United States Patent Application Publication US 2013/0129668 A1 - sequence listing, part 28

SEQ ID NO: 466311 - DNA, 122 bp, Homo sapiens
ccctgcagccccaagcccagcgagtcgccgtaaactgtcacccggtacatccgcggtccccggcacccaccactcccagcacaccctggtgagtggcccgcccgggcttggttctgagccct

SEQ ID NO: 466312 - DNA, 122 bp, Homo sapiens
atgtttgggatcaggtgagcttggactgcctgtgtttgtgtgcgtgtttgtgggtgtgcacgtgtgccacatgccgctgagtgagacccagggcctagcctggaacctggggtacagaggcg

SEQ ID NO: 466313 - DNA, 122 bp, Homo sapiens
cgagcataacagaaaaaaattctgaaaagccaagtttgcgtacctattgcggttccttcacgaaatttcattctgcttgcttttctgttggtctgttgccacgcacaacttaaaatatcaga

SEQ ID NO: 466314 - DNA, 122 bp, Homo sapiens
ccctgcgaccgaggcatctgcgggaaggagtctctgaggtcactcctgcccacaggtgcacgtctgtgcacccgcccactcctgcatacacacgaacacacctgtgcatgtatacaccgcac

SEQ ID NO: 466315 - DNA, 122 bp, Homo sapiens
cctgggggcggtgcctgtgaacagggacggctgagagggtccggggatgctggtggtccccgcgagcctccgcctgccctctctcgccccagcgctgcccgaggtcaggggggacagtcccg

SEQ ID NO: 466316 - DNA, 122 bp, Homo sapiens
gatgctggggctggggctttgcttcctgtctccaacactgcggtgattctcagctggggtcgagaacccctgccttcaccggagcgctggggccaggcgagcccagacaggaaggggattgg

SEQ ID NO: 466317 - DNA, 122 bp, Homo sapiens
gtcagtcccgggcagcttcagcaaatcccgcatttaggaataaatttcttaactaccgaacggccagtcaaattggccagaccagacttctgcctccaggggtcttcagcgcccaccgcccg

SEQ ID NO: 466318 - DNA, 122 bp, Homo sapiens
tctgtccatttctctctccttaagaacggtctctacaccatctccaactttttggggacccgcccagtggttgtccggctaaaacgccctttccaggagcgcccactcccatcccatctgtt

SEQ ID NO: 466319 - DNA, 122 bp, Homo sapiens
ccttgcctgggactacaactcccaggatgccgcaggcggagaagctggccaatcagggggcgcggcttcgccttcaccgtcggctccctgctcctgtcagaacctcggtgacggttggccag

SEQ ID NO: 466320 - DNA, 122 bp, Homo sapiens
acctcaggtgatccgcccaactcagcctcccgaagtgctgggattacaggtgtgagccaccgcaccccgccatgggttgaagtttttaaatgcatgttttccggtagttaatacattgcttg

SEQ ID NO: 466321 - DNA, 122 bp, Homo sapiens
aaagacagagggacggtccagagggatggtaactgggaacagaggaaaatgccacagggtcggggaagccttaaatactagacagaacagtttaggtttaatgaccaggaggcaatgggcaa

SEQ ID NO: 466322 - DNA, 122 bp, Homo sapiens
acttgggcggagaaacagatgtacctcgggaagaggagaggagacacaaggggcttatgtcgggacacaagcacaacatcacaggaacatggaaagagagtcagcaaagagacaagacatcc

SEQ ID NO: 466323 - DNA, 122 bp, Homo sapiens
gggatagatacttgtctatttaacttgcaatgaagaaagaaacacttctttcaagaaagacgcttccatttaagaggaaggtattgaaaatgcttccgaggccaggtgtgattgctcatgcc

SEQ ID NO: 466324 - DNA, 122 bp, Homo sapiens
agagagagaaaaaaagaaagaaagaaagaaaaagaaagtgaaagaaaggaagagaaagagcgagtgagcacaacagctttcacttagggctcctgggcccagagtcatcaggtaaaaagtct

SEQ ID NO: 466325 - DNA, 122 bp, Homo sapiens
cgcgcggccccggagaggttgggtgaccccagagactgtggggcctgcgggttgcaaaggcgctggcattgaggtttcttcaccccaagtttgaaaggggtacgcgggtgagagcgagtggt

SEQ ID NO: 466326 - DNA, 122 bp, Homo sapiens
ctcttaggtccggcagttcctgcctccttctgatccagaagtttctctggcctctggagccggggcacacctcatgcaaggacagggtccaaattcctttgtccttggatcccacttggctg

SEQ ID NO: 466327 - DNA, 122 bp, Homo sapiens
atctggcaaagatctcaggcactgaaggaaccagctgttccgtagcaatgtgattttgcacgcttcttggggcctggcattcttaaacttccaccagcgttaattcttactggtgagttttc

SEQ ID NO: 466328 - DNA, 122 bp, Homo sapiens
gcaaaaggaagccgagtcagggacgcgcttccttccccagggctcgtccccagcgccacccgcccttctctagagccccatccccagcgcgaacctccaggaggaagcagcagtcaccacgc

SEQ ID NO: 466329 - DNA, 122 bp, Homo sapiens
gctctgcagtgggagggggcagagcctgtctttgcggatagagaggcctgggtctgcagtcggggaatgctcacctccggggccacgaaattggccgtgtagcagggtgtcatgagcagccc

SEQ ID NO: 466330 - DNA, 122 bp, Homo sapiens
ttaactggctgaaagtttgagtcttaggcttatttgtgccgctccaggcaggctgattggcgctggtttccatctgtcagattggacagcagtaccactggctgttgggggctcacgaccag

SEQ ID NO: 466331 - DNA, 122 bp, Homo sapiens
agcaagctgcgagcggccgcggggaggccagacgacttccgaaccgccgtcaccgcctcacgtaaaagggtacaacgcagtttctcttccggggttcaggacccaaaaagaacgcacggacg

SEQ ID NO: 466332 - DNA, 122 bp, Homo sapiens
ggggcggacgcggaacttgaaccgtgtccctcctaaacctgccccttgtccgccgcaacgcgccctcgacgcgcacaaaaccctcactttgctactgaggaaagttattcaatggccagaga

SEQ ID NO: 466333 - DNA, 122 bp, Homo sapiens
ggatgaaatgtgttcgatgaggacaactcactcgtgtcgcggcgtttggatgggctgcggcgtggccgcttctgccgtagagacggagccttcctgtggttcgcgcacttccttcctgaagc

SEQ ID NO: 466334 - DNA, 122 bp, Homo sapiens
aactcggcaggcggcgctgcgccgggccccgaggaaacctggaggtccccgccctccccgcgcccgaaacaccgcgcgtcctgataggcccgcgcccagcagccccctccccgcgcccgccg

SEQ ID NO: 466335 - DNA, 122 bp, Homo sapiens
ctccttctacctgcaatgttactgatccctattaggcaagttgtactccctctctgcctccgctcccatgccagaccctctgtctggacagaagccaaatccttcctatctgtatagtgaat

SEQ ID NO: 466336 - DNA, 122 bp, Homo sapiens
ggtgggcaaagaattggttctcttgtagttaacacgggtgattggaatgtttaatgacatcggtgtgtctgcttccgtgataaggatgtgtctccctgagaaaaatggctgtttacatcatc

SEQ ID NO: 466337 - DNA, 122 bp, Homo sapiens
gagctgtcatgtgaggggcctggggcgtggcctgctgcgagtgttttctgtggcctcgcacgtgaacgcagcaggagcgcagcctgcgcaatcggacagacgccgcacagcgcttgtctgtg

SEQ ID NO: 466338 - DNA, 122 bp, Homo sapiens
cccacaggctgctgcaatgcgtgtggtggtgattggagcaggagtcatcgggctgtccaccgccctctgcatccatgagcgctaccactcagtcctgcagccactggacataaaggtctacg

SEQ ID NO: 466339 - DNA, 122 bp, Homo sapiens
actgtgaaaaccggagtcacggcctgagccccaccactgagcctctgcgtccatgaacgacgaggctcgaatgtcaggccaggggcaaccaaggtagttatcaggggacaagaaaatgagta

SEQ ID NO: 466340 - DNA, 122 bp, Homo sapiens
ttgcaaaggtatcaacacagaccaacaagtattgaaatccccttgacttaggcatatgggcgaagtctaactgccagtcttctcctagatagtgccctattctttgttcccccagaggggcc

SEQ ID NO: 466341 - DNA, 122 bp, Homo sapiens
gactaaatttacaggttttaaaaatttctcacctggcgccgtggctcacgcctgtaatcccgcactttgggaggctgaggctggtggatcacctgaggtcaggaattttgagaccagcctgg

SEQ ID NO: 466342 - DNA, 122 bp, Homo sapiens
cctgggggaggaaggctcgccaaggccccggctcatctgtcctttccctcttagccaccacgggcagtgaccccagtttgtctccggattcccaagacccgtcgcaggacgacgccaaggac

SEQ ID NO: 466343 - DNA, 122 bp, Homo sapiens
ttcatctttctggtcccaagaggacgctggaatggagagtcgtgcgtgagtgtgtgcgcgcgcgtgagggtgtgtaagtaaaatgccaaaaattaaaccacccttcatggtgcccctgaaac

SEQ ID NO: 466344 - DNA, 122 bp, Homo sapiens
tttgttctgacatgtctgcgccgtctggcaagggcagggcctctgcgtccaggagctcttcgagcctgcgctccctccgcggattcctggagaggaagtgcgcgttgctgcgcgcggcgcct

SEQ ID NO: 466345 - DNA, 122 bp, Homo sapiens
tctccgtgggtgagggaaaaggcacagggaggtgcagaagcgttcctggcgccacggagccggtcagtgacagagccgggtctcaacccaggccactgccctcggcagccaagccccttctt

SEQ ID NO: 466346 - DNA, 122 bp, Homo sapiens
atctttaaaatttgaagatcttgccagcaggtatctggaggcgtgggctcctttcatggccggcgcacctgcccgtgcgcctgtgtggggctctgggcggctccggcgtgctcacttgccag

SEQ ID NO: 466347 - DNA, 122 bp, Homo sapiens
cagctttgctcaatgccttgctcagccatttcgccaagtgaggttttatgcaatgttactcgtcactactctgaatcccagtttcagattgcaggacaaacagacgcctttttaatcattga

SEQ ID NO: 466348 - DNA, 122 bp, Homo sapiens
aaaaccacacattgcatgctttcaattcttttatatttgttaaggtttgttttatggctccgaatatagtttatctgaatgaacatttcatgtgcacttgaaaagaatgtgtattctgttat

SEQ ID NO: 466349 - DNA, 122 bp, Homo sapiens
cagatattacagtagctgtcagccaccagcctcttcctgtccccaccagctgccggggcccgctccatttgcatgctaatctggtgcagggagagagactggggactgagggaggaaccatc

SEQ ID NO: 466350 - DNA, 122 bp, Homo sapiens
ctcctctagccacatgatggcggcatgagcattgccgtacttctgcgctctcaagtctagcgctttaaatccccagttttaaagccaggggcgccggggtgtgtttgtgtttgtgcctgcaa

SEQ ID NO: 466351 - DNA, 122 bp, Homo sapiens
tgaaacctcacaacccccgttgcgtagcttgttcatggacacgtacttcgtgtttagcagcggagtggagacgccccacaaaccagactcagctgcgtgtatttcacttcttgagatgcaca

SEQ ID NO: 466352 - DNA, 122 bp, Homo sapiens
cagggcctggatggggctcatgctgctgcctctctgacctctgccctggcctaggctctacggtttcaagatccatccgatggcctaccagctgcagctccaagccgccagcaacttcaaga

SEQ ID NO: 466353 - DNA, 122 bp, Homo sapiens
ttttaagccatcaattcctaattctatccactgtagaatatataaggacaaacatgtttgcgttatgtttattttaattagacagtaatatgagatggtaatagctatgtttccaggtacct

SEQ ID NO: 466354 - DNA, 122 bp, Homo sapiens
ggcccaggacccaggaagttaagcagctcctccacttcacccagataacattgaaaactccgggtgctgaccagttttcctgccccactcctttcccagctgtcaccttcctgagagtagag

SEQ ID NO: 466355 - DNA, 122 bp, Homo sapiens
tccgcatccggcgggcgacagagcagccccggaacaggagcttcccggcaccggccgtggcgtggcgccctccgctgggccgttctcccccgcagccgctaagtcagcatcgcctactttcc

SEQ ID NO: 466356 - DNA, 122 bp, Homo sapiens
ccgcaaaacaatgtgtgttgtgagccaggacgcaacttgccggaggcggcgggggcgcgccgagcccgcctgagaccgcgctgaccttctccccccgccgtccgttgggcccgagcgcccag

SEQ ID NO: 466357 - DNA, 122 bp, Homo sapiens
gcagccgcctgcttctgccggctggagttgcttaagttgccacgacaaccaagggcccaacgatgtcctcacaagcagcactaaatggaagctctaaattaattcacccgcctgtgtttttg

SEQ ID NO: 466358 - DNA, 122 bp, Homo sapiens
ggccggaaatgctttctgcatccccaaataacctctggcagcctcagaaggtcatcaagccggtgctggagctggagcagctgctggggagaggctgctttgggtcttggcatggtctggtc

SEQ ID NO: 466359 - DNA, 122 bp, Homo sapiens
agggggtgttatccacggggctggagcagagtgtagcaaggctggtcaaccccatggccccgggcctcccacgtctctaacggttcacacctgacccgtcccatcctgcccactcccgccgt

SEQ ID NO: 466360 - DNA, 122 bp, Homo sapiens
ccctttctctgcagctatctttaacaactttttctttaacattgaccttggaaaatctgacgactatgtgtgttgggaatggttgtcttatatagtatctctcggaatttcttgaatttgca

SEQ ID NO: 466361 - DNA, 122 bp, Homo sapiens
actggggtcaccagggaaaggtgctggcaaaccccaggccttgtttccctgcctccttcacgctgtcttccctccttccctctctcccctctccttgcatgtctatactcaattctccctct

SEQ ID NO: 466362 - DNA, 122 bp, Homo sapiens
cctgcaactctgccttcttgagtccaaatgtcttcgaaaggggcaaatgctcgtaagtgccgacagggtgtgtttcagtgaatgtttgcagtgtgcaccggtctggctgaaggcctcttccc

SEQ ID NO: 466363 - DNA, 122 bp, Homo sapiens
attatcacctaactggagtttcctcctcacaggccccacccttcaatgttcagagaggggcgattgccccagattttatttaattgtcagagtttaggagggagcaattcactcttccctac

SEQ ID NO: 466364 - DNA, 122 bp, Homo sapiens
ctcggagggtccggagcgggtgcgggggtgctgggcacgaggttcccaagaaaaccacggcgaggacgcgggttcaccacaacagcgctgtgttctcggcctcagctccgcgcaggtttcca

SEQ ID NO: 466365 - DNA, 122 bp, Homo sapiens
tccccgccccgcgcacgcccgggctgaatggtagacgttctggcgccgggcagcggccaccggctggttcccacttccgcgcgcaccccttaaactgtgttctagaggccccagcctcgcct

SEQ ID NO: 466366 - DNA, 122 bp, Homo sapiens
aaaaaaaaaaaaaagaactctaatataaactgtgggctttgggtgctaatattgcgtcaacgtgagctcatcaaatgcaatgaatgtaccactgtggtggggctgttgataatgggggtggc

SEQ ID NO: 466367 - DNA, 122 bp, Homo sapiens
cgaagaatccagtactttcccgccacttgactccaaatatcacttgccctcttcgaaacacggtcatctttgaagtgaaacgtgacagcagtcactgccttcccgcctagcagagatgacgg

SEQ ID NO: 466368 - DNA, 122 bp, Homo sapiens
gcgagcggcgcgcgggctgttgcagagtcttgagcgggtggcacaccgcgatgtagcggtcggctgtcatgactaccagcatgtaggccgacgcaaacatgccgaacacctgcaggtgcttc

SEQ ID NO: 466369 - DNA, 122 bp, Homo sapiens
actttgcaggagagagcagtagcagacctgggctattaacacaccacagttaattctctgcgggaacttttactaggtgggacttgtggaaggagaaaacgtctgtaaacagtgcatgctcc

SEQ ID NO: 466370 - DNA, 122 bp, Homo sapiens
tgccaaaagctagcgaacgtcatcctccaccccatccttaaaaagtttggaacctgtagacgaaactaggtagagatacatgtatttttcactacccaaacagaattgccgtcttttaaaga

SEQ ID NO: 466371 - DNA, 122 bp, Homo sapiens
gcggctcaccacatcctcctcttcctccccactctgcacatgcggctgggtggcagccagcggcctcagacagacccactggcgtctctctgctgagtgaccgtaagctcggcgtctggccc

SEQ ID NO: 466372 - DNA, 122 bp, Homo sapiens
cccagtgcaggggcgtggctttcagccaaggggcgtggccattgcgattgggcgggactccgaaacgagggccgcaatcagagaacaccgccaggacttccaggacttggtctccaggactg

SEQ ID NO: 466373 - DNA, 122 bp, Homo sapiens
cttttttttgagatggagttctgctcttgttgcccaacctggagtgcaatggcacgatctcggcttactacaccctccggctcctaggttcaagcgattctcctgcctcagcctcccgagta

SEQ ID NO: 466374 - DNA, 122 bp, Homo sapiens
gaaaaacaacagaaggatcctggtccctgtacgacctcattgaagaaacaccataagtggcgtggactatctacctccagactgttttacaagagagaaattagcatattccatctaataca

SEQ ID NO: 466375 - DNA, 122 bp, Homo sapiens
ccgcctccctggcccggctggagtccctgggagcccgtggaggcggctgacctgcaggctcggagtccgtggctgctgctgcttgttccagtggctgtcgtttgtttccacggggattcatg

SEQ ID NO: 466376 - DNA, 122 bp, Homo sapiens
gaaaatacacatatattttaatgtcaggtgcgtgcgtgtgtgtgcctgcatgtgtgtgcgcgcgtgtgtgtgtgatggcaatatgatccagaaagataacttacaaggagatggttgtttat

SEQ ID NO: 466377 - DNA, 122 bp, Homo sapiens
agcggctgctgtccctgcagagcctggacggagctgggagaagcgcgcggcggcagcagccgacaggctcccaacccaatgccgcaggtttccgaggaaaacgctccgccagagtccctaaa

SEQ ID NO: 466378 - DNA, 122 bp, Homo sapiens
ctcaaagaaagagctgacccttgtgcagaggcaaaatctaggtgaggctggtcacctaagcgagtacagctgggtcaggccaggctgcctcagccccgggcgttaggaaaccaccggccccg

SEQ ID NO: 466379 - DNA, 122 bp, Homo sapiens
gtctagggtttagatgtcctccatccctggtgaggggttttacccacgctaactcgtaagcgtggctctttgacagatgtggagagcgaggccctagaggctgggctcgtgtgctccagcca

SEQ ID NO: 466380 - DNA, 122 bp, Homo sapiens
gctggaccagcccgactgacctcgcgcgtaggggtcgcgtgagccacaccggtgcagacgcgcctagattatttttaaatgttagaaggtaaaatatttgcctccaattaatctgaaaactc

SEQ ID NO: 466381 - DNA, 122 bp, Homo sapiens
ccaggtggcagaagtctctggagtggcacagcatgaaaacaagcctgacgcttaggccagcgatattatcgagccaaatttgctggtttacctaggaaacagatgaaagataagaactgatt

SEQ ID NO: 466382 - DNA, 122 bp, Homo sapiens
gaaagggaccagagctatggagaccacccagactttttgtctgcagagagctctgacatccgcctggcctccccagcaaagcccttgcctggggctgtccagctggggcgggggagcggggg

SEQ ID NO: 466383 - DNA, 122 bp, Homo sapiens
ggaccccgagacccccaggcgctctcccaaggcctgacaggggaccccgagacccccaggcgctctcccaaggcctgacagaggaccccgagacccccaggcgctctcccagcacagccgtc

SEQ ID NO: 466384 - DNA, 122 bp, Homo sapiens
ccatggtggagatgggcctgagcacgtgcacccctgccccggacccccactcaaggcattcggggtctgcacgaggagcacacctacctgagcgtgtgcacccctgccccggacccccactc

SEQ ID NO: 466385 - DNA, 122 bp, Homo sapiens
gtctctcccgccgccctagcctccttcaccaatccattgggcagcactttataaaagcctcggctttctcatttctgtttgggagttgtacattagatgttagtggttcttttgtactaatt

SEQ ID NO: 466386 - DNA, 122 bp, Homo sapiens
cggccctgaaccactgacactggactcgtaccaggccccgggccccggggatggaggcaccgccagccttgtgggcagcaacatgttccccaatcattaccgcgaggcggcctttgggggcg

SEQ ID NO: 466387 - DNA, 122 bp, Homo sapiens
caatcagattagagtcctgccttgggcagctgaaaagaggacaggagaaggtcagagagacgaaaggctgttttttgaggcctgaggcaccccaacatgacaacgtaagactgtaaccatgg

SEQ ID NO: 466388 - DNA, 122 bp, Homo sapiens
tctatatgcaatatccgctacagccaaatccatagggaccaaaagcggattagtggctgccggggccagagttactgttaatgagtaccgaggtggcgtttgggatgatgaaaaagttctga

SEQ ID NO: 466389 - DNA, 122 bp, Homo sapiens
gcgcccagctggctcggggacagccgctgggtgtcggagaccggagctagcggattgcagcggaaaagcaaaggtgaggggtgtgtgtgtgtgtgtgtgtgtgtgtgtgtgtgtgtgtgtga

SEQ ID NO: 466390 - DNA, 122 bp, Homo sapiens
ggatgaggaaagactaaagtgttaggagacctttaccgcacccccaccccacacacacttcgggctgaaactcagatctttttgaagaggatgcagctgtcacagaaacatgcagctgctgc

SEQ ID NO: 466391 - DNA, 122 bp, Homo sapiens
gacctccgccctgcttctgaagccgcaggcgctggcctcaataatcccccagccgcgggccgatttggcatcctccgacccctgcggccactgccaggtaagtgctcctgccaatgcatcag

SEQ ID NO: 466392 - DNA, 122 bp, Homo sapiens
acttgaactaaaaatatactaaagtgggaagtctaagccactagtcagctgctcgggtgtcgattattataaatactgtaatgtgattcccaaatgatgtagctgaattcacagtatgggca

SEQ ID NO: 466393 - DNA, 122 bp, Homo sapiens
ggccgcagcccctggacacctgagcctctgagagtgtcgagtcggttgtgctgacaagtgcgcagccctctcaacgcggttgcgggctcctggtgaggggcgtggccatggggacgtgtcct

SEQ ID NO: 466394 - DNA, 122 bp, Homo sapiens
aggacgtttcagttccactagaatcttgtgggaccatcatacgtgcggctcattgttgaccgaaatgttacgccgcgcgtgactgtacgtacctaagaagcagaagctgtgtcatcaggttg

SEQ ID NO: 466395 - DNA, 122 bp, Homo sapiens
tacacaccgcgtaggaggtgccgtctttcagccggcccgaccccgtgtcacgggcagggccgcggcacctcaccacctgcctctgcaacgaccctggtgtggtgcccgctgatggcacgcag

SEQ ID NO: 466396 - DNA, 122 bp, Homo sapiens
gctccaggcggtgcttgttcctcagcctcttctccttcctgatcgtggcaggcgccaccacgctcttctgcctgctgcactttggagtgatcggcccccagagggaagaggtgagtgcctgg

SEQ ID NO: 466397 - DNA, 122 bp, Homo sapiens
cggagaaagacacagccaccacggcgagggaggatggccaggacagctcgctgagcggggcgccgtctgcgggagagcagtgtggtgagagtggccatggctgagggccggccaggcccctg

SEQ ID NO: 466398 - DNA, 122 bp, Homo sapiens
cccgtgctggtattgagaaagcgctgtagccaagactcaggttcgcgacgtttacgcccacgaagactcgggttcgccatgtttaccctcacgcatctacaacagtcctggatttttatgga

SEQ ID NO: 466399 - DNA, 122 bp, Homo sapiens
aaagcacggcatgggcagggccactccctcgaggcgctggcgggatccttcctgcctctccggcacagcggccccaggtgctcctgggcctgcatcactccagcctctgcacgtggcctcct

SEQ ID NO: 466400 - DNA, 122 bp, Homo sapiens
atcagacctgcctctggccccaggggctgaatttattttggcttaaatgacagggtggtccgaaatagtaaaaatactcccttcatgaagccactgggtgaatctagtaaggttgtgaaggg

SEQ ID NO: 466401 - DNA, 122 bp, Homo sapiens
ttcactcaggaaagaatttgaaagccagctggtggtggaaggcaggtttacttaagcggccgtgtacagagagttgctgctccttgcagagcagggctaacccacagggagtgcgccagggt

SEQ ID NO: 466402 - DNA, 122 bp, Homo sapiens
tggaaagttcttcctgctgggaagatggggttctccctgtacctagccttcttggttatccgtctcatctgggtccatcccaccgggttgtgaaggtgcctgcttggcaggaggcatgcatc

SEQ ID NO: 466403 - DNA, 122 bp, Homo sapiens
tcctaatctttcattattggtgagaggttgctgtttaaaccttcaagtccaagttctcttcgtgggctaggcccattaagccgccacctcctccaggctgccagttacctggagagagccac

SEQ ID NO: 466404 - DNA, 122 bp, Homo sapiens
gtgggtgccagcttccctgagacattccgtgcctgtgacattgctgtgtgcagagatgaacgagacgggaaaagccactgcaccctgaagaactacaatatggtgggggtggcagatgccaa

SEQ ID NO: 466405 - DNA, 122 bp, Homo sapiens
cagctgagggtgaaaggggaccccgaggatgccgctcccaaggacagcagcactttgaggcgagccagcagtgcccgggcccccaagaagcgcccagagtctgcggagggtcccagtgccaa

SEQ ID NO: 466406 - DNA, 122 bp, Homo sapiens
atcattgtttaaataagactgtgctcagactcaactttcagctttttctgtaaagggagtcgagatgaggctgtgggcaccgaatgtcatgaatcaggagacggtcggtgacctcgggccgg

SEQ ID NO: 466407 - DNA, 122 bp, Homo sapiens
cccaggtggcctgttccctcaatggagccactccagctctggcaagggcaggtgtggtggcgctgctggtgcctgctgtgggagtacagtgggcctttgtgccaggcgggcaccaccccctg

SEQ ID NO: 466408 - DNA, 122 bp, Homo sapiens
cactgcggattttgcaggcgtaaacattaagccggcatgccagcgggcaggggccgccttcgattttctgggctgggggccaccatctgcgtaagaaacctgggtttccacaactgcgaacc

SEQ ID NO: 466409 - DNA, 122 bp, Homo sapiens
ggggctgcggcagggagggagaggcggtgctgcgggctccgggccgcgggagaccagaggcgccgccgccaccgcagacagctccgcgatggacataaggttttcagtgagaagagttttta

SEQ ID NO: 466410 - DNA, 122 bp, Homo sapiens
atagtcaacgaagatcacgtaaaagactgagagctagtgaccacacaacagctcaaaaggcgactgcaggaccaaaaagaaggaaggcatatgaagagcagacctgggcaatatcagacctt

SEQ ID NO: 466411 - DNA, 122 bp, Homo sapiens
taccctacctcccaagctgaggcttttttcttcctctcctgtcaggcggcgcctcacagtcgatgactttgaaatcgggcgtcccctgggcaaggggaaatttgggaatgtgtacctggctc

SEQ ID NO: 466412 - DNA, 122 bp, Homo sapiens
atctaatgatgacttcctgattacttatctgcttgcccctgagcaaattacctaacctctcggagctcaagtttcttcacttgcaaaatgaactttcaacagtactccccctcaccaagtag

SEQ ID NO: 466413 - DNA, 122 bp, Homo sapiens
tgctggcagctctggaatccagccgtgtactcttgctccccacagggcaggactgagccccgtaatccttgcctgggctcctgcaccagccctctgcaactggccccctggaaccatgcttg

SEQ ID NO: 466414 - DNA, 122 bp, Homo sapiens
ggcggatctggggtgtcctcccctctctggctattaaactgtttctgctgcagccctcagcgtctcggtgcagtgagtcgggccgcgaacctgtgttgcttacagccgcacaatctcgggag

SEQ ID NO: 466415 - DNA, 122 bp, Homo sapiens
accgtaggctgaagactccgtagggagactgcattaatgagcctctgccttgtgctcatgcggaggatgggctggattgatctcctcttgcctgagttgggagctctcagagtgttccttca

SEQ ID NO: 466416 - DNA, 122 bp, Homo sapiens
gcgctccgtgcactccctcttcgcgctcagccgcccgcgccgcgctctcctccctggacccggatcctccgcagcccctttgctggcttctctgtgtcccggcgggttctcggctcaccgtc

SEQ ID NO: 466417 - DNA, 122 bp, Homo sapiens
agcagggctgccctgcacctcctcaacatgctgagaagtggccggggctgggatgcgggccgcggcttcaccgtgcaactgcggcccattgctacgtgcctcgtgtgctctgccatggagcc

SEQ ID NO: 466418 - DNA, 122 bp, Homo sapiens
ctccccggcttccttccggccctttgtgttttcttctcttgctccgccccctcgcctgcccgctaagcacttaagctggtgaagtcaccctactgccacctggcagtcactttcgctgttgg

SEQ ID NO: 466419 - DNA, 122 bp, Homo sapiens
tcgggatattgttgagaaggaaataacgaataaccctgccgccagccctcataccccccacgtggggagatctggatgataggtgtgttttctcctgaaatggaatcctactaattgccttt

SEQ ID NO: 466420 - DNA, 122 bp, Homo sapiens
aaaagaagaagagtgtaccttatcttctaagtatgaaagtctaattctgtaggcctatgtcgcaaatagtgccccacgaggaaatgcagggaggaggcaagtagcatattcctatatacatt

SEQ ID NO: 466421 - DNA, 122 bp, Homo sapiens
cgtcagctccagccggcgccctgggccgcggggccggagagctccggagcggaccctcgccgcgctccgaacccgccccgcgcccccaggccacacccggctcgcaccctccccgctccacg

SEQ ID NO: 466422 - DNA, 122 bp, Homo sapiens
ccctcccagtctcccggccgccaccgccgccgctggcggcttgatgttgtcatcactgcgcgcccgtttctgtcataagctgtgggatccaaccagagggaagagatcatggccgatcgact

SEQ ID NO: 466423 - DNA, 122 bp, Homo sapiens
ccagctggtgagcccatttggcgggggtttgtttcggtttgagtctaagtgtctacaacacgagacactgcatgcacgcgcacacacatgtgagcacacacatgcacacacactatgcccaa

SEQ ID NO: 466424 - DNA, 122 bp, Homo sapiens
cacctcccccagcctgaaatcatccaagtaaaagatactcataaaaaggtagacacataccgcttccccttctgtcttgattatcatctaggaaccattaccggtgtcatccaggctatcca

SEQ ID NO: 466425 - DNA, 122 bp, Homo sapiens
gagagagaaaattggaacaaaagcaggtgctcgcgggtacctgggcctagcctcttagtgcggccagccaggccaatcacggcccccggctgaaccacgtggggccccgcggagcctatggt

SEQ ID NO: 466426 - DNA, 122 bp, Homo sapiens
ctgagcaagagtgaggccctctcaaaaaaacaaaaattactggccgggcggagtggctcacgcctattaccccagcactttggatggccaaggcgggcagatcacgaggtcaggagatcaag

SEQ ID NO: 466427 - DNA, 122 bp, Homo sapiens
aacaagcctctctcccttgagcctgtcaacactgggctgttagtcttctgagcgggagcccggcccagagctgagttgttcatccgtccccagccagggttgatctgaagggggataagtct

SEQ ID NO: 466428 - DNA, 122 bp, Homo sapiens
gaagtggcttcgctagggagcctcccggcgtggagatggcgggagctggtcgcggagcagcggtgtccagggtgcaggcgggtcctgggagtccccggcgagcgcgggggcggcagcaagtg

SEQ ID NO: 466429 - DNA, 122 bp, Homo sapiens
catagatgttacttggaaataatcactgaagatggcagctatgcgtttaacaaatggccgcggtggaaattgctgagcagagagaggatatttagtccagcaggcttgttccctttaggttt

SEQ ID NO: 466430 - DNA, 122 bp, Homo sapiens
tagaggggcaggatgtggctgtgtagagccccagctctaggccaattcagaggatggaggcgctgggtctaaaggcaggcacttgccccctgtgaaacatggaggcagcgcccctgaaggaa

SEQ ID NO: 466431 - DNA, 122 bp, Homo sapiens
cggggcgcgctccccaaaagctcccaactagctccaagagccccgaagtctaacttcgagcgtcagggggacctaaagattgtaattcatctggataatactgcataatattagacgctgaa

SEQ ID NO: 466432 - DNA, 122 bp, Homo sapiens
ccgcccacccgtccctgcccggatgcctgcgcggcggcggcgtccttccctcctcggctgcgcttttactcttggtcagggcccgcttgagagagggggattttagagagagggtgtgaagg

SEQ ID NO: 466433 - DNA, 122 bp, Homo sapiens
ccattaccccttggagaactgggtgccaggccgagacctggtgtctcatttatgacaaaccgctgcagtgcgtttgggagtctcctcctccatgacgtgcttgtctggattggttttatttt

SEQ ID NO: 466434 - DNA, 122 bp, Homo sapiens
agcctgcctttccctggtgccagctgcaacaagtattatgttacacaggcagttaacaaccgcctgaccatcgcccgaaggacgactgatgctcccggtgtgtgggaggggagccctctcct

SEQ ID NO: 466435 - DNA, 122 bp, Homo sapiens
gtctttgccacactctcatacaatctattctccatagtcatcagagtttctttaaaggcacggttcagacaatggcaccctctgttccaaaccctccagggcttcctatttcacttagcata

SEQ ID NO: 466436 - DNA, 122 bp, Homo sapiens
gcaagttcgctctgcgcctgccgggatacacgggcaccgactgcgtcgcggcactgtgaccgccacccgcggccacaccgcagggaccctcgccaataaacagccctcccaccaccgccgcc

SEQ ID NO: 466437 - DNA, 122 bp, Homo sapiens
agcccaggctcccattggacacgcagtcccgcagctccagcagaagctcccgcgtgtaatcggggacaaagaccctgcagcgaggggacacagctggctcaggctctgccattcctcagccc

SEQ ID NO: 466438 - DNA, 122 bp, Homo sapiens
ggagtcctgggctgtggggtcgggcttttagcttttctgccaggaaggggcacccaacgccgggctccactagggagctgtgaccttgctggagggagggcaggacgcagactggcccgcta

SEQ ID NO: 466439 - DNA, 122 bp, Homo sapiens
ctcagaaaggggaagtacttggctaaggccacagaaaagtgagttccttctttcacacttcgggcactacctctctaatccaattggttattttctagaagaggaaagtcagatctaaggca

SEQ ID NO: 466440 - DNA, 122 bp, Homo sapiens
tgtgtgcatgtgtgtacgtatatgtgtatgagtgtgtgtgtgcacgtgtgtgtgcatgtgcgtgtgtgcgcatgcatgtgagtttaggagtgcatgtgtgcatgtatgtgtataagtgggca

SEQ ID NO: 466441 - DNA, 122 bp, Homo sapiens
agcaagcgcgtcccgggggcggggagcttggccggcggggcgggccggggtgggggcgggcggctgctcttggggccccgcgccattggccgcagggcccggcggcaggaaggggccagcga

SEQ ID NO: 466442 - DNA, 122 bp, Homo sapiens
ttgccccatacaaagtggacattgtggatcacagagaaggtaaatgagtaacagagctcccgtatgcttcatggggtcagtgataaccaagttcattaacgagtgacagtcttaatgactaa

SEQ ID NO: 466443 - DNA, 122 bp, Homo sapiens
cgctacccgacttccattttctctcgctttaaaggaaaaccagatcagctgttttgctcccgctcgggctccgcggccccctccccagctgccgctcgcggtcccggtggcctctcctcccc

SEQ ID NO: 466444 - DNA, 122 bp, Homo sapiens
cctcagaggcttcgttcctgggggctgcattcctggagggctgtgcacaggcacccagagcggcttctctgcccggcccatcctgggcgtttccacttctccctgaaatgtgtccatgcgag

SEQ ID NO: 466445 - DNA, 122 bp, Homo sapiens
ggtgcgccccgcagggtggtccgggaggcagggccgacgtgccgacggaccgggcggaagcgtcggggcggcggggacaaacctccaggatcctcgaccgcggcggacccgccaatgaaaag

SEQ ID NO: 466446 - DNA, 122 bp, Homo sapiens
atttttcctacgtaagaacaaactaaataaacgcttgcctttctctgcatcttccacctgcggacactttctgtctcttctcctttccccacccacagccaaacttcttgtctggtttcagc

SEQ ID NO: 466447 - DNA, 122 bp, Homo sapiens
cactgtggaccgggaatgtcaggggaacgcgggcacggctgaccgggaatgccaggggaacgcgggcactgcggaccgggaatgccaggggaacacgggcactgccgaccgggaatgtcagg

SEQ ID NO: 466448 - DNA, 122 bp, Homo sapiens
agagtggtgggaggaagctgttcaagctgcccaaagctttccggttcttggcacaccccccgtcccccgcgcccccagcaggatggaggattcccagcctggggtcctagtcaggcctcagg

SEQ ID NO: 466449 - DNA, 122 bp, Homo sapiens
cgtgaacgaagccagacaccgaggaccacgtagcgtgagactctcagtctatgaaatgtgcggagtcgataaattcacagagacagaaaggagattcacggttgccaggggctggggagtga

SEQ ID NO: 466450 - DNA, 122 bp, Homo sapiens
gaggctgcgctgagcatcctgggaatcgtagtgctcgctacacggtgccctctgcgcaggcgcacaccgagagccacttccggaacaagcgtcgcgtttctgaggagaaactcttggtgaga

SEQ ID NO: 466451 - DNA, 122 bp, Homo sapiens
gaggccctggaagcatgcctctttcagggaggcctccatcatcagagcttccgtctgcaacgtccctgccctgtgctggccagggaactccgcggcgggctcccccactgtgcccgggattc

SEQ ID NO: 466452 - DNA, 122 bp, Homo sapiens
acctcctgaacccgcacgtcatctgttatgctccccacaatcacggccgttttgttttcccggacaggaagcttcactcttctggatcatctgggaaagggacagaggtggccggttggtac

SEQ ID NO: 466453 - DNA, 122 bp, Homo sapiens
atccgtctgggcagcggctcttcgggggccacgccctccgggccctgggggcctagcgcgcgacggtggggtggagctagcctcgtgaccttttaccccaacatggctgcgcccgtgggacc

SEQ ID NO: 466454 - DNA, 122 bp, Homo sapiens
tgctcaggacctcctcgctgccgggaaaactcctcgtgccgcacctacgcaacctggcgccgtcagatactctgctgcgctgcagctccctcagccagggctgttcccgtttagacggctgg

SEQ ID NO: 466455 - DNA, 122 bp, Homo sapiens
acctttgtctcctactgtatatttttacttccaacaatacttaaaaaaaaaattctaccgcgacactttacaaagaagctctggcattgtgtagtcaaatggagtgaatgagtgcattctcc

SEQ ID NO: 466456 - DNA, 122 bp, Homo sapiens
acctgcaggctcacggagccacagactgccaggccctccctgagcctctgcttctgtggccgtgggtggggcctgacgatttggctttcttgggtgtcccacaaaattgctgctgcggccgc

SEQ ID NO: 466457 - DNA, 122 bp, Homo sapiens
tcaagagcttcgggactacaatcctagcatgccccaggctcgggagcctggtgaagttctcggggggaggagcgaagcggcgcgcgcctggccaggcacgctggaaacggtagctcttaacg

SEQ ID NO: 466458 - DNA, 122 bp, Homo sapiens
agttcaaggatcagctctgtccctggggctgggcaaatagagtgggcaaacagcaagctgcgggggctgcagggcaggggtcaagggttcagtgggggcgggaggggagtgtctgcaggctt

SEQ ID NO: 466459 - DNA, 122 bp, Homo sapiens
ttgaggccaggagtttgagaccagcctgggcaacatagtgagacacccccctcaacaacccgcatctcttcaaaaattagaaaaattagccaggcatggtggtgcagtcctgtattctcagc

SEQ ID NO: 466460 - DNA, 122 bp, Homo sapiens
cgtgttgtttgcttctcagtttaatggctatgctgggagcctcttctcaagtggaccctacgagaaagatgatgaggaagcagatgctatctatgcagccctggataaaaggatggatgaaa

SEQ ID NO: 466461 - DNA, 122 bp, Homo sapiens
ggcgggaggctgggagcggccgcgggaagaattcgggaggggggagtgcgggggaagagccgacagttgatgaatgtggcttgcaaaggttaattaaaaatggttttgcagccaacaaacac

SEQ ID NO: 466462 - DNA, 122 bp, Homo sapiens
aggccgctgggccccggaacccaaggtccctctgcttctgctccactccccagtgcccagcgcctgggaatttgggaggggaagctctggcgctccacagccctgcttcccacccaaacacg

SEQ ID NO: 466463 - DNA, 122 bp, Homo sapiens
tccctcgctgccgcgggcttcacatgcctcaaggattacacgctgagtgaactctgtccgcgaagccaaggcagcagggagtgaggacaacgcgttccattgttccccacccgccttcccaa

SEQ ID NO: 466464 - DNA, 122 bp, Homo sapiens
gaggagcactgagaggggagacgggtcaccccccggggggacgcaggtcagccggtcagtcgtgcgtggcctggctggcctcctgcccggctgcctgtcacccgctccctcccgactgcctt

SEQ ID NO: 466465 - DNA, 122 bp, Homo sapiens
gtccgggccggctctgaatgaacgtctcagcttctctccgcattgctctttcctcagccccggccatggccccgcagaacgtgcaggtgaccccactcacggccagccagctggaggtcacg

SEQ ID NO: 466466 - DNA, 122 bp, Homo sapiens
tgtcactgaaacctttcccagccttggtcttcccctctgtgaaatggagtctcacaggatcgccgtgagaactgaatgactaactctatggaaaatgcttccaaaacagccctcagtaggtg

SEQ ID NO: 466467 - DNA, 122 bp, Homo sapiens
tggaagcggggcgggaccttagcccttgacagcagttgtgacggggaggattggaccgcccggattagggctaattaagggtggatgggtggcgggcggggaagtgcgggtggctaaatagg

SEQ ID NO: 466468 - DNA, 122 bp, Homo sapiens
tgtccaaggaggctggagacaccacctctcagccttcccctccacctttctccatagcaacggggtcattcctccctgaggtccaggagaagggcgacctctgccagcccaagaagcggtga

SEQ ID NO: 466469 - DNA, 122 bp, Homo sapiens
cgcctccgcctccacctctggccgcgccgccgccgcccggcgcctctgctaaggggccgccggcgcgcaagctgctttttatgtgcaccttgtccctgtctgtcacctacctgtgctacagc

SEQ ID NO: 466470 - DNA, 122 bp, Homo sapiens
gcgcacactggccacccgcagagcaccgggaccacattttgcagaatccttcggcagtcccgcgatgccttcgcggtcagcagatctcattggtttacagagaaacttgtcaacgtcacttg

SEQ ID NO: 466471 - DNA, 122 bp, Homo sapiens
actgcgggaacgcagcggcccgggaagctggagggggcggacccggccggcgagcgcaggcgctccctggctcacgcgcgcaccccggccccaccacccacccttacgccgcggcccgccct

SEQ ID NO: 466472 - DNA, 122 bp, Homo sapiens
gaggaaacaaagtcgcggcccccacacagtcaccgttcggggccggttgatctttccccccggagctcccatagtcgcgattccactccagttcacggtccgtacttccgctcagcgccgga

SEQ ID NO: 466473 - DNA, 122 bp, Homo sapiens
ccgcttcaggcggagaatctaggcggcggcggggcctccctgaggcggaggagtcggcaccggggcctggctgccggggaaggagagcacgggagcggggactcctgtgtctggcggaggga

SEQ ID NO: 466474 - DNA, 122 bp, Homo sapiens
ttcatggaccccgtgctgctccgcgacttgcgggtctcatggacactgaccgacatggtgcgtcagcttgtgggggaacaagcccacaggttagaggagcccctcctgcccatctgccctct

SEQ ID NO: 466475 - DNA, 122 bp, Homo sapiens
cgagagataaagggaaaggggcctcatccagggcgagcatgggctgggtcccgaggggaccggccataaacagtcgaggccaaggtagacaggggggttgcaagtcaaggtgtaccttcatt

SEQ ID NO: 466476 - DNA, 122 bp, Homo sapiens
tccacaaccacctccagcctgggagataggccttgcttgctgccttctggattcttggcccgcacagagctggggctgagggatggactgatgcttttagctcaaacgtggcttttagacag

SEQ ID NO: 466477 - DNA, 122 bp, Homo sapiens
ttggtggttaggccggttggctgtcttgaacagctggagggaagatgcaggggtgggaagcggccaggcagaaagagctccaggctcttgtgtcgcccacccagccctcccatactcactcc

SEQ ID NO: 466478 - DNA, 122 bp, Homo sapiens
cagggtgcaatgccgggaggggctcgtcgggtcccgggtccggcggctcgcgctggggagcgtggctgcccccgtcacccccaccgcggctgcccagcagcccgcgcgccccttcccctccg

SEQ ID NO: 466479 - DNA, 122 bp, Homo sapiens
gcatctgggcgtccgttgtcgctgtttctccgatgctttctctgcttgtcctctgctgtccgggggcagcctcatggtcgggcccctccctgtagactctgctgccccatttccagtgtctt

SEQ ID NO: 466480 - DNA, 122 bp, Homo sapiens
gcgcggagctgctcccggagctgccacctccgaggcgcgcgccacgccggggttccctcgcggctttggaaagggggtgcaaatgcacccttctgcgggcccgctacccgctgcaacacctg

SEQ ID NO: 466481 - DNA, 122 bp, Homo sapiens
ggcaaggacgacactccgggccctaccggcggaagctctgctcctgtcgtgcgtggaccacgcagcaaatggccttggaggctgctggcagccatcttgtgaccatgaggcaagtcagcgca

SEQ ID NO: 466482 - DNA, 122 bp, Homo sapiens
gccacggcagctcctttgtttacttccagagctgccaggcccaccactagccaaacacaacgaagcccagccagtgaggggaggctccaggctcagtctgtcccctcagagagaggtaatag

SEQ ID NO: 466483 - DNA, 122 bp, Homo sapiens
agaaagaagggagaagctgggggtaccctgcagtggagaagtcctggcctctattttccccgccccccgcccatgtctttctatgcgctatattaagagcagtggctctggggtcctagcac

SEQ ID NO: 466484 - DNA, 122 bp, Homo sapiens
ggtcgaaccggagccccggggcggggtgggggagctctctgggtggttaacaggatgtggcgagcacagggaaagggggggtttgcacggagcccgggcaggggtgcctagcgcctcccttc

SEQ ID NO: 466485 - DNA, 122 bp, Homo sapiens
gtgctgggattacaggcgcgagacaccgggcccggccccccgccgaagcatttttaactgcggtgccggctttaaaaaaacttttaggtcaagaaatgcgctccagaagctcggcgagggta

SEQ ID NO: 466486 - DNA, 122 bp, Homo sapiens
aaaagaagatggagagacttcagcgcctgggactcgggtgggcgaggcggaaggtgtcctcgcagcacggcttttctccgcgccgcggttggttagcgagtgccctctgggtgctaggcgtt

SEQ ID NO: 466487 - DNA, 122 bp, Homo sapiens
agaaacatatagggaaagcatatacctgcacacaaacacaaagcacaggaatgcagagtacgcttactatcgttgcaaagaaaaaatccagaaaccacactgaaagctacacaaggaaaaaa

SEQ ID NO: 466488 - DNA, 122 bp, Homo sapiens
gttagtgcgcttcggccaagggcgccgcctgctccgcgtccctcgctcgcctcctgcgctcgcaggagcgctccgagtgcctctttagcgggagccaatatccttttgtgctaataggcttg

SEQ ID NO: 466489 - DNA, 122 bp, Homo sapiens
gccaagctggtctcgaactcctgacctgaagtgatcctcccaaagtgctggtattacaggcgtgagccaccgcgcccgggaccgcttttttaaaaatccgttaatctcttctacctcccaaa

SEQ ID NO: 466490 - DNA, 122 bp, Homo sapiens
ctaaaagattccccgagatgagagtttcagaagcctgagacgctatgtcaaacaacccaccgtagttattcagggacactgcaactcaaaatgaggtagccatcgatccagagaacaaatga

SEQ ID NO: 466491 - DNA, 122 bp, Homo sapiens
agccttggggcggggcggagggagggggttgggtggggggctcccccaggtcactggggacgaagaactcagactctcaaggtattgccccagctccctggacctgcagcagagacacaaac

SEQ ID NO: 466492 - DNA, 122 bp, Homo sapiens
cagtaaccaacattaaaatagttctgccctggaagagcagacatttgtttgtgggtctgacgggttaccaatcctctgcatcttgaaaggcactcaaatgagcagggccttgtaaattggat

SEQ ID NO: 466493 - DNA, 122 bp, Homo sapiens
tactatgtggatcacaatactcggaccaccacctggcagcgtccgaccgcggagtacgtgcgcaactatgagcagtggcagtcgcagcggaatcagctccagggggccatgcagcacttcag

SEQ ID NO: 466494 - DNA, 122 bp, Homo sapiens
gcagcagggacacggttcttgtcctcgccaacacttgctactttgtggctttttgtttgtcgcgtactaacgatgccggtgggtgcgacgtggtgtctcgctgcggttttgattggcatctc

SEQ ID NO: 466495 - DNA, 122 bp, Homo sapiens
cgcgtcgcggctcggggcggacctgcggactgaagatccttatgcgattggccggggagccggaggggcgggcaatttgggatcgacagtgactcgcgactggtcggcgcggcgaaagcaga

SEQ ID NO: 466496 - DNA, 122 bp, Homo sapiens
aggggcaggcaggggcggtggagcggggccggaagtgaggctagcggagccccgcagtggcggctcgcgctcattggccgggagcagcgcggtgggcgggacggagctcggcggtctgcgct

SEQ ID NO: 466497 - DNA, 122 bp, Homo sapiens
gggcaggtctactttgggatcattgccctgtgaggaggacgaacatccaaccttcccaaacgcctcccctgccccaatccctttattaccccctccttcagacaccctcaacctcttctggc

SEQ ID NO: 466498 - DNA, 122 bp, Homo sapiens
gtggtaaaaccgctggagctcaggctcgggcttcgggggctccatcatagagccggcggccgccaccgtccaggaacagaaagccgaggggttactaaggcaaccaggagcccgacggcccg

SEQ ID NO: 466499 - DNA, 122 bp, Homo sapiens
ggacactggaatgctttagtcaattacaaactgcaagctgatgatgtgaagttacagctacgtggagcatgtgaacaagaccacatttagaaaggttcacttaagaatcccatgacaatgcg

SEQ ID NO: 466500 - DNA, 122 bp, Homo sapiens
ctcgaattcccccccttgcggcccctcggcgcgatcccaggcgaggcaatgtcctgagaacgtgtggggcttagcaaacaaagtgtctgtgcaataaagtgaaacccagaaggacacgcaca

SEQ ID NO: 466501 - DNA, 122 bp, Homo sapiens
tgcttcccgttttctcggaaaagtgccccgtctgcaaccctcagacgtggcttttacgcacgaagtctctgtccaaaggggtcagatgaggctacctgctagcgacaccttggcggacactc

SEQ ID NO: 466502 - DNA, 122 bp, Homo sapiens
tcccaatattgagccctgtcccattgatcctgcaggggagatgtgtagggcatttgttcacggggaggccacaagtttgggcctctcatcactgtgacctcacacccctgttgagtgtgtcg

SEQ ID NO: 466503 - DNA, 122 bp, Homo sapiens
ggaactcctgggctcaagcaatcggcctgccctggcctcccactgtgctgggattacgggcgtgaggcactgcattggactccactttattgtagttaccagtgagaccttctgtttcccct

SEQ ID NO: 466504 - DNA, 122 bp, Homo sapiens
atagccctgtctcaaaaccgggttgccagctcccatgtaccagcagctggactctgaaggcgtgagtctgcatcttagggcatcgctcttcctcacaccacgaatctgaacatgcctctctc

SEQ ID NO: 466505 - DNA, 122 bp, Homo sapiens
cggggccgagctcaggcaggctggggcgaagatctgattctttccttcccgccgccaaaccgaattaatcagtttcttcaacctgagttactaagaaagaaaggtccttccaaataaaactg

SEQ ID NO: 466506 - DNA, 122 bp, Homo sapiens
ccatcccgtgcccaacagcaggagctcatcgagagcatcagccgcaagctgcaggtgctccgggaggcccgcgagagcctgctggaggacgtgcaggccaacaccgtgctgggggccgaggt

SEQ ID NO: 466507 - DNA, 122 bp, Homo sapiens
cgaggacaccagcaccctggtgcaccctgagctgcaacctgaaggggacgcagacagtgccggcggctcggccgtgccctctgagtgcctggacgccatggaggagcccgaccatggtgccc

SEQ ID NO: 466508 - DNA, 122 bp, Homo sapiens
gaggcggggcgggggctggagggcccttgtttgcaggggctgatctggctggggactctccgggctgcaggtcttcatgatcaacctgaggcggcggcaggaccggcgggagcgcatgctgc

SEQ ID NO: 466509 - DNA, 122 bp, Homo sapiens
caaagcgcagctggtgcgcaggcgtcacccaataaggtttttgtgagcaggccccaatcgcggtgtgggcggagcgagcggctgagaccacgaggacgcaaggccagcgccgccagggagac

SEQ ID NO: 466510 - DNA, 122 bp, Homo sapiens
aagggtgcagtccccacaagccctgggctctatgggctttatggggcagggcagggagagcgtgacaggtgcagcccagagggaaacaggcagaggcttgatgcaagggctgagcctgcgtg

SEQ ID NO: 466511 - DNA, 122 bp, Homo sapiens
agtccttcctcttcttgagctgagacaaccatcttcttccaccctcgacatcagagtgcccggtttttgggtttttagactccaggacttacacagcttccttctccggttcttgggccttt

SEQ ID NO: 466512 - DNA, 122 bp, Homo sapiens
gaatcttaagggaaaatggcttcacctcaaaaatactctgttacttgcttggaagatagacgactttaagctgatgctgataaacttgtggcttccaaagttttccttactaattctaaacc

SEQ ID NO: 466513 - DNA, 122 bp, Homo sapiens
ccgcagaggtgaaagaccaagaaggtggagcaaacttttagggagcgcctcttgggcccgcgtacccttccgcctgttcctctctgattggccagcgtgagtcacggacgcccaatcgcgcg

SEQ ID NO: 466514 - DNA, 122 bp, Homo sapiens
agagacagcgtgcgcacgagacagcgcgcaagagagtgcacgagagaattccccaagggacgcctgctcgggtcacaccctgaacgccaataaaagctttggctcccaggaccctttttttt

SEQ ID NO: 466515 - DNA, 122 bp, Homo sapiens
gcctcctacgcccgagccgcgggccctttaagtgctgacggcccactccggccccgaccccgcccctccacgcccccaaggaaacatgtcactcgggttacggccactacggggagggcggg

SEQ ID NO: 466516 - DNA, 122 bp, Homo sapiens
gctcttcagcagcaccacttacctgctccaacacatatgcggcaccaaaatcaatagctccgcccagctcacgatattgaccagaatacctgatgtagccccaggtgaggagtgctattaac

SEQ ID NO: 466517 - DNA, 122 bp, Homo sapiens
cttcacctgctggcagcttcacctgctggcatgctaataccattctcaaggtcactgagacgggcacttatggcttgccaaccaacaggacgtcatctacataaccaaagctatggacatca

SEQ ID NO: 466518 - DNA, 122 bp, Homo sapiens
cagtggattacagaagacaactgtggctacaggctgttcttgccagctcaggcgtcaactcgtggaaaccggttaatgacccgaggggacagcggattctcgcctaagcaagatcccgcaga

SEQ ID NO: 466519 - DNA, 122 bp, Homo sapiens
tttttttgtgtgtgttcttgcttttaaaagtaaagctatatatatgccaaaacaaaaattcgttgttttccagtgtcattaaaaacagaatctaggccgggtgcagtgactcatgcctataa

SEQ ID NO: 466520 - DNA, 122 bp, Homo sapiens
cctcggcgtcatgtcttcggtgctggcggcttcccatccgctggttctatcctcaaacgccgggacaccgggaatctcggagaaggacaaccgagatccagctggctcctccatcggggtgc

SEQ ID NO: 466521 - DNA, 122 bp, Homo sapiens
aagagatgaaaagagaaaggcaaaaacgtccagagacaaatgcagagacatgtggctgagcgacagtgccacagaccacagacacttggaaacagagagtgagacacgatgctgaaagctgc

SEQ ID NO: 466522 - DNA, 122 bp, Homo sapiens
agatgcagggagcgcggtgggagccgcagtagagtccgcgcttggagagcgcctaagcagcgctgggaacgtttccgttcctttcaggagagagagaaggagcagggtttgcgcttctccgg

SEQ ID NO: 466523 - DNA, 122 bp, Homo sapiens
gcccgcgagacgcagcccgcagcggcgatcccgggtggccgtcaacgcccactgtcccagcggtgaccctgccctggcgcttctgccaggtcctcggccagagtccagtcgccaggttcagc

SEQ ID NO: 466524 - DNA, 122 bp, Homo sapiens
gagtaaatgggcctctggcgtgcagtggagaaagagcaggagtggcgaggaggaagcccacgcctgctgccaggagtcatacaaagccaggcttcatggatgagcggcggcagttgggacag

SEQ ID NO: 466525 - DNA, 122 bp, Homo sapiens
cggttcccggggtctctctgtgctctctccgcagtctcgaagcagcatgcaacagggcaacgtggacggcgcccggaggctgggccgcctggctcggctgctcagcattaccctcatcatca

SEQ ID NO: 466526 - DNA, 122 bp, Homo sapiens
taatgataaggatgaggacaaggagagacagggcagcctcggagaccttcatcctctcagcgaggcagtacagcttcagggagagccgaatgaagatgttgtctgttgctggtggtccgctt

SEQ ID NO: 466527 - DNA, 122 bp, Homo sapiens
gtgattacagaataaaaagatcctttaggaatgcagtcatctgtttattcagtaaatttccgtatcttactaatcacaacagcatccacgtacacttaaaatagtgcctatatgtatgtgtg

SEQ ID NO: 466528 - DNA, 122 bp, Homo sapiens
tcagaatgtctctgtgcctatctccatctctgacccccaccccagggtctaccgggccaccgcacaccatgttgccagtctctaggtccctgagaccctttaacctgtgaggacatccaggg

SEQ ID NO: 466529 - DNA, 122 bp, Homo sapiens
ccgacctcgggtccagtcctctgacctcggcctcacgtctgtggagtgaagatttgagaccgtgggacagtactgctggaagtagagaggaggagtcgaggctgggagagctcctgagagac

SEQ ID NO: 466530 - DNA, 122 bp, Homo sapiens
aatgtgagcgtggccagggtgagcgctgccctcgcggccggccgtggtgcctctggtgtgcgcctgtgtgtgctgctgccgctgtcatcacagatgcaccccagctgtcactccccgctcca

SEQ ID NO: 466531 - DNA, 122 bp, Homo sapiens
ctgcccttttttcagtaagttcttgttgactactctcttgaaaccaaaagatgcatatcccgttgtacagggggtcaaaagtgtgcccaattaagcctgccttgacttcaatattgcaactc

SEQ ID NO: 466532 - DNA, 122 bp, Homo sapiens
gtgtggggcggtgtggcgggcgcacactgtatgtacctataataaaccctttggctttgacggtctatggtcctttgtttgggttttctgggctgcgcccgggaggattgaaaggagggctg

SEQ ID NO: 466533 - DNA, 122 bp, Homo sapiens
ccaaccgcgagagccccctactgcgctttggccacaccccctacgcctcgctcccggccccgcctctgcccctgaccgcgcctgcgcaaggcgggcgccctaaagtcctatttcactctgtt

SEQ ID NO: 466534 - DNA, 122 bp, Homo sapiens
aagccggcaggaagcgcagcacgttgcccatgatgctcatgagcttggggtagtagtgggcggccgaggtcatgcggaaagcgtccagcggcgtggccgtgcggtcgcagatgacgttcttg

SEQ ID NO: 466535 - DNA, 122 bp, Homo sapiens
ttccacctaagccttagccttggcacagtttcaatatcgaaatggatcgctgcgtcccggcggtcccaggaaaaaggcaaaccaaaaaatagagacgttaaggattctccaagtccccggag

SEQ ID NO: 466536 - DNA, 122 bp, Homo sapiens
tcagaaggagcgaatttcctgcagagctgagcctcccagggcggccacaccttccccacacgttccctcggcaggttccaggcggaacacaccgctcgtctgcaggcgcttggtggtggagc

SEQ ID NO: 466537 - DNA, 122 bp, Homo sapiens
aaatgacatttgaggtgcctctgatcgcctctgcctgaagaatatgagttagtgttagagcgtgcagctgggtcttttcactcccgattcaggaggggacagaagggaagaggccagggctt

SEQ ID NO: 466538 - DNA, 122 bp, Homo sapiens
agatgatgaggaattaaattcctgccattctatcctttctgaagtcttcctcacacccctcgaatccacctttacactatcattaaagtaaagatgataatatgattcctctcatggaaaca

SEQ ID NO: 466539 - DNA, 122 bp, Homo sapiens
tggacaaagagcgggcgagggagggcgtttgccagcctgaggggtgcgccgggcggtgcgcgcacttccctgggctcagctccgtacccggtcgctcgcggtggccagagcccagtctctct

SEQ ID NO: 466540 - DNA, 122 bp, Homo sapiens
ctgcggcttccaccttctctctctctgaatctgggatcatgagctctgggggaagccagccgctgtgccataagcagccctgcaggaaggtccacatgactgagaactgaggccttctggga

SEQ ID NO: 466541 - DNA, 122 bp, Homo sapiens
gggggtgggggccaccggacagactgatggcccgacagactcaccggggtgggccggggacgccaggcagccggaggcggagacggccgcaaggaggatgagggcgccgggggcaggcatct

SEQ ID NO: 466542 - DNA, 122 bp, Homo sapiens
gaacctgggctgcgcgtggctggcggtctcctagcgactagagcgtcagggatcaggaaccgcggaaactggagaggtggcaccccagcgagggccaccatgggggaccagaggccgcagga

SEQ ID NO: 466543 - DNA, 122 bp, Homo sapiens
acgggcccctgcctgggccccgggactacgccgagcgccgcagtctgcccttcaccaccccgccgggccccacccagttcttctatacagaggagccccaaggcttccggggcagctttgca

SEQ ID NO: 466544 - DNA, 122 bp, Homo sapiens
aatagccctgcgggtgccctgcagaatctttgaggctttaagggtctggtctgctcctgccgaggcaggtgccagtctcaaggggtgaggcttctgccaacattcttatgaggggaaatatt

SEQ ID NO: 466545 - DNA, 122 bp, Homo sapiens
tgcgggatggcgggcagaggtagcaggagctgagatcgcaggcaccattgcactacagcccgggcgacagagcgagattgtctgaatcaatcaatcaatcaacaccctccccctccccctcc

SEQ ID NO: 466546 - DNA, 122 bp, Homo sapiens
aaagtacctggtacaatcctggcacacagtaaatgctcagaaagctagttttccttattacgctattatgattagcagttcaccctttgtttcgacaggggaacaaaccatgcttacagccg

SEQ ID NO: 466547 - DNA, 122 bp, Homo sapiens
tctgaatatttttaaaccccgagttgttgaccgccttaatctcgtgtccatagagcaaaacgtctgctcagatggatgcgaggcacagcgtccgcccacgctgctgtttttaatccatctca

SEQ ID NO: 466548 - DNA, 122 bp, Homo sapiens
ccgacccccgccggggcggagcctgaggggtggctgattcatgcacggggactgtcaccccgccgcccccgcgctgcaaactgtgtaagagggagaggaattccccgccaagttgaaaagtt

SEQ ID NO: 466549 - DNA, 122 bp, Homo sapiens
agcgcgccaagctgctaaccccctaactcccgttcctcctcggcgtttcttctccaagtccgaagtcagggtccaggactgctgcgatgcatcagccccgcctctcatcccccatccagagg

SEQ ID NO: 466550 - DNA, 122 bp, Homo sapiens
tcagcggcgcggcctggtgccccgccactccgcgccggccatataggcctcctcctggcgcgcctccgcaccgcattggtggaccggcccccagcccgtccatgggcgttgtggccgccacc

SEQ ID NO: 466551 - DNA, 122 bp, Homo sapiens
cgtcacacaaacaactggttgccatccctcctccccattttaagctttagtcatatattccgtgatttagcttgattatcatattgggcccatcatcaactcttgcaactactgtcacccgg

SEQ ID NO: 466552 - DNA, 122 bp, Homo sapiens
acagctataagccttgttttcaaagcagcacatcacagactcgtgtttaccgtcagtttacgaagaatgcgctgatgtctgggtccataaaaatatctttcctgtccttttctgctgtttgc

SEQ ID NO: 466553 - DNA, 122 bp, Homo sapiens
agctggactcgcagtccggagttcgtaccccacagaactcttcgcagggagtgtcttactcgctacagccggaccctaagcgcatccgccttcccaagttcatctgacacaaaatcgcgatt

SEQ ID NO: 466554 - DNA, 122 bp, Homo sapiens
ggataaggcctttatcactccgacgcatcctctctctgctttttaaatagacttttgactcggccaggccccctgccacccaccgcgctgaccctgcctgcgcttgcgtcccgcgtcccgca

SEQ ID NO: 466555 - DNA, 122 bp, Homo sapiens
aaatgtgggagcttaaatgtgtgaaggatgaccctgtaaggtgccacacccacggctgaacgtatataaatggtcctgtccagatgtggcatgcaaactcagaatcttctcagtgtaactca

SEQ ID NO: 466556 - DNA, 122 bp, Homo sapiens
acaatgtattgttttggtggctgctttgtacatttataaacagaggctttgattaatatacggcagtgtttgctacttagatcttttttagatagaggcaggaaagtaattaagaagctgga

SEQ ID NO: 466557 - DNA, 122 bp, Homo sapiens
gaggtggtaaaagttaatcttgaggtccctttctcctacagggctgggggaaaattttcacgtgagagtcaaacagtccttttcagatacatccagacaaggtttggttagaaataaaatta

SEQ ID NO: 466558 - DNA, 122 bp, Homo sapiens
atcaacttaatggaagaaggaaaagagctctgccttaatccctatgattctgttccagagcggtatgagcccagctgatttcagtgcagtgcagcagtatctttggttccatgtcatggtaa

SEQ ID NO: 466559 - DNA, 122 bp, Homo sapiens
acgagggtgttttctgtgcccagcaaggtcatgaagggccttgacttttcttggttaggccggctttgctggtgacttcttccaaactctgcaggagcagtctaccccaacacacatcatca

SEQ ID NO: 466560 - DNA, 122 bp, Homo sapiens
tcaggcgagcgacgcgtctcctgcggcccagctcagctgcctgggccaggatggagactccgctcatgtggggctcaggggttttttgaggattccatttgggaaaaaagccaccagatcac

SEQ ID NO: 466561 - DNA, 122 bp, Homo sapiens
tggtcaggactaccctgtcccccacccaaggcccagagcaaggagtggcccacccagcttcggtagccactacacaccctttgtgaagtccctcagactctgcccagtgcttcacgccacgc

SEQ ID NO: 466562 - DNA, 122 bp, Homo sapiens
tcccgccccttccggccagtgttggccaaagcatttcctctttcggcctcagtcagctagcggctgctaggtgcgggcaccatgctactgatccttcttgctgtctcttggactccatgtag

SEQ ID NO: 466563 - DNA, 122 bp, Homo sapiens
gccactgccccagcaccccggccaccagctctacggccacgccctcctcaactccggggacgacctggatcctcacaaagctgaccacaacagccactacgactgagtccactggatccacg

SEQ ID NO: 466564 - DNA, 122 bp, Homo sapiens
ggggtgtgtggcagtggaggggctgtggtcacagaggagccaaccaggagagctgaaggccgcccgtagccatggagacagggcccccgggccagccaggcccgggctggtcagtgaatgaa

SEQ ID NO: 466565 - DNA, 122 bp, Homo sapiens
gcccgcccaacgcccacctgcccaggtgcctggaggccggaactcgccgggcggtgcctgcggtgccaaaagctgtaggataacctgccccagggccttactgaacttcacacctttctgta

SEQ ID NO: 466566 - DNA, 122 bp, Homo sapiens
cgttcccctcgatttgcaccgtcactcgggttgtttgggaagaaaaggggaggcgctgtgcgtgccaccgggtacctggacctggatgcccagtgtgtatgcatgcctgtggcgctgcgtga

SEQ ID NO: 466567 - DNA, 122 bp, Homo sapiens
accccacacaaggactgcaccccatctcccctctgccagctcatcaaggacaggtgaccccgcccaggcctgcctgtggccacgacaccaataagctgagggcctctgtgccccagccccca

SEQ ID NO: 466568 - DNA, 122 bp, Homo sapiens
ctacccaccaggcgtccccgcggcctctagaatattgtagaatcttcccaagagcccccgcgggaaggaggcccgccccctcatgaatagcaagcagcctcagctctcgtagtgcccgcctc

SEQ ID NO: 466569 - DNA, 122 bp, Homo sapiens
tagcgcctcgagtgccggccctgggagtccaaacttcccgccggtgcccccagctgggcccgagcacccaagctacctccacacggaggcctgagtcaccgttcgcgcgacacagaaaccgg

SEQ ID NO: 466570 - DNA, 122 bp, Homo sapiens
agggaggcctgtggggatctggggcaagagcactgctggagagcacagcaacgcttctagcgaggggtatgcctggtgtcggtgagggtgaccaaagcagccagtgtggtcatcatggagga

SEQ ID NO: 466571 - DNA, 122 bp, Homo sapiens
cgggaccgcggaggcggcagcgccactggcggggatggtaaagatggccggcagtacccacggtgcctggcatctcttgtactgttcagtagtgggacttcaggggccagaaaagaagggca

SEQ ID NO: 466572 - DNA, 122 bp, Homo sapiens
ctgactttcctgctctttaactttgcgggaggggggaggctgcacaaaggagcaggtgtgcgcctcccctgccgccccgcgcccacaggacggcacacaggggtctgctcgtgccgctttct

SEQ ID NO: 466573 - DNA, 122 bp, Homo sapiens
ggctatatccagcagtgcagcaggtgtacgtcgtccaggagttaactccgggcacggggacgaatgctacaggggaggcagggtgctcctgtccaactgtggccgaccctggggcagaagat

SEQ ID NO: 466574 - DNA, 122 bp, Homo sapiens
gagaatatcagctccagaaaagcagggactttgtttaacacagcgttaagagacaggactcgaccagtgtggatcaattaagtgaggatgtttgcacagcaggctccgggccagcgagtggg

SEQ ID NO: 466575 - DNA, 122 bp, Homo sapiens
gattccgcaccctgcctacgccaggagaagttgaggggagcatgcttccctgcagctgaccgggtcacacaaaggcatgctggagtacccagcctatcaggtgcccctcttccaaaggcagc

SEQ ID NO: 466576 - DNA, 122 bp, Homo sapiens
cggtacaagaagtgagactggtttgtgccgattcagcgccctgcctgggctggctagcaacggagcatgcgcagtgtttctaggcgtggtcagactccagaggtgttggccaatgggctcag

SEQ ID NO: 466577 - DNA, 122 bp, Homo sapiens
tcaggctcaggtgatcctcctgcctgggtctcccaaagggctgggatttcaggcgtgcgccgccatgccctgccgcaggctttccgattctgaaccatagagtcaatgaaactgtcctccat

SEQ ID NO: 466578 - DNA, 122 bp, Homo sapiens
gacctcgacgggccctacatgacgtcacaaaggggccagaccaagtggggcagcaccctgcgaccctgcgatcctgcctggctcagccgccttcatatatctgcttccttaagtccactctt

SEQ ID NO: 466579 - DNA, 122 bp, Homo sapiens
cagggcctcggcgggagtgattattttctcaggtgtttgcaacagtgttctaactattaacgctacgatgcctgaacctaccaagtctgctcctgccccaaagaagggctccaagaaggcgg

SEQ ID NO: 466580 - DNA, 122 bp, Homo sapiens
aaggactggcctggaaagggagtctcttctccccacaggggctgacaggcgtactgagttcgcctttactgacaagcttttaccatttattttgaacttattttcctttgagacatctggga

SEQ ID NO: 466581 - DNA, 122 bp, Homo sapiens
cggcgccggcgcggggtgctgattggctgtgcgcgcgcctggtaacagcagggtcaacggcggcgccttcggcagcctccgccccgtgacgtcagacggctcccctggggggcggggagaga

SEQ ID NO: 466582 - DNA, 122 bp, Homo sapiens
tcctgcaggtggatggtctgaagcatttgctggagacaggggcctcggtcaacgcacccccggatccctgcaagcagtcgcctgtccacttagccgcaggaagcggccttgcttgctttctt

SEQ ID NO: 466583 - DNA, 122 bp, Homo sapiens
tcaaggattacttcctgtatagaagaagtcagctgcatgcatacaatagcgaagaagctacgttccctcctggagccagaccaaggtcaggaatttcaattgtgattcctgactcatggaaa

SEQ ID NO: 466584 - DNA, 122 bp, Homo sapiens
aagctagaggttgacattgtggagctgggagggtccctgtgcaggagaagttgcagcgtccggcatccctctggacaaagccgcagctttgtgtggctctgccttcccgggctgccatgatg

SEQ ID NO: 466585 - DNA, 122 bp, Homo sapiens
ggctccgaaaaggcgggggtggggctgcccggcgcaggggctgggggcggggtgtgcatgcggattgattgggtgggtgttgctgtgattagtcctgactgtgtagatgccagcaacatagt

SEQ ID NO: 466586 - DNA, 122 bp, Homo sapiens
ccagggatttgggtgccatgttcaccctctcagaaggctttggggaccgagcagatggctcggaaatccctgccaagatcaatttctccaattgatttgacaccgggcgctctccctgcagg

SEQ ID NO: 466587 - DNA, 122 bp, Homo sapiens
gagagaagctgaaaaccgaccctgctttgtccgcatctatttcctgccggctctcagcagcgtgaccagctacctctgctggtggcgtgaccttgggtgtgtcacctcactgccggctctca

SEQ ID NO: 466588 - DNA, 122 bp, Homo sapiens
ggagaaaatcctgcctcagaacaaacagaagaatgtgctattttgcaaccaagtgaagagcgtatttcaaaaggaaggaatgacttgatattaaatgcttttcacagatcaagtaaaaagag

SEQ ID NO: 466589 - DNA, 122 bp, Homo sapiens
aagccagggataagttagtgggaggctggagcccttacgtcacttacataatgagccaatcggaaggggctgagggcgagcccacacgcgagtgaggtggcagcgtgagagcgcgcgcagcc

SEQ ID NO: 466590 - DNA, 122 bp, Homo sapiens
tcaccggagcctctctcaggatgccggggtggtgggcggggcaagcaggggcagcaggtgcgtctcagcctctgcagaccatgcctggcggagcaggcagccagccgggcccaacaatggca

SEQ ID NO: 466591 - DNA, 122 bp, Homo sapiens
agatccgctgtcccttgagacttggcctactcccggcactccgcggacagccccagcctgcggacagccccagcctgcgtcacttgtccgcatgccagctccacccgggcggacccacacat

SEQ ID NO: 466592 - DNA, 122 bp, Homo sapiens
ggggcagtggtgcgcggctgggaacctcgctgagcccaagcattggtagggagaccccagcggccagtaaggcggctcctggcgccccctcgggccggagctgtgcgctgcaaggctggatc

SEQ ID NO: 466593 - DNA, 122 bp, Homo sapiens
ccgcgaccccacaggcagggagccgcatttaggtttcgggcgggcggacgggggacggcccgagtgaggcgtcctccgaaggctgcgggcccgaagccagaactccttcctctccgaagacc

SEQ ID NO: 466594 - DNA, 122 bp, Homo sapiens
gcttgcagggtctggcagctgtgtcccacatctggggtttcaggaattctgacctgaacacgcactcccacactcaccttcatcaccaggtgaacaggcacagaggggaaaggagggacaca

SEQ ID NO: 466595 - DNA, 122 bp, Homo sapiens
cataatttgaaaatccgcattagtgtgtttcctgcattgtgtgtttaatgtgtgtctccacgtctaagctgtaagctccatgagagtccatcggtttcatttccagttgtatacacacagca

SEQ ID NO: 466596 - DNA, 122 bp, Homo sapiens
tgggcgccccggcttccccctccaagtggtaattgggggtccgcaggcgaaaatggggaccgctccccaaatcccccgtctcctggcctagaaccgagcgtgcacgggggcggcgacgacgc

SEQ ID NO: 466597 - DNA, 122 bp, Homo sapiens
ccggccggcagctcggagcgcggggtccgcggagcccacgccacgcccacccggaactcacgctggtccgcaagcgccgtgcgcagcccaggttcccgcccacgcctcttcctccatgcctc

SEQ ID NO: 466598 - DNA, 122 bp, Homo sapiens
cggaggcggggaaggagcctcccctccaggggtggatccagctttgccccgcccacgcctcgcttcctgattggctcatggtccctgacaaagaaaagcctacattaacgctcccgccttat

SEQ ID NO: 466599 - DNA, 122 bp, Homo sapiens
gagcgtggggagccgggggagggagacgggagtctcgcgatgctagcgcggggctgctgacgtcatctgcaggccctggagacgcgactgcagttaccgagtttctaaggcctcgtcccctg

SEQ ID NO: 466600 - DNA, 122 bp, Homo sapiens
acacttgggctcctccttaattctacctacagagccctctatgggcctcagcaagactgccgccaactgaccggccagcgatctcctcccactgcccacatccctggggttctcggttgagg

SEQ ID NO: 466601 - DNA, 122 bp, Homo sapiens
ccgcgccgcgggggccatggcggagccaggaagccgggagtccgagacccgggtaactgccgcggcgtggcggcttgcctttctggagggggagggagtggctctttgggggtgctcggcgc

SEQ ID NO: 466602 - DNA, 122 bp, Homo sapiens
aaatacaaaaattagctgggcgtcggctgccccgtctgggaagtgaggagcacctctgcccggccgccccgtctgggagcctttctgcaggtgtacccaacagctccgaagagacagcgacc

SEQ ID NO: 466603 - DNA, 122 bp, Homo sapiens
aaagatgtcgttctattgtctcctggtcataactgatgaaaaatcagccattatttgcatcgtcattccatggagtgtaatgtgttgttttgctctggctgctttcagtattttttctttac

SEQ ID NO: 466604 - DNA, 122 bp, Homo sapiens
ttgaaacgaactccaggcagtaccacccacaacagacacggaggatgggagtgagccagacgccctagcaggggaggaagcggggcagctgtgaggcagagccgcaggcccagtgtgctcct

SEQ ID NO: 466605 - DNA, 122 bp, Homo sapiens
gaaccgtgagcctccccgtaacgagagagtttgactgtcagccaaggtcaccgggcccggcgcagggaaggggtggggctcggctgagcccgcgagacccgccctgctcgccgcagcccccg

SEQ ID NO: 466606 - DNA, 122 bp, Homo sapiens
ggctgtcgtttgcgctgcatttatccgaatacatccagctcgcaggcatcctgcaagaaacggctcccggctcgcgtgtacgccgacacctcggcccaacgcaggactcgaggtggtttcta

SEQ ID NO: 466607 - DNA, 122 bp, Homo sapiens
tggacacatatagggatctgggctgcaccactccaacaaggatgagtctagaaacagcagcgtgctcagaatctagagagaaataacacattggtggaagtgggtctgtgcagggctgcctt

SEQ ID NO: 466608 - DNA, 122 bp, Homo sapiens
gcctcctccagatgtcttgttcagggccagtgccaaggcccagatggcatcataggccagcggtgcctcctggaagcctcctgtctcctcagggtgtcttttcagtcgcttggttagtttct

SEQ ID NO: 466609 - DNA, 122 bp, Homo sapiens
agtagaattaagagtttgagttaatcccctcagtattccatattcttttagataaagaggcggaggaagtactgctccctggctgtgattactgatgacacagtatagctgcttataattct

SEQ ID NO: 466610 - DNA, 122 bp, Homo sapiens
ttgaagcttctaaataggagatggagggagatgcatttctggctcctggttgggaggtagcgaggggaaaaagagagaaaaaagagacagagcaaaatgttcatagacacccacagcacagt

SEQ ID NO: 466611 - DNA, 122 bp, Homo sapiens
tctcgatctcttcttctccctgtggcccctgcgctgttgccccgtccccgtcaccccgcccgttactgaaatgtataatctgacttcctgtacagaaacctgccgctgcgcctctgtcttct

SEQ ID NO: 466612 - DNA, 122 bp, Homo sapiens
tctacagggaatttccttgtctatatcccaggcacccagcgggcatcattgctttctctgcgtgggttcctgtctgcctgcttgcctgtttcagagccttagcagcagaaagggctcttggg

SEQ ID NO: 466613 - DNA, 122 bp, Homo sapiens
gcacgcgcagctactaggtttgcaatcccatttcctgtttctgctcctggaccgagggggcggggccgggtgcctccgaggggcggggctggtgcaactccaaaatggctgccgcggggagc

SEQ ID NO: 466614 - DNA, 122 bp, Homo sapiens
cgctggaggaggggcacgtgacggtgtcagccaatggctgagcctcctgcaaaagtttgccggcttccgcagtgatggatcaccgttttagtggcatttaaatccccggcgctccgccgtct

SEQ ID NO: 466615 - DNA, 122 bp, Homo sapiens
gcctgcggaggagagcagtggggacattatgccaacaggtccccttcggcgggcctcacccggccagccttcctccgccctgccctgaggccccacattcagcggaagcgccgaggcacctg

SEQ ID NO: 466616 - DNA, 122 bp, Homo sapiens
gcttgtctgcagggcttactaacacttgcagatcttccaagagaagaggggtgggggatgcggaattcctagtatagttacaggccatttccgtgaacgcagacattatgcctctgcacttt

SEQ ID NO: 466617 - DNA, 122 bp, Homo sapiens
gattacagaggcttcatcggcctgggaccctgaataactccactctcttctcctatcccccgtctctatccagtccctgcatttgagctttatgtgagcaagggagaaaaaaaaaagaagct

SEQ ID NO: 466618 - DNA, 122 bp, Homo sapiens
cggaagccgcacgtctcactagtaccctcgcagacggacagcgccagggagcaatggcagcgcgccgaccgcgatgggctgtggccaatagcggctgctcagcagggcgcgccgagagcagc

SEQ ID NO: 466619 - DNA, 122 bp, Homo sapiens
gggaaggggcggccccagctgggtcgggcgaggctggctgcgggaaaccgagtgagccctcgcttttcctccggggtccgcgcgcgggaccctatttctggcctgtctcgcgcttcgcctgc

SEQ ID NO: 466620 - DNA, 122 bp, Homo sapiens
aaggctttgggacatagggtgatttgcaaggtgactccgccggtctctttcaagcgggagcgatacacaggtcagcccggatcgtccatggtcactgccgtaagtgacactaacagaatata

SEQ ID NO: 466621 - DNA, 122 bp, Homo sapiens
tgtctctacccaccttcgttcctcgaggctcctcccatgttcccgcccacctcaggtccccgaggctccacccatgtcaccgcccacctcagctacttgagaacccccgtcccttgggtccc

SEQ ID NO: 466622 - DNA, 122 bp, Homo sapiens
cctgctcgaaggacctgaccctgcggaactgctactcatgggcagttacctgggcaagcccgggccgccgcagcccgccgccgctccggagggccaggacctgcgggataggcctggccgcc

SEQ ID NO: 466623 - DNA, 122 bp, Homo sapiens
agagaagaaggagggcggtggcgggggtgatgtggcggcctctttgggaggcgcaggggccgcagccagccagacgctgcagcagtgtgggcagctccagaagcttgtgggcagctccagaa

SEQ ID NO: 466624 - DNA, 122 bp, Homo sapiens
gcggggcaagcgggaggcgggggcggggccggggtgacatctcaggctgtgattgggccgcgccgcgcctgtctccatgtgccgcgcagctgaggcacaacattcaagcccgggggtggggc

SEQ ID NO: 466625 - DNA, 122 bp, Homo sapiens
gggcaccactcaactgggtgccactcacctgggtgttatgcacctggacaatgctagtcacgtggatgccactcgcctgggtgtcactcacctgaatgctactcacctgggtgccatttacc

SEQ ID NO: 466626 - DNA, 122 bp, Homo sapiens
ccctttcattagcttaattacaccgtgcctatgacaacagagcaacggaaactgatacctcgggcctctggggcttgaattattcaaactctgtaaagcagcacacagactcagctcaggcc

SEQ ID NO: 466627 - DNA, 122 bp, Homo sapiens
tcccgacagccacccgtgcgacgacacagtggcccctcactcgcgtccccctgacagcctcgcagtcattcacaagccgtcacagtgacccacagccacacgcaggcggccaggcactgctt

SEQ ID NO: 466628 - DNA, 122 bp, Homo sapiens
tgtttgaagccagacacggcccagctgggtaggggcagggggcaaccccgtcccagctcacgccaggggctgatagataagcaaggccgcagcccactcccagcaggcaggcggggcgctgg

SEQ ID NO: 466629 - DNA, 122 bp, Homo sapiens
gggcgcagcgccttcagcaaccggagaagcatagttgcacgcgacctggtgtgtgatctccgagtgggtgggggagggtcgaggagggaaaaaaaaataagacgttgcagaagagacccgga

SEQ ID NO: 466630 - DNA, 122 bp, Homo sapiens
tttcctctccccttccaccatcctccccctgcagaaacattcgccgaggaaggtacgacccgacccagcagggggcagtgtgatgccggccacgtcatccctcccgctgtccttgtctcctc

SEQ ID NO: 466631 - DNA, 122 bp, Homo sapiens
cgcacctctccccaaccctccccaccccggtgtcgtctgcgctgggaaccaggctggagccgaggcccctgcagccgcagccggacccttgtcctggccccctgcccaggctcctgcgtgct

SEQ ID NO: 466632 - DNA, 122 bp, Homo sapiens
ccctccacttactcattagatgtccttgggcaagccctcacgcctttggaggcagttacccgcctgtactgtgggacaaataaataacgcctccccagggggtctccatgggcaccagccaa

SEQ ID NO: 466633 - DNA, 122 bp, Homo sapiens
cccgcgagtagcgcctgaagctcccccaaccccacaaacacctcacaaaggtgcacacctcggggaagcattgcctaggaattttggaaagaaaagcaatccaacagaagccacacattatt

SEQ ID NO: 466634 - DNA, 122 bp, Homo sapiens
atgtagtccctcccggaactttcctgacatagcacttctctcctccgctgcagagaacaacgctgccaggcggaggaggaaggaggacaacgaagaggaggtggtggcggcggcggcgatac

SEQ ID NO: 466635 - DNA, 122 bp, Homo sapiens
gtccttaagactgcgggtgcggccccgcccaaggtcgccccgccctccatccttctaccccgcccccccaccacatttctgaaatgaaagagttatcaatcgctttagggttaacttaaaga

SEQ ID NO: 466636 - DNA, 122 bp, Homo sapiens
gggcgctcaaggactgctcatctgcgcttctgccgcgggcagctctgacccctcccgctgcgctcctccagccgcatccctgcagccttgggccctactggcccgggggaggaggcactgcg

SEQ ID NO: 466637 - DNA, 122 bp, Homo sapiens
ccctcgcccgccccctccaggtttaattggtctcatctgacccctctggagctgaagaatcgatctgtgggacttggaactgaaagcacaggtcggggtaagccccacttcacactggaggg

SEQ ID NO: 466638 - DNA, 122 bp, Homo sapiens
gccccagggcgagcggaagcggcggggcccaaggtgctgggcggggtggggagcctgggacggtccctcccaccgcggcctccgcaggcgcgcccaggcccgggtcaggaggggcggcggcc

SEQ ID NO: 466639 - DNA, 122 bp, Homo sapiens
cctcaccaggcccccttgccaagacccgcagccgggcacctcctctccgcgtgccagcgccgcagctgctccagccgctcctccgccaggtgccgctgcttcctcatgcgctcctccaggac

SEQ ID NO: 466640 - DNA, 122 bp, Homo sapiens
agagatctcgtagtgaataagggcgagttattctcgtaacgccagaggtggtggacctgccgacgccctagggtgggacattccgggcttggatagtaagacatcgtaaatatacgccaaaa

SEQ ID NO: 466641 - DNA, 122 bp, Homo sapiens
gatgtgaacacagaggccaaggaacccctactttcatggtgggggctctgagggctcatccgccacctgaggcccccagtgctgcctgtggctaccaggcaaccagctctgcgtggcccagc

SEQ ID NO: 466642 - DNA, 122 bp, Homo sapiens
ggtgctagcatgttgagcctagagaagaaaagcttttcactattttctacaagaactttccgagctttcatataaaatgtactttaggttttccatgccattgcagagaagagtactagggt

SEQ ID NO: 466643 - DNA, 122 bp, Homo sapiens
ccgcttactctttgggtccgtgccatctttgagagctgtaacactcaccgggaaggtcggcgactccgttcttgaagtcagcaccaccacgaatccactggcaggaaccaactccggacaca

SEQ ID NO: 466644 - DNA, 122 bp, Homo sapiens
atgcctgtctatctggtatggaggcttcccctaggaatcactcacctgcacagatctgaacgtagtaatgaaaggcaacatgatatgatagcctggtccactggggctagttagtaaagctc

SEQ ID NO: 466645 - DNA, 122 bp, Homo sapiens
attagcagcatcaactctcaccttcatggctgggatataacatttcaaattggtcctggacgtggggataaagggcggcctgtgattcaggcctgaggatgtggaggtgtcttgggctgggc

SEQ ID NO: 466646 - DNA, 122 bp, Homo sapiens
gcttggacacttgcagcatgttgcctctgccaactgcctagaatttaagcctgactttgccgccttactgaccccagcaacttaacctgtctgtgccttaattttcttatctacagaatgga

SEQ ID NO: 466647 - DNA, 122 bp, Homo sapiens
taattcttggtagggtactcagagggcccccgagagatggcaggggcagatgttgagtagcgggccatgtaatggctggggccctgggacccccccgaggggcaagtgcagcacagcaaccc

SEQ ID NO: 466648 - DNA, 122 bp, Homo sapiens
ccaggtttgaataagactttccccaaccgtgacctcatttaagcaccccatgatgagattcgtgattgcccccactttacagataaggaaattgaggttcaccatggtcaagtcactccccc

SEQ ID NO: 466649 - DNA, 122 bp, Homo sapiens
aacttccgaggctgctctgtgtggctttgtgtggcctggctgcaaaccagaccccgatcacgccgatgagaaggcctcgctggggcaggaacctgggctggggcggattcctgtccctgggg

SEQ ID NO: 466650 - DNA, 122 bp, Homo sapiens
agtgctggggagtggggggaccttctggttttccataggtccctcaggatgggtgggtggcggccatgggtgtcatcttcttagcgctttaatgggtctttgtgatgtggtctccggtagag

SEQ ID NO: 466651 - DNA, 122 bp, Homo sapiens
ttgaactcgggaggtggaggttgcagtgagccgagattgccctactgcattccagcctggcgacagagtgaaattctgtcaaaaaaaaaaaaaccttaggcctgtagaccttaagctctcac

SEQ ID NO: 466652 - DNA, 122 bp, Homo sapiens
aaagataccattcttgagtcatggatttctctgctcacagaagggtgtggcatttggaaacgggaataaacaaaattgctgcaccaatgcactgagtgaaggaagagagacagaggatcaag

SEQ ID NO: 466653 - DNA, 122 bp, Homo sapiens
gcgcagtgacagcagggcccggctcgggccgcccgggcgtcggcgccggcgggaacgcgacgtcttgcggcaagaaacggcgtggcgcagctcctgcagcatctcctggcacaccgacacct

SEQ ID NO: 466654 - DNA, 122 bp, Homo sapiens
ggtctcgggggctgtgactgaggggtgtggcagaggcttcgggtgttcactgggagcttccgcaggggaaccggcctggtaggaacggccgctttggggaaggcagaaccatcgggaaccag

SEQ ID NO: 466655 - DNA, 122 bp, Homo sapiens
ctgtcccccaatcagaacaccctctgaacccccagttctgtggagcaggccaggctgtcccggattgggagaccagccagggtgaggcgaacaagaccaacttctctcagggaaaaggagga

SEQ ID NO: 466656 - DNA, 122 bp, Homo sapiens
ccttcgtcgcccccgcccccgcgaaaagccctgcagcttgcagccggcttcactcgcgcacgccgacctcccggctgcagtcctacctcttggaactacccgtgtttccgggcccagccctc

SEQ ID NO: 466657 - DNA, 122 bp, Homo sapiens
ctgtgcccatggcctctgccctgaccacccccagtcaggaggccccacaggaggggcacccggtagatgccagtgaaatcctcaggggaggtctgcctgaaagagcccaaccccctctgtgc

SEQ ID NO: 466658 - DNA, 122 bp, Homo sapiens
ggcggttgaaatgaaagaggcaaggtgaagccgggcgcggtggctcatctgtcatcccaacgcttagggaggccgaggcgggaggattgctctaggccaggagttcaagaccagcctgggca

SEQ ID NO: 466659 - DNA, 122 bp, Homo sapiens
catccaacctagcaccggctctttcacccagacatctttataccctggtccatggacctccgcagggcgatgaacttggccccctcatcggatgaggacattttcctcgcctcagcaaaggc

SEQ ID NO: 466660 - DNA, 122 bp, Homo sapiens
gagtgatttacctaaaacacaaacacaaccacaataagcctctatttaaaaagctttcaacggttcactgttgtctctacagaatgtaaacagagcgtcttaacatggcacaccaggccctc

SEQ ID NO: 466661 - DNA, 122 bp, Homo sapiens
gcctcaggcggcctgggcccacagagccaacgcgtgtggagggcccctggctgtacctcacgccacctgcgagtttcagtgcccaggaatccccagaaggaaatggccattggtgacggcaa

SEQ ID NO: 466662 - DNA, 122 bp, Homo sapiens
gggaggggacaggagaagcccgaaggccccagccggagtattccgggaacctgggatctccggcttccatccgctctgcccctacctcgtcacctccctgccgggaatgacccgggaagggg

SEQ ID NO: 466663 - DNA, 122 bp, Homo sapiens
cttgataggtctactggtgcataatggtagcagggcatatcaatatggtccaagactctccgagacacacagatgcacatccaaatgtatgtgtctcactcacccaaagctcagcctccccc

SEQ ID NO: 466664 - DNA, 122 bp, Homo sapiens
tatttgtgcgctttgcgtgtgcgtgaggttgcaccttttgtaggctggcgagtctctggacgaggatgggacgggggacacgggcccagttgcggccctgcgcgagcgggacctgtcagccc

SEQ ID NO: 466665 - DNA, 122 bp, Homo sapiens
tcgggccccgccggtggcccggggaagcagcacgggcggggggcaggggctggggccgaccgggaggccggtgccaaggatgggggccgcccggctgccccgcgcgtgaggaggccgagggg

SEQ ID NO: 466666 - DNA, 122 bp, Homo sapiens
gtccagacagaaaccatccccagcagaggccagcacaaaggactgagataaggagaagggcggtgggcaggcctctggcctctggctgagtgagagtcaggcaaagaattctgcccacacac

SEQ ID NO: 466667 - DNA, 122 bp, Homo sapiens
ggggcagggcctctgattggaggaggcctgccagaagggtggggcgatgggcgtggctaacgggataactgccagagcagaagacagttggcagttatttcgcaaccttcatctgttcctgg

SEQ ID NO: 466668 - DNA, 122 bp, Homo sapiens
tgaccttgtgatctgcccgcctcggcctcccaaagtgctgggattacaggcatgagccaccgcgcctggctgagctgaacccttttaaggctgatcagagatgccgtctctgcagtcttccc

SEQ ID NO: 466669 - DNA, 122 bp, Homo sapiens
tcctcccctcagcatcgcaggtcggatcacgtgcgggttctgtcacgtgacatcaggtcacgtgaggccggtcacgccccgggcagcttggctggggctaggcttccggggctctgcggtcc

SEQ ID NO: 466670 - DNA, 122 bp, Homo sapiens
tgaatcagcatgtaagcaggtgagaagacagatgacaggtcactgggtctgaaacccttccgataccaataaagggaacctgcgagtgcactccagcctgctggggaggaatctcagggccc

SEQ ID NO: 466671 - DNA, 122 bp, Homo sapiens
agtcgcccggggagcccgctctgcctcccggagccgccgccaaacttcggtcccggggcccggctcagctcccgccctcggagccacggccgccccgtctctgcctcccggtccccgccggg

SEQ ID NO: 466672 - DNA, 122 bp, Homo sapiens
cgtccccctcctccccctttgttctcctcccctttccctctctttaaatagatttcagggcgctgcctgttggagagcagctggcgatctctcccgagagagggagcgagcgaagcccgagg

SEQ ID NO: 466673 - DNA, 122 bp, Homo sapiens
agtggtgcttctctcccaccccagctgtaacaaccaaatatgtctccagacactgctaaacgcccccctggggggcaaaatcacccccatgtgagatccactgctgtggagtgtggtcctcc

SEQ ID NO: 466674 - DNA, 122 bp, Homo sapiens
gggcttgttgctgcgcagcgggcagagttctggttttttaggcggtctgtcccctgttcgcgtgtgtattcagtctctccccttccatgcagagttttgtggcacaggcgtgggtaccggga

SEQ ID NO: 466675 - DNA, 122 bp, Homo sapiens
cactgagtgcctcggcgctcgccgtggccttggcgttcatcatcaagccaggatccggtgcgcagacccttcagtccagcgacctggggctggaggactcggggcctcctcctgtccccaaa

SEQ ID NO: 466676 - DNA, 122 bp, Homo sapiens
tttcctcttctgtgggttctctgaaatccatgttggatccaccgaggggagggccatctccgaagcggctgcccatgggggggcctgttcgccggtcgcctgggcgactacctcccctgccc

SEQ ID NO: 466677 - DNA, 122 bp, Homo sapiens
ctagggtttctgatgcactctcttaccacacagttctttcatttaatgtttaatctttaccgccgctttgatgtatggatttgtttattttgtaattattttgtttaagacactctatgatt

SEQ ID NO: 466678 - DNA, 122 bp, Homo sapiens
cagtccagcccacgcaaggcagcgtcacgagcaaacagcacagaaacgtgagagccacagcgccaggcaggccacagaaagcacacttgtttttacctgagctgaggtgaggagctgagcac

SEQ ID NO: 466679 - DNA, 122 bp, Homo sapiens
tctggcgctggtcatggactcgggaagactgtcttcccttgtgtttagtcactgcagggacgcctgcctgattattcacccacatttcagaggtgttcgatcactgcggggacacctgtttt

SEQ ID NO: 466680 - DNA, 122 bp, Homo sapiens
ggccggtcagctcgtgcacgatgcagttatcagcctcggtgtcgggtgctgtgggcaccacgtgctgtgggcaagcagcgctgagccatgcacgggctggccgggcgccccccacgctggcg

SEQ ID NO: 466681 - DNA, 122 bp, Homo sapiens
ctggcccctgcccttcattcttcctcgggatccaggagagacccttccttgcaagggcctcgcctcccctcatgctccacgcgctgcgctggcgtcacagggagtctgtttcttgcaagtca

SEQ ID NO: 466682 - DNA, 122 bp, Homo sapiens
tccgctcttggaacgtcttttcaaagagtacagaaagcaaagctctttcctgctattgttcgcttcagatgagaaggagggagagcgcgtctaacaccagggaacaatagcgtccgcggtgg

SEQ ID NO: 466683 - DNA, 122 bp, Homo sapiens
ctccattccctgccctgggctgctctgcttcccaagggagatggctcatcccacctactccgcacaccagattgatggggacacatatcctcgagatggaatcccaggggtttacctacagc

SEQ ID NO: 466684 - DNA, 122 bp, Homo sapiens
cggctaaagaccctgaaacgtccatttttgggtgggagctgaggctggctcagccctgagcggtgctgagctgtgacgcccagaacatggggccacccccgtcccagaggggtcttgtgggt

SEQ ID NO: 466685 - DNA, 122 bp, Homo sapiens
gtttcttttatttatttagcaagaaattactctttattgatcaaatcaccaggaatctgccgcaaaagacttaacatcttaatgaccactgaggcctgggctctgaggcttgctctgcctct

SEQ ID NO: 466686 - DNA, 122 bp, Homo sapiens
ccaggagaccgaggtgctgtaccagctggctcacacgctgcccttcgcccgcggcgtcagcgcccacctggacaaggcctctatcatgcgcctcaccatcagctacctgcgcatgcaccgcc

SEQ ID NO: 466687 - DNA, 122 bp, Homo sapiens
ttcatctgcctaatatttgagggatgattgcacaggaagggaaactgttgaataaagtcacgaggctgaccataaagagtctacaagctcgaaaagtgctacacctcactccctttccagtg

SEQ ID NO: 466688 - DNA, 122 bp, Homo sapiens
aggaggtgatggctgtcggtgacgtcatagagacgggctctgaagggcgtgtccctgctccgttccgagggggcgcgactgtgtcttgcttgacctcgtgagggggcggagcctcaggggcg

SEQ ID NO: 466689 - DNA, 122 bp, Homo sapiens
agtctgaagaaaaatagattcatagaaaactctggcccctccccgggggcctgccctgctcgcctcaacatcttgtgctttttggcaagagagggctgaggagcctgctggtcgctctctgc

SEQ ID NO: 466690 - DNA, 122 bp, Homo sapiens
tttttcaacatacaaacaaacaaaactcttaattgttgtcccatgtagcagtttagctgccgtatatgtgatgtcactcctaaaggttcaagtaaatggcgtcacacatacgaccaccaagc

SEQ ID NO: 466691 - DNA, 122 bp, Homo sapiens
tagtcctattgagaagacatttcgtctctgagaaaaaaggatggaactatgggttctcttcgcaaagccaaaggatagtgtttaacaagccagctggcttatgctggttctcagctgtttaa

SEQ ID NO: 466692 - DNA, 122 bp, Homo sapiens
ctaaaacttgcaccggatgcagatacgagttcgccatcatcgaacctagcagacccaggacgcagactgggtgttcacagaaagttgaaggtcccacttgagaaaggactaagaatggtgag

SEQ ID NO: 466693 - DNA, 122 bp, Homo sapiens
ggactcgggcacttttttctgcaagggccgccacgaggacgagagccgtacagtgcttcacgtgctgggggacaggacctattgcaaggcccccgggcctacccatggtaggtgcaggcctg

SEQ ID NO: 466694 - DNA, 122 bp, Homo sapiens
gccttcggggaataacagagaagacagcagtgcatctcatccttcaggtctcaactgagacgtgaccttccccgataaggcctacctgagttcgttaaccagtgattttttaaaataacaat

SEQ ID NO: 466695 - DNA, 122 bp, Homo sapiens
gcggcttgccagcattttctcgggctgcagaggctggaggcttatggacgactccgtggtcgcctcccccggggttacgatatttggagaaggtttttcctccttgatcattttgggcaaca

SEQ ID NO: 466696 - DNA, 122 bp, Homo sapiens
cctggcatacaggtacaagagctgctccctgctggccacctgaatcaggccttgcaggtgcgcggcagccttctcaaacagctcggccaggcaactggtctcctcgatctcagggctatggg

SEQ ID NO: 466697 - DNA, 122 bp, Homo sapiens
gtacgtcgctgccctcggtttcctcgttatctgcccgacaatggggcgggcattcagggtcgtctgggacacccccacccctctcccatcagcacccctacccaccccagcctaccctcatt

SEQ ID NO: 466698 - DNA, 122 bp, Homo sapiens
ccacttaccggagttgtgaggagtgggctatattgaagccggccctgtgcatgtgaaccgcgctggagcggcgtaggacgcccagtgatcgctgggactcgctgccttaggcgtctgcacag

SEQ ID NO: 466699 - DNA, 122 bp, Homo sapiens
ccgccccggcgctaagactcaatttcacactacgcgcccaggccacgcccacctgtcatgcggccctggaaactgtgagtttggggattgttgtgtccactaaccggactcagaagggactt

SEQ ID NO: 466700 - DNA, 122 bp, Homo sapiens
agtatttcttaaactggtctataaaccatctgaatggtttagtggagtcttacacacacacgcctactcaatcagaaagtctgtggaaaggacctctgatctcttaagatttttcagaaatt

SEQ ID NO: 466701 - DNA, 122 bp, Homo sapiens
cgcgctaacacatctgtttcaggtccacgcaggagcgctgggacgcgtgtggcctctaaccgctctcttctctctcccctgcatggcctgccctgtgccaggaccccgctctggacacgaac

SEQ ID NO: 466702 - DNA, 122 bp, Homo sapiens
ttaggcccctttcccgtgagcagcagaagccagttctcctgccttaaccacgggaatcaccgccaggcagcgggcggttccctggagggcagggagggctggggccccggccgctccagagg

SEQ ID NO: 466703 - DNA, 122 bp, Homo sapiens
tacaggtctctcgggctgttctattaagtgcctgctcttaacaaattcccctttgagaatcgctcaccaaccggagaccggttccagtgcttttgttctttctctgcttctggaggcatgct

SEQ ID NO: 466704 - DNA, 122 bp, Homo sapiens
ccacatctgcatccaacctggactcttcccctgagctttcccctctacaaccaccttccccgggccaagggcacacaggcacctcgacaaaacagtgttctatgtttcttcctgcccaaacc

SEQ ID NO: 466705 - DNA, 122 bp, Homo sapiens
tctcatttatccattttcctccttccccttcagggtgtagagaaaggcctggaggattcacgaggggaaatgaagaataaggtgagttctcttgggtcagcgcctgactgctgaaaagaggg

SEQ ID NO: 466706 - DNA, 122 bp, Homo sapiens
attcaggaagccagaggtcagggaagggagtgtatacaggagaagtggccccgaagcctgcgttagtcaggtgattgatggctgaccctgggcaaaagggtgaagccagcaaaatgcagctt

SEQ ID NO: 466707 - DNA, 122 bp, Homo sapiens
cctccagcccggggagtcccaggcagtgctgtgctgctgtttgaggtggagctggtgtcccgggaggatgggctgcccacaggctacctgtttgtgtggcacaaggaccctcctgccaacct

SEQ ID NO: 466708 - DNA, 122 bp, Homo sapiens
caaaatcaagagtctcagattgttgccagatctaggtacacgtagaatgaagtccaggcacgtatcatcccatctcccaccacagatcccggcgcaagtattactgaagttcctttcctcat

SEQ ID NO: 466709 - DNA, 122 bp, Homo sapiens
agagactgcctgatgatttctgtcgtcaagccctaaagcctaacagataacagtggcaaacgacacgtgggttccagaataccagtgatgttcatgtgcatttctgagtgcgtagcctcact

SEQ ID NO: 466710 - DNA, 122 bp, Homo sapiens
aatcccttagtagatatctttccagacggttttccatatagattcccatatctggccaggcgcggtggctcacacctgtaatcctagcgcttggggaggctgaggcggatggaccacctgag

SEQ ID NO: 466711 - DNA, 122 bp, Homo sapiens
tgcctctgtccctctggtcagcgtgatggccagaggcctgggggccccccactgggtggccgtgggactgctgacctgggcgaccttggggcttctggtggctggactcgggggtcatgacg

SEQ ID NO: 466712 - DNA, 122 bp, Homo sapiens
ggccgcgctctttccacttttattcccccggcctccccggatcggcgccctggatgtgatcgacaccatgaagttgccccataatcctctctggcaacataggatgtaaaatttgatcagct

SEQ ID NO: 466713 - DNA, 122 bp, Homo sapiens
cccagatccgaggcgggaggcggcccgggggcgggaccagccggctccagcggcccgctccgctcccaccatgcccttataaggagcgcccggcgttagggctcgggaatccggtagcaatc

SEQ ID NO: 466714 - DNA, 122 bp, Homo sapiens
gggggaattgccctgatggtaccccagttggcgcagaagatccccaaaagtccctgtcaccgcagcggcggacagcggggctgcccaggcggctgggagggcagcttttccctcccgctggg

SEQ ID NO: 466715 - DNA, 122 bp, Homo sapiens
tggaggttgacacaggagtgctcaggggagcagcatcacaagagggcagatcgaaagcatcgtccttgctgaaaaagtgagcatgggcctggggtgtgccctggactggggagggagacggc

SEQ ID NO: 466716 - DNA, 122 bp, Homo sapiens
ctgtgatctgactctgcccgacgtgacctccacccctagtgcctgcgatctgactctgcccgacgtgacctccacccctagtgcctgcgatctgactctgcccgacatgacctccaccccta

SEQ ID NO: 466717 - DNA, 122 bp, Homo sapiens
agatgttgcgggtgccggcccgcatgcggctggcgtattctgagaggctggttagctgcccggagggcagcgccgaggactcgtagcgcagcagctttgctatgtcctcctagaagggacgg

SEQ ID NO: 466718 - DNA, 122 bp, Homo sapiens
atggagccaagaactcctgctttgctcactcctggggctgagcagcctttcaggagcacccggggagccagcagtgaagccctccctcactcagcattaactccaaatttatttcttgctct

SEQ ID NO: 466719 - DNA, 122 bp, Homo sapiens
gcagaatcagagtatttcaaaacacggatccctagacccccaaccccagggcttctattccgcatggtctgagcaggcagccggatgctgctggcctcccaactatccttgacaaccaccga

SEQ ID NO: 466720 - DNA, 122 bp, Homo sapiens
tatttctaaaaatgctttcaggagctgctggctgtcagtgtccctgtgctgtttgttttgcggtgttgatggcacatttatgacaagaaacgccagacccaacattgtcctgctgatggcag

SEQ ID NO: 466721 - DNA, 122 bp, Homo sapiens
gacttatttaacttcagttaatttacagagccacatgcgtctagcgcttaccctactggtcgcagtttttattccacgacccggcctcatttacggagctgcaattgttcagatctgacatg

SEQ ID NO: 466722 - DNA, 122 bp, Homo sapiens
ggtttagcttaagggatggaggcggggacccctgcgcaggcttgcggcgtgggaggcggccgcccgcgacctacgacgccgcgcgccgggaggctgagagttcggcgccgggagggtcccgg

SEQ ID NO: 466723 - DNA, 122 bp, Homo sapiens
actgcttccacctgcctgaagccacacacccgggtcccagcgggcggaaatggagctcagcgctccagcacaatggttgcacccagaggtagtactgaagtagatactgaattccctacaag

SEQ ID NO: 466724 - DNA, 122 bp, Homo sapiens
ggattcccaagtcttcacttactaggttttagggtcaggatccgactcggttggttcggccgccgccgccgaggctgctccgcacctccctggccgccgctctcaagcccgcctccaatgag

SEQ ID NO: 466725 - DNA, 122 bp, Homo sapiens
caccctggtgctccacccccaggagcccgcggtccctggtgtgcgtggtgccggacgtggcggccttctgcagcgactggcgctggctgcgcgctcccatcacaatccccatgagcctggtg

SEQ ID NO: 466726 - DNA, 122 bp, Homo sapiens
agttgggggcctggctgaggctgtgcgggcacagctgttacaggcagggggcaggggcctcgtggagcttgtgtagacggaggggcggcgggccgtgtagtgcaggctgcgaagactcaccg

SEQ ID NO: 466727 - DNA, 122 bp, Homo sapiens
gccattccatgacgtgcccaggccaacgtcgcaggacagttgtgaaaataacatgacgctcgtccaaggccacttcctgagggcaagtcctaatagccctgagacaccgagacggcatgttc

SEQ ID NO: 466728 - DNA, 122 bp, Homo sapiens
tcgacgccgggccgcccccactccgcttctccgggttttccgtgaagctccagccaacagcggccgtcaccggaaaaaacggggagcgaagtttattcagcgtatattccagcaaattgttg

SEQ ID NO: 466729 - DNA, 122 bp, Homo sapiens
ggttgcagtgagccgagattgtgccatcgcattccagcctgggcgacagagccagactcacgctcaaaaaacaaaaccaaccaactggccgggcgcggtggctcacgcctgtaatcccagca

SEQ ID NO: 466730 - DNA, 122 bp, Homo sapiens
acagggcggttgccaggcagagggtctcctcacttctcagacggggcggcctggcagagacgctcctcatatcccgacggggcgacagggcagaggcgctccccacatctcagatgatgggt

SEQ ID NO: 466731 - DNA, 122 bp, Homo sapiens
gaccggctagggtctcacaccctccagggaatgaatggctgcgacatggggcccgacggacgcctcctccgcgggtatcaccagcacgcgtacgacggcaaggattacatctccctgaacga

SEQ ID NO: 466732 - DNA, 122 bp, Homo sapiens
ggaggcccacgcgagctgtggcgccggcgcggcacccacgctccacgagccagtggcggccgccgacccctacggcggggtgtgcctgtgtctctgtcccccaagactcaggcttgtgttag

SEQ ID NO: 466733 - DNA, 122 bp, Homo sapiens
ccgcttctctttgccggtctggtgcactggcttcttcctacttgtgaccaaaacctgcgccgccgcggagcatgcccagtctttgcgtccgctagctcgccgctcctgggcgcgatcctgcg

SEQ ID NO: 466734 - DNA, 122 bp, Homo sapiens
gccatgcgggttgcgctcagggctggagggcgcagccgggaagggcaaggaggccccgcacgcctgggaggggcgatcctgaccagactgcacccagtctgtcttggagtgaaagccattta

SEQ ID NO: 466735 - DNA, 122 bp, Homo sapiens
tgtcacatttccacaagacacccatctaccacccactgccagcagggctgctggactccacgatgtggtcacgtttccaccagacacccatccaccacccaccgccggcagggctgctggac

SEQ ID NO: 466736 - DNA, 122 bp, Homo sapiens
cagggggtgggcaggctcccaggggcaggagctgtcaggcacgcggctcaggtccaagtccgagtgcagctcgtccaggccatcgaaggtgaagagggccacgtgggggaagcgcagcagga

SEQ ID NO: 466737 - DNA, 122 bp, Homo sapiens
accagacgggccggagtctgtggcccggttggaccaacgaaaactctagggcggatttgccgggatttctgggaaagtgacactcccggaagctaccgcctcttataagccacacatgggcg

SEQ ID NO: 466738 - DNA, 122 bp, Homo sapiens
tgtggtagagcttgtgcagtttctgaacatgcgagatcagtttttcaccaccagctcctgcgctggccgcatcctactccttgaccgggtgaggcccctttgcgcctgtccatcgcctgcct

SEQ ID NO: 466739 - DNA, 122 bp, Homo sapiens
ggctgagggcctcttcttgtctggggcggaggggaggccacctccagcaggaacgcagagcgggtttccagagcacaggtagcactgatcagctagaactgaaaagggcattgctgagtaga

SEQ ID NO: 466740 - DNA, 122 bp, Homo sapiens
gcttgtgaattaaactgccaaaggacagattaacaagagaaggaaaagtttgctcatatgcgtatgaggtctacaaaggaagtggtccattcaagggctaatgttaggagcttatatatcta

SEQ ID NO: 466741 - DNA, 122 bp, Homo sapiens
tgagaggtgacggaatgcaagtgggggcgacttcggcaaagggtgcgtcgccttgggcggcggttgtcagggtgaaggtgtgaaccgtctttcacagtctgttatgaaaaccgctcaaggtc

SEQ ID NO: 466742 - DNA, 122 bp, Homo sapiens
tgcagtgagaagtgattgcgccactgcactccaacctgggtgacagagcaaaccctgtctcgaataataagaagaagaagaaagaaactcataagaaaggctatgcaattgctaccgcgcta

SEQ ID NO: 466743 - DNA, 122 bp, Homo sapiens
catcttccgggagcgtggctaggggcggagcgactgccgcgcgatagtcagggagctgtgcgggtcctggttgcaagagaggtggggagaggggcctggcgggttttgagggactgggagga

SEQ ID NO: 466744 - DNA, 122 bp, Homo sapiens
aatctccgcccccagctggagcggctgtgcgggctgcgtagcggtgctgggtcgggccgacgtgccacccacccggagccggtgagtgcagccgcccgccctccggtagatctgcggcctgg

SEQ ID NO: 466745 - DNA, 122 bp, Homo sapiens
cggggaggtgtgctattgactgagcgcaccccgctagcgtgggcctggggagcgtgtgcgcgtgcgcggccacacacacacacacacacacacacacacacacacacacacaccggcgtact

SEQ ID NO: 466746 - DNA, 122 bp, Homo sapiens
cctcgagacccaagggttcaaatccagacgcaagcccagaactgcaagattccgaagccccggaagggcccctgccctccaggcctggtgcccgggggagatttccctgcaacacgccctcc

SEQ ID NO: 466747 - DNA, 122 bp, Homo sapiens
gcccgcgtggagtggaagctgcctcttggacacagggcggggaggccgcatgcagtctggcgcgctgggaggatgggagatccagaggggcagggctggaggggtaggaggaaaacctgaag

SEQ ID NO: 466748 - DNA, 122 bp, Homo sapiens
tgaattataaactaagagacactactgctgactctccccaggctaggattctagtttagccgcaggatgaccacaacagacaaacctcgcatgctatttgcccatgagtggtcggtcacacc

SEQ ID NO: 466749 - DNA, 122 bp, Homo sapiens
cgagaggattgccgtacgcatgtctgtacgtatgcatgtaactcacagccccttcctgcccgaacatgttggaggccttttggaagctgtgcagacaacagtaacttcagcctgaatcattt

SEQ ID NO: 466750 - DNA, 122 bp, Homo sapiens
ttttccttataaatctgcttttttcattgttccctttttgctgagtgcccacaaataaaacggaggatgaggctcctaagtttgttttaggcttatctgtatttccccctctcataaaagat

SEQ ID NO: 466751 - DNA, 122 bp, Homo sapiens
aaaccccacactccctcctgctgctggtcagcctccgtccttctctttcctaggtgggcacggctgcccatcaaaccaacagacaggaaaaaagcccccaggaccctggggaccccgtccag

SEQ ID NO: 466752 - DNA, 122 bp, Homo sapiens
gggcggactaccctgcaggacgcgggaggctgctcagactgtggtgatgtcaggaagggccgcacactttggcatggacgatgcactaaaaaaagagaaagggaattctaaatccctcttaa

SEQ ID NO: 466753 - DNA, 122 bp, Homo sapiens
tatttatttatttttttgagagggagtttttgcgctgttgcccaagctggagtgtggtggcgcccagccctgttagccccttacagagtagatcagctgccgcaggcatctgagttccccaa

SEQ ID NO: 466754 - DNA, 122 bp, Homo sapiens
gaagggctgccccaggtccccctccctggaccggtacactcaccccagctgccgagacggcggctgctaatgtccactgctgctaatgtccacagcaccacttctctggagattagccttcc

SEQ ID NO: 466755 - DNA, 122 bp, Homo sapiens
tgaggtcgccgcacagaacgaagaatttgggtttggggttcagcttgttgatggcctggacggcttgctcagttagacggatctcctgttcccattcgtcaccgccattgtcacagtcccca

SEQ ID NO: 466756 - DNA, 122 bp, Homo sapiens
cacttggcctcgattggaccccggggcccacagcaacgccagtgcccctccccctccagacggctggacgcgctctgctcttcccgggctgcccctgctcaggctttgtgctgagacaggcc

SEQ ID NO: 466757 - DNA, 122 bp, Homo sapiens
tgggctaggaaaaataattaccaatgaggagatacaagatagcagcagttagggagaggccgtccatgcagctgcctatttaaatcactgtccatgttaacagataagaactggaaatgtca

SEQ ID NO: 466758 - DNA, 122 bp, Homo sapiens
gcagcaagctctcctgaggctgagtacatgcagcaagaaggccggcacacagccccgcatcgtcttctgagcctgcctgctgcatcgcgcttgggtcaatccctggcccagctaagcatctg

SEQ ID NO: 466759 - DNA, 122 bp, Homo sapiens
ttgtggtacctgcaggcattttcaatgattgttgtaaataatttctgctatatccaatgtcgggcaaacattttgctgaggagcaattttgattgtgtatttgagagacaaaaaacattgca

SEQ ID NO: 466760 - DNA, 122 bp, Homo sapiens
acgtggagaaggccttctttcggccctccactgaacggattcgtagaactgcagctgccacgtggctgtaggcagtgatgatgagaaccaaaggtgtgcctgccatgatgaaacccacagca

SEQ ID NO: 466761 - DNA, 122 bp, Homo sapiens
atcccatctcatgcccaccccaggtactcagacaccgacaggagtttgtggtgaccccagcgtcaggtggcacgttaggcaccaagtgtggacttgccagtctcctgactccactgttagat

SEQ ID NO: 466762 - DNA, 122 bp, Homo sapiens
agatttgaaagggaaaagccttcagtaaaacatagagatggtgcttgtagtcaagggatacgaccttaggcagaaagaagggggaaaaaaagaccatgtcagtttctacttccaagaaaagc

SEQ ID NO: 466763 - DNA, 122 bp, Homo sapiens
ggcaggttgctgagctgagtttgatgttggtgtttaaggataaacaggtttcagataacacgtctgcacagagggagccataattcagggctcagacggaccacctgaagtctgattcagct

SEQ ID NO: 466764 - DNA, 122 bp, Homo sapiens
aagagagaatcgagcctaagtgctttctggaagagtcagaattgtggctcttcagacttccggaaacgtgcttaatgtccagagatgtgaggggcatacctacctaaaaaatgattgacagg

SEQ ID NO: 466765 - DNA, 122 bp, Homo sapiens
ctggctgctttctcaaccaatcagcaccgaactcatttgcatgggctgagaacaaatgttcgcgaactctagaaatgaatgacttaagtaagttccttagaatattatttttcctactgaaa

SEQ ID NO: 466766 - DNA, 122 bp, Homo sapiens
ctctggggtggaggattctgatgcgcatgcttctcccctccagatgggctgcgccatcatcgcgggcttcctgcactaccttttccttgcctgcttcttctggatgctggtggaggctgtga

SEQ ID NO: 466767 - DNA, 122 bp, Homo sapiens
aagaaaagacaaaattccagaattctgggggccttcactatgattctgtaaatatttccacgagttgcacaaagcatccaggtctgccacatccactcaacgctatcagagctggtgggatg

SEQ ID NO: 466768 - DNA, 122 bp, Homo sapiens
cccagcagcatcaggcccggcaggctgcctcttagcccaccaccctggcctgctgtcctgcgtctatccatgtggaatgctggacaataaagcgagtgctgcccaccctccagctgccgctg

SEQ ID NO: 466769 - DNA, 122 bp, Homo sapiens
tgctccctgagggctccaggtcagctttgctctaattttgttttcatttgttttcacaatcgtggagggagaactctctggaggcttgggaaggtggaccccagctgcagagaaacacaggc

SEQ ID NO: 466770 - DNA, 122 bp, Homo sapiens
tgtttccccttggtgcagccccaagctccctatcagagacacatcagccaaattagtttccgaggctcacaggctgctaacattgctgaacaagatttttcgaatttctatgtgttaggagt

SEQ ID NO: 466771 - DNA, 122 bp, Homo sapiens
ggctgaccctgagggccgggagcatggaccaggcgacctggcctggctgggaggggcccccggcacctgcccctcaccggagccggtcctcgtccagcgagtccacgatgtcactgcggtcg

SEQ ID NO: 466772 - DNA, 122 bp, Homo sapiens
gagcaaacagtaggcgtggccagagccgtgggaatcattacacggtgggcgtggccaacgcgggagggagttaaacagtaggcgtggccagaaccaagggacgcatagacggtgggcgtggc

SEQ ID NO: 466773 - DNA, 122 bp, Homo sapiens
gacgggctctgagggccaagttcttgtcacgaatttagtttgtttcagagcggcaggactcgtagctagagaacgaggacccacgacgcgtacgcgttacagtcctgtttccctagaaacgg

SEQ ID NO: 466774 - DNA, 122 bp, Homo sapiens
gattaaagggctcgaggacggcggacacaggggtgggcgccagggatgcggcgttaggggcgtcctctggaggcaggggcgccggcacaccctcttcagccatcaggatctggcagaagacg

SEQ ID NO: 466775 - DNA, 122 bp, Homo sapiens
tcccggcgccagcctaggccatttgttgtttcgggtttcggcctcattagtatgcgcctacgagggaaaatgagacttccccacaggttaataaacaacctgtccggcacaggttaacagga

SEQ ID NO: 466776 - DNA, 122 bp, Homo sapiens
cttagccctgtacttagtacctccccggccgcgtgagcctccctctcccaacccagcacccgtgtgaccttgtgatggatggtaaggaggtccagacttgagtttgatagaacctcggaacc

SEQ ID NO: 466777 - DNA, 122 bp, Homo sapiens
gaccttgatgagtctgtgtgtgagcaaatgcataggcaccatgatgcatctgcacatacacgtgtctgtgtgtgtccaggagggattgagggaaagaaaagaatcaggaaaatcatggggat

SEQ ID NO: 466778 - DNA, 122 bp, Homo sapiens
gtttcggtttgtctttatttcccatcttttcacccaggtcctcaactacatgctaatccccgccggaccatcgttcagttttattcacagaaacggtgccttcaagaaatcaaagcataaga

SEQ ID NO: 466779 - DNA, 122 bp, Homo sapiens
agaacccggagcaggtggcgagcgagggtaaggcaaccggggtggctccaggaggggcggcgacagagaggtctgacccttgaccctaacctctgacccccgcaatcgctccaggtctcccg

SEQ ID NO: 466780 - DNA, 122 bp, Homo sapiens
acagccgggcaaggggaggagacaggggccccgcgctcggcagcccccgagaggcagcggcgaagacagggtcagcagtagttcctgttcaccatcctccggggtcagtcaccgggaacgtg

SEQ ID NO: 466781 - DNA, 122 bp, Homo sapiens
ccttgtatagaggtgcaggcacaaatgtgagacagagataccatttaaagtgatgctgctcggctgggcacggtggctcacgcttgtaatcccagcactatgggaggccgatgcgggcggat

SEQ ID NO: 466782 - DNA, 122 bp, Homo sapiens
ccctgtctctccaggctatgatgggggcgtgaagccacagaagccaggtgagccctgccccggccccagctctttgtctccccctctttctctcacactcctcacctcacctcatctgtctc

SEQ ID NO: 466783 - DNA, 122 bp, Homo sapiens
cctctttctctctgcagtgtttcttggggctgttgtctttctgtctgtcactctgcgtctcggtctctctggagtccttctgcctctgtcgccctcccccgcctcgctgtgtctccgtgcgg

SEQ ID NO: 466784 - DNA, 122 bp, Homo sapiens
gatgctgcttcttttttctcaggtgacagaccctgccctctccatttcttggactctccccgctaggactccccaccactgggagtgccccccttaggtacttccaatcctaacgagcccgt

SEQ ID NO: 466785 - DNA, 122 bp, Homo sapiens
tttttccgtgattactgactggtttaaacacgaccccttgaacaatattgataaaacctccgagacccgcagcccctccttgcagcgtgtaggagctgccagcgtgcccagcagctggtgtt

SEQ ID NO: 466786 - DNA, 122 bp, Homo sapiens
aggcgcgcactcgggctcagagcggcggcgcgagcacctcagctccccagtttcccaggccgggcctaaacctgctctgccactgagcatgcccagtttaatcgccggccgggactcttccc

SEQ ID NO: 466787 - DNA, 122 bp, Homo sapiens
cgatcgcggacggggtgtgcgggcgcgggtcgtgtgcgtgtgcgtgcagggttccgaccacggggacacgagcttgtttgtggcagtgtcccacatcctgtggcccagccacgacgacccct

SEQ ID NO: 466788 - DNA, 122 bp, Homo sapiens
taggccaatccgaagtcccagagcacagacagactaggacaagagccaattgcgggggctcgaggccaggcaaagcctggccaattaagaagttcaggaaaggttatgggcggaagcgccga

SEQ ID NO: 466789 - DNA, 122 bp, Homo sapiens
ggtgaggcaaatgaggctgaggaaggtggggctggttgggagagactgccccaggtgtctcggcttcctggaagttatttagggtctcttctgaggagctgcgttcgggctcccctaagtca

SEQ ID NO: 466790 - DNA, 122 bp, Homo sapiens
ctgggaggtgtcccagcacgtcttcctgtggccagcctgggaggtgtcccagtgcgtctgcgtcacgggtgaggcgggctggcttcctcttgcctgtgtgccagcccggggctgtgtggccc

SEQ ID NO: 466791 - DNA, 122 bp, Homo sapiens
agatccggctctacacataggtttgagagcatactcagcagtttctcatcctggtccaggcgatatttatagagggaccagtgacatggagctggaagcctactactggtgactaagaaggg

SEQ ID NO: 466792 - DNA, 122 bp, Homo sapiens
ttgaattgcacccatgctgccttctccaggcctatttgaacccagaacctcgttgtgcctcgtttgaaatataatttcctcctaactagtctctgatctactatttcccctacattgctgcc

SEQ ID NO: 466793 - DNA, 122 bp, Homo sapiens
accaaccagccaaccatgttgcttttataagacagagctgagaaagcaaagcttggctgtcgtcttggctctggtaccacccacgagatgcgggcgattctcagctcagggcgtggaggcgt

SEQ ID NO: 466794 - DNA, 122 bp, Homo sapiens
gccgaccggcgctgtgcgctgtgcggggtcaagctctccgccttgatggtggccactgggcgggcgcgtggagcccggcgggctgggcagcagccgccgccgccgctgcgagtcaacgtggt

SEQ ID NO: 466795 - DNA, 122 bp, Homo sapiens
aatgctcaggatataaacatatccattagtcattacagaagtccacacgaggctgacacacgtagaataccattattagcaaaactaaactcagtacagttacaactgcctcaaacttgacc

SEQ ID NO: 466796 - DNA, 122 bp, Homo sapiens
tgacctcgctcccctggtagcagctgtaccagctcatactctgaagccactgcagagtcacgattgtttttcttaaggacacgactgatgacacttggagccttgtcctggcttgtcacctg

SEQ ID NO: 466797 - DNA, 122 bp, Homo sapiens
agccccagggagtggtttctatgacaaccctgggaatcgctgtgatggggagaagcggctcgctcctcgcgcatgcgcattgacttggccaagtcttgcgtagctcctggaagtcaggctga

SEQ ID NO: 466798 - DNA, 122 bp, Homo sapiens
gtgagccatggcatgaggccttgtggggtgtctcttttaaatgaaagcatactctgtttacgtatttgatatgaaggaatatccttcctttccacaaagacaaaaattatcctatttttctc

SEQ ID NO: 466799 - DNA, 122 bp, Homo sapiens
ggagggcggggcggtgggcgattggcggtgcactgcagctcgggctgctctgcagcctggcggagacgggaggaggagcggagggagaagtaggttgcgagctcagcacaggctccggcgct

SEQ ID NO: 466800 - DNA, 122 bp, Homo sapiens
tcagtgcagtttcctcgtgcgctcacagcttggggactggagctatccgtggcggctgcccggcctcctggaacactgtggcagccgccccgcacatgtcccgtgtacgtcacccagggcct

SEQ ID NO: 466801 - DNA, 122 bp, Homo sapiens
aggtgggcgaccatctttccttgcttcccactaccccgcccccgtgggctgcaccaaaggcgagtgtagaattaaacactgatactgaaatagggagtcaaggtgcagggagtggggagcgg

SEQ ID NO: 466802 - DNA, 122 bp, Homo sapiens
tttgaccagaaatggtgtcacatcatgcatgtatttcctgcaacttcctttttcccttgccgagtcctgcatgaacatcttttctgtcagctcatgtagatcttcccagccttttacatgat

SEQ ID NO: 466803 - DNA, 122 bp, Homo sapiens
gctgtggtgctggtgggggcgcaggaggccgagcagcagtggcagccctgtgggccagtgcgatgtcgtggaggcaacggcgcgctgcctccgccagggctcctcgaccatgggcagcatag

SEQ ID NO: 466804 - DNA, 122 bp, Homo sapiens
tgcagtcctgggacagttcccttgacttacacatgggccgacttcgccctccggcctgggcgagcattgttttgaagctctcaaggaggagctcagggcagggaaaggtgactcgggtccag

SEQ ID NO: 466805 - DNA, 122 bp, Homo sapiens
aaggaactggagatggtccttttaggggtttatgttctggattctagaaaacacacaaaccggacaaataaatgcatctttatttttgtgtctattttaacctcgtcaaggaagattccaac

SEQ ID NO: 466806 - DNA, 122 bp, Homo sapiens
agatggctctccaaggggacccttctgtccccacttactccacaagcctcctgatgagcacgcaacacagggctgcctcccccggtatatgggccccactccacagaggtcaggagggggct

SEQ ID NO: 466807 - DNA, 122 bp, Homo sapiens
tggtagcctgagggcagcccggtggcccccaggggctgaggccgcctcttctgctcaagtcggtggcctgccacacccggtcgggtgaagacatgtttcatccccagccccggctccgtccc

SEQ ID NO: 466808 - DNA, 122 bp, Homo sapiens
ggatatatgtatgaatagagaatatggagagttataaaaaaagggaggtaagaaagctcacggaaaagagtgtaaattataaagatcacacgggaagaggcttgccttttgagatcagaaac

SEQ ID NO: 466809 - DNA, 122 bp, Homo sapiens
gtgcacgtttgcacttcgaccttgagctccttttatagagtcaaacaggtctggaccctccgagcaaggatgattcatgtctcaaacagtaattatacagctcatttctctccctgatgatg

SEQ ID NO: 466810 - DNA, 122 bp, Homo sapiens
ggtttctttgttctgccagcacagtgttatgacgcactctgctaggtctgcacccaacatcgcctacagatgttatttattgaattttgaaaagcctcttgggaagccaagaggttgggcac

SEQ ID NO: 466811 - DNA, 122 bp, Homo sapiens
ctgcgtgggggccgcagccaagcggcgatttcacctccaagcctccgtggagggtctctgcgcccctggggtgctgtgtgcacagtggaatgttaatgcggccagtgctctgggccactcct

SEQ ID NO: 466812 - DNA, 122 bp, Homo sapiens
agtgcttccagtcctggagtagtcattctcatttgatttaacatctttctttgcactgcacgagcggcacccagttttaaccctgcagagcctagatgaagttctgtgattcataggccata

SEQ ID NO: 466813 - DNA, 122 bp, Homo sapiens
gagagaataaatttctcttgttttaagccaccaaggttttggtacttggtactttgttatcgtatcgtttaaaaacgaatacataggagaacctttgataatatgtatcctaatttgttctc

SEQ ID NO: 466814 - DNA, 122 bp, Homo sapiens
tggaactcagaagctgggggtcccacctcttgcagattctctgccttggttaagacctctcggcacccccactgctcactggcaaattactcagctcattgttgcaccttacctgctctttc

SEQ ID NO: 466815 - DNA, 122 bp, Homo sapiens
ttccaggtgccgtctgtcacctctttctttgactaggaaagggaactctctgaccccttgcgcttcctgagtgaggcaatgcctcgccgtgcttcggctcgcaaatggtgcgcgcacccact

SEQ ID NO: 466816 - DNA, 122 bp, Homo sapiens
gcggaagtctgggccacacctggtatggctcacctcaggatcaccaccggtcccgccagtcgccttcctgttggatttattttcaaagagggctggggccacccaggaagggtgggtgacct

SEQ ID NO: 466817 - DNA, 122 bp, Homo sapiens
ctcagaagtagctgggtgagaaagaccccaagcactgctgccctgggctgcttccacaggcgctgctggtgttgctggggcaaggccaggggtggcggctgctatgtccaaggctccctggc

SEQ ID NO: 466818 - DNA, 122 bp, Homo sapiens
ctcaggatcacgacgcatgtgcgtgcgtgcgtgtgcgggcgcgcatcatgtgtgactgggcgctcagttaatactcagccgcagatattaatccctttctatgcaaagagacgatggattgt

SEQ ID NO: 466819 - DNA, 122 bp, Homo sapiens
ttgaacagtaccgtggaccacaaaagagcaaggctgtcctaaggaaagactttgcctcttcgccggcctccctttgggccgtcagggtggcagcgccaccccgtggctgaatgtggtggtgt

SEQ ID NO: 466820 - DNA, 122 bp, Homo sapiens
acgtctccctcaggaagacaaggcctctctctctgaagaccatgtaggcactggggcaggcgcaggacagctgaggcaggctggaggctgacctctctctcttcttgacaggtggagggata

SEQ ID NO: 466821 - DNA, 122 bp, Homo sapiens
agcgtgtttgctgtgcttggtcatgagctgctgggaagttgtgactttcactttccctttcgaattcctcggtatatcttggggactggaggacctgtctggttattatacagacgcataac

SEQ ID NO: 466822 - DNA, 122 bp, Homo sapiens
cctggcggcgctggggaaatgagcaggtaggaggccgacagcgacctccgcgtctcggagcgaaccgtgagcctccccgtaacgagagagtttgactgtcagccaaggtcaccgggcccggc

SEQ ID NO: 466823 - DNA, 122 bp, Homo sapiens
ctgactccttccttgtttcgacgcctcacctcgctctctattcctcagctcctcggaatgcgtgggggcttcctgcaacatcagtctccgccgccctccactaaatcgcgaccctgggaagg

SEQ ID NO: 466824 - DNA, 122 bp, Homo sapiens
cgcgtgttgctctgtgtgtgtgcatgtccacgtgttgctctgtgtttgtgtgtgcatgtccgcgtgttgctctgtgtgtgtgcatgtccgcgtgttgctgtttgtgtgtgcatgtctgcgtg

SEQ ID NO: 466825 - DNA, 122 bp, Homo sapiens
ctatgctgggtgccaacatgtgcagggaactaagcgacctggtccctgactgctccaagtcgggtccaccccatttgggcttctgtcctgttggcttaaggacttgccctggtgtaggtctc

SEQ ID NO: 466826 - DNA, 122 bp, Homo sapiens
cggggagcctggagaaaggggcggagctcggcccgggccctgggctcagcgggtcccgcgcgctgctcttggacgccagggtgctcgctggcacctcgaagtgcttcttgcttcctcccttt

SEQ ID NO: 466827 - DNA, 122 bp, Homo sapiens
ctggcactcacttagccaaaaatctttctagaagggtggcaggccttcctgccccactcccggaacaggccggctgctttcagggccagaagagccagccctttggaggaggaggcttgtga

SEQ ID NO: 466828 - DNA, 122 bp, Homo sapiens
taaagctccgggaagaacgacatggctgctgcgggagcggcgggaccggagaaccaggaccggccggcacgaatcgcgactccccaggtcagctgacgctgcgtcctcagcgggctgtcaag

SEQ ID NO: 466829 - DNA, 122 bp, Homo sapiens
cgccgaagagatggctttgactgctgtgcagagcgagttgagcagctgggtcaactcgcccgtgccgcgggccttcctgccctcctccatgacgaagcgggtcagggtgttgacgtccgtgt

SEQ ID NO: 466830 - DNA, 122 bp, Homo sapiens
tccaaactttggaaaacgtcccacccgaattcccagcgagcagcaaggagaccagagcgtcgatggagccaccgttagttgcgggagggctgtccccaagaggaattcatcactgtcgtccg

SEQ ID NO: 466831 - DNA, 122 bp, Homo sapiens
gatctccaggtggaggaaaattctacctgttctccctttgctgatgcttccttcaagtttcgtcccagatgtggctcagaacttctgcccagagcttcgtgtcaggccaggtttcccagctc

SEQ ID NO: 466832 - DNA, 122 bp, Homo sapiens
caagcgcgccgaggagagggggcggcaaacttcgggccgagcggcgccggggcccgcgcgcggagtctccctccgggcaccacgggggccgccgtcctggcaccaacttgaggggctgtgcg

SEQ ID NO: 466833 - DNA, 122 bp, Homo sapiens
tcagccttcttccaactggccctgagaccacttttgcgactgacccccggaggtgcctggcggcttaaggccatggggttttactggggtcactgaccattgggtcaccctttcccagctct

SEQ ID NO: 466834 - DNA, 122 bp, Homo sapiens
gtacagacaatggcctcccgggaactccagggaccttatcaggagggggaagcatgaaggcggatctgcgcttcccccgcgcccccagtccacgccccaggtgcccagcgtggggcttcagt

SEQ ID NO: 466835 - DNA, 122 bp, Homo sapiens
gatgttgcagggcggcggcacaggggtgtggggcgccgtgttgggagtactgagcggccccggcgcgctgctgttgcggcgcagctgtcgactcggtcgcgcggagggaattgagcgacggt

SEQ ID NO: 466836 - DNA, 122 bp, Homo sapiens
ttctgtgccatgcgtccacattgttttaggtatgaggaaatccatctggatgctttcatacgcagaccgtggattggtgggaaccgcgctggcgacagaacggcaaaaccgttgtgtaggtg

SEQ ID NO: 466837 - DNA, 122 bp, Homo sapiens
gctgctcaccgtgtactgtgtgcggagggacctctccgaggtgaccttttccctccaggtcgacgccgacttcgagctgcacaacttccgcgcgctgtgcgagctcgagtctggcatccccg

SEQ ID NO: 466838 - DNA, 122 bp, Homo sapiens
gctgtggtgcccggtgtgtaatggggcctacacctgcttgcccacctgcttactccttgtcgcccccccacccacgtgtctttcagcccggccgcaccacctgggtctccgccatgaacggg

SEQ ID NO: 466839 - DNA, 122 bp, Homo sapiens
tggtggatttttccccctacagagccaactatctccaaggttcctttaatacctgaaattcgcccccttcgcggcgcacgagtctctgatcccgattggctgggcagggcaggcggcgggac

SEQ ID NO: 466840 - DNA, 122 bp, Homo sapiens
ctagaacattggggcccggggaatgccctccacttgagtgtcctccctgcagatatccgacggcatcaccctaggggacccttcctggccccccgtgctctgaactctcctcccagagctgc

SEQ ID NO: 466841 - DNA, 122 bp, Homo sapiens
gaggggggccggcggccggggggcctgccctccttctgtgggacaaaactaactccctggcgcacctccgctcccgagaagaggggcctggtggggacgcgggctcctcgcacctccagcgc

SEQ ID NO: 466842 - DNA, 122 bp, Homo sapiens
aaggcgctccttctacaaggtgggcgagcctggctcttgcaaaatctgcagctctcgcaacggaaggcgctttgcaatctgcaccgagaggtgtgcgcggaggggcggaggagggggcagga

SEQ ID NO: 466843 - DNA, 122 bp, Homo sapiens
tggaaggatagaacaggtgtcaagccctctgcaagggagccacccagagggggccagtcacggttcagggtgatcctcagaccctgccgccctcatcctgcaccgcgcctcaaggctctgtg

SEQ ID NO: 466844 - DNA, 122 bp, Homo sapiens
ttcctaaccacggtaatggagagaggcacccccttcccccactttcaagcaagggaggtacgtccttagcctggggttccgagcaggtatctcccagtaggtcccttcctggccagccgggc

SEQ ID NO: 466845 - DNA, 122 bp, Homo sapiens
gaagtcttcgtcatggcgagtgctgaccggggcaccgtgaatgtcttgagtactttctggcgtccttctgtgggtcacagcctaagtccaacagcaggccggagagctacaaaccacacccc

SEQ ID NO: 466846 - DNA, 122 bp, Homo sapiens
ggaacattaatctgtattttaacaaccctctccccaccatccctcactgcctccgccccacgtgattctaatgcaccctgaacgtagagagcctctgatttactgtaactgcccctctgcca

SEQ ID NO: 466847 - DNA, 122 bp, Homo sapiens
ccccagtacttgctggcagggattaagagcagataaaagtgtgctcacacactgtagacacggctaccatgccatccacagtgttgccatccacagtgttgccatcactcctgcccacagca

SEQ ID NO: 466848 - DNA, 122 bp, Homo sapiens
agcagcgtcgcgcggcccagttcccttttccggtcggcgtggtcttgcgagtggagtgtccgctgtgcccgggcctgcaccatgagcgtcccggccttcatcgacatcagtgaagaagatca

SEQ ID NO: 466849 - DNA, 122 bp, Homo sapiens
aaaacctagaatcaactgctgctgggccaacatggcttccagggcagggcagttgggtcccgcctgcaaagagaaagaagcaagcccctccttcctctcccatccttccggcctccctccag

SEQ ID NO: 466850 - DNA, 122 bp, Homo sapiens
catctcagatgagcgcctccagggctgggaacgagcacgccggagcaagggagctccaggcgtcactcagggcgagaggcagagaacaacgaggcgcgccgggccaggcccgcaagcccagg

SEQ ID NO: 466851 - DNA, 122 bp, Homo sapiens
gggaaagaggacggagaggagcgaggacggaggggggacgggaacgaagaggggcgaggacgttcagcatccattgcgacagcgacaaacaggacaccgccaggttcccggcggaggcagcg

SEQ ID NO: 466852 - DNA, 122 bp, Homo sapiens
gtgaatggggcctcactgacagggtcatgtaaaggtcattataagcagcaccacatatgccgtgtgcccggagctgttctgagagcttctcatggtttaaaaccacctatgaggggccgggc

SEQ ID NO: 466853 - DNA, 122 bp, Homo sapiens
aatttcgtttaaaattttcaaatagcgttaaatacaatttatcaggttttgaatcaaacccgtgtaacgagtcttggaagctgcagctcccgtcgccggcgcgggaggaccaggagcagctc

SEQ ID NO: 466854 - DNA, 122 bp, Homo sapiens
ttaggaaataaataatttagtttccatcacacctgtgtttgagaaaagaagcttatccatcggatttggaaaatgggtaaaaacaaggaaaagaaaatacttgacaaagagtattttgcagc

SEQ ID NO: 466855 - DNA, 122 bp, Homo sapiens
catttcagcctggtgtcccagctgtcttatttaggccaacagtaatcgctaaacttgcttcgtcatcaataaatttttttttatctgcctattcctggtaactggttgcagtatactattta

SEQ ID NO: 466856 - DNA, 122 bp, Homo sapiens
gccccctccctgcgtgcagggcgagcgagggggagcgccgggaccggagcctgccctgcccgcaggaccgccccatacgcggcggcagccccacaacagctcccgcccgcctcctctcctcc

SEQ ID NO: 466857 - DNA, 122 bp, Homo sapiens
caccgggccaagaacttcacagtgcaacatttgtctcctagaacagggggtggcagattgcgggcaacaggaagagctcattccccacagggatctggtggcacgggccaaaagtggagcga

SEQ ID NO: 466858 - DNA, 122 bp, Homo sapiens
gtgcgcgagcgcaggagggtcgtatggggagactttttctgtctttttttccctccactccggaaacaaaaggggcaaatgcgccgggcggctccagagaggctcagtttgaaatccaggaa

SEQ ID NO: 466859 - DNA, 122 bp, Homo sapiens
aggggtctgggagttccctttccgagtcaaagaaaggggtgacggacgcacctggaaaatcgggtcactcccacccgaatattgcacttctaggacgggcttaaaaaacggcgcaccacaag

SEQ ID NO: 466860 - DNA, 122 bp, Homo sapiens
actttgctttgtaattcctacaataaaaatctccactccactgtgctttataatcatagtcgaagttcacttctctgttttgacacggtaaataagcactggtaataaaataacatataaat

SEQ ID NO: 466861 - DNA, 122 bp, Homo sapiens
ctgagtcacccaggagtctctgcatcctcagccctcacccggcagagtggcagggaggggcggggcacctctttgtgccacagagcctgtgaacactgaactgggcccggattacctggaat

SEQ ID NO: 466862 - DNA, 122 bp, Homo sapiens
caaaggcgataggcagctttccttacctgagacttaggaggacgtttccatcagggtgtacgcgcagcatgatattctccatagttgtatcatggatgaaggatcttttagagtggacaaaa

SEQ ID NO: 466863 - DNA, 122 bp, Homo sapiens
atgaccgtcggcacactgctgttcctccagttccatggacaggttctgttttcactttttcgtatgcactactgtatttcctttctaaataaaattgatttgattgtatgcagtactaagga

SEQ ID NO: 466864 - DNA, 122 bp, Homo sapiens
agtgccggtggcttgcctctcagcgcctggatgggatcaggtggcagcgtccgctaggctcgctcctcccggctctgcccgccccccgccccccgccccccatcgcacaccggaggaaggcg

SEQ ID NO: 466865 - DNA, 122 bp, Homo sapiens
tgactccaagatgacacaatttcccagttttttttttaacggctaggggatgggggtatgcggaacagaacacagtggtctagctaaccgatttccgctagacgtccagctatctttcaaaa

SEQ ID NO: 466866 - DNA, 122 bp, Homo sapiens
ctgggcgggccgtccactcctcacctcctgcttgcccagtggccgagccggggaggtgggcgtgcagactctatcaggactgggagatgtgcctgcaaggtgctgctgctgcacaggtgctg

SEQ ID NO: 466867 - DNA, 122 bp, Homo sapiens
acgtatagtcctgtgattttctacataaaatgtgaaggcaaaaaataactgtagagagtacggtgcggccttgtaatattttaatttctaggcaaagcttgtatcctccggatacaagaaca

SEQ ID NO: 466868 - DNA, 122 bp, Homo sapiens
cgatactcgggttgtaaagggaggagacatcgcctcggcgcatccctggccgctgaacaacgcaacccctacgtccccgcacgggaatccggctgataatctcctcttgcctgagaatcggg

SEQ ID NO: 466869 - DNA, 122 bp, Homo sapiens
gagtctggtataggaagactatcagtttcaggcacatagaaggcagttcttgactaggagcggaatatagaacaccccataaaaaaatgagaggcttgaggaagcaagaacccagggaaaac

SEQ ID NO: 466870 - DNA, 122 bp, Homo sapiens
agctccctcccgtgcatcgcgttccccgagcttcggcgatggagcagcgccgggcagaggcggccactccgtaccctgcggtccccaaaacgcacactcgcgtccgcacacggggcctccga

SEQ ID NO: 466871 - DNA, 122 bp, Homo sapiens
tgttttgcttaagccttcatttttgagcttgctttcctccaagaacccctggcaggtttccggttgttgaaatgcacattcacttcttccaaaggatcatcctgtgttcttttgccccttgc

SEQ ID NO: 466872 - DNA, 122 bp, Homo sapiens
tggaaaactgaggcacaggaaggttagggaccggtcggggaatccgcaccaggggcgtagcggaggcgggattcgaacgcgggaccctctttcccccgggagctagaaattagtgaccaatt

SEQ ID NO: 466873 - DNA, 122 bp, Homo sapiens
tcacagcaataagacactcggggcggtgcattttctgtgaaatgactactgtccggggcccgaggtgctgcctcgcacaatgcatcaaaggaggttgtgtccgtggtcgtaacctcttcgcg

SEQ ID NO: 466874 - DNA, 122 bp, Homo sapiens
ggcaaagctgactaaggcgcctgaagtgacgtcattgcctgcatcacaacaggcgtcgtccggctgatagcttatcgcaggctctgaggggcgggacccaactgattgtcaaaggcggcaga

SEQ ID NO: 466875 - DNA, 122 bp, Homo sapiens
aggctagtggctgccacgctgggcggtgtgctcccagacagcgctgtctaaaccaacacccgcccgtccgtgagcagctctgtgggcctccacatgcccctcatctgcatgtcctctgtggc

SEQ ID NO: 466876 - DNA, 122 bp, Homo sapiens
cctagggccagtgagtcaggaaggtgttctgaatccgagcgggaagacggggtctggattcggccccaagtgttaatagtagggcttgagggttatactacattccattaatactgtttttg

SEQ ID NO: 466877 - DNA, 122 bp, Homo sapiens
tgcgtgtcactctgggcaacaggctggtcggccacgactgcgcaggcgagaggcacagagcgactggagactgtagtcccccggtttccctggagaccaggcggaagcggccggaagtagcg

SEQ ID NO: 466878 - DNA, 122 bp, Homo sapiens
agcatctgcattgtattacacatcataatctagtaacggtctaacgtatacgggaggatgcgcatagcttatacgtaaatactaggccatgttctatcagagacttgaacatccatggattt

SEQ ID NO: 466879 - DNA, 122 bp, Homo sapiens
gggctccgatcattaccctgaaaaccctagggcccttttggagaatgtcagcgaggccatcggtgtcggtgtatgggtggacggtgcatgtaccacagagccaaatgtgaaccctacacacg

SEQ ID NO: 466880 - DNA, 122 bp, Homo sapiens
gcttgcccctgtgccagcggtccccagggctgtgaggatgagcgctgccaaacccctacacgaaagtttggttctgttccagaaactatggaggaaaacacgcatagtaacatttaaagggc

SEQ ID NO: 466881 - DNA, 122 bp, Homo sapiens
ggcattttaaataatatttgacacataactggctgactccacagctccaaattagtcacacggtagtcttttgataatagccaacatgtgacaacagggattttttgcacgaggtggggagc

SEQ ID NO: 466882 - DNA, 122 bp, Homo sapiens
gtaagcttttcaactcccgtatctgttcacgtcccttgtacttaaaatgtggtacacatacgccatggaatactatgcagccataaaaaggaacacaatcatatccttcaaagggacatgga

SEQ ID NO: 466883 - DNA, 122 bp, Homo sapiens
tactgcccccctttagatctgcacctatgcccctcaagcccaccaaccttatctcatggccggtcaccaaacctgtatgctacctgcccagctggtcccaagaccaggctcacatctccagt

SEQ ID NO: 466884 - DNA, 122 bp, Homo sapiens
ggtgaacattccagagggaatatggtgtgaaaaaaatgcagagcaggaatggacaagaaacgttcagggaatggagacaaggcgatgttcattgtagattaaatctctcctttattatcaat

SEQ ID NO: 466885 - DNA, 122 bp, Homo sapiens
agagggtgttccaagtggaggggacagcttgagcaaaggcacagggtgtatttggactgtcgatagaccagtgtgagtagagcacaagctgggagcagtacagttgtagccattggaaatga

SEQ ID NO: 466886 - DNA, 122 bp, Homo sapiens
aattccattctattttcttcccacagggagtttccctgattgggaagggcctgtatttcccgcgagcgttaggagatgtgcaggtctattcattgggggagcccaattcccgggaggattta

SEQ ID NO: 466887 - DNA, 122 bp, Homo sapiens
agtttcattcgcttctcaaggttcatgagccaagtaaatggagatcctctctgccttatacgataaactctatattactggtgagggtgtccaggttctcggcgtcttgaacaaagaattaa

SEQ ID NO: 466888 - DNA, 122 bp, Homo sapiens
aatcggcggccagcagtgctttagacacaggttaagtgtctgcccctccctccagggttacgcaccaccccgatgcatactgggattgtagttctgaagctacctacccatgggctgagagc

SEQ ID NO: 466889 - DNA, 122 bp, Homo sapiens
gtcacgagcccagagctgggtgtggggagactcacttgggtcggtcccacctctgcctgacgacttggaccagccccccttcctctccctgggcctcaggtcagactagacgctctgagttc

SEQ ID NO: 466890 - DNA, 122 bp, Homo sapiens
ggcagggcttgtcaggccgcgtgaagtgagaaacggtttgcggtgtcctccgcggagtgccgggcccttccccggagagcagctctgcagggaagggaagtgggttttcctggaaaacgggg

SEQ ID NO: 466891 - DNA, 122 bp, Homo sapiens
cgaccccagcaagatcccggagcgcgcggtgcagctcatgcagcaggtggccagcaacggcgccaccctccccagcgccctgtcggcctccaagtccaacctggtcatttccgaccccattc

SEQ ID NO: 466892 - DNA, 122 bp, Homo sapiens
ccctaaacagacaaaagtgggcaaaggtttattagtggaagaggccttgggaaagtgacacggtgatattacagactgaagccaactttattttaaggtaggctgtgatactttacaacttc

SEQ ID NO: 466893 - DNA, 122 bp, Homo sapiens
gcaccaggcgggcgggcggtgccagcaaccaaccccattggctggctcgaggagggggctcgcgagacagcgccggcccccggcgcgagactcccagtccagtggccgcctggaaattgcgg

SEQ ID NO: 466894 - DNA, 122 bp, Homo sapiens
tacatagaaaggtgacaatatatatcagaggtgccccaggtgaggcaaggggaagacattcgtatctgtgggtactgctggatccctgtgacatcttaggtcgcttttctgaaggatttagg

SEQ ID NO: 466895 - DNA, 122 bp, Homo sapiens
gccagccaggcccaggcaaggcgctctgtgccacctcgcccttccagggcagttaggcttcgcagagcatgcttccggtcctctctcccctgctctccaccccagctccctgtcatgcattc

SEQ ID NO: 466896 - DNA, 122 bp, Homo sapiens
ggcggggtgtgtcgcttcccactggattttcaacgcagggaattggttacacgtccctggcggggtgtgtcgcttccagctggattttcaacgcagggaattggttacacgtccctggcggg

SEQ ID NO: 466897 - DNA, 122 bp, Homo sapiens
gggccctggagttgggacatttggagaacaaagccacttttcctcagccagtgcggttaccgtggccatactcgtcccagtgagtatgagtctaggactcaaaaagtgcttcaaggcctcct

SEQ ID NO: 466898 - DNA, 122 bp, Homo sapiens
actttgaatgccattgtttcacacctttaatactgtcttaaaggttctattgctcttcaacgatcttagtgtactttgaaatataaaagtaataattatcattggaacagttattctaaatc

SEQ ID NO: 466899 - DNA, 122 bp, Homo sapiens
gaaaagtggcctcctggaggtccctcaggacggcagggagcatgcctctgggcggccgagcgtccctgaccccgcagaagctgtggctgggaaccgcaaagccaggtatgtggttgtcgcac

SEQ ID NO: 466900 - DNA, 122 bp, Homo sapiens
tccaaaaaaggcaaacaggagtttataaagttgtccaagggtctctcccatctggtagatcgaggaagattgactacaggaaagttcaaaggtcagtcttggcagatctaaaaacagagtgg

SEQ ID NO: 466901 - DNA, 122 bp, Homo sapiens
acctcctgctcctcagctcggtttcctctcccacctgcacccggggtctttccagagcatcgcgcctccttcagcccagggagccgcctgctttcttaagctgctgtgggaactggcctgag

SEQ ID NO: 466902 - DNA, 122 bp, Homo sapiens
aacagaaaggaatacaaaaacttattcagatctcgatggagcttgagtcacacaggcatgcgcatcggtcagatgtacccttaagattttgcgcgttgcagctgggcccaggggctcatgcc

SEQ ID NO: 466903 - DNA, 122 bp, Homo sapiens
acagtgttatgtgaaggattcatgaattaatgtgtaaaacgtgttcagcacagtggctggcgtgttctcagtgccacgtggtggctgttacttatctccatgagattgcaaactccataaag

SEQ ID NO: 466904 - DNA, 122 bp, Homo sapiens
caggctgtttagacggggcgggaacccttagcctggccccgcgtctctatccccagcagccgtggagccttcctagccgcccaaggccagggaccctgcctggcttttcctccagggcagca

SEQ ID NO: 466905 - DNA, 122 bp, Homo sapiens
gaggggcaagggcggggagggccccggcgctcagagcaggcgccagggaggcaggctgggcggcccttcgtcctcgccttcgggtgtccatgcctcggcggcggcgtcccgctccgcagcca

SEQ ID NO: 466906 - DNA, 122 bp, Homo sapiens
cggcaggcaggtcgggaggctggcagctgccctcttcaacaaaatcactgatgctggagtcgcctgagtcatcactcagcaccaggatattgttggagaggacagccgtgcggcgtctgggg

SEQ ID NO: 466907 - DNA, 122 bp, Homo sapiens
aaaaaaaaagtaagtcaatagacatgggtttacaaaccctatctaacctttcccaatacacggttttgaatctgcttttggtacttactagctatgtgatctcggacaatttgcttatttct

SEQ ID NO: 466908 - DNA, 122 bp, Homo sapiens
gtagtgggaaacggtaaggtctttaccacaccctcactactgagatttggctaattatcccggataggtccctgatatctaagtattaaggggaaagtaagctatcatttactctgatgctg

SEQ ID NO: 466909 - DNA, 122 bp, Homo sapiens
ggtagacagctgcatgacagacaggcctggtcacagcaggttacgatgcactgtgtcatccggcacaccaggcaatttcctttttgagtcacttttcagctaagaatgaatcatgctccacc

SEQ ID NO: 466910 - DNA, 122 bp, Homo sapiens
caggttcctgctaagatcccacgggcgagggcttgctctggactcagtctgtcaagtccccgaagcttcctgcagctccaccttgtaaaaatgctgcctttgggaatcttcgaaatatgtac

SEQ ID NO: 466911 - DNA, 122 bp, Homo sapiens
gggggcctggggcggggtcggggaccggggccaggagcgggggagctcggctgggagctacggctgccccttcgcggggggcaaggggctgttcggaagaaggtggggggcctcggccggca

SEQ ID NO: 466912 - DNA, 122 bp, Homo sapiens
acgcaagtggaaaactatgcgctgtccgatcgcaaccctccaatctgtccctgtggccgccggcagctccgccttgggccacagacctgctgactcagggcttccctggcagccgagggggc

SEQ ID NO: 466913 - DNA, 122 bp, Homo sapiens
ggggcccccggggctcccacccgcgccccgcgcccccggcactcactggccttcccgggccgcggcctctgcagcagcctctgcgcggtccctacgtcctccgccttcaccgcctgcaccag

SEQ ID NO: 466914 - DNA, 122 bp, Homo sapiens
ctccgcctgccttaatgttcccctgagtccctgcgtcccttccaggccaccgtgcggacccgttttcgtttgttggggcctgttgcgagagacacaggcacccttctccaaagactgtggca

SEQ ID NO: 466915 - DNA, 122 bp, Homo sapiens
tgtagaaacataattttatgtgtgtgctctgtggaggaagaagattgtcagagggagggtcggggttacaaacataggaatgtggttccctaggtgaatgcatatgaaaaaggaccccaagc

SEQ ID NO: 466916 - DNA, 122 bp, Homo sapiens
gcccccactggcgcaggctgagccggctgcggctagggctgcgaagagttaacgagggaccgagccccagcgccgcgggctccccgcatgctccctccgccctcccgtccccaccctctcgt

SEQ ID NO: 466917 - DNA, 122 bp, Homo sapiens
ggacgggggtgtcagtacagcccacctgttggtcctttctgggacctcatgagaccaggccgggtgcctcctcacaagctggggcacgactggactcgccgaccggtgtgatgggcaggggg

SEQ ID NO: 466918 - DNA, 122 bp, Homo sapiens
tcagcctgacatcacgggacatttgggggattaggtcggacggtggcggcagcggcagcacgtgagaatgtgtgttatcgacggggaacacttttcccgtgctctcatgtggtcatctgtct

SEQ ID NO: 466919 - DNA, 122 bp, Homo sapiens
ccagctgcccggtgaggtcgggcatctcagcccctctctatgtggcagggatccaaggatcggcactggcccctcagcgccctggctccgcccctgcccacagcctcatctgtcagctgccc

SEQ ID NO: 466920 - DNA, 122 bp, Homo sapiens
ctgaggacagagagtggggggtgcccacccaccccccccgccccgggcctaccaagcccccgcccttcccaccccggggtcagccggccgtgtgcgtcccccgacagacactgtgaacggaa

SEQ ID NO: 466921 - DNA, 122 bp, Homo sapiens
gctcacttccggtgggcttcacatgctgtggggtgtcactgttaaggtaaaatgctgggacgctcgcgagggtgtgccgcctgagagtcctttaaaaactgccgtagggaggttctttggga

SEQ ID NO: 466922 - DNA, 122 bp, Homo sapiens
caggtttgtttcctgtaacttaaaatgtaacagtctttatggctgtttttgtagatcgtgcgcggctgccttttaattagtttcttgcaagtgcaggaaatgagatttattaatagggaaaa

SEQ ID NO: 466923 - DNA, 122 bp, Homo sapiens
ctccgcttccagctggaaagaccagcctccggcacgtctggactcggagagagcgctgcccgcctccctgcctccagacccgttgctggaggaagggctaggacaggcctgagtttgtggcg

SEQ ID NO: 466924 - DNA, 122 bp, Homo sapiens
tcagctccaattcaccctccaagattcaaccaaaacgttacacagggaaattccctaaggcgccagcactgcctctggagggcccggggctcccaggacttctccttggtagctcttattac

SEQ ID NO: 466925 - DNA, 122 bp, Homo sapiens
gcccctcaaccctcctggacccaactgtgcccccgcttagcttccagtccagaccttccccgcaaatgagtgtgtgctgtgagtgagaccccgcgtgtctgcccttgcagtccgccctgagg

SEQ ID NO: 466926 - DNA, 122 bp, Homo sapiens
aatgccacgggcttggtattgtcaccccgcctgaaataaaccagcaagaatagtacagcacgatgagtgacagggcttcacagccaacgtgcttctctgtagtagttttggccattagcaat

SEQ ID NO: 466927 - DNA, 122 bp, Homo sapiens
ctcgggatttggcataaggctggacgcaccaaggaaagattgtggccggccctctcacctcgccccatctggaactaatgatgcagaagttgtcactgaagaggttcaggagcctcaggaac

SEQ ID NO: 466928 - DNA, 122 bp, Homo sapiens
agattatagcaggtaaaaggctcctaaaagagctgtcaccttactggccaccttgattttcggatggacccaacagggctgtagatctgctcaactgtctttgaatccaatttagtggttcc

SEQ ID NO: 466929 - DNA, 122 bp, Homo sapiens
tcgggaccacgttttagttggcctagtggcctgccccactgagaagtgtgctgattgtgacgcaagcattacctgggatctctcccttgggcgtaaaactgaaggcagggggcatttgtgag

SEQ ID NO: 466930 - DNA, 122 bp, Homo sapiens
ccctgctgcgtgctctccaaccccgaccagaagggcaagatccggcggattgactgcctgcgccaggctgacaaggtgtggcggctggacctggtcatggtgattttgtttaaggggatccc

SEQ ID NO: 466931 - DNA, 122 bp, Homo sapiens
cagggcgggatgcactgtggttggggtctgggtcacgcccacggcaatgacaggccccctcgctcagcagggagggacgcacaggcccctgggcgcttcgccccgccgtttctggaagaccc

SEQ ID NO: 466932 - DNA, 122 bp, Homo sapiens
cccagcagtgacgtgagccgccccttacctctgaattggtacttggagtgacggggatgacgctgggtgggcaaatttaggagggaatacaaatcccttgctggcgtcgaggcaacgttttc

SEQ ID NO: 466933 - DNA, 122 bp, Homo sapiens
gtatcttgtctgtgctctagccccgagaaggtcttcttccctaatgttaccaaaatgcagcgacacctttaaagcgagagagagaaagacagaacaagtaagaggggacaggaaagacagag

SEQ ID NO: 466934 - DNA, 122 bp, Homo sapiens
gtgcaaagggggaggatgctcatggggaagtgctcccgaggcccacagctgaggctggctcgcttgcccccgcctaccccggcccctttggtgctcacgtggataacgagggtgagaggctc

SEQ ID NO: 466935 - DNA, 122 bp, Homo sapiens
cacagccgcttgaggcttggaggcagtggatttccgagcctgggaaccccggcgtctgtccggtgtccccgcagcctcacccgtgctggcccagcccccgcgagttcgggacccggggtttc

SEQ ID NO: 466936 - DNA, 122 bp, Homo sapiens
cggttaaatgaggtaactcatatttatgctaaacacaatgactgatgactacaatgatgacgatgatggcagccgggcgcagcgggtggggcttaaatggcaagtatagcaataccaggaat

SEQ ID NO: 466937 - DNA, 122 bp, Homo sapiens
gggctgtatctggagggagcaagaccatctgtgtgcttctgttccacaatttaatgaaaacgcaagtgttagattttttccctgctccctatttcagaactatccttaaagctctttagaaa

SEQ ID NO: 466938 - DNA, 122 bp, Homo sapiens
ctgctgcaggaaagagggctggagatattcattgctgctatatttataggatagacacctcgcaaaatttttagcctacacttagacaattttgcatgaacaaaaacttaaatgtgaatttc

SEQ ID NO: 466939 - DNA, 122 bp, Homo sapiens
accctcaaacaagttcacgttccgtaaactacttttccctctgttccagagcccccagggcgcccaggcaaggccgccacctctcccacctgggaggacgcctcgagcaccgactccacagc

SEQ ID NO: 466940 - DNA, 122 bp, Homo sapiens
gccgcctgcgaggcctcggctcgggccgctcccggaacctgcacttcaggggtcctggtccgccgcccccagcaggagcaaaacaagagcacgcgcacctgccggcccgcccgcccccttgg

SEQ ID NO: 466941 - DNA, 122 bp, Homo sapiens
gacgctggtggagcatgggcggggcagggcccagttgggggcggccctcgtagctgaaatcgggcagaccctgccggggtgcagcccgatggattcgctgatggattggatgtgggtgtaga

SEQ ID NO: 466942 - DNA, 122 bp, Homo sapiens
ctgtgttcatggattggaaaacaacatcgttttaacatagcaacactctctggctgggcgcgggggctcacgcctgtaatcccagcactttgggaggctgagatgggcagatctcctgaggt

SEQ ID NO: 466943 - DNA, 122 bp, Homo sapiens
cgtcctgcctctgactctccggcgggcacacacctctttcgatcctcccgtcctgccccccgactctcgggtgggcacgcacctctttccgtggaaggaggctcccccacgcaacacggcca

SEQ ID NO: 466944 - DNA, 122 bp, Homo sapiens
ccctccccttcccgcccctcaatcccagcgctcatctctgcggccacgcccgccccttcccgccacccaatcctagcgcttgtctctgcggccgggccccgcccccacccgccccccgccca

SEQ ID NO: 466945 - DNA, 122 bp, Homo sapiens
agccactgcacccggccgagattctttatcttctacatgaacctgctatcctgtataaaccggctttctcaggttagagtgatacagaattcttccaaactccagtaaatcttattcttctt

SEQ ID NO: 466946 - DNA, 122 bp, Homo sapiens
cagagctcaagtgatcctcccgacttggcctccttaagtactgcagttagaggtatgagccgccgagacccaccgtacttgtgtttttctattcaaatattattgaggagcttttatggcct

SEQ ID NO: 466947 - DNA, 122 bp, Homo sapiens
gccctggaaagcagggtttgggtggatctccacattaccttgggctgggcttgggagctccggatctcaccaagggactcctgggggccttgattactgcagaggtcagcaggcccagagac

SEQ ID NO: 466948 - DNA, 122 bp, Homo sapiens
aacagcgcccttcctgctctcccccaccggccacagagcgtgagtcccgaccaccgcgtccgccggcgcccctcagtgggcctttgtcccaagaagctgccaagccaggtggggactgctct

SEQ ID NO: 466949 - DNA, 122 bp, Homo sapiens
aatgaggtggttaccagttgcctgtgaagcagctggaccattactgcagttctgagggtgcgtcacaaatcaggtcatagctctgggtagagtccacccacttcacccagtataacgccctc

SEQ ID NO: 466950 - DNA, 122 bp, Homo sapiens
atgcagaactggaccccggatgagtgcattccggagttctacaccgatccctctatcttccgctccatccaccccgacatgcctgacctggatgtgccagcctggtgcagctccagccagga

SEQ ID NO: 466951 - DNA, 122 bp, Homo sapiens
cttcacatgagccctggcttgggctcaggcatggaggtgctgccggacaggtcctctggacgcaggtgagataaccaggtttatctgggtggagctctgagtctcttaggtgattgtttgtt

SEQ ID NO: 466952 - DNA, 122 bp, Homo sapiens
attgggaggcgagggaggtggccaggggagccgggaccgtgcgtgtggccaggccggtagcgcccagtaagctccacccgcgggcgctccccgtgcttccccgcccctgaacctgctccctc

SEQ ID NO: 466953 - DNA, 122 bp, Homo sapiens
catgcacacaacgccctggagtactcgccctgcagcgtatcgatgagcacatgcacacgacgccctggagaactcaccctgcagtgtatccatgagcacatgcacacaacgcactggagtac

SEQ ID NO: 466954 - DNA, 122 bp, Homo sapiens
gccgtggaggggcgggtccgggggcggggcgagggacggggcgggacgggctctgggtcccgcgcggccgctgaggggctgggagccgcggcggggcggtgcgagggcgggccggggccggt

SEQ ID NO: 466955 - DNA, 122 bp, Homo sapiens
tctcttcctgcaatggggtcaacggcttggagactacaggtggccgctgcaggcacaacgcgcccaacaagcgccatggggatccgttgcttgagggtgcggctgcaagagccaggctgcga

SEQ ID NO: 466956 - DNA, 122 bp, Homo sapiens
gaaaaggtcatgaaagaagacagtaacttacaggagagaacgagagattcaaaataaatacgttaagggggtagagacatgtctcattagttttcttgcgtggtgagaaatatgtaaagaat

SEQ ID NO: 466957 - DNA, 122 bp, Homo sapiens
ccaccgaccatgcctggcatacagtaagtactcaataaatgttaagggtttcccccctcccgcctctggcattggcagggagagtgtcaaagtgggagggactgaggaaaacacatcagagt

SEQ ID NO: 466958 - DNA, 122 bp, Homo sapiens
gcatgttacctccacaatcatcttgacggtaggcaacgtcgtcgcgatgttctgtgggtgcgggggacggacggttattggcacacagcctgcgtacaggcaaccataaaacgctgctatca

SEQ ID NO: 466959 - DNA, 122 bp, Homo sapiens
ccaaatatgagactcatttctttttatcttctgaggtggcgcttcggcacatgctgcaaacgtaaaaaggtacattccttgaatttactggctaaattgtagaaaggaattaggatttaaat

SEQ ID NO: 466960 - DNA, 122 bp, Homo sapiens
cttccctagcacagcccagcctccgggtgctagaagaccccactgtctccaacacttcagcgccccgcctcctctgcagttccacctgctgctagtcgcgcccctcacgcgttacgataggc

SEQ ID NO: 466961 - DNA, 122 bp, Homo sapiens
aaccgtggagtggggtgaaccggctggagcgctgcgaggaggagcagatgctcccgttcccgagtcccccgtccgcccgtgtttctggagccattttctatatgacacccatttgtttagct

SEQ ID NO: 466962 - DNA, 122 bp, Homo sapiens
acggaaaccacagggccagcgtcttgagccctcgatcagacgcctcccgcccaccgcggccgcttctccacgcttttgcccagatctctgcaccgcgtggcccggtcttgcctccctgagga

SEQ ID NO: 466963 - DNA, 122 bp, Homo sapiens
agaagaagcccgaagtgaaacagaaaagctgaaaactccccggctgggctctccacttctcggttcttgctcacgagttccaaacagttaaagtgacgttggcaaggccgagggccaccgag

SEQ ID NO: 466964 - DNA, 122 bp, Homo sapiens
tccgggtccccccggccactgtcctgaagccgccggaggctgaggacgcatgggagtgagcgtctcttccctgtccggccacaccctctgtgactggtgactcatggcatggccctgggcag

SEQ ID NO: 466965 - DNA, 122 bp, Homo sapiens
gcaggttgggcctggccgttggcagggaagtgggcagaggggaggcccggccaggtcctccggcaactcccgcgtgttctgcttctccggctgcccacctgcaggtcccagctcttgctcct

SEQ ID NO: 466966 - DNA, 122 bp, Homo sapiens
aaatcgcagtcggagcccagcacggggtcttggaagaaaagaccccaccttctatcctcacgagtacgcattaggagtgagcaccgctcagtagatgacacagaggcacagctgaggaccca

SEQ ID NO: 466967 - DNA, 122 bp, Homo sapiens
ttattggcattgctccattttctgtatataaatatatctttaatgtggtattttcaattgcgtgatagtttgtagtttcaaccactcttggtgactgtcatcctgtttcttccatattctct

SEQ ID NO: 466968 - DNA, 122 bp, Homo sapiens
gtggcatgcacctgtagtctcagctactcgggaggctgtggcagaagacttgcttgaatccgggaagcagaggttgcagtgagctgaaatcacaccattgcactccagcctgagcgacagag

SEQ ID NO: 466969 - DNA, 122 bp, Homo sapiens
cctggtagcagcgtgtgatgcaggcagccacctcaggtcgcggcgggtccagcatgcctacgcagcccacgaaggtcaggtccgtctgtagggagggggcagattcaagcggggcctgagcc

SEQ ID NO: 466970 - DNA, 122 bp, Homo sapiens
tagcagttagcgtcaacctccgcactctatgacctttccaaaatgatggtgaacgtaatacgcaccacactctgaccttctcaagatggcgctgagctgacaaactcgcgtcgcaaactcac

SEQ ID NO: 466971 - DNA, 122 bp, Homo sapiens
ccaaattctaccatttacttgagcatttacccaagcttattaaatagatctcaccatcatcgaagaaaaaatggcaagtaaatctcactcacttttctctgaagctggttcagactgcagaa

SEQ ID NO: 466972 - DNA, 122 bp, Homo sapiens
ccacttaagctggtgcacagcaaagacgcaacaagtaagctgtttggatgactattatcccgtaagttcctcctggattcctccttaagtcctaccatgattgctaagttatttgacttatc

SEQ ID NO: 466973 - DNA, 122 bp, Homo sapiens
gcgctcgctcctacggtaagagcggcatcacctccgcgctcgggtgggcagtgtggaggtcgtcgagttctgacagaatttcgaggatggatcgggacgagggaggagagcggtcgtcggga

SEQ ID NO: 466974 - DNA, 122 bp, Homo sapiens
agccgaatctgcgagggtgaagctgcaactccaacgccggaaagcgcggctaccgaaaagcgcatgcgccacggggtggcacgaagctagagtaagctgaggaggtgggcggaaaccatggc

SEQ ID NO: 466975 - DNA, 122 bp, Homo sapiens
ctgttcatgtccacccgagtagccacggacacttggctttgaagagggctttttccttgtcgaaaacaggaagggctctggtgggagaaaggcggcaggtgtacttcggtttatatgcacac

SEQ ID NO: 466976 - DNA, 122 bp, Homo sapiens
cacagggagtggttttcctgataaagcctggagtgatgcctccacctcaattctggggcacggcgggttcctccagccccccaccagggcagcagctggcaaacccctgcctgctcagactg

SEQ ID NO: 466977 - DNA, 122 bp, Homo sapiens
caaaaaacagctccgatgctggctcctccaggaagccttccctgactacacatacacacacgcacgcacactacccggggtcaggagcctcttaagtgagccggttagatccagtgcgcccc

SEQ ID NO: 466978 - DNA, 122 bp, Homo sapiens
cgcgaggcgcccccaggagagcccggccctcgcaagggctacagctgcccggagtgcgcccgtgtctttgccagccctctgcggctgcagagccaccgcgtgtcgcactcggacctcaagcc

SEQ ID NO: 466979 - DNA, 122 bp, Homo sapiens
tgtcacttcaaagaggacggggagcgcggcagaggggctcccgggccggcgggctggggccgccggacctgctcaccacgccccccaccctgggcgagtttgcataaataaacaaatccaag

SEQ ID NO: 466980 - DNA, 122 bp, Homo sapiens
cctcagcccatgctaaagttgaatctgcaaagtaccaaaaatgccccctgaatgggtaaacgctgggagctccccggaggcccagcgctggggctgcctggctgtttttttggcacagctga

SEQ ID NO: 466981 - DNA, 122 bp, Homo sapiens
caagaaaagcacagcaaagaaggcagctattctttcataatttagatgggcaatgatgcacgagttgcctgagagaaaaatggatgatcaagaagaagttcaacaggtcaaagtcccctgaa

SEQ ID NO: 466982 - DNA, 122 bp, Homo sapiens
aagaggcgccgggcatgctctcggatgaacttggcagatttagacactcagccctaattgcggcgagctcgggccgctgcacccgcgcggggcagatgtgcctcggcgctgcccggcccaat

SEQ ID NO: 466983 - DNA, 122 bp, Homo sapiens
tttactaaaataggtaaccaggcgtctcacagtcgccgtcctgtcaagagcgctaatgaacgttctcattaacacgcaggagtaccgggagccctgaaccgcccgctgctcggcggatccca

SEQ ID NO: 466984 - DNA, 122 bp, Homo sapiens
atcaccctgcacatcagagttaccctgggcagggcccactgagacctgggaggggccactcgggacctggagggctgggggctgcccgggcgttaggggtaaagctccctacccaactgcgc

SEQ ID NO: 466985 - DNA, 122 bp, Homo sapiens
aggttgtcaccatgagcaaattaacaaagaatgcacgtgtagctcgcagcatacagcaggcgctcagtgagtggcaggttattattccgttttgttttgttttgtgcgccaggttattattc

SEQ ID NO: 466986 - DNA, 122 bp, Homo sapiens
attcatatgcaaatacctttcccagcatcctccccattctgcgcctcctcatcatcccaacggcccacccactatgctcacctagcaagcggtgagaacatttccttccgcatgggaggaac

SEQ ID NO: 466987 - DNA, 122 bp, Homo sapiens
gttgggtaaacaagaaaagactggcatcgcagtcatcgagtgagcagcgaggcttggacacgggtctggcggcgcagccaatggcgggggagggccgaggaggccgagggggggccaatagg

SEQ ID NO: 466988 - DNA, 122 bp, Homo sapiens
gctttttgtgggaaaaaaaacacaaaaactaaaacaaaaacaaaaactaaagagtttcctcgatgtttaattttagttgtttcatagtatgtggacacatatttaagtcttcaatccatttt

SEQ ID NO: 466989 - DNA, 122 bp, Homo sapiens
gtaatgagcatcttcatccctttccttcaagattagaagaatatcattcttatggtattccgaaacatatgactcaaacacttgaccaaccagtgtaacttgatcgctattcatcttgaatc

SEQ ID NO: 466990 - DNA, 122 bp, Homo sapiens
acgcgcagcgcggggcagggccgagccgggccgggcgagaagatggtccaggtgcctggacgtggggtaagaaaagcccaaaccggcatcacaggggtcaagggactctttagggaagccca

SEQ ID NO: 466991 - DNA, 122 bp, Homo sapiens
ctgaagacgcaaaaagaataagggtctccagtgacattatggagccatcgtgtcagcccacgcgggacctgcccctctccggactcctgtccgggaactcctttccttatcctctcaggttg

SEQ ID NO: 466992 - DNA, 122 bp, Homo sapiens
cgcagcttggcggttgcatgctgtgccagaggtggccctggtgtcagagctgctttgcagcgagactctgagtggatgggcctgccggatcctttgaacctctacctactatattgtgtcat

SEQ ID NO: 466993 - DNA, 122 bp, Homo sapiens
ctagagggcacacaaggagtgagtgcaggctctgcgcaggtggccgggaagccacggatgcgtccccccactcccggcgagggggtggtctgcctcctgacgggaagcaggggccggagccc

SEQ ID NO: 466994 - DNA, 122 bp, Homo sapiens
actacactgtctctaagagaatatatattgcattatatcctttagggaagaaggtacacacgactcagaggttttttaaaatgttaagagtggtttatttttgactgctggggtctctgatg

SEQ ID NO: 466995 - DNA, 122 bp, Homo sapiens
cagctgcgtgtcggaggcgtctactggggccagctgctcatgcgcggttgtccccgaaggcgcggccccggagtgcagctgcggggacccgctgctcgaccccggcctgccggagcccgagg

SEQ ID NO: 466996 - DNA, 122 bp, Homo sapiens
acagccagctcctgccgtgtgtgagccttccctaccagactccggccatgatggggcagacgccgcggtcataaactgtaaacttggttcccctgaggttagatctaagtttgccagtatac

SEQ ID NO: 466997 - DNA, 122 bp, Homo sapiens
aactctgtgctgtaggagtttgtagcctgggttcatggatgctacacatcttcaaacacacgctcccacagggtttacagataggctcttcgaacttggtaaaactgtatgtaacatgcagt

SEQ ID NO: 466998 - DNA, 122 bp, Homo sapiens
ggcaccaagcacaggtgacagcttaagtctaatgagctttcaagttcaacaagccctgaacgttctctgccagatggaagccccacgggcaagaaggacagggtccctggacagcgaggttg

SEQ ID NO: 466999 - DNA, 122 bp, Homo sapiens
ccgtcgcgccgactctccggagggaaacaaaaaggcagaaaaaagagaccggcgcctggacgactttcaggggagagctggaagaaagactgtcaacagctgagtgcgggcgccggcgccgt

SEQ ID NO: 467000 - DNA, 122 bp, Homo sapiens
ccttgccatttctattgtagggtggagtgggaataatctggggtaagaattgaagcatgacggagtagcaagtctcactgaaatagattctgtattcccaaatatgagaccctagccccaga

SEQ ID NO: 467001 - DNA, 122 bp, Homo sapiens
ctggagtttattactgctagggcacacagagcaatccttaaaaatgcgtaagtcagatcacgttcctcctctgcccacaccctcccctggctagtatctcactccaagtaaaagctaagctc

SEQ ID NO: 467002 - DNA, 122 bp, Homo sapiens
gagatgatttatgggaagtcatgtgttgccgctcatgggtgcgtccctgagggtgggggccggggtggatggatgagtttggatagtgtaagctgcactaccacggcaggctcacactcagc

SEQ ID NO: 467003 - DNA, 122 bp, Homo sapiens
cgtcacccctcgcccagtcacattgcgttcccacacacccgtcacgttgatgtccctgcccgggctccgtcggttattctgtaagagagacaggatgggaatacagtgacacatagcacagc

SEQ ID NO: 467004 - DNA, 122 bp, Homo sapiens
atagatgcatagggtgtggatctaaccgggtacaggtgatgcggaaacggatctagacagcgatgtggaaatggatctagacagcgatgtggatgtgatctagataatgtggctctggacgt

SEQ ID NO: 467005 - DNA, 122 bp, Homo sapiens
gcgcagcaaccacaaaaagcaagtacgtgttccctgcacatgtgagggatggttctctcgcgttaacacggacagggggctgtgaatatgattgtgatccacctagtacttcatagtgattt

SEQ ID NO: 467006 - DNA, 122 bp, Homo sapiens
attctgcttaagtgcacatttctccccaggagagtcgggtcactgcactgggaggaagcccgcctgccaagggctgtgtctggaacctgttcatcgcgctccactcagcacagtgagatcgc

SEQ ID NO: 467007 - DNA, 122 bp, Homo sapiens
acttgcccctgcggctccaactcacctttgcgaagcatgttggccacggggccgccgctccgaggtcggcctaggcgcactccctcccggggtccagattcaaatccctgggcgccagctgc

SEQ ID NO: 467008 - DNA, 122 bp, Homo sapiens
cccgcgcgctaccccctgggaagtgtagtccgaagttgcgggccggggccaagcaggaggcgcgtgggactacacttcccggcatgccacgcggccgccggcgccctcggcccgtccgcccc

SEQ ID NO: 467009 - DNA, 122 bp, Homo sapiens
cactcgtcgttttggagcaggcaggcctgtgttttacatgcgagagtgaggagtgaggcccggaggtcaggtccttgtcctgggtctcccgcccacgagcctcagatctggctctcatgcat

SEQ ID NO: 467010 - DNA, 122 bp, Homo sapiens
tcaagccagctgcactcagaagataggaatacctcaaggctcctcgcatttttcctattccgttttcactgagactgataacattttgctgagggcacagtgacagaggaatgtggccgtca

SEQ ID NO: 467011 - DNA, 122 bp, Homo sapiens
gctctgtcgctgcggggctccaggctggtgcttgtgctgagaatgactgcgggaggggctcgcgtgcccagcactgcaccgcgaggcgaccaaccgctgacatgtggggcgattgggtggac

SEQ ID NO: 467012 - DNA, 122 bp, Homo sapiens
ttgaggaggaaacgcctgtgttagggagagagtgggtgcggtgtagaggatgctcttggccggctggagcaagacctggctcccaccagagggacgtgtgtgtgcctgcagacggcccggga

SEQ ID NO: 467013 - DNA, 122 bp, Homo sapiens
aaagctctggtgggagtcctgggtcctgatagcagaaggaaaatgtgctttctctccattcgttgagtccaataaagactcaaaaggtttaaaagaggtggaatctaagctaacttttccac

SEQ ID NO: 467014 - DNA, 122 bp, Homo sapiens
ggctacaagtagtctaacctcattggaccggaggactccgaagaacgggtaaaggaaggccggcaccagggctgcagctcccagaggcactgcctccgacacccagtacacagcagtcacga

SEQ ID NO: 467015 - DNA, 122 bp, Homo sapiens
ccagggtttctgggtggcctggtcctgcctatggagtgactgagcctagggacctagtcccgcctccagccctccccttgccgcctgcccaggcccgtctgctcacccctggatatacttct

SEQ ID NO: 467016 - DNA, 122 bp, Homo sapiens
ggatggcgaaggggcaggctcgctgagcgctcactagcggctcctcgcagcctctaggatcgccttagtgctgattgcaacgcgcggtccctccagccaggacccaccggcccttgagggtc

SEQ ID NO: 467017 - DNA, 122 bp, Homo sapiens
gcaggttttcaggtgtgcttggcttttcctcagctttgtgtgggaggtcccagaagcccacggacgcacgcctggacgtcactgtcagtctcggcatcgccccatacggcctcagagacaca

SEQ ID NO: 467018 - DNA, 122 bp, Homo sapiens
gcccacaatagccaacccaaaacagttctggcaaaattaaaagacgcaggaaaatgccagcgaccgtttattttctcctagggtagatgggggagaaagcagctcctttttctgggctgaat

SEQ ID NO: 467019 - DNA, 122 bp, Homo sapiens
gcgctgcaacagagtctcggtccggactggagccccggcgagggccgaccccgttccccacgcagctttccctcgcgaggtttcgcactttccagcgcggttccttcccgcagccctcccgg

SEQ ID NO: 467020 - DNA, 122 bp, Homo sapiens
gttgaagatttggaagtatctttgctcggtttattgtcccagcgaagtcatcaacacgggcgtgtttgcttcctgcggctgctttcacacagcagcaccgacatggcgccaacagcagagct

SEQ ID NO: 467021 - DNA, 122 bp, Homo sapiens
accagcccccacccaccccctgggtccgtggaaaaattttcctctacaaaaccggttcctcgtgccaaaagaaggtggtggttgctgccctcgggtgctcttgaaaatggccctgcattgtg

SEQ ID NO: 467022 - DNA, 122 bp, Homo sapiens
gtcaaactccagtcaccctcagcaggcccgggcccctggcctccgcactggctaggaacacgctctctgggctccaggcccagttcctcgcgccccctggctccgtccctcaccgggacgag

SEQ ID NO: 467023 - DNA, 122 bp, Homo sapiens
gcggggttggtttccaccctggaggttgctgacaccctgtgccctcggctgacttccagccggtggcacagacgcctccagggggcagcactcaagcgcatcttaggaatgacaggtgagaa

SEQ ID NO: 467024 - DNA, 122 bp, Homo sapiens
acctgacttcacacacatacctgccttcagcgcctgccccagagctcccaagcccctgcccgccacatctgcagtgccgcacacagacaggagaccagcattacagcaacaaccgagtgaga

SEQ ID NO: 467025 - DNA, 122 bp, Homo sapiens
gggcaaggaccacagtgaggcaggcaaggtggccagggcacaaaatgtgaggctctgtgtcgggagcggagcgctcgcacagccctgagaatgagtgcttcattaaagtttgcttcctaggc

SEQ ID NO: 467026 - DNA, 122 bp, Homo sapiens
tcgccccatgcgactgggtgcagcattgccccatgcgactgggtgcagcatcgttccatgcgactgggtgcagcatcgttccatgcgactgggtgcagcatcgccccatgcgactgggtgca

SEQ ID NO: 467027 - DNA, 122 bp, Homo sapiens
accccatgcgcctaaccacaaggttccctccctccaggaaggccgttgtcttccctgggacgacttgccagctctgaggcatgacagtacgggcccccagaagggtgaccaggaggccctcc

SEQ ID NO: 467028 - DNA, 122 bp, Homo sapiens
ttctaatgctttgtatttgtagttcttagtcgttttcaaggccctttgcattctttgcatcgtgctctcttaccacgatgcatagtgagaccccacctctacaatttttttttttttttttt

SEQ ID NO: 467029 - DNA, 122 bp, Homo sapiens
gaattggaggagagggatcgaagggagagcaagaagatcgcggatgaggatgccctgcggcgcattcggcaggcagaggagcagatagaacacctgcagcgcaagctgggtgccaccaagca

SEQ ID NO: 467030 - DNA, 122 bp, Homo sapiens
cccgaccccgtctcctccggcgaaccccggcccagcgccgcgccctcgacccccagcccccggcccccgaccccaggccgccggcgagcccaccacacctccgacactcaccgccaccaccc

SEQ ID NO: 467031 - DNA, 122 bp, Homo sapiens
ctctacctggacaaccactactgcacggcctctgccactgccgctgccgcccgctgcccccgcgccctcagcatccactacaagtccatggatatcgtcctcactgtcaccatggtgcatgg

SEQ ID NO: 467032 - DNA, 122 bp, Homo sapiens
ggagacaaaggtaagcagcagtgggcaggtctcactttctggctcagggtcgccccccagcgggtccacaaaccccaccctgatgcgctgatgctgacaccactgcccacctcccatgacca

SEQ ID NO: 467033 - DNA, 122 bp, Homo sapiens
ggaggtgggcagtgtcgtgtggggaggggtgttgctgcagggccgctttcctgtgacctccgggccttcccctgaccgtccctcactgctggcttctgcccccaggctggcgcccatgcggc

SEQ ID NO: 467034 - DNA, 122 bp, Homo sapiens
aaagagcctcccagaggctgccatcataccccaccatctgacctcaaataataccagcagcgctcctctcttcagccctgacgatggccaggtgctgggctgagcttctgtgtgtcgcatca

SEQ ID NO: 467035 - DNA, 122 bp, Homo sapiens
ctgtcagctggctctgtcctcagggcttctgctgtctgcatcgctatctcctccagggcacggctgcctgactccttctcatcatccacatctcagcccaaatgtcacatccatagcaaggc

SEQ ID NO: 467036 - DNA, 122 bp, Homo sapiens
gatgggtgggacggtctaggaggtggggcttgggtaggttggcctggcctagagctggcccgtcagcccaagtgggcgtccagctgaatctaacacctctgtttttcctgcacctgacccct

SEQ ID NO: 467037 - DNA, 122 bp, Homo sapiens
gcgggggcttagtctaggcccggcagggttttctggaagaccagagggccaccaggtcaccgaggtgggaagtgaagagaggttcgacgctgcctcaggcctgggcctggccggtgggagac

SEQ ID NO: 467038 - DNA, 122 bp, Homo sapiens
accgacagacagtagccagttgatgctaattaaggctctgggggcatcatcctgaaagcacgcttagggacgggggttgtggggtggacgccccccccccccccgtgccaggacctgttggc

SEQ ID NO: 467039 - DNA, 122 bp, Homo sapiens
tggcgtccaggccgagctggcccagggtggagctgttgaggctgcgcagccaggccctgacggtggggtggctgcgggccttctgaaggtctcccacgttgtggcccagcagcgcagtcacg

SEQ ID NO: 467040 - DNA, 122 bp, Homo sapiens
ggggcggggcgccgcccccggaagtacttccccttaaaggctggggcctgccggaaatggcgcagcggcagggaggggctcttcacccagtccggcagttgaagctcggcgctcgggttacc

SEQ ID NO: 467041 - DNA, 122 bp, Homo sapiens
tggatcacgtccgtcaccagggctgtggcacacaggccgaacacgtggacacctgcagggcggaaggctcggccaggcggggagctggggacccgggacagccccaccccctgcatgtggag

SEQ ID NO: 467042 - DNA, 122 bp, Homo sapiens
ataatgcttttgggtcctgtgaaataatggtgtttcttaaagcagcctatattggtcaagcgttgctggcaggggcacttagtaattaaagcaattacacaaagtaaacattaggttcctta

SEQ ID NO: 467043 - DNA, 122 bp, Homo sapiens
tttaccagcaggggtccagcgttaattagaacccagcctgggagcagctggaactctcggcgctcctggctcagtcctcgccgccctgaacccgtctgcaccgcagggcccgagtgggaggc

SEQ ID NO: 467044 - DNA, 122 bp, Homo sapiens
aaaccagagctagacgataaagtagtaaaaccagattttattcaggactattgcaataagcgaaaagagacctcaatatacagtcaggctcattctaaaaacagcatgagaagttgagactt

SEQ ID NO: 467045 - DNA, 122 bp, Homo sapiens
aggagcctgtagggcttgggtgtgggtgctggccttggtatcaggtgcctaacccagcaccgggccactggggaaggtggcctcagccacacggggccacgttggcccctctgccagcctcg

SEQ ID NO: 467046 - DNA, 122 bp, Homo sapiens
ggtcccgagctaggtcccaggactccagcccccggaccttcttccggacttgctgcaggacggaagccgctgaggaccaaacttcccggcggtccaaggccccgccccttcccagactggaa

SEQ ID NO: 467047 - DNA, 122 bp, Homo sapiens
tttcttggtagttccctgcgtccccaagtaagcctgcgcagactgggaagtctgggaagtcggagaaggaaggcgctaccaagccggcaacgcacgacctttgctttgcggcgcggccgtaa

SEQ ID NO: 467048 - DNA, 122 bp, Homo sapiens
tcaggctggaagatttgagagctggattaagtacttgttggctcacgcccgtgactgttccgctgtttagctcttgttttttgtgtggacactcctaggatagaaagtttggtatgttgcta

SEQ ID NO: 467049 - DNA, 122 bp, Homo sapiens
tactggcctctagagggcgcaatcactcgaggctccgccccaagcgaggcggggcggaagcgtgctgtgcacaggcgcaagatgggtcttgggcagcccagagcttccgattggctcttctg

SEQ ID NO: 467050 - DNA, 122 bp, Homo sapiens
gtaaagcgcagcgccctctattggccatcgggacctcgcctggaggtgccgtcaggattccgtcccccagccactcccaggcactcgagagtaagcgcattagcccgagaaagcgttctgtg

SEQ ID NO: 467051 - DNA, 122 bp, Homo sapiens
cctcgccagtgagggaagttacagatcagctgcgcccggaattaaacgacccacagacaacggcgcaaacagagggactgacctgctttagtgagctcccaaaacctgctctcgcataagca

SEQ ID NO: 467052 - DNA, 122 bp, Homo sapiens
gctccgccctgggcctggccctggtctttgtcctcacaaacctatttccccagataccttcgggacggcccggacacgccttacattaggctcatgatgtgaaactttgaattccttcactt

SEQ ID NO: 467053 - DNA, 122 bp, Homo sapiens
tgccaggcggggcgcagggcacagggtctccatggagcagcctgaggggtgcccactgagcgggtccaggtcccagcggcgggatgccctggctgcccgaagagcccacgggtgaggggaac

SEQ ID NO: 467054 - DNA, 122 bp, Homo sapiens
tcccctaccccgcagggcagctgcgtgttttgtgttcctgtctctgcggccaggtgggggcgagtgcgctgaggtcaaccctcggccacccgggcgctgggtggtgctgccactgtccccat

SEQ ID NO: 467055 - DNA, 122 bp, Homo sapiens
tggacgaactataacctaccttaatagcagacaggactgaaaacctaattcaggagtctgcgcctgtaatagtggccgagtcttgaccaatcccagcagccatacgtcaaccatgcgtagac

SEQ ID NO: 467056 - DNA, 122 bp, Homo sapiens
ttgaactcttgggctcaagcgattctcccactttggcctcccaagcattgggattacaggcgtgagccatggttcccggcccctgctagggtttttaaaaatgtaaattaggggtcgggagc

SEQ ID NO: 467057 - DNA, 122 bp, Homo sapiens
tcctagtgctattgcaaaattactcccttgcactcttgtgagactcaaccatgccattcacgctgtctctccttatcactatcttaggccaatctccagggtacaagcctgtaagccactgt

SEQ ID NO: 467058 - DNA, 122 bp, Homo sapiens
cacctctgctcgcacctctcctgtgggttctgtctctggggctggctgtctcactctgtccgtctctgcccctaactctgtctaccacatattcctgtcccacttctctccttcaagtctct

SEQ ID NO: 467059 - DNA, 122 bp, Homo sapiens
ctttagtttgtgcatttttttttccatcaactattattattactatttgagacggagtctcgctgtgtcgcccaggctggagcgtggtgcgatctcggctcactgcaacctccacctccccg

SEQ ID NO: 467060 - DNA, 122 bp, Homo sapiens
cgccgccgcgtcgagtgcaagggcttctgggagccgagcctcggggtctcggagaaggggcgcaggtggccgccatcttggattgcgaactgggtcgctacgcttcacgccaggggcggagt

SEQ ID NO: 467061 - DNA, 122 bp, Homo sapiens
tctgcacagctggcccctgggtcactggggttctttgctctgttctagtcctcctggggccggggccacagcctctcccttgcccggtggcctccagcaaacctgtgcggttcagtgtgtct

SEQ ID NO: 467062 - DNA, 122 bp, Homo sapiens
agcccaagggggaagcagtggagagagagggacccgcccggaatcacacagcaacggcctcgtcctggacaccgagctcgctgaccctggggcagcaggccatgtccgcagtgggcagaggg

SEQ ID NO: 467063 - DNA, 122 bp, Homo sapiens
aaattaattaattaattaattaaaagatgggtcaaagtgtctgggtacaatggtgcacaccggtagtcctagcactttaggaggccaagacagctctcttgaggccagctatttgagaccag

SEQ ID NO: 467064 - DNA, 122 bp, Homo sapiens
ccggcccgaacgcctgcgtctcagtagctgggagccacgggcccacgcccgcccaccggccgcagtgatgttctagccacagaggagccaagacctcaggtttccagagacttgggatttgc

SEQ ID NO: 467065 - DNA, 122 bp, Homo sapiens
aataggattggccatggcgaatccctcagcagggcacgcaccgcacaaagggccgaggagcgagggtagctcgaggtcaggattacagagactcaggagcaagagaggaaggcttaaagagc

SEQ ID NO: 467066 - DNA, 122 bp, Homo sapiens
gtctccgcggggccgccatcagctgtgctgctccaggtaggcggacaggagcagccccggcggcaggaaatccaggtgccgattactgaccttcatctgccgcttcccctccaggtcagcac

SEQ ID NO: 467067 - DNA, 122 bp, Homo sapiens
gccggcgacctaaaccctgatgtgacctctaccctgccctaacccctgccagccggaatccgggagccgattctcatttcatcacggggttctgatggttccctttaacgatctgtattctg

SEQ ID NO: 467068 - DNA, 122 bp, Homo sapiens
acggggtggtggcccggcagaggggttcctcacttcccaggaggggcggcggggcagaggcgcccctcacctcccggacggggcggctggccgggcggggggctgaccccccaacctccctc

SEQ ID NO: 467069 - DNA, 122 bp, Homo sapiens
ttcaaactgttgcactttgggtttacaggatccttcctccatgtcccttttttgggggtgcggaaggatttgggagaatgggaaacactctcactatatatttattacattaattatcttct

SEQ ID NO: 467070 - DNA, 122 bp, Homo sapiens
tgatgtgttcccataaaacgccacttaaaagatttaaactttagatggtccaaaaggaaccgttgatgtcaggacaaccataaaccaaattttatctcatggggaaatatgagattggatga

SEQ ID NO: 467071 - DNA, 122 bp, Homo sapiens
gtcttcatggggtgggggtgtcccagctccccttctcacagaggccagggtcttgaggatcgcgaaatggggccagccggggcaaagacgaagtttcaagggccagcggcagccaggctcct

SEQ ID NO: 467072 - DNA, 122 bp, Homo sapiens
ggtcccaggacacgccactgtcccgccttccccattgcccgccccactggccagtccccacgcccacacacccaaggctgccccatctggcgctgattatcctgctgctgccgccaccgctg

SEQ ID NO: 467073 - DNA, 122 bp, Homo sapiens
gctacccgcccaaatctcagggcgtagttcggcgcgaggttggcggcagcggcgcggagacgctggttggccccagaggaaaggacgctcactgggcgcatcgttacctgtgacgggtcctc

SEQ ID NO: 467074 - DNA, 122 bp, Homo sapiens
ccgtggttttgagtacaaacagccccgccgccctcaaagtggggaagcagcagatcattccgaagagtctggcctcggaaattaaaataagtaaatccaacaatcaaaatgtggagccccac

SEQ ID NO: 467075 - DNA, 122 bp, Homo sapiens
gtaaagtctttgcagcctcgctacggggcggagtcttgcctgtcagcaggggcagagtagcgatcgtcgccaaagcgcgcggttttatttctctccgctttggacggggcaaactagctttt

SEQ ID NO: 467076 - DNA, 122 bp, Homo sapiens
gccggctcgctgccaattcggcctctactctggaatgccggcggggacaggtggtgcggacgggcgctcctcgctccggttgccgcggcggctcgaactcccggactgcacacgcaggcagt

SEQ ID NO: 467077 - DNA, 122 bp, Homo sapiens
atttaatatttaagttctgtttgtggagccaaaatgtggtgatcagcatgagatctgtttcgtgtttgcataactgtttgtgagttgctagggaatatactctcagttttttccatcttgcc

SEQ ID NO: 467078 - DNA, 122 bp, Homo sapiens
ggactagggatgcttctccaagctctaagaggaccatagtctgctctcttctctggcacccgcttgcttctacgctccttcacctctgcagccaggtcggtagacccacgcccaccttccct

SEQ ID NO: 467079 - DNA, 122 bp, Homo sapiens
tgctggaaaactggaatttactactcaggttggattccgcctgagtcccctgtctctggccggccagggcagatgtcagcaggagaagcccgaagaggctcatttggctgactggggtgaga

SEQ ID NO: 467080 - DNA, 122 bp, Homo sapiens
caggatggggcccttgtgccgggcagcagcggctgccgagaccaggcggagtggagggtgcgcgcagcgagggggtggccgccgcccggctctccaagtgcgagcgaggagctcggggtctt

SEQ ID NO: 467081 - DNA, 122 bp, Homo sapiens
aaggagggagggtgaccatgtgggaggctgtgagaaggaaggagatgcctccgctaccctcgtcaggaagggcagacacaggaaggaaccagttttatttgctgctacatcctggctctcag

SEQ ID NO: 467082 - DNA, 122 bp, Homo sapiens
ccaccggtcgcccccccgcttccccgcacgcgctctccagccgcggccgcccgcctgccgcggtcaccccggcctctgcctctgtcccccagtgatcggatcaaggcgctgagcgaggccct

SEQ ID NO: 467083 - DNA, 122 bp, Homo sapiens
ctgctctgccttcgaggtgtaccccgggtctgtgctgagcagaacgcagctccgccctcgcggtgcccccggcccgcccgcccgggtctgtgctgaggaaaacactgctccgccttcgctgt

SEQ ID NO: 467084 - DNA, 122 bp, Homo sapiens
gtgactcagagggaagggagctgcgcctcccagggaaaccaggttgcgggtcactccagccgcacccccacccctccctccgccgcgggcccagcctcacttgagctgctgggtaataagct

SEQ ID NO: 467085 - DNA, 122 bp, Homo sapiens
gctgacgtttctccctctcaaagttcaggttgaattgccctaacgtgctgattactgcaccgaggatgccggtatctggcttgtaataattatagatttcctctgcgatttgatcccattgg

SEQ ID NO: 467086 - DNA, 122 bp, Homo sapiens
ctcaactcgaggtgcgagtccccatctcgcagcgccctcgcgactgtcatctgctgccttcgctaccatttttgtttggagaagcactgagaggagaaaggggcagtctactcctcactaaa

SEQ ID NO: 467087 - DNA, 122 bp, Homo sapiens
agggccgggcgggggctgcggtggctgaggcggcaccggagtctgggcggaagccggacccgacctgcgagcggcgccgtcgcccgggagtagcttgtagaaaccctcgcgcgtgcggaatt

SEQ ID NO: 467088 - DNA, 122 bp, Homo sapiens
cccctggcctcaccccccaacagggcggcggccaacttgtgaacaggagcgtttcggccccggctcctgaagcctgccgtggaagccctgcgccatgcccggccctcgttcctcagggcctc

SEQ ID NO: 467089 - DNA, 122 bp, Homo sapiens
tttcaagagatcgctggctctgcagcccagctcaaaagcccatcctccaggccacttccccggctgagccagaccccttgctcccatgactctctgagagccaggcccagggtcgggttccc

SEQ ID NO: 467090 - DNA, 122 bp, Homo sapiens
agtaattacccccaaatttagtaaaaccataattaaccatcagttatttaaaaatttcaccgcatagttcatttctgaaaaaagtatatgaattataaaatcaatatcacagcaataaagtt

SEQ ID NO: 467091 - DNA, 122 bp, Homo sapiens
ctgaaatataagctccgaacgttgcattttacatccagtcttgcgggtgcctgtgctccacgccctcccaaagccaggcccctgagctgagcggcttcagaaagtagagcccctctgtcttt

SEQ ID NO: 467092 - DNA, 122 bp, Homo sapiens
tcaagcacctctttccgtccttaccccaattccttggacactaaagagtctatattcaggcgactctttcaagtgtatgtttcagggtgcccaagcagacacttgttttctcgcgggggatg

SEQ ID NO: 467093 - DNA, 122 bp, Homo sapiens
ccggcgggagtcagggtggcggccactgacaacgaaagtgaaacaaagctggtcgccgggcgcgcacccccgccggccccgcgcggacctcccaggccggacgcccccgccgcgtccagccc

SEQ ID NO: 467094 - DNA, 122 bp, Homo sapiens
agtatgtgtgtcggggttttggggtgagggtgacgatactcagaggattcggggcggggacggggcttagcgagtgtcctgccactacccctggtaggcccccttagatccaacccttggcg

SEQ ID NO: 467095 - DNA, 122 bp, Homo sapiens
gctcatttcatagaaatgttcggtttcatctggtagcaaacctcaaggggctgctggccacgtgccctatccaatctctggggtagaacctggtcagaaaacacattcttcttccccagatg

SEQ ID NO: 467096 - DNA, 122 bp, Homo sapiens
tgctgcactgagccaggcgggagctggaagaagacgcagcacactgggttgggcaaggtgcggggctagggctaacagcagtcttactgaaggtttcctggaaaccacgcacatgctgttgc

SEQ ID NO: 467097 - DNA, 122 bp, Homo sapiens
gagtgagcttcctgccaccaccgctgtgggacccgaaaatgttctctgtgtgatgtgtaacggcttttcctttgtcttttatgtttcatggcagaactacttaggagcgcggcatcgccagt

SEQ ID NO: 467098 - DNA, 122 bp, Homo sapiens
acggagctggcacgagcgcagcaggagagacggacggcagcctccggcgggcgaaggacccggcttcagatgcccgctggctggcaatcaggcagagcctggccaaccgtgccaggccccct

SEQ ID NO: 467099 - DNA, 122 bp, Homo sapiens
tcccatggctggcatttatggaaacaaccgctggtatgtgaaaaacaggtccgtcaccgccgtcacgacggccagagattatacccgccgagatgcccgcggcccagggcctacaatttcct

SEQ ID NO: 467100 - DNA, 122 bp, Homo sapiens
ccatgtggtatgagagcacctgtggcaggctcccagagaccacggacctcttcctctaggcgggctctgctcttctttaaggagtcccacagggcctggcccgcccctgacctcgcaaccct

SEQ ID NO: 467101 - DNA, 122 bp, Homo sapiens
gagcagtctcccaccaagtgccctgaggtcacaggacattggctgtccctgaatggaccacgacactctgcccggacaccgggccccactccccaccctgagcgcggaccccaacgtggagg

SEQ ID NO: 467102 - DNA, 122 bp, Homo sapiens
gaacggacatgagctctatgcctcttggggtttctctgcctgcccagtcaccctggataacgtgcttgccctagattgtctcctaggccaagtcctctccaagttcttggccctttgtccta

SEQ ID NO: 467103 - DNA, 122 bp, Homo sapiens
caatagctgttaatgaagcttggtgcaggcttaactctctcccctgcctctcctttcgcgcgtctctgtcgggattcgagtggaacctcatggtccagggttcttatccaggataatgcttc

SEQ ID NO: 467104 - DNA, 122 bp, Homo sapiens
tcggttctcactctaagtggggaaaaaaagaaagaaaacgtggttgcgggtttgggggtgcgtcttgagccctggtcttaaaccttggcaaagcttgggactcagcactattcttgatcctt

SEQ ID NO: 467105 - DNA, 122 bp, Homo sapiens
gaaacccaggcctccggaagagggaccggaagcccagaagccccgagacctccggaagcccggaggcctccggatacagctgtgtttgccgggtgacttgcttcgttctcctgcccttcctc

SEQ ID NO: 467106 - DNA, 122 bp, Homo sapiens
taataattaaatcagggctgccattgacctcaactaacgccaggggcttctgactgcagccgagctctggtggaaaggccgatgccggcctgagagtgggaaacgtggggccgggagccggg

SEQ ID NO: 467107 - DNA, 122 bp, Homo sapiens
caggggttgggaggagaagcaaagggggacatttttttatttttgaagcctcaaaaagttcgatctgattttgcatttgcctttggacttggtataattaagggtgaaaataaggcccctct

SEQ ID NO: 467108 - DNA, 122 bp, Homo sapiens
taccgccctcttcccggtgggttgctgcgaaaacccggaaaggtggactttccacattgacgctcccggcggctccggcagccagactgggcatgttccgccgccgggtcaggcattgctgt

SEQ ID NO: 467109 - DNA, 122 bp, Homo sapiens
aattccgcctgcacaggagggggcccccgttgtcgccctgtggggagagatggcgctcagcgagggctccccatgtgcctccccatgtgtcccccctaggaggggagagacaggtgggtctg

SEQ ID NO: 467110 - DNA, 122 bp, Homo sapiens
accaaagggccaaaggaggagacacggacagtgaatctgctcttagtcttttccccgtaacggataactgatttcttcctacagagaccaatgttccaaaggggaaatgacaaggctgctgc

SEQ ID NO: 467111 - DNA, 122 bp, Homo sapiens
gatagaaggaaggaaagcccagaaggcaaacttggcctgagttcagcccagcctgttcttcgcttttaaagaggacaactgtcatacctcggttaacaatcacagtttcctcctcatgaaaa

SEQ ID NO: 467112 - DNA, 122 bp, Homo sapiens
cctgatcgccacccccccagggtgcctgatcgacgtgcccctgaatgaagaagttccccgcgattcccccacccgagggcccagatactgctcggctgaattcacccaagttctagccgcag

SEQ ID NO: 467113 - DNA, 122 bp, Homo sapiens
tgctatgttgcccaggagtggtcctctggcttcagcctcccaaagtgctgggattacaggcgtggaccatcacacatagcctaagttttactataaccaatgaggcaacctccatggagacc

SEQ ID NO: 467114 - DNA, 122 bp, Homo sapiens
gcggcgcggcggacagccccggcggcggggcggggggagttatattgcggggtccttcctcgctcaccctggttcctctcggagcggagacggcaaatggcggacttcgacacctacgacga

SEQ ID NO: 467115 - DNA, 122 bp, Homo sapiens
cctggaacccgagaagcctttttggcgcttcctgaagcgggacgtacagattccttttgtcgtggagttggaggtgctggacggccacgaccccgagcctggacggctgctgtgccaggcgc

SEQ ID NO: 467116 - DNA, 122 bp, Homo sapiens
cgcgccgcgggctacttaatagagggctgttcccagctctcagtttactcggttacgaaacgcctgagaaggtggacggctgccacggggtgatgtatgctcctccggcggtgaaggaggtc

SEQ ID NO: 467117 - DNA, 122 bp, Homo sapiens
tctgattgttcctttttcaggaattcctccctgccatatccatgtgccactgtgtagtcccgtgaactctgcattttcgcagaatgcccccatcatgtgaaggggttcggctcactctgtgg

SEQ ID NO: 467118 - DNA, 122 bp, Homo sapiens
atacaggatactgaaggcagctctaaagcagggctttcaaaggcatgttgtgtggtgacacgggaaatgaggtgtcatctcccagggcacagcagccatgaagatccgtggacattccttta

SEQ ID NO: 467119 - DNA, 122 bp, Homo sapiens
ccgggggcggcggggccggggcctggattgggccgggccgaggcgaagggtcgaaatcggcggcctccgattggcggagcctcagtccttcttgatgcgcgctgggattggccgaaccgtta

SEQ ID NO: 467120 - DNA, 122 bp, Homo sapiens
aagccgccgaagcccgacagcgcggaccaatgaggcggccttcctgcgtcgtggcggacgcgcattgtccaatcagaagccgctactcccagctgaggggcaggggagaagctacgggtcct

SEQ ID NO: 467121 - DNA, 122 bp, Homo sapiens
ccccctgggccttcagcccaggtcctggagaccagaggctcgaaaaccccgccaggactccgggcttctgaccacgggccgcgcggaacctcttctggactcatctgccagtcgcctaacag

SEQ ID NO: 467122 - DNA, 122 bp, Homo sapiens
aacaaagtgactgacctgtgagctctggctcagacagcagcaagccggatccaccaacaccgcagcgccttatgaccccggaaccgagccagccactgaggggagctggcagagcctggggg

SEQ ID NO: 467123 - DNA, 122 bp, Homo sapiens
gcaaggctccggggcatctctggctcgtgtggtcgtgccaagggtgccattgcggatggacggggccatgcgggccgggtcggcctcctggggagaaacgggtgggcgcaaggggatcggcg

SEQ ID NO: 467124 - DNA, 122 bp, Homo sapiens
aggagaccacaggcctggggaggaggatgcgagtcacagcagacagagggggctgctttacgtctgctgtcatgatatccttcaacttgcccaaggccagtgtggcctaaacaaaacaaagt

SEQ ID NO: 467125 - DNA, 122 bp, Homo sapiens
cggacattcctaatggttagcgcccagcctgtgaagagtcgggggtcggggagggggtctcgctaagaaggaggtttgcagaccatggcaaaggttggagaaagttatatgtacaaacctgt

SEQ ID NO: 467126 - DNA, 122 bp, Homo sapiens
gggcttgggggtgatgcattttgatacccaggcctggatcaaattatggaaggcaccaaacggcagcctaaagagtctggattttgtttgacaatggggagctactgaagggctttctgtac

SEQ ID NO: 467127 - DNA, 122 bp, Homo sapiens
agcgtgtgtggccccggcctctcactagcagcggcggctcccgacgctagcctgctcgagcgcacccagcaccctccccaagaccatggcccgcacctggacccgcggttaacttagcccgc

SEQ ID NO: 467128 - DNA, 122 bp, Homo sapiens
ccccggccacagcagagcagatcgcagccatcgatgccgtgggaggtgacattgcaagtccggtcccttgtgccaaaggaacccgtctctgggttgggctcacaaaagttgggggagttctc

SEQ ID NO: 467129 - DNA, 122 bp, Homo sapiens
tgagggttgaggtagccactgtgtttcaggccaagatagttgttaatgggatatcaggaacgcgactgggcttgacgggaagcaaggctggagttacaggctgggcttggcgggaaacaaag

SEQ ID NO: 467130 - DNA, 122 bp, Homo sapiens
ggagggggtggggagtcaaaggcggagtcacgggctccgccctctttctcctgcttggcgcgagcacaggcaccgcgtggttctcacaaccagcagctcggctcactgagacccggtggtcc

SEQ ID NO: 467131 - DNA, 122 bp, Homo sapiens
ggagccctggtgcttggaggaagcggattttcctgggactggcacctgagtgtcttgtatcggtcacggaggagtcaggacagaggggtcatggaagaggctggcggggccgggaaggtgct

SEQ ID NO: 467132 - DNA, 122 bp, Homo sapiens
gcctgaaaacaggatgtgagcaaggtcattttactgaggttattgttttgaccacctgggcgccggtacactcggtgttgtatcctctttatctgccagattgcagtgggtcagaccgcccg

SEQ ID NO: 467133 - DNA, 122 bp, Homo sapiens
gaggaaggaagggagggagggagggagggaagaaagagaagctaatgaccacttgatcctcgtaaggccttttcagttcctaaaatgactgattcaggaaaccccaagagccacaagagtca

SEQ ID NO: 467134 - DNA, 122 bp, Homo sapiens
actgtgtccatcatgcttgggctctcttatctttcccaggatcctgaatagggcatcccccgttcatccatagggctctgggatgtcttggtcttactgtttccctgccaaacccggtgcca

SEQ ID NO: 467135 - DNA, 122 bp, Homo sapiens
ggagaaattatgtcaaagcacttcccaaaggccaggaagtatttgctttccgaatgcaggcgtctttgtatatctgtggctaaaagtgatgctgaagatatgcagatttgtaatttctaatt

SEQ ID NO: 467136 - DNA, 122 bp, Homo sapiens
tggtggggggaggggagcgagtggacgagtccattcttatattcccttgaaggggtggctcgaatgcacctggctgggggggacgctcctattttctactgatgtgggggacagaaaaggaa

SEQ ID NO: 467137 - DNA, 122 bp, Homo sapiens
aaggaaaatgacccattaacctggctacaatcttgacagacaagcagtaacaaatagctccgagttgccatttgtgtcacatccctgaaagaagcatcgaggcttacccagatggctacagg

SEQ ID NO: 467138 - DNA, 122 bp, Homo sapiens
ttaaaacgctagggttaaactgcgtttaccttaaacaggcttactgtgttcactgctggacgcctctgggcaatcttaccctcctgggaactgagagaggtaggtggaggtcagcgtgctgg

SEQ ID NO: 467139 - DNA, 122 bp, Homo sapiens
gctgagcagggctgcaaactgttcagctaattaggctgcatcctgaccttagcctccatccgcagcaggcctcccttgaggggagccgaggtgctgctgccacctagggtcaggagagtgca

SEQ ID NO: 467140 - DNA, 122 bp, Homo sapiens
acctctgattcccagcatctcttcttgttctgatcataaacaactccagctcttggattacgtcgggcaacataacagcaggcacggaattctctctgcttatttagaacctagtctgaagc

SEQ ID NO: 467141 - DNA, 122 bp, Homo sapiens
ggtggaaggaattttattccactctctgcaaatcttcccggtgcctcagtgggaagtggacgctgtgagggtctaccagctcccagaaggcctcccctttctgtttcccctagggccctcca

SEQ ID NO: 467142 - DNA, 122 bp, Homo sapiens
cccagcgccagcagcggccccgccccgcgttcgctgggtgaccggtgggcggggcgccctcgagggaccagcaggaacagcagcaggaggacaaactgcctcaccctccctgccccaagagg

SEQ ID NO: 467143 - DNA, 122 bp, Homo sapiens
ctgagccggacggcgcctgctctgcctggctcctgggaggctcctcgtccccagcgcctgcggcacccaggccaggagcctctctgagtcagggcttgtttccacaaccacacgtgcaacac

SEQ ID NO: 467144 - DNA, 122 bp, Homo sapiens
ccgccctctcggctctagcaggtcgggagagagcttgggcaggtgatgtctagccaatctcgtggggagaggtcgaaactctgcctacagactggcctttgcacttcacctgaggcaggttt

SEQ ID NO: 467145 - DNA, 122 bp, Homo sapiens
gagctagggtgaagcatgagggctccaaatgcccgcttctgggttggaatcccaccccgccgcttacagctgggtggccctgggcgccagaatacctatttttttctttataaaaatctctt

SEQ ID NO: 467146 - DNA, 122 bp, Homo sapiens
ctctgaagggtcccggatgaaactctctgcaggcctctgggtctctcaggtctatctccccgatctccctctcctttccatctccttacttccgcccctccggtgtctctccgagaggtgtc

SEQ ID NO: 467147 - DNA, 122 bp, Homo sapiens
ctctgccagatcaggataagtgcttgggacaataccccgtgacctcggtccacacagacacgtgcagaccagagccctcccgcactgctcagccacacggccacgttcaggctgaagccgca

SEQ ID NO: 467148 - DNA, 122 bp, Homo sapiens
tcagttgctcccaggttcctgatggttccgaagtctgtgatggtcccaagtccgggtacacggtgaagtaggccccatggacggggacgcccctgccaaatttctactgccatggcacgggg

SEQ ID NO: 467149 - DNA, 122 bp, Homo sapiens
tcaaacctggccaagagcaaaggtctctgctggagaatgactgagggtttgggagcttcccgctccctgtgggcatctccttagtgtaaacaggtttgccagggcaccaagtaggctcccca

SEQ ID NO: 467150 - DNA, 122 bp, Homo sapiens
agggatgggagcgccttccagctgcccagcggcgtccgcgggccctcctcactccacagccggagcacactctcccacagggtggccatctcctgcgtgcgctgtgggacggggatgctggt

SEQ ID NO: 467151 - DNA, 122 bp, Homo sapiens
tgcgctccccagacatgtaacttcaggcagaatacctaatttttctgtgccttggttctccggcctgaaaaatggggataataaaatacctcccacatggagtttttatgagaattaagtga

SEQ ID NO: 467152 - DNA, 122 bp, Homo sapiens
agttgttatctgcaaaacagttatggagaactctaatcttctaacagggctacatgattccgaggcaatagaatcaaacagctatgaagaccaaacagctcagaggacgcaggtcagagagc

SEQ ID NO: 467153 - DNA, 122 bp, Homo sapiens
agatagatttttatttaaaaagttattttcctgatgcgattagctgtggcactgcaaaaccgaaatcaaactataaggaactttcctcctttaatttcagattaatgacagctgggaattta

SEQ ID NO: 467154 - DNA, 122 bp, Homo sapiens
gggtaagcctagggtgttccctaggaaagggccaggttccctctatccagctgggggcaccgagacggcctcattcagggaagtccaggatggcagctgaaggcagcaggtttagcagccaa

SEQ ID NO: 467155 - DNA, 122 bp, Homo sapiens
atcgaggcagaggctgctccagcaccagcaaagccactccaaggcagcccgggccgcggccgcacaggcagggagcagctgccgccatgtggcgtcacccaacgtcaccagatgttaaagga

SEQ ID NO: 467156 - DNA, 122 bp, Homo sapiens
agaccatttccaggattgacaacattgtgcatcctgtattcagacaatgtacactccactcgactggttaagatccttccatcataatgcggaccacaccagatgcatgggttccaccaaac

SEQ ID NO: 467157 - DNA, 122 bp, Homo sapiens
ctattggcttccctgaatgggttgttatggtaacaaatgaccgaacagtcccttatgaatcggccaatgagaagggccgtcttttccagtgcgcctccgagcagtagatgttgcgaaagtcc

SEQ ID NO: 467158 - DNA, 122 bp, Homo sapiens
actctttcaacaaaagtttactgagcattcactatatactggcactattcaaggtacttgcgatgtatcaatgaagaatagacaagatctctgttgttgtggagcttatagtaatcctctga

SEQ ID NO: 467159 - DNA, 122 bp, Homo sapiens
tgcaaactctaaatctgaggcagccgtgaagtcccatgccctgaatcatctcatccttagcgtcatcagcaagaagggaggacactgagaatcaaaggttttatttattgaactcgagcatg

SEQ ID NO: 467160 - DNA, 122 bp, Homo sapiens
tttttcagaaatcccggaagctaaggatcagcagaggataggaggggcccatttcagtctcgtgctttgttactggctacaaaggcgacggaatgaccaacaacccacttcctgttgactga

SEQ ID NO: 467161 - DNA, 122 bp, Homo sapiens
caagcttgcccttcagacccctcttgcccaggccggggcttggcattggtcagagacctgcgaggccctcagtgggctctgaaagaggccagggcagggacccttcccttcctgccagggta

SEQ ID NO: 467162 - DNA, 122 bp, Homo sapiens
caaggaagtggaacaaatcgtcgtagccaggcgtctctgcctctccggaaacccgaaatccgcccaaacctcatcccaggcgctcacggtaccagtcgcagggccccgcactataggggctg

SEQ ID NO: 467163 - DNA, 122 bp, Homo sapiens
agggagcggccacccagcccggggcctgcaagcaggcaggcagccattcgccagcagccccgggcccgggctgactcactgggggccccctgctgtggcctggaccctcacgctatcccggg

SEQ ID NO: 467164 - DNA, 122 bp, Homo sapiens
aaactgagaccacccttgaggtggtagaggacagacttcaaaagcagatacaagaggccccgggcagacagggcaggcagagcagggcaggcaagatgggctagaagtcccagggcaagctg

SEQ ID NO: 467165 - DNA, 122 bp, Homo sapiens
tttgcactttttgcgtgtttgactccacggatgtgcatcaccacggcgctgcgctctgcacggaaaccttgaacttcctcaaaaaatgaagagatgtcctgttcgtacattcgcatttgggc

SEQ ID NO: 467166 - DNA, 122 bp, Homo sapiens
cacgcagcccaggggccagggagatggcaagggagatgccccgggcaggagatgggtccgcggctcctagctcccattactgtcacccccactgacagccccgggggagctgggacaagtcc

SEQ ID NO: 467167 - DNA, 122 bp, Homo sapiens
acgcctcgcataagtcccatctctcagtcttggctcctcctacggtctccatctagaagccgtctcctctgcttctgcacggtgaaattgggccccgagtttcagatatctctgagatgtca

SEQ ID NO: 467168 - DNA, 122 bp, Homo sapiens
cttgttaacataagagcttttctttataaactatataaaattaaataacccccagaattgcgtttaaaagttaccactgttattcattgttctggaagagttggccaatttagttaagaata

SEQ ID NO: 467169 - DNA, 122 bp, Homo sapiens
accaagaaaacatgtaaagcttttcgataaattcttgcaattatggccgggaactctagacgccgcagttcagctggcggcaaaagaaatgctgtcctaatcagtcagccctgcttcttttc

SEQ ID NO: 467170 - DNA, 122 bp, Homo sapiens
gtgagtctagaaagtgttcatttctggtgactctataattccttctaacccatgccagggcgcatacacaatgagccctgatctctcctgctgacagagtctgtgtaactctcttccccacc

SEQ ID NO: 467171 - DNA, 122 bp, Homo sapiens
ggaaatgaaagagataagtatgaaaaaatccatgctcatagtagctgtggtttccaactgcgtgataaaactttaaaatctgcattcaaataagaacaactatgtcgacgtaaggttacaag

SEQ ID NO: 467172 - DNA, 122 bp, Homo sapiens
caggtcggatcccagggtgggttcagatttgaagggcgaggttcgaggccaagcccccgtcgcagcctaagactgcgggcttttctcctctgcagggatggggtagggcagggccaggggcg

SEQ ID NO: 467173 - DNA, 122 bp, Homo sapiens
taaattatttttctgtacttcagctttatcaggtgaatgtcatgggagatgacaaatccccgtaagtcataggattattttgagtactaaatgaacaaactgaaaagcaactagcagaggac

SEQ ID NO: 467174 - DNA, 122 bp, Homo sapiens
gggccgctccaggctgaagccgccggaccacgtgtgtagtcgcagctgccatctttcatccgggcatcggccatcttggtaaaggcaatgttctagattttcgcctctgcccgcccctcctg

SEQ ID NO: 467175 - DNA, 122 bp, Homo sapiens
cacagcaggaggaccattatttgaagcaggcagtctgattccagacacccagtttttacacgctgtactgtattgttttcaaaactctaagatttcatggatctttgattttttttttaaat

SEQ ID NO: 467176 - DNA, 122 bp, Homo sapiens
agagccccagatacccgaggctgggagcgccggagagctcccaggtttcgggtaccctcccggagcacgcaagcacagtcccaggcctttagggacagatgggccagagccgtctgcatctg

SEQ ID NO: 467177 - DNA, 122 bp, Homo sapiens
cctggccaaagagcccgcgcagcgaggtggggttgggggctgggacccagctccgtgccccgccacctggctctctgggaagaatcggacctgtcaccctcgaaggactggccgctaaataa

SEQ ID NO: 467178 - DNA, 122 bp, Homo sapiens
ccgggttgggtaccggtataatccgcttctagcttgtttggaggcgtgggctcttgggagcgggacttctgctcaaatcctgtccaggggcttgaaaaggaggagaattgggggtggttgcc

SEQ ID NO: 467179 - DNA, 122 bp, Homo sapiens
tctgttccagtatgacaatcacagactcctaacattgttaaacttattaaaactccttcccgccttcccctaaagactgagtgggtaacgagacatggctgacttctctgttccccaaccta

SEQ ID NO: 467180 - DNA, 122 bp, Homo sapiens
tgcctttgcgcctgccccttagcctcaatgaccagccgaatccttctgggtctcagcttgcggtgtcctcttgtcggagcacctgaggcgcccacttcccctgccctcgcaggacgcctcct

SEQ ID NO: 467181 - DNA, 122 bp, Homo sapiens
cttatttttaacacttccattgaaacacccggagtctcccaaggtctaacctctagaagtcgggtggcagaacctgaatcagaacccgagtgagccttccttcctccaccacctccctttag

SEQ ID NO: 467182 - DNA, 122 bp, Homo sapiens
gcagccgtggctcctgtgagtgtggctcccgctggagcgcgcggaggatgggagctcctgcgtcagggcagagcaagttcccagtccccggctgtttccaggtggttgggcacagggcccac

SEQ ID NO: 467183 - DNA, 122 bp, Homo sapiens
aggacagcgatgtcttcctgcatgacagaaggggaaactgaggcccagagtgatgcagcccgggacctcccaggacaaggtccaagctcttacctcaggtatggagtttccatgataactgt

SEQ ID NO: 467184 - DNA, 122 bp, Homo sapiens
tggcggaggtagcagcggccatagagtgaccagcagcgtgctcccagggcccccggctcccgcttcagcacctcagcatagctgaagaaggcatagaggatttgccatatgaggatgagggg

SEQ ID NO: 467185 - DNA, 122 bp, Homo sapiens
atcctcattctatcgagaaggacattgaggctcagggaaattaagtatcttgcccggactcggcattacaatagcaattaacatatatcgagtatttctcggtcccaggcactgggtttagc

SEQ ID NO: 467186 - DNA, 122 bp, Homo sapiens
cagcggaaaagggaccgcatgaacctccggaactttgattcccagaaagccacaggctggcgcaggcgcaccaagccgctcccctcccccggggagcggcggggagaccaggagccggaggg

SEQ ID NO: 467187 - DNA, 122 bp, Homo sapiens
gcttaaaaattgtatgacaagaggtgctttgtggccctccacagacttgggcaagaatcacgcggaccgcgggcagtggtgcccaccgagagcacctggaagggccagcgtcagggggcgcg

SEQ ID NO: 467188 - DNA, 122 bp, Homo sapiens
ctggggcgtggggagtctggtggcagaggggctggaaggccgtattctccggataactgccgcaactaagtgcagaccctcctcccctctgttacaggtggccggccaagtagttacagtac

SEQ ID NO: 467189 - DNA, 122 bp, Homo sapiens
gagtgtttagaaggaggtctagtttccttccttcaatttccagaatcacctggtggctcccgtgctgtaatggcagtttgagccactggagctggggtttgagccccaggacccatcagtcc

SEQ ID NO: 467190 - DNA, 122 bp, Homo sapiens
aatgcaaatctggattccagagctggcagaggccccagggtcaggctctaggacaaccggcgaaaaagcgggaacctctactccacgcccttggtttttcgccccttgacagcttgaggctc

SEQ ID NO: 467191 - DNA, 122 bp, Homo sapiens
ggccccgcggtgtcctctgcccagacctcagcggattgctcgcttttatagagcttgccgcgttcccattggctggcctcaggtggcgtgatggcccactgctctctgattggcccacaggg

SEQ ID NO: 467192 - DNA, 122 bp, Homo sapiens
ttcggtcacaggcaaagcaagggcgcctgaggcaggcgacacttctccaggccggcagcgcgcagggacattaacagaggccagcacacttccaagtaacgttccacaagggccgagcctaa

SEQ ID NO: 467193 - DNA, 122 bp, Homo sapiens
gtgtgtctgaggaagggggataataaaccacccttttttcctcctggctgctatttcccacgtgcgttgagtaaaggcaccaaagctgcctagtgactgggtgtctcctccccgtcaggggc

SEQ ID NO: 467194 - DNA, 122 bp, Homo sapiens
ggtgggagaaagtttttagatccatgtagcctacaattgcctttggcttcaattggttaccgaaggtccagccaactggattttcagaattcaccttcttggccaatggcatccacctctga

SEQ ID NO: 467195 - DNA, 122 bp, Homo sapiens
catcagattttattggataactgctgtatgcaaggcattgtgctatgtgtgcagagtctacgaactgcagagttttgattaaatgcatgaagatacctgaagtggtatttacctgcacatac

SEQ ID NO: 467196 - DNA, 122 bp, Homo sapiens
cagatttggtttcttgcctcccaccactatcactcctgacttgtaatccttggctcttcccgacacagctctgacttcctcagagatggaagctctggagcctgttaacatttggtggagtt

SEQ ID NO: 467197 - DNA, 122 bp, Homo sapiens
agttaagatgacttttgcctaaaattaatcccacctatcctgttggcaaaggtccccaaacgccagtgtgagtcaggttgctttccccccaaagccggttgctttcccctaaacccgttcgt

SEQ ID NO: 467198 - DNA, 122 bp, Homo sapiens
ttgggaacacgtttgagggtccaacttgcaatgacaagataattgtcattcagtgtctaacgtgcctgttgtggtgactctgaatggttgaaatattgattgcagctcttggttaaactaat

SEQ ID NO: 467199 - DNA, 122 bp, Homo sapiens
cttacctccttgaaagtgttgtcactatttagtacgtttatccaatagtgttaagatgagcgtgtctacccaaattcggtgcagagctcttaggcaatgtaaataaactactttgaagattc

SEQ ID NO: 467200 - DNA, 122 bp, Homo sapiens
aagcccctcactgcctagggcgggcggggccggctggctggccgctctgagtgcagggcccgtggagcccacgcccacccggaactggcactgacccgcaagcgctgtgcgcagccgcggtt

SEQ ID NO: 467201 - DNA, 122 bp, Homo sapiens
aacaccgtctgcaggagacacagctgcagggtcagaccttgcacaggaggactcagcccccgggacacccctcccaggacaacctccctgtgaggggtgcagacatgcataccctgagaacg

SEQ ID NO: 467202 - DNA, 122 bp, Homo sapiens
agcaagccaatcagcggcagcggggagccggccagggagcagcgcaggaggcgtcctgcccgactccaggcttcaggccagccagaccggtcccaacctgtccctgggggaactagatcatt

SEQ ID NO: 467203 - DNA, 122 bp, Homo sapiens
tcatgggcatggaccacgagtgtgaggccactgctgctcaccagcttccaagatcaaagccgctggggtgccaggatttttaaataaaaaaagatggagagattgctttggaaatcagtgtc

SEQ ID NO: 467204 - DNA, 122 bp, Homo sapiens
cttcttttccctcctgatccaccctcacacaagaattgatctgcaaaatgactctcaaaacggcagccttggtcgtgccacgccccttatagaaagccttggctagctgttcattccgcaag

SEQ ID NO: 467205 - DNA, 122 bp, Homo sapiens
cagaacctgacagtgcgggagggcaggcgcctgggaggtaggagctggtggagatgacagcgtggaactcgtgagccccacgcaacgcctccccgccgcccaaggtgggctcctagaagcac

SEQ ID NO: 467206 - DNA, 122 bp, Homo sapiens
acagcacccctgccccctaatttatacagaaaccggacccactaatcctctgggattggccgactgtgagctgcagataaggctatcagccaccaaagagcaatgaacaatggaaacttcag

SEQ ID NO: 467207 - DNA, 122 bp, Homo sapiens
cgcgcgtggcccgcgtgaagggcagcagcactttggggatgttgagcttggccgcagcggcggaggggcccgccgccaacagcaccgacagcgtcagcagcagcagcccccggccccgcgcc

SEQ ID NO: 467208 - DNA, 122 bp, Homo sapiens
ccaaatcccaaggtaccagagagcctaaaattccctggcagatgaatttaatcacttttccgtgttgttaataagaaaacactacagaatgtcagctggtggaatcggaattttcagtgctc

SEQ ID NO: 467209 - DNA, 122 bp, Homo sapiens
agacatatgccctgggagcccacaatctgttaacaggaagcaggtaaacccgagagcgtccgcctgcgttccagtccagtgcccgtcccagcacacacctgctttttcagacctgccgctca

SEQ ID NO: 467210 - DNA, 122 bp, Homo sapiens
attcatgcatattcatagcctgttcctctctgtaggttcaggtttttcttttctgtcaaacgaggcattaagtaaattctaaggtctcctgcatctctgacattccagagttctagatatat

SEQ ID NO: 467211 - DNA, 122 bp, Homo sapiens
gggcagggcacccagcccacaaaacttacagaggccctcactcattctcccggcacttgccgaccctgagaatgggggctccttcaatacagcacttggtacacttcacttgcctcacccta

SEQ ID NO: 467212 - DNA, 122 bp, Homo sapiens
ttctttctttccctttgatctacttccaactctccctttctgtttcttcaagatctttttcggatccctgggtgcgaaggacataaggggccagtggccttccctactggtccctccttgac

SEQ ID NO: 467213 - DNA, 122 bp, Homo sapiens
aggaccgaggtgcgcagggggcgctcaggtcccagaccccaaagacgctgcggcgaggcccgggtcccgccacagccggttccgactggttccgaccagcccttcgccctgcctcaggacgc

SEQ ID NO: 467214 - DNA, 122 bp, Homo sapiens
gtattgcaaggaaatttgtcaaaatgtattcttctaagtggcataagctccctcctaggccgcactgaagcaaaagttaggctatttccaagccaactgaattgggattttatggttttatg

SEQ ID NO: 467215 - DNA, 122 bp, Homo sapiens
ctcgccccgttctctgcagctgccattgcaaaatacagtcttggtcaagtgcagcccccacggggtccccaaggcacttacttcaaaagaaactcaatcacgatcccgcacagtgacagttc

SEQ ID NO: 467216 - DNA, 122 bp, Homo sapiens
gaaactgcaataattggcctcctgggagtgtgagctcaggagcaatgtccctgtgtgggacgcaggcctttgctcggggccgcccgggctctgccggctgaccctggtatggactcagaggg

SEQ ID NO: 467217 - DNA, 122 bp, Homo sapiens
aacttgctcttacgcagaagcataaatcatcacgacaaggttgctccggccaccgggtgccgcgggcagagggacggtggaggggacattctccttttaaaagtggccaggcccgtgagcct

SEQ ID NO: 467218 - DNA, 122 bp, Homo sapiens
tgcagttgttggtttaggttatgcctgagggagtgtccacagtagagtagaagtcaaactcgctggagaagagttcaataaatagcaaagatcatgtttttgtttttgaagcaaggtctggc

SEQ ID NO: 467219 - DNA, 122 bp, Homo sapiens
gctccactctgcctccccgcctcaccccgctctgactactgcgtcccattaccggctgtccgggtcctcagcgccaacaccaccgacgccatgctttcgatcactcacttccggtctcgaaa

SEQ ID NO: 467220 - DNA, 122 bp, Homo sapiens
agattggagtctgtctgggcagataggggtttccgagggaagtctcggaagggtggatgtcgtcatcgaagacgccagaggagctcggcagggaagggtctcatttctcacttggcctccgc

SEQ ID NO: 467221 - DNA, 122 bp, Homo sapiens
ctgtctgtgctcatctgcctccttagccccgagtgcctgagtgactgccagttaaccgagcgtacctgtgcctctgtatctgtgtctgtacgagcccaaggggtgtgtgtgtgtccgtgtgc

SEQ ID NO: 467222 - DNA, 122 bp, Homo sapiens
ccccagcaatggtggttcacgtgtctctccatctcacttcccgtgcaaaagcgacacaggcgggtacaaacccaaacagtgcagacatggaggagacagaaggtgaaaatggtttctgagcc

SEQ ID NO: 467223 - DNA, 122 bp, Homo sapiens
gtctgtgtgctgggaccacaatgacacttagtggtcaggctagaatgttggctggcctaacgagccactgttattcttcaccaactgtggtgactccgtggggcacaatatttttaaaactc

SEQ ID NO: 467224 - DNA, 122 bp, Homo sapiens
ggagttggaggtggccaagggcagaatgagcgggattcagggcaccaggacctacccaggcgcgggggacacctctgaccttaagtaccccttggcgaccaggctcagggaagctctcaccg

SEQ ID NO: 467225 - DNA, 122 bp, Homo sapiens
agagccttagactgagatgtggagatgtgcagagagccccaggatgtgtaggtctacggccggtgatgacgtgagaaggaaccccatgcaccctgtagcccatttttttcccccataacagg

SEQ ID NO: 467226 - DNA, 122 bp, Homo sapiens
cggtcactcgccagaccccgaccagcgagtgcagcaggaacagcaaccgagtggccagggcgttaaggaagaccagtccctccatgctggccggagcactctgcctacgtccccttgcctgc

SEQ ID NO: 467227 - DNA, 122 bp, Homo sapiens
gagttctttcctgaggagctcttgcctgagctcctgcctgagatgctcctctcggaggagcgccctccgcaggagggtctttccaggaaggacctgtttgaggggcgccctcccatggagca

SEQ ID NO: 467228 - DNA, 122 bp, Homo sapiens
gcttctctccgaggtttgtggcctgagaaactctccgctgcgaatctgggctggcctctccgggaagccttgaaactcaactcccgggtgggccaggaaggctgcccgacttgggcagcgcc

SEQ ID NO: 467229 - DNA, 122 bp, Homo sapiens
cctcctgatgcagacattacacactccaggcttcatacctactcctgttccctctcccaacgcacacctgccctctggccgcagcttgcctgagccctggaaggttgatttccttggccccc

SEQ ID NO: 467230 - DNA, 122 bp, Homo sapiens
aggcaggcagggtggtaaggggctgggccctggcggaggggtgtgtcccccagctggccccgcccctgccatgcctcacctcctgcattgtgaagtccaggcaggggcccacgtcctctcgg

SEQ ID NO: 467231 - DNA, 122 bp, Homo sapiens
ccgcccaccgcctagcgcttcctcctccctgcaggcgagccggggaatccccggcagcaccgatatccgcagagcccaagaagtgggcctctctgccccgcccccccggctcgccgagggct

SEQ ID NO: 467232 - DNA, 122 bp, Homo sapiens
ctagggcctggggcttgcaggagatccgggactgtctgattgaggacagtgacgacgaggcgggccagagctgagcgtgaggacgtgcttgccgggacagcaggcagtggccacctggtaca

SEQ ID NO: 467233 - DNA, 122 bp, Homo sapiens
ctcggtgccacgggggcttgctgtaaagggcgcgcttccttccctgaggactgtggcgtgcggggagacaaagcgagaaaccgcgagcaggcccacagccaagatccacaggctcatgcccc

SEQ ID NO: 467234 - DNA, 122 bp, Homo sapiens
aggcggcgctggttcccgggctctgggcgcccccgggggcagcttccgcgccctggaagccgctccaggactgggcacctgagcctatgttctggctgatgggcttcagccactctgagagg

SEQ ID NO: 467235 - DNA, 122 bp, Homo sapiens
aggcaccaagtgtcctgtgggccctgcaagaggccagcaccctcgctcaggcctggaccccggtccctggactcctagatgtggcttaccctgcaggcaggagggccccatccagccagggg

SEQ ID NO: 467236 - DNA, 122 bp, Homo sapiens
gtggtttttgattctggcggaagccttcccgagtcgagagaacgtgcaggtgattagcaccggaggggccttccatgtttaattggttttctgtgttggtactgttttgtttttagaatcaa

SEQ ID NO: 467237 - DNA, 122 bp, Homo sapiens
ggagggtgcgctgggtcccccagcagtgcagacccaccgctgctgcgctcgatttctcaccgacccttagctgcctccccgcggggcagggctcgggacctgcagcctttcatgcctgaacc

SEQ ID NO: 467238 - DNA, 122 bp, Homo sapiens
ttcggcttgtacagaactgggggagtgggatgttgtgggcagaccagtctccggtatacacgtattttgcccctgtcggagcttgcgtcgatgcctggggcttggaaaccaccgcaaaaaac

SEQ ID NO: 467239 - DNA, 122 bp, Homo sapiens
agggggcaaagaattgagatgagggaccaggcccggggcacagcaggcccaaaggccatgcggtgggtccaggctgggctggccatgcaagccccatgtcgggatgcacacaggcagaggtg

SEQ ID NO: 467240 - DNA, 122 bp, Homo sapiens
aatttgctttttctcttaattgcttattttttatgttatttatgatagattttaaatcttcgtttggctaccatactgagtcacctaagttagatttacttaggaagtatgcttaagtcaga

SEQ ID NO: 467241 - DNA, 122 bp, Homo sapiens
ctgctgctgcaggtggaagggagtgacgtcagcaattaccgactgttttttctatctcttcgttgcctctttcagtgatactgctcacttgacttttgattctaatgaaggtgttttttctg

SEQ ID NO: 467242 - DNA, 122 bp, Homo sapiens
ttggaaatgaatcttttgcttctattgaatctgactttccttttttttttttttttttttcgtgatacaggcttctgcctatgaatcaagacaatggatgtgggcaataagtctaccatgtc

SEQ ID NO: 467243 - DNA, 122 bp, Homo sapiens
ttgatgcaaaaagcctcgggttaggtcttgccatttaaggtagggctggatccatcaatccgggttaccaggatctgttttctagttgtggcttcattttcagacaagttgtttccatatga

SEQ ID NO: 467244 - DNA, 122 bp, Homo sapiens
atacccctagaaggtgggtttagccaatttagtaagtaagacttctttgtcattgttacccgaatacttcctgtatttcttaggagaacaaaaggagatcctgtgaatgtggagtttcaggt

SEQ ID NO: 467245 - DNA, 122 bp, Homo sapiens
agctgaccccgatgatctctcaggtttctgccagttgagaaagtgtagcagtgccctggacggggaggcgggcggggcgaactgcgagctcctgccccttcccagggctcaggcgactgtgg

SEQ ID NO: 467246 - DNA, 122 bp, Homo sapiens
gatggcagggctgggagcgtcagccagctaggcccgcctgaccccaaaggcagtgcaccacgggggaaacataatgaaacatgcttttgagaaagctttccctggcatgtgaaggatatctc

SEQ ID NO: 467247 - DNA, 122 bp, Homo sapiens
aggggggaccagaattcccccatgcgagctgtttgaggactgggatgccgagaacgcgagcgatccgagcagggtttgtctgggcaccgtcggggtaggatccggaacgcattcggaaggct

SEQ ID NO: 467248 - DNA, 122 bp, Homo sapiens
tttcctctccgagttgctgattctaattgctgccttggacgatctataaagctgagtgcgcgctatgtgacctctcaggggtcgctgccttggacgatctgtaaagctgagtgcgcgctatg

SEQ ID NO: 467249 - DNA, 122 bp, Homo sapiens
gcctgcccgcaggcaccgcggcctcgggcctcccctgacgacgccctcggccccgcagcccgggcgcccgcgccaccctgtcctgctctgcgcccgcctgtccagccccactcaccgcctgc

SEQ ID NO: 467250 - DNA, 122 bp, Homo sapiens
accctggtctcacaaagcttctgtgcacattggaggagccgggtgactgcaaagaaagggcgtaagattgtttctgatagggcctgggatgtgaggagcgatgatagagtgcgtgctctcag

SEQ ID NO: 467251 - DNA, 122 bp, Homo sapiens
gcatagctgactactcatgcattgctcaaagctggcttttcacattaagtcaacaccaaacgtggttgccacatttcatcagacagacacctccctctggagatgcagttgagtgacaacct

SEQ ID NO: 467252 - DNA, 122 bp, Homo sapiens
tacaaaatgcatcaccaagagtctggagaagcaaatcgtgctgtgttcacgtgatggaaccgttatcagaaactgctgggtcgtatgaaaacacaggtgagacccagaggcatcaccccgac

SEQ ID NO: 467253 - DNA, 122 bp, Homo sapiens
ttgggacctgagattctcggaagccaagccttgtcctggtttctgaaacacccccaaccgcgtcccgacactgaccagccgccggaacagcctctgcagttgcgccgcgtcctcccggagcc

SEQ ID NO: 467254 - DNA, 122 bp, Homo sapiens
ctgggaggtggggtggccttgcacagggcccaggcacctgagtgagtggtggggtccttacgttcactgctggggtgaggcaatgagcaccttattgtgtccacatgaattcaataaaaaac

SEQ ID NO: 467255 - DNA, 122 bp, Homo sapiens
cccgaaacctggcgggaagggccgtaggcctgctgcacctcccagcagccacgagggtctcgtggaacagaaggaacgaagacctcctggactacacgagccaccagacgccagggcttcag

SEQ ID NO: 467256 - DNA, 122 bp, Homo sapiens
aagtctttccttctccagtgtccacctgatgctgcctaaggctttgctatgcagaaattgcggtgtcaccattggctggaaaagaaattccctaaggacactgggcagggcacacattagca

SEQ ID NO: 467257 - DNA, 122 bp, Homo sapiens
tccggggccgtgtgtgccgacgtcagagtcagagcccgagcgggacccaccggccctccacgctcactctgcccaggacaccctggcagatccttcaccaaaagctagtgactttgcgaaag

SEQ ID NO: 467258 - DNA, 122 bp, Homo sapiens
cccccttcattctctcactctaaaacctcccggacaaaccactaaaaacgatgcggctgtcgtggtggtgggtcatttggttttgggtcgcgtgacctcagtgagtgtgtccccatggggaa

SEQ ID NO: 467259 - DNA, 122 bp, Homo sapiens
ggtccatcagggctcccgattagttcattcattcaacaaacgtccgccgagcagccggggcgccgaggctggaggggacagcggtgaacagaacccccgccccctaactgcgctcaaggcca

SEQ ID NO: 467260 - DNA, 122 bp, Homo sapiens
taatgaaggccacaactcccaggaggctccacgccgggcggtcagggacgctcgcgaggacgcatgggcccccaggaatgggaactggttagatcccaggaactccgtgccggagacgggaa

SEQ ID NO: 467261 - DNA, 122 bp, Homo sapiens
cgggacccgacacgcccacgccccctaagtcctggtcctggggtgggctccggagccccgcgtccgacagtggtctccgtgcagacccagtgcccctaccgcaccactcgcagtcttctggc

SEQ ID NO: 467262 - DNA, 122 bp, Homo sapiens
ttggcgtctctggaaggagtggctgtggctcgggctctccagataaaccgcgctctaggccgtttcccagataggagcgctataggttttaagaactaaaactttaaaatctcagccctcag

SEQ ID NO: 467263 - DNA, 122 bp, Homo sapiens
ggaagtcctggctttgcgattttgttttgttattcctaagcactgcctcacctgctctagcgtgggagctgagtcgtcaaggggaaagacaatgaaattgctctaagttatcatctctccag

SEQ ID NO: 467264 - DNA, 122 bp, Homo sapiens
tgaagtccctagcccatatggctggtagtgaattaatctgtgtctgagcagcaggtagcacgagccagtctgtctgttggggctgttagtaacccaggggcagatcagagaacagcaggaga

SEQ ID NO: 467265 - DNA, 122 bp, Homo sapiens
gcagctcccagtgcccgggaggcagggccccagtactccctccaggagcggtgatggtcccgccatcgactgggggacttcctggaggaagcgacgtctaagctggggcctggcaggccagg

SEQ ID NO: 467266 - DNA, 122 bp, Homo sapiens
ggctccagtttggaaagcctttcctgatttgagtctgggaagagataagataacaatcagcgatgttgttccagcagccaggcctcttcggagagtttatcagcagaatctgcccaaccagg

SEQ ID NO: 467267 - DNA, 122 bp, Homo sapiens
aggaagttgcccaccctctcggaatctggtttggcctccgtaaaatgggcagatcccgctcggatggcccggttcccggcttccttttgcgggtcaacggcagcgtcacgcgcgcgagcgcg

SEQ ID NO: 467268 - DNA, 122 bp, Homo sapiens
ttgagctctgacaggcatgggcctctccgaccttcatcactattcttaggataatgctggcgggcagagatgatcaatcatcatattaaatcataatgagcttataatcctcccactggagc

SEQ ID NO: 467269 - DNA, 122 bp, Homo sapiens
acttaaatacaactgtggtgaaccgcacaagagggacgcgcggcggtctgcggggaatgacgaggccgacctcgtctgcgacccagggagggcaagggtggaccaggcaaagggaacagagg

SEQ ID NO: 467270 - DNA, 122 bp, Homo sapiens
agaaagttagctttttggcaaaactacttcctagtagatggtgtgtacttcctatcacagcgcattaaggggcacataatgcctgggactccgggatttcgagcccctgacgccagcggcgc

SEQ ID NO: 467271 - DNA, 122 bp, Homo sapiens
ccaaaactgtgagaaaacgaacgcctattgttaagttgcccagcctgtggtattttgttacggaagcctgagcaaactaacacagcctggcatttttgctctgaagtttacaggattgattg

SEQ ID NO: 467272 - DNA, 122 bp, Homo sapiens
agctccttgagtatgctctagaatttggctggctggatctgggcttacttccagctcaagcgtttcggtaggagggtctcggggctgctgcctaatctgaataactgaatcaaggttctccc

SEQ ID NO: 467273 - DNA, 122 bp, Homo sapiens
gtcctgacggctgcccgataaaacggacattaaaattgcactttccactgaatacagcagcgcctattgtggcggcacacctgaatgcgaaaattaaagccaaaatatttcctagcggctaa

SEQ ID NO: 467274 - DNA, 122 bp, Homo sapiens
ctctggcatctgcagaggccgccccgtctaagcacacccatgactgctctctcctgcttgcgtctttgagaagaagacagttcagtcccccaccactgattgttttctgacacagagttgag

SEQ ID NO: 467275 - DNA, 122 bp, Homo sapiens
tctggaaggatcgtttcaccgccatgggctggaaataggtttgggggcagaggcaggaggcgttcagggctgtcgtgaggagccctgccagctcacttgctgggtgggtctggcggtgtcag

SEQ ID NO: 467276 - DNA, 122 bp, Homo sapiens
gtccaggcgagaggagggttccgggaaaggcacctcataactcactcagcgcagcacacacggcggcgagctcgggcacttgacgaggacgcaggtggcagtcacagcatccgtgctgacac

SEQ ID NO: 467277 - DNA, 122 bp, Homo sapiens
agggccagtttctgggcgttaccgatgcgatgatttactgtgctgatttgcacaggcccgcgtcccacgttgtcgtccccgtctcatttctcacttagctgaaacttggcctacaaaatcat

SEQ ID NO: 467278 - DNA, 122 bp, Homo sapiens
tcctccaaaataatttatacatgcactttgaacaatttgcaattatttcaaggcaggtgacgataaatgttttattgtgaagtaaaacatacacagtatgccgggcgcggtggctcatgcct

SEQ ID NO: 467279 - DNA, 122 bp, Homo sapiens
caagggtgcgtggggatttgtagcgtgatgatttggctgcctggtgcaccgactggagcgcgcctgccggagcacagcctcagctgctgggtgcaaatgggctgcgaggtgggctggggagg

SEQ ID NO: 467280 - DNA, 122 bp, Homo sapiens
tatatattctatggtttttgagaccaaggtttctcagtgaataagaaagcagcagaccttcgtgggggtcgttatgacattatgacacatcaccatttcctgttaactctgcagctgtacat

SEQ ID NO: 467281 - DNA, 122 bp, Homo sapiens
aggctggcacgcaggcgagagtctcacctgggccctccatggggtgaggaagccaggagccgggcaccagccctggagaaggctgtggaggcaccgggagcccaccactcacacaggcgaca

SEQ ID NO: 467282 - DNA, 122 bp, Homo sapiens
tcctgacccagcagccagggtggtcctcttgcgagggaagtcagatccactcttcccgctcgggaccccggagtggccccacggccctgagagtcagccagtgccttgaacggccctcatga

SEQ ID NO: 467283 - DNA, 122 bp, Homo sapiens
atcctcagctttgaagcattgcactgggtgtgacagaattctcctcctgaactgtgttctcgtgacacctgagctgaaggaacacagagctaccttcttacttgctgtagggtattcgccag

SEQ ID NO: 467284 - DNA, 122 bp, Homo sapiens
gttcttcgccccatctggtctgtaccctggctcctcggtccagccctattgtgtgtgcttcgttaaacctacaaacagtgaatctgtcagcggggccaggggaaccccaactagcaggagcc

SEQ ID NO: 467285 - DNA, 122 bp, Homo sapiens
gagacacagaaggagacagaaagcaagagaccagagtcccgggaaagtcctgccgcgcctcgggacaattataaaaatgtggccccctgggtcagcctcccagccaccgccctcacctgccg

SEQ ID NO: 467286 - DNA, 122 bp, Homo sapiens
ataaaacacgccacagcctgggaaggagcgtgctctaccctgtgctaagcacggggttcgcgcaccaggtgtctttttccagtccccagaagcagagagcacagcccctgctgtgtgggtct

SEQ ID NO: 467287 - DNA, 122 bp, Homo sapiens
gcacatggctctgctcgtgctgcctgatggcgaggggggtgatggggggaaaaggggcgccgcttaaaggggccgcggtcctaaagatggttttgagaagcaggaagccaaaataccgagag

SEQ ID NO: 467288 - DNA, 122 bp, Homo sapiens
aggccaggtgggggatggaagcgattgcgttgcctctctaaattacccccactgtagacgcggtttgtggaactaattttgagctgccagaatataagaaccttctcaccccctattctggc

SEQ ID NO: 467289 - DNA, 122 bp, Homo sapiens
aggggatttggcgtgggcagtggaggtgctccagggtcctgcactagggtgcagcctgggcgttttgctcgaaccctgtgaccctcctgccccgtccttccagggttcagtggccaagggtt

SEQ ID NO: 467290 - DNA, 122 bp, Homo sapiens
gcgcggcctctcgggtagagtagtccggttccccatctgggagcgcgatggggcgcgcaccgcgaactacccgtcccatggcgcaccgcgcgcagagcgtcctccaccgccctcctcttcgc

SEQ ID NO: 467291 - DNA, 122 bp, Homo sapiens
cacttctgcaaacagaataggctttaaaacaatatttgtaaggccaggtgcggtggctcacgcctgtaatcccagcagtttgggaggccgaggtgggcagatcacgaggtcaggagatcgag

SEQ ID NO: 467292 - DNA, 122 bp, Homo sapiens
ctcccgctggatctttaagtagaaagtaatctatcaggccagtccttaaaacgggactttcgactaccggggcttcggcgtccctgacacccagccccctgcccccccgctactgtccctgc

SEQ ID NO: 467293 - DNA, 122 bp, Homo sapiens
ctgggaggcaggcctgcatttctcaagactcgtcactcttctctcttctgaggggacttccgccataggctctccacatcgcccgtgtcctctctttcactcctagcaggtgaccctccctc

SEQ ID NO: 467294 - DNA, 122 bp, Homo sapiens
gggcaccgagggcgcatgcgcgagggcagcgaccgcgactcagtctccgcagagcccgggcgggagtagctggtggaccccgttgagctgccgaacttccgggactcccccgcgaccccttc

SEQ ID NO: 467295 - DNA, 122 bp, Homo sapiens
cctccgcctttccccccttccatttttgcagaattagggatcctggcctgagtaaatggacggttggaaatggtggctgaatgcaacaccgcagtcccagtcccctcctcttgcacctgtct

SEQ ID NO: 467296 - DNA, 122 bp, Homo sapiens
gcaccttctgacctccctatggtggtcccttactcctatcacattgcatgaaactgtaatcgggtggttattttggtgaattttttactatcggctacgtaagcccagggtttggttttgtt

SEQ ID NO: 467297 - DNA, 122 bp, Homo sapiens
tccacctaattctaagatgctccatcatgacagaaggaaaagagtggaacttgtttgcatcgttctggcttgtctgggggtgctgctcatgggactgattactgtttcacctgatgcaaagt

SEQ ID NO: 467298 - DNA, 122 bp, Homo sapiens
tggcagcgaggggcaaaaagccgggtcgggcaaaaagccaggtcgggcagaaagccgtggcggcggcggggggggcaaaaagccgcggtgacaaaaagccacggcggcgggggtgaaaaagc

SEQ ID NO: 467299 - DNA, 122 bp, Homo sapiens
acttgaagaccaggctgttttctacaacaccaatgtgctgcttagacatgactgcgcccacgcttctagggagccctgggcctgggtgtgagtcccacacacataaagcactccttgccaag

SEQ ID NO: 467300 - DNA, 122 bp, Homo sapiens
ctagtccagtgcagccgggtgggagctgcagagcgaagcaggtgggtgtggagccaggcccggggcagcaggagtggctggcgcgcggaagctgagggaggcaccccgccgaggtgtgggcg

SEQ ID NO: 467301 - DNA, 122 bp, Homo sapiens
gccgctgctttgggtggggggctgacagggctgcgcgcgtcgcgctcttggctggggctgcgcgggcccggggcgctgcgggcggctcagcggcagctgccgcgctctgcgcctcctctggg

SEQ ID NO: 467302 - DNA, 122 bp, Homo sapiens
aaggggaacagataactaatctgtggccaaccaaccaatgattaatcagctatgctgcctcggatcttgatcaaaaaaggaaaatgtgaaaagtgatacacaaaatggcatcactttggttc

SEQ ID NO: 467303 - DNA, 122 bp, Homo sapiens
gaacgcttggccaggctccttatctgcgtccccagagacatttccgccttgaaacgaactcggtggacagcccttgcccatgtaattctcactctgctgaaattagcacagcacacatgggt

SEQ ID NO: 467304 - DNA, 122 bp, Homo sapiens
tgtaatttagcattgttatttattagggagaaaaagatctcttagtgaagacggatctcccgtccacttgactggcagaggctcctggaggactgagcatagcagggaagaagcccccagac

SEQ ID NO: 467305 - DNA, 122 bp, Homo sapiens
ccatgttactttaaaaaaaaaagagtcaacaaactgggaattgaaaggaactttctcagccggataaagggcatctataaaaaagctacagctaacatcatactcgtattagtccatttatg

SEQ ID NO: 467306 - DNA, 122 bp, Homo sapiens
aaaagaagccatttccatttccaagaagagccatctatatgtcttacctgatgcttgcagcgtgtctggttagagctctgccctccgaggtgcagtagattaaagctgagagaatggggcct

SEQ ID NO: 467307 - DNA, 122 bp, Homo sapiens
agggtgcagggcagaagtgtccgagtccaagtccacatccaggtgtgctgcctgccctagcgtcctcaaggccaaaccacccacccacccacccccagcctcaggaagctgctgtgggtccc

SEQ ID NO: 467308 - DNA, 122 bp, Homo sapiens
atgttgggggcactggtgagtacactgcacaagtgacaaaatgttttcagctcctggaggcgaaaggtgcagagtcgctctgtgtccgtgaggccgggcggcgacctcgctcagtcggcttc

SEQ ID NO: 467309 - DNA, 122 bp, Homo sapiens
ctgtgtggcttcccggattactcggaatccttcattatctattctacagcaagtggccctcggcagctcaggctcagggaatttcaaatgtatcacctccaccggctggacaagtcctctca

SEQ ID NO: 467310 - DNA, 122 bp, Homo sapiens
cgtggttcctgtgctttggactgtgtgcaagtgtcgtgcctcatgcatctctctctgtgacgtgtgtttctgagaccggcccaagcaggggccgtagccctgtccgttcctttctccattgg

SEQ ID NO: 467311 - DNA, 122 bp, Homo sapiens
ctaaaataatggacattatattagcgtattcagtgagctccagcaactattacaggtggccggccggccttccttccttccgccctcgccctcttcatgcctcagaaacgtggcctactctg

SEQ ID NO: 467312 - DNA, 122 bp, Homo sapiens
taaagtgacatctaggcagagctacctggtatgactgtgcaggtcgaccaaggggaagagcggggattaaaatctggttcacaattgccaaacctggtgcagggctgtatctgcctttttct

SEQ ID NO: 467313 - DNA, 122 bp, Homo sapiens
ccaccgcattgcagaagccatgaacttggcgggcgtgggggggaaggggaagaagtccggcgagattagaggggaaatccgaaaaagcaagcccctgcggcagcagccaggaaacactcgcc

SEQ ID NO: 467314 - DNA, 122 bp, Homo sapiens
agcccctgtcacgtagcccttctaggttcctgtgtatggcggattccctccagtttctcccgctggcgggctgcatctaaagtcgtccgagtcaacagccgtgactctgggtgatactagct

SEQ ID NO: 467315 - DNA, 122 bp, Homo sapiens
aggtcaggcacacattatcccggaagtagggcagcctgatggacagcagcctggatagtgcgctcccggctttccacaggtggaagtagccgtccaaggacaccgctcccagttcctggttc

SEQ ID NO: 467316 - DNA, 122 bp, Homo sapiens
cgcacagcaccccatcgccaaacgacagtggcacatatggagcaggagctgggcccaagccgccctggaggctcccgtggggaaagggctcaggagtccagtgtggcctggagtgtgcatca

SEQ ID NO: 467317 - DNA, 122 bp, Homo sapiens
ccatagtcctgtgctttggctgataaagagatcacaggaaacaaagctattaatttttatcgctgcagtgcaatagcacatttgagtgaatacaatatatccaaggggaaaaatactttctc

SEQ ID NO: 467318 - DNA, 122 bp, Homo sapiens
gtggcctccctgtctgaataattcagacggtgtgtgaaggaagcccccacagtcctggtacgcacaggccatctggggcaggcactccccaccgatcagcctggctcttccttctcctgctc

SEQ ID NO: 467319 - DNA, 122 bp, Homo sapiens
tggatgcacggctggggaggagcccatgggccggagctgaggctgcccggggcggcggggcgcggggcagggggcgcggtcgaggcccggaggcggcggcgcaggaggaagcggaggaggtc

SEQ ID NO: 467320 - DNA, 122 bp, Homo sapiens
gttttctcagccagttgctgtggaaggagaatgctttctttgtggcctcatctgtggtttcgtgtccctctgaaggaaactagtttccactgtgtaacaggcagacatgtaactatttaaag

SEQ ID NO: 467321 - DNA, 122 bp, Homo sapiens
cacccacctcctccctccttattgttccccaaacatctgctcaatgcacagctctagtgccggccatgaccgaccccattcagcgtgcccagactcatcgctcctggtgagtttccgggaac

SEQ ID NO: 467322 - DNA, 122 bp, Homo sapiens
tgagattagaagagaaactccttagatgggggacttaacctgaagacatccttttagaaacgatcgaatggattgttgcttctgagaaattgttccttgttttttggataataaacgatctt

SEQ ID NO: 467323 - DNA, 122 bp, Homo sapiens
ggtcataaatgcttcctcggtgctgcctccgccgcctgaagtcccgctctctcctgaagccgccatttccccggcccagccaccacgtgacccttctgcgcaggcgtcgcctcacgtgattc

SEQ ID NO: 467324 - DNA, 122 bp, Homo sapiens
acctggagggggccctgttgaacagctaatcttaggaacacagcatgaggactgggagttcgagggagggccagtcaatggagtgcagactgtggactggcttgtttttttttaaccccgag

SEQ ID NO: 467325 - DNA, 122 bp, Homo sapiens
gcatatatggataaacctttcctgtgatctggtctctttctcacttcctcagagtctttgcgaaatgccactagacatgtgaggtttcccttgactacgctgctcaaagttgaacgtgctct

SEQ ID NO: 467326 - DNA, 122 bp, Homo sapiens
accttcccaaacagcaggggttgtgtgctttcacatagcagtactgtacaaggaaaaccccgtcggatctgttattgcgggatacttgtgaaatatacataggattctttcttatggctgca

SEQ ID NO: 467327 - DNA, 122 bp, Homo sapiens
ccaaagcacgaagggatttgatggcttgtgaaggcaacgtgctcttcagagtcgggcagacgtgcagctgaagcttggtctggccactgatctgctgcccggccttgggtaaactcctggag

SEQ ID NO: 467328 - DNA, 122 bp, Homo sapiens
cgatctgactttgcacaacgcccggagcacaggaacaggagtgggcgccccggaggtccccggagcccacccaacggaggcccgacatcacgcaaacaggagggaatcgcagccccggcccc

SEQ ID NO: 467329 - DNA, 122 bp, Homo sapiens
gtacaccaattaaccaatgggagcctctagagggtatttaaatcccagaaaattctgtaacggagttcttgagcccctatgctcacgctggctcccaccctgtggagtgtacctttgttttc

SEQ ID NO: 467330 - DNA, 122 bp, Homo sapiens
tcctgcatgctctacatgattgcttaaaggcgtgctttcctttccccggtatgacaacaccgctcccgacctgatcttcctaataccatcactgtaattgccttgacatgaaatagcagcac

SEQ ID NO: 467331 - DNA, 122 bp, Homo sapiens
aatgaccccaagacctttgagggcgttgacccccagactaccagcatgcgtgacgtctaccggaagtttgatctgggccaggatgtcatcgatttcactggccatgccctggcgctctaccg

SEQ ID NO: 467332 - DNA, 122 bp, Homo sapiens
aacggggaggcctcctctttgtcctcgcagatgctggagcagcgactggcccgggagatccgtgccctggagagaagcaaggagcagctgctctcggagagtgagcctcccgcgccaggtgg

SEQ ID NO: 467333 - DNA, 122 bp, Homo sapiens
aggtcccctcccttgttgtgtgtgtgtgtgtgcgcccgcgtgtgtttcctgaaaggcgggcgaggtgggttcaatatctgttctccctagtgagaggaatacagcctctagagaaaacttct

SEQ ID NO: 467334 - DNA, 122 bp, Homo sapiens
gggacgcagagcagggttgggggtcgctgggaacaggggtgctggaactcaccactttgccgcggggcccggtcttccctggggagccctggagaaagcgggcagtgaggggtttggcgagc

SEQ ID NO: 467335 - DNA, 122 bp, Homo sapiens
cagccgaccacctggctttaaggcagtggagcctgagtgttcaaagtggacccactttgacgctttgctctatatgctgaaataatcctgatgtaaattagctatatgaaaaccaagcccca

SEQ ID NO: 467336 - DNA, 122 bp, Homo sapiens
cgtaggcctgtgtcccatccaagacactgctcacgtcttagcctgattacctggccgcctcggctcacctgggcacatggtgagccgcggaactggcaggcaccaaacatttattgaatgaa

SEQ ID NO: 467337 - DNA, 122 bp, Homo sapiens
ggccacgctgccctccacatgacgaggagaaaatgccaccgatgttcacgctccgggccacgctgccctccacatgacgaggagaaagtgccaccgatgttcacgctccgggccacgctgcc

SEQ ID NO: 467338 - DNA, 122 bp, Homo sapiens
ctcacaggacagtacgaatatctggcatttttaagttcattaaagcagcaaattccttctcgcctttaagggctatggttgtagtgtgacccgtggctaacctgctttcaaaatcaagtatt

SEQ ID NO: 467339 - DNA, 122 bp, Homo sapiens
ggactgggcctgcctcatcctagcatcttaaaccctctttccagagctgcagcttctccacgtggaagatgtctgctctggtgggcatacattcattttaggagagaaactaaactcacaac

SEQ ID NO: 467340 - DNA, 122 bp, Homo sapiens
ttgcctcctgtgaacgtggttctacgtctatcaagtaagaataatcgcaccgaactcacgcggttgtttgaagtttaaacacacagatgcaaaaccacgttgaagtattttccacatgcaaa

SEQ ID NO: 467341 - DNA, 122 bp, Homo sapiens
gtgtatctggacaacactctatacataagcagtgttgaaaacaccctgcaatgtaactaacggataggcttgagtgccctgagccttccttgggttgtttgggttacagctaaactagcctc

SEQ ID NO: 467342 - DNA, 122 bp, Homo sapiens
cccccgccgcaggggcccgggaccctagaggaggcggggctagcaggtgacgtcagcgggcgggcccgacagaattaccgccgcggcggcgatggaaggcggacgggggagatatagtcact

SEQ ID NO: 467343 - DNA, 122 bp, Homo sapiens
ggagaagataccttctgcaacctgccaacattttaaccggcgcgattcttccgctgagcgcgcgcctcagccagaagttggagtgccaggccaagagcgcacgctctggctgcagctccgcg

SEQ ID NO: 467344 - DNA, 122 bp, Homo sapiens
tacttctactcacagcggccgattccgaggccaactccagcaatggcttttgcaaatctgcggaaagtgctcatcagtgacagcctggacccttgctgccggaagatcttgcaagatggagg

SEQ ID NO: 467345 - DNA, 122 bp, Homo sapiens
gggaaggcgccctgcggccatggaggcgcagattgcggtgacaggactgcaggtcaggagcgccagtgtcctccaccgaagctcggagagagagcacggcccgcccccgtcagacttctggc

SEQ ID NO: 467346 - DNA, 122 bp, Homo sapiens
gatgttccactgagaagaagccacatggctctccgccggctctcaagccaaaaacagttccgaaaatctgggcggggagcgggccagagagcgctggggctctgcccccagcaccccctcca

SEQ ID NO: 467347 - DNA, 122 bp, Homo sapiens
gggagttttaggcagcgtttgcctttccctggttttcttcaccaagccccatcctccccccgcataccacccccagtcaaaagagtgggagaaaatgcacagttcgaagtcggtgagagcaa

SEQ ID NO: 467348 - DNA, 122 bp, Homo sapiens
cccagcctctttggtcagccatctcctgggtagggggggtcttatactgggggctgtgcccggtttcactttccgtcctgcttgtactttcagctttgtgttcactcattcttccctctcgc

SEQ ID NO: 467349 - DNA, 122 bp, Homo sapiens
aaaaggtggggggcctggggaggcgaggggagctctatccccctttcagatcctccgcagcgccttcgcgggtcctggaccctcacgggatcgtcccctttcgcaactccaagctcagccgc

SEQ ID NO: 467350 - DNA, 122 bp, Homo sapiens
gccttccaggtaagtcacaaactatgcgtaatatttccaggaagcattccagccctagtacgtggatctggttgcattgattttatttccaggtatttgcatacactctgccacagctccga

SEQ ID NO: 467351 - DNA, 122 bp, Homo sapiens
aaactgtaatatcattgaatccttgaatctcaaattttagagactgatttctctggagtgcgtgcaaccctggctaagcaactgtttctaaagcacagccctctttggaaagggagacacag

SEQ ID NO: 467352 - DNA, 122 bp, Homo sapiens
attagtaataattttttaaaaagtcatcttagggaagacttccctgtcactttttctcttcggtgctccttcaacacataaaatgctaattactattatatagtaaatatcaaaacgaactt

SEQ ID NO: 467353 - DNA, 122 bp, Homo sapiens
ctggctgcgcttattaatccgttaagctcgctctgtcacgggcgccgtgatgtgctcacgcgcccactccctcaggtttaaaaggcgcgttgcccggcaacagaagaaactgctggcttagc

SEQ ID NO: 467354 - DNA, 122 bp, Homo sapiens
gggaggtgatatgaacaggcagaggcttctgcacgtgctttctatacagaatcagcgtagcggcccagattgtcctcctccactgccgctccaccctgggaaatggtctcaaagcgatccct

SEQ ID NO: 467355 - DNA, 122 bp, Homo sapiens
cctggttcttatcctgccaacagactatttaaacaacctttgtccggactccgccgagtacgacaacacacagggtgagtccagcgtgaatgcggagggaggtactcaagcctgctctgcct

SEQ ID NO: 467356 - DNA, 122 bp, Homo sapiens
gggcgaggagcggcagggcggagcacacgccgccgcgggcccgatcccctgccgcccgcccgcgccgctcaccatccgctccgaaactggagccgagatctcctccgagagcttggccaacc

SEQ ID NO: 467357 - DNA, 122 bp, Homo sapiens
tcagacaggggtctgggactgggcccagacccagtgagtcaacaacaaccccaacaccagcgccgcagcagaagactcaagccaaacctacaaaggctgccaggcagaaggttctagtgact

SEQ ID NO: 467358 - DNA, 122 bp, Homo sapiens
tttggcttttacacattatttcctttccctgaaaagcttctcccccacattttgtatatccgactcctttttgttcctcatagataataaaatgaatatcacttcttcagagagatctctac

SEQ ID NO: 467359 - DNA, 122 bp, Homo sapiens
tttaagggtctctcactctccggggagcccctttccttcctggctgcggagggcggagcccgagagaggcacgcatgcgcaatgcaacgtctgccttaggcccggaacttcggtgcctgggc

SEQ ID NO: 467360 - DNA, 122 bp, Homo sapiens
ttactggctccccctcctgaggcctccgaggtgtacctggcgcctgcgcagtaaggctagcgccgccgcctgtgcggaggacccggggaggtggtgggctggggagagttagaaaggtctgg

SEQ ID NO: 467361 - DNA, 122 bp, Homo sapiens
aggattgtttttcttctttcgggcatgtgataacaaggggtcccctgtataacaaacagccggccggcattcacctcttgtctcaaaatcttcttggcgcccgtttttgttttttcaacttg

SEQ ID NO: 467362 - DNA, 122 bp, Homo sapiens
cgtgggcccgcgaccacacacatcacagctcacagccacgcaacctcaggggcgcacacacgtgtgcaaatacaccctcaccagcaatggagagtgtggaaggcgccatgtgacacctccgc

SEQ ID NO: 467363 - DNA, 122 bp, Homo sapiens
aggtctctccctccttcctcttttctatttctgcagtcctccttctctgtggaaaacaagcgtccgttttaggtcttgcccccacacctttctttattagacttaataaaccgtgtctgtgg

SEQ ID NO: 467364 - DNA, 122 bp, Homo sapiens
tatcggcacgcagcgatgagatgtgtaagaactaacacgaagctgcgttcctcccagtcacgcgcaggattggattccttttcacggtcagcctccggtaccttcgacccaggacgagaccc

SEQ ID NO: 467365 - DNA, 122 bp, Homo sapiens
tagctcgatgacccctttaatcgctggcatcctctgttaaatcaggaataaataacatcacgtctgaggcttgttgtgagaaaggagtgagataaatgtatgcaaagcacctagccctgcac

SEQ ID NO: 467366 - DNA, 122 bp, Homo sapiens
cagatgcagccaggcatttagaacccacttttggaatgaaaacgcatgtgtagtttgatccgtagaagaccctgacacatttgagtagagatccccgctgcacttatgccagtagacaaggt

SEQ ID NO: 467367 - DNA, 122 bp, Homo sapiens
cacttcgtaaggtttaaaaaggatgcttcgcgttttctctctcctttttggagacagattcgcagtggtcgcttcttctccttggtaagtgtgatccttggtaagtgtgatcagatgcttgc

SEQ ID NO: 467368 - DNA, 122 bp, Homo sapiens
gaggccccagactccctttgcctacctcttcctctctgaccccatcctcgctttgatgcccgggacctgctacccaggtacgtgggtcttctctgccggatgtggacatcttggcctctcgc

SEQ ID NO: 467369 - DNA, 122 bp, Homo sapiens
gttcaggagtgtgcagcaaactcagctgagagagaaaattggaacaaaagcaggtgctcgcgggtacctgggcctagcctcttagtgcggccagccaggccaatcacggcccccggctgaac

SEQ ID NO: 467370 - DNA, 122 bp, Homo sapiens
ccgcccacctcggcctcccaaagtgctgggattaccggcatgagaccgtaatcagcactgcgcctggcctcagcagatatttttctaatgaatgattaattcgccctgggatttagtgctct

SEQ ID NO: 467371 - DNA, 122 bp, Homo sapiens
gttcggtgagtgcgccctgcctatagcgcccagtggaatcgctagtacctgtctctgtggcgcaatcggtcagagcgttcggctattaaccgaacggtgagtagttcaagaccacccaggga

SEQ ID NO: 467372 - DNA, 122 bp, Homo sapiens
gggtggcatctgtcacggtcagctcccccaggcgaggcttgatggggggctcgggggttgcggtgggaggttctgaaggcttctcctcctccgggactggacagagacatggaaagagagga

SEQ ID NO: 467373 - DNA, 122 bp, Homo sapiens
tccgtcggctcctctccctcctggaatataagatggagtcccctgtggtactgctgcccccgcgtcatatgctgcccccgcgtcgtatcctgcccaccccctggaggcaggctgcctcccca

SEQ ID NO: 467374 - DNA, 122 bp, Homo sapiens
tcacttgaagcttatgaacaaggacaggtacctgtgtgtcctgccagctcacgactcacgcgcacgttcccctcacgagttttcagattgtaaatggagcaaatgttatccaggccaccgca

SEQ ID NO: 467375 - DNA, 122 bp, Homo sapiens
cgggggccgccccaaggcgggagcctggcccgaggacgccacggcaaggcaacaggtgggcgtggagggcccactgttgaggtagaggctgggcctctagaggccgccaacaggcaggggct

SEQ ID NO: 467376 - DNA, 122 bp, Homo sapiens
tacacagaaggccttcccctcccgtcggctcattcagccgcggaagcccctgggagaccccgccccgccccgtcccgcggtgccccccgcgcactcaccctcgctcacccacgcggccttcc

SEQ ID NO: 467377 - DNA, 122 bp, Homo sapiens
cgtgcttagcgtcctgcgacagtacaacatccagaagaaggagattgtggtgaagggagacgaagtgatcttcggggagttctcctggcccaagaatgtgaagaccaactatgttgtttggg

SEQ ID NO: 467378 - DNA, 122 bp, Homo sapiens
ggaggcaatcgggctgcaccagagccactgagcttttattcattcccttgaccttgtaaacgtcacttaagtttcagttgtaagaatgggctgctcctctggtgaaaagcaaatgcttggaa

SEQ ID NO: 467379 - DNA, 122 bp, Homo sapiens
ccaccctccgccacccactccaaccctggcgctccacaaggtctcccgcagtccctagcccggtccagctgggcacagggcccactctttgctcacccacattgctcccctgcctggggcgg

SEQ ID NO: 467380 - DNA, 122 bp, Homo sapiens
gtacccaagccgtggagaaagcccaggaagggcacgtgctaggatctcacacctgacccgcggcagaggctgctcgggggtcagacctggcgctggcgtttctttctgctcttccgcctgtg

SEQ ID NO: 467381 - DNA, 122 bp, Homo sapiens
acgccttctgtcgtgagcagttgacaagaaagacccagcacttactgcaaccggaaggagcggttcctccctcgctcgcgcagccgctcttccccgccactccctcggtgcccgccagcaca

SEQ ID NO: 467382 - DNA, 122 bp, Homo sapiens
tttaattggacattagcacaaagttttgataattaatgtaaatgaaccttgtctacaaagcgaagcatgcctgctggtgagccacacagatactgctccttcagattgaggttgtacatgcc

SEQ ID NO: 467383 - DNA, 122 bp, Homo sapiens
ttcaacaatcttcctaatatgtaggctcactagaacattttctctttcaaactgcccagacggttggacaggacgtagacacacagaagaaaagaagacaaagaacgggtaggaaaattaaa

SEQ ID NO: 467384 - DNA, 122 bp, Homo sapiens
ttgttgttgtggtggtggtggtggtggtgacagggcctttctctgttgtcccatccagagcgcagtggcaccatcagctcacagcagctttgacctgggctcaagtgatcatccctcttcag

SEQ ID NO: 467385 - DNA, 122 bp, Homo sapiens
tttcttctgcagagctgtgttgggcgttgcctgtggccagcatttgagcactgtgacaggcggcctcatgaatcttgctattgtctctaggacaggactattctcgaggacattatcctcag

SEQ ID NO: 467386 - DNA, 122 bp, Homo sapiens
ggatctgctttgcaagatgaaggacccttcagggagaggcagcccctcccagcagcctcacgaagtgccacagcagagcaggtggagctcagcttgggtcttaacctcccctcaccttctca

SEQ ID NO: 467387 - DNA, 122 bp, Homo sapiens
taatcacagtgttgactttgattgcatacccatgtccctggcagcttagaatggttacagcgcttaaggtaacatacaaagtgcagatgagtaagaaaagaacctgacaaaactcagtgaaa

SEQ ID NO: 467388 - DNA, 122 bp, Homo sapiens
cgggtccagagctccgattggccagagtcggagtaaacatccggcgggacggggcggggccggaagtggaagtggaagtagaaggcggtggctgaggcggttccggaggttctagtgtcgga

SEQ ID NO: 467389 - DNA, 122 bp, Homo sapiens
ccgccgttttctttccctgcttctggatctcgatttcttcctctctctgcttctggatctcgatttcttccgctccctactcctggatcgagacttcttccgctccctgcttctactacgat

SEQ ID NO: 467390 - DNA, 122 bp, Homo sapiens
gccagccccgcagactcctgtgtccgaatgtagtgctccacacgtttctgcagcatcttccggtgtgcccaaaggctgacattctgtggcacaccaccatgcacagaccttccggcagaatc

SEQ ID NO: 467391 - DNA, 122 bp, Homo sapiens
tcccgcgtgggccccggttcctgaggcgctggctcccgggtgcccccctccgggagctggcggtgggaaccttcgatgggcccccaacctcgaagtctccgccacctttcccgagtgggggg

SEQ ID NO: 467392 - DNA, 122 bp, Homo sapiens
agggatgtttttaggtgacatcactgaagaaactcggggtagtgcagtattcaggaatctcggtcccctccctctctcctctctgctctgctttgtgctagctttattcccaaacaagctcc

SEQ ID NO: 467393 - DNA, 122 bp, Homo sapiens
aagagccatggcataaggccctaccaccagctgcatacagacctgctgagacataatgagcgtatacaacaagggcttgcagatggccacataccggtcatatgccatggcagccagagaaa

SEQ ID NO: 467394 - DNA, 122 bp, Homo sapiens
gataagtacgtctgtggatacgggccccagtggtcagagactgagtgcccgctgtgtgcccgtcactgtactcgcggcttgtgagcagctcactgagtaataaaacccgtatgagtttggca

SEQ ID NO: 467395 - DNA, 122 bp, Homo sapiens
gttgctgcaggtccacagcccctagtgctggggacagagccagcctctgtgagagccaagcgcgggcaccaccactgagtctggacgccaggaggcagagccagaggtcctgaggaaatggg

SEQ ID NO: 467396 - DNA, 122 bp, Homo sapiens
gcatctgttcagttctctacctgccaaggacattctcagcatcacatctcgagtgggcggcgtgggtgcgtcggcggtgtccttacggagaaggggcacacgcctttcctccagccccgtga

SEQ ID NO: 467397 - DNA, 122 bp, Homo sapiens
tgagcccaacacctggcctgcttacctctggactgctgtgtgagtgagaaacaaaccttccgattgtgtatgtgctcttatactggtctttatcaccttgactggaaatctctttgcatggc

SEQ ID NO: 467398 - DNA, 122 bp, Homo sapiens
ctcacccggaggtcacaacacacttttaggggccaaactttgtcctctgcttctgctactcggcgtctctgctaaaggcattcaacagctttcctccggcactggcctgggagcactggggg

SEQ ID NO: 467399 - DNA, 122 bp, Homo sapiens
aggggttctacgggtattgcccggcgctgtgtttccaaagcccagcatgtgcctggcccacggtgggcgcttaagaaatgttcatgcagtcaagggggtgcagctgcctggcaaggagaacc

SEQ ID NO: 467400 - DNA, 122 bp, Homo sapiens
gactctggggaatatcacaagggaacaacacagttgaatcagaaaaatgcaaatcagaatcgcaagagagcctctaggttttcacagctgcctaacctagttctaacaccaccagcatgcgc

SEQ ID NO: 467401 - DNA, 122 bp, Homo sapiens
cgcggggcgagcacccccaaactcggcgccccggggacctgcgctgagacacgggccgggcggcgcagcctgaggagaaagccggccaggtctttgacacccagccggaccaactgcgcgga

SEQ ID NO: 467402 - DNA, 122 bp, Homo sapiens
ttatagttcacgttggcagcccctgtggagccaagggcaggctgcttgcacccagtgaaccgctgtctcttttgggaagtccctccgtctgctgcattaatcctacctctggcaattcctgt

SEQ ID NO: 467403 - DNA, 122 bp, Homo sapiens
tctcgtcaatgccagtctccctggtatgattggggacattatcagagaaacatctaatagcgcacatctgggcacccacactctgcttcagttgcatccatcctcccaccccaaattcaact

SEQ ID NO: 467404 - DNA, 122 bp, Homo sapiens
cagggccgcacagcaggcctcgggaaccggattcagtctccagggtgcagctcccagggtcgcacagcaggcctcgggagcgggattcagggccggggtcagggcccttcccagcattcctg

SEQ ID NO: 467405 - DNA, 122 bp, Homo sapiens
cccgcctcgcagcacacacctcctgcagcacacaccccccccgaagcacacacacccctgcgccagggtccaggcgtcccccaagacccccgggcggaagctaccgccccctgcccccaccc

SEQ ID NO: 467406 - DNA, 122 bp, Homo sapiens
caccgtgctggttgcagtgaatgaaacaggttccaggctcccagaactcagtgaggttggcgagccgggccggcacacagaaacgctgctacaaacacgcaaacgtgctcccctccatgcag

SEQ ID NO: 467407 - DNA, 122 bp, Homo sapiens
ccgcatcccgatggtgaactgctaactaccgcatcccgatggtgaactgccgaactctaccgcatccctatggtgaactgctaactctgccgcatcccgatggtgaactgcctaactctacc

SEQ ID NO: 467408 - DNA, 122 bp, Homo sapiens
cgggcgtggtggctcacgcctgtaatcccagcactttgggaggccaaggtgcgcggatcacggggtcaaaagatcgagacaatcctggccaacatggtaaaaccttgtctctactaaaaata

SEQ ID NO: 467409 - DNA, 122 bp, Homo sapiens
gacactctccagggaggccccagcaaccacaccatcttcttgctgtgagaggtctcaccccgggctacctcctgtcactactcactgccctggggtccgtgggcaagttgcccagggtgggg

SEQ ID NO: 467410 - DNA, 122 bp, Homo sapiens
tgtccagtgtgagttctgtgatgggaaattaggttagaactttaaacaaaggcctttccacgtttgttacactgataaggcttatttccaatgtggattctttggtgttacacaagattaga

SEQ ID NO: 467411 - DNA, 122 bp, Homo sapiens
tcagcctgcaaggcgagcaccaggacttgacagtctctaaaggatggacggatgtccgtccggaagggcagtccacgcagacccccgcccttggccggacagagagtctttcgctgccaccc

SEQ ID NO: 467412 - DNA, 122 bp, Homo sapiens
cacactggctctggccagcattatgctaaaaccctgttactctccaatgaaccagggaggcgggctcctctctgcgcctatcccttgagaattctgtcttaccagtgaagggtggggctgcc

SEQ ID NO: 467413 - DNA, 122 bp, Homo sapiens
cagaagttctttggactgccccagacaggtgatcttgaccagaataccatcgagaccatgcggaagccacgctgcggcaacccagatgtggccaactacaacttcttccctcgcaagcccaa

SEQ ID NO: 467414 - DNA, 122 bp, Homo sapiens
cagcagaggccgggcgcggtggctcaggcctgtaatcccagcactttgggaggccggaggcgagcggatctcgaggtcaggagttggagaccagcttcaccaacatggtgaaactgtagaga

SEQ ID NO: 467415 - DNA, 122 bp, Homo sapiens
ccggacagaaccgtgggatgcgcctgccctgagcctggtgcctgagcattatggaggccacgtctgacaccagctcgggagtctgctccaagtcagatgcggacctagcccaggctacaccc

SEQ ID NO: 467416 - DNA, 122 bp, Homo sapiens
cccagcccagggacctcgactttcaacgggagaaattcagagacacattcagggctcagccggtagatgtgctgagaatcttcggtagacaactgtcgaagtacggcggacaaactttaaag

SEQ ID NO: 467417 - DNA, 122 bp, Homo sapiens
ggcactgagaagcccagggtggtgcagtcagccttgagcccacctggggagccggggggccgtcgcagaggccacaaagagctttctgaacaaaaagcacagctctggcagcagtgcagatg

SEQ ID NO: 467418 - DNA, 122 bp, Homo sapiens
tcccacaacgaagtctcccaggctgagagaagctctgatgcccatggcaagcagacagcacgaactgctggagaggggagctgctgactccctcatcttaatggtttatccttggttactct

SEQ ID NO: 467419 - DNA, 122 bp, Homo sapiens
agttccagggtgagtgcgcagaggagcttatctgcctgcctgcgggtcggtgtgtcctgccggctgctgggcgctggcctgcgtcgcctgcttgtctcgctccctgtccctcgtccgctacc

SEQ ID NO: 467420 - DNA, 122 bp, Homo sapiens
aggacagagttatagtttgcagagatgcaaaaagttcttgagatggatggtggtgatggacgcacgacaatgtgagtgtgcttactaccactgaactgaatattttaccacagttttttaaa

SEQ ID NO: 467421 - DNA, 122 bp, Homo sapiens
cggttaccccctcggggcgcaaggcggcaggggtaagggcggggttgtcccccagagtttcggggagcacaggaggctggccgccccaccccaccagcccatcctcccacctccctggggcc

SEQ ID NO: 467422 - DNA, 122 bp, Homo sapiens
caggagacgctctcccgaggatattttggcgcttgttctcccggtgggggggagctctctcgaggatatctgggctgcttgttctccagggggagctctctcgaggatatctgggtgcttgt

SEQ ID NO: 467423 - DNA, 122 bp, Homo sapiens
gacaagtcctgctaatgcaagaaaccagggaaggtcgtcccctagtgctcgggtgtgtagcgccgctgacctcaccaaggcgcgtacttaccctgtatgtaggtggcgttgcagggtgtttc

SEQ ID NO: 467424 - DNA, 122 bp, Homo sapiens
cccgttgtcccggcgaggcgcagggggtgacagacgggaggcgggcgagtcccagcgcgccgggtggggaccaggaccgcgcctccacgactccccagcccacggcccaacccggaagtggg

SEQ ID NO: 467425 - DNA, 122 bp, Homo sapiens
cattacaaaggtccctctctacaaagacagaacacggaggccgattaaagcccgtcagcccggcatcatttttgtaatcgatgctccgtgattgtgaactgggtgtctgtcggcagctgcct

SEQ ID NO: 467426 - DNA, 122 bp, Homo sapiens
cccgcccgctatcggggccagcatcctgcatccttccccgccggccccgcttccccgctccgctcagctcctgcctcgcgcaatgccatcttcagatttcacggaacacatttctgctctca

SEQ ID NO: 467427 - DNA, 122 bp, Homo sapiens
tgggaaggatggtggggttggaggaaaagtcagagagaccttgaggcttctttagtttagcgtgtcaaataccatgttttggcatatcagtttctgagcaccagcactggtcagttttatat

SEQ ID NO: 467428 - DNA, 122 bp, Homo sapiens
gcctggtgggaggagcgactgccctgcccaaatgaactgccacagcagggacagctggaccgcagagtttatttttgtatttctactgggcctgcacactccagcccaaagggtctgtggcc

SEQ ID NO: 467429 - DNA, 122 bp, Homo sapiens
cttttcatttctcttacagtaccatccttgctgagtctggaacagagttacaggcatctgcgttgtttgtagttttaattaaagtgaatctttccttcttcaagtgtaccaaatcaagtgag

SEQ ID NO: 467430 - DNA, 122 bp, Homo sapiens
taggcctgaaaagctgctgtgatcttcctgtcaagctggtgactgagacttcccatcactcgctgtcatctctgagagcacagatttgttccttcttccttctccttttcattttcttcaag

SEQ ID NO: 467431 - DNA, 122 bp, Homo sapiens
gttgcacgtccggacccggacccagacccgagcgtcgcaagaaggcccgttggagtctcgcgcaactgggcaggacgcgacttctgacgaagtgacaatggtctatgcatatattaagtgaa

SEQ ID NO: 467432 - DNA, 122 bp, Homo sapiens
gtctttccttctgggaggccaaggcgcagctggccaagagctgcaaggtgctggtagacgcgcttcgacacaacgccgccgctgctgtgccattttttggcggcgggtctgtgctacgcgct

SEQ ID NO: 467433 - DNA, 122 bp, Homo sapiens
agtgcgcgccccttccccacccctcctcctcctcctgctttcctccagtaagtgcatacccgctagtggtctgtacaggcggcacggtttgatggcagagatattttctttccaaactgttc

SEQ ID NO: 467434 - DNA, 122 bp, Homo sapiens
tcggcgaacttccgctttaaataatcgctcttaattaggtctcgggcttttcagtttcggcgtgattataacccttcagggatcgcctaataacaactctgctgactgctcctgtaattaac

SEQ ID NO: 467435 - DNA, 122 bp, Homo sapiens
cctgcctgcggccctctccggctaaggagcctgtgtggttgacctgagggcatcggcgagcgcgccgggccaggtcttgttccacgcagcagcctggaccccacagtgtgtgcctgcactcg

SEQ ID NO: 467436 - DNA, 122 bp, Homo sapiens
gagaatcaagcagaaacaaaagataatgaaaaaagagaactcactaatgaacggtacattcgaacaagcaacatgcagtaccagtgtaaaaagtgcaatgtggttttccccaggatctttga

SEQ ID NO: 467437 - DNA, 122 bp, Homo sapiens
caagttctcattacttaatctcgccacgacttcccccgctgctccccctccccacgtcgccggcccctacgtcatctcccacaacagcccatcctgaggcgcgcccccacctccttcccttc

SEQ ID NO: 467438 - DNA, 122 bp, Homo sapiens
ccgccaactcctatgaccttgccatcaagaccatcacctccagcgccaaagtggacatgacgttcgaggaggaggagcagctcctgtagttgaaggtgaagtgtctgaacaacctggcggcc

SEQ ID NO: 467439 - DNA, 122 bp, Homo sapiens
ttatagtacaatgtggcaagtagaaagacagtatgcaaggcctgcgcctagggctggaagcgggagacattcggttcataactgccttccttcacaggctgtgatgcaggagctgagtaagc

SEQ ID NO: 467440 - DNA, 122 bp, Homo sapiens
gttttcggacatcatgttgacctgcacctccacagagtgcttggaggtgtaggtgatctccgcgctgacgtgggccacctcaccgatgcacatgggccacaggaagtgggtgcactcgaccc

SEQ ID NO: 467441 - DNA, 122 bp, Homo sapiens
cccagccgacgtgcgccgcctgctgtcctactgcaagggccgcgaccacggcgtcctggacgccctgcacgtgctcgagggcctcttccgcaccgaccccgaggccaaggtggggtctcgag

SEQ ID NO: 467442 - DNA, 122 bp, Homo sapiens
ccgttcatccccggcagggcaggacggggcagggggccgacttactgcacgcgctgtggtcggtccagccgtacagcaccattccctcctgggcacaggtccgggcgtactccaggagggca

SEQ ID NO: 467443 - DNA, 122 bp, Homo sapiens
caggtgctcgtggaagaagtggacattgaagtacttatcacacaaatgaggataaaagtacgataacgatatctaccacgaaggtgagcagacagagctagcggggcttgcaggaggagttt

SEQ ID NO: 467444 - DNA, 122 bp, Homo sapiens
cggagtacagcggtcctggcggcctccatagtggctgccgctgagcactgtgggagctcgcggggtgtgatgggatagctttccagttctgctttaggacccgccccccagcacgctcctcg

SEQ ID NO: 467445 - DNA, 122 bp, Homo sapiens
cttcacctgcgcccgctccttcccctcctccaaagccctaatcacccaccagcgcagccacggtccagccgccaagcccaccctgccggttgcaaccactactgcccagcccaccttccctt

SEQ ID NO: 467446 - DNA, 122 bp, Homo sapiens
gggcaggtctttccacttgatcaggtagtgcacatcccccttcttgtcaaagctgcaacacggtgaacagatgtgggtcgctcagagcagtggccacagcacaggtttgatgaagggcacct

SEQ ID NO: 467447 - DNA, 122 bp, Homo sapiens
cccagggcaggtggccaagctcagagatttcctgggtgattagggggaggggcgcgaaaacgccccttgctgccacctgctccttgttgccagagcaggaacccaggttggggcttggggag

SEQ ID NO: 467448 - DNA, 122 bp, Homo sapiens
aagcacattgtgctcactcttccaggcagctctttcagcggccgggcagtagcagggttccgagcccgtcttctccggggcggtcacacgtgtccattccctggggttggggatcgctcttc

SEQ ID NO: 467449 - DNA, 122 bp, Homo sapiens
gccgcccacctggcagttggagccgactcgagaggaaccgggacagcagcgaactcagtccggccgggcccagaagctgggcgggaaggttccgggcttctgcgcctgcgcagcgccgccgc

SEQ ID NO: 467450 - DNA, 122 bp, Homo sapiens
agaccggggagggggggtcccacattccttcaaacatcagaatccccccggggcagggcacgtgtacaatgcagaaatcgggaccccaccgcggtgtctgatactctgggtcagggccccgg

SEQ ID NO: 467451 - DNA, 122 bp, Homo sapiens
gggcgtggtgcgggcgccgggaagactgggcggggcgaaggcatcacctttcgatggggccggcgctgtgcgtcctccagtcgaggtggggcgctgtggaagagcggcagcttccggtcggc

SEQ ID NO: 467452 - DNA, 122 bp, Homo sapiens
ttcaaaaaatcgaagagtgaagcggtgatgagagtccatctggtcgctcttcggatgcggcgctagcaggcagttgcatgaaagcagatcccagatcacgttgcactggcacacagtaggta

SEQ ID NO: 467453 - DNA, 122 bp, Homo sapiens
ggctcagctgtgtaggggcccatctcacccgtctttgcctccacagagactgggctgcgtcgtttcccatcctggatcccaaagagcaggaacttgtacttgcgggagggttccaggtcagg

SEQ ID NO: 467454 - DNA, 122 bp, Homo sapiens
tcgaaatatttgtagtttttacaggcggcgttgtctttgatagatatttgttattaatatcggagacaaaatgcccacaggggctgcccagtcagcacttatactgaattgagtgacttaat

SEQ ID NO: 467455 - DNA, 122 bp, Homo sapiens
ctgggactagcggaacggcggagtctcgattggcagtgcctggacaggcgcaagggccggcgcgggctccgggcgctcccggcatccctcgggcggcggcggcggcggcggcgaggcgaagc

SEQ ID NO: 467456 - DNA, 122 bp, Homo sapiens
cgggcgcgtctgcgactgggagggggtcggagagaagccacaaagcccgggctgcagacgcggttctgcagggttggcctgtatttcttttagagacagggtctcactctgtcgcccaggct

SEQ ID NO: 467457 - DNA, 122 bp, Homo sapiens
ttgcgcgctgagcagcctccccactcccgccctgcccagcgccgccgtttcacttcctcccggccctccctgcctgcaggagcatctctgtgcccgggtccccgggccacgccatggctgac

SEQ ID NO: 467458 - DNA, 122 bp, Homo sapiens
ggatcaaagctgctcgccatgcagaggcgaatgaaggattattcactttctattttttcacgcctgcagcacacatggggatctaattggtcaggatgcgaaatacagccagccagcccccg

SEQ ID NO: 467459 - DNA, 122 bp, Homo sapiens
gcgcggcgacttcatttgcgtctctgcaacgcccaccctgcagtgccacgcccccgagcgcgaagccttctgggagttctgatcccggacgaccgtaaggtagggccctacagactgactgg

SEQ ID NO: 467460 - DNA, 122 bp, Homo sapiens
tccagtctgatgggggaggcaggcccttccccagaagctcccggcctgatgggagatggacgttcgggtatttgggaggaacagcaggccctcaagaggaagcatgcgtgaatgaatgcggc

SEQ ID NO: 467461 - DNA, 122 bp, Homo sapiens
ccccccacgcgagcccgtcctgtgctgggggcagggagatgggccggtgggagaggagaccgcatccagccctccctggccacctgcagggtccccaccgtggcggctgctttactgctaac

SEQ ID NO: 467462 - DNA, 122 bp, Homo sapiens
ggagcgccctgcccgcaagcgccgccaggtggagcgggccacggaggacggcgaggaggacgaggagatgatcgagagcatcgagaacctggaggatctcaaaggccactctgtgcgcgagt

SEQ ID NO: 467463 - DNA, 122 bp, Homo sapiens
ggactgtcagggtagtgggcgttgcgtgaggcgggtaaatgttcgcggaagcggcaaagacgacacggccttgtgggatggcggagtttaaggagaagcctgaggccccgactgagcagctg

SEQ ID NO: 467464 - DNA, 122 bp, Homo sapiens
cacggtgacggcagggctcctgcagaggcacaccagccccagccgcaaggacactcccggcgcaggctcccagggcaggcgccccgccacagcattcaccaggacgagctggaccaggtggc

SEQ ID NO: 467465 - DNA, 122 bp, Homo sapiens
gggggcctcccttaggggtctgcgggtctctcccccaggggtgtggggtcctgcctcctccgggctgaggtcctcccaccggggtccggggtcccgcctgcggggtccggggtctctcccac

SEQ ID NO: 467466 - DNA, 122 bp, Homo sapiens
cagctcgcccctcattgccgggcaggaccccaccacgtggccgcaccccaatgtgctcatcgcccactgggtgtccaggtgtccgtcctgtgggtgatggatctttctgtggtttcccggtt

SEQ ID NO: 467467 - DNA, 122 bp, Homo sapiens
cggcggcggcggcgagggcccgggtgggtggccgaacttctcccgccatggagggagcagcggcccgggaggcccgggggaccgagaccccgcgcgcgtctgcgcccccgcccgcgccctcg

SEQ ID NO: 467468 - DNA, 122 bp, Homo sapiens
gagtggatttccggatcgcgcaatgcatgcgtggaagtgcgtccccggaagtacggaggccgacaggaagagaaggaaaaaagagaaggcgctgtcccgctcttgctacggtggcctggagg

SEQ ID NO: 467469 - DNA, 122 bp, Homo sapiens
ccatcatcattgtaggtctcatcaatacatgtgatgcttcccctgcctcctaccttcccccgggcccatctgttcactccagagagaagcatagctctggagacggcactctgtactgtctt

SEQ ID NO: 467470 - DNA, 122 bp, Homo sapiens
ctctactaaaaatacaaaattagtcaggcatggtggctcacgcctataatcccagctactcggtaggctgaggctgaggcatcacttcaacttaagaggcagaggtggcagtgagctgagat

SEQ ID NO: 467471 - DNA, 122 bp, Homo sapiens
tgtgtggtgggcgagttgaagcggctgttgacctgtaccaacttgccccggctgttgagccgcatggccgccgcgctgtcgtacttctccttcagggcatcacccaccttgcggaagtctgc

SEQ ID NO: 467472 - DNA, 122 bp, Homo sapiens
ccaacctgggctatctcttcgtctgtaaaaatgaggcctgcgtgacctccggggcccttccgaactctatggtcccacgatgatgattattgtcattgtatattttaattagtactttattt

SEQ ID NO: 467473 - DNA, 122 bp, Homo sapiens
caggacagtgggtgcagcgcaccgtgtgcaagctgaagcatggcgaggcattgcctcactcgggaagtgcaaagggtcagggagttctctttcctagtcaaagaaaggggtgacagacggca

SEQ ID NO: 467474 - DNA, 122 bp, Homo sapiens
ttgactcatgcaacatggatggatcataaatatattttgctaagagaaagaaattattctcgaaagataacatactatagtaataggtgtggagagggtgtgactataaagggcagaatttt

SEQ ID NO: 467475 - DNA, 122 bp, Homo sapiens
gaagctacttaaatccggatttgatctttgctagttcttatccctggacctgaacccaggcgcacatctggattagaagatgccaggctcagaggatcttcgtaaaggtaagccagaaaaaa

SEQ ID NO: 467476 - DNA, 122 bp, Homo sapiens
tttattaatatttatgccgactttgaaggtgctgaccagaaggcatcagtaacacacacacgcacacgcacacacaccacacaccatgtctgtttggtttgattctgagcctgagatcctgg

SEQ ID NO: 467477 - DNA, 122 bp, Homo sapiens
ctttggatatgggctgctacagaagggagacatgtaacctggggcaaggcaactctcttccgtcagcacaaatattgcagagggctgacagctgagggtatctgcacatagcactaccagca

SEQ ID NO: 467478 - DNA, 122 bp, Homo sapiens
atctgcctgcctcggcctcccaaagtgctgggattacaggcgtgagtcaccacgccgggccggtaaggcttttgaaaagagatataagacctgattatggagctggccctcttagtcccatt

SEQ ID NO: 467479 - DNA, 122 bp, Homo sapiens
tagaattaaagaattggatggaacatcagtgctcacattacacatcaggaaactgacatccggtagatcttttcaactgcctggtctttggctatgttatgagggatgccaggaattagacc

SEQ ID NO: 467480 - DNA, 122 bp, Homo sapiens
cttgattgggcagggctccgcttcggattaacgtctctgattggacagttccctaggccccgcccctgcctgtcctgattggataattctctcctcagtgacgggctcgtcgagaacacgcg

SEQ ID NO: 467481 - DNA, 122 bp, Homo sapiens
ggggcccccttccccgggaactgactttccagtgggaacaaggacgaccgtcgaggaacccgacaaatgaattaaaccagcaccagcgtgatgagcaaagcggagaaggaaagagggcgctg

SEQ ID NO: 467482 - DNA, 122 bp, Homo sapiens
acgctcttgctgggctcattgttgtgctgggcccagtggagcaaaagacaggcctccagccggggcacctcccaacaactctgcacccttgattgaaatgcaatgtctgcggctgacggcca

SEQ ID NO: 467483 - DNA, 122 bp, Homo sapiens
tggtacccctagggtgcagggctgagtgatgcagcttgtctatgcacactcttcactgggcgacccgtgtaccctgctgagacgggggcaggcttgagtagccacctccaggtgtagctccc

SEQ ID NO: 467484 - DNA, 122 bp, Homo sapiens
agctcattgccctctgctgctaccatgccaagcactgccaggagaacaaatgcccggtgccgttctgcctaaacatcaagcagaagctccggcagcaacagctgcagcaccgactacagcag

SEQ ID NO: 467485 - DNA, 122 bp, Homo sapiens
taagttggttgatgtcactggcattggctcggccaatcacaagggcgttccgaaagcaagcgctcgacacttgtaaacgcgaagagctgtagtgaaactggacacatctttgtattttgtgt

SEQ ID NO: 467486 - DNA, 122 bp, Homo sapiens
ggagtttttgtccgttttgcaccatgagaaaggccccagatggaatctggcaggtagcggcggttcagtgtgtgtgtgtctgccttagggcgtgttttacactgttgacgaaaagactcaga

SEQ ID NO: 467487 - DNA, 122 bp, Homo sapiens
caccgcaaccttgaaaccatttctctgacctctctaaacctcatctttgtgacgagactacgcccactaagtccgtggggcagtggtgtgaattcaatgaaaatcgagtctggaggacccag

SEQ ID NO: 467488 - DNA, 122 bp, Homo sapiens
cccagcagatggtgctgtctgctaggacaaggctggagagcagtcgctccatccagtcaccgtttcccgcatctggacgcctgcatcatcccctggacagccatgcagaacccgccctgtgc

SEQ ID NO: 467489 - DNA, 122 bp, Homo sapiens
tttcccatctcttcctctcttcccttttccccccactgcatttgtgaaatgcttggcaaacgtgtctcaccagtgaaagggagaccgaaagagagaatgcgacagtgaacacgacacattac

SEQ ID NO: 467490 - DNA, 122 bp, Homo sapiens
ccagggtatgcttctcaggcagatcatcagagcactatagccaagcccaaattacactagcgtatttaaggcctctcctcacaaaacatctgctaacatgccattggccaaagcaagtctgg

SEQ ID NO: 467491 - DNA, 122 bp, Homo sapiens
tcatacggtatttcattttttaatttttagaggaatcaccatagtgttttccattgcaggcgtgccattttgtatttctagaagcagtatacaggggcttcagtttctctacctccttgcca

SEQ ID NO: 467492 - DNA, 122 bp, Homo sapiens
gatttaagcggtggttccacatagtctgttggctgcggaaacttctttggtgtcagagtccggtcttcccgagaccacgaatggccatgtctgtaaatcaaaaagaacgtgagatattagag

SEQ ID NO: 467493 - DNA, 122 bp, Homo sapiens
tctactttcccggacccgcctcccgctccagccggttacacgcgccgttagcagcgtgggcggagttggttctgccttcgcggaaccaactggtccagcttctggtgtctcccctcgctcaa

SEQ ID NO: 467494 - DNA, 122 bp, Homo sapiens
ttcagccccgggcaagcctgcccccaggatgacacaaacatgaaccctgacttgggcttgcggtcgcaggcccgtgggaggcagcagtggctgcaccgagatccccggacctcaccccgtcg

SEQ ID NO: 467495 - DNA, 122 bp, Homo sapiens
atcagtctttttcctcggccacaggagggaagagggtggtgggagtgagtttagtctgaccggggctgaagacatcctgttgtttaggactgcggttctccaacgttccagccccggtgccc

SEQ ID NO: 467496 - DNA, 122 bp, Homo sapiens
gtcgccttggggagtgggacttgcctgaggctgtgcagcgactggtggagctacagaacacgagggtcccaaatgccgaagaaattttctgagcctttgtacatagatgaggcaaaaacctg

SEQ ID NO: 467497 - DNA, 122 bp, Homo sapiens
agcagcacagcagcaggccaacagccctcctagaaatagaagaaagaaaaacattagacacgcatctccttggtacaaataaaatcaagtctagatgatggagggaataaagatgaatcaga

SEQ ID NO: 467498 - DNA, 122 bp, Homo sapiens
tactgttccctatctagacaccagtgggccgagtggagcagatgccagttgggaccttcccgccctctctttggttattaatccattattgttccctgtacactggtatgagtggatggggg

SEQ ID NO: 467499 - DNA, 122 bp, Homo sapiens
tctgcccacagaagggggactggggagggaccatggagaagcagaaagagcgaatggggccgctgagagtccggggccaggagcccacctgagcatcctgtaggcaccctctctggaggctg

SEQ ID NO: 467500 - DNA, 122 bp, Homo sapiens
gtccgacccgtttccacctcctattccgagggaccccggggacacccagggccttggtggcgtcatagacacagcccccaccccagccggccaagggtcatagccatgacacaggcctaaga

SEQ ID NO: 467501 - DNA, 122 bp, Homo sapiens
aggaagtcgcgtgcgctctgcgcttgtaccgtgtcttgattctggccagcgatgtgcaaacgctccgtggccacgtatgcccgcagctgctgcacgagcagctcagccctgcacccagggtc

SEQ ID NO: 467502 - DNA, 122 bp, Homo sapiens
ggcagcgtggccacgcctcctctgggctgtccctcggctcctgggcggggccttctgccgcgccactcccccgggaaccctcgcctgttcgcgggtcaagccggccctattgggcagtctct

SEQ ID NO: 467503 - DNA, 122 bp, Homo sapiens
ttagcctcggttttcgcttctgtgaaatgggaacagtaacctttgctggattagggaacacgtggaaagggctagaccagcaacccatagagctcagaaaatggaaggggaagaggaagccc

SEQ ID NO: 467504 - DNA, 122 bp, Homo sapiens
cgaacccctgacttcaagtgatccacctgcctcggcctcccaaagtgctgggattacaggcgtgagccaccacgcccggcctaaaaaagtttgaaaaaggtgaaggagtgagtcctgcaggt

SEQ ID NO: 467505 - DNA, 122 bp, Homo sapiens
ctcaaggtagtgagcactgggaattcagataacatacttccattgagttgaaagcatgctcgcgagacacttggtacttgtccagttttcccagagctgctcaccagacatccattaaagaa

SEQ ID NO: 467506 - DNA, 122 bp, Homo sapiens
agcagattttttaaaaaggaaattcctcctagaactttgaaattttggttattatctgcccgagagcttggaggtagacctccgtagagaaatggcacacagagtttggggcctgacttcag

SEQ ID NO: 467507 - DNA, 122 bp, Homo sapiens
aattttgggactactaagtcatctgctgcaaatgtcaccagtccgttgtttaagtttctgcgtgtatttcactcaacaggttttcttcattaagcacggtgttgtctgtccatcaggcagca

SEQ ID NO: 467508 - DNA, 122 bp, Homo sapiens
tggaccaggttttagggatcctaagatgaaataagatattgtccccatcctcagggaactcgcaatctatcaatattcattaaaaataattaagttgagagtgaagggaactgtagttgggt

SEQ ID NO: 467509 - DNA, 122 bp, Homo sapiens
cacagtctacgtgtaggtccccttctatctcattgcaggaacagatcttctctttgcaaacgtcccctgtaacgtttccagcggcaaaacaaagagacgtctccagcaacagaatccaaagc

SEQ ID NO: 467510 - DNA, 122 bp, Homo sapiens
tctgatgaagcaggacccatgggtattatatttttaaatgtaggatgatcatacaagtttcggatacttctggtggtattattagtctgtcattttatgcagatgtttcttaagagtagtca

SEQ ID NO: 467511 - DNA, 122 bp, Homo sapiens
agcatttgagaagggggtatgaatgagcacatgtggctacatatgtatgtcactggccagcgatagaaggatgtccttatgtgtgtatatgacaggaaggaagaaggagggcagccggaggg

SEQ ID NO: 467512 - DNA, 122 bp, Homo sapiens
tgcgtctcctccggcgccggctctgcaaggagggaggagggggcggggccccacaaccaccgcagcctcttaggtttctccattgtgattggaaatccgagtaccgcctacccctcccctcg

SEQ ID NO: 467513 - DNA, 122 bp, Homo sapiens
ccagtggggggcccaggcactcagccgacacagctttcatttgggcagacagtttgggctcgctctgggaaaagaagaacagggtggatcaacttgcccaaattgcatggcacataaagggg

SEQ ID NO: 467514 - DNA, 122 bp, Homo sapiens
ctggagctgcagcgccacctgcaggccaaggagtctttttctgggaggctggagctgcagcgccacctgcaggccaaggagtctttttctgggaggctggagctgcagatgcagtgaagtca

SEQ ID NO: 467515 - DNA, 122 bp, Homo sapiens
gcacctagcaatcagaggtgatacaagggtctcttggcccgaagtatccccacctctcctcgctggaaaggacgctgcctaagcctcatcccgagctgggggcggaggaccaagggtgagag

SEQ ID NO: 467516 - DNA, 122 bp, Homo sapiens
cccgccactcacctgcagcccccgctgcgcgctccgccggcccggccctgacccactttccgccccggagcgagacgtaaacaatccccgccccctgcgcccattggctccggcggcgaggg

SEQ ID NO: 467517 - DNA, 122 bp, Homo sapiens
agctcgtggatttagggagtccagcctacgagaatggccgcctgtgacagaaagcaggggcgagcgtctgggaatagagctgtgctcatggcagaacaaagacgtgctgtgtttctggcctt

SEQ ID NO: 467518 - DNA, 122 bp, Homo sapiens
gtggtccaggcaggaaagggtttttttcagccccacacaaggcagctcctagctgagaatcggtgcttgggtcagacctcaaggattgcccaggccacatgagggcgactgagagcctccgg

SEQ ID NO: 467519 - DNA, 122 bp, Homo sapiens
ggcagggccggagcctgctctgggggtcgcggaggtgtctcgagagttgaggacccgacccgggcgcgcgcgggcgcaggtatggggagggcgcggcggctcctggccggtcctaggagcct

SEQ ID NO: 467520 - DNA, 122 bp, Homo sapiens
tgggcccaccccgcagaggccccgggcgggaaacgggcaggcccagaaggacccacaggtcgcggaggggacgccctgcctgtacccgccggcgcaggtggcagcgcagagtccctgggagg

SEQ ID NO: 467521 - DNA, 122 bp, Homo sapiens
aatacacaaagttcagagccaactactcatgtgcttagataagaaggccaccaataaatacgtcatctaatcaggaacagtccttgatttttaaacttcatgaaaatgtactctgatattcc

SEQ ID NO: 467522 - DNA, 122 bp, Homo sapiens
gctgctcgtcaatcctctcagcggccagcagatggcgcacacttctcagaaacatcaaaacgtggcgtgggaaaacccgattccgtggggaaggcgggccgcctaacacaaagctgtctttc

SEQ ID NO: 467523 - DNA, 122 bp, Homo sapiens
gatgagattcctgagaagttgatcatcaattcacccaatcttgccattcatactgaggaccgtcctgaggctgtgggcagtttctcacatccctggaacaggcaatgtcaccagtaaaatag

SEQ ID NO: 467524 - DNA, 122 bp, Homo sapiens
ttgcccaaagtgaaaccgggcttagttgttgtctcaggagcccagccagccagggggacacggcctcctgcccacaggcagaggcccggggccagatgtccgctttctctttcgctccgcag

SEQ ID NO: 467525 - DNA, 122 bp, Homo sapiens
gaaagaggggatttattgcaggaattagctcacgtgattctaaaggccaagaagtcccaccgtatgccgtctgcaagctggggaacctggaaagctggtggtgtccttcaccctgagtctga

SEQ ID NO: 467526 - DNA, 122 bp, Homo sapiens
tttattgcggcggttgctgtgagcctgggtattgtaatggctcgtccctgctctgcccaccgccaatcgcagctcaaggctgaggctcacatggttactcaggcatgttaaatattagtcca

SEQ ID NO: 467527 - DNA, 122 bp, Homo sapiens
acagcccgagtctgtggcttcgtccccacagttcagcgatcctcatctgtacgtgtggaacgccactggcaacagactgttgcaccgagtggaaggggtgaggctgaaaacacgacccgctc

SEQ ID NO: 467528 - DNA, 122 bp, Homo sapiens
tggggttgcctccatgaacaaaacaagcagaaaactctgctgctgtgaagcaagctaaggcggagcccagcatggcaggggcgggaggggctggctggcaagacattgcttcctgccctccc

SEQ ID NO: 467529 - DNA, 122 bp, Homo sapiens
ggacatacttctacaatgagggcctccacaaaagcctaatacttgttagagtcatagattcgtaagtatgttgatctgaagggcaatagtaatatcggaagttggtaattgagttaataaac

SEQ ID NO: 467530 - DNA, 122 bp, Homo sapiens
ggccacgggtgtgattccacagaaaaggcctggtgtctgctgcggtcatggccggaggagcgggagagggcgggtggagtggatgggggtggtgtgcactgcacaaggggcctcgtctgggc

SEQ ID NO: 467531 - DNA, 122 bp, Homo sapiens
cacggggggctccgctccgcacgcgcaggccggcgtgctttccagggacattcacaacgacgaggagctctgagtgtaatctcttatgataagagtgtcatatttgggagacgacgggatac

SEQ ID NO: 467532 - DNA, 122 bp, Homo sapiens
cttttgccgtcgtttggagaattactgcgtgcactgccgttcgctcagagccattgtgcacgtttgtttctctgatcactaacagcctgcacgtttccagcgtttccagtttccagcgttgt

SEQ ID NO: 467533 - DNA, 122 bp, Homo sapiens
aacctcataaatgtgtcaatcacacacaactccaggcgtatgctgagccgcacagtcccacgtggactcacaatgacaaagtcatgtgcaccctccggtagctctggttcataccacacaca

SEQ ID NO: 467534 - DNA, 122 bp, Homo sapiens
cgcggggcgggtggggaaggccggctgagaaagccgggattgcctcctggtgtcaaagctcggaactgcagcaggatcctgggggcggggcttgtgttcagcagcactcgccacgcgcccag

SEQ ID NO: 467535 - DNA, 122 bp, Homo sapiens
aaaataaatgtactactaaaccctacttagcggctaactagcccaagagcagacagcccacggacggactgcaagtcggaagcgcgggcggaagctgtgcagcgcccacctggtggctccat

SEQ ID NO: 467536 - DNA, 122 bp, Homo sapiens
agtcagatagcttaatcagaccaagtcagatgtaactacgatctggctgcagaaagccggcgtctgggctccttgctttatgtcttatatcccttttacattccccacaggttctaagcagt

SEQ ID NO: 467537 - DNA, 122 bp, Homo sapiens
cgggtccgcgcgagggccaggctgccaacctgcccgcgggcggctggtggttggggagggcgttgggaggaggagtcccgccgggtggacgcgcgcccttcagcggcggaggcggaggcggc

SEQ ID NO: 467538 - DNA, 122 bp, Homo sapiens
ctgggaggccccgccaggaggctgagcttgtgcaggtttctccccagctctgggccttagcgtcctcatctgtggaatgggcgtggcagcgtttcgactttgtggggctttttgagggtgaa

SEQ ID NO: 467539 - DNA, 122 bp, Homo sapiens
gaccacgccctggctttttggttcacagcccttcctatgctcctgagagatatgcgcggacggcattttctttttctttttctttcttttttttttttttttttaattttactttaagttct

SEQ ID NO: 467540 - DNA, 122 bp, Homo sapiens
ggatgtgagcactcattcatccataaagggccagtctactgggacctttggctgcccctgcgatgacagtgagcagcaaagtgatacccagggagggagtatagggtctctgcagggctctc

SEQ ID NO: 467541 - DNA, 122 bp, Homo sapiens
attaacgcacacagccatgtcctgccggtttcagttcaggttgcgccctatttaggtctccgggtttcggtgtggaaacaccactccacaagcagcctccacgctccccacttcattccaaa

SEQ ID NO: 467542 - DNA, 122 bp, Homo sapiens
tccctacatcaccagcaattgacaaggatccaggaaatgcctgctaggcactttcaaactcggaaaaatgggagtatgagggaggctaagtaggcagtatttagctagcaactattatttcc

SEQ ID NO: 467543 - DNA, 122 bp, Homo sapiens
ggccgcggtcgcggccgctaacgttaccctgcgggctgtgggcttcaccccgacttcggccggctcggaagaggggaacttcctggacccgcaattgcaccccaggttctccgtcctccaga

SEQ ID NO: 467544 - DNA, 122 bp, Homo sapiens
accggggcgctgtcggtccacgtggccgctctggagcaggttggagttggcagcgggctgcgctgcagggacaggcgcggcggacagccccgggggcagcggcggggtcctgtctgggagag

SEQ ID NO: 467545 - DNA, 122 bp, Homo sapiens
tagttaatttttgttgttgtttttcagagatgaagtctttctatgttgtccaagctggagcgcagtaattattcacaggcaagatcattgcctcaaactcctgggctcaagtaatccttcca

SEQ ID NO: 467546 - DNA, 122 bp, Homo sapiens
gtagctggtatcagggatcagatcagcggacacgcccattccagcagtcaggggcctgctcggaccgtcgtgcacctccgagcgtttctgtccggtccctctgggtccgtctggttttcgga

SEQ ID NO: 467547 - DNA, 122 bp, Homo sapiens
acgatttcgcctgaaggaccctagcgtcgattgctctcaaaactcaaggggcctttccttcggccttgccggggccatccccacctgcgtccaggaggcgccccacagcgccggggccgggg

SEQ ID NO: 467548 - DNA, 122 bp, Homo sapiens
ggtcatcccgggcacgtgcagggtcagtgctgtggatgtcatggacctggctgcagctcccggggctgggggctgtgtggttcgggagtcctacttgaggtcagctcagggtcccctcagtc

SEQ ID NO: 467549 - DNA, 122 bp, Homo sapiens
ggcaaaacctggcccttctgcacacttattgcacgttattatagcaaacgtgcattgcttcgtattgcaattatctatttgcagttatttgcttacatttggaagccccattacagtgtgaa

SEQ ID NO: 467550 - DNA, 122 bp, Homo sapiens
caggcaatggccgcccgtgggcttcgggccggtgtgggcagaggacgctagaggggctcccgggcccagccggccagagggggccccgataagggagaccggggctgggtgtccccactccc

SEQ ID NO: 467551 - DNA, 122 bp, Homo sapiens
atttcaggacaacaaacaaatcaaaattacacttcaaattattggagatcgggaggcagacgtggaagcaaaagagctagatgctggaatgcaggagggtcagaaatgtctaaacactgcct

SEQ ID NO: 467552 - DNA, 122 bp, Homo sapiens
cagacaccaccaccaccaccaccacagcggccgccgcctttgcagctaccgccacggctgcgccggccgcctgccccgccccttggagcccagcccattggcctggcccgcgctcccggggg

SEQ ID NO: 467553 - DNA, 122 bp, Homo sapiens
aatatctgagtggaaggaaaaaatcctttagtcacgtgcttattgaattaggaagttagccgtatgaccagtagattcccgttgccatccagactttctgtctactctgtctggagatatta

SEQ ID NO: 467554 - DNA, 122 bp, Homo sapiens
acgcgggagctgcgggtgggccaggtgtccagccttgggagccgtaggagccgccagagccgccagagccgccggcgccccgccccgcctcctccggccgctctcgccggctcaggttacct

SEQ ID NO: 467555 - DNA, 122 bp, Homo sapiens
ggcaatctctggctcctcctctcagccctcctccctgtctcctctgagatctgaggccttcgtgatgtaagtggcaggactgctaaatggcaatgttggtgctggggccacttaactccctg

SEQ ID NO: 467556 - DNA, 122 bp, Homo sapiens
cggactgatccctgctggcgaatggggtttctcaggatgacaggcagaggatgctcctaccgggctgttcctcctggcagaggcagaaacgctagcagctcctggccagtaagtccatttcc

SEQ ID NO: 467557 - DNA, 122 bp, Homo sapiens
tgtgatcaaatgacacgctgtatatgaaagcgccctatacactgtaacatgctgtgtaaacgcgaggaacaagtactgtgttgtgatagcctctgtgggttgtactgaaggctgttgcccat

SEQ ID NO: 467558 - DNA, 122 bp, Homo sapiens
gcctggagttggtgactttgcattcctgcagaggaaacccacttcctttgcctgtgttctcgggccgacttcccatatctgctgaccagaaatccttccttgcagccgcccctgtaacgggg

SEQ ID NO: 467559 - DNA, 122 bp, Homo sapiens
gtggcgctcgctgtccgtgcagcgggcggaggcggccgcggtgcctttgtgtgcggtgggcgcggcgatgggctgctccggcccgcagcccgaggggagcggcgggcccgggccggggccag

SEQ ID NO: 467560 - DNA, 122 bp, Homo sapiens
ccgcggcccagagcgcgccgggaccgagggccgcccgagcgcacacctggggggcgggcacggggcgctcagtccagcctcccagccttggcttttcggaggcctggctccctcccgggcct

SEQ ID NO: 467561 - DNA, 122 bp, Homo sapiens
caccacttggacccagggactccagcttcactccgctttgtgcactgggtggggcggtcgcggtgacgtttcaggcaacgcctctgctgtcagccaataaggagcgggagacgcgtcgggcc

SEQ ID NO: 467562 - DNA, 122 bp, Homo sapiens
aggagagggagaggcaggcaatgtcagggaaattgggcaggcaagacgccagggacgccacgtactgccaggttctcaacgaggtggagccaaaggggcaggccccgcggtgcgcccggcgc

SEQ ID NO: 467563 - DNA, 122 bp, Homo sapiens
cagcaatcccagccctaaaaggtcaagaaagtgcttttggcccccaaactctgaaaaccccggaccacaagccgagcccctccctggtctctgccgccaaccccgcgagccagggaaccccg

SEQ ID NO: 467564 - DNA, 122 bp, Homo sapiens
ggaaactgatattagttttcagacaagcagttctagaatcaggggagaggtttcaggcagcgctctagtgattggaatccctggaatgctccttgtagaatgaagggaggcatcttcaaggc

SEQ ID NO: 467565 - DNA, 122 bp, Homo sapiens
cattttgtactttatgattattcttttctttttgttttgccgtgttgcccagtctcgtctcgaactcctgagtttaaacaaccagcccaccttgcctcccaaagtactgatattacaggcgt

SEQ ID NO: 467566 - DNA, 122 bp, Homo sapiens
attccctcagcttgtggggacctgtcgatggacgaggtgcaaatataccctttagtttgtcgagcatccaatgcttcggcactgcagcacgcttcaagtgctccttagggccccaggccatg

SEQ ID NO: 467567 - DNA, 122 bp, Homo sapiens
gatcctgggagcacccgtgtctcccagggaggaaggtctgtgggcagcccttgggggccacgacattcctcatagaaaacacagaggttgagggggaacccattttgttggagagtgactcg

SEQ ID NO: 467568 - DNA, 122 bp, Homo sapiens
aatggattggagaagaaggggatggtacaaatatgggacgtgtaatgttggcagagagatcgtttcagggtaaaacagtatctgagaaattccttgaccatggacagattagggttattttc

SEQ ID NO: 467569 - DNA, 122 bp, Homo sapiens
gggaaggcggctgcgctgctgggcgggggcgggagctggagccggagctggagccggggccggggcccgggtcagcgcttgagccgggagaagagtttgagatcgtggaccgaagccagctg

SEQ ID NO: 467570 - DNA, 122 bp, Homo sapiens
actacaggcacatgccaccatgcccggctaatttttgtatttttggtacagatggggtttcgccgtgttggtcaggctggtctcaatctcctgaccataggtgatctgcccacctcagccac

SEQ ID NO: 467571 - DNA, 122 bp, Homo sapiens
ggcgtctccagcgagctcctgcttggaaggccctgccatgcccagcacacacagccaggccggatgtgcccggcatcttggaaagcctgatccggatgcaacagcgccccctgagccagccg

SEQ ID NO: 467572 - DNA, 122 bp, Homo sapiens
ggcgccgcgcggtctcccgggagctgcggagaggtagctgctccgggttttgcctggagccggatggggccaggacgcaggcgaggacggtgaagaccgcggacagccgaggcctgagcagg

SEQ ID NO: 467573 - DNA, 122 bp, Homo sapiens
gacttgtgccctggagttagggagccttgtgctacagattatgtgaagccatgaaataaacgtggtaaattttattgagggaagcaacagagcagcttttgtattaaaaggagcctgagtac

SEQ ID NO: 467574 - DNA, 122 bp, Homo sapiens
ggacaaagcatctgacggtttggaggatgtttctgtagtcctaggaatccacagtgaattcgagtctagactcagtcatttttcagggtcaggggaggagggagaagtagcaaatcagatat

SEQ ID NO: 467575 - DNA, 122 bp, Homo sapiens
ttttgtttttaagctatacctgctggaatggataaagtgagctttaaaagttgatcagaccgaagagattgaagtgagagaaccacaggaacaaaggcaagcagacagacagtgaaaggtag

SEQ ID NO: 467576 - DNA, 122 bp, Homo sapiens
accggacatggggcatttcagacacagggcgagcacattccctagttaccagggttcattcgagtcagtcacgtcacaggctggcaatgggctaactcctcctcaacaatcacacggggctt

SEQ ID NO: 467577 - DNA, 122 bp, Homo sapiens
agaaagcaatttaccaaagccacaggcttcttcctggaagctcaaaggcatgcctttattcgtgatttctgaagcaaggtgcatgcagcacctgagctgatgtggaagagggtttgcaggga

SEQ ID NO: 467578 - DNA, 122 bp, Homo sapiens
ctgagaggtctccaagccgtcttggggcactagccccactccagtctgaggcccacagtacgccatccccccgcagaactcatacggcgggggacatgggggaatcccccactcctcagagc

SEQ ID NO: 467579 - DNA, 122 bp, Homo sapiens
tgagggtcaaaccagaactcagcccatctggacgagcaaagccacggaagaggctccagccggtctgttcggctctcctcgttcataaaccatctcttaatcttctttttttcttttgcaga

SEQ ID NO: 467580 - DNA, 122 bp, Homo sapiens
tcgccggattccctcagccagaagttgacttaaagaggccacgatcccggtgccagcttgcgcaatgcctgtgaccaagcagccgggcatcctgctggcacagaaccaaatggtgaatgatc

SEQ ID NO: 467581 - DNA, 122 bp, Homo sapiens
ggccagctgtgaagtctgcggcgggctgaagccccagcatctgccgctgcaccagcttggcgtagaggccgccctgggccagcagctgctggtgggtgccctgctgcactacgcggcccttg

SEQ ID NO: 467582 - DNA, 122 bp, Homo sapiens
tctcccttcaacttaaaactccctgcagctccggcctcagggaagctgagctgtcagccacgggtccctaggagagccctacttttgaatccccaggtaccgctgagggtctccttccaatg

SEQ ID NO: 467583 - DNA, 122 bp, Homo sapiens
ttatctatttatttatttagaggtggagtcttgctctgtcgccaggctgcagtgtagtggcgtgatctcggctcactgcaatctccgcctcccagttcaagtgattgccctgcctcagcctc

SEQ ID NO: 467584 - DNA, 122 bp, Homo sapiens
gggaggtagggagctgcggtggtaggagtcagaatgggtacccctgtgggactggctctgcggagtggagggcatcacctacatccttcgtgagtgcgcaccatgaccagccacacccatgg

SEQ ID NO: 467585 - DNA, 122 bp, Homo sapiens
gggtcgcttggcagagcccccaaggcactgcgtcagtggaaaggctgtttgcaggagctccgagggcagaacatacacctgctgtgggtctgcaggctcacctgccccagatccccaaggtg

SEQ ID NO: 467586 - DNA, 122 bp, Homo sapiens
tgcaccgccctctcagcttccgtttttctccccgctcccctggctctcctatctcggccccgtaaccgctgtccgcacggtggcgccacatacgtactcgtcaccccttggccctccctgaa

SEQ ID NO: 467587 - DNA, 122 bp, Homo sapiens
caggctgctgagaggagagggtggctggggactgggggcagagggagctgcacagggctccgagcaggcagctgtgtctacctaggagtgactcctggtgtcgatggatgactcggggatag

SEQ ID NO: 467588 - DNA, 122 bp, Homo sapiens
tgcctggattttacaagagattttaatgttcatgattaaactggccgtaccagatttcaccgaagcccatttattgtgcattggctgtagccttcccagcaggcattccaatgctcttttaa

SEQ ID NO: 467589 - DNA, 122 bp, Homo sapiens
gctgttaacaggtaaatttaaattgcaatttttaaaactcaaactattgcacagaacatacgtaatttcttgcttgctctagccctgcctggcctaagaacacgggcctaagattcagcccc

SEQ ID NO: 467590 - DNA, 122 bp, Homo sapiens
ggcggcggtgtgggagcggcgcgtcatgtacaccatcaccaaggggcccagcaagctggtcgcgcagcgccgcacaggtgcgcacgggccggggaacgggaacggggacggggcggggcgcg

SEQ ID NO: 467591 - DNA, 122 bp, Homo sapiens
accattatgcccggcctcattttttttctttcccttgtcctgtttcctattgtgctgtaccgcataatttagtattttattatatgagatcctattttctaattgttatgtgtttcaagaat

SEQ ID NO: 467592 - DNA, 122 bp, Homo sapiens
gctcacagtcaaactgctgggggtgcaggtaggcactcttgtacaggctggtgtaggtcacgcacttccagtcctctgacagctgcaggtacccactggccgactgtgggtccagggtgacg

SEQ ID NO: 467593 - DNA, 122 bp, Homo sapiens
tcctgaacctcttgtgaaatgaaagatgttcctcattccaagctgaggacggagaaaagccgtaaagctgacactggtatcgcactgtgatatttgttgttttctaggtttgccattttccc

SEQ ID NO: 467594 - DNA, 122 bp, Homo sapiens
atgtcgctcctctcctccgggtacatatggtggcctggtcccctccccccaccccccacacggtgcccagtgagaagcacaagaaggggagaaaagacccgcagcccgcctcaggagggcaa

SEQ ID NO: 467595 - DNA, 122 bp, Homo sapiens
agcagaggaatatcgtgcaacgtttaacaattcctgttattcttaagccagtatctacgtcgatctacatgcacccatgcatgatgtaaaacagagcttctttaggttggcaactggatgga

SEQ ID NO: 467596 - DNA, 122 bp, Homo sapiens
gcaattgaaagacattgtgtattccatgtaaataacaggaagatgggcacatgagtctcccgttccgtaagctaagtggatttggctttctggataagagagccatgggtggccttgctcct

SEQ ID NO: 467597 - DNA, 122 bp, Homo sapiens
atattcaattatcggtgctgtctgtgcccccttcttttattttttcctcaggtcaaagagcgattttaaagattctaaacagaaacatcactttcttgattttcaagtgctatacaaataga

SEQ ID NO: 467598 - DNA, 122 bp, Homo sapiens
tgcctgttctagctcttctcagaatatgacattttcttggtcacttctgtaactagcgtccgaccacacatgccattctgtcttcagattcctgcagttagtgtgctttctccctcgtttga

SEQ ID NO: 467599 - DNA, 122 bp, Homo sapiens
aaggctttggcagcccggatggaaagaggagcaagcgggacacacgacgtggaccctgtgcgcgccacaatcggctgcatgcagataaaacattcaccgttggcacggggggagtgtgactg

SEQ ID NO: 467600 - DNA, 122 bp, Homo sapiens
tactggggattaggatttcagcatatgaatttagggcaagggaggaggacataattcagacgtagaaggcagattagttgactgtactggtgtaagtttctacacgaatgagccttgaatga

SEQ ID NO: 467601 - DNA, 122 bp, Homo sapiens
tggctgtttgactaggcctccatttcttcggggcaagaatccagatctcagtggcaggcccggtcctttctatgagtgctctgaaccgatctatttccatattgttatttaagaaccggggt

SEQ ID NO: 467602 - DNA, 122 bp, Homo sapiens
aatgcgaggaggcgcaggtacccaggaggcacaggtacccaggaggcacaggtgcccacacgggccttgccgggggaagcacgactttgaagatggggacgtccacgtttcaacgctgcctt

SEQ ID NO: 467603 - DNA, 122 bp, Homo sapiens
cctctacatgggaagatgaagttgaagagtttgataaagggacatttgaatatgcactcgcgtgagagttccagctatatggtttttatggttgtgccatcgggacacattctggatacaat

SEQ ID NO: 467604 - DNA, 122 bp, Homo sapiens
tttgccctgtaactctgtagtgttctcctactctgactctgagctcggccatgtgacttgcgttggtcaatgggatgttaacaaatgtaatgaaactgtaagcttgacaaaacaatgccagc

SEQ ID NO: 467605 - DNA, 122 bp, Homo sapiens
cagccacaggctgaagacgcagaacccacaccacagctggggctggggcaggtctctgggcgtgacgcccgacagcagagctctggcacccgcagcctgcggggcagctccaggctaaggag

SEQ ID NO: 467606 - DNA, 122 bp, Homo sapiens
gtgaaccagggatgccagggtccctggggcccagcgcaagggctgatgggaaaaaactttcgtccctggatgacccagacactgcttcgcggcgcatttttttttcttctttgccccaggtg

SEQ ID NO: 467607 - DNA, 122 bp, Homo sapiens
cctcaccttgaagcctggggaggtgacggtacctgctcccttggggcattgcaaagtgaacgagctcagtgcgtggctcatagcaaggtctgggagagtgatgtctgagccccacggccaca

SEQ ID NO: 467608 - DNA, 122 bp, Homo sapiens
aactaattgcagcatcatgtcctgaatgcattactgagaaggcatgcacgtatactcatacgaggttgacagagtaagtcagagaaaccacaacaacaaattaataaactttccagaaccat

SEQ ID NO: 467609 - DNA, 122 bp, Homo sapiens
acaaagacagacaaccgagttgtggaggtgaggggtaaaaaccaccacagaatcactacccgtttgtcttgaccgtgagatcattactgtgcaaacccttaaactaaagtaacagctgtcaa

SEQ ID NO: 467610 - DNA, 122 bp, Homo sapiens
ggaattacagggttgtgagccaacagcaaccacatacacctttgcagtaatcagaaccagcgttctcgatgctgaaagcaaaatcaagtaaacaaggttgtgttgtggacttccttgaccca

SEQ ID NO: 467611 - DNA, 122 bp, Homo sapiens
gcaccaccccagagaaattataatctaatctttcattttgactttgttcttctcaaaggccgatttttcaatcccttggccgagcagtacccatcggcttttcagcgctcaccatcaactga

SEQ ID NO: 467612 - DNA, 122 bp, Homo sapiens
cacagcagctgccctcgcggcagctggcacccagccctaccttccactcactcccaagggcgcctctccagcccgaccctcacaggcgcaatctgtgcagccactcagggtgctgctgggac

SEQ ID NO: 467613 - DNA, 122 bp, Homo sapiens
aggaacctgagcacacagctcctttcgtaaagtgagaaattctccagcggagcgtgtagccgtaccctggtttacctgttcaaggagtcctatgctgaagaccacatcttatgggcatcggt

SEQ ID NO: 467614 - DNA, 122 bp, Homo sapiens
cagcccgcgtcagaacttagagggccaggcagggtcgcgcgcatggcctgggcgggctcgcggcgggtcccagctgggacgcgcgcggcagccgagcgctgctgccggctctcgctcagccc

SEQ ID NO: 467615 - DNA, 122 bp, Homo sapiens
actgtgtctgaagctgtgtaaagactatgtctggagccgtgtaaagactgtgtctgaagccgtgtaaagactgtgtctgaagccgtgtaaagactgtctggagccgtgtaaagactgtctgg

SEQ ID NO: 467616 - DNA, 122 bp, Homo sapiens
ccaacggacttgtgccttagccccatgatataacctgatgacgttcggtggaataatgaccgttcatcacagccaccactgcttgaaggcgtgctgtgttttatgagttttacgagagttct

SEQ ID NO: 467617 - DNA, 122 bp, Homo sapiens
atgatttgtgtaaactcaccagtcttgctttggagtgagcagaagagaatgactattttacgtggagcatcattgtgtgactgttgacctggacagtcccaagggctatgcagatggactcc

SEQ ID NO: 467618 - DNA, 122 bp, Homo sapiens
cactggctcggggacagttcttgggaagccggcaaactgcaaaagccccatatttccttccggtcggtccttagatttgtgggctttgctttcatgctttttaacaggcaaggcttagatgt

SEQ ID NO: 467619 - DNA, 122 bp, Homo sapiens
cctgcatctctaataagtgccccagtggtccagcgaccaggctttgtgagccactggtttcggcacaaacaagcagccaactgtggtcaatgaaaggaggccatactgatggactctggaac

SEQ ID NO: 467620 - DNA, 122 bp, Homo sapiens
agggggcgggcgtggaaacgcctaagaggatgctgagtgacagaggcgcaggccgcgctccgaccctgccatgtctctccccagctgtctctcccgccagccgccgcgtcctcaacgtcctc

SEQ ID NO: 467621 - DNA, 122 bp, Homo sapiens
acttcaacaacagttcccacttcagtgctcaccggagaacccatgcaggagggaaggcgtcgtaggggacagtttcctcaacaacaaaggaggactcaatgtatatatcttatatcataaga

SEQ ID NO: 467622 - DNA, 122 bp, Homo sapiens
agaagtttaaaagcttcattgtttcatcagtcagataaacacagcaagacgttatgggtccgtagactattaaaaagaaaaacatccttgcgggtagggaaggttcctttactctctcatgt

SEQ ID NO: 467623 - DNA, 122 bp, Homo sapiens
atcgcggcccacaattccctcactgcttgggcttctttccaattagatcccctgctatatcggcaaccaacagcctccatccagcagcttaggacagggcctgagccaacccaccaccttct

SEQ ID NO: 467624 - DNA, 122 bp, Homo sapiens
tgacctcgtgatccgcccgcctcagcctcccagagtgctgggattacaggcgtgagccaccgcgcccagccagagtcttccacttttatagcatgtcctcaggaaatgtcttctgtctcctg

SEQ ID NO: 467625 - DNA, 122 bp, Homo sapiens
tgggaatcccagagtttgaggccaaactctcagttctgcctggaaccctggaccgaggtacgagtaggtgtgggggcagggttgcgcctgcacatgcctggtgactgagggcacctggcagc

SEQ ID NO: 467626 - DNA, 122 bp, Homo sapiens
tgttcctttgatggacagctaaatggcctggatacctttcccacagttttcgtgaagacccggagctttaagatcaggattctggtttacctgagaagctccccgttaggtccctgctcggt

SEQ ID NO: 467627 - DNA, 122 bp, Homo sapiens
ctctgggtctaagggtgggggtgctaactgaagccggggtcccccttgtctttcctgggtcgttggaactgaatgctccaggacgtgggtttaatcccgcttctgaccttgcgccccaatct

SEQ ID NO: 467628 - DNA, 122 bp, Homo sapiens
ctccatccctgtgcacaaacacaggtgtgctgggctctgagcggtaccacctcacctccacgtgcattgtggtcctcttggggagtagctggcaggttaacagggcatcttccccaaccccg

SEQ ID NO: 467629 - DNA, 122 bp, Homo sapiens
ggcaagcgtcggtcagccgaacactgtgtgcctggtggtgtgtgttcacatgtgtgcgtgcgtgtgcccggcagagcagcaaacagctgcgcccgagagctgtggcgctttccctccctacc

SEQ ID NO: 467630 - DNA, 122 bp, Homo sapiens
gaacaaaggactgagtgtaggcagagagatagagatccccgaggtgtggggcagagcccacgcatctgaattccaagaacaggcgctttctgacagagaataccaggaaatgacttcacatt

SEQ ID NO: 467631 - DNA, 122 bp, Homo sapiens
atctgcttacctaacagacctcggacggcctcaggagccagggacacaggcgcaggctcccgcgtgctcgccggctgtgttgttaaacatcttcatgcaccagccctcccggcaggcccggg

SEQ ID NO: 467632 - DNA, 122 bp, Homo sapiens
ggatgcggtttaggtcggctcgcaagggaagcccgttttgtccaggttggatattgtctacgtatggatcagcccttggatgagggtttattttaatttatggcttatgcattcttttaagg

SEQ ID NO: 467633 - DNA, 122 bp, Homo sapiens
ccgtctctactaaaaatacaaaaaagtagctgggcatgttggcatgcgcctgtagctactcgggaggctgagggaggagaattgcttgaaccagggaggcagaggttgccgggagctaagat

SEQ ID NO: 467634 - DNA, 122 bp, Homo sapiens
aggggcttgcagttgagctcggaacaaaatagtgacctactgctctaaacccccaacttgcgtgggtctgcaattttttagcacaaggagagccttttaaagacctggttcttcaaggaaag

SEQ ID NO: 467635 - DNA, 122 bp, Homo sapiens
agtgggcctgcccacagtgacgtctgcacgcagtgacgtctgcccacagtggggcctgcacgcagtgacgcctacatgcagtgatgcctgtacgcagtgacgtctgcccacagtggggcctg

SEQ ID NO: 467636 - DNA, 122 bp, Homo sapiens
ttaaccatcatgatgtgctgattagcctggtacactgcagtgggtgtctgtgcaccaggacgaatggaaggactgctgttcgggatggtagctctaggaggctgtatttgaggcctctggaa

SEQ ID NO: 467637 - DNA, 122 bp, Homo sapiens
ctccttgtgggggaggggcgggcggtctgacacagttattaaacctggcagctgcgctggcggcactgaggagcattttgagtgagcttgcagaaaatgaggggctttcagctggtcgcctg

SEQ ID NO: 467638 - DNA, 122 bp, Homo sapiens
agcatcagcatcttcatttcacaaccgggaaaaatgaggcacacgacagcggctccgggacgaagagacccgaggaaaagaccgccgtggaacttccagtttccgggcccgccacctagtgt

SEQ ID NO: 467639 - DNA, 122 bp, Homo sapiens
actgccaaccaagcattttcatgcatatctttttaacccccacaacaatcttaatgtggtcggtattattaccctcattttataacttgagctcagacaggttcattaacttgcttaacaac

SEQ ID NO: 467640 - DNA, 122 bp, Homo sapiens
ttttgtttggagaagcactgagaggagaaaggggcagtctactcctcactaaacgtaacccggtggccccaggcgcagccccatctcctcggatgccaggaagatgcccgcgtgccgctcgc

SEQ ID NO: 467641 - DNA, 122 bp, Homo sapiens
gcccaatgtttactgttcagaaaggtcattgcccagcagttgcaggcaagaaaccctggacgcatcttggggaaatgcatctaaacaatgcagagcagaagacaggaggggttcatgctctg

SEQ ID NO: 467642 - DNA, 122 bp, Homo sapiens
cagcctattttgcgggttgacccgctttaacctgcggcttccttgcagtccttccttgcgcggagccccagacctacacttgccacgccgttggtttccagttaccacagcctggtggtcag

SEQ ID NO: 467643 - DNA, 122 bp, Homo sapiens
atccttcctggttccactctaggagctgattcggaggactggggtccaggaaacaccccccgccccagttccttgatcctggagaaggggcacttctgctgctctttcgccttgtccccaga

SEQ ID NO: 467644 - DNA, 122 bp, Homo sapiens
cccccacggaggccatcaccacgcaggctacatgggcaggctatgtgggaaccaggcccacggtgtccccggacagctctgagttgatgataatggtgactctgcgggaggacagaagacag

SEQ ID NO: 467645 - DNA, 122 bp, Homo sapiens
tatctgggtaatagtctatttctcccgtgattccaggcatatgcacccaacagtccatttcgttattgcttatcactgcccaaaagttccaagaaatgatgaagtcagtctcatttggcata

SEQ ID NO: 467646 - DNA, 122 bp, Homo sapiens
agccggagatgggcacaaagggcacggtggccgggttgtagccgatcttcttgatgtaggcgctgacttccttgacgatctcgtcgtagcgcttctcgctgtaggccggctctgtggagtcc

SEQ ID NO: 467647 - DNA, 122 bp, Homo sapiens
tcagtgcctgggaagccagaaacgctgcccgtgaaatacagaacacaggatgcagaagcacgtttgtgtggcagagtctacttgaatcatccaaaacccaagatcgccctcctgcctctgac

SEQ ID NO: 467648 - DNA, 122 bp, Homo sapiens
gatgttgacaacattgctgccgatactgctgctgtctggctgggccttttgtagccaagacgcctcagatggtgagtcgggggcacatctcctgcctcaggatggttctggagaatctcagt

SEQ ID NO: 467649 - DNA, 122 bp, Homo sapiens
tttgtgcagaaaacaaaacttcacaccccacacatattttggatgacctaattcttccagcgaagtttaaaactataaccaaggttgtttaaaaaaccattttcacatggaagggcagtggg

SEQ ID NO: 467650 - DNA, 122 bp, Homo sapiens
ggcaatgacaaggccagggagccgagcgtgggtggcaggtggcgagtgtcctggtacgaacggtttgtgcagccatgtctggtcgaactgctgggctctgctctcttcatcttcatcgggtg

SEQ ID NO: 467651 - DNA, 122 bp, Homo sapiens
actctccatcatccattacacatactcaagaatttggccttttatagcactattcattctcgaggcatctaaatagtctttgcaaaagtaaaaaagcaaccacaggcactgctgaggcctta

SEQ ID NO: 467652 - DNA, 122 bp, Homo sapiens
ggccgggctggctgggccgggtggcccagggaagggttcccgcggcaaaagatgccggggcgggacccggttccctccctagccttcagcggccccaggggcggagcctcgccgagctgagg

SEQ ID NO: 467653 - DNA, 122 bp, Homo sapiens
gagttctctggtcttctggcaggggctgagacggcagtccagcaagggtcacaggcctgacggtatgacctcttccccttcccaccgcaggtgcggttctcccggccggagtcagagcaggc

SEQ ID NO: 467654 - DNA, 122 bp, Homo sapiens
atcataggcctggaggacaagtggaactcacggagccgcttcctgagcgggggcatgagccgcaagctctccatcggcatcgccctcatcgcaggctccaaggtgcggcggtgggactggag

SEQ ID NO: 467655 - DNA, 122 bp, Homo sapiens
gacaaaggacagtagaaaatggtgaagactgcagatcacctgctatacctcaaggagcagcggacccagcagaatatggcccaaaaaggaggcaggtctcctgttgcaagagcctctgtttt

SEQ ID NO: 467656 - DNA, 122 bp, Homo sapiens
tcccagctgggccaagggcaagaagagagaacgaggccaggccaatgtcttcaatcccagcggctaggaacccttcaccttggtgagcaacctgtggtgggaatggggaggaaagaaaaaca

SEQ ID NO: 467657 - DNA, 122 bp, Homo sapiens
ttagggtcttggaacatatgtcatacagagcttcgttatctatgcaaaaggtctcatctgcgttttctatgagctggtggactgagagggtggcgttgtagggctccaccacggtgtccgac

SEQ ID NO: 467658 - DNA, 122 bp, Homo sapiens
tattccttcagcacctaccgggaaagcgagaagaaagcaaagggcatcactccctacccacgaaagactcacaacatccctggaaaagcaacgaggcgaacggctggtctgcgttcagagct

SEQ ID NO: 467659 - DNA, 122 bp, Homo sapiens
gcaatgtactgaccaactccttgagtgatctgtggcccctgcaggagtgggggtagggagcgccatgtcgcacacctgttgtcaggtgacactgccagcagcatcctgcacactcacctccc

SEQ ID NO: 467660 - DNA, 122 bp, Homo sapiens
gggcagcaagaacctggaggttttcttccggggctggatggtggccatggataaccgcttcgtgggcctgaaaggagacagtcaacagctttccggtcaacgcactgccatgccatgggatg

SEQ ID NO: 467661 - DNA, 122 bp, Homo sapiens
aggcgatttttccttaaatggaaggaaacttgttatgttcaccatcggatctccggggcccggcacaatctggccacttaataggcattcaataaacccccgagctggcttgtggtcggctt

SEQ ID NO: 467662 - DNA, 122 bp, Homo sapiens
ggcccctgaaagcccaagtcaagtctgtcctcagagccgcacggggcagggcgggggcgtcgcgaacacagacagagccagggtcagccatagacacatctctatatttatatattagacgg

SEQ ID NO: 467663 - DNA, 122 bp, Homo sapiens
gggcccagaggatccgaagtctgagagattgggtggtataggtggggcaggatcctgccccgggcctgtcccatagactctcccgtagtccagcagatttgggggcagaggtgtgctgattt

SEQ ID NO: 467664 - DNA, 122 bp, Homo sapiens
tctttgtggagcacttacaatgtgcaggcgtcgtcagggaggtgcaggcgcctcagcccccgtggtatcttgacttctgcgttaactggctttccacccttgcccagcacggttactttctc

SEQ ID NO: 467665 - DNA, 122 bp, Homo sapiens
ggacaggattgtaccggttgtcaaggcccgggtgaaattttaaaaataaaaaaaagagggcgtgcaccggcgtcgcccctgctccgcccccaccgggtacctaaatgcagcctggcctgacc

SEQ ID NO: 467666 - DNA, 122 bp, Homo sapiens
ccgaggccgtggaccaattagagtccggccccgctccagcccccaccaacactgccccctcgccccaggctgacagctgttcttgttcaagtgcccggcctttgcttttctgggatgaactt

SEQ ID NO: 467667 - DNA, 122 bp, Homo sapiens
tcctctcccctgcgctggggtcttctcctagcttttctagaaacccagttctgaggaacacgtccataggttagaaggctgtcgcaaacgttaactccaaagtcaaaatgtgttttgcttta

SEQ ID NO: 467668 - DNA, 122 bp, Homo sapiens
ctgcgttcaccagcgcccaaaagaggaggcctgcttggcttcccaccgcgccccaaagaacgttcttctgcagatagtcccctgggttcccagaaagcccttgagagaggggcttctcttgg

SEQ ID NO: 467669 - DNA, 122 bp, Homo sapiens
aggtgacgtacttattttcattgctggcatcatatcgtggagatgggtcataatcattgccgttcacgtcgtagctggcgtaggaatcctaagaaatggaatcgtggtgagtgaggagaaat

SEQ ID NO: 467670 - DNA, 122 bp, Homo sapiens
gctgcaagtcggcggaaagtttggctgcgcgggttcccccgaagttcaggtgcggagagccggggacggggaaggaggggtccgtatttgggaggggcggggggcgcccgcaccgtaagccg

SEQ ID NO: 467671 - DNA, 122 bp, Homo sapiens
gagagggggagaaggaggagcttcttgccctggctaaaaaattacctggccacttaatcccggagactccgatacttgggtcccagcccctggtgcctgaagccccccggccgatcgccctc

SEQ ID NO: 467672 - DNA, 122 bp, Homo sapiens
gggtggcgcgggggcccagaccctctgtcttgggccacttgttggtcgggagccagatctcgccacacccgcgtttcctcgattgtaaacggttatgttgggagtgtttgctgctgcgtggg

SEQ ID NO: 467673 - DNA, 122 bp, Homo sapiens
ttggtgaaatgtttgtgtcctctccaacgtggtatctacatgtaagtgattggtactgctcgaaggttgccagaatgagtattgtaccgaagcccttatggttatatgactcagttataatg

SEQ ID NO: 467674 - DNA, 122 bp, Homo sapiens
agtccccgatcccctaggggcctgagggctgtggtgggggcctggcagggctccaggtaccgagagaggccctctgcccagcaccctgctgtcccggggcagggaggccacatgtccccacc

SEQ ID NO: 467675 - DNA, 122 bp, Homo sapiens
taagccaagttccaaagcgcacagtgcctgctcaacttagtaagtacaaggacaagtgcacgcaaagaaacatgagaattaaagtcatcactaaaggcagaggaaatctcattcttgaccct

SEQ ID NO: 467676 - DNA, 122 bp, Homo sapiens
tgccctgccctgaagcagttccaggaacgtcagatggtaagagaagaaacgacttacaaacgtcaagtccattttacagatggaaaatctgaagctcagataggagaaaagacttgcccaag

SEQ ID NO: 467677 - DNA, 122 bp, Homo sapiens
gacttggggggcagacttgacactaggccccactcactcagatgtcctgaaattccaccacgggggtcaccctggggggttagggacctatttttaacactagggggctggcccactaggag

SEQ ID NO: 467678 - DNA, 122 bp, Homo sapiens
gcagggaatccgcaggtggggtgagcagggaatccgcaggcttcagcggcgggggttgaccggcagctggcgtcgagaggcgcttgggaaatggggtctaatttattttagaccctgtcccc

SEQ ID NO: 467679 - DNA, 122 bp, Homo sapiens
cttccccgtctttcctgcgatttcaggccgcattttagatatcccctgcaaagtgtgtggcgaccgcagctcggggaagcactacggggtctacgcctgcgacggctgctcaggttttttca

SEQ ID NO: 467680 - DNA, 122 bp, Homo sapiens
tggaaaacctgagagatggaattaggaattctctggcagggctgaaaagtctggacccatcggcttaaagaaactgatccacctcatgacctgaccctggaagccttctcgcccttcacacc

SEQ ID NO: 467681 - DNA, 122 bp, Homo sapiens
gctgcacgggtctggctgtctctccctgcgccacgccacgccacaccgccttgctgctgtcgctgtgtgctcggcttggaagctggagtcctcctacttggttgttctttctcgagattccc

SEQ ID NO: 467682 - DNA, 122 bp, Homo sapiens
gaccttgagttcagaacctccacacaagaccctttcttaggcctcttatccctcagagctcgggttgtgaaggcccaggcacattaactcattagccaacactgtgttggagaatccagtgt

SEQ ID NO: 467683 - DNA, 122 bp, Homo sapiens
gaaccacagtcgggcctggccctgctgccggggcggggctgctggacttccctcccgctccgggctggacctgacatctgtctctcgcatccgcactgatccgagctttaacattttctttc

SEQ ID NO: 467684 - DNA, 122 bp, Homo sapiens
cacctggcttccccgaagtcccgctgcgcaccttccctggcgagggcagctccccgggcacgcaaccccacagttgagaaggttccctgctcagttccggagaagatggaggcgtggaggtg

SEQ ID NO: 467685 - DNA, 122 bp, Homo sapiens
agctgttgtttgtcagtggggcctgggacaaggacagagggtggaattaaaatgagaagacgccaagcacaaagaaaaccaaccatatatgaagcagtgggaaaaagcaaaggaccaagcat

SEQ ID NO: 467686 - DNA, 122 bp, Homo sapiens
ccccagcaacgttcccgccacctgcccaggccagtgccccgtgcccaaccccagagggtgcgggatgacagactctgacaatcattaaaccagccgggcctgatttcccagcactgcctgct

SEQ ID NO: 467687 - DNA, 122 bp, Homo sapiens
agatgaatacattggctaaattatgtttgaatttgtaaaatgtgtgagctttcagctttgcgggactttgacactgtatttcgtgctgtttattacacgaagccaatatcctaatgtcattt

SEQ ID NO: 467688 - DNA, 122 bp, Homo sapiens
ggcggcacggtccagcttttcaggctgaagctggaaacgatgactctgctactcgctccccggctctctgggaaccctcggagtgcgggtcaggtctccaccgcggcccacagcccggcgcg

SEQ ID NO: 467689 - DNA, 122 bp, Homo sapiens
gatgtttttgacagagcgtgtctttaggagaggctggtgggaccttctgctcctgagccgcgatctctgcctccacctgaatcttcacctctgctctgtacctcccctcttcactcacagcc

SEQ ID NO: 467690 - DNA, 122 bp, Homo sapiens
tgtagaagacagaggtcggggcagtgagatggtggcccggcggggcggtctgggcagggccgcgtcctgacgcagggagggcagacacgctcaccaggaaggccggacgcgcctcctctgtc

SEQ ID NO: 467691 - DNA, 122 bp, Homo sapiens
ccttgtttccggtgcagaagcctggtctccccgttcggagccggcagtctgcgcttgagacgttaagacttgagacaggccagaggagctctcagggccggagggaggccaggacggctgta

SEQ ID NO: 467692 - DNA, 122 bp, Homo sapiens
cttgatctcctgacctcgtgatccacccgcctgggcctcccaaagtgctgggattacaggcgtgagccactgcgcctggcccagttagtttaactcttattaccattaagtcaagcataaaa

SEQ ID NO: 467693 - DNA, 122 bp, Homo sapiens
attgtttttgcctttagatgcagagttggaagcaaggggttaaaagaaagggaactcagacggagtgtttggccattagctaagggtagctcttgtattctagcacctttgaaaagaggcag

SEQ ID NO: 467694 - DNA, 122 bp, Homo sapiens
tgccagtagggcagcgttgcacggtgaaaggcaaaaacccctctaagcctcctcctgtggcgacaaagctctcggccaacgctcaccgccatacacatccgcgggaacgcttcctccaccag

SEQ ID NO: 467695 - DNA, 122 bp, Homo sapiens
gctaacaaggctggtgtgtgtgagtactgcaggcccagacggttctccttaacatgctgacgtctttatggagtctgacgtttggctggctttgctctgtgagatcagtggtcttccagggt

SEQ ID NO: 467696 - DNA, 122 bp, Homo sapiens
gctatggagttcctctgggcccctctcttgggtctgtgctgcagtctggccgctgctgatcgccacaccgtcttctggaacagttcaaatcccaagtaagcctcgagactcccgctggcagc

SEQ ID NO: 467697 - DNA, 122 bp, Homo sapiens
agtcccctgcccggcctgcctcgctcgaggcacccgacggcttctgtctccgcgggctggcgcctgaccagccaggcccagcggttccccgcctactgcatttgaaagatcccgaaaaccct

SEQ ID NO: 467698 - DNA, 122 bp, Homo sapiens
cagaggggacacaaacgtggaatagtgagagggtgaggagagtgcagttcaggctgggatcgtgtgtggcatattcgtaggaaaccacagaatctgaagttagttaggtttggatttcattt

SEQ ID NO: 467699 - DNA, 122 bp, Homo sapiens
agaagctcgggcagcctcgcgaccctcacctacgcctcccagtaccgccgctgtctcaaccgccacccagcccctcgcctgcgcctgcgcctgcagcccactggctcctcaggatcccgatg

SEQ ID NO: 467700 - DNA, 122 bp, Homo sapiens
agaaacgcgtttggatggagccgggagggagaactgggtgcgcgcttggcatttccttgccggtgtgaatgcgcttcccgtaaatatggcagaacgccttcacctttcaccagatgacgcgg

SEQ ID NO: 467701 - DNA, 122 bp, Homo sapiens
gcagttaatacaattaactggaagacagctgaactggtgaggagtaggcttcagtcggtgcgggcgtgatgaatgaaattggcaaactgagagactgccatttggtcactggacgaaaggag

SEQ ID NO: 467702 - DNA, 122 bp, Homo sapiens
tgctctcggttgccactctagccgaggcctcgagacaaagacgcgccgggcactggtggacgacccgggcgcctgggacactccctgactcgcgcctggagtgctcagcatcccggccctgt

SEQ ID NO: 467703 - DNA, 122 bp, Homo sapiens
gcaataacaattatttaaaattttccaattttatgagctcctggcttcttgtcctttgagcgggtagcctgacatttttttttaaaaaggcagtcctctgaaattgaatgtgagccacgtga

SEQ ID NO: 467704 - DNA, 122 bp, Homo sapiens
aggattaaatccaaatctaaaatatgaccagttaaaaaagaccatttacctggccgggcgcggtggttgactcctgtaatcccagcactttgggaggctgaagcaggcggatcacctgaggt

SEQ ID NO: 467705 - DNA, 122 bp, Homo sapiens
ggaaccgctcgtcctacgctgggtccctgcctctgctcctgcttgtcacccttggccaaacgttccccaatcccgagcggctctggcctttggacagaagtcagcctgtcagccttctggaa

SEQ ID NO: 467706 - DNA, 122 bp, Homo sapiens
cctccacggcgtggttcacctcttggatgaacagctgcagcttcatcaccagggtggctgcgtggccatccgccttcccggacgccgcctccttggagccggccctgaaggccgcattgatc

SEQ ID NO: 467707 - DNA, 122 bp, Homo sapiens
tgaactcctgacttcaggtaatccatcctctttggcctcccaaagtgctgggattacaggcgtgaaccactgcgccaggcctaatctatatccttttgctgtaataaactgtacctgaagcc

SEQ ID NO: 467708 - DNA, 122 bp, Homo sapiens
ccgtgccgatgctctgcccgtacaggatgatgctgtccgggctgatgccgtacctggaggcgccggagcagggtcagccgcggcctccgacgcgcgcgcacccttcccgccagcgggcgtcc

SEQ ID NO: 467709 - DNA, 122 bp, Homo sapiens
caccacccaccccccagtctgcaaatcctgacccgtgggtccacctgccccaaaggcggacgcaggacagtagaagggaacagagaacacataaacacagagagggccacagcggctcccac

SEQ ID NO: 467710 - DNA, 122 bp, Homo sapiens
aaaaactcactagtgggatttcaacaccaccacatctgggttcttctagccgttttttgccgcccttgcaaattttaaatgtgcttatatttttgcatagtgggtccagacttctcattttg

SEQ ID NO: 467711 - DNA, 122 bp, Homo sapiens
tgtgggtgttatatttgatctctaaatctgaacagtttatggtcacagtccagcctcctccgtgcagccctgtgtgctttgcacatttaccttacagtggtaagcagagaccatctgtgacc

SEQ ID NO: 467712 - DNA, 122 bp, Homo sapiens
tcagctgccaggtgagccagccgggatgtctgcctacccagacgaaggcctccatcagtccgaggcaagaggacagagaagctcctgcacaccaaacaggaggctggatgtaagggtggcaa

SEQ ID NO: 467713 - DNA, 122 bp, Homo sapiens
tctgccctggttcggagagtactcgtggcccacgtcttcgtggagtgaggaactctggcacgtagtgcctccctgttagggttaatgctcgtattggattcatagtgagctgtgttgctggg

SEQ ID NO: 467714 - DNA, 122 bp, Homo sapiens
tcataagtttggagctgtactctcagctactcggggctggtccttgattttggctgcgctcgcgcacgctcccccttttctggccgccaggtcccgccttctaaatttccccaggtctccag

SEQ ID NO: 467715 - DNA, 122 bp, Homo sapiens
ctcactgccatgtcccctgcacaggccttcgtgatctccttcacgtctgacttcatcccgcgcctggtgtacctctacatgtacagtaagaacgggaccatgcacggcttcgtcaaccacac

SEQ ID NO: 467716 - DNA, 122 bp, Homo sapiens
tgaaaggctgcatgtactcagaagatttgcaagcaacactccaattcttgtcatagagctcgcagacttctcacttatcggcttttttccttccttattttttaagaattattcttattttc

SEQ ID NO: 467717 - DNA, 122 bp, Homo sapiens
accgggaccatggaggtactcgcagccattttcccgactcgggccactccagccaatcatcggcgataatactggctgcccatctgcaccaaaaatatctgcctgtcattggccggctcttg

SEQ ID NO: 467718 - DNA, 122 bp, Homo sapiens
gatggcagcttcagccgaggcctcgtgccaagacccttgcagtggagccagggcacgggtcgcccctgacggctcaggcctgctggggctgttggctgtcctgggctggagcacacagggag

SEQ ID NO: 467719 - DNA, 122 bp, Homo sapiens
cccaggcattgggctgggctggggcaatgccatgctgctgatggagtttgtggagggcaccgagcacgacgtggacctggtgttgtttggtgggcggttgctggctgcctttgtctccgaca

SEQ ID NO: 467720 - DNA, 122 bp, Homo sapiens
acccaagcaaggtcttgcatatttccataaaatcccaaacctagaagcaagctatggagacgaacctggtccattcatctctcaagaaatgaatgcattggtttcattccagaaagatcaca

SEQ ID NO: 467721 - DNA, 122 bp, Homo sapiens
cagaaacttgaagggcaatgccaggtaccgaaaaaccggcccccgccccttatccccggccgacccgtccgccgaggtggctgccctgggaacctcctgttcctcgtccaggagaggaaacg

SEQ ID NO: 467722 - DNA, 122 bp, Homo sapiens
ccggcgggatattatatttccataaggccctccgggggcctgggaacggactggtgcttgcgtgcggggcttttccactggttcccttccgtactcgggcttcccccgctgttgttactccc

SEQ ID NO: 467723 - DNA, 122 bp, Homo sapiens
gagttggggcccttgagaagccttgtcaccttctccatccattctagaaaagtttctgtacgattagagcctgtcttgaaattctagaaaaaaatctaaacttatttcctgagaaaggttga

SEQ ID NO: 467724 - DNA, 122 bp, Homo sapiens
actgcccagatccagaacagaggtacttaacacctttgttttccagtttagttatcaaagcgtggtgtgaacaaaatgcttagtgtcacactggcattacaaataggcccaaaattttgagc

SEQ ID NO: 467725 - DNA, 122 bp, Homo sapiens
atgcaaatacatttgaggacgtcttatttatccatcatatgccatgtgtctgagtaatagcgtaggtatggcaaaattacaaactgctccattagcctgtaaaagcatttaaacatgacaga

SEQ ID NO: 467726 - DNA, 122 bp, Homo sapiens
tgagtagttagtgagagagatgagtcttttggaaaagtctggcattgaagaaaagttaaacggggctgtagctacaaagaaatttggggcaaatgtaggggtttctttctctttcttttttt

SEQ ID NO: 467727 - DNA, 122 bp, Homo sapiens
aggtcctgggggctaggacttcaacgtatgaattttgggagacaacattcaatccataaccgggggcctctgacttttaagggaagagacccctcccctgggaaacctcagattctgggtct

SEQ ID NO: 467728 - DNA, 122 bp, Homo sapiens
gctccgcgcccagggtaccgaccgaggccacccggccgcgcgacacgtcccccaccccgccggtctcggccaccatgtccgtggcgtcatcccccgcgcctgccattggctcttcggcggcg

SEQ ID NO: 467729 - DNA, 122 bp, Homo sapiens
gcacttgaatctgtcagtttctgcatctgtaaagtggagataatatagtacctcatgagacggttattttgagaaccacattctatatgtgaacacagtttaaaagctgtaaatcactatcc

SEQ ID NO: 467730 - DNA, 122 bp, Homo sapiens
gcatcctttgccttccggtatgtggccccgtctggctagtcccgcctagcgcgcccatttcgagcccaagtttccagctcgggtttccaggctcagaattttccaggagtaggttcttgggc

SEQ ID NO: 467731 - DNA, 122 bp, Homo sapiens
ctgagactaagcatttgggttgcaaataggtttcctaaatgatttacagctatcccctgccgtacaaaatgagattaagaaattaatgacatcaccataccccaagcaaacagaagtaatct

SEQ ID NO: 467732 - DNA, 122 bp, Homo sapiens
aatgaagttcttccctttctggtttgtgtgttttctgtttcttgggtttggagtccggcacgtgactgctcactgtggttacttggagttagaaatccggaggagactcagccggaaaggtc

SEQ ID NO: 467733 - DNA, 122 bp, Homo sapiens
tttcggcagaaccctgcccagtaagctcgcccggggctgtgttgtctgcagatggagcagcgacagtgtgtgggaggagcaggggcagagaaagtcggggagactcggctgccgtggcagcc

SEQ ID NO: 467734 - DNA, 122 bp, Homo sapiens
ggccgcgaggacgcgcgagggcggggcggggccatctgtaccgccgcttgggggtgggtgcgtttgctaagaagggcgccaagcaaacggaaaccgcgcacctctactggatcaatcaaaac

SEQ ID NO: 467735 - DNA, 122 bp, Homo sapiens
gtgcagtaactatttaggactgtaagcgccgctgttcacctactggaagacaaatgcaaccgaaaacactcagatctcacacctcacgaagacccgcagatgccacaaactaactgctggac

SEQ ID NO: 467736 - DNA, 122 bp, Homo sapiens
agaaaaatatataatttcagaaaccatctgcctatgagtcatatttcctcattgcttcctcgtgttttcttaactaatttgttaatatttgcataaaaacaggaccttactttcatgaaaac

SEQ ID NO: 467737 - DNA, 122 bp, Homo sapiens
tatccatccatggtgatctctctcgtacctgagcaagacaaactctttactatctcagggcgtgttccattttcttggattattcttcctcctcccctaaaacgtctggctccttcttttcc

SEQ ID NO: 467738 - DNA, 122 bp, Homo sapiens
gtaagaaggcaggacaggatacaaagagaggtctgggaccaggcccaaccttgtccaacacgtcccagtaggaaaatgagctcagaccctgggaacccaggacaggcctctacattcccctg

SEQ ID NO: 467739 - DNA, 122 bp, Homo sapiens
gcacaaaggcagtggtgggtaagatgaattgcctctgttacatgggggtatgatacctgacgaggtacatgaaaaggtaacatcttccttgtgatcccacacatgcttcattgagaagcggg

SEQ ID NO: 467740 - DNA, 122 bp, Homo sapiens
gcaccgccccgcgggccaaccgagccacccaggcggggccgggtgttgccctcgggtctgcgggccggccgccggctgcttgcctctctgcgcttctcaccccgtcctggcgcacctgccca

SEQ ID NO: 467741 - DNA, 122 bp, Homo sapiens
ccctctccctcgcctctctctgcttctttggtgggctcacgaccacctgtcgcatccctacgcgtgcctgcgccccttcccaggcaccaaaagccttgcgctccggactaggggcttgagat

SEQ ID NO: 467742 - DNA, 122 bp, Homo sapiens
gcgtgggtggcagggcgcctggagaacccacagaggcggcggggagtgaggggcgcagaccgcaggtactaggcgcccaaaggctgaccggcgggaatggcgcaccttctgggagccagaag

SEQ ID NO: 467743 - DNA, 122 bp, Homo sapiens
agagcccgggcggagaggcagagcgagcgagcgacagccagcgaggcagcgagcgggaggcggacaggactgcagcgtgcttctccaggccccgcgcgcggacagacacacggacaagtccc

SEQ ID NO: 467744 - DNA, 122 bp, Homo sapiens
tgagtgccaccctgggaagatgcggacaaagcatgtttccaaccccagtgccacagagtccgaatccagttttgacaggtttgagaaaaagtagagaggacatcaaaagaaagacaggagcc

SEQ ID NO: 467745 - DNA, 122 bp, Homo sapiens
tagtgaacccagggaagcataaatgagctggaacacatttatctatcaggaaaataacttcggcctagttgcaccaagactagcagcaatactgactacaggtgtgcacctgccaccaggta

SEQ ID NO: 467746 - DNA, 122 bp, Homo sapiens
gagatagtttcccagagccaggtactgacctcagagtcccaactcctggccacatgaaaacgtgtgtgtgagctatgctttctttttgtcctggagttataaaggttctgttgttcacaata

SEQ ID NO: 467747 - DNA, 122 bp, Homo sapiens
ggaattgagaggggagctagggaagtctgtccacagcccagctgggttagagctgagacacgaccagctcctatctttatcttttttaaaaaattcaagatcaatacaggtttatcatttct

SEQ ID NO: 467748 - DNA, 122 bp, Homo sapiens
tgcatatgtatgcatgtgtgcatgagtgtatgcatgtgtgtatgtgtgcgtgcatgtgtgcgtgctttagtatatgtatgcatgtctgcatgagtgtatgcatgtctgcatgtgtacgtatg

SEQ ID NO: 467749 - DNA, 122 bp, Homo sapiens
atccgatgatcacctgggtcatataattgtttttggtgctgagggagctgagtctcacttcgtcgcccaggctggagtgcagtggcaccatcatggctcactgttacctccgcctccaagat

SEQ ID NO: 467750 - DNA, 122 bp, Homo sapiens
gtttggagcacacagtgtctgggaggaaagggcaaggtccccaagaacctccgcaacaggcgctgaggagggagctgtgctcccctggctatctgagagggtggtacctcccagccccagcc

SEQ ID NO: 467751 - DNA, 122 bp, Homo sapiens
tggaaggccaggtaaggtaacgggtttattcacagtgtcatttacaggcagcccccaccccgcggcatcagatcccggcgggaggcccgaagtcgctagaaggtggggacggccttggaggc

SEQ ID NO: 467752 - DNA, 122 bp, Homo sapiens
ggcacggcggccatgggcgcggggcgtggggcgcgagctgcggtcacaaagggcaggccgcgccggccaccgcggccggggccacaatcgctccctccgcctccttctccgcctcccctgcg

SEQ ID NO: 467753 - DNA, 122 bp, Homo sapiens
gtgagctgttccaagaccactgagctcatggttccctgtggctgggacctccatcatgaccggggcttgaagagggtactctgttcccgctgccacatttggaacagtatgacggctgcagc

SEQ ID NO: 467754 - DNA, 122 bp, Homo sapiens
ggtgcttcccctgttccttttgttcagcccccaaaggcggtgcagcacttccacctgcaacgaccatctgtgtcacagaatacaggaaagatatcttgacattctaccgcgttctattttca

SEQ ID NO: 467755 - DNA, 122 bp, Homo sapiens
aagaatattttttccatacgcagtgacgtgggtgggtcatgggtgtctcaatgacagtaacgttcccgaaccccggaccttagctgtcatttcacctgcgtcgtcccggacgccatttggct

SEQ ID NO: 467756 - DNA, 122 bp, Homo sapiens
atgcgatgtccccaacagtgacctgctgtgtacacacagtgccacgccatggccgggatgcggacgcggtgccatcccccaccccactccctcctcagctctacccaccctcgcacgccctg

SEQ ID NO: 467757 - DNA, 122 bp, Homo sapiens
gttgcttttagtattgaaaactctaggatgctccatcttgtctgtggttgtactggctcccgagaagacctttagccactggcctggctgagttgccaaagttgggggagggggcagtgcac

SEQ ID NO: 467758 - DNA, 122 bp, Homo sapiens
gcaggggtgggcagggcaggggaagggcgggggcaggggcgggcagggcaggggaaggggcgtgggacacccaggtacatctgttttccagagcacgtggaacgccacctggacctgtgcat

SEQ ID NO: 467759 - DNA, 122 bp, Homo sapiens
ctcctaccgcaaaggctttaaagactcgcagcgacactcacttcttgctcagtttcggctcgctgccatccactttcacctcggccgcctgcacggccgccatcttcccggagggcccgacc

SEQ ID NO: 467760 - DNA, 122 bp, Homo sapiens
cttacagaattatgagggaagggtcaggtttgtggtttcagagatcctgtccctcctggccgtagccctgaccccagccctgacccctggctcctgcagcagggcccttggcatccactgag

SEQ ID NO: 467761 - DNA, 122 bp, Homo sapiens
cccttcttcattaatattagcaggggaaaccgtttgtgtaatttgtgtccctataatagccggatagaggtaaatcatgcagttacatgtgttttcatcacaggcttctccccatcccaagt

SEQ ID NO: 467762 - DNA, 122 bp, Homo sapiens
cacatctctccacccaccatgttctggcttccaaataaatacattggaaattccaggagccgaagcccatttggaaacgtttccgggccaccattttgctttgggatgggcaagaagagaca

SEQ ID NO: 467763 - DNA, 122 bp, Homo sapiens
ggtaaaggtctatcagtcttcagggaggccctggaccagaaattccgtacctattggctacgatcaagcgcgcagttaattttgataggtccaggagggtgtacgtcccggagaaatgattt

SEQ ID NO: 467764 - DNA, 122 bp, Homo sapiens
agaaaaatggagagtaaaatccaagatggcggcgcgggccgcagcaccgctcgctccctccgctgacgggaaaaatgagtccccgcagcgtccgagccccccgcccccaaccggccgccgcc

SEQ ID NO: 467765 - DNA, 122 bp, Homo sapiens
gggagagaggcgggtcctgtcggcggggcggagccgagagaggcggggtcgatagcaggccgccccgccccccacgtccccaggcccttgggcggcgaagaggtctgggcgtagcggtgacg

SEQ ID NO: 467766 - DNA, 122 bp, Homo sapiens
gaggagagcctttaaatgctgctgtcaaatggccaggacttgatccttgttgaagctgggcgatgagaatgtagagattcattaacagtttgttggcttttaaatatgtttgcaaattttat

SEQ ID NO: 467767 - DNA, 122 bp, Homo sapiens
agggggtggctctggggctgacccgggaagtcggggtctccttcgccttctgtctttctgcgtcctactagcaggtgaggcctccccgcccgtgagctccgttctctaaggggaactctcgg

SEQ ID NO: 467768 - DNA, 122 bp, Homo sapiens
caggggcccaccttggcccaggaacgtctttgaaccatgtgaggccatgtgtgtgtccggcgtcccgctcgcctgcggtagccacgtagactccgcgtcccccccaggctggatcctctcca

SEQ ID NO: 467769 - DNA, 122 bp, Homo sapiens
tgctgaggatggaggcgaagcacacggtctcaaagagggccgtcttgaagtagcagcccacgggcccgaacaagaaagggtagttgcgccacatctcatagacctccaggggcattccaagg

SEQ ID NO: 467770 - DNA, 122 bp, Homo sapiens
ctgcccgggtaggggatgcccagtgaatgtgcactgccgaggagaatgccagccagggcccgggagagtgtgaggtttcaggaaagtattgagattctgctttggagggtaaagtggggaag

SEQ ID NO: 467771 - DNA, 122 bp, Homo sapiens
tcttgtaataaaaagcatgtagagtgtagaggtttgctggcgtggctcttcctttgaccccgccacggagtgggggcgcggttgggggcgggtgtctgccattgcccgctagcgttggcgcc

SEQ ID NO: 467772 - DNA, 122 bp, Homo sapiens
gacctgctcaggacccagggccctgtttttccaccctaatgcataggtcccaatattgaccgatgctctctcctctctcctagcctcacttctaaccttctggaacccacccaccactgcca

SEQ ID NO: 467773 - DNA, 122 bp, Homo sapiens
cagagtggctttgttttcgggggtgacacttgtgtatgtctgtgcttttgcagtgtgtgacgttcctctgtatgacatttgtgactacaacgtctccagggaccgatgccaggagctcgggt

SEQ ID NO: 467774 - DNA, 122 bp, Homo sapiens
aggggactgactgtctgaattgtctttttcgactgtaggtaattggtacgcctcagagaccggcagcgtcaaacaccctggtggtaggaagcccacacacccccagcactcactttgcctct

SEQ ID NO: 467775 - DNA, 122 bp, Homo sapiens
gtttcatccagaagagccagaggtgcttgctgtccttgactgggaactttctaccttgggcgacccccttgctgatgtggcctacagctgcctggctcattacctgccatccagttttcccg

SEQ ID NO: 467776 - DNA, 122 bp, Homo sapiens
agctggctgcctgtggctcagagtctctcacgaggttgcagtcaagctgggggccagggccgtggtcatgtcaagcctccactggagcagaaggatccatttccaaattcattcacagggtt

SEQ ID NO: 467777 - DNA, 122 bp, Homo sapiens
gccaggcagtgcgggagggcggcagcggccaggctaatattcgcgaccccgactggggcgcggcaacttctgccctcagtccccacaagctcccggccgcgattcgcggccgagaaattctg

SEQ ID NO: 467778 - DNA, 122 bp, Homo sapiens
ggtgataaggctagcccacagcggatttaggcgacgtggggagatgccaaagtgaatacacggtgacttctaaatctagacgtctggaaggggccatgagagccagacaactgggcccgaac

SEQ ID NO: 467779 - DNA, 122 bp, Homo sapiens
ttgtcatatgtggatgacacccttggttcatccagtagttaccattctgcctaacattcacgagctatggattctattactgggtcccttgtgactgcattacactgagaaagtaaaatata

SEQ ID NO: 467780 - DNA, 122 bp, Homo sapiens
cgctttaagccgtggctctcaaatgaacccatccatccctatcccgcttcccagatccaacgctctccgcaaaattttacccactagacgacaaagtaggcaaacttacctctaaacgaacc

SEQ ID NO: 467781 - DNA, 122 bp, Homo sapiens
aatatccctaaaacctaataaaacaatatcctgccagcagctctttatatgaaaggttcacgcatctcacttaaaaaagaatggtcatccagatacaaaattggccacagggacttctttca

SEQ ID NO: 467782 - DNA, 122 bp, Homo sapiens
agaactgtgccctgcagatgccaggagccacagaagcgatgcgagcaggtgtgtgacctccgggaaggctcctggaactgagcccagcagcaacctggacccttgggagagggcgagagccg

SEQ ID NO: 467783 - DNA, 122 bp, Homo sapiens
aggtttggggtagggcccgagaatttgtcattttaacagtatctccggtgttgctgatgccgctggtcccagaaccacacactgcgaacaactggcctagaacgttgtcattcctttctcct

SEQ ID NO: 467784 - DNA, 122 bp, Homo sapiens
ggagctggcgctagaaatgcgccggggcctgcggggcagttgcgcaagttgtgatcgggccgctataagaggggcgggcaggcatggagccccgtaggaatcgcagcgccagcggttgcaag

SEQ ID NO: 467785 - DNA, 122 bp, Homo sapiens
ggggaaaaagaacttgatttgtcatagaaattgaaaaagctagcatggtcaagaagtagccgtcagggaaagaggagaatagaaacacaagaaaatgtaagggcagccaaccttatcaacac

SEQ ID NO: 467786 - DNA, 122 bp, Homo sapiens
cctcatctttatcaccgtcatcatcatggtgagatgtcgtcagctcttgcttcatgctgacgcaagtgatttataggcattgtctttgcagccactctatgaggcagacactgccattaaac

SEQ ID NO: 467787 - DNA, 122 bp, Homo sapiens
catctgctgagagctatttccactcaataaaaccttgcattcattcttcaatcaagcccacgtgtgatctgattcttcgggtacactaaggcaagaaacccaagatacagaaagcctctgtc

SEQ ID NO: 467788 - DNA, 122 bp, Homo sapiens
ggtgagaggctgggaggcctcaggtgggaacatacctttggccaaaggcaccaggtaacccgaacgccccggggaggacccctgcctgcatcgccgcggccgtccccccctaccccgtcccc

SEQ ID NO: 467789 - DNA, 122 bp, Homo sapiens
gccgccgcgccccggctcgccgcgctcccgccggcaccatggaggaattcctgggacaaccgcctgcagccggcgacttttccccaggaatctctggcctggcgccctttgggtgagatgac

SEQ ID NO: 467790 - DNA, 122 bp, Homo sapiens
ttagagaaccacttccccttcccttcaccctacctccgagtgcctgtgactttgtatcaccgctctggcaccacatcctcatcccagcaggatttgggaaggctgctttttgaaagcctttt

SEQ ID NO: 467791 - DNA, 122 bp, Homo sapiens
ccgctttgggggatgatgcccgtgctgggcaggatacttaatgtttgggaaatttttctacggcctctgtcagggtggcctgccactcggcagcaccggtagcggggaattgaggagggggg

SEQ ID NO: 467792 - DNA, 122 bp, Homo sapiens
gcgggccgcgccgggatgcagtgactcagccgtctgagatctgggctagagccgctcagccgaccaccgggcagcagccttcggcttccgctttccggctttcgccgccgaggtggctccgc

SEQ ID NO: 467793 - DNA, 122 bp, Homo sapiens
atgagtctcttctgcgcaagttcacactgttaaaaacttgctgaggatacagtggagtctcgcgatagctctgccccacgccattagagaacacaggatggccgaatgcccgaagtaggggg

SEQ ID NO: 467794 - DNA, 122 bp, Homo sapiens
ttggaggctggaagtgaatccaagtctgtgatcccaaagcccctatgtcagggcggggcacggtggctcacgcctgtaatcccagcactttgggaagtggaggcaagcggatcacctaaggt

SEQ ID NO: 467795 - DNA, 122 bp, Homo sapiens
tttgaaaactttaggtggaaataaagctgccattcagggaaacggggatgtgggagccgccgccgccaccgcgcacaacggcttctcctgcagcaactgcagcatgctgtccgagcgcaagg

SEQ ID NO: 467796 - DNA, 122 bp, Homo sapiens
tgctgctggccatgctggtggaggtcgcactgtgcacctggtacctggtggccttcccgccggaggtggtgacggactggcacatgctgcccacggaggcgctggtgcactgccgcacacgc

SEQ ID NO: 467797 - DNA, 122 bp, Homo sapiens
aaggaaaaggccaggctccaggagcacagagactggatggattcctgcttccctgtcactcggctctgttcaggcggtgcagtcacttccttcacctcagtgtccctgtttgtgcaaatgag

SEQ ID NO: 467798 - DNA, 122 bp, Homo sapiens
ttcccgaccgagcctccggagctaccttcgtccaaggacgtgatcgactcgttccgaaagcggctgtacttggccctgtgcagcatcccggggtgcccgaagagtcctacatacagcacgag

SEQ ID NO: 467799 - DNA, 122 bp, Homo sapiens
attttatcgaagaacccagtacttgcaggcgaattatgttctttgctacctcctccccaccggctgctgtattacagtactaacctcacggaatgtagtacagaataaatgaaataaagtaa

SEQ ID NO: 467800 - DNA, 122 bp, Homo sapiens
gaggcgatgatcctcggactcattaatagggagtcatttgtgactcaggtgcgctctctgcgtctgcaagtcacgttcccttcggcacgcccatctcgaggattcatcctctccaacgggtg

SEQ ID NO: 467801 - DNA, 122 bp, Homo sapiens
tcttgctggcaggcagttggcagttgatagactgcagcatgcttatgacagcgttctcaccgaaaagttcccgtggtattcagtaacaagatcctctaggttcttcagggtgggaattcggg

SEQ ID NO: 467802 - DNA, 122 bp, Homo sapiens
aaattcagggggacccagcttcccccaagaacacacagctggctcttggccaagcctggccgggagcgaccttcttctgactttacggagtgtgttttcactacactcagtctctgatttta

SEQ ID NO: 467803 - DNA, 122 bp, Homo sapiens
tacacgtcgccgacgcgcccgtacttctcgaagacgcgcctcagcgtgtcgggcgaggtgcggtaggtcaggttgtccaccttgagggaggtcataccctccacatcgggaggggggcggcc

SEQ ID NO: 467804 - DNA, 122 bp, Homo sapiens
aactgctaaggccatccttcattaagaaatatgcactcacctccatagatccaggaaacacggcattctttttctccttttcatggagctccagggatctcagctcacagtagaacccagtc

SEQ ID NO: 467805 - DNA, 122 bp, Homo sapiens
tcccgcgcccgctggagaccgtaagccaggagagctggctcagccgtcagcaattacctgcgccccgaacacaacacctgcgctccacttccgcacaggcagatggtgcaatctggccgcgc

SEQ ID NO: 467806 - DNA, 122 bp, Homo sapiens
agatcaaggcagagcaggaggaaaggaagaagcaggcggaggagatgaagcagcggaaagcggccttcaaggagctgcagtccacctttaagtagcgggggctgcagccgaccgccctgctc

SEQ ID NO: 467807 - DNA, 122 bp, Homo sapiens
gttttctccctagcttcagtgaagaaagcctgacggctcccccgcgtccaacaaagacaacgctcttccggtcttcgtgacccaccccgtgagcagcccaaaccgaccaccgtcctccccca

SEQ ID NO: 467808 - DNA, 122 bp, Homo sapiens
aaagttaagtactaagtatgtggtgaacaaataaatccacccttctgaaacacatctaaacgaggtcctgtatttgaaagtgtctggaagattaaaaggcactacaccaaagctgctagcac

SEQ ID NO: 467809 - DNA, 122 bp, Homo sapiens
aaaaaaaaaaaaaaatcacctcttcgccagtgactcgggaaacgcagaggtggcgagatccgagtacggtccaaccaagccagagccaattaattttaaatcctgaagaattattcagatta

SEQ ID NO: 467810 - DNA, 122 bp, Homo sapiens
atatataattttatattgtgccttcataaaatataatttctttgcatgaaaaatgagtcccgtgagtttgaattccactctgggtggttcaggattccggatatccaccgtcttctgggcac

SEQ ID NO: 467811 - DNA, 122 bp, Homo sapiens
gagccccggctacttgcatgcaccatgccctccatctaccagacacaggacattttcaggcgctgttccctcctagatcaaaccaggcctacctgttcatctctattttgtacaattttagg

SEQ ID NO: 467812 - DNA, 122 bp, Homo sapiens
cctggcgcccagcccccgcccccctctccccgcccgtcccgcccaggtgagctgcaccgacgtgagcctgtccgagcaggacaaagacggcgccaccgccatgcacttcgcggcgagccgcg

SEQ ID NO: 467813 - DNA, 122 bp, Homo sapiens
ggggcatgtttctgcctacactttgaccttgggcattcggtccccagaacggtgagagaacgcacttctgttgtgtatactatgcagtgtgtgacactttgttacggcagtcctaggacatg

SEQ ID NO: 467814 - DNA, 122 bp, Homo sapiens
tattagaggctgagtgtatgaacaaagcatctttcctgggattttaacattgtgagtgatcgagggtgctcttaaataagttcccccaagaagccctaatgttcctctggatgcatgattat

SEQ ID NO: 467815 - DNA, 122 bp, Homo sapiens
ttagcggagcttccgctattctggcaaggtttcatttttgcccggggagctatcagccagcggagagatctgtaagaagagataagacctcaagggaagtacgaggcagagccttccgcggc

SEQ ID NO: 467816 - DNA, 122 bp, Homo sapiens
acgccccagcccttcctcaccaccctgtccccggcacaggtgcgggagatgctgcgaatgcgggactccaacggggcgcgcatgctgattctcatgaccgagcagttcctgcaggacacgcg

SEQ ID NO: 467817 - DNA, 122 bp, Homo sapiens
tacttattctctcaaactctaaagtacttcagagtaagaatgtggtttatagagtctcctcgctccttccgactccttgaaaactgctctgcattattcctctcttcatactggaaaatctc

SEQ ID NO: 467818 - DNA, 122 bp, Homo sapiens
aatcacccaccttccggcaacgttgccagaacccacctgatgtcttgagggtcacaaatgcgagcgccctcctgtttgctccatttcaggattcatggcattccagtgagaagaaatctaga

SEQ ID NO: 467819 - DNA, 122 bp, Homo sapiens
gaccacatgatgcgtactggcttgccctttataacatcaaaattcatggtgtccaaagcacgctccgctgcaggaaggacattttcagagtcaatattacttcaaaatttttgctggctact

SEQ ID NO: 467820 - DNA, 122 bp, Homo sapiens
gagggccgaggtcgtgacgggcatgaccgtctctctgcttggttagggttagtgtcccgccgggcacatcaccctatgaatggagccactgagatagactgggctgaggagaaccggttgga

SEQ ID NO: 467821 - DNA, 122 bp, Homo sapiens
tatctgagctgcttgtcagtttgttcgtctgtccctaggtctgtctgctatcagctatgccgctgcccgttgcgctgcagacccgcttggccaagagaggcatcctcaaacatctggagcct

SEQ ID NO: 467822 - DNA, 122 bp, Homo sapiens
gactgcgtttcccaggcccacctatgaggtcctgcgcagacggcaaacagctgagaacagcggaccaggctctggtgctaaggcagcgaatgagcaaatggagaagttaacacatatgcatg

SEQ ID NO: 467823 - DNA, 122 bp, Homo sapiens
cccacgtgtgacagtgggaaactaatggaattcagggagttcacttcccggctcgcactccgggggcgggagggtgctgccaccgcctcaggtcgcgcgctccttaggcttccctctcacgg

SEQ ID NO: 467824 - DNA, 122 bp, Homo sapiens
cgtaacctggaatgacgaaatgacgtttgctgcgtagggacgtggctaaacgtgagggggcgtggccaagatggccgcgtgcgggatcctcgggtaccgggagcgaacgaggaggttctggc

SEQ ID NO: 467825 - DNA, 122 bp, Homo sapiens
tctatgtcactaaatattcctctctagtaacattgtgaaaggcaggttcctggctgggcacggtggctcgtgatggtaatcctagcactttgggagcccgaggcgggtggatcacgaagtca

SEQ ID NO: 467826 - DNA, 122 bp, Homo sapiens
ggaggcagggccgggcgggggctgcggtggctgaggcggcaccggagtctgggcggaagccggacccgacctgcgagcggcgccgtcgcccgggagtagcttgtagaaaccctcgcgcgtgc

SEQ ID NO: 467827 - DNA, 122 bp, Homo sapiens
tgctgccagggctttcaggccccacttggctccaaacgcacaaagtgggaacttgagccccgtgctccaggcccaggcccagcaccgcgtcagccggtctgcagtttggcccctcccttgcc

SEQ ID NO: 467828 - DNA, 122 bp, Homo sapiens
aggtacgcagcggtgagcggatcaccgtggccatgccgtagggcacgctctggcgcacgccgtagccatgccgcatgcctccggcccactggccctggtaggtaccttggagagaccgcaag

SEQ ID NO: 467829 - DNA, 122 bp, Homo sapiens
acgcccgtacgctgcggaatcgcattatggaaatagagtgccaaatggatgccttgacctcggggcccggcctattctgcacaaagatgacttctgaaatgagttttttgctataatttgct

SEQ ID NO: 467830 - DNA, 122 bp, Homo sapiens
aggagtcaggatttcagtcgagttctacccgacggcagagactgcactgttaaccactgccgagaagagtggagagggacggctaagggttctgagtcccgggcttctgcgaggatcggtga

SEQ ID NO: 467831 - DNA, 122 bp, Homo sapiens
cccaccagaaggaagaaactccgaacacatccgaacatcagaaggaacaaactccagtcacgtgtcctttaagaactgtaacactcaccgccagggtccacggcttcattgttgaagtcagt

SEQ ID NO: 467832 - DNA, 122 bp, Homo sapiens
ctcgcttctcccgctttccgccgggaggcgggaattcgcggtgtccccgggggagggagacgcaaaggcccttcctggaaggcgacaccgtcccgggccgttgcatttgtgagagagagcca

SEQ ID NO: 467833 - DNA, 122 bp, Homo sapiens
actgttagaaatggtcccgagcccagaataacatgaattgcccccaccctcacttatccacgcagtccctcgccagtggctaatgcaccacgtttacagaccacgtccccaagcgccagcgc

SEQ ID NO: 467834 - DNA, 122 bp, Homo sapiens
gaggctctgggtggggatgggagacgtggtcagtgggaagcgtccttccaccctaaggtgcgttgctccgggtggccgctggccaagtcgcctggggtgggggcggggctcccctgtcagga

SEQ ID NO: 467835 - DNA, 122 bp, Homo sapiens
caaagtgctccatggggttggcggctgggtgcagggggtccagctctgggggcttcacctcgaagcccggcttcatcctctcccgcagctcccgctctcggatctcccgctctcggatctcc

SEQ ID NO: 467836 - DNA, 122 bp, Homo sapiens
agcaaccgtgatctgtgcataaatacaagacatgttccttcaaaactccgtttctaaacacgaattctttaccagttaaaatataaaatgtgttagccccaggcaaatgattctacacccac

SEQ ID NO: 467837 - DNA, 122 bp, Homo sapiens
cctccgagccgggccggcgatggccgcagctgtgaggcgaggtcgggtcccgtagcggcgcgcagcctccttgggggactcggggtcctggttagtttccacagctccttctatctgagggg

SEQ ID NO: 467838 - DNA, 122 bp, Homo sapiens
acataaaatgatttaagaagtggacgtgtcaggaagtggcctcagctacggggactcacgcgaggcgaagagaatgagacagatggcaagaagctgtgtggctgccggcgggtctgacgaac

SEQ ID NO: 467839 - DNA, 122 bp, Homo sapiens
atatggatgcctctgggtaacttgttaatgctggaaggctgaagaaggaaaccaacagtgcgaactggctacttcccaactgttctaaaagaggcacaaagggcagggacattttcgtaaac

SEQ ID NO: 467840 - DNA, 122 bp, Homo sapiens
ggtagtagtctttgcccacggcccccgcctgcagcccactgacctgctgtcgccatcccccggctccgccaccgcccggtcccggactctgtatacccatccggccagaagtgcctgttata

SEQ ID NO: 467841 - DNA, 122 bp, Homo sapiens
cccagcgctgggagtggacatcgtcaattacaactcaggtgtgcctcctatcctcacccccggcgcagccccggcctccctgaggaaaattcgtagagctccttccccgtccaaagtcttgc

SEQ ID NO: 467842 - DNA, 122 bp, Homo sapiens
aagacatctttcctgcaacccccaacgtgacatcactcgagattctgcacaccgtctccacgtaggcccatgagaaaaaaatacgagtcacaaccattgcataatatgagccagcctataac

SEQ ID NO: 467843 - DNA, 122 bp, Homo sapiens
aaaaaaactgacgttgaacgtgcactaaactgaactgctcaaacacctacaggcacagggcgaggggtagaaccacatcgcttgactcttaagtgtgtttccaactgctcccacttcccgtt

SEQ ID NO: 467844 - DNA, 122 bp, Homo sapiens
tcaatcaagctatgcaacaggaagtcattacgatcccgttgtaacctctaaatatgtccccgttctgcacagcatcccgataaccgttttgtttttctcatattatgaccttctcatgttag

SEQ ID NO: 467845 - DNA, 122 bp, Homo sapiens
ggaggagccagaaacagaagtgatcctggggtcagagtacctgggtttcagggctggccgcgtccttgtctgtagttgtgtaatcaccagcaagttgctgacgtaccctgcctgggtctctg

SEQ ID NO: 467846 - DNA, 122 bp, Homo sapiens
gcgctggggcccgggtcggcgaggcgagttcaggtgcgctgggcgaggctgggacggcggcggcggcggcggctggccccgctcctcctcctcctccccgggcggactgaggagacgagccg

SEQ ID NO: 467847 - DNA, 122 bp, Homo sapiens
aatttggagataagtaacacatcgagtgttttcccacccacaggaagcccctctaggatgcgacaggtcacgggggcgaccctcatcacccagcaagaacactgcggaatgctgctcatcac

SEQ ID NO: 467848 - DNA, 122 bp, Homo sapiens
tctccaagaccgcggtcgcccccatcgagagggtcaaactgctgctgcaggtgaggaccgcgcggtgcaagaggcgggcgcgggcgcggcgggccgggcggggcgcgcgatgcggcgcgagc

SEQ ID NO: 467849 - DNA, 122 bp, Homo sapiens
tcctggcaattgacccctgaggcgggagagacaacggaattcccacaaagggatccttctcgggatctccccacctcaagacagctaaagctggaggaaaagcccctccggggggtgggggg

SEQ ID NO: 467850 - DNA, 122 bp, Homo sapiens
ggggtcctggaaacactcacgctcaaggagcggaggtgaatggcttcctgttctcacctccgggtccaggcactgggggtgaggaagtggctgggaggccaggaggctggaggaggggaggt

SEQ ID NO: 467851 - DNA, 122 bp, Homo sapiens
gaagcagcagggcctgccgccccatcgcccgcagaggcccagccccgacacctgccatcgcgcctcagcccctaagcgcctgcgcacatttgcgcatcgctctgcgcctgcgcgccacccta

SEQ ID NO: 467852 - DNA, 122 bp, Homo sapiens
gcatctgaaggctagcttgtattgttctgtaatgaactcatccgggctttttctcttaaacgagattttaatctcctcaaaggtaaacatcttttgtgccagcctttcagcatcacactata

SEQ ID NO: 467853 - DNA, 122 bp, Homo sapiens
ctctggttccttagagccctggttcagaacctcactctgaatcacaatgaagggaaaggccggcccgcgagggccccagtaggaccatttggaaagaaaggaaaaggataacaaaccagccg

SEQ ID NO: 467854 - DNA, 122 bp, Homo sapiens
cgtccataaattacatcaatgattgacactagaggcaccacactcacaacaaaggtggcccgattaggtgagacacaaaacatcgtcctgatgcctacagaagcccgggccccggccctgag

SEQ ID NO: 467855 - DNA, 122 bp, Homo sapiens
aagttcaatcacataaaagcgtttcacttgacctactcttccaccttgttcatgtctttgcgccttatgggactgccagaaccctgcagatgccagggcctggctcctcggttttcttttct

SEQ ID NO: 467856 - DNA, 122 bp, Homo sapiens
ccgggactgggattcctgggcagctggggctggggtgcctgggtgtctggggtgcctgggcggccggggctagggtgcctgggcgtcccctcattgctggtccttggcaaggctgggccaga

SEQ ID NO: 467857 - DNA, 122 bp, Homo sapiens
ctaattaaaacagcttcatgaagtatagtggccactggcttcctgggaacattttttctgcgctgaatattctagtcagtttctagcaaatagaaaatgctttgtggttgccactagagggc

SEQ ID NO: 467858 - DNA, 122 bp, Homo sapiens
ctgcgcaccttccggctgctgcgtgtgctgaagctggtgcgctttctgccagccctgcggcgccagctcgtggtgctggtgaagaccatggacaacgtggctaccttctgcacgctgctcat

SEQ ID NO: 467859 - DNA, 122 bp, Homo sapiens
cctgagcctctcccgggctgtgcgcccgcgtccaaggcgccaccttgcggggacagcaggcggggacttcgcgggcccagttccatttttccaacagcatgtgctcgctttgtcacattttg

SEQ ID NO: 467860 - DNA, 122 bp, Homo sapiens
aaagaagtcagccaaggaacaaatctctccacactttggctgggtgggctgatttacctgcgaaagtaatttctgtgtgtccctgcttagaatccagggttttgtgaatgagaactatcatt

SEQ ID NO: 467861 - DNA, 122 bp, Homo sapiens
taagttcaccaaggaagtgaatgtagagaaaaaaactaaattttgtgtcactcccaacaacgggaggtcaagaaatgaaaccatcaagtaaattgcagaagaatgatcagtaagggctgggc

SEQ ID NO: 467862 - DNA, 122 bp, Homo sapiens
gccggggacggtttcgggtcgggactccggcttcgggaacgggcctctggaaacctgcgacgtcagtccttacccgcccgcggctgccgcggaccgtcccacccccaaacccgtagaagccc

SEQ ID NO: 467863 - DNA, 122 bp, Homo sapiens
tctcagaaccagtggctgagcagggacatgccaggaccctcccgccacacaggatccccccgccacctggccgccatggtccctgcgcagccttgcgtttgtatcatggtcgtgtgtacctc

SEQ ID NO: 467864 - DNA, 122 bp, Homo sapiens
tggctttaagacaccggaacctccaaggttcctacaaaaccgtttgcagcttttgcaaaccgccttaaagtcatcagcgccccactgcggaattcaaagctaagctgtcacaattgttaaca

SEQ ID NO: 467865 - DNA, 122 bp, Homo sapiens
gtggctgagagaggaagtttaacgggtgacgtccccggacagaggccctgcccccacccccgtgagaaacccaggcatcctgcctgctaattatgttggggatgggtgggcaataagtggtc

SEQ ID NO: 467866 - DNA, 122 bp, Homo sapiens
taagcaatgaggaactatttcaaagttcttgagcaggagctgagtaattagtcagaaggtcgaaagtagattggaagggaaacagattgttgacaacagacaagtatagaggctagtatcac

SEQ ID NO: 467867 - DNA, 122 bp, Homo sapiens
tcaacccccgtttctgaccttgcagattccctccagagcaagctcgtctaactcgtggcccgcaggccacacggagcccaggaggacttgaatgcggcccaacacaaatttataaactttct

SEQ ID NO: 467868 - DNA, 122 bp, Homo sapiens
tcagagctcatggatgtggccaccgtgcaggacatcctgcgggactttgtgcagaagctccgggaagcccagcgggagcgggtaatgggggctggggtcctcccgcccacggcggcaccccc

SEQ ID NO: 467869 - DNA, 122 bp, Homo sapiens
atgggcgtcctcccaaggcctttgtcgctgcccctgtcccagacttttgtaggggtcaggcggccgctacggccacctttccagcgctaggaccccggctagccacgaagccggggaccttc

SEQ ID NO: 467870 - DNA, 122 bp, Homo sapiens
tttaagttatgtgtattttaaccacaataaaaaagttaactggtaggtcacctgggactgcggtttaaagcaaatgcttgatggttagactaatctggatggtccaactaacctgactctac

SEQ ID NO: 467871 - DNA, 122 bp, Homo sapiens
cagctgccactgtcactccccactgactgcacttccaggccaggaacttaatcttgctaccgtttctaacccccaaagctggacacattcttaccacccttgtcagcatgatgggttctggg

SEQ ID NO: 467872 - DNA, 122 bp, Homo sapiens
cccagggcaagtggcccctgcatgccttccagctctgggcgcagagtctgcctgcagaggcgcctcttcacaagcaggtcacgctctaggcttccagctgctaatcacaggggctctccagc

SEQ ID NO: 467873 - DNA, 122 bp, Homo sapiens
cacacttcagtggttcagaggtgtctgaatctggggataccaggtaggataaggggcctacgttataggactgctataggattaaatgagtttatacatttaaggcaatagaacaatgccag

SEQ ID NO: 467874 - DNA, 122 bp, Homo sapiens
gagcttgcacacggaagtgccatggccattgaatgaatgcgggaccgtttgcgttaataccggcaacgttctttctccggtgacactacgcagctgtcgttttccctatttctatgatcgtt

SEQ ID NO: 467875 - DNA, 122 bp, Homo sapiens
gcgggggcggccggggatcgtgcttctcgctcaggtccagattcccggcaaccaggccggcggaatcacgtgccatgctccaggccagcgtagtcccgcccatcttccagctgagcgtaccg

SEQ ID NO: 467876 - DNA, 122 bp, Homo sapiens
aagccttcgcaacagaccaagacctagtctcaaaaaaaaaaaaaagtgcgcaatgactcccgttgccaattcaaagagcttttatgaatgtttcaatatacttgtctagcgtatgtgcctgt

SEQ ID NO: 467877 - DNA, 122 bp, Homo sapiens
gaacgcctcgttcagcgactgggtgcgctggcgctcccgcacgttggccatgacccgctgcgtctgcagctcctcgtaagactgcggactcccgccgccgctgctgctgccgccgccgccgc

SEQ ID NO: 467878 - DNA, 122 bp, Homo sapiens
ttcattaggatgatttcataatatatttcctggtttagaggaaacaggaacaatggctaccgagagtactccctcagagatcatagaaagagaaagaaaaaagttgcttgaaatccttcaac

SEQ ID NO: 467879 - DNA, 122 bp, Homo sapiens
cgggcggcgaagatgcgtggggcgcggaaggggccgagcccctctttggactgcaagtcccgtctccctggcaacggcctcggccttgggggcgggcgggaggaggagaaaccgcgcgcctc

SEQ ID NO: 467880 - DNA, 122 bp, Homo sapiens
aactggggttgcgatccagtgtatgggcagtcccactcctggaactccagggtgggcactcgctccatttccacaggccctcaagggttccaggattgccccgtgggaggggttttagtgct

SEQ ID NO: 467881 - DNA, 122 bp, Homo sapiens
ctcttaggactcgctaaacaaatgttagccatcaaacctgccactgcctgatgttcctaacggccccgcgtgttaggcaaggggtatcattgttcccatggtgcacttgggaatgcgaaggg

SEQ ID NO: 467882 - DNA, 122 bp, Homo sapiens
tttatgactttgcctgtaacctctgcctccctgcctttaaaaatccttacctgggctgggcgcagtggctcatgcctgtaatcccagcactttgggaggccgaggccaggagttggagacca

SEQ ID NO: 467883 - DNA, 122 bp, Homo sapiens
cgcccgacaccacgaaagttccgggtcagggagctgcgttggcagaggccaggaggggcccgggattggggtctgcgggccgccctgggcgttgccattgcgctgcggtgctgtgcttgtgt

SEQ ID NO: 467884 - DNA, 122 bp, Homo sapiens
tcccagatcttattctttttacccatatcctccttctctcatacagcatctccttataatcgagtttccacatacttgccagatgagcgattagtttgtttatccaataaacatctattaag

SEQ ID NO: 467885 - DNA, 122 bp, Homo sapiens
tgtcgtaaactgctctcccgcttcctctgggttgggcggaagaactcacgagccgtaaagcgaaggtccacccggaaatccgttactgcgtttcgccaggcgtcctcattagcctccgaggc

SEQ ID NO: 467886 - DNA, 122 bp, Homo sapiens
acgagctggctagaggatggttctccggacctggtcccacgtggttcccaggtaagcccccgcccaggatgcagccccgttgtccatcagttttcttggagagggcatgggaaaccttcgtc

SEQ ID NO: 467887 - DNA, 122 bp, Homo sapiens
atgattataggaaaaaggctgaagatacagtcttcttgtttcaccccacactgttgagatcggaactgtggcaatcttaacaagtcatataatccaaggaaccttagtccttaaactttagt

SEQ ID NO: 467888 - DNA, 122 bp, Homo sapiens
gtgcgcatgtgcacggctacgcgggcggggggctccaacaggtgacaccggggcggggttcgcagcgcgcaggcgcgttcgggtaggtagcgcaggacaggaactctgggcggttccgccgg

SEQ ID NO: 467889 - DNA, 122 bp, Homo sapiens
ggccgtgctgggtgtgctcttgaggcgagaggcccccgaggagctgctggcctacgaaggcgtgcgggcagcgcttgaggccctgctgccctacactggtatgtgggcacagcctggggttg

SEQ ID NO: 467890 - DNA, 122 bp, Homo sapiens
aagagggagacttaatacagtcccagccctcggaccgaggatcgcctggcgcgaggaactcgggctgagctggaagatgaagggttaaaaggtctgtcaggatggaaactacaagattaaaa

SEQ ID NO: 467891 - DNA, 122 bp, Homo sapiens
tctgctgccgcctcggcacagaccctctgtgcagccccaggggcggtagatcctagtgtccgtgcgtagccggcctgccctgggctcccctgagcctcttcgggcccagtgcgtggtctgtc

SEQ ID NO: 467892 - DNA, 122 bp, Homo sapiens
ggacccccacgttctaggcctccaggtaggaggagccaacctgtcttcctggaacaggcccgaatcatcagccggtccccaccgcctgtcctgctgggaggtggaagggaaaagtgggtgca

SEQ ID NO: 467893 - DNA, 122 bp, Homo sapiens
ctgaagcctggaagagaggtcagggctggacacagactcagagctaaacagggccaccaacgccacaggtgaggaggcaatcatcaaagcttgagcaagaggagacagccatgtgataacag

SEQ ID NO: 467894 - DNA, 122 bp, Homo sapiens
gttgatggtgagaatcaggtgtagccctatttgtatagataatggtaataccagtgagagcgctccaaagggcataacacgctgccaaagctaacacactgcaggataattatggttatctt

SEQ ID NO: 467895 - DNA, 122 bp, Homo sapiens
gcccaggaggctcgcggagggcaggaggctggcggccggacgggggcggacggtgggttccgcggagccgagcagccccgccccagggtcggcccctgggagtctgcccttcactaccctgc

SEQ ID NO: 467896 - DNA, 122 bp, Homo sapiens
taagtgagatctgtggccaggacggcggggcctggacagagtggagccggcgccggccctcgtcacccttcactcagagccgcctgattagcatcagggttccgctcgcctcttgcacggat

SEQ ID NO: 467897 - DNA, 122 bp, Homo sapiens
caagccagaggcagcgactaggggtagctgaaacctcagtccaggcactgccgcatgccccgcccctcccggccaaggactataccagcccagagaattagtctttttcaggacccctttca

SEQ ID NO: 467898 - DNA, 122 bp, Homo sapiens
gagctgactccgtcccttcgcccgagcgggcgtcgcggggagggaggtggttcctgcttccgcatgcgcacaactggggtcttggatcgtagctcctttgtgagaaagggactggctcaccc

SEQ ID NO: 467899 - DNA, 122 bp, Homo sapiens
aacatttattagtgaatatttctatatattcaaagaactatatttaagtattcttaattccgcattgtattttgaggagcatagagttgggagagccatttaaaaacatttcaatcccgctc

SEQ ID NO: 467900 - DNA, 122 bp, Homo sapiens
tggctccagtgggccttccagaccccagggctgagcagtgaccccctgtgccctccagagcgctgactcttctgtgccaaggctgctgggaaggaaggacccagggtacgggtaaggtgtga

SEQ ID NO: 467901 - DNA, 122 bp, Homo sapiens
gcgctcgggctcccggcttggaaccagggaggagggagggagcgagggagcaaccagctgcgacccggaaatgccatataaggagcaggaaggatcccccgccggaacaacccttatttggg

SEQ ID NO: 467902 - DNA, 122 bp, Homo sapiens
tagagaacatagtatattctacttccaagtcatgcaaacttcagattatttcatagggctcggtatttttacatgtctgaaatacatgtatatttatctattgcagacttacatcaaccata

SEQ ID NO: 467903 - DNA, 122 bp, Homo sapiens
tacagacctacttcaaatcggggcgcagagcgttgggggtgggggaaggcgcaagctccccggccaatcagacacgagcaacctcagcccaactctggaggccccgcccccttccccgcccc

SEQ ID NO: 467904 - DNA, 122 bp, Homo sapiens
gttacagagaaatgatatcgccatggcaattacaaaatttgatcagtttgattttctcatcgatattgttccaagagatgaactgaaacctccaaagcgtcaggtgagctgtgaagggattg

SEQ ID NO: 467905 - DNA, 122 bp, Homo sapiens
gtggtccaggcgccgcgcatcccacaagctaccttcagcgcgccttaccgaaggggtcgccgtcctctgccatggcgttgatgcgcttgttggccaggacctgcacgtgcttcccgctggtg

SEQ ID NO: 467906 - DNA, 122 bp, Homo sapiens
gtgaaaaagtgggcgcccaccagccctcctcaccaccgcggctgcgacgagcctgggcgtcgcctcctaaggatggccctgtcctaacacacgcgtgcggacacaggtggcggcggcgcggc

SEQ ID NO: 467907 - DNA, 122 bp, Homo sapiens
ccaagttcctcacgtgtccccctacatacttgttatggtagaccaccggtgtgaaggcctcgcgggtaaattcactgcagctggacttgccaaagatgacctgggagagtggattcatgagg

SEQ ID NO: 467908 - DNA, 122 bp, Homo sapiens
cacctgcctttcagtggtgcggggtttgatcccgagagcggtggactcaaagctgcccgccgggactcgggctgccggccgacaaaggacggtcctcgggggttctgaagtctgacccggcc

SEQ ID NO: 467909 - DNA, 122 bp, Homo sapiens
gggctgggggctgggggctgcgatcctatctttgacgggcccgtttctgcttagctctggcgctgtcccggctcggcgaccattcccccgaccatcctctccctcttgcttcaagttcacct

SEQ ID NO: 467910 - DNA, 122 bp, Homo sapiens
gtctgcactttacagaggtccaatcacgcggacccagtaagttctcggcgctttcgtttgcgtagcgggagggaccgtggggcctggtgctgccggctggttttgagagcccgggaaggtga

SEQ ID NO: 467911 - DNA, 122 bp, Homo sapiens
ctgacatgagcttttcttcctgaactcttgttatcagttggccactccacaccacctgtgcggccacctgttggagggaacgctaggtccttcctttggctgtcactcctccatctgcagtg

SEQ ID NO: 467912 - DNA, 122 bp, Homo sapiens
cgatgcctgccctccggacaaggcggggttggtggccagggcgaccgcggggcgggccagcgccgggggtcgtggccgggacacgtggtacggaaccggcgccgcgcttgctgctggtaaca

SEQ ID NO: 467913 - DNA, 122 bp, Homo sapiens
tactctgccctgccagtctcttctcacgtgtgcccctggaaggctctgccttaacgcatgcgtagttaccttagttttcgtcgcctctgaggggcgccccgcggctttggatttgaccccgt

SEQ ID NO: 467914 - DNA, 122 bp, Homo sapiens
gcctcctcgctccccgcagtccgcgcagacccgcgccccgcacaggcccggtgggcaggccgaccctggctccgagcccctcccgcgcccacgcccacgccaagaccaacctgctgccgggc

SEQ ID NO: 467915 - DNA, 122 bp, Homo sapiens
gtcccactgcccattctgattcacatcccccaattcctgatcatgtttgtctacgtctggcgatacctgaccagaagacgtccttatcttctatcctctccctttcctttgagggagaagtc

SEQ ID NO: 467916 - DNA, 122 bp, Homo sapiens
tgacttcaggagtgaagctgcagacctgcgcagtgagtgctacagctctcaaaggctgcgcgtctggagatgtttgttccttctggtgggttcgtggtctcgctggcctcaggactgaagct

SEQ ID NO: 467917 - DNA, 122 bp, Homo sapiens
ggtgggggtgtctctcagccccttggatttgataaaagctcagcctggggccccattccacgccctgaggagttttaagccctgcccaagatctcagcagctccgaatgcagcggctttccc

SEQ ID NO: 467918 - DNA, 122 bp, Homo sapiens
gcgggaggctgaggaggctccggagcgcggagggttgctcgcgagcgtctgtgggaacagcggcacctccgcgatggtggcggagccgcggcggagctgctgcaccgacccgccgcccactc

SEQ ID NO: 467919 - DNA, 122 bp, Homo sapiens
agtcttgggcttgagtgtggctctaaagtaaatgccgttgactttgttgttctgtatggacgcttttatcaggacaataaagggtacatagggtgacctctgctcctgtggagaggtcgaat

SEQ ID NO: 467920 - DNA, 122 bp, Homo sapiens
cgccgctcctgacatccaacctccatgttcccccttttattctccactacctttgacccgcgcgctcttggtctcgaatttggttaacatctctcaggtctccgactccgatgtcttaatcc

SEQ ID NO: 467921 - DNA, 122 bp, Homo sapiens
gctgatgcgaggtggtggggggtccattctgttaacaaaaaagtgagggcaacagattcccgtcctttaaagaaagtaaacaggatcacttcacttaaagtagggcaccagacttacagaat

SEQ ID NO: 467922 - DNA, 122 bp, Homo sapiens
gactccatgttaagacgaagtgaactccctgaaccttcaagggataatgcacaaccataacgagaataatttttaaaaatagagttttcttccctgaaaacttggagaggtccaggatgcgc

SEQ ID NO: 467923 - DNA, 122 bp, Homo sapiens
gtgcaggcagcggcccggacccgggtggcagtgccgggcgctgacggcgctgggtggggccgtgggtccattctgtgtggacaggggcaagggctcacggcccagccacctcaccccagtcc

SEQ ID NO: 467924 - DNA, 122 bp, Homo sapiens
ctgtacagaaaaaaaggttgacccgtacggtaaaatttggagagcatgtggattgtgggtcgcggtctgggacactcacctgaggatgcgctcccagagagcatgcttgcgcacacggcatt

SEQ ID NO: 467925 - DNA, 122 bp, Homo sapiens
accctggttcatttgctttgcatgttgagtttcaatctcaccgttactgcctcctagtggcggatacggcggcaatagtggcgcacattcaaggcaggaagcaagaggaacagagccaccag

SEQ ID NO: 467926 - DNA, 122 bp, Homo sapiens
cggccggggaggaggagctgtgaaaatggaacggggccggcgacgctggagggagcgctccgaaggagcgcggaagaaagccctgcttagctacagccaatcaggagcgcccgtgcggcgct

SEQ ID NO: 467927 - DNA, 122 bp, Homo sapiens
gtagctcgagcggcccctggtggacgcgcgcggagcagcaacccgaccccggcgagcaagcgcgcacgaagaataatgcccctccctgtgacatggctttagtatcctccacttcctagggt

SEQ ID NO: 467928 - DNA, 122 bp, Homo sapiens
cagcgccgctgtcactgttatggtcctgtcagggtgccggcgtcgtggtgcttgggtggtcgccaccaagaagactttggtggggtagtctcggggcagctcagcggcccgctgtgcccgtt

SEQ ID NO: 467929 - DNA, 122 bp, Homo sapiens
cagtgggagggggacgataggtgctggaagcccggatgcccgcctgggaggagaccctctcggagccttggcgggagagcaagagtacagagtgggttcttctgaggagagcagagtccagc

SEQ ID NO: 467930 - DNA, 122 bp, Homo sapiens
tgctgaaggtggcgcacacgtgtgcctgggatgtccggctcttcacaggggatcagactgcgggtcacgttgagagccaacaccatgggctcggttccggctgaaaacccgccagtgtgagg

SEQ ID NO: 467931 - DNA, 122 bp, Homo sapiens
tgtcagcagcagcagcggcagcagcagtggctggcagccacgcaggtgtttatgtctggtcgtggggtctcgcggcagcatggcagactacctgatcagaggcggcaccagctacatgcctg

SEQ ID NO: 467932 - DNA, 122 bp, Homo sapiens
ccgggattacaggcgtgagccactttgcccggcctgtatttttacgttttaataaatccccgtatttttgttaaaggctgggtaacctgactcctcccctcatttctactgcaaaataggag

SEQ ID NO: 467933 - DNA, 122 bp, Homo sapiens
gcagggagagtgttccaggcagtcattcatttgggaaatactcaggtttcacaagttccacgacggtcgagggactctgtgatcttgacctcagggtcacgtaagggcttgccacccacttt

SEQ ID NO: 467934 - DNA, 122 bp, Homo sapiens
tccacttaactgctctgagtacaagcatttcaaaaaaggatgcccccaaaatcagatctccgcttggtagaatttctcactgtaaaatgtggcggttcctctgaaagggtgtgtggtaaggc

SEQ ID NO: 467935 - DNA, 122 bp, Homo sapiens
tcctgccactctccatcatcttaactgtggtgctcacagccccctggctctctcccaccccggctcggagctgtccttcaagaacctagagcagtggctctcaccctgaccccaggggtggt

SEQ ID NO: 467936 - DNA, 122 bp, Homo sapiens
agtccttttccgtaaagagtcaccatgcgtcagctgaaagaaccacatttcccaagaatccgttctctctgggatgtgtagctttggaaatctgtctttgttgctctgggagaggggactcc

SEQ ID NO: 467937 - DNA, 122 bp, Homo sapiens
ttggcaccgggaagcagaagtggctgcagtcaccgttaggatgcgtgggttgattacaggcgttagaacctgcaaaagcaaagccccgagggagtcagtcatgtacattttcactaggtagg

SEQ ID NO: 467938 - DNA, 122 bp, Homo sapiens
taattcttagtacaagactctctagcattcttctccctctgttccctgcttggtgatactcgaggtaatgcaacccccattagccttagtcttagggcaggtttgatggaaaacagagcatc

SEQ ID NO: 467939 - DNA, 122 bp, Homo sapiens
agccttcacttttaaggaggtctttaaaaatgcgcgtaatccctacctggctaaaaggaacgtaagaagtgttgggtgcatttggtagatttagaaaaactgggaaggagaatgagtgggaa

SEQ ID NO: 467940 - DNA, 122 bp, Homo sapiens
gacgcggcggtaggaggggcggcggctgtgggaacagccgggaggcggcacccgggagctcgcgctcccccgccccctgcaccccccaccctcatcccctccccctccgccccctcccccct

SEQ ID NO: 467941 - DNA, 122 bp, Homo sapiens
gaaccaagaagttggctgcaaagatctgggcctactgcaaagatcattgagtacctcctgcggtcccagtctctctttctctccttactcctggatttatctgaagatgagggctgagtgac

SEQ ID NO: 467942 - DNA, 122 bp, Homo sapiens
tcccacagtgttttacgacgacgacttgactgatgctgtgtttaaaacgctctcccgactcgcccacagattgaaaaatgcctgcacagccatactgtcggtggagaagaggtgagctttgc

SEQ ID NO: 467943 - DNA, 122 bp, Homo sapiens
gggaaggctccatgcccccagccctccccatcccgggaattttctatcagcagaaagtaacggctcccgacacaagacatacccagaggcgccacagacccagcagtcccacccctaagcac

SEQ ID NO: 467944 - DNA, 122 bp, Homo sapiens
ggtccggagccggtccctggtcctccgcgcttgccccgcccccaccgccctccactggctcggctccgccccagcggcaacgccccgcccccaccccgcagctctgccccgcctcgcctctc

SEQ ID NO: 467945 - DNA, 122 bp, Homo sapiens
ctactgtttcaaggatcaggaagttgtgggccactctcttaccttcataatactaataaacgtatcaataatagagcctctactctagccagggagtttatagatactatgtttcgttcttg

SEQ ID NO: 467946 - DNA, 122 bp, Homo sapiens
tgaagaaagcagagttgggatgattcttaaatttgtaacacaaatgactgcatgactggtcgttctgtcaaatgaggcagtgaaatctagatggagttcaggaaaggggcaaaagacaagtt

SEQ ID NO: 467947 - DNA, 122 bp, Homo sapiens
ctcctctcctggaggcaggggctgctccagggcaagtttccagaagcttccctaccctgtcgagttgccaggccggagtgtgattcaggaggggagaagcagtggctgtcggaagaggctga

SEQ ID NO: 467948 - DNA, 122 bp, Homo sapiens
gcttgccagggtcgtgggctggggcagtagcgagcattcttttcttccagcttgcagctccgacccgggcgcctcttcattcgcctccttccctcttgttgctgtgagatacctccattggc

SEQ ID NO: 467949 - DNA, 122 bp, Homo sapiens
acagaagccgatcctactgcagggccatgagcggtccattacgcagattaagtataaccgcgaaggagacctcctctttactgtggccaaggaccctgtgagtgttggctggagggggtccg

SEQ ID NO: 467950 - DNA, 122 bp, Homo sapiens
actaaccagttgttacaaaaatcacctcttggttttatttctttttatattagtttgatacgtgaatgttagtccaacttaatttttgaaggagaaacaaaatgaaaaatgttttttaaaaa

SEQ ID NO: 467951 - DNA, 122 bp, Homo sapiens
tagtcccaaagggaggaagcgacacacgcacagaggggacatacgcacagggggcacacacgcacaggggggacacaagcacaggggggacacacgcgtagtcccaaagggaggaagcgaca

SEQ ID NO: 467952 - DNA, 122 bp, Homo sapiens
gggctcgggacctgcagcccgccatgcctgagtctcccaccccctccctgggctcctgtgcggcccccgcctccccgatgagtgctgccccgtgctccacagcacccagtcccatcgaccac

SEQ ID NO: 467953 - DNA, 122 bp, Homo sapiens
aataatcagtccccagaacaaacacttaacaaccagaccatactgtcagaactctagtcccgtatttccacctaaaaaaacaaacaaaaaaatgtatcttcagtctctccatttctctccac

SEQ ID NO: 467954 - DNA, 122 bp, Homo sapiens
gctccgggagagcgagcgagcgtgtgtgagagcgagtgtgaggagcgagccgcggcccgacgcccagcgccgccgctggagcagctgtcaaaacttcgccgccgcccgggccccgcggcccg

SEQ ID NO: 467955 - DNA, 122 bp, Homo sapiens
aacagcagcacttgaacatgtctgccgggtctcagcgccagggatacagctgagccaggacgttcccggcccccacagtgtgcaggctgcaggtgtggccccgatgccaagccagcaggggc

SEQ ID NO: 467956 - DNA, 122 bp, Homo sapiens
ggtaagtcccaggtttggaggaggggtgggatcagagttctgagtgagcattctgggaggcgaggaacccaggtccccagtcctagggatgtcactgtgtcatcctgaatgccatcctcatc

SEQ ID NO: 467957 - DNA, 122 bp, Homo sapiens
gggctaagcctcagctgcaccatccaggagacagtggctggcacttgtgtgtgctgtgtgcggggcaggagggggaaactgaggcacggaggggctgagtctcagctgcaccatccaggaga

SEQ ID NO: 467958 - DNA, 122 bp, Homo sapiens
cctagctgagcttccagtcaaaagccagtgtcagatgttagccatgtgaatgagtcatcacggaatgaccagctcacttgaatcttcagtatacctgattgcaaccagagaccccaatcaag

SEQ ID NO: 467959 - DNA, 122 bp, Homo sapiens
gtgactcacctttaattccttcctgtgcaagatccaagaatactcttttggggtcgggatcgggacctgtttttctggtaacagtttctccaacaaatcaaagccttgagaaaaaaaaaata

SEQ ID NO: 467960 - DNA, 122 bp, Homo sapiens
agcaaagaacatcctcggctctaagtagggcttttagtgtgctcattgatgagtgaaagtcgccacacatgtcaagctaaaggcagttgttgggttactaacaggacccagcgccttgcaaa

SEQ ID NO: 467961 - DNA, 122 bp, Homo sapiens
agctcctggtcagggcgcggggagggggtcgggcgtgcagggaacccgcgctccagtttgcggcttggttgaccactcccaacccgggtggggtgactgccaggaggaaggggccaagctgc

SEQ ID NO: 467962 - DNA, 122 bp, Homo sapiens
caaagactaaaatttaaaccatcttttctgtagcgatctcccatcaggttggtagacacacgggagtagagaataatttaatttacttaactagtattcagaaaagatagtgacctctacat

SEQ ID NO: 467963 - DNA, 122 bp, Homo sapiens
taaatgaggcttcatcgaaaaataagctgggcggaaaaataagccgccccctcccgacgacgtacggtgtattcttaaccaccctccgaaggaggctggggcgcctgtcatgttagattagg

SEQ ID NO: 467964 - DNA, 122 bp, Homo sapiens
ctggtacattctgccatctctcttaatgggtcaggtcatctccaagttgggtgacccggtcggattacggtcccgtgaactgattcgcctttattaaaaacaataatggcttagggttttca

SEQ ID NO: 467965 - DNA, 122 bp, Homo sapiens
acaaaaaccaagtccatggctcctttgccaagttgcttcgtccccaacctgtaccacactcgctccccagtcccatccaaggctggccccgagaccagtatatagtgatatttgtatttctt

SEQ ID NO: 467966 - DNA, 122 bp, Homo sapiens
gtttctgagagcaccgggcaagtgggccactgctccagggatcagaggccatccccaggtcggccagaggtcttgtccagaaagttcaggtgctcctccatgatgggcgcccaagagcagag

SEQ ID NO: 467967 - DNA, 122 bp, Homo sapiens
gcgctcacctagacggccgggcagttaggatcgtctattggatgtgaaaccagagatgcccgccaacctggaatagagaggtaaacagcaggatcccttccagggtagaagggaccggaaga

SEQ ID NO: 467968 - DNA, 122 bp, Homo sapiens
atgacatagatgccttgaattataaacattctagtaacaggatagaactgtgaactaaaccgtatatccaattcacttgccaaagaagtgatagtctgcgccatggttttggaaattagttc

SEQ ID NO: 467969 - DNA, 122 bp, Homo sapiens
aggcgccgaggctgaaaaccagagaaccatttttagcgtctgagttggggtgagatggcgcgtgaaggggaccctactgggggcagctgtcctgtctgtctggctcatgggagcttcccctc

SEQ ID NO: 467970 - DNA, 122 bp, Homo sapiens
ctgaagggcaggaaagccacgaaagtcttgtcatcaggggagcgtgagctacagtcgctgcgtgagggggatggagactctggctgctgtggagaaaaatcgatgagaaaaccttggaataa

SEQ ID NO: 467971 - DNA, 122 bp, Homo sapiens
ggggccgagggactcgcagtgtgtgtagagagccgggctcctgcggatgggggctgcccccggggcctgagcccgcctgcccgcccaccgccccgccccgcccctgccacccctgccgcccg

SEQ ID NO: 467972 - DNA, 122 bp, Homo sapiens
catcttcaattccttttaagaagttgcctcctcaggtcagacttcccatccttgccagcacgctgctgcagcagctccccagcactaggcccatgccacaggtgtggccgggcaccgtttcg

SEQ ID NO: 467973 - DNA, 122 bp, Homo sapiens
cgcccggccccacccgctcacagaacgtctttaacaccaggggtctgaaagcgaaaactccgggaaggcactccctgaccgcagatcacactctgcagctgatccacaccgcccaggaggca

SEQ ID NO: 467974 - DNA, 122 bp, Homo sapiens
cggcggcggcggcggcggtggcggcagcggcgtcggggtgtaagcagccagcgagtaaggcgaatgctcagaccgtgctaggcagcttcgcagcccggctggctggtggggctgcctgcacg

SEQ ID NO: 467975 - DNA, 122 bp, Homo sapiens
gtggccttcaagaactctttggatcttgttgctccttgaaaaatccaggtttagaacctccgggctcaccatcctataaacaggtattacagcactagacaggaggaagtctttctatgtcc

SEQ ID NO: 467976 - DNA, 122 bp, Homo sapiens
ggagttctggtgaccttaactctgaataccaagcaagcagcaagcagccagaagtttaggcggtgtttcttatttactgtcagcaaactgacacataagaaaacaaatgaaatcaacagcat

SEQ ID NO: 467977 - DNA, 122 bp, Homo sapiens
ctcttgtcctctacttcctcaatttcacacccaactctccttcctaactcccagtccaggcgatatagaacaaattcagcccagtatcagatactacctttacagagatttcacaaccagtc

SEQ ID NO: 467978 - DNA, 122 bp, Homo sapiens
ttctggcagcggtacccgaatccctatagcaaacatgtcttgacggaagacgtagtacaccgggaggtaacccctgaccagaaactgctgtccgggcgactcctgaccaagaccaacaggac

SEQ ID NO: 467979 - DNA, 122 bp, Homo sapiens
tatgccccccgcaacccctctctcggcctcagtttctccatctgtcaagtggagctgcggcgtggatccctctcatcacccagcctctccctcatggactcttccccatgtcctgccaggtg

SEQ ID NO: 467980 - DNA, 122 bp, Homo sapiens
ctgagcttaaataacaaaactgtgccaactactactggtgatgcctaattatgaatccaacgtgtaaccagttataaatacatatatatataaaaaaggatctatttttgtgtaaatgtaca

SEQ ID NO: 467981 - DNA, 122 bp, Homo sapiens
gagcggcgagagagatgcagactcgtttcctgagcgcggtggagccgggtcttgacccagcggctctgcacagctcgcctcattcaaggcaggttttggtcccagctgttccactaattagc

SEQ ID NO: 467982 - DNA, 122 bp, Homo sapiens
gtcatgtgcccatccctgagccattttcagtggccagagagctgggatgtgctcactggccgagtaggggcatggggctagcactacgttaaaaaaaaaaagaggaaaaaagaggggggact

SEQ ID NO: 467983 - DNA, 122 bp, Homo sapiens
aatttgattagtggactattgcactcttaaaggcaaagaaaacaaagcacggcagtgccccgctcggtcgggattcaaaagcagtgaaagctgccttgctctgtttaaagcgacaggactgc

SEQ ID NO: 467984 - DNA, 122 bp, Homo sapiens
acataagcagtgggtaagggtggctgcccttgtgtcttgagctcctgggcagtgcctggacgaatccaaggcaagagaggcacctatggtgtgagtgcctgcttacattctgtgtacttggg

SEQ ID NO: 467985 - DNA, 122 bp, Homo sapiens
tccctaagttgctgggttaacctctgtagaatgtgaggatggcctggtcattttcattctcgagagacactggagagaaaaagaacattttgtgaatgatgtcgtgtgtccacaggtaactc

SEQ ID NO: 467986 - DNA, 122 bp, Homo sapiens
attcaacaggcgggaagaggatactcccggaccagggctcacgctttctccatcccaccccggactccaggcacctgtgtgccagcctggccaagcgtttcctccaaagtacaaacagctga

SEQ ID NO: 467987 - DNA, 122 bp, Homo sapiens
aagaaaggggaggtgggggaatcaaaaattaaaaaccaaacccaagccattgttcctcttcgaggaagggtgggtggtcagtcgtcgcctgagctccgaacatcaacccgcggctctcaagt

SEQ ID NO: 467988 - DNA, 122 bp, Homo sapiens
acacgcaagccggcctcctccaccctgtaaaccccgaagcagcctcatccctgtgccacacgggggtcgagaaatcttggtgacatgcaaagattggggagaaaacattaaggcgcaaacgt

SEQ ID NO: 467989 - DNA, 122 bp, Homo sapiens
ttccagcttctcatttcccaggggaccctgtaatgtacgaaaacccgatgtcataagatacgaggggccggcttgtggctccagctatcaaagtctgctttttcttcccaagtctaaaacaa

SEQ ID NO: 467990 - DNA, 122 bp, Homo sapiens
tctttgcctcgctcccggctcggcgggctcctcccggcgtctctctcgcctccggggtcccgctccccgccccccgcggtatgtcttgatcccgagcagcgggtttcatggggctcctcagg

SEQ ID NO: 467991 - DNA, 122 bp, Homo sapiens
gccctctcgggaggcagaccgcggcagcgcaaaggggcttcgaggatctctgagcaacgacggctgagtgacctctttccctctcaagcacaccttcaaggagccggtggaccctctcaccg

SEQ ID NO: 467992 - DNA, 122 bp, Homo sapiens
ggactggtacaggacaggcatctttgaacctatttctgggagttctgaaactactgttctcgtgggccttggcgactgatttgggaaagctgaccctgggttggcctggcttccagccaccg

SEQ ID NO: 467993 - DNA, 122 bp, Homo sapiens
tgccctgtcaccctcccgctgagccggcaccaggaagtggggatccctatggcggggcgacgttacaccctctttggacacctcagacccgggtggctgcttccagtgagtctggccagggc

SEQ ID NO: 467994 - DNA, 122 bp, Homo sapiens
gaggaccttcggaatgacaagccctcctcttaccccacatagaacaattccaaagcaaatcgacttttgcgttttacctctgggattagatagaataagggggcagagtggaaacgagagcc

SEQ ID NO: 467995 - DNA, 122 bp, Homo sapiens
agtctaaaatgaaggttgaaaaaaacagctcatgtccatacacagaaacagaaactgaaccgaacaccgaaactgaaactgtttgtctcttcctgagaaacgagcaaacctgaaagctactc

SEQ ID NO: 467996 - DNA, 122 bp, Homo sapiens
cggtgcggagtgaggggcgtgctcggggcgggacggagagaccggggcggcacctttggccgtgccgggcgagaggcggggagcggggcggggcgaggggcgaggggcggggcgaggggcgg

SEQ ID NO: 467997 - DNA, 122 bp, Homo sapiens
tatttataataaccagagccagccctcgcgctggccaggatcctcctgccgagctgatgtcgctcctgccctctgccggggtccggaagcgacatctcaggaggtagctctcagcagagtga

SEQ ID NO: 467998 - DNA, 122 bp, Homo sapiens
acattcaagtgggaaatggagcagggcttggaaaggagaccccagggagaggctccagtgcgcctgttaagaatctgactccatctgatgtgtaatacagacttggcaggagcaaagctccg

SEQ ID NO: 467999 - DNA, 122 bp, Homo sapiens
ctgtgacaatctgagccgtctttctctgggggagaagtttcttgctgggagtggaggcgacgccaagtggcctgggaagtgggaagccagattggaccctactgactggggaccctcagcct

SEQ ID NO: 468000 - DNA, 122 bp, Homo sapiens
tgtgcttcaaaagaattcgccagggacttcctggcttctggtcgctgtttggtttttatccgtgaaactatcaggcccacagtcctggcaaataggggataatagcatttcaggttatcagc

SEQ ID NO: 468001 - DNA, 122 bp, Homo sapiens
agtccccagcatcgttttattacatgtcatggaggaaagctcggagctcccatgccctcccggggcaccgccttccaggaacctgcctgcgttccgcttctgggcacccggaaagtcgctca

SEQ ID NO: 468002 - DNA, 122 bp, Homo sapiens
aattgccccccgggctctgggatggaaggcggtgtgcgcctgcgaaggtcagaggcccagcggcgccagggctcctcggcggagagccgcccgggtccggcgctttgctttcgccttctgcc

SEQ ID NO: 468003 - DNA, 122 bp, Homo sapiens
gatcactgccctccaggagttcagtttatagcagagcgaagacttgaacaagagcaggaccggacaagaatcctgtcaattcagagaaaaataatcacagtttattaggaaactgaatttca

SEQ ID NO: 468004 - DNA, 122 bp, Homo sapiens
tggaaatggacaatcccgaaattggcaacatatgatgtgctctttattcctgctccccaccggcatgtggtagaaggatgcagaggaaaggacggtaatgggtaagataatatgaataccac

SEQ ID NO: 468005 - DNA, 122 bp, Homo sapiens
ggggttgcccgggtgacaatcaagctgctgcggcctccagggaggtcctgtctccccagccgggtgtcggagagcgattggggagctgagcgaccacccaccgctccatggccgtccccttc

SEQ ID NO: 468006 - DNA, 122 bp, Homo sapiens
tggaatcaaatccacttaccaactgggtgatttttgtcaagttcctcaaactcagagcctcgtgtgtaaaatggaaataaaagttaaaccaacctgctgaaaattaaaggagataatgcgtg

SEQ ID NO: 468007 - DNA, 122 bp, Homo sapiens
gacattggaatagatcgaaagcatcctacaatcgccgcccgccaggcgcccacgtgacctcgttgtctttgcggcatgtgcaaacttgttcacagctgtggctgttgtcatcacttcagcgg

SEQ ID NO: 468008 - DNA, 122 bp, Homo sapiens
ccgcccctcgtctctcttctcttgggcgcattacctctctggcctgtcttactgcgttcccgggttattcatcacccatttgctcggttccattaagaaccagcttggagattaggtatttc

SEQ ID NO: 468009 - DNA, 122 bp, Homo sapiens
gtacctctcccggcgtcggagacggggaacgctccacggccctcgtgggtgttacagggacgcgacagtgcgtgtaagccccagcgctgttgtaggctctaagacccacccaggaaggctcc

SEQ ID NO: 468010 - DNA, 122 bp, Homo sapiens
cggccacactcccggaggccatggcgccggcctgcgggggcgcacgggcatgggccccggcgccgagctctgcactgagcccaactctccggcgctctctccggttcgctgttcctgagagg

SEQ ID NO: 468011 - DNA, 122 bp, Homo sapiens
aggcacccgccaccatgcccaggtaatttttgtacttttagtagagacacggtttcaccacgttggccaagctggacctgaattcttgatctcaggtgatccacccacctcggcctcccaaa

SEQ ID NO: 468012 - DNA, 122 bp, Homo sapiens
tctgacagcctaattttctaactgtataaatgcagtactgtacacatgaaaactcaaatccgtagcctgtctgcacagctctcaggctctggggttgtcaccaaaacactacagtgacaccc

SEQ ID NO: 468013 - DNA, 122 bp, Homo sapiens
cgctgccctgcgcgccccgagggaagggagaggctgtcagcggccgcaccgtgcccctgccgcctagaggcactctccccacggcccacctgactcaggctgatctgcacacggaggcggat

SEQ ID NO: 468014 - DNA, 122 bp, Homo sapiens
aagatgtggcaggcaggcagagggcttctgaccagacaacagaccaggcacctctggacacgtggctgtgggccctcacagccgctcctgacacacccggggccgagctcggagggacctgc

SEQ ID NO: 468015 - DNA, 122 bp, Homo sapiens
ccctcctcgaaggacgcacaaggggcggggcttaaggccaacggaaaacagagcgagaggcgcctgcgcattaccgaagaggcaaagttgtttttgtagtttcttcgggcttgcttatcttg

SEQ ID NO: 468016 - DNA, 122 bp, Homo sapiens
tgtgttgtccgcttcctgggacggtcccctgcgtccagcacactcaaggccagggccgcacgcaggcctgtgttgtctgcttcctgggacggtcctgtctgggaaacccggacagtcgttcc

SEQ ID NO: 468017 - DNA, 122 bp, Homo sapiens
cacaccaagttctggggaggctgccttcccaacagccggtaagtccttcctggagtgcagcgccttcagaaaaggccccgtctttggggaggcgctctgagtccccaggggcgcccatgctg

SEQ ID NO: 468018 - DNA, 122 bp, Homo sapiens
gcttttaacccttttctttgaatttgcttacccaaataaggcaacacccagaatcccaagcgtctgaacagtcaccaaataaaaacttggcacctgctgtaggccgacgtaggcctgctcgc

SEQ ID NO: 468019 - DNA, 122 bp, Homo sapiens
aagaaaggggaatcaatgtgagaacaacaacttatctaaaacgtgagagtcaaggctgggcgtggtggctcacacctgtaatcccagcactttgggaggccgaggcaggaggatcatttgag

SEQ ID NO: 468020 - DNA, 122 bp, Homo sapiens
tctcctcatccataaaatcaagaaaatcaaaatcagtcagtcagaggcagtttgtgagcacgaaatgcaaatacatgtgaaatgcttgggacagagcttggcctatgggaaacattcattca

SEQ ID NO: 468021 - DNA, 122 bp, Homo sapiens
cgtcacgggctgctgttgctccagcgtgttgggacgtgcgagaggcatttacgacctcagcgacacattccctcaacctcgtcacgctgcaagtgctgccagggtgtgttcaggggacactc

SEQ ID NO: 468022 - DNA, 122 bp, Homo sapiens
ctccttcagcgcgagccaccgattgtacaggtagggtgtgcacacaggtacagcggcgggcggtgggcgccgggccccggaacgtcaccggggcggggccggcgggcgtgctgacgtcgggc

SEQ ID NO: 468023 - DNA, 122 bp, Homo sapiens
ccctggctccagaggtcacgcttgtagtgacagagagcccagctgggagagagagccagccggcagggagcctggcctggatagcccattgcagccccgctcatcccacttactctgccatt

SEQ ID NO: 468024 - DNA, 122 bp, Homo sapiens
acgtgggcggcggcggggcctgaggtctggggctcgggcggtgggcgctgctctggccggcgcgcgtgggccccggcgaggcggcgctgcaggagctttgcgggcagctggagcgctacctg

SEQ ID NO: 468025 - DNA, 122 bp, Homo sapiens
accaaagaggagtcccctcggagtcccgtgcttgaagccagctgctggatagccagacaccgtagcttactgtggacgagcactccatccccagatgaagaaagagggtgcactgcataagg

SEQ ID NO: 468026 - DNA, 122 bp, Homo sapiens
cttctataacagcacaaaaaagtcttccagtatgttcctgccagcaaggagttggcagggcggggagaaacaaaggctgtcgcctttccagtgatgagtgcctgtaatatgaagccgggagt

SEQ ID NO: 468027 - DNA, 122 bp, Homo sapiens
ggggaccggaagctgttcgtggggatgctgaacaagcagcagtcggaggaggacgtgctgcggctgttccagcccttcggggtcattgacgagtgcaccgtgctccgggggcctgacggcag

SEQ ID NO: 468028 - DNA, 122 bp, Homo sapiens
aaaacgcagccagagctcaatccggattctcagggcttcaactacacaagccccacaaaccggctgctgggctgcagggaagctcactccagaatttaaagtgcccaggctacagagacacc

SEQ ID NO: 468029 - DNA, 122 bp, Homo sapiens
ttccccgtgtgcccttgccaactacatactgggctgcccagaggctgccttctgaaggagcgagggggccgggaggaggaaagcccagctcccctgcagccatgatagatagaccagacttt

SEQ ID NO: 468030 - DNA, 122 bp, Homo sapiens
gctggcagggagcagactggctttgtaggttcagcactcggccccccactgcgggagaggcggaacccacttgcatgtcagcgtttttgattcgagaaaagaaatactctcaacgttttacc

SEQ ID NO: 468031 - DNA, 122 bp, Homo sapiens
atccacctgcctcggcctcccaaagtgctgggattacaggcatgagccacctgcccggcccgaaaatgttttttaaaaaattagctggacttgatggtttatgcctgtattcccagctactc

SEQ ID NO: 468032 - DNA, 122 bp, Homo sapiens
cggggagtgctgcgctgtgcccgccgtccttgcccgccgcctgcagccgccgcggccgggcggtttataaccagcccagccgacccgccgcggggcttttccgtgacgtcagcgcccccgcc

SEQ ID NO: 468033 - DNA, 122 bp, Homo sapiens
ttccggtataattttgtgcatttacttgtttattgctcagctccttgctctaagcacaaccgtcctcagtcgaagtgattcatgatgactccccaggggaaaaaactggtcctcagggagga

SEQ ID NO: 468034 - DNA, 122 bp, Homo sapiens
ggaacctgtcaggtcagccccacctgtctgcctgtgttgggactcgcctgcccagggaagcggcagtgccaggccctcggtgcacactcctgcctccctctcttcctcccagcaacgccgcc

SEQ ID NO: 468035 - DNA, 122 bp, Homo sapiens
cccacgcctgcctataaaccctcatagtgtgacctttgacccctggtgtgatcttgggcccgggctgggaccagcccctagtgtgggttgtgggggcggccatggagctgggcagctgcttc

SEQ ID NO: 468036 - DNA, 122 bp, Homo sapiens
acgcgccttgatgaatgcagttggcattcattcattctcccaccagcgcactgtactccacgtgtgagcaactcacggcatccggatcctttcttgttcacaggcacttgcatcatttccag

SEQ ID NO: 468037 - DNA, 122 bp, Homo sapiens
aacatttttaaagaaaatgcagataggtagctggtctcttcatgggaaggactttctaagcgtaaaagcaatggatcataaaggaaaagattaacaagcagacaacataaaattgttttaat

SEQ ID NO: 468038 - DNA, 122 bp, Homo sapiens
acaatctatttttaaccatctgtttctatttagagcttgaagttggatatccaaaatggccgtgcaagcttaggctggggattctggatgcaacgtctttacaaccttacctagatatctgc

SEQ ID NO: 468039 - DNA, 122 bp, Homo sapiens
aggcccgcccgcctccctggcaggcactctgctgctttcttgccaaatcttgtaactgaccggtattccctgcatgtctgccccatatttcccacgtgggtgcgatgctgacagctctgtca

SEQ ID NO: 468040 - DNA, 122 bp, Homo sapiens
ctgtctccagtctcagtcaaagagcaaggcacccagcccaggacagctcaacagacccagcgatttttaaaaagaaagaggagtgccaaagccacaactcagaattccaacccccggggccc

SEQ ID NO: 468041 - DNA, 122 bp, Homo sapiens
gttaaagatgaccctaaaccaaattaggagtttagccacgtttaccttcacagctcccaccgctagttccttaaactctcttttcctcctgatcaaaaattatttcaggaagaacatctgaa

SEQ ID NO: 468042 - DNA, 122 bp, Homo sapiens
gcaaggggctcagcaaggtgtgaatgaccttagtccgcaagttcagggaagcaggcagagcggggaggtgcctgagctggggcctggagaggggcctgggaaaggaaaaccagggatagcta

SEQ ID NO: 468043 - DNA, 122 bp, Homo sapiens
ttatgtatacaattgactcatccttgcccccagggctcatgggaattaaatgagtttgtacgtaaataaatattagctgctattattgttgtgcaggacattagtccaggggtctggaaata

SEQ ID NO: 468044 - DNA, 122 bp, Homo sapiens
tatctgctcctggggagctggggcctcccctggtttacatctgcatctctaggactcccacgctgcactctgcacactgagttctcaggagattcctgctgagcaaagaaggatgaattgta

SEQ ID NO: 468045 - DNA, 122 bp, Homo sapiens
aggcagggcccgtggagaagcggccagcctggcaccctatggacacgctcccctgacttgcgccccgctccctctttctttgcagcaatgcctcctgcaccaccaactgcttagcacccctg

SEQ ID NO: 468046 - DNA, 122 bp, Homo sapiens
gaacgctctgggcagcctggagccactgcgctggatgctgcgctcgcccttcgaccgcaacgtgccggtcaacctggagcttcaggagttgctgctggactacagcttccagcacctgggtg

SEQ ID NO: 468047 - DNA, 122 bp, Homo sapiens
tcccttctcgggacaccctgctccgcacactcaccatttcccagcttttgggggtcccagcgtcctccctataaatctcgcaatacctgcaggccacagggcgatggagcctgcggcagtca

SEQ ID NO: 468048 - DNA, 122 bp, Homo sapiens
tcaggtggcaaagtgagaaataagcttttccccaaaaggggtaggttctacttcatggaacgccaaaatgatactaaggccaggtcagctgcatcccttttcaaagctgtatctgccttttc

SEQ ID NO: 468049 - DNA, 122 bp, Homo sapiens
tatgacagcatcctgcagtgaacatctctcttccttgtggagagcatccaaatatctggacgagctgcttttgggaatgacattcagggtaagtaagtaagctctgccctccactcagtgca

SEQ ID NO: 468050 - DNA, 122 bp, Homo sapiens
cccgccagataatcccgaggggatgttccttaaggagtgtttcccctagagcagctgccccgccagcgactgccccttcccagtccccacgccccccccatgccttcccagtggcccctctt

SEQ ID NO: 468051 - DNA, 122 bp, Homo sapiens
tgtggcagctattggccatgtgtggctcctgggtgcctggaatgtggctggtctgaactgcgatgtgctagaaaggtaaaatacagaattagtttcaaagattttgtttcaaatgtatttat

SEQ ID NO: 468052 - DNA, 122 bp, Homo sapiens
cttgccgcgccgcgcggaggctcgccgcgctctggaaaacaagaaaccccactgcctcggcggctttccgctcccgcaagagttgcgggcacaaagtcctcaggtggcaggcctggggttgg

SEQ ID NO: 468053 - DNA, 122 bp, Homo sapiens
gatcgagttcatggtggttcttctcatccttcaccgtcagatgggcctggctgcccagggcgcccagtgccagcagcccggagctgctccctgtcactggggggattcctggaggctggaga

SEQ ID NO: 468054 - DNA, 122 bp, Homo sapiens
tccagcttctcctcttagaagctattctcttctccctgaagggaggcaacactgtccgttcgcctgactggcagtgttttaaggacccatcgcgcttgacgggaaagtcaggtacaagctga

SEQ ID NO: 468055 - DNA, 122 bp, Homo sapiens
cggcagccgggacccctgggcgccctgtctcgtcgccgcgcggcgactgcggccccagcccgggagccctctctggacagctccgcgcccgcagcccggagcctctccatattgtgcggggc

SEQ ID NO: 468056 - DNA, 122 bp, Homo sapiens
ctgccggggactgggccttgtctccctaacgagtgccaggtgaggctgcggcggctccgacgcaggtggagctgctgacctggcccctttctgcggctgcgaggtgtgtgaggttcgtgggc

SEQ ID NO: 468057 - DNA, 122 bp, Homo sapiens
gcattcttccgataggccaggcccaaaccccacacagccaagatgctgtacacattatctcggacccaagcatctttctgaacatagctggctggaagcaagccagtcactggattctgatg

SEQ ID NO: 468058 - DNA, 122 bp, Homo sapiens
taatttcaaagaaagtagttaaaacatcagtcttctgatgaatttctaaccattcccccacgtatacaacttactacattttgtgcttttaattcgctctggaacgttgttgtcaatgaatt

SEQ ID NO: 468059 - DNA, 122 bp, Homo sapiens
taagttagaggtgaaagtatttgaaaggcttttgtaagacagcagcagccattctttcaacgcagtcaatgtagagttgtatttatttggcaaatatttattgggtacctatgacatgccca

SEQ ID NO: 468060 - DNA, 122 bp, Homo sapiens
tccctacttctgactcgggagatcgtgggctgatcctaggtgggaagcgcaggcgcaggccgtctaagggattgatggatgtggcctgccagggctttgcctaccacacagctcagagcacg

SEQ ID NO: 468061 - DNA, 122 bp, Homo sapiens
tgcaggcgatggctgctggcggatgccggcagacacactcaaagacccttttggactttccgagtttcccattctcctctactggaggctgaggcgggcaggcccagcgacgtctcccagct

SEQ ID NO: 468062 - DNA, 122 bp, Homo sapiens
ttgtaaatctgctccttcacgtcgtcagatgtcaacttcaaccaagtggggaagctgcgtcgatagggtaaagccgactgggacaggcccttctcaggagcacgcatacgacccatgatggc

SEQ ID NO: 468063 - DNA, 122 bp, Homo sapiens
attattagaggggagcatcggggcctttactaaaaacaaaacaaaatgtaaaacctttcccgtctctgctgaaggggttccctgctgtgcagcagacattcagtgatcacagagcttagctc

SEQ ID NO: 468064 - DNA, 122 bp, Homo sapiens
gagcctggtgctgacctatgtcaatgccatcagcagtggggatctaccctgcatggagaacgcagtcctggccttggcccagatagagaactcagccgcagtgcaaaaggctattgcccact

SEQ ID NO: 468065 - DNA, 122 bp, Homo sapiens
tacaggtatgcgccatcacacctggctactttttttgtatttctagtagagacagggtttcgccatgttggccaggatggtcttaatctcctgacctcatgatccacccgctttggcctcca

SEQ ID NO: 468066 - DNA, 122 bp, Homo sapiens
catttgctggaatctcttgaatggaaggggaagcaaggaggacactacaaacagaacctgcgcttctcttagactttatttctggatctaggggaaagggacaaaaaatgaaaaaccaactg

SEQ ID NO: 468067 - DNA, 122 bp, Homo sapiens
ttaatttttctgcccagtgggttttgaaatatggttggcttccttcaggaagctttttcccgacgttggtgatgataataaaacctgatgctttctatgtgctgggcccacttataaacact

SEQ ID NO: 468068 - DNA, 122 bp, Homo sapiens
gaataattcaactcgtgaatgcatctggagccctagatgaccgctttataaggcagccctcggagttgggaggctgcagtctacctgggacactcgaggaggcacacgaggcggaaaagtgg

SEQ ID NO: 468069 - DNA, 122 bp, Homo sapiens
gcgcggctcccatcacctgcaccgcgactgctagggactgtcaaagcggcagcatgccatcgccttctccagcccttctccagcagcacaaccagtcctcccagctggtcctctgaggacca

SEQ ID NO: 468070 - DNA, 122 bp, Homo sapiens
caaaagacccctcctcccgggctgggatcacggtcccggtagagagggtgctcagataaccgacagcgtttctcccaccctcatcactgtccgacttaccccgggctggcatcagggagtgt

SEQ ID NO: 468071 - DNA, 122 bp, Homo sapiens
caaagctggaatttaaacctagggacatctgatttcaaaatctttcactttttagccagacgtggtggtgcatgcctgtggtcagctacttgggatgattgcttgagcccagaaatttgaga

SEQ ID NO: 468072 - DNA, 122 bp, Homo sapiens
gcgcttctttcccccccccgccccgcctccgcccccgcccccgccgcgccgcctctctcccgcgctccggaaggcctgcgtccccgctccccagccaggcgccaccacctgccgcccaggca

SEQ ID NO: 468073 - DNA, 122 bp, Homo sapiens
tggtccagggtgctgcgcgatctaaggcgtggaggctggggggcgtggccaataaagaggcgcaactatgctaggggcaggggacctgttttgagatactaagtcaggaaaaggggagagcc

SEQ ID NO: 468074 - DNA, 122 bp, Homo sapiens
gctgccccggcgccctccactccgcgttcccagctcttggccgtccagactgacgtggtccgagaggcctcgcaagtgctccacggagtcgcacttctgcaggtctgaagccaccgtgcgca

SEQ ID NO: 468075 - DNA, 122 bp, Homo sapiens
ccccgattccggccccagccgggggggaggccgggcgcccgggccagagtccggccggagcggagcgcgcccggccccatggacagctcggccgtcattactcagatcagcaaggaggaggc

SEQ ID NO: 468076 - DNA, 122 bp, Homo sapiens
cgcagccccacgtgaccccgccctacgccccgcctccgctccgcagcgacaagggctagtcgcgcaagatcttctcaccattggtccctaaggaacggcggcctcctattggttaagtgccg

SEQ ID NO: 468077 - DNA, 122 bp, Homo sapiens
gtgaaaaaaagtgtctaggtctgcttggaactaaaacagtcacaggagtgctttcctttgcgacaaccattgtactttgggatggagcaggagtgctttgtgggcatttccattttatcatg

SEQ ID NO: 468078 - DNA, 122 bp, Homo sapiens
tctttggccaaagagcaatggtttttaggtctcccggcatgtgtaatgaatattttttaacgaaaatattatcctgaagctacctgaatctattatgtgtggtagcattccatattccctcc

SEQ ID NO: 468079 - DNA, 122 bp, Homo sapiens
tgccactaacaggctcaggacacattttcagaatgcattataaaaacagcacttcctcagcgtccctcactgtggtcacacttcctgatcaacatggattttgttataatagtttctctctg

SEQ ID NO: 468080 - DNA, 122 bp, Homo sapiens
catgctccgtacagatgctttttccctgagtatgttttgatctgcagttggttcagtctgcggacgcagagcccgctgacgtgaagggctggcagagcttcagtttgggaggcagatgcttc

SEQ ID NO: 468081 - DNA, 122 bp, Homo sapiens
cgatttgcttttagcacgagttcaaatatcctggcttagatggaattgcatggccaaatccggatgaggctgcaaatgagatcaccaaagtcctacagctggcacagcgctttcacaaaagg

SEQ ID NO: 468082 - DNA, 122 bp, Homo sapiens
gcaggcccagagcagcagtacgaaggtcagccagctgtggtaggtgatgctccatacctgcgcggcagagagggctgcacagctgcccagcgcaccccacccaggcgatgccccacacctgc

SEQ ID NO: 468083 - DNA, 122 bp, Homo sapiens
ggcggggcctggggtgggggtggaatctaaagagatttcctagacccaagtttatcctcccgagagaagcctacacgcagggattacaggcagatggaattcctcagtcctgcctgcggccc

SEQ ID NO: 468084 - DNA, 122 bp, Homo sapiens
ccccctggtgcccaagatactttctcctcgagtgatctcatctaggcacatggcttcacacgcatactacacatgtttacatagcttacccccatctctttctcctgcctagcctctttgct

SEQ ID NO: 468085 - DNA, 122 bp, Homo sapiens
actgagtcctcacacgaggcccaccttcctcacagatggcactttctcactgagtcctcacgtggggcccgccttcctcatagatggcgctttctcactgagtcctcacgtgaggcccgcct

SEQ ID NO: 468086 - DNA, 122 bp, Homo sapiens
ggctagctaaagtagagggagaagaaagccctgctgaaccagctgccacagctacttcttcgaacagtgatgctggaaacccagtgacaatgcaggaaagccatactgaatcagaaagtggt

SEQ ID NO: 468087 - DNA, 122 bp, Homo sapiens
ccctgctcccccagagccggggcaacgccccacaacctgcttcgagtgtaaaaattcagtcggattatctcatgaactgtctggctgattagtttccaatcctgccagcaaaaccttcttcc

SEQ ID NO: 468088 - DNA, 122 bp, Homo sapiens
gggagggaaggaagtggagggtggtaaattttgcttgctttgcagcttttcacagggccccgagagtgcttttagcactaaggatgtacagtcacgcaccgaataatggtttggtcaatggc

SEQ ID NO: 468089 - DNA, 122 bp, Homo sapiens
ccgaggtactcctcctgccccgcgctccccccttcctctcgctttcgcctaaatattctgcgcttatctgctccaggaccaacctgccgcggtcacgcaaagcgaggcagccggctcccggc

SEQ ID NO: 468090 - DNA, 122 bp, Homo sapiens
cctggccgcctcgccctcctcttgcaggggggagccttctgtgctgtgagtcctgcccagcggccttccaccctgactgcctgaacatcgagatgcctgacggcagctggttctgcaatgac

SEQ ID NO: 468091 - DNA, 122 bp, Homo sapiens
ctgtggttttctcgggggaagcagagatcgtgacgtgcatgagctggtttctgtgctgcacgccagcctcgggtaaagctgccgctgccgccacccactcacactgcctagcaccagctacg

SEQ ID NO: 468092 - DNA, 122 bp, Homo sapiens
ccccagcccgcaaggactccgacaccccagactttccactacgtctgcaaatgtggaccgcgtgattgactccagtgggattgttgcctccagggtggcggagtctcctttcaggcagtgct

SEQ ID NO: 468093 - DNA, 122 bp, Homo sapiens
aaaactccttaatttttggggaatcccagtaagggacagtcctgattgccattaggaggacgggacccacgcgtaaaataccaggggttgggtcatcatgggtcaggaaatgaccaaagaac

SEQ ID NO: 468094 - DNA, 122 bp, Homo sapiens
ccgcgccccttcagggagcgggatcccaaatacagtgagaaggactcgcagcagcgggagcgcgagcgagcgcgtcggagacgtcggtcctactcgcctatgagaaagcgccggagagactc

SEQ ID NO: 468095 - DNA, 122 bp, Homo sapiens
ccctccctcaccgcccctgctgctcctgaaagaaatacatacatacacactatttaaaaacgcatttttaaaagccacgttccgaactgacaatcgctgatctcggctcgcgcagagactgc

SEQ ID NO: 468096 - DNA, 122 bp, Homo sapiens
taggctaccaagaagaactgcatcttcaacaggtttgtgctcagtcattagttttccacacgttctttcagaatgatgtgttgaataaaatacatcattgcacaaatctttgtcaaagagat

SEQ ID NO: 468097 - DNA, 122 bp, Homo sapiens
tgtaaaaacgcacttacatgccattcgttctttcatttgtttagtagaatcgtttgaacccgggaggcgttctttcatttctacgttctaaagagcttaatgtagccattggtatgtccaag

SEQ ID NO: 468098 - DNA, 122 bp, Homo sapiens
ctctaaggcgccctcccccacaccccccgccccgcacagccctctggacgccttgaagtacggagccgcagccttatcctaaagaaaggcacagctctgacaagaaaaggcaatccgggagc

SEQ ID NO: 468099 - DNA, 122 bp, Homo sapiens
gactgggcagcctgggaaggccctgagcaccagccaaagctgcccccaacgctccctcaccgctagtcgggtccccactgggcatctcaccaccccggggaggggcagcccctccagacaag

SEQ ID NO: 468100 - DNA, 122 bp, Homo sapiens
tatgggggtcgggggaatgatgggtcaagggtcttccgaagaaagcgagaaaggaacaggcgccttcaaaagcccacttggcgatgggttacagtaagaggtacctccaggcccgggcatcc

SEQ ID NO: 468101 - DNA, 122 bp, Homo sapiens
cctttgcaggtgggcagggtcatgtgactattatgactaataaaatgtgagcaaaagtgacgagtcacttgtgggctgaggcagtgaaaagttgtttgtgattctcaaatctctcttctgtt

SEQ ID NO: 468102 - DNA, 122 bp, Homo sapiens
tgttataatgattcgattaagttgttaggtccaaagaatgtatgcattacatgtgttttacgtctttaccctgtgagatgaggcagatttccataaagaatgaaaagacgcattgtctgcca

SEQ ID NO: 468103 - DNA, 122 bp, Homo sapiens
accaccatgaatgacacaagagctagtttaaaaagaaagcaaagaaacaaacgcaaaacccgaaaccgcatcctccaccgcaaaggtactcggatggggcgcccgccctccccttagtcaga

SEQ ID NO: 468104 - DNA, 122 bp, Homo sapiens
accccaaagcctatgctctagctgctgtgctgtgggactcaggctcctgtgggacacagacgtgggcaccacatgccctttccttccaattctctgtcctttaagttttagggtcaataggg

SEQ ID NO: 468105 - DNA, 122 bp, Homo sapiens
caaattgttccattctgatgtgcctattccacagaggatttcaccaaagtcacatttaaccgcttcagaaaactttgcaccttctacaagaccctaatttagctcaacagtatatttgtacc

SEQ ID NO: 468106 - DNA, 122 bp, Homo sapiens
ctgaccaacatggagaaaccctgtctctactaaaactacaaaagtagccgggcgtggtggcgcatgcctgcatttccagctactccctgaggtgggaggatcgcttgaacccaggtggcaga

SEQ ID NO: 468107 - DNA, 122 bp, Homo sapiens
ctgtgttaggggaatctggactaatataacactaggagggagaaaattgtgtttctttatcgctactgtgaacgttgttgttttttaaaatttacagctgactactgaataaactctaaaac

SEQ ID NO: 468108 - DNA, 122 bp, Homo sapiens
ggcccagataccagcacgtcagacctgggcatgggccactgagagagcccggagcagccacgtccacgggaccctacgggagacccacctgaagcccggtgcacgcatgtgccgagggctgc

SEQ ID NO: 468109 - DNA, 122 bp, Homo sapiens
accgagggtcggccctgtaggtgacctcagagcgtcggggatgggcgtggccccgtcgggcgctaagaagacctagcgcagagaggaccgccgagctcccgacggggcggggccaggtgtgt

SEQ ID NO: 468110 - DNA, 122 bp, Homo sapiens
cctaattcaatggcatatcctgggagccactcaaaatagagatgatgctagttatgatcacggtcatacgttatattttataaagccctttgtcatgaattcctcccattccttttcacgtg

SEQ ID NO: 468111 - DNA, 122 bp, Homo sapiens
ccgggtccgtgagcttgaactcgccgtgaccgccctcccacgcgatgcagccggcgttcgcgcggtcagccagcagctccagcagaaactgccacagctggatctgtccgctgcctgtgggg

SEQ ID NO: 468112 - DNA, 122 bp, Homo sapiens
ccccgtgtgttactttgggggatcgcagtctccgccaatccagagcaggcttcgcgggggcggtgcccaggctctctccacctcctccacccaccacgggttgcccacctagaaaaggggaa

SEQ ID NO: 468113 - DNA, 122 bp, Homo sapiens
cagagaggtgatgacgtgcccaaggtgacgcaactcgtgaacagccgtgcctgccttgggcgcagcctccggcgccagagctgggctcttcaacacggcatttagcgcagaaagtcgtggtt

SEQ ID NO: 468114 - DNA, 122 bp, Homo sapiens
atatctgcgcgtggagctgagtgacgtacaggtaaaggccgggtcgggcggcgggaagcgcgcgggatcgcggctccgggtacccgccaggacccctgccccctttgtccgcgtgcgcgccg

SEQ ID NO: 468115 - DNA, 122 bp, Homo sapiens
ggccaaagggtcgcgttggttggggcgtggggcagctggagggctgcaggtccccagcgccgcctcccgggcaaggggcggaggcgcggatcgctgaagtcagcccgcccctggttccgcgc

SEQ ID NO: 468116 - DNA, 122 bp, Homo sapiens
aagccctgcagactgcttcttcagcatcctggcccccaccggggagggcaggccaggggacggttcaaggctgccctgggcttgcccggctcccttgcccgcagtcctagggatgcctcctc

SEQ ID NO: 468117 - DNA, 122 bp, Homo sapiens
ttgaagggcgcgagcatagcaggggcagacttgggtcctctgctccgtgctctgacagatcgtggaggtgggaccgcctctctgtcaagccagatcctaagtttctggtgttttgctttttg

SEQ ID NO: 468118 - DNA, 122 bp, Homo sapiens
cctgggcatgcgtcctctcctctcatctaagttccagaacacaagttggcaaagcctcagcgggcactgccctctgggtggggtggggcttcctgtgccctccctgccgtcactcagctgtg

SEQ ID NO: 468119 - DNA, 122 bp, Homo sapiens
gccgcgctccagcgtctcgctattgcgcatgtgccaccgccggtcgtgatggcgtagccacgctggcttactgagactcctgatctgtaaacaggactttggtggctacagcgccctcttta

SEQ ID NO: 468120 - DNA, 122 bp, Homo sapiens
cggtcttcaggcttgagggtggggcctttgccgggaaccaccctcttctacccagtatttcggtctcctgtccgtatcagcacccttgtgcaattgctcatggttaggctagctactgccct

SEQ ID NO: 468121 - DNA, 122 bp, Homo sapiens
atccatggagattttaaagctaagaatgacttcggccggatgccagccagttgcactcctcgaggtggctgccaaggaaggccaggcccagccggccgccacagtgtgcagtgggcactcgg

SEQ ID NO: 468122 - DNA, 122 bp, Homo sapiens
ttgtttctcatagcacaggtgcagcagtgatcaatggctctcagcatccatcatcatcgtcgtctgtcaatgatgtgtcttcaatgtcaacagatccgactttggcctctgatacagacagc

SEQ ID NO: 468123 - DNA, 122 bp, Homo sapiens
ttctctcccctccctactccggaggccaagcgccccagcgggaggcttccctgcccgcctcggcctcgcttacaccgcaggtgctgtgagtcacccacctgcgtggtgagtcaggggaggag

SEQ ID NO: 468124 - DNA, 122 bp, Homo sapiens
ccaatccacgcggagtagggcggggcccgctgggcgaaagggcggggcgggccgtgttcccgccggaggaacgaggacgagagccgtaaagtgccgcggcttgtaatgcaaaaggaggcgga

SEQ ID NO: 468125 - DNA, 122 bp, Homo sapiens
cgcgcctgggcgaggaggaggttccgactggggcgggcgctgggcgggcggggggcggcgcgcggccggcggggggcgggggcgcgcggccggggggcgggggagcgggggtggcggccctg

SEQ ID NO: 468126 - DNA, 122 bp, Homo sapiens
tgaactcctgggctcaagcgatcctcccacctctgccttccaaagtgctgtgattgcaggcgtgagccacagtgcccagactgtcaggacttttaggagtacatatttgcgttttttgctat

SEQ ID NO: 468127 - DNA, 122 bp, Homo sapiens
aaagctatttaacaattaatgcgttcctgggggaggccgggggaagtacccgccccttgtcgggacgcaaagccaggcgtcaggtccaaaggggctgcagtgcagtccgatttcagcacgga

SEQ ID NO: 468128 - DNA, 122 bp, Homo sapiens
gacgccggcaatgtcggctcagccgggcggttcagccgcaggaagatcagaccacagaagcggaagaggcggggcgtgcggacctgccaatcaccgcctcctacccggccccgcccctgagc

SEQ ID NO: 468129 - DNA, 122 bp, Homo sapiens
ccccgggccctttccgcagccccacgcggtctcctcccgggttaaatctatccactcgcgcgttccttggcagccgtgatcacaggcgtgaccacggtccccaagccctcgcgcctccgtcc

SEQ ID NO: 468130 - DNA, 122 bp, Homo sapiens
tatgaaaagacatctcacatactaaggcatattcacaacttaaatcatattacagtccttcgatctggccaagagaagccaggtactgaagtttaggtggcagccagaaagctggactgagt

SEQ ID NO: 468131 - DNA, 122 bp, Homo sapiens
ttacaagtaaaaagtggtacaattttggaaaactggtaatatcacctacagctgaagagacgtaaacatacaacacaacaatgtgattattacacatgttcccaacagaaatttgtacatgt

SEQ ID NO: 468132 - DNA, 122 bp, Homo sapiens
cgggtggtcctgtgcaggccgtgggtgcggtgtgcgctgtggctgatggctgagtggcagcgctgctcttacataatcagtttctctcctcctttctcttcctagagccagatttcacactg

SEQ ID NO: 468133 - DNA, 122 bp, Homo sapiens
aacctgctccctcctccgcctgactggcgctgtgatggcagctccatcttcctggctgtgcgttcagagcctcgcagttgtctttgattcctctttcttcacactccacgtgctgagtccct

SEQ ID NO: 468134 - DNA, 122 bp, Homo sapiens
caacccccgtccccactccgggcgaaaagcactgaccgggactggagatgtctctaaggtcgacgcagacccctaacgcgcgcgtctacgccgacctggggcgagcgggccgcccgggaggg

SEQ ID NO: 468135 - DNA, 122 bp, Homo sapiens
tgttttcaaagcggacctcaccatggcaaacctcaaaaggccttgtctccatgaggtcgtcgtcctgtgcctgcacaagaaatgaccttttagctggctataaaatcctgagcttgaacttc

SEQ ID NO: 468136 - DNA, 122 bp, Homo sapiens
aaccgcgccacgcgctgcaaggtggaacggctgcagctgcttctgcagcagaaacggctccgtagaaaggcccggcgggacgcgcggggtccgtaccactggtcacccagccgcaaggccgg

SEQ ID NO: 468137 - DNA, 122 bp, Homo sapiens
gaccttcgtgccgggtacgcaggaccctggaggctgtggggacggtgcaagcgctgtggccgcgggtgaggaacttcccgtgagcgaggctgacacctaggccggacagcctaggatccggt

SEQ ID NO: 468138 - DNA, 122 bp, Homo sapiens
taacccgtaagtaggttatgcaacggtttttacatgagagggccatgagtgttctcctggcgggatggagaagcattgttctggtctttgagcaaattcttgagcaattacagttctgggcc

SEQ ID NO: 468139 - DNA, 122 bp, Homo sapiens
ggttcccttgggctccggccgccaccatccactcgacggctctcggcccgaacgcttggtcgcaccgcctgccgaggtcctagatgaatcgcttcaggcctggaaacgaggaagccgtctcc

SEQ ID NO: 468140 - DNA, 122 bp, Homo sapiens
tcaagaagattctgaaaatcctacccccaccccccaccagccgcacagattgtactaccgcgagaggcatccctggcgctgtctcccactggacagaggaggctggccatggggcccagggg

SEQ ID NO: 468141 - DNA, 122 bp, Homo sapiens
tcttcccttggtcccaaggtccccaacttgtcgccaagaccccgcctgggctcccagcaccgcccctcgcgctcggggtctcccgccccacgccaagtcagcaaatgcaccccaggttctgc

SEQ ID NO: 468142 - DNA, 122 bp, Homo sapiens
tcgttccgggctccgagtagaggtggttccgaccgccgtggctggggctggggctctgcccggggcgttcggccgctcacgtggctctgccgctcacctgcgcggctgcggctttgtgtcgc

SEQ ID NO: 468143 - DNA, 122 bp, Homo sapiens
cctgctatacaagataaataagttgttgtcctttttccccctcaggacctcaaagcatgccgatatttcattacttttcatctttacctatgaaatactgctctgttcattttacggagtgg

SEQ ID NO: 468144 - DNA, 122 bp, Homo sapiens
cttattttgctagacattgagctacagcagtcaacaacacatccagtgttctctcaactgcgtagaatggcagtccagggtacctttcctagtttagacaactattgagtagagcctgtata

SEQ ID NO: 468145 - DNA, 122 bp, Homo sapiens
ccgattggtccgggttagggacggcgggcagcgcctatagctattggagagggtgaggaacggggcagggagggcagcttcgtgtctatccttgtttctcgggtaaacatttttttttaagc

SEQ ID NO: 468146 - DNA, 122 bp, Homo sapiens
gcatcatgcaattttgttttgcttgcatttttggagtgacagaaactttcatgttagcagcgatggcttatgaccgttttgtggcagtttgtaaacccttgctgtataccactattatgtct

SEQ ID NO: 468147 - DNA, 122 bp, Homo sapiens
gcccaccgtgacgtccgggcccgggttgagttgggggcggggccgggcggcctggctccgcgccctctcgtccaggcctccagagcggggaaactgaggccagcggccccctggtcgcaaag

SEQ ID NO: 468148 - DNA, 122 bp, Homo sapiens
tttattcgattggatagtcggaatgctacttttcacggtgcaaagctatgattggctgcgcgcggcagggctcgcgcagttaccaggcagcgggctagactgaggctagttaccacgtcagt

SEQ ID NO: 468149 - DNA, 122 bp, Homo sapiens
tcccccgcccagcgcgcacgcgcgatcagagcttgcccgcccggcccgaccctggcagtgcgtgccacagtgcacgccgcactcacgcgccacagtatgtcccgcgacctgccggcgcaggg

SEQ ID NO: 468150 - DNA, 122 bp, Homo sapiens
tttgcaccctagaattgacaggtggtggcctcagcagttacaacctactacacagcatctcgtccgtgcgatacggtcacattgttattccccgcacccggctgaggagcgcagcgcggcag

SEQ ID NO: 468151 - DNA, 122 bp, Homo sapiens
aaaaaaaattattaatagatggtgaccctcatcttcacgttttctgcatctattgaagtgcgccactgagatcgtggagttcttccctgtttgtccatatgatgaacaacactgattttctg

SEQ ID NO: 468152 - DNA, 122 bp, Homo sapiens
actaaaaatacaaaaaaaagtagctgggcatgggcgctcacctgtaattccagctactcgcgaggctgaggcatgagaatctcttgaacctgggaggcggaggttcctgtgagccaagattg

SEQ ID NO: 468153 - DNA, 122 bp, Homo sapiens
cctgccaagacggaaccctgcatgagcatgggggatggggagttggggtgttgcaaaagacgcaatacatgaatgatctcaggtaattctcaggcaacccccggaggctggtgttgctagca

SEQ ID NO: 468154 - DNA, 122 bp, Homo sapiens
cctgtcgtcctctctctgcctgtcgtcctttctctgcctctgatgcggatccttctcccgcgtgctgaggaatctttccgcggcgtccagtttcgtcttcagctctgctacctgaggaggtc

SEQ ID NO: 468155 - DNA, 122 bp, Homo sapiens
gccagctcgcgctccggccagtggagaaggtggacactgaccgacgtttccatggcaggtcgtctgcagggcctggagacctggcctaggtcctcccggggcctgccggaccacatgttgca

SEQ ID NO: 468156 - DNA, 122 bp, Homo sapiens
aagaggagtaaagacggcgagacgcgtccacgcagggggagtctgtgcggtttggaggaacgcgccaatgtctgcactcatgaggagcccccaagggcggttttaagagggtgaagcaggac

SEQ ID NO: 468157 - DNA, 122 bp, Homo sapiens
aaagaagcgctccacatcgcgctcccgggcctggtagctcaggcggccgatgtacacccgcggcatcccggcaacggcagtgatggctggccccggccccagccccccttaggcggcggcgg

SEQ ID NO: 468158 - DNA, 122 bp, Homo sapiens
gagaacgcgcgctccggagccaactgcctgccctgggcctggtcctgcgcctcccacggccgcttccaccttcacgcggcaggtacgacgcctccccgcaggctgcccagggattcagtccc

SEQ ID NO: 468159 - DNA, 122 bp, Homo sapiens
tggaggttttggtggtaacggaggcacccggggaggcacccggggaggcacccgtggaggcgaccggggaagaggcagaggcgccggcaggaattcaaagcagcagcttttcggcagaggag

SEQ ID NO: 468160 - DNA, 122 bp, Homo sapiens
gtagagtctgatggctttaggtacttgtcacatcagcatagtcaagaagatgatcatggccgggcgcggtggctcacgcctgtaatcccagcactttgggaggccgaggcgggcggatcacg

SEQ ID NO: 468161 - DNA, 122 bp, Homo sapiens
tagtttagatctgtatgcacagctttttagaaggataaatgcataattccatatctctttcgtaagaatacattttgaaatcttaagctgaatgtgaatattagatcttgtaaggagactca

SEQ ID NO: 468162 - DNA, 122 bp, Homo sapiens
gagggagggctgtggaagggggcttgctggcagttgagttccaccaatgttttctcaagccgacactgagccccattcatcctcctgcccatgtgtggctccggcacccctagacggggcca

SEQ ID NO: 468163 - DNA, 122 bp, Homo sapiens
atctagatatttgtttgtgaggatatgattttcaactcatgttgccaatgagtaatttaacggccagttacagtctgagaaaaatgtgtctcccactggtgattctttgtaatatattacaa

SEQ ID NO: 468164 - DNA, 122 bp, Homo sapiens
atcaaataattacttcattaatcacaaatgtgtgaagtgccttactgtagacacgcagagcgtgcgggacacgttatcacaaagcaacctcctgtagtctagagtggggcgtgtgggtcagg

SEQ ID NO: 468165 - DNA, 122 bp, Homo sapiens
gcacaggggctggcacacagtaagcgcctggtgtgggcagggcaggaggtgggcaggggtcgatttcaggatgtaaccatggagacctccacgacaacagcctagggcttgaaacccaagaa

SEQ ID NO: 468166 - DNA, 122 bp, Homo sapiens
gtcttatcacacagtcagaactgatggctgcagaagtcataaagatcccatttaatctcgcgcctatctatcacgcggctgccttcatcctctttgtgccggggtaatatgtgctcattaca

SEQ ID NO: 468167 - DNA, 122 bp, Homo sapiens
tctggaggcgggagcacgaaggagcgaccacggagcccttgagcctgtggatggtggcctcggcggccggcaggccatgctggagtatctgccaacctgatgaagacgaggacgtcccacaa

SEQ ID NO: 468168 - DNA, 122 bp, Homo sapiens
cccaggtaccttgatgtaggggttctccatccaggctggcgtgagggccgtggccgtgtccgcatcgctctcatagtagaagacggtgaaggtctccttgcaggagcgcccagcccgaggca

SEQ ID NO: 468169 - DNA, 122 bp, Homo sapiens
ctcaggtccgctaggggttctctatctctccgtgacggtcacgggtccccagcttcctggcgctcgagctctcccggctgtctgctgcccggcgcacgcctgccggggactgccggccactc

SEQ ID NO: 468170 - DNA, 122 bp, Homo sapiens
tcctttgcccctgggttgcgtcaccctcatgcttccagaacctggaggatccagcaggaccgtcccacttgtatttgcattgaggtcattgatggaaatggtgggggatggtgggggcacca

SEQ ID NO: 468171 - DNA, 122 bp, Homo sapiens
gttcgttcctcccagtgggctcgtggtctcgctgccttcaggagcgaagctgcagaccttcgcggtgagtgttacagctcataaaagcagtgtggacccaaagagtgagcagtagcaagatt

SEQ ID NO: 468172 - DNA, 122 bp, Homo sapiens
tagtaatacaggtcttcaaacatgccaaggatattcctcccttggagctttgaacatgcacgtctgtggttatattgctctccctgcaaattattcctaaaagaggcttgccctgaccattc

SEQ ID NO: 468173 - DNA, 122 bp, Homo sapiens
ctctcagtttcctcttcatgaacataacactacatttgccaccagtttgagtccatgtgacggctctagccaataagccaccatatagatacatgttgtaggtgatgcaattacaagataga

SEQ ID NO: 468174 - DNA, 122 bp, Homo sapiens
ctgggaaatgggcattcgggtcgcatgcccaccgcagtggcccagagcccctgtccggaccgctaacaagttgcttagcaacccgccgcccggccctcggccaccgctagagggcgagcggg

SEQ ID NO: 468175 - DNA, 122 bp, Homo sapiens
accatagaggtgggccttccgcgacgccacaggagcgggtgttcgcctacgtcactggggcgctacagtacctggagctgggcagtcttctcatcagagtggggactaataacagtgacctc

SEQ ID NO: 468176 - DNA, 122 bp, Homo sapiens
aggagatgtcgaggcccccgagggaggcggtggtgaaatcttggcttgcagcctccagcccgcccagagccagagtcaggcacgaggctagggcaactccgccccacccctcccccggggac

SEQ ID NO: 468177 - DNA, 122 bp, Homo sapiens
gcgggggcgggaggggggagccgggagccctctctgcgcctgagggaggtgtcatcttcacgattccttggtgaccagcgcagctccactttacagatggagaaactgagcctgcgagaggg

SEQ ID NO: 468178 - DNA, 122 bp, Homo sapiens
gggaggtgaagcagcaggaggaagaaccccaggtggacgtatgggagttgctgaagaacgcgaaacccagtgagtacgagaagatcgccttccagtatggaatcaccgacctgcgcggcatg

SEQ ID NO: 468179 - DNA, 122 bp, Homo sapiens
ccgcgtcgccgccgccgctgcccggcttcggcaccccctggtcggtgcagaccgcgtcgccgccaccccagccccagcagccgccgccgacccagccgcagcagcagccgccgccaccccag

SEQ ID NO: 468180 - DNA, 122 bp, Homo sapiens
tggtgggtttgacagggaggcaggcaggtgacttggatgcaggagagcaagtgcgtcaagcgctcatccatgggtccttgccatgtgactgggcagggtggcctgagctgagagaacttggc

SEQ ID NO: 468181 - DNA, 122 bp, Homo sapiens
cttcatacagagagcctttaaacaaggatgtggcacataagaacagaggcatacattcttcggttacttagagctcaggttctacagttaaattacatggataaaaggaagcatactcttct

SEQ ID NO: 468182 - DNA, 122 bp, Homo sapiens
aggacacaggatcccgaaacatggtccccacatcagaaactgcacagtggaaacgctatgcgatagccacgcatccaccacccaggacaggatgtgagggaagcagaggcggcacgttccaa

SEQ ID NO: 468183 - DNA, 122 bp, Homo sapiens
atgggccgaagccgtgtaaatgcgttttaaggcgagtgcggaaagtggcctggggagcctcggggagcggacgccctccgccctggtgctgacctgcctccctgccccttctgcctcctgtc

SEQ ID NO: 468184 - DNA, 122 bp, Homo sapiens
gacctcccaccctaggagggagggaaggacaccgtcctagggtataacctggcaataaaccgtgcctctcactgtgcctgttgctctagctgtgtcttcctgctccagaggatgggagaagc

SEQ ID NO: 468185 - DNA, 122 bp, Homo sapiens
tttttaattttcaatcctcgtcctacatttgccaagacatccacctctgcaatggaggggcgtatatacagggtctgtggttttgaaacagcacacaactctgtgctgcaaatggctctgat

SEQ ID NO: 468186 - DNA, 122 bp, Homo sapiens
cctctgcctggggccccacctggaaaaatggctcctctaaggcgcttccagcctaaagcccgtcctcttccacctcttgggtgcagactggccctcccactccgaccgcaggtcccccaccg

SEQ ID NO: 468187 - DNA, 122 bp, Homo sapiens
ctctgatcatccccaggacaagaatagcattatcctgtgttgatattcaaatatgtactccgtgtgagtgctctgaatagctgagagcatcttgcaaacttcagtaagaatgggacaaacac

SEQ ID NO: 468188 - DNA, 122 bp, Homo sapiens
ttttaaaaacgaaatgaaggtgttagacccgcggcgcagtctccaggaaaagcctccacgcgcagaggggagggccctccgggggagggtgcgcggggcgggggcgcgcggggggagggggt

SEQ ID NO: 468189 - DNA, 122 bp, Homo sapiens
tccctgagcccaggccccagtctgtctaatggggcagcagtgccttccacgataggtcggcgggagaatggagtggatgctgcgccgaagctgcccgcaggggacactcggtggagacctgg

SEQ ID NO: 468190 - DNA, 122 bp, Homo sapiens
ggctcggctgttgttatcaaaatgataacagtaattattaacacagttaattgattccttcgctgtagagctgtgcaggccagtggtaatggaataggacaaagagaagccccatgtgttgc

SEQ ID NO: 468191 - DNA, 122 bp, Homo sapiens
gtgcattataaaaagtacagtaatgcattggcttcaacttgcatatttcccaaacatgggcgtttgcaagaaaagcaaacactttttgataacatatactgaaggatcttaaaataagatca

SEQ ID NO: 468192 - DNA, 122 bp, Homo sapiens
ggctggggtcagagaagtgaagccaaactgtcctcccgcaggaggcaaggcctggagggacgccagggtcccagtccggtgccgggccctgcgcacacagccgccgcctccaccctcgcgga

SEQ ID NO: 468193 - DNA, 122 bp, Homo sapiens
tatcaaacagacactgattttaattcttactatgccatttacaagatatatgaccttgggcggtatatttaagtgagattcagtttttgtcaaattggaatgatagcagctatctcagagtt

SEQ ID NO: 468194 - DNA, 122 bp, Homo sapiens
cttcagcgagagctcggcgctcgtgcagcaccagcgcacgcacaccggggagcgaccctacgcctgcggggactgtggcaagcgcttcagcgtctcctccaacctgctgcgccaccggcgca

SEQ ID NO: 468195 - DNA, 122 bp, Homo sapiens
gcaacttctcaggaacgttctgtggttagtactcactctggcccattgcctgcaccttctcggttcttgagcctagacaggggtgacacgtcataggtgctcaaaaacaacttttgcaggaa

SEQ ID NO: 468196 - DNA, 122 bp, Homo sapiens
ccccacctgccgcgggaaactcacgaggaaagtgcagaccttcggtggcgctggcacccgcgtggccctgattcctaagacgacttggcattggccactagggttctcttctctccagccag

SEQ ID NO: 468197 - DNA, 122 bp, Homo sapiens
cctggcccccagcgggggctgccacaggagtataggcccaacaggaagggaagatcccagcgattggttccagtgggttctggggatgtcctcggagcctggcctggctcagggtccctcca

SEQ ID NO: 468198 - DNA, 122 bp, Homo sapiens
ccaaccccgtgtctccctgcagaaagtgggcagcggcctgcgccagtggaagcgggtgtacgccgcgctgctggcgcgctcgctctcgctgagcaaggagcggcgggagcccgggctggcgg

SEQ ID NO: 468199 - DNA, 122 bp, Homo sapiens
ctgggtgccaaagatgtaggggaaccagcccgctacaccacatgcgtgttctccccttcccggtggaaatgaaggaatgagaaaagaaataaagacacaaagttcaagagttaacaaaagtg

SEQ ID NO: 468200 - DNA, 122 bp, Homo sapiens
cgcgaggtcttgcggccgggctgcgctttcccaagcggccaccaggtggcgcggccagaccgcgcagaccccaagctttgcgccagcaggtggcgcgtcccaagctccccgccttcgccgcg

SEQ ID NO: 468201 - DNA, 122 bp, Homo sapiens
cgcactttcccccattagcgttgtccaagtctccctctgccttcaaggctgtgtcccaaccggacccacccggaggctgtggctagggcggagagcgcagcgcagggattctcgggctcacc

SEQ ID NO: 468202 - DNA, 122 bp, Homo sapiens
agttgggaaacaggggcctagtgatgtagtggtcattctagaaatgcaacccctcagaaacgtgctgcccagacttttggatgaagggtaaaacaaataaagctgccgcctattggaacgta

SEQ ID NO: 468203 - DNA, 122 bp, Homo sapiens
tgttgttgttgtttttgaaacggagtcttgctctgttgcccaggctggagtgcagtggcgcgatctcggctcactgcacgctccacctccagggttcatgccattcttctgcctcagcctcc

SEQ ID NO: 468204 - DNA, 122 bp, Homo sapiens
ttaccgttgtgttctttcaaaaaccaaaaacctgtgtctagtcacgagaaaaacatcagacgaatccccatagaaggacattctacaaaataccagtttatttctcaaaactgtcatcaaaa

SEQ ID NO: 468205 - DNA, 122 bp, Homo sapiens
acacttactgcccttcagaacaagcaggcttctatggtaaccagtgaagtaaatggaccccgttgccaggaaaggtacatgaaacaaaaccaaaacaaggcagacaggaagacaggggcttc

SEQ ID NO: 468206 - DNA, 122 bp, Homo sapiens
aactgccgctgtcttttttctccagttctcctgaagctggaagcattaggaaactggattcgtttcctgcgggagaggaatatcaaagacccggttctgttcagtcctgggaagaagcaaac

SEQ ID NO: 468207 - DNA, 122 bp, Homo sapiens
acacctcccctttctttgggccgatgacaactcttggacctctgaggtgactgtcctgcccgcagcttctctccttccaagagtgtcatttcttgatcctctccatagtggctcaacggtaa

SEQ ID NO: 468208 - DNA, 122 bp, Homo sapiens
ccaggtaaggctggagctccgaactgactaaggcggggccagccacagaagggggcgtgtcggagaccacagaaaggcttggtctcatccctgggcctgggaagaagccgactatcccttgg

SEQ ID NO: 468209 - DNA, 122 bp, Homo sapiens
ggcccactccgccattttcatccggaagtgcgtcacccagaggcggtcttgtagcggggccggcttggggcttggttctatgtccctgcgggtcggtgcgagggcgaagaggaacccgtggg

SEQ ID NO: 468210 - DNA, 122 bp, Homo sapiens
agaaacattattgcccagaaggattatgtgtttatggattattttgccccgcctcaggagcgcaggaagtcactaccatttatattctaaaacagacctatctatgttcataggacttctga

SEQ ID NO: 468211 - DNA, 122 bp, Homo sapiens
ctgtgataagttggttactgtaagtgagaaaaataaaaatcaaactccagggctgaagagcgagtgtgagggaagaagcagcaactgaagtgaagagcagtttttggttcacagcaaaattg

SEQ ID NO: 468212 - DNA, 122 bp, Homo sapiens
tgtggggagcgcctctgccccgccgccccctctgggacgtgaggagcgcctctgcccggccgagaccctgtctgggaggtgaggagcgtctctgcccggccaccccatctgagaagtgagga

SEQ ID NO: 468213 - DNA, 122 bp, Homo sapiens
gggctcagagcaggggctcctccgcccgggcccacgggcaattctattcctggtaaccctcgaaagcctgcaggtctctgctctggctgtggcccgggccaccctgcctgacgcgtgtgctt

SEQ ID NO: 468214 - DNA, 122 bp, Homo sapiens
tgcagatcaacaaagggtcggtggcctctcactgcctccgcggcagggttgtcaaggtaacgctcctcagacaagggtggggcgcggcccgccccttttctcaccccgcctcctcctcagcc

SEQ ID NO: 468215 - DNA, 122 bp, Homo sapiens
tctcaagatgagcatgaattaaggtgtttatttcattttaaatacttttttttatcatagcgtacaaagctagagttctctgacatggatggcttatgtggatctctatttagacttgatga

SEQ ID NO: 468216 - DNA, 122 bp, Homo sapiens
actgacaatgatggaagacaaaggaagactacacgatagaaggaattaggaggagagggacgcagagggaggagaagagaaggggcagaaactaaacagccatagtaggctggggctattga

SEQ ID NO: 468217 - DNA, 122 bp, Homo sapiens
gatctggccttgctgatctcatcagaccatgctgaaggtagtgccagtaggatgttgatacgatacgagaagggggggcagtccccttttgccattctcccaaagccgcatctaaagtcccc

SEQ ID NO: 468218 - DNA, 122 bp, Homo sapiens
agtcttctttccaaataaggaaaggaatgtgagctggtactgataagcctggtactgtggcgtgtccaggcatgtaacaaaggcagaaacgaaaaaaagagaaaaaggaaaaaaggttgtgg

SEQ ID NO: 468219 - DNA, 122 bp, Homo sapiens
caaaatatcctgaacgttgggattctgctcctccagctccaggttaagcgagcctgtgtccggaaaggacttcaagatgtcggcgaccatgagcacccaggggtccgagtcgaggctggcga

SEQ ID NO: 468220 - DNA, 122 bp, Homo sapiens
ccagcctggatgacattgcaactctgtctctacaaaaaaatacaaaaaattttagccaggcgtggtgatgcacacctgtggtgaggctgaggcaggaggctcacttgagcccaggaggtcaa

SEQ ID NO: 468221 - DNA, 122 bp, Homo sapiens
aggaattcagaagaactgccttagagaaaagtggttccttggccagacgtggtggccccacgcctgtaatcccagcattttgggaggctgaggcagtaggattgcttgaggccaggagttca

SEQ ID NO: 468222 - DNA, 122 bp, Homo sapiens
agtgctaagcctctcactgccggggcggcggtgccggccgaccgctccgagtgcggggcccgtggagcccacacccacctggaactcgcgccggcccgcaagtaccgcacgcagcccggttc

SEQ ID NO: 468223 - DNA, 122 bp, Homo sapiens
gccgggatccctaccccctcctctcccagccttcaacgcctggaaaccaacgaacccgcccggaacaaaggcaggccggctttccaaaggcaaacaaagaacagtttgtcttttccctcccc

SEQ ID NO: 468224 - DNA, 122 bp, Homo sapiens
agactggagggccccattaaggtctttcacgctgggactttggaaggtggcttggaagttcgccttccaaggctgctcccttcctgcctccctccactcaccccagcccacatcccttaccc

SEQ ID NO: 468225 - DNA, 122 bp, Homo sapiens
ctcccgggcccagccgggctgaggtggcgtgggcgccctgcgggccgggcctccgcggcgcgtcccagtcccagtctccgcgctggtctggcccggtccctcagctccaccccctgcctccc

SEQ ID NO: 468226 - DNA, 122 bp, Homo sapiens
gggcgatttgttagtttattcagtgtctggcaaggccggacgtgtgtttgtgatttctatcgtaaagctgatcactgtccaaaaatactccacatttatccacaagtcagtgattgtgatgc

SEQ ID NO: 468227 - DNA, 122 bp, Homo sapiens
gacataatttcaccatgttggcaaggctggccttgaagtcctgccctcatgtgatccacccgcctcagcctcctaaagtgctgggatgacagtcatgagccactgcatctggccctaatcct

SEQ ID NO: 468228 - DNA, 122 bp, Homo sapiens
cctgagcacgtccaattaaggctctgaaagatgtgtggccccttccttcctcccacagtgcgtcacgtgttgtgtttcatgctcaaggaagggtgtgtatgtgtgtccgtgtgagagagaca

SEQ ID NO: 468229 - DNA, 122 bp, Homo sapiens
tccagcacagatgccatccaagtagcccctgcatcgctgtctgactgagatctttttattcgcaatcatgcagacgtaggggccctttctgcagctgatgtttgagactgttagaacttctt

SEQ ID NO: 468230 - DNA, 122 bp, Homo sapiens
aacgaatatgtttattgagcattttcaatatgccagacacagacactgtgctaggttctccggatatagtcttcaagaatacacatcactgtcatggagattatactcaaaataagcaagta

SEQ ID NO: 468231 - DNA, 122 bp, Homo sapiens
taaaatgcttgcttacagccctacgacaaagaaggctcccagaaacaggaactgtaatttcgacacccaactccctacacccatggccctcacccaggccttcatctctctctcacgggtcc

SEQ ID NO: 468232 - DNA, 122 bp, Homo sapiens
agaaaccgtggccaaactaaaaaagagcatcctcgagggcacatacagtgtaccgccgcacgtgtcagagccctgccaccgactcatccgaggagtccttcagcagatccccacggagaggt

SEQ ID NO: 468233 - DNA, 122 bp, Homo sapiens
atagaaatcggccatctgggaacccagcgttccgaggcgcagcctaacatagtgaaccgacgaaggtccaatggaaaaagacggccatgggcatagaccaatgacaaagtggcaggggcggg

SEQ ID NO: 468234 - DNA, 122 bp, Homo sapiens
tgagaaaccagaactcctgcccctagttcccccggctttcctcaggctggggagtgagtgcggtgagatagaaagggcaagccctcctgctgtttctctctggacaggggcgggatgctggg

SEQ ID NO: 468235 - DNA, 122 bp, Homo sapiens
agagttgcgggtcatcaaaccacggggccgaaattcggagcagagtgggtttgccctccgcgcagtgcgacaccccctaccgcataagctaacttgcggatctcccccagctccctgggcct

SEQ ID NO: 468236 - DNA, 122 bp, Homo sapiens
ccgctggcccgggtgctaagcccctcattgcctggggccggcagggccggccggctgctccgagtgcaggacccgccaagccaacgcccacccggaactccagctggctcgcaagcgccgcg

SEQ ID NO: 468237 - DNA, 122 bp, Homo sapiens
ttggcagggttcagctttcaagttgacccttgatgaaccatggtcaatcctgttaagaggcgtgaaagccaatcccagccaatgagactggggagaaatcactgaagaacttgtggaaaaca

SEQ ID NO: 468238 - DNA, 122 bp, Homo sapiens
ttccaggagcttcagggttcccgccaggccacactcatctccctgcccctttgaggttcccgaccgaggcaaggggtcttgtgcaagtcaggtttgtagatccctagtgaccagacccacgg

SEQ ID NO: 468239 - DNA, 122 bp, Homo sapiens
ctgctctacgttccctggggaacccagaggctgagtgatcctaagacgtgcaggcctacgcgggggctgacgggctgccgagaccctgggcccacgtgacggacaggtggggccggcctgcg

SEQ ID NO: 468240 - DNA, 122 bp, Homo sapiens
catgtatacgtatatgtgtattgattagactcaagtcaacactggactcagttctgtgtacggcactcacaaatatataaagcaaaacatgagtaaagattgctgatggacttgaacttaat

SEQ ID NO: 468241 - DNA, 122 bp, Homo sapiens
ctccacttgcttctgcaggttgcggacaccgctctcgcggcagtactgcttgatgagcagcgtcagcacgtccgatgacagcttggccttgctctcatccaagccacacagggcgcgagcct

SEQ ID NO: 468242 - DNA, 122 bp, Homo sapiens
cacccgtccacccccaggtcgtcctagccgcacagagacagagcagtttcctacaggaagcgccgccgggcggttccatccgctacccattgtctgcgggtccgggggccgtgcgtccctcc

SEQ ID NO: 468243 - DNA, 122 bp, Homo sapiens
gggggcagagagacctcctgctggggatgggcgagacctgagcctggtgcggaggaggcccgcaaagctggcggaggacctagttccagggacgggatctagggctcctggtttgcccggtc

SEQ ID NO: 468244 - DNA, 122 bp, Homo sapiens
gacaagagcacaggctccctttgtagtccattcctattgctctacttagagcaggtgctccgggaggccctgaaggaaataagcacttggctaaagcctggccagggtaaccacacttattt

SEQ ID NO: 468245 - DNA, 122 bp, Homo sapiens
gcacagagagccgcgtggcacgccgggaaatgaagtccacaaaagcctcagagtagaccgcgggaatgatgggcgggaatgacgggtcacgctgtacgtcgggaaatggagtccagggtaat

SEQ ID NO: 468246 - DNA, 122 bp, Homo sapiens
tagtgttccctggaaccgggaggctgccagctgccagccctcctgccgctcatacggtgtcgtcagcagttttgtcaggtgcccccgccacgtcactatggcctctgccagccagcctggac

SEQ ID NO: 468247 - DNA, 122 bp, Homo sapiens
catgccaggagcggtgggagtgcatcccatgccaggaggctgtggttggtcaaggcctcacgggagggcccagtctgaatgaacaagcaggaggaagctgccacctgtaggggggtcaggga

SEQ ID NO: 468248 - DNA, 122 bp, Homo sapiens
gttctcagctttgattcccacatccggtgttgacaatcttctatcattctccaagccagtcgattcttcctcagatatccctcatatctaagatgaccacagcaggcaccactacctcaaga

SEQ ID NO: 468249 - DNA, 122 bp, Homo sapiens
ggtcactgaggccgcggggcccgacctgcggcctctcagaaccacggcaccgcccctgcccgccccagcgccactccggcacctccgcaccaggcgccctagctcgggactcactcggctcg

SEQ ID NO: 468250 - DNA, 122 bp, Homo sapiens
atgtctttcttttgtaaaaagagtagtgccagtaaatggcaggttcctaataatttcattcgacaaaccaaaagctggcataccattgccaattcctaaagttgttttggaattttacttgg

SEQ ID NO: 468251 - DNA, 122 bp, Homo sapiens
gaaacccgcgacggatgggcgccagacggggctctggaggctttggggagttgtagtctccggccatgcccttgaggatcttaggcaagtgaggggcaggggatcaggaggatgatcctgat

SEQ ID NO: 468252 - DNA, 122 bp, Homo sapiens
ccctctgtccctattttttttttaagtggggctttggacaacttctgagcctgatttaagcgccccaccctgctgggttgggtggaagccatagatacatagaagaataactgaaaaagcag

SEQ ID NO: 468253 - DNA, 122 bp, Homo sapiens
ggatcccaccaacctgcagtctgagacgcagaaatagaaaaaaaagagaagaaaacatttcgaaccttagtgaagctgctgccagaggtccagtcaggggagaagaattatctaagggggaa

SEQ ID NO: 468254 - DNA, 122 bp, Homo sapiens
agacagatttccggacgaatacttaggatggcgataacagctttctgttgtcaaaggttgcgttgtgtccctgtccctgcccttttgccttaatgtcctacgcacagttatctacggctaca

SEQ ID NO: 468255 - DNA, 122 bp, Homo sapiens
taggagtggtggtggtaacgtgcagtagacgcactgtattccatgggctcccttgtaagccgggcatcattttcaagatggctgccaaggctagtagtgctagttacatgggtgcagagcac

SEQ ID NO: 468256 - DNA, 122 bp, Homo sapiens
ggactgaccctttgtgctccacatatgttttgccaggaaacacttatctcagccacaaaccgtccctgtcctccaaaagactcagagctgcttacaaggggctgctttggtcagtcagctgt

SEQ ID NO: 468257 - DNA, 122 bp, Homo sapiens
caggtatcccgggttggaagctcctccagaaactgactctggcccaggtccagtggctcacgcctgtaatcccagcattttgggaaggtgaggcgggaggatcgcttgagcccaggagtttg

SEQ ID NO: 468258 - DNA, 122 bp, Homo sapiens
gtaagttcatttccactttgggccactgagcttgatcctgctggggaaccctggcaggtacgtctcagatgccaaccatggagcaagaacacaggggtgttctttccatctggccttggtgg

SEQ ID NO: 468259 - DNA, 122 bp, Homo sapiens
tgcggtgaatggaaccaacactctgcggccttcgtgtctggctctttccacttagcataacgttttcaaggttctttcacatgaatcagtgcctcagtccttttcatggctgcataatattc

SEQ ID NO: 468260 - DNA, 122 bp, Homo sapiens
ctggcttgcactgagaggacctgcagatttatttgactgcaaagcctgttttccttccagcgtgcatactgctgccacgtctgttcctgcagatgcagagaggggaagatttcaagcacttt

SEQ ID NO: 468261 - DNA, 122 bp, Homo sapiens
acacagcacgtcctgctttctctgttccctcttctggggaggctgacttcacagtctgtgcgtgtatgagggctggttctcagcaagcagggacctgtccaaaggggatcctgccccaaatc

SEQ ID NO: 468262 - DNA, 122 bp, Homo sapiens
ggccggggaccgggtatataaggcccttcggggccggccaccctttcactacttctcccccggactccttggtagtctgttagtgggagatccttgttgccgtcccttcgcctccttcaccg

SEQ ID NO: 468263 - DNA, 122 bp, Homo sapiens
ggctcactaattggttaaacccattggcattagcttcgcttcgggtgtgtattcccactacgggcacagaaagcgttcatattttattaatattatgccacagatgatgttactgtccaaca

SEQ ID NO: 468264 - DNA, 122 bp, Homo sapiens
aagtgacaggaatgtgacagccctgggctgaaagactcccggtggccgtagtgtaatagccgcggtgagatttgttttgtcacacctgctgcgaagtaatcaccttaatgcccatcagctgc

SEQ ID NO: 468265 - DNA, 122 bp, Homo sapiens
gttggcgggtcactgaggtgcattctgggctccagggacgccactgcggggcaaaggcgccgttacctggagtctgcatcatgggtcttgcttgcctgctgccctgatggcctgagcatccc

SEQ ID NO: 468266 - DNA, 122 bp, Homo sapiens
cccctcatctgtaatctttaaagaggaggaagtgtactccaaatcaagcgatagtccatccgtccttggcacggtgactgccgggaggccaggaccaaatgtgtctccttccggcttttgca

SEQ ID NO: 468267 - DNA, 122 bp, Homo sapiens
aataccacagacaacaccagcacagacttggggcggagggggaatcaaacatgcgggttacggttggggcaaagagaaccagaaaggcattttcctggccataaggaaaagatgtcaatgct

SEQ ID NO: 468268 - DNA, 122 bp, Homo sapiens
tcaggttccccagcaccgccactgccatctgttatgtctcctagcagggttgcagctagtcgactggctcagcaaggaagtgatttaattgttcctgcaggtattcactgcactgattggat

SEQ ID NO: 468269 - DNA, 122 bp, Homo sapiens
cccgccctccgtcccgccccgccctccatccccgcccctcaccgtccgcgcccagcccgccggccccgccctgcccgccggccccgccctgccccacgggcttgaaccccgcccacctcttc

SEQ ID NO: 468270 - DNA, 122 bp, Homo sapiens
aggaagaggtgggacctcaggttctccttgcctgatgggggcacggaggtggtagcttggcggcgcatccctgctggcgcggttgcgattgtgttttgtccccagtgttagtgacttgggaa

SEQ ID NO: 468271 - DNA, 122 bp, Homo sapiens
gagccccaaatacaccttcctctgcaagctagggctctcattgggattaagaggaagccgcgcggtcatacagactttggctgggatcccagctctgccatttcctcgctgtgtaatattag

SEQ ID NO: 468272 - DNA, 122 bp, Homo sapiens
agaatccaaaccaggtccacctgtggcaccttcacccttcagtgggagtaaggagccggacgcgtcacttaaaaccattcctcttacgttgtcaccctcaatcttacaggtaaatggcaaat

SEQ ID NO: 468273 - DNA, 122 bp, Homo sapiens
gatcaggagcgtcaaagggaaaaacgaagtcagaggcagaagaaaaaggtgttccccaggcgatgaaaactttccagtaagttgtcttggaaaaggcaactccgcgtaatagagggacttgg

SEQ ID NO: 468274 - DNA, 122 bp, Homo sapiens
gacacagtgtcagcaggacatgggcctctgtctccgatctcggaaacacatcttctggcccgggtttaatctcagaagggcctgtcctcatgtgacttattgcaactaggatctttgcagat

SEQ ID NO: 468275 - DNA, 122 bp, Homo sapiens
tgtagtttatgagattagcataatctatgttcactgcttcaatggtcacttagattccagcgacaatactccctgcatcttcagtcctatcttctctccatgtctaatgctgcatgccaaaa

SEQ ID NO: 468276 - DNA, 122 bp, Homo sapiens
cactttcagcccaacttgctggtctcagacatctcagcaccccaggttgacatcatgagccgctcagggcaaggggcataagaggctgttgaggcatcagcagaggggctggtggtcctggt

SEQ ID NO: 468277 - DNA, 122 bp, Homo sapiens
tctgtgcagacttctttctcagaaatcattcgtcattgatatccctcttgccttgttctacgtgttcttcaccacctaggacttatctgatgaggacacatactacctagtactttttaaga

SEQ ID NO: 468278 - DNA, 122 bp, Homo sapiens
cgtgcgtccgtcctcgtgctcgcgcatcgtaggagggcgggacttccggcgtcctcttgccgtggttgatttgattttctctggtgttttcactagttccggcctttggcgctctatgacgt

SEQ ID NO: 468279 - DNA, 122 bp, Homo sapiens
gcgctcagggcgagagcgactcggcttagggagtccgggagaagcctgcggctgccccctcgccgccgaggtcctgcgggtcctgcgggtcctgcgtgctgagccggggcgtgcgcgggcgg

SEQ ID NO: 468280 - DNA, 122 bp, Homo sapiens
agcagccaaaggcttgtccctgactttatatggctgctcctggcgagcgactgagtcgtccgtgaggaaaaagaggcgaggcttttccgagatcgtctcagcgatggcgcttcggtcgcggt

SEQ ID NO: 468281 - DNA, 122 bp, Homo sapiens
ataacagctacctttcactgggccctcacttcgtgccaggcactgtgtaaagggactttacgtttaatcttcacagtaacccctttgagtgaggtactgtcattaccccatcttactgatga

SEQ ID NO: 468282 - DNA, 122 bp, Homo sapiens
atcatgcctctgcactcttttgtcattagttgattacataacaaatatcagtgggctgggcgtggtggctcaggcctgtaatcccagcactttggaaggccgaggtgagtggatcatgaggt

SEQ ID NO: 468283 - DNA, 122 bp, Homo sapiens
cactaagcctttcaagatggtcctcctcagtattcttagaattctttttctttgtgaactcgtgcttttcatggaacacagggcccaaatggcagaaggagggcagtcctctattgcccttc

SEQ ID NO: 468284 - DNA, 122 bp, Homo sapiens
tcctgctttatattccaaaatgccacccggaaggctaggcaagtcaggaaacctcgctggcggtgtggatggctggtgagggtccccggtgctccagttaggaggcaggggctgtcccctct

SEQ ID NO: 468285 - DNA, 122 bp, Homo sapiens
tcctgactgaaatggaaatctgttccttcaataccagcactctacattgttgcttctcagcgtatagtagagcagcagcagcagcctccacagggtgcccagaaatgcagagtctcaggccc

SEQ ID NO: 468286 - DNA, 122 bp, Homo sapiens
ggagttatttacccagaaatcagcgaaacggacacttgttaacgttgcgggtttcacttgcgtgctggtgggcctggaaattgaggcacagttccaacaccagggcggattcaggccttttt

SEQ ID NO: 468287 - DNA, 122 bp, Homo sapiens
ggtggggccgggtctcgggggcggggcctagctcggtctgcgggggctcgggggtggggccgggtctcgggggtggagccgggactcgggggcggggcctaggctcccgggctgcgggggct

SEQ ID NO: 468288 - DNA, 122 bp, Homo sapiens
ttttagctctgtgatcagttaacttttgatgtggagcaggcaaccacgaattctcagaggcgtgcaacaataaacatttatttctcacacatctgtggagctgagctgatgtaggctgggct

SEQ ID NO: 468289 - DNA, 122 bp, Homo sapiens
tgtcggcgggacaactacgcacaatgagggccgcacccccacactccactcggtcagaaacgcacactccgccccgtggcccagtgatccaggtttgggggagctccatactcaggagaggc

SEQ ID NO: 468290 - DNA, 122 bp, Homo sapiens
cttctctgctactttgggctcaggtggaaggaattttattccactctctgcaaatcttcccggtgcctcagtgggaagtggacgctgtgagggtctaccagctcccagaaggcctccccttt

SEQ ID NO: 468291 - DNA, 122 bp, Homo sapiens
ctccctgtgctgtcctgatccctcccagggaacatttgcatttatgcagaattacctgcccgtactcagcaggcccttactgccttttcctcctggagaaggagtcacaagtgttttgcagg

SEQ ID NO: 468292 - DNA, 122 bp, Homo sapiens
cgggggaggaggggcagggaggccgtgattggcggggacccgagctgaagggggcggggccgctatatcagcagagtccctgtcgcagcgcaggcagttgggctgctggagtgcggcgccac

SEQ ID NO: 468293 - DNA, 122 bp, Homo sapiens
tcctctccccagcagcccaggaaaagcagctcggtcaataggggagcatgctggcgcggtcgaaaacaaaaaggttcctcctgctcgctgcgttcacgtggggggctctgcacgcggggctc

SEQ ID NO: 468294 - DNA, 122 bp, Homo sapiens
ggagtcgggggaggggtccgccccgggctcgacccccaccccctcggtgcgcgccagccccgggcagcctccctgcgtagcgcgccgaaagcttcccagtgcccctctcctgttttcccagc

SEQ ID NO: 468295 - DNA, 122 bp, Homo sapiens
aggtctcaatgctagtgagtgatggagccccattccaatccaggcagtctgactacacatcgggctatactgccttatagtgatattatatattatgctacaatgatcacatcattgtaata

SEQ ID NO: 468296 - DNA, 122 bp, Homo sapiens
cagaaagagagcttccctttggggaactgccaacccagagtgaagttttctaaacatttccgtcctctgcaaaagggattaggagtctctgagtagttgctgctgtcactaaaaggaaaaga

SEQ ID NO: 468297 - DNA, 122 bp, Homo sapiens
catccccttcactaaccagggaaaatgtcatattaagattgtcctcctgttgcagtgagccgagatcatgccactgcactccagcctgggcgacagagcgagactccgtctcaaaaaaaaaa

SEQ ID NO: 468298 - DNA, 122 bp, Homo sapiens
cctgctccatagtacattcccaccaccatgaggtgagaggaacaagtagtaaaagctttgcgacgtccctctccagatcccatgtgaatgacagccagaataactcgagcataggaagtgat

SEQ ID NO: 468299 - DNA, 122 bp, Homo sapiens
agggggactggttagtcacccctcaccccaccccacaccctcagtcgctagaaggacacacgttttggagacagagatctgccattaaatgtattatttaaaaatccgcaaatacttttatt

SEQ ID NO: 468300 - DNA, 122 bp, Homo sapiens
cttgaattaatcctttgtggcttggcttttttgggtgtccctcttgatctctgggaaggacgggatctaggccatagcttaatgtcccgtgttgtttttattcacaaagtaggtgtgcacac

SEQ ID NO: 468301 - DNA, 122 bp, Homo sapiens
tcacagaggtgggaggggggcaccacattataggtggccttgtcagcctccctgaggattcgacttttacaccaaatgaaatggggatcgtaagagtgacactctttgtcttaaggacccct

SEQ ID NO: 468302 - DNA, 122 bp, Homo sapiens
tgctctcctctgtggccacattgaagttctccaggatgatggcgatgtacatgttgaccacgatgaggaaggagatgatgatatagctgcagaagaagcagatgccgatggaggggttgccg

SEQ ID NO: 468303 - DNA, 122 bp, Homo sapiens
ccagccggcagaattaggaccagggagagagtttccgggaggcacttttcagcgcagtgtcggtgaaccctaagaaagctgtcctgttgggatcggccgccttcacaacccatcccattaga

SEQ ID NO: 468304 - DNA, 122 bp, Homo sapiens
gtgaagtcccagatcatggcccagggcatgcggggcaggtcacacaggtagcacgactgccgccgggacgcggccgccaccgccaccgccgcggccatgtccgaggagcccgcgacgccgga

SEQ ID NO: 468305 - DNA, 122 bp, Homo sapiens
agaactttccacagcatgaacatctgaacagttcccttttgtatcgccgaagctgggaggcgtgtgtgtgtgtgtgtgcgcgcgcacacgcgtgtgtgtgtgtgtgttgggtgggagtgaca

SEQ ID NO: 468306 - DNA, 122 bp, Homo sapiens
atgcggagcagcgcctgttctggaattttctgtggctgctcagctctctcccagggagcgcgggtcttgagccacagcagagggcatcagcctcagcaagcccagacccgcccggaggctcc

SEQ ID NO: 468307 - DNA, 122 bp, Homo sapiens
gcacatctgtggacacgcccatagtcacaagcccgagtctgggaaagtacaggagtagaccggcattccctgcctctttcccttccccaaggcctccaggcagccaccctggggctacagtc

SEQ ID NO: 468308 - DNA, 122 bp, Homo sapiens
gcgcagcaacgagggcacaagggaatggtcccacacagatacatgacacctgcacatcgacgacacacatgtgacacgtgcacaacacatgcatgtgtattacatatatgacacacatatgt

SEQ ID NO: 468309 - DNA, 122 bp, Homo sapiens
aggcctggggagacagccgtttctgctctggaaaacatctccagaaaaggtcccaaaacacgtctctgggcaacaggacaccctaattatgatacctctaaactgagtagcctttgcttcta

SEQ ID NO: 468310 - DNA, 122 bp, Homo sapiens
gtgtctccgttcccagtgtgaaggatcgagcctggctcggaggaggcgctcagggtggttcgggcccggcccttgtgagtggagggtcgttgcgcatcctcctcctcactttcttcctgccg

SEQ ID NO: 468311 - DNA, 122 bp, Homo sapiens
tgatcctccgagctggatctgagcgcctcagcgagaaggtccccaaatcctcctgggaggcgttggagaaaggcttgagtgtgcagaaaagggctgaggaagaggaggaaggggaaacagga

SEQ ID NO: 468312 - DNA, 122 bp, Homo sapiens
tccagtcaaccctttggaagaaaatacagcctgtttcaatccaatgctggatcttccaggcgtaaaatgactcgacgcatccgcagggcacaactcaaccgtaaccctctacacctcctccc

SEQ ID NO: 468313 - DNA, 122 bp, Homo sapiens
cgtcaggtctagccacttcctcctgggcccctctcccttttctgtggctggctgcctgcccgcctggcgctggacctttcatgtaacgggaatcagcatgtatattctggtctggtctgttt

SEQ ID NO: 468314 - DNA, 122 bp, Homo sapiens
cctatttgctttgcacccctggtgtgcttgagagaagtatcttttgaaagtcactgctttcgtatatactattactattagaggaactataaaatattaaagccattcattattcaacgtgt

SEQ ID NO: 468315 - DNA, 122 bp, Homo sapiens
atacctccgctgcctcgaaatagacactctagtgcacgaattaccagaatcaaaattcagcgcatttaaaatgatacatcttttattagaagagttccgttccagggcattgcatgcttttg

SEQ ID NO: 468316 - DNA, 122 bp, Homo sapiens
agctgagactggtggaaatttacaaggagcaccacgggcatttctttgttggtgggaagacgactaaaggaatcacttttgttcacataaacttggggtctccatgctctctgaaaaaggct

SEQ ID NO: 468317 - DNA, 122 bp, Homo sapiens
cttaatttttcctaggagccttgctgctgttctctgtttcttacgagtagcccgcctggccggactacttatttagttcctttaacaaatacaactctcctgcagggtgcccaggcatgcaa

SEQ ID NO: 468318 - DNA, 122 bp, Homo sapiens
aaatttattgatggcagaaattagccatgtccttaaacgctttcacagggcagacagagacgtcttagtcttcgtggtggagttgagaccgaggcagtatcttcaaaggtgtattaaggtgc

SEQ ID NO: 468319 - DNA, 122 bp, Homo sapiens
tttttctctcctcaggaacctcacgcctgggtcattgtccatttgggtgggtcaagaaagcgatcgcttctgcccgggagcagttgattgtcaggaaggaattcgtgataaaaccgccatca

SEQ ID NO: 468320 - DNA, 122 bp, Homo sapiens
aaccccctgtaaggttccatccacccctgcgtcgagctgggaaggttccatgaagcgagtcgggtccccaacccgtgcccctgggatccgagggcccctctccaagcgcctggctttggaat

SEQ ID NO: 468321 - DNA, 122 bp, Homo sapiens
cgccggccgcccgcccggtcgggcgatgaagtgtcactatgaggcgctgggggtgcggcgcgacgccagcgaggaggagctcaagaaggcctatcggaagctggccctgaaatggcacccgg

SEQ ID NO: 468322 - DNA, 122 bp, Homo sapiens
ggcagggcaggtgcaggtcttggggcaagagctggagctgtcttttccttcctgcacagccgcagagcaggtggatggggctgcttccctgcaagggcccagggccaggccccctggggatt

SEQ ID NO: 468323 - DNA, 122 bp, Homo sapiens
tcggtctctcttttttttaattttgggcctttataattgtatattgctgataaatacaagcgtatggggactctctctattaaacccaggactccagcgaaattacagggaattcgtggtca

SEQ ID NO: 468324 - DNA, 122 bp, Homo sapiens
gccagcaggacacagggatgcgcagggcgcccccttctgttccagggtgaacatagcacacgccctcctggctgggcctcaggaggaacagccaaggagaagaatggcccaaggaactagga

SEQ ID NO: 468325 - DNA, 122 bp, Homo sapiens
cttgcagggaacaacaagaacaacaacagaaaagagtagaaaaagaaattgaacttaccgcggggtgctgaaggtggaccagctgaaaaacagagaggtatcttagcaactgttttttctcc

SEQ ID NO: 468326 - DNA, 122 bp, Homo sapiens
ggcccccaggccgaccttgcaggaggctgggctcacaaagccagatttcagcgtctactccggtctcatgtgctttttctgtaacagtgtaacttttgattaaaataacgatgtgcattatt

SEQ ID NO: 468327 - DNA, 122 bp, Homo sapiens
taccaggtgctggcggagatgttccgcagcatggacaccatcgtgggcatgctccacaaccgctccgagacgcccacctttgccaaggtccagcggggcgtccaggacatgatgcgtaggtg

SEQ ID NO: 468328 - DNA, 122 bp, Homo sapiens
tgtgcagcgccacggacatgcccgtcaagaaccagtactccgagctgctcaagatgtcctcgccgtgcgagaagctgatccgcagggacatcgcccgcacctacccggaacatgagttcttc

SEQ ID NO: 468329 - DNA, 122 bp, Homo sapiens
tagcaaagagatcctagaaatgagagcactgcagaaagcctagataagaccccaggcagacggggatgggatgctacacacatgctcatgggacacccagaagggcccagttgaaagtaaaa

SEQ ID NO: 468330 - DNA, 122 bp, Homo sapiens
tactctcattcatttatctctgctgacatcgctccacaggaaggttttccagggcagatgcgtgctcccttggcaataaaagtggtggagattgcacatccattttaaaatcctgaaaggta

SEQ ID NO: 468331 - DNA, 122 bp, Homo sapiens
aggaaacctgccaaaggggctggcttcctgggagaagggagccgagatgaggcctctctgcgccgaggtggccatttagatcctgggctttggtgctggaatccaagacattaaccaaaacc

SEQ ID NO: 468332 - DNA, 122 bp, Homo sapiens
cctacgtttctgccagacatctcttgctctgatgttctggctgccaaattctctgtcaagcgcctccaattttttgtgtcctttgatttaccccaacatgacaaaggcagttgtgcttcatg

SEQ ID NO: 468333 - DNA, 122 bp, Homo sapiens
gccgcggccacagtcatggtaagtgcggccgcccgccgcccctgcaccccggcgcctctgcggaggccgctccgggctgggacttggatgttcttccaaacactcgggaaacatggaaggct

SEQ ID NO: 468334 - DNA, 122 bp, Homo sapiens
caggagtgacgcgcatgtgaataacacactggccagtacacagcatccactcgggagtgacgcgcatggtgaatagcacactggccagtacacagcatccactcgggagtgacgcgcgtgtg

SEQ ID NO: 468335 - DNA, 122 bp, Homo sapiens
gaaccctactcttcagttttgcagatgtgctgtcctcaaagacatcgtcgtctcccatctcgtcagagcagaagcccatactccctgccagcccgctggaggacttggcagtgtgcaggcga

SEQ ID NO: 468336 - DNA, 122 bp, Homo sapiens
atcgattgattaacatatatgccaggaattgagatagaagagttacattgccttgtgccacgccttgatttaggagttcaatttagtctccgacttcctgtagcctgtaatctagtgggaga

SEQ ID NO: 468337 - DNA, 122 bp, Homo sapiens
cgcggcctcgtagtacttcacgttggggccgccgtccttcttccgcaccgccatcttctccggctcgggccccgccgccgcccgccccactcagctcagctcccgcctcctccgcctcctcc

SEQ ID NO: 468338 - DNA, 122 bp, Homo sapiens
tctgtaaagtcaccgcgatcactgaaatagcaaatacggaaccagtgctcctaggagagacgcagcgttgggctcctgcgagcctctggtcaccacatactcaccagcccgtcagtacagaa

SEQ ID NO: 468339 - DNA, 122 bp, Homo sapiens
agggaccctctaacttcaggttctttgagaaaacaagcacatggatccaatagccaaatacgtgccattgactgagaactgtattaaataataaacttcagcttatcataaatataggtact

SEQ ID NO: 468340 - DNA, 122 bp, Homo sapiens
taggactgagtgtttggggactttgagcccctgtggacgcagaccagctggtctggagcacgtgaaacacacaggttctgcgttttgtcttccacgggtgggttaattggtgattttcccaa

SEQ ID NO: 468341 - DNA, 122 bp, Homo sapiens
cttcaccgcctgaggtcccctctccctggctggtgacccccatctctgagagcacggggacgtcccctgtgctgtggaggagcgtgtgctctccgagatccaggtgctgcccccgaggagcg

SEQ ID NO: 468342 - DNA, 122 bp, Homo sapiens
agtaactccactagtgagaatgcagccatacttatgaagcaaaacactctgaacacacaacgtcccacgacaaatttggggaaagaatagcccaaaccataagtagggagaaactaattttg

SEQ ID NO: 468343 - DNA, 122 bp, Homo sapiens
ataattggcccttaattgtatgaactgtattcccggtgcttttcacagcacatggcattgcgtaagggtcaacatggcttgctgatttatgtgttgatctctctctctctctgtgtgtgtgt

SEQ ID NO: 468344 - DNA, 122 bp, Homo sapiens
caggtgggatgcgctgtctgaggctcccactggatgtcaggtcctgggacagaagccctgcgggacatttcggatgcagacagccgtctctgacgccaaaggactgtagatgccgctctgat

SEQ ID NO: 468345 - DNA, 122 bp, Homo sapiens
tttacccctcttctccttgggctggaactcccagagctggaggcagtgcagccacggctgcgaactcaacaccagcacattcttagaaatggaaaaccctttctttacctctgatgttcata

SEQ ID NO: 468346 - DNA, 122 bp, Homo sapiens
ccgttacttctaaacgtggacagtctttttcccatgttcaccctaggctgcaggggacagcgctggaccgtacagacctgcctaacatgccagcgcagccaacgcttcctcaatgatcccgg

SEQ ID NO: 468347 - DNA, 122 bp, Homo sapiens
cgacgacgacctcaacagcgtgctggacttcatcctgtccatggggctggatggcctgggcgccgaggccgccccggagccgccgccgccgcccccgccgcctgcgttctattaccccgaac

SEQ ID NO: 468348 - DNA, 122 bp, Homo sapiens
gtggtcagggcaggtctgcagagagaccctcggccctgggccatgctgttggggtggcagcgtatcgggaactggactcagcatgcagtgggaggggttgggtgttgtgacattctctctgt

SEQ ID NO: 468349 - DNA, 122 bp, Homo sapiens
aataaaaaaattagccaggcatggtggtcccagttacttcgggggttgaactgggaggatcgcctgagtctgggaggttgaggctgtagtgagctatgtattactgtacttcagcccccgca

SEQ ID NO: 468350 - DNA, 122 bp, Homo sapiens
agcctgggctgtattcctgtctccatctagcacaagatgtccttcaaccctttagcccagcgtgcaaggtaagctgcttattggggtccctcagctgtggtgcaagaagagcatgtgcagtt

SEQ ID NO: 468351 - DNA, 122 bp, Homo sapiens
attgcattttatgacttggagtttatgtgaaacctcaacggtattagccgaacagcctgccgcaccttccgggagttccagagtgggcctacaactcccacagggctccgcgagcgccggac

SEQ ID NO: 468352 - DNA, 122 bp, Homo sapiens
ttacaatcatggtaggaggcacctcttcacagggtggcaggagagaaaataagagcagagcgaagggggaaccccttataaaactgtcagatctcatgagaactcactgtcatgagaacagc

SEQ ID NO: 468353 - DNA, 122 bp, Homo sapiens
ttccagcggcccagataggctgaaggcaaaactctcagcaagggggaagcgaccatcctgcgtggacctttctcccaggggtgggatgatgaaaaaagaaatcctcctggggaagcccctag

SEQ ID NO: 468354 - DNA, 122 bp, Homo sapiens
ttatatcccatgttattgatctcagcaaatgtgggtttcaaaattgagagagaagtaaatcgtgctgtgttgttactgtgcgtttggctgaattctgttcaacctctaaaggaaaggaaata

SEQ ID NO: 468355 - DNA, 122 bp, Homo sapiens
ttaaggaaaaaaagaaaagaatacacaataatcttattcctgaaggttgggccccacgtgcgccccctggcctggctgtgagctctccgcaggagtggggagtgtgggcgttgggccccacg

SEQ ID NO: 468356 - DNA, 122 bp, Homo sapiens
cctctatctcctttttgtgccctgagtcttggatcactccccccaggcagggctcttaggcgtttcctgcctcatgtgtacaattgtgaggatttattgtagctgggattttgtttcaagcc

SEQ ID NO: 468357 - DNA, 122 bp, Homo sapiens
aggcttgggccctttaggtcgggcagtgaatccctctacccttctctttctcctgaagcccggctcctggggccggcccagaagctagccaactacgcgggaggccccgaagcgccgcttgg

SEQ ID NO: 468358 - DNA, 122 bp, Homo sapiens
gccaagactacatctgccccacctgcacagagcctcgccctcgccactccacagccggtccgcatgtgccgccagctcaccagggtgatatcactgggctccagcaagggcaaggccagctt

SEQ ID NO: 468359 - DNA, 122 bp, Homo sapiens
gaacatggattgaacatcctctttcaggctgacagcccttaaatttcattaacaagccgccgagcctctctactgctctgggaatgatgctaccagtaagaaagattagccaggtgagagtc

SEQ ID NO: 468360 - DNA, 122 bp, Homo sapiens
ctgaccttgccttttcgcacttcactcgctgccacgtggcctcggagcccagtccgcacccgcagcccccagctgagccaggctgcagactacaactcccagcgagcacttcttcccggccg

SEQ ID NO: 468361 - DNA, 122 bp, Homo sapiens
ctggaaggtaacggcgagaggaatgcctggtgagaagcctggcccttcttccatgcttaccgacatgcgacagagtgtgacctggacagctggaagcgcttaggacatcctaaagctggaag

SEQ ID NO: 468362 - DNA, 122 bp, Homo sapiens
ctacctcttcttccccagagtcggcctggggtccgcatgcccctggagcccctgtagagtcgctgatttgcccacaagggcctcgtcctggggccaccagtggtgtcggctttgctcagtgt

SEQ ID NO: 468363 - DNA, 122 bp, Homo sapiens
gtagtgtgaggaatgaattttactcatctgtcctgacaaactaagggcatacattcctatcgatatctcgccatcctaaaagcaggtcaagtttggtctgtgtcacaacatttaatacctat

SEQ ID NO: 468364 - DNA, 122 bp, Homo sapiens
gtatttccagtaccgccagctaaacctggacatgttcaaaaacttcaaggcagatgatcccggcattaagagggctctgatcgatgggttccccggggtgctggaaaaccgagaccattacg

SEQ ID NO: 468365 - DNA, 122 bp, Homo sapiens
cctcttcctccgccgcctccctcccgccctccaggcaactccccaactccatcttcctgccgcctctgcaccgcccctttaagcggaacaggaggccaacgcgcggctctgcgcaggcgcct

SEQ ID NO: 468366 - DNA, 122 bp, Homo sapiens
gaagcattttgattctcatagatgaaaggacaccagcacggaggacatgattggtcttctcgcctctcaagctgcggtggtgctgtccgatttgtgcatagccagaggaagatttcctgaga

SEQ ID NO: 468367 - DNA, 122 bp, Homo sapiens
ctcactcaggggcaagtggtaagcgctctttcccctctagtgtttgtgactcaggagtttcgaaacaggaagtagagctggctggctgtgcccttccgtccttcattagacgtttgctcttg

SEQ ID NO: 468368 - DNA, 122 bp, Homo sapiens
ctgcgtaaaagcagctggtggaggagggagagatgccgtgggaccgtctgggttcgcatgcgtgaagtattatctgggcctggagtgtgcaaggcacacatgtgtccttactgcatgtgttg

SEQ ID NO: 468369 - DNA, 122 bp, Homo sapiens
gccgctcacctctaggctgtagttgcctcggatggcagtaaagtcgtccagggcttcggccgcgctcccctcgtccaggttcagctcctggcacagggcctgtagcgcctccccggctgcgg

SEQ ID NO: 468370 - DNA, 122 bp, Homo sapiens
tttccagtctcaagcgccgctttcattccctgccccgagcggcgctccccgctccgtgcacgcatctccgctgagggccgccctgacgcacggccttctgccttgaacacagaacccctcag

SEQ ID NO: 468371 - DNA, 122 bp, Homo sapiens
gcacgtcggcgcctcggcgaggatgggagtccccaggacccggagctgagcagcctggcgcgcggcgggcagggcgcgcaggacagaagcctcgctgttcctccgggagcccaacaccgttc

SEQ ID NO: 468372 - DNA, 122 bp, Homo sapiens
ttaatatgtattttacagctgctggtgaaacaagaaagggagagataattataaccagatcgtgacaagcagagaacttcttaggatctgattgaccttagggtatcaaggaagacaacaag

SEQ ID NO: 468373 - DNA, 122 bp, Homo sapiens
gaataagaataccttaaataatataataaagcttatgtgtgagaatttagtaccaaatgccgtgttaacagttatgcgtgagtataggcatttgggagattccatgaaaaaatttgataaag

SEQ ID NO: 468374 - DNA, 122 bp, Homo sapiens
cccagtgccccggtgttctcccatccgagcaggagttggacaattccgaacaataaaacccggcccaaacaaagagtgattaatgacttgaggagtcgcagtgccacgtcgaccagagaggc

SEQ ID NO: 468375 - DNA, 122 bp, Homo sapiens
ccttacctccgtagtaggtgtacggggtggaccccaacatctcagactcgtccaagcggccgcccagcggacgcatgcgccgcggactccggaagaaggcgtgcctccgggcgcctagggcg

SEQ ID NO: 468376 - DNA, 122 bp, Homo sapiens
aatctttcatctcggacgtccctctaaggggagtgagcgaagattccgattgcaagtcgccgctgtcgcttgtgcccgtcagcccctcgcccaaaggagacgcccccgggcggggcggggcg

SEQ ID NO: 468377 - DNA, 122 bp, Homo sapiens
tggccagcgagatgcccagctgtgcttatccttggagggtggggctgggagattgagacccgcatgggtgaggctcacatagaggaggcggggtgggggggtgcttctggcgcagttggggg

SEQ ID NO: 468378 - DNA, 122 bp, Homo sapiens
ctctccgcgagcaagacaggctgcgattcgccgagcgcggcgcaagtcaactgcgcttcgcgccgcagtcagcaaccaatcacaagcctccgaagaaacgccgcgccatatgcaaatattcc

SEQ ID NO: 468379 - DNA, 122 bp, Homo sapiens
caggggagagatcgagaagtcagcatgcatttatcctgcagcgatgagtcctcccacaggcgatccgtgtggctctgggggtgcagagtcctaccacaggcgatcccgggggctccgggggt

SEQ ID NO: 468380 - DNA, 122 bp, Homo sapiens
gagatggggtgggttgttggtatttgcctgagggagggtcctcctggattcaattagccccggcaggaaacccaggctggggaccgtggcgttatccccgcatgaccgggaatgacccacat

SEQ ID NO: 468381 - DNA, 122 bp, Homo sapiens
ggggcctggaaagactccatagaaagacctggatgatctggtggatggggccagcagaggcgctggcaggggcaaagtgaaaaaaacacagtgaaggcacctggtggggtgaggaggggtac

SEQ ID NO: 468382 - DNA, 122 bp, Homo sapiens
caaagcgacgacgcccactgtgctggggaagcacaggcagcacagtccgtgcaagggaaacgcggctccctacaaggtgttttcaaggttccggtttccccagagcacaaccctaacctcag

SEQ ID NO: 468383 - DNA, 122 bp, Homo sapiens
ccaggaacacgtgcctcttcccccggctcctgactacattcatggtgaagcttgtggctacgccctcctaagtctcatcaagcagcaatacccccgccccgggcattttaacctctccattt

SEQ ID NO: 468384 - DNA, 122 bp, Homo sapiens
atgcagtattaagttaggactctaagcgtcgctgttgaccaacctgggcaagaaaatcaacggaaactcaagttacatcctccaacaacaaagcaaattagacgggaaagcaggaaagctgt

SEQ ID NO: 468385 - DNA, 122 bp, Homo sapiens
attgtattgctaattaaatctggaacatggtgacttattcccccttctaggataggaactcggaccgcttcaaaagctccggttgctttattttcagtctggccaactggccctgtttctgt

SEQ ID NO: 468386 - DNA, 122 bp, Homo sapiens
aaggcaggagactgtctctccctttctctttcagaatagccctgaaaatcagtgcaacctcggacatccatggttaaaagtcagaccctgttttggaaatggctgggaagggcggctttctg

SEQ ID NO: 468387 - DNA, 122 bp, Homo sapiens
ttcatgtagagcccttctctcttttatcacgagtaaaagttcaggtttaaaatagaacaacggatgactaatgccatttccagctgtgactgaattctccactgcctgatgcttttcaaatg

SEQ ID NO: 468388 - DNA, 122 bp, Homo sapiens
gatctggctgggctcgaagtcggggctcagcaaaggtatttcgtgtgaacgaggaatccacgggtcagacccgcttccacagccctgagtcggggcgggtgccagggccagtcaccctgaca

SEQ ID NO: 468389 - DNA, 122 bp, Homo sapiens
gcattatggaaggagaaccaaaggacagaagacaaagcgagcacccccaccccaggccaacgccatcctctgtacacaattacaacacaggtccagaatgagagccctggccaggaagtggg

SEQ ID NO: 468390 - DNA, 122 bp, Homo sapiens
ccgccgccctcctctccagcccttcatctgcccggcctgcttctccgcacacacagcagccgcttaggataatcgcgtcaaatgttgctgccatctgttgcctgacttcccgtccctcgcct

SEQ ID NO: 468391 - DNA, 122 bp, Homo sapiens
ctcgaactcgtgaccgcgtgatccacccgcctcggtctcccaaagtgctgggattacaggcgtgagcccccgcgcctggtcaactattttatgcaatcagtatttattatgctcctactatg

SEQ ID NO: 468392 - DNA, 122 bp, Homo sapiens
cgcacgcgcgctgcggagccggacagttggtggtgctggcttggcccggctgttcgtctccgcgccttgctccgaagcgcgcgaccgtggcgcgacacgccggcgcacaggcgctctcgggg

SEQ ID NO: 468393 - DNA, 122 bp, Homo sapiens
cccaatggctatatttgggtgataaagtgttcccgaacgcatttgcacaaattcagctgccgtgatagttttctgaaaagtaacatatttggttgcccagaacacaatactacatatattaa

SEQ ID NO: 468394 - DNA, 122 bp, Homo sapiens
accctctagcacacgcaccagcgttttcctggacagcttctcaccagggcctcagagttgcgggtcacacatattgagcgaccttcagtggctttgctgaggataaaggttagatgtgacct

SEQ ID NO: 468395 - DNA, 122 bp, Homo sapiens
ggttcaagaaagatgacacagagcctgtcgggcccgcgcactcttggcaaagtttcagtgcgacgagaggcgccgggcgctccatggccgcgccgtaacggggacccagccgcctccccgcc

SEQ ID NO: 468396 - DNA, 122 bp, Homo sapiens
gtcagggagcgcagcccgagggggccacttggccagggccgcgtgtttgggatgcttggccgggtatataagaactgcaaaggtgaggccggctcctgacccgaggggggcccccacgcccg

SEQ ID NO: 468397 - DNA, 122 bp, Homo sapiens
ttgcaaatgccactgcgctctcccttcctttcctgccggatgtccccactgagtcagactcgtcaaactctcccagcaaccatgacgcacccaggctttgtgccctgggcctctctcacaca

SEQ ID NO: 468398 - DNA, 122 bp, Homo sapiens
tcttttgtctctatagcagctgtagttttataaaatgtgtaattataacctattgtagtacggctctaaagtcattacaaatgtgatgtgcctttgaattaacattttttagttcctaaaac

SEQ ID NO: 468399 - DNA, 122 bp, Homo sapiens
cagcatcctatcattaaataaaagaggtgtatgccagatcaggctcaaacagattatgtacgagtttttggcataaacaagtcacccagatgatcacaactcctgtggcctcatgaaaagtt

SEQ ID NO: 468400 - DNA, 122 bp, Homo sapiens
tctggggtcatgaagctcccaaatgtcaatcaagcaaacagattcagaaatgccattgttcgactcccacgtcactcgccttcctctcattttatttaacaataccggagttctctgatcag

SEQ ID NO: 468401 - DNA, 122 bp, Homo sapiens
ccagatcgtgccgcaaacgaaatgccagctcgagctcccacagctctacggaaggcctcccggaactaaagcggaggagggtgtcagcctcatcccgctgccagctggccctcagttcctca

SEQ ID NO: 468402 - DNA, 122 bp, Homo sapiens
ctgcctcaccggaaacacgaggccgaattccaagctattgtcctgcttcgccgggggtcgcgcactccaagcggcagcccactggagtcccagtcgccacgacaggcggcagccaggtcggc

SEQ ID NO: 468403 - DNA, 122 bp, Homo sapiens
ctctcttgcgggcagaagagatgtcttcaggtccagctgctcccatgctttttgcggggccggagtgtgtttcttccctggagttcttgtccctttgggtttttcgggttcctctggccgca

SEQ ID NO: 468404 - DNA, 122 bp, Homo sapiens
actttaaattctcttaatagaggcctttctcaatttgattctaagtagaacctatatgctcgggtctcagcacacagagaccataatacagtaaatgttcaatatatttgatgttcaatgta

SEQ ID NO: 468405 - DNA, 122 bp, Homo sapiens
aaacccctctaagcagggcaggcatctgcaggaaggtcaacactaaacagagagctgcaacgaggacctggctctgaacttgtcagctgtccccatttcagcttctctttgcacatcatcat

SEQ ID NO: 468406 - DNA, 122 bp, Homo sapiens
ccctgcacctaccagaaatcagctggatgagtcacagtgagattttccacccctgctcaccgccttgcacataggatgggctctgtctgagcctatactttgcctgttggcttgaattggat

SEQ ID NO: 468407 - DNA, 122 bp, Homo sapiens
ggatggtggcaggcatagcccgtcctagccttgaaactggggggcctatgtctctggcttcgttacaaacgaaacgtttctcgccttcggacactccaccctggcggtggtacccaaccttc

SEQ ID NO: 468408 - DNA, 122 bp, Homo sapiens
cgcaacaccccaggcgtggggcaaagacagcggggttgcggggctcctgtctgcccggggcgtcgagagttcctgccgccccctcccgcctcatgcacggaaagcgccgagccacggcgtgc

SEQ ID NO: 468409 - DNA, 122 bp, Homo sapiens
cctgcctctctccgccatgctggggctcgctgcatcttcgtgctcctctgcttgtggatgcgtcactctggctccgttcttcttcacgcggcatccgtctccctgtgttctctgctttataa

SEQ ID NO: 468410 - DNA, 122 bp, Homo sapiens
cgtgatctgcccgcctcggcctcccaaagtgctgggattacaggcatgagccaccgcgcccggccatcttaagtaattcttaaacaaaagccttaggtgtcagagatcctatctgtaggaac

SEQ ID NO: 468411 - DNA, 122 bp, Homo sapiens
cttctgatacctcgaggacactctggaccctgtgtctgggtcccagcccttccgtaacaacgtggctcctctgaatcagtcacaaggaagatccaacttaacacagagagtttttcccaaac

SEQ ID NO: 468412 - DNA, 122 bp, Homo sapiens
ctgaggggctgcagcagggtggagcccgtggtgctggtggtggccatggccgggcctcggcgctccggccgcccgcgccgctcgcccgctcgcgctgtgccgggcgacgacgaggatgggga

SEQ ID NO: 468413 - DNA, 122 bp, Homo sapiens
ggaggccacagtcacttgcccaagctcggatccggcctgctgggtcatcctgtggttggacgatgttcatcggaggtggccgtggggtagatgctctttttcttgctctgtcacagagtggc

SEQ ID NO: 468414 - DNA, 122 bp, Homo sapiens
ctgccaagggatgagggagaggggatgttggagagtcaagacggtctttcctcccctctccggtgcatctttccttgatatgatgtgttaaaaccaggcactgtgatcgttcatctgatttt

SEQ ID NO: 468415 - DNA, 122 bp, Homo sapiens
tgcggtcgcggcctgccaggcactgccgcagagtgcggtagcgagagctgcagttggattcggcggcacacagctcattggcccggacacagtccactggggggcgccagccgtggagctcg

SEQ ID NO: 468416 - DNA, 122 bp, Homo sapiens
ggagctgcagtcataatttatgacaagccctgcaggaaggggtctgcagtacagtaaatgcgcaatttgtgacgctctcgagccaggagccggcgcaggctgggtccgcagacgcccggttc

SEQ ID NO: 468417 - DNA, 122 bp, Homo sapiens
ttctcgagtgtcccagcatccgcatcacctccatctctcccacgccggagccgccagcagcgctggaggacaaccctgatgcctggggggacggctctcctagagattaccccccaccagaa

SEQ ID NO: 468418 - DNA, 122 bp, Homo sapiens
ccgccccgtaatctcccggctattcggggcccttcgccgagatttctcccggaccagccccgggattggctcctgccgaacttcgccatccaatgggaaccttagtctcttttacgtcactg

SEQ ID NO: 468419 - DNA, 122 bp, Homo sapiens
gatgaaatggaaaattgggcggtgatagcagcgttttctttgatcaaactgaaaagagtacggagcaaagtagaatcctgtcctgaaacgtggaaacgcacaacaaataacaatgaggagga

SEQ ID NO: 468420 - DNA, 122 bp, Homo sapiens
gccttaagttatatacgaaggaagcagcaaagccaggtttccactcataagccaatgctacgtccaccaccccattctacctctccacaggccaactgctaatacagtgtacagaagctgcc

SEQ ID NO: 468421 - DNA, 122 bp, Homo sapiens
gggactaaaatgcgcaaccgcagtggacatctaggcctcagctccgcttctggtggcttacgtcattactcagcgacagccttgaggaaggtcccttctcgctcgccatctctgcgacttta

SEQ ID NO: 468422 - DNA, 122 bp, Homo sapiens
ccagtcgcgcttcttgcaatagacgggcagttttccccatcccgggtcgacttgagggggcgggattctggacgccagagttggcaaacccctgacctatgatggacgtattctctagccaa

SEQ ID NO: 468423 - DNA, 122 bp, Homo sapiens
agaggccccatcccagctttggttcctgttatttcaccctcttgcttcccataaggcagccgggggtctccactcatccccccgacaggctcctggcagccaagaccaccaaggtttctttc

SEQ ID NO: 468424 - DNA, 122 bp, Homo sapiens
ggaggggagggaggaagtatctgggactgagaaaggccataaggctgcctcactcaccaccggggggcagcagagccacattgccttgggcctggcgggggaatgggtccctgcctgccatg

SEQ ID NO: 468425 - DNA, 122 bp, Homo sapiens
cggcgaaaggggcttggtgaggcccgcgctcctcggggtgggggcgcggggatgggtggtcgcgatgccgggagggcaggcagggccctggccgtgcttatgaagttggagctgtactctca

SEQ ID NO: 468426 - DNA, 122 bp, Homo sapiens
cgcccagcctgtgacgccacgtgcatggggcggagcccaggccctagggaatcgtggggtcgtatcccgcgggtggaggccggggtggcgccggccggggcgggggagcccaaaagaccggc

SEQ ID NO: 468427 - DNA, 122 bp, Homo sapiens
ctgactcatctgttcccagagctgactcagtcctcgctccctggagccagaatgctcttccgtgcacattcattgaacattctagacagtgtgccaagatgctggagctacacgggtgaaaa

SEQ ID NO: 468428 - DNA, 122 bp, Homo sapiens
tcagacagtcactgcacagataactatgcaaccacaatgacagctttgaagcggccgtggcgatagggcaaccccatccagcctgggcctttaggggagtgtcaaggaagagctctctaaaa

SEQ ID NO: 468429 - DNA, 122 bp, Homo sapiens
aagtcaaagaggagtagtctgaaagcctgaactccctaccaccctgagggggtgcgggtgcggcggggccggctgggggcttcccccaccccctgctcctgcgccctccccccgcttccccc

SEQ ID NO: 468430 - DNA, 122 bp, Homo sapiens
cccagggcgctgccagagccctgccggctaagggatggggaaacaaacaggtactcggtccgctctttaagtcccctacgtattttccgggagggctgaacggaaccacaatgtttttctag

SEQ ID NO: 468431 - DNA, 122 bp, Homo sapiens
actgctattgtccttaacacggactagctccaggtgagtcccccggccccgggggtgtggcgggcgtcacccgttgtccgggcacacaccccgcagacccaatcctagcccgctggctagac

SEQ ID NO: 468432 - DNA, 122 bp, Homo sapiens
gttactgacttcctcttcctgttgggcaaacttctgatcgttggtagtgtgggtgagtgccgcccacctagcctctcggggtgtgggagcctgatttctgtcttctgtgatgagtgtcatct

SEQ ID NO: 468433 - DNA, 122 bp, Homo sapiens
aagggcacaccctgcattctcattgtcatgctaaacgatcaaatcactgcttggtatgcacgcgttccctctccccctccgtctctctctctcttcctgcttccatcctgcatctctgtttt

SEQ ID NO: 468434 - DNA, 122 bp, Homo sapiens
gaaacaaaggtaaaatcctgacatgccatttcaaggacttgggaatagattagggatatccgtacttcattacagtcatgattttggatcctaataaagactagtttttagttaccatcttc

SEQ ID NO: 468435 - DNA, 122 bp, Homo sapiens
cgtctagaggagccgagaactacaagtcccagtgtgtttcgccgcagagcctgccggttccgctgcagctacgtagcagtatccccttggatccggcctcccgcccagtgcctttggtcgcc

SEQ ID NO: 468436 - DNA, 122 bp, Homo sapiens
tcttcagtccgctagcctgatactgcaatcagtgtcgcttcaggcaacttctcctttctccgccaaatttcgcctttcggtctcacccacccatcacccagacaaatcctccaaagctccgt

SEQ ID NO: 468437 - DNA, 122 bp, Homo sapiens
gtgagggtgagtcagtctgtcggccgacttcctgctccgggtcagggcagccacactgcacgcaggctgggccgactggggagctcataggccaggctctgacacccaggcagggcctaggg

SEQ ID NO: 468438 - DNA, 122 bp, Homo sapiens
gctcggtgctgttctctcgataaatcacaacaaagcttccagagggagaggaaggatggacggcaccactgcccctgtcactaaatctggagctgccaagttagttaagagaaatttccttg

SEQ ID NO: 468439 - DNA, 122 bp, Homo sapiens
gggaggcttgacagaagggtgaataggtcagggggtggggatgagggtcttcatcaacctcgaaggagcagggagactgagccaaggagtctgtcagcattattttgtctgaaggcattctt

SEQ ID NO: 468440 - DNA, 122 bp, Homo sapiens
agtgctaatttccagagcattaaatgggggcctatgtttgttgctaaacaattagacacacgttggcttgcattctcatgcaagccctgcattaatcaaagcctgttgtaatctaactgctg

SEQ ID NO: 468441 - DNA, 122 bp, Homo sapiens
ttattgaggggaattgatctaaaacactctttatgccggtttctattgacttgggttaatcgtgtgaccgcggtggctggcacgaaattgaccaaccctggggttagtatggcttagttaaa

SEQ ID NO: 468442 - DNA, 122 bp, Homo sapiens
aggaacaagaaagagtccaggaagctgccacggatttttcatgcgtgtctagtgcaggcacggttattagtgctttgagggagcccagcctctgtggaggcaactgtcatgttctgactcag

SEQ ID NO: 468443 - DNA, 122 bp, Homo sapiens
ctcccgccgcaatcttggcgggaaggcgccggccgctaagaagccgaaagatgtccaggtcgggcgcggcggctgagaaggcggactccagacagcgaccccagatgaaggtgagaaacgga

SEQ ID NO: 468444 - DNA, 122 bp, Homo sapiens
tgccgtgctgtcatttgacgcagagctttctgggtaatgtagtttcccaggttccaaggccgtaaagagagagattcccaggggcgcttcggaaggaaaagcccagctccacctccggggcc

SEQ ID NO: 468445 - DNA, 122 bp, Homo sapiens
tggtacttcaggtcctggcacgctggggactggcgctcaccttaaaggagtccacaaactcgtcactcatcctccggagctcgcggccatagcgctgtgctgcccagaggttggggggcgcc

SEQ ID NO: 468446 - DNA, 122 bp, Homo sapiens
ctgaggacaccaagaacttgttcccataaacagaaacaagaaggtgtaagacttttaagacgttgggcccaagaggcacagtattacttctactgtattctactggtcaaaaaagagtctac

SEQ ID NO: 468447 - DNA, 122 bp, Homo sapiens
cagaaagtagttagagaaaggcagcaaggggtggagtggtgttatgtcgcagaaaataatcgagaggagtagcaagggtttggaaagatatgcccactggccgaaatctctagctttgcctg

SEQ ID NO: 468448 - DNA, 122 bp, Homo sapiens
ccctttaaccagtagacgcagaaaggcatcaccagcccaactttccagcagtgtaaatttcgaccctggggacccatcagagaggcccctgcatcccccaccgagcctttcaaccgggggcc

SEQ ID NO: 468449 - DNA, 122 bp, Homo sapiens
gctgttgctagggtgccaggattcgctgcagcagcttccggaaaaggcggtgactgggggcggggccagagagggcggagcattgtcctccgtctgggagggtgggccggaggtctgacggg

SEQ ID NO: 468450 - DNA, 122 bp, Homo sapiens
tcccctgtcatcccaaatgactcaagaatgtgacgctattccggagtgaagagtgtttctcgggatttcgcgagcttttttcctagatgcctcacagagcttgctgtccggcagtccagtta

SEQ ID NO: 468451 - DNA, 122 bp, Homo sapiens
aagagagagataggaagctgcctcggggccaccccttgcaaagggggtgtgtcccacaaacgctgctatgggtggggtggggggctggggtgctgcgtagccagtgtttgactttcttttca

SEQ ID NO: 468452 - DNA, 122 bp, Homo sapiens
ccctccgacgcgggctttcgctggaagtagaaagtttgggctcctgcgtggaaacttctccggcccaactctcccggcgtagcagtgggggaggggaccggcgagaggggaggaaggaaggg

SEQ ID NO: 468453 - DNA, 122 bp, Homo sapiens
agcaagctccaagtcttcagtaaattcgatctaccagtccttgcaattaatccttgttggcgagctgcacagtatcttgataccctgtagggtcgtaaaagcacagtccattcacagagtgc

SEQ ID NO: 468454 - DNA, 122 bp, Homo sapiens
ctttgcaacccgtggatcaggagatgccctagtgaccccatgttaccaaggacttgggtccgaagcatagagctgtgtggattcttggcggccactcaggcatgcgtggagacccaggaggt

SEQ ID NO: 468455 - DNA, 122 bp, Homo sapiens
gcattgccgagatccatgagagccgcacgaagctggagcagcagctgcgggcccaggcctcggacaacagagagatcgacaagcgcatgaacagcctcaagccggacctcatgcagctgcgc

SEQ ID NO: 468456 - DNA, 122 bp, Homo sapiens
acttccaattaattagcattgtcagtggttactttatttgaatgacgatcctcttgataacggcgatgtaaggaacatgagctgcctttatgtggcacttaaaagcaaaaaattttgttgga

SEQ ID NO: 468457 - DNA, 122 bp, Homo sapiens
cctccactgccaggcctggagtgtaccctgcacctaagcccgtggtgatgcacctgtcaccgcaaaacattctacagtgatcaggggaacttctaccgtgatttaggcaaacgagtgttggc

SEQ ID NO: 468458 - DNA, 122 bp, Homo sapiens
cagcactaaccacttgtggaagctacaaagatgaacagtgcttctaactataaacaaggccgaatatgataaaggctctgtgatgattgagtgtcaacttgattggattgaaggaggcaaag

SEQ ID NO: 468459 - DNA, 122 bp, Homo sapiens
ttctctctaccagaacttcctcagatagcaactgaagtgaatcactaatatttcatgaagcggggttttttgaagtcaagtttacctgcttctggaagcaactttactattgcagctactca

SEQ ID NO: 468460 - DNA, 122 bp, Homo sapiens
ggaggctgaggtgggaggatcgcttgagcccaggaactgtaggctgcagtgagccaggatcgcacaactgcaccacagcctgggcagcagaacgagaaataaataaacaaataaaagccaga

SEQ ID NO: 468461 - DNA, 122 bp, Homo sapiens
tctttccaataaccctgtcatcagctcctgcgttgctgggactttaaatctcaatctgagcgcagcgtgcatacagccgctgcatcccagtggaaaacaaaagccgggctaaggctgggggt

SEQ ID NO: 468462 - DNA, 122 bp, Homo sapiens
tcacagccccacttccggccaactgcccgctacttccgcctgctgcgcgagtgacggatgcggccgaggctcaaaagactctgtcagcgtttcccaaggacattttccactggaggacgttg

SEQ ID NO: 468463 - DNA, 122 bp, Homo sapiens
gggccgggtgctcctggttaggctaaggtaggagcggcctgaagacgcgcgtttagaaggcgcgggtgaaggcgggcaacaagggcagagcccttctcccgagccttgggcgaaggtacctc

SEQ ID NO: 468464 - DNA, 122 bp, Homo sapiens
tttgcctgacctctggctcccatctgtgaagccctggagaggtgagagccctcgggaggccgtgtttcaggcatgctctgcacccgtgcagagcgcgtgtgataatgcattgctaatgcttg

SEQ ID NO: 468465 - DNA, 122 bp, Homo sapiens
aggtgattcaacctaccaaccttaaattgaaacccaagccattacaagatcagactgtagcgttctgaaggagtgtgtaagtgtacgtatgtgggctttgtcatgaagcagaatttgagaaa

SEQ ID NO: 468466 - DNA, 122 bp, Homo sapiens
cctttgccaccgtcgcagacccgctgctgacttccatacctccggatccgacagggtgtccgctgtgctccccatccagggaggcgcccattgccgctcctgatcgggctaaagacttgcca

SEQ ID NO: 468467 - DNA, 122 bp, Homo sapiens
ttagaggaggtgggtattagccacgatcggatattcttcccctgagctgcccttcacacccgaccctgccttgaattaggattccataggagagctgggggcaggagaatggggtgttccct

SEQ ID NO: 468468 - DNA, 122 bp, Homo sapiens
ggcaaagggtcacagaagtgttcagaagaagggcaaagataagaacaatattagctgttacgaaattttaactgtatcttccaaaatgagtggttaactgggcaaaccttaagctcacaaga

SEQ ID NO: 468469 - DNA, 122 bp, Homo sapiens
gggcgacatagaccctaaccctaagtccaaccccaaggcagaccccaccgtcccgccaggcgcactcctaagagcgcggcttccggagcaaagccgctgacccccgcccccagggtcttggc

SEQ ID NO: 468470 - DNA, 122 bp, Homo sapiens
aatattgtctttcagaagttcacacacactcacacacagatcagaacaaggcggggccgccgaggggagcggggagcggggacttgggaggtccatagcctggattcccttctgcccggctg

SEQ ID NO: 468471 - DNA, 122 bp, Homo sapiens
tgagtgtttgaacaggccataataagctgacatttgccactccccacccctgccaccccacgtttctccatcagctgccacaatttgcacaggagtttaatcccgtgttacgttgccatccc

SEQ ID NO: 468472 - DNA, 122 bp, Homo sapiens
cgaggacgccatccagttcatccgccagtgagtggccgcggtggtggggtgggctgtgagcgctgggggaggggagatccggctgcccacgaagggtggcggcattggctgtgtggttccgt

SEQ ID NO: 468473 - DNA, 122 bp, Homo sapiens
aaactctgctcttaggaaatacatgcaaccagggaccttgctagaaggctcggaagtagccgtaagacaaagaaatggaaatcggcattgtcaattaccatccgagagcagccccggttctc

SEQ ID NO: 468474 - DNA, 122 bp, Homo sapiens
gaactgccggtcaaacatctccaccacctggccagacagcacagagatcacattccggtccgtccgcgcggccgaccacgtgaagctgcaacagagggagggggcgctggtcaggcacatga

SEQ ID NO: 468475 - DNA, 122 bp, Homo sapiens
ttggaccccatgcacactgaccgcatgccctgaccaaggtagaaccctgtgtgaactgaccgcgtgccctgaccgaggtcggaccccaggtgcactgactacatgccctaactgaggtcgga

SEQ ID NO: 468476 - DNA, 122 bp, Homo sapiens
ttacttctactcttttttcagatctcagctcaatctttacttcctctaggaaggccccaccgaccagccactccaccaagctaaacaatcctccacgtatacactctcataatctgtcatac

SEQ ID NO: 468477 - DNA, 122 bp, Homo sapiens
caaggacattgccagggtctgaatttttacttgtggaaaaattcaaaaaattgcagcctccggcataaatgcgttaaagagctttctcagaagcccggtccaactacttgcacttagtggcc

SEQ ID NO: 468478 - DNA, 122 bp, Homo sapiens
caacagacagatgccaccaccgttctccccacccttttggtagccctggtccctaaggctcgttgggactgcgagctgcaagcctcagatccatcatctcaacctgccttgcagtcggtccc

SEQ ID NO: 468479 - DNA, 122 bp, Homo sapiens
gctgacagcatggcttcctcgtctgcagagtgtgacagtgacattccctgcctcattagacgttaggatacagtgaggcgccgtgctcagccccattctggcacgtagcatcgataaacacc

SEQ ID NO: 468480 - DNA, 122 bp, Homo sapiens
tgaaggagggcgcccccaagccatccccgagcacctcagtcttagtcagggtctcctagccgctgccccagggccagcttgtgagagtccttgaacaggccagaggccagccactgaactac

SEQ ID NO: 468481 - DNA, 122 bp, Homo sapiens
gagtaccagcccccgccccaccccgcagacagcctggcgtcgggacaccggggacgcctgcgcagaagaacccgcctggccccttggctccaacggtaacaatgctcccctccgaaagacag

SEQ ID NO: 468482 - DNA, 122 bp, Homo sapiens
tctcggcttactgcaacctccgcctcctgagttcaagtgatttctcctgcctcagcctcccgagtagctggggttacaagcaccaccacggccggctaatttttttgtatttttagtagaga

SEQ ID NO: 468483 - DNA, 122 bp, Homo sapiens
acaagaaggaacttaaagagcaacttggagaaataccagtactcatatgaaacaaccccacgaaataaagcatcccatgcctcttcccttctcctgcagcttataccttcactcttcaaaaa

SEQ ID NO: 468484 - DNA, 122 bp, Homo sapiens
aggtggagcacggctgttcctgcccaggggctggaggtcgggcaggtggcctggggcgggcgcgaggttgactctggctggggagatgctcgctgttatgggacgcccccgaccgccccata

SEQ ID NO: 468485 - DNA, 122 bp, Homo sapiens
ccgtcgcagcgtctcacccgccgctcagccgcctcagcacacacaggccctgccgcccgccgcagcgccacattgcgcatgacgagcacctggctggcgaggaaccccctcttaacccgacg

SEQ ID NO: 468486 - DNA, 122 bp, Homo sapiens
ccccggccacctgggcgagttgccgctcctgccacttcctcctgggacagcctgatggggcggggctgagcgcagggcagaggggtggtctgggccggccctgcccctgccccctggccctc

SEQ ID NO: 468487 - DNA, 122 bp, Homo sapiens
ccctgacgcctggctctctccccacccctatggccagcatggtgcaccccctaccactcccgggacaggatgcaaaagaggctccagagtcagagtgccaagccagggaatcccagtcccag

SEQ ID NO: 468488 - DNA, 122 bp, Homo sapiens
aacaacaaagacagaaaagatctatgacgaccaccgtaaatttctactgaggatcgcctacgacacgtctgggcacccgactctctggctgccaagcagcaagctgatggccgtcaatgtca

SEQ ID NO: 468489 - DNA, 122 bp, Homo sapiens
ggctctccggtcccccggggtaatgcgatatgggggtattttatttccacccttagggaccgtgcctgccaagctgcctcccgggcgccccgccaccgcgggctcgacgctgcaccctgcca

SEQ ID NO: 468490 - DNA, 122 bp, Homo sapiens
ggggcgcggtcgcggctctgggggcggagccagagcaacgaagagccgggctggcgggggcgtggccgcggcgctgggggcggagccggagaggtgcagggcccggcaggaggcacggggcg

SEQ ID NO: 468491 - DNA, 122 bp, Homo sapiens
ggtggccggtggccggtcggggaggggtgggggctccctggcagaggactcaggacatttcggtgttaaagcccctgaggacaccagccccctctggggatgatgaattcattgctggggaa

SEQ ID NO: 468492 - DNA, 122 bp, Homo sapiens
cattaacatgttctgtttagtactgacatacgaaaccaggaagcgccttaatgaacttgccgagccttttgtgctatgacattgctccctttgagcccagcctcttgagaaacagacaccat

SEQ ID NO: 468493 - DNA, 122 bp, Homo sapiens
acaccgtgcagcaagcggagggaagagaacttccggcgcccccacctaccgctccccagccgtgtcccgctgctctaaatctgcagacttgatcgattgcttctgcctgggcggtaccgccc

SEQ ID NO: 468494 - DNA, 122 bp, Homo sapiens
ccatggcaataggaatgcatttaccttcaccaaacctgctcaaatccttgctgaacaggacgtagcaggagttgactttccaatggtggaggttcagagtacagcctgtagccacagagaaa

SEQ ID NO: 468495 - DNA, 122 bp, Homo sapiens
taagtggtgagaattaaacacgttaatataaggaaatgtttagaacaggcctatgttcagcgctcagatatgtcagctattattacttagtagaattcagggtttggagtcagacaggccaa

SEQ ID NO: 468496 - DNA, 122 bp, Homo sapiens
ggtaatatagtgagactacatccctacaaaaaaaacacaaaaattagctgggcgtattggcgtgtgcctgtaatcccagctactcgggaggctgagaattgatcacttgagcctaggaggtt

SEQ ID NO: 468497 - DNA, 122 bp, Homo sapiens
aatgagccgcgcagaggctcagaggcgtcagcggcgtgcgcggtttccaaggaaaccgtccgtcctagccaccccagcggctctggaatggtagagcaagaggctccgcccacgcaccgccg

SEQ ID NO: 468498 - DNA, 122 bp, Homo sapiens
cgccccggtctcccatgggtgtgcgcagagcccccgggccggagcaggccttcccctgtccgctcccccagtctctcggcccaggaccacgggggagttcaggaccaccggccccacgccgg

SEQ ID NO: 468499 - DNA, 122 bp, Homo sapiens
ggaccaagaggaggatgaagtcacaaacgcccctgtgaccttcctaggtgtggtgggcagcgtgatggcccccttcccccaagtatccacctcctgatcccccaaaccaataaatatgttat

SEQ ID NO: 468500 - DNA, 122 bp, Homo sapiens
cttacttaggcgagttgcattatgtatgcacggaagcgtctcatcatttggctgtgcttgcggggtgttccctagcactgtcttgccgaagtgagatgtgtggaagagctgccccagaatca

SEQ ID NO: 468501 - DNA, 122 bp, Homo sapiens
cccagcctcagagggtggagtgagggcggaccggccctggtgggggccgcagtcgaggtccgcagtctcctcggggtcgaaatcgggcatcagcgccgtttagagaacaccgtcctgctggg

SEQ ID NO: 468502 - DNA, 122 bp, Homo sapiens
tcgggggccacgtgaacacagaactaggttacctgtctgtatgacagagagcatgcagagcgactgagtgacgaccacggcgctgccccaataacccagcgacccgcaaccaagggcctgga

SEQ ID NO: 468503 - DNA, 122 bp, Homo sapiens
ctccccctctgctaggaggtctttgcctctggcccctgatttccggaaggctgtgggaggcgaggctgggctgggctggtcgagccaatccccatggactgggtgtgtcttccaagcctggg

SEQ ID NO: 468504 - DNA, 122 bp, Homo sapiens
cccgccaaatcgaccacaccgggcgctggaaggagcaccgggagggaaacggagggttgacgcctcggcctctgggtggctttaaaaccctgtgccaatagtagactgggtgctgagcgctt

SEQ ID NO: 468505 - DNA, 122 bp, Homo sapiens
agtattgctgtttgttaaactccagcgtgtctgttggctccctgcggcgctggggaggcacgtttgggggtgggtatatttccttttttttttttttttttttaaacccctgtttttctgtt

SEQ ID NO: 468506 - DNA, 122 bp, Homo sapiens
tgcgtgcgcgtgtgccgttctctagcgggggattaggatggtgccgcagagaaggctgcgcggtggtgcctgactctgacgctggctgtagcgggtctctggggtctttgcggtttgtgtct

SEQ ID NO: 468507 - DNA, 122 bp, Homo sapiens
caagcatgcctgaatcatcagaaatctttgtcttaatccaaagaggtattctttgcttgacgagcaagtacagatccactccacttattgagaagttcatgttgtctagggacctcaatagc

SEQ ID NO: 468508 - DNA, 122 bp, Homo sapiens
tagcattttaaagactacatccatggctgcacatatgacctagtatacattacctgtttacgtggctgctcctcttccagtgtgtatgttctttgagaatggaaacgtgtgattcacttctg

SEQ ID NO: 468509 - DNA, 122 bp, Homo sapiens
tggaacgttgctcagaatcaaaggagcagtcaagtggcacgcgggggtgggagggaggaacgagtaagccccccaagtaaacataaaatccagactggagtgggtgtggcggtggctaagcc

SEQ ID NO: 468510 - DNA, 122 bp, Homo sapiens
acagataatctgtggtcaatgactgttggatgcaggggaataggcccagccccttgcttccggaaggttcaccaaacatttgtgctcccccttccacagtgcccggaggcagtgtccagcca

SEQ ID NO: 468511 - DNA, 122 bp, Homo sapiens
gaggctggaggcaccttgtcttcctcccagccctgcccatctccatgactgacctttttgcgcaccctggaccttgccaacccaagatgctcgctctagagatgaaggtggatgcagatgct

SEQ ID NO: 468512 - DNA, 122 bp, Homo sapiens
cttacagaacccagggcggggttgggctgggcgcccgcgcgcgttttcaagcctgcggcccggagttcactgcgaggactgagatcacccgttaccccgccctggtctacaagtgtttgctg

SEQ ID NO: 468513 - DNA, 122 bp, Homo sapiens
cccatgtccattcactgcgcccagcatggggcctgatcagtaggtcctggtacatgagggcgagtaagaggtgattgccagttcaagtggagagaaggttttgtgaaggaagaaagatcagc

SEQ ID NO: 468514 - DNA, 122 bp, Homo sapiens
gtacactgcaggaaaagacaggagtcaggggtcttttgcagggcagcctcctataagccccgaccctctgtgcttcgatgtccccgttgtagcaatggggatgtggtcaccacaatcggacg

SEQ ID NO: 468515 - DNA, 122 bp, Homo sapiens
ttctagcatgcagcacctgctttcgattctgagatgcatcccacatggtccagcacgaagcgttctttggacagaacgcctgccatgaatgtcattcctcactggcctaccgtggtgctcag

SEQ ID NO: 468516 - DNA, 122 bp, Homo sapiens
aatgctgggattacaggcatgagccactgtgcttggggtgagtctcctaatctatgaagacgacgtgtttctctgtttattcagatcttttttgaggttttcagcagcattttgtagttttc

SEQ ID NO: 468517 - DNA, 122 bp, Homo sapiens
cttaatcatatgtcattgaaataatctcctctatggagatccctgcttttacaaatgtttcggtccctaccacctaagtttcaaacagcaaccagagtgatttattttttcatttttatttg

SEQ ID NO: 468518 - DNA, 122 bp, Homo sapiens
tcatggttattgaaattttcctcatagattgttccacagttaacagtgcacagtgtcctgcgggtaactaatgattctcctgtagccttttccagcttactcatttatagtagtttaggaca

SEQ ID NO: 468519 - DNA, 122 bp, Homo sapiens
aattggaatgcgaaacgcctttcaatggtaaaacgcacgcttgcctaatgaagacactaacgtttagttggcgactgagccgtcctggttcacagatttcgatttcgaccctccggagcatc

SEQ ID NO: 468520 - DNA, 122 bp, Homo sapiens
taggtgggcatccctgggaaatcagagagacaagaaaacgctgtactgcgctgtgccagccgcagaagccctgtgtaaaaccccacctggaagaaattaataagtgtctgtttttaagatcc

SEQ ID NO: 468521 - DNA, 122 bp, Homo sapiens
ttcattatgtctcagcgcgccctggccgccaggctggcagttcttcgggctggcggggctcgggagctgtcagcctgccaaatccagttgtttgacttcatgtttcaaggccaaatcctttc

SEQ ID NO: 468522 - DNA, 122 bp, Homo sapiens
gggtcgtccggctgccaggcagggcgagcacgcgccgggaggccttggaggcgtagggggcgggggtacggctcgcctgctcgcaagatggcggacgaggacggggaagggattcatccctc

SEQ ID NO: 468523 - DNA, 122 bp, Homo sapiens
ggcgtgggtggcgtgcagcaggccgtgtgctgctgggcgtgggtggcgcgctacaggcttcgtgctgctgggcctgggtggcgtgctacgggcttgtgctgctgggtgtgggtggcgcgcta

SEQ ID NO: 468524 - DNA, 122 bp, Homo sapiens
tcagtttccactgccagaaccccataatgtgaagcgtgacacgccaagcgtctggtcatgcggtatctggtaggataaaccgtcaccctacaactggggaaggatttcaaaacaggaggcac

SEQ ID NO: 468525 - DNA, 122 bp, Homo sapiens
cctctgcagccgctggcccgggtgccaagtccctcactgcctggggccagcagggctggccggctgctccgagtgcaggcccgccaaacccacgcccacccggaactccagctggcccccaa

SEQ ID NO: 468526 - DNA, 122 bp, Homo sapiens
ggcacggtggttcacaccagccgggcacggtggctcacacccgccgggcacagtggttcacgccagccaggcacagtggctcaaacccgctgggcacagtggctcacaccaacggggcacag

SEQ ID NO: 468527 - DNA, 122 bp, Homo sapiens
ctcaagagatccaccatcctcagcctctcaaagtgctgggattacaggtgtgagccaccacgcctagacttattctgagtttaagacttaacttaggggttacaccccgtaaaagctaaaga

SEQ ID NO: 468528 - DNA, 122 bp, Homo sapiens
aaaggaactaacaaacatgctgtaaaaattcatgcaactttgtttttttcttcagcaccccgcctccccgattaacaatgtagatgcttttcttttcccttgattgaagagtgattcaggaa

SEQ ID NO: 468529 - DNA, 122 bp, Homo sapiens
ctggaactgggctgggcggagaaatcagggcccgcagagaggcattcctgccgccttccccgccgcccggggccgcaggggggcctggccaaggtgaccccgcgggaggaggcgaggggtcc

SEQ ID NO: 468530 - DNA, 122 bp, Homo sapiens
agctgagaccctcaaccagtcttcagtccttggtgctctcagatttggtcccccagcctccgtggattcagataaccccaaatttaccttccctttttgcttaatatgggcagagtctctct

SEQ ID NO: 468531 - DNA, 122 bp, Homo sapiens
ttctcgagccaggacgtgacgtattcagacgtactgggggcggggcctcaaggggaaaagcgcctgagccgggatatcgcgagaacatcccgttctttcgtagctctggtgctgcggctccg

SEQ ID NO: 468532 - DNA, 122 bp, Homo sapiens
gggtacaggtgcaggtttgttacatgagtatattgcatgatgctgaggctttaatgatcccgtcagccaagtagtgagcacagtacccataggtagttttttgacccttgacttcctccctt

SEQ ID NO: 468533 - DNA, 122 bp, Homo sapiens
gaaggagactgacagggacacaccgcgagctccgcatactctcctctgccccctgtagcccggggctttaatgaccccaagcagatttcctgtctctggtctagccagctgcccctagggct

SEQ ID NO: 468534 - DNA, 122 bp, Homo sapiens
cagacaggcttcagagagaataggttgcaaaatgtttattatcagacttaaagtctgcatcgatgttaatgtcagagacatacaatgaggcaggttcagcccccacttcccatcatggccca

SEQ ID NO: 468535 - DNA, 122 bp, Homo sapiens
aagcaacttccctccacaagtcctccggctgagcccgcttctgccaaccttgtgttggggcgctgcggaagcccctgggcagaaaatgaaaactgcctcatgctgacaggaggcgaggtgct

SEQ ID NO: 468536 - DNA, 122 bp, Homo sapiens
ggttgtaaatccatgtggcgggggctttggaccctggcggcccaagcggcacgtgggcctcgcaggtggggctacaggggaaggggtgcgacagcttggggtgctgcttggaccccagaccc

SEQ ID NO: 468537 - DNA, 122 bp, Homo sapiens
tacatgattatatatttgggggcatgtgtttactgtctgtctccctgactgggctgtcagcgttttgctcaccactggattctcagggctccgcactcaggaaaggttcagcgaggtttgtg

SEQ ID NO: 468538 - DNA, 122 bp, Homo sapiens
tggtgcaggcacgtaggtgtgatgcacgtacaagaatcccagcggcagctgcagcagcttcgggcggccccgataaggcgccgctccccagcggcagcgggggtggatggccgggcatccta

SEQ ID NO: 468539 - DNA, 122 bp, Homo sapiens
attcagtgttaagattttattttcaaagcttttttgttgtacagaaagtaaaaatgctgtcgcaatctcagtgtaattggtagccacagatggttgactcaccaatcacagctatccacgct

SEQ ID NO: 468540 - DNA, 122 bp, Homo sapiens
agagggtgtttaaaaggatttactatcagatttggccttgtgttctgtgattttggtgagcgttcaaggaagccaggctttggtctggattggatgttctcaggtcatgaatataattctct

SEQ ID NO: 468541 - DNA, 122 bp, Homo sapiens
acgcaggccccagcaagccaggctgcccagctctgagtcaccgccagggctgggctgggccgggccgtcagccgcacgcgccgcttgtctcggcccctgcctcccatactcaccttcagggg

SEQ ID NO: 468542 - DNA, 122 bp, Homo sapiens
tctctttgaggctctgatttagcacataccagaaagaaatgaaccatatgcaggtctttccggccagtgagattttgttgccatttaaaaaaataacggtcttctattgagcaataagttat

SEQ ID NO: 468543 - DNA, 122 bp, Homo sapiens
caataaatttagttgtaattttttacaactcgatcttgattgactttgtggttccattatcgggcaacactcagaacggggtctctgaggaaacaaacaaaaaatagaatcgggcaacacct

SEQ ID NO: 468544 - DNA, 122 bp, Homo sapiens
gcactgcctccccggggtaaggacagtcaaaccaggaagagacctgtgccttgagaacttcgggactgtctagaactgcccagtcccctcatcaaaggtggccgagagattttaaagcagga

SEQ ID NO: 468545 - DNA, 122 bp, Homo sapiens
tctgctttagccgcgtcagcagttccccaatctgttgcatagagactagatcactgcatccgcctatacaatctttaccgataaagactcgaggcaccattctcgctcctgtgagctgttgc

SEQ ID NO: 468546 - DNA, 122 bp, Homo sapiens
catgtgcaggtgtgccagctagaagctggcagtgagtgcctgcccaccccacttccaacacggagggacagacctccagagcctcaggaaagactgcaaaaataatcaaatcctcaccctgg

SEQ ID NO: 468547 - DNA, 122 bp, Homo sapiens
ctttccaggggagacactgcagaggagctgggtgtccaggttaaatttggaaaaaagaggcggaaaccccacacagttttattttagctggaacgcaaggctgagcgaacgacatccttcta

SEQ ID NO: 468548 - DNA, 122 bp, Homo sapiens
gcggcggggagccgcggggccgaggcgcagggcgttttccccggaggtgcggcgtgcgcccgcgacacaaaggtcttttaaagacctcgcagcgcccttcccggctgcggaggctggaggcc

SEQ ID NO: 468549 - DNA, 122 bp, Homo sapiens
ttctctccccgggtcctctgggtgcacctgccccgccccgcgcctttgttccggaggagccgccttgggcagcccccagggagctcaggacccgctgtaccccctgccaccgcctcccggtg

SEQ ID NO: 468550 - DNA, 122 bp, Homo sapiens
gtggggtctcctggagccggggacggcgggaagacgtctcgaggtggcggctcccatactcgccccacgtcccgcctccagacttgctccaccgccccagacagcccagagatggttcccgg

SEQ ID NO: 468551 - DNA, 122 bp, Homo sapiens
gtaccagtcttcatttgtggggtctggactttctccgaggatgccccattcacaaaattccgtcctggaccctcaccgttgaggaacgctgaggaccactccccccgggggacacaggatgt

SEQ ID NO: 468552 - DNA, 122 bp, Homo sapiens
cgcatgaaatgaaaaccagtgacagttctcgcaggagcaggaagccgcatgtatacagttcgtgcaaagcagcttttctttaagatcctcccgggttttgagcatcacaatgggtatgtgag

SEQ ID NO: 468553 - DNA, 122 bp, Homo sapiens
accagaagggggtgtggcctctcaggtcgaggcggggttaagggtcataaggcggaggcgcgcccaagatggcggcctccatgtgcgacgtgttctccttctgcgtgggcgtggcgggccgc

SEQ ID NO: 468554 - DNA, 122 bp, Homo sapiens
tggctctctcagacaaaactccatgtgatcacatataggcagcctcagtgaggctgatgccgtgcagcaagcagtaggtaatgagtctttgtgcagagtgaagctcttgttgctgaacaata

SEQ ID NO: 468555 - DNA, 122 bp, Homo sapiens
gtggggactttctcctgtcgccgtgggaagcaccgactttcgttgggggatttgactctgcggggaggacagagcggggagcacgagagcagggccaggaggggcggggccggagacggggg

SEQ ID NO: 468556 - DNA, 122 bp, Homo sapiens
tcttcggagtgggactctcgggtcggagttccgccgccggcccatccagtttcagcgggtcgcctttgcctctgggccgggtggggagcctcccattccagagaccccccgactccctgccc

SEQ ID NO: 468557 - DNA, 122 bp, Homo sapiens
ccccagcctgcagtgtcctgtcccagcacagccctgtgaggagtagcctgggcaaggcctcgggagccccaagggtgcagggcatggggaggcagctcagttcccccagctccttccacctc

SEQ ID NO: 468558 - DNA, 122 bp, Homo sapiens
atggaaaggacgcctgctaggaagtcagccaggcctggtttcccatcccatctctgccaccgacttgctgtgagaccacaggcaagctgcgagccctgcaaagcagagatgacgcttctcac

SEQ ID NO: 468559 - DNA, 122 bp, Homo sapiens
ccgcggcccttcaccgaggcggcgacccaggcttagttggggaggctgctctgccaccttcggaaggcgggcctctgtgcccgcccggccaatcgcgagcaacctctccggtgtgggcgggt

SEQ ID NO: 468560 - DNA, 122 bp, Homo sapiens
tagattacatgaagacactttggagttggtgtatagggtttcctcaaagaactgaggtaacgtggactttagggaattttcctcaattggattccctgtttatttgtgatactatttgtgtc

SEQ ID NO: 468561 - DNA, 122 bp, Homo sapiens
gcacgatttctgattcaaccatacaatactggatggtggaatagttgagtaaatgattggcgacctggttatctttctgagttgtaggttctgatggttcctgacttgacttatgttgtcag

SEQ ID NO: 468562 - DNA, 122 bp, Homo sapiens
ggtggggacaaagcatacagaatgtgtgtatctgtttttatgtgggtgttggctgtttttcgtcactgctttttaagctgaatcttagctggttttcttgaactttgactttaggtgtaaaa

SEQ ID NO: 468563 - DNA, 122 bp, Homo sapiens
agttgcctagcttattttatccctattcttggtaacatctccattttctcttatattagacggtgtactacataggtccagcctcagaatgcctgcaaaccaacagctcccttcagcctaag

SEQ ID NO: 468564 - DNA, 122 bp, Homo sapiens
attcaggatatcaaggcatacaggacctggggaacagatttcccccactggcactgaacacgatgcagtattccttgtgaacaagagaacaatttcatgttgctttcagaaacatcaaagga

SEQ ID NO: 468565 - DNA, 122 bp, Homo sapiens
gctggttgctctttgagccagcttcacctcccttgcatgcacaggccccaggtactaacacgctgctctgaatgagcctgtcctgccttggctgccacctaattgctgatggagcagaggcc

SEQ ID NO: 468566 - DNA, 122 bp, Homo sapiens
aggtggactgcagcacgtgggagagagaacagtgcgaaactgggagatggctagaaagggcgtcaaagtcctcagcagaatttctgtagaaatgactactacagctgacatttattgagcac

SEQ ID NO: 468567 - DNA, 122 bp, Homo sapiens
gactcagctcaaagcctcgtccctttagcccaaggcacttcgttcctcctggagtccactcggcttccagcgggttcccaggtgaactgaaatccagagctattctcatctggttgccctgg

SEQ ID NO: 468568 - DNA, 122 bp, Homo sapiens
agtgagagcgggcgccatcgcagccattcagcacagagagacaggaagtccagcctctcccgatgccgaggccgaggccagctccacggccccttactgcctccccagagaacagactagaa

SEQ ID NO: 468569 - DNA, 122 bp, Homo sapiens
caccatgcctggctaattttttgtatagatggggtttcaccacgcagcccaggctggtctcgaactcctgagctcaagtgatcctcccacctcggctttccaaagtgctgggatttacaggt

SEQ ID NO: 468570 - DNA, 122 bp, Homo sapiens
ctcctcacgcagctgtaaaggcgtgctgttggtgactcgctgtcagacacaggaaaggggcgctgcaaaagagggctcttatcatcatggaggctgatgcagccactgccgctaggcaggaa

SEQ ID NO: 468571 - DNA, 122 bp, Homo sapiens
gttgaagaagataatctagttttactgacctttattgagcattcactgtgtgctaggcaccgttctcagaatacagtatctccacttaatttctcataactcagaggtggctgctgctctca

SEQ ID NO: 468572 - DNA, 122 bp, Homo sapiens
gtcggggagaaaatgtaaaagcttggccgtgggtgggttggggccgaccctttctcccaccggtttatggctggagaaggtgggagatgtcaactccatttaggggactggagggacctgga

SEQ ID NO: 468573 - DNA, 122 bp, Homo sapiens
aagatcttctttgtagggtcttccagtgcgcaccctgctgtggggtctgtgaaggaggatcgctcttccctctatggaatatctcattatgggtccctctctagggtcccttagtccaggat

SEQ ID NO: 468574 - DNA, 122 bp, Homo sapiens
cggcacagggcagcgaggcccagctcatttcattcgactgacccaggccatgctcacgtccggagtaacactacatacagttcacctgaaacgcctcgtctctaactgccgtcgtcctgcct

SEQ ID NO: 468575 - DNA, 122 bp, Homo sapiens
ccaggatgtgcgcctctctccacccctaggcgaaggcactagaatttcccaaattaagaacgaagaggaagtttggaccttttcggccaccgctcgcttcaatatggctgcccccagggaga

SEQ ID NO: 468576 - DNA, 122 bp, Homo sapiens
ggccttccccttgtcctctctgtcccccagcgctggagctgagatgcccggcccgcgggacgctcgaccccctggtacgcgcgctgaggcccccacggcttcccaccgctccggccctttcc

SEQ ID NO: 468577 - DNA, 122 bp, Homo sapiens
atccccctcctccccacccccaggttccctcggctcgcggccctccgcgtcccgggctcccgccccagaacctgtgggcagatgtttcctccacgcagtaccctcccggggctctgcctcca

SEQ ID NO: 468578 - DNA, 122 bp, Homo sapiens
caccgtgccaggggctagggacaaggataagcaaggccaggtccgggcctccaagcagcgcgctgtggagtcgggtagagtagaccaagtgcaacaggcacctggctgcagccaggaaggac

SEQ ID NO: 468579 - DNA, 122 bp, Homo sapiens
tcggccccgctcgagcgggggacactcaccgagcggctggagagtcttttccgggagctccggctgaacatggccggacgcctcctgctcgcagcgccgtccgtcggtccgtccgcgccgcg

SEQ ID NO: 468580 - DNA, 122 bp, Homo sapiens
aactgcaaggcatcggccaatgggaactattgctgggctcgttcgaaagtaaacggtggacggcgcggcccgaggcaggtggcgggagtcagtttaaggctggcgcccagctttccgcgcct

SEQ ID NO: 468581 - DNA, 122 bp, Homo sapiens
ggctctgtgattcatagttgcagatactgactggagttcctctttctgctcacacttagacgtctaagagtaagtagtgagtcaggcagggtcccagccctcaggggtttcccatgacggga

SEQ ID NO: 468582 - DNA, 122 bp, Homo sapiens
ccaaacctcacactgtaggttcatgactgtggtcatttgtagtgtattctttgttgctgacggcttcctgggtatgcatcggacctgtattgcagcagttctcaaactttttggtctcagaa

SEQ ID NO: 468583 - DNA, 122 bp, Homo sapiens
tctggggacagggaaaccactctccccgcagtaggaggggtcccaggaattgaagctccacgggaaatttcctggtagttggagtggagtctcggcggctcctccgaacacagcaatcggtg

SEQ ID NO: 468584 - DNA, 122 bp, Homo sapiens
gcgtcctgcctgcagagagccaggccggagaagccgagcggcgcagaggacgccagggcgcgcgccgcagccacccaccctccggaccgcggcagctgctgacccgccatcgccatggcccg

SEQ ID NO: 468585 - DNA, 122 bp, Homo sapiens
caggcgccgaccgcggacgctccagaggtggggtttggttcgaccccgccccttcatgctcgcttcttaaagggcccgggttcgatgattgaatttaccttggttcccttgaagctgtaggg

SEQ ID NO: 468586 - DNA, 122 bp, Homo sapiens
cctgagaacaagtttcaagtgcgtgtgtcgtcgatcaggagggccaggtggcggcgagggcgggtcgttagtggcagccggagcggcagggaggcggcagccccgcttcacgggcggggaga

SEQ ID NO: 468587 - DNA, 122 bp, Homo sapiens
ccgctatgtgaccaggatagatcaagacaaaaacaagattactctgacatcatgtaatgacgaaacaccaatattgttcaatccacaaaataccaatcatccctctctcccctcccgtctgc

SEQ ID NO: 468588 - DNA, 122 bp, Homo sapiens
gaggggccgagggttcgcccagtcacccacagtggcatccttgcaatgtgctagttagaccgctcctttaagtccctcccgcactggcccgctcggccccgcccctctctggctccgcccct

SEQ ID NO: 468589 - DNA, 122 bp, Homo sapiens
gcacattgtcttgaatgaaggcaagttattttctttctcggccttggcgtcctccacagccgacactgttcttgcaatctgtgaagggatgatttctaagctccgcctttgttcttcactca

SEQ ID NO: 468590 - DNA, 122 bp, Homo sapiens
cagggtcaccctgagggaggacgtgccgccgggcttctttgtgcttcaagtgacagccaccgaccgggatgaaggcataaacgcagagatcacctactcctttcataatgtggacgaacaag

SEQ ID NO: 468591 - DNA, 122 bp, Homo sapiens
ccggagcagcctgtgatagagactctgtgtcccgcaccggagcagcttgctagcacgtcccgggctttcaccccgtaacatcttaagaaggatggaaagaccaatcagtacaaaaaaataac

SEQ ID NO: 468592 - DNA, 122 bp, Homo sapiens
accaaggtaagagggtgaggggcctctgctgtccccataaggaggtggcccatgttgccccgagaataaggaagggatgggccccttctgggctccgaatctggctggcggaggccctcgtg

SEQ ID NO: 468593 - DNA, 122 bp, Homo sapiens
gctgaagaacctgaccagccataccaagtacctggtcagcatatcagccttcaacgccgccggagatggacctaagagtgacccccagcaggggcgcacccaccaggccggtaggaggaagg

SEQ ID NO: 468594 - DNA, 122 bp, Homo sapiens
ttatgtggtttttaattgtctgtaaacaaagccttttacatctagcactaaatctccatccgaggtcagctggcatccaaagggatggttgctgatttagtttgtcttgtctgcttttcttt

SEQ ID NO: 468595 - DNA, 122 bp, Homo sapiens
ccacgcccgtcatggcggcggccccggccggctctggccccgcccctcggtgacgcgtcgcgagtcacctgaccaggctgcgggctgaggagatacaagggaagtggctatcgccagagtcg

SEQ ID NO: 468596 - DNA, 122 bp, Homo sapiens
tgtttgtctcctgatggggctggcttcatggctgtctatgtagattaagatggatggaatcgtgcagtttaaacatggcaatggctgcgtgtcaatgacaccctcaacgaaggtggttttaa

SEQ ID NO: 468597 - DNA, 122 bp, Homo sapiens
ttagacttagtggaccatgtggtcttttttgtgaaactgttcaactctattgttgtagtacgaaagcagccatagacaatatggaaatgaacaagggtggccgtgttccagtcaaactgtgt

SEQ ID NO: 468598 - DNA, 122 bp, Homo sapiens
ccctgaggcatcgtgttagcaggcaggaggcaggggtggactaggtgggctttgccgctgcgttgccgcctcagagttcagcaccacggacaggtcccaggccggcctcccagcaggggact

SEQ ID NO: 468599 - DNA, 122 bp, Homo sapiens
ctacgaagacatacagcaaagcatgatcaaccttctcctttttgcttacctacaattctacgatgtgcatatattacctgtttgtttttaataggagttctttgacttaatttatacagttc

SEQ ID NO: 468600 - DNA, 122 bp, Homo sapiens
tgccgggaggaagaagtccatggaccagccggaggggacccctgtggagctctactacaccgtgcacccaggaaacgagcgaggggactgtgccgggggtgacttcaggaagggcaacgcca

SEQ ID NO: 468601 - DNA, 122 bp, Homo sapiens
ccccgggctcccattggctggtagggccgccagtcattctattccggcacctcccttaggcgccagggacagccgagcgttacctggtcccgggcagcggagttctttacccaccccagttc

SEQ ID NO: 468602 - DNA, 122 bp, Homo sapiens
tgaggggcgcctgaaggtgagatcacaaaacacagaacacgatgtttacccgtgagcatacgcttgagctcatgaggttcatggtgactatgaaaacgcacaaggagggcaggtagcccagg

SEQ ID NO: 468603 - DNA, 122 bp, Homo sapiens
ggtcagaagcctgcgctgtgtttaaaatcagggcgagagggagacagggagggaacgttccgccgcctaaaccactttcccgccgcatctttcacctggagtggaggggcaagtgcctgggc

SEQ ID NO: 468604 - DNA, 122 bp, Homo sapiens
tttgccattgtattttaacatctcttccccaccagtttggcagggtgcgcagcggagaagcgtgtagcttcagagttcagagcttgtggagaaaccttgctttgaccatctctgagcgcccc

SEQ ID NO: 468605 - DNA, 122 bp, Homo sapiens
aatcgggagccgggacatttcccccagaattccccgcatttgaatcttcagttctgtaatcggccagagaccggattttgcttgatttggaagtttttttctccctaggatgtgccggaagc

SEQ ID NO: 468606 - DNA, 122 bp, Homo sapiens
cctcaggccccgattctcgctcaccttccgggtcggagcctggaagctacgtctcagatccgccttcccgctgacctcgatcctgcgccgttaaatccaccaagtccccctccctcctttcc

SEQ ID NO: 468607 - DNA, 122 bp, Homo sapiens
ttggggggcccggagccggggccggactaggggaccgagttgggggtcagagaccgagtccgagccggcggctggagctggggacgtagacctaggccgagccggagcgaagagaaatcccg

SEQ ID NO: 468608 - DNA, 122 bp, Homo sapiens
accatcctccctcctgagagctcattcactccgccccgcccgcctcgcctagtctggtctcgccccatgcccttgactcccctggatgctgtactgtctgccaagccagccccaggggctga

SEQ ID NO: 468609 - DNA, 122 bp, Homo sapiens
cgcctgaccacggcgactggacttacgaggagcagtttaagcaggtgagtgggcgcgtcccgcgtggcggctgaggcacctgctcctgggccagtggggccctttgaaggcccacgttgcac

SEQ ID NO: 468610 - DNA, 122 bp, Homo sapiens
gagaaaaggggcggggcgtgcccaatccggccgaggagcgttaccatggcaaccgtgccgcggaggccttgagaggccacacgccctatgttggtctgcgagaaatcaaacttcgaacagga

SEQ ID NO: 468611 - DNA, 122 bp, Homo sapiens
cttcctttttaaaggaaggagcaggaatgttaacctacacagaaaaaaaaaatgctttcacgctcttgatttactctaggtgggcttcaaatgcgcggttagcgctttctgtagagcgttga

SEQ ID NO: 468612 - DNA, 122 bp, Homo sapiens
aacctcgtactccttccgctgctccagggccttatgaatccatttcagcctctttttgtccgagagctgagaccactgcttccccagggagtccttcacctccttcgtagtggcctgcaaac

SEQ ID NO: 468613 - DNA, 122 bp, Homo sapiens
gctgctcctcagggctcaggatcttcagtcaggcaaaggctccccaagttccaggggtgccgtcctggactcctgagcctgcccgcctgcctccgcaggtcctgtctgtgcgagtgggagtg

SEQ ID NO: 468614 - DNA, 122 bp, Homo sapiens
gctagaccctggaaacattacgctgcgtgaaagacgccagacaccaaaggacagaatgtacgattccacttagaggacatagctagaggaggcgccttcactaactagttaggtgtctaact

SEQ ID NO: 468615 - DNA, 122 bp, Homo sapiens
ctgggaagcgcctctgcctccgaccctagccggaaccccttcggggccagagtttgaagccgtggatgtgcctgcctggtggcttgtccgatttgcacggtgacttgattacactctctcat

SEQ ID NO: 468616 - DNA, 122 bp, Homo sapiens
tcccgagccaggcagagggccaccaacccctcgactcaccttgatcttcatggtgctgggcgccagggcggtgatctccttctgcatcctgtcggcaatgcccgggtacatggtggtgccgc

SEQ ID NO: 468617 - DNA, 122 bp, Homo sapiens
cccgggactaggaggggctcggggccaggccggagccgtggtaggctggtgcagcggctgcgcggcgcggcgcggcgcggggcgggcgtgctctccgcggagagttagaggagttgccgagc

SEQ ID NO: 468618 - DNA, 122 bp, Homo sapiens
gccccctccccgggcggcggggcggggcccaggtcggcggggagggggtcggctctgcggcggcgcgcgcacaccctcccggctcacacgcccttgcccggccgtgcacttgtcttcgcgct

SEQ ID NO: 468619 - DNA, 122 bp, Homo sapiens
aaataattcatttagtgcctgccattctgattacactagaaatttagttctcctgctcagcgttctgttatgtgactgttcaatgcattacttaaaactgcaagattgaatagagagatcag

SEQ ID NO: 468620 - DNA, 122 bp, Homo sapiens
gggctcttggggtgggggcgcgcggcggcgcctgcagggcgaggggcgggggaggcaggacgtcccgagccatgcttggtcgtccagctcttctaagcctccctgcccgcctccccgatgct

SEQ ID NO: 468621 - DNA, 122 bp, Homo sapiens
accggcgcgtcgccggctcattgtgtccgccattttggggcgacaggcagaagctgagggcgaggagcctcagccgcggcgcacgccgggaaagggggcggggcgggaacggcggagcaagg

SEQ ID NO: 468622 - DNA, 122 bp, Homo sapiens
cacgcactcgggcctctggaggatctgctgcctggaaggtagggtgcgggcggccctccccgcagcccccgccgctcccctccgagagaccctgagcctcccggggctgcctgtccctgatc

SEQ ID NO: 468623 - DNA, 122 bp, Homo sapiens
gtcacacgggggagccctgcattccgagtcacacgggggagccctgcattccgagtcacacgggggagccctgcattccgagtcacacaggggactggctcccagcttggccactttctgac

SEQ ID NO: 468624 - DNA, 122 bp, Homo sapiens
aatgctggtcagagcctgggcttcaattctaggtgcacgtcttacaaactgtgtgacccacgcaagatatcctctctttgccttggttttcttgtcagtcatctgagaataacaacagtgcc

SEQ ID NO: 468625 - DNA, 122 bp, Homo sapiens
ttgagaacagtgcagagctcattgatgtagacatagagcttggctggccggctccgggcccgagacaggaccctagagaggatgttgcagaactccgccgaggccaaaaacagagagtgggc

SEQ ID NO: 468626 - DNA, 122 bp, Homo sapiens
gcaccgcgcggcgcccggatccggagctgccagcagcagaagggcaggcgctaggaaaagcgtgaaaagggctgggtcctttgggtcaggatttgccctgcgaccggaggatggggcgcacg

SEQ ID NO: 468627 - DNA, 122 bp, Homo sapiens
atataggcaactcactagcaaatgtctcatatggaagcatagtcacttacacttgtgacccggacccagaggaaggagtgaacttcatccttattggagagagcactctccgttgtacagtt

SEQ ID NO: 468628 - DNA, 122 bp, Homo sapiens
cgagcaggcttgggacctgcagcccgccatgcctgaacctccccccgccccaggctcctgcgcagcccgagcctccaagacgagcgccgctcctggctccacggcgcccagtcccatccacc

SEQ ID NO: 468629 - DNA, 122 bp, Homo sapiens
actggggcacttggctgggctggaggggcacctggaggtgtcccacagtgaggggcgtggcgggctgcttgctggggtcgatctgaaactggagaacggtcacgtccgagttcttactctca

SEQ ID NO: 468630 - DNA, 122 bp, Homo sapiens
agggtggggtggaattgggagcgagagcccagtggcatattgggtgggttgactagatgtcgaagaaaggtcagtgaaaagtggccactgtttccagatgatggtttgactttgctttattt

SEQ ID NO: 468631 - DNA, 122 bp, Homo sapiens
gtatctgtgcaatagggacagtaagagcgcacccggcgagggtggctgggatgcctgcagcgcccaggagaaggtgccacacagcccggggctcagcactcgcaggcaccggagcaaggcac

SEQ ID NO: 468632 - DNA, 122 bp, Homo sapiens
caattcaagcgagaatggggccgcagtgtgacgtgggtgaactgcagttactcagggggacgttgaggcaggcagaggggagaagtagttataccgcagggaatgctaggagtctcccaaaa

SEQ ID NO: 468633 - DNA, 122 bp, Homo sapiens
acttgccgcagccgcagccgcagccgcagccgaagccgaagccgaagccaaagccaaagccgaaaccgaaaccgaagccaaagccgaaggcgaaaccgaagccaaacggaagccaaagccga

SEQ ID NO: 468634 - DNA, 122 bp, Homo sapiens
aatttgaccaattgcttgctccttcctcgtggaaacacattcttcatgtggcatcaaggacgccactctcttgattctacctatttcactaactgttccttttcagactcctttcctagatg

SEQ ID NO: 468635 - DNA, 122 bp, Homo sapiens
ccacttcctccccaaatatacagcccataactaaacaaccaaaacaaccaaagcatcagccgggcccctgcactgaccgcagacgcccccaacacacgccaccacgccacactgcgccggga

SEQ ID NO: 468636 - DNA, 122 bp, Homo sapiens
cggctggaggagcgcagtgggaactgggaagagctagcccggctggagggcggacctctgcgtccgggagccgggtctcaggcaccgctgggggcgaagccacgcgtcttttcgggcagcca

SEQ ID NO: 468637 - DNA, 122 bp, Homo sapiens
aaaccctgcccagtagcagtggcatcgcttggttcctgatgcccatgttccagaggaattcggataccacaaacagctaagacaatctcagcttttcttagacaatcttctatctcaaactt

SEQ ID NO: 468638 - DNA, 122 bp, Homo sapiens
ggaaaaaaattaaaaatcagatgaaagaaaataaagcagtggagacctccagaaggtgcccgccccacagaatagtagtcagagtggtgctgtggttacaatgtgcttcctggggtgatgac

SEQ ID NO: 468639 - DNA, 122 bp, Homo sapiens
aaaaaattaagaaaaccaaaacgcaaccaaggcgaattcaattgcatttttttttcccagcgacactttctgagacacgaacctctctcttcggcgaacctattccagggcgcccttcattt

SEQ ID NO: 468640 - DNA, 122 bp, Homo sapiens
ggctgggaggggctgcatgctgtgtgctcaggtcacactggaaggcatcagctgggtccccgcgcttgctctcggacctctgcaggcctcctgggaaggtgactcagatccaacttctagga

SEQ ID NO: 468641 - DNA, 122 bp, Homo sapiens
gtaaagggccccggtgagggaggcagagaaggagggggtgtctcccaagagagggtgggtcgccagctccaatctctgtctctgagactggctaggaatcttttttgctgtttcctctgaga

SEQ ID NO: 468642 - DNA, 122 bp, Homo sapiens
atcatttgacctcggaaacaggagaaacggaagcacaggccaaggagggagccgaggggccgcgtgacactgcacgggatcgctgcccttcccacacgcacgttctgtctcacgcagttgct

SEQ ID NO: 468643 - DNA, 122 bp, Homo sapiens
cccagtcacttgtggatggcctcaatgcatccagtccatcggggctgcggcaatactggtcgaggaaagcaggaagttaacctttggaggaaaattgacggtaagcacgcctcaccaagtta

SEQ ID NO: 468644 - DNA, 122 bp, Homo sapiens
ccacctgcgccgtaagcccagagttgggctggaaccgggtccccactcctcgctgccgggcggaaagcaggagaccgctccgccgccacagcccgtgcggacaacacaaacattcttcagtc

SEQ ID NO: 468645 - DNA, 122 bp, Homo sapiens
ttgttgcctgcttctgtgtctctgccagcctgtgatcattttgtgttagagtttgaaatccgctgtttgcctttcttactggtaggatccttttttgttcctcttttttttttttttttttt

SEQ ID NO: 468646 - DNA, 122 bp, Homo sapiens
cttctgcgacctcccggccgtgctggtgctggcctgcgggtgccgggccctgcaggagcgcgtcctcctggtggcctgcctgctgctgctggtgctacccctgctcctcatcctgctctcct

SEQ ID NO: 468647 - DNA, 122 bp, Homo sapiens
tggtgggggagcggggatacctactgaaaaacactggaggcaaaactggcagcaagagaccgttacttctaaacgtggacagtctttttcccatgttcaccctaggctgcaggggacagcgc

SEQ ID NO: 468648 - DNA, 122 bp, Homo sapiens
ccctgaccgcgctgcgtctgtctgtcccgcgggtctggagatcttcaaacgatggaacaccggctttgcccttctgagggtctccatcccttggcattctgcctgcgcccctcagcctggcc

SEQ ID NO: 468649 - DNA, 122 bp, Homo sapiens
aaacccatttgaaatgtcgctgtgaaaaccaaaagaaaagcaagggacagagccccacggcgccgcgctggcccctgccacagacccagccctgtcctcatcaattctcgctaccacgaaag

SEQ ID NO: 468650 - DNA, 122 bp, Homo sapiens
aaagccagacctcagttagggactaggtcttttaagactgcagaagacaggagaggaggccgggtgacattattctgaagacagctgaagcgccatgtctgtctatagctgacccataaaat

SEQ ID NO: 468651 - DNA, 122 bp, Homo sapiens
actgctgggctggaggagggctcgagctgcgaggacggcacggagcagcggggtgggactcggggtcgccccaggagagttccgcggcccgggggggcagaggcatgcacaagtggggggcg

SEQ ID NO: 468652 - DNA, 122 bp, Homo sapiens
gggagtgccagaggccttttcccctgcccaagctctgggatctccgggcagcctccattccgccgactctccaggccttccccggctccggagctccagagcttccatgactttgggccgct

SEQ ID NO: 468653 - DNA, 122 bp, Homo sapiens
gtctgggagaagaagggggactccggaagacagtgatgcggtcggagattgtgcaggccccgggccgggaagtgggcggtgtctgggtgggcgggaccagcgccggggcggggctacggact

SEQ ID NO: 468654 - DNA, 122 bp, Homo sapiens
ttcccagacgggtcggcggccggacagaggcgctcatcacttctcagatggtgaggaggccgggcagaggcgctcctcacttcccagacggtgggtcggccaggcagaggcgctcatcactt

SEQ ID NO: 468655 - DNA, 122 bp, Homo sapiens
tgccctgactttagccgggacccgaagcccccgccgccctcctgccagctcttggtctaacgttcggccctcggtggctcagcccccgcgccactgcctgcccggtgcacctgccccctcct

SEQ ID NO: 468656 - DNA, 122 bp, Homo sapiens
gccgtccgggacgcgcgcgcgctcctctccccttccagcccatcccccccagccccccaccgacctactttactgtctccaaactcgggcagcccacctggcccccgacgaccccagcccct

SEQ ID NO: 468657 - DNA, 122 bp, Homo sapiens
ctacagcaagcagggggagcccctgtgggtgaattaggcaggatgggtggggtggtggtgcgggtactgcaatgaccagtgactccccctggtggagccaagtggtagggcacttaggaaat

SEQ ID NO: 468658 - DNA, 122 bp, Homo sapiens
aggacccgggcagggctggagctgggctgggatcccgagctcggcagcagcgcagcgggccggcccacctgctggtgccctggaggctctgagccccggcggcgcccgggcccacgcggaac

SEQ ID NO: 468659 - DNA, 122 bp, Homo sapiens
aaactaacatgctggcaggcggtgcgcctcaaggatgagtgcctcagcgacttcaagcagcggctcatcaacaaggccaacctcatccaggcccgctttgagaaggtgccaccagggccttt

SEQ ID NO: 468660 - DNA, 122 bp, Homo sapiens
cgcgttcccgggggtctcggtggcgggagccgccttcttgtgggacttgggggcacgtggcgcggggcggggacgcggacagacccctcccgcatcctaggaggcctgggagggtccgcggg

SEQ ID NO: 468661 - DNA, 122 bp, Homo sapiens
aaaatccacatataactttgaactcatcaaaaccttaactactaatagcctactcttgaccggaaaccttactgataacataataaacagttgattaacacacattttgtgttgtatgtatt

SEQ ID NO: 468662 - DNA, 122 bp, Homo sapiens
cagagcagggtccctggtgccactagagagagaaggccaaggtggccagctaaagatgggcggctcccaaatccagtcaggctgcaggggtcaatccgcctcccttggccccagctcaaaca

SEQ ID NO: 468663 - DNA, 122 bp, Homo sapiens
aatttcagggccctggggcaaagtggaaatgcaggcctctcattcaaaaatgttcaacgtcgccctacagcaacagcagagcattcaaccgggctgagggtggtgcccgtgacctgtgccca

SEQ ID NO: 468664 - DNA, 122 bp, Homo sapiens
cacagaaggagggggaagggcagggtctaccaggggaaaccaaggcacagcagcatttcccgcgatgaagtgtgtgttttgacctcacagaccagcgtttgaaagcccctggagtggatgac

SEQ ID NO: 468665 - DNA, 122 bp, Homo sapiens
ccagcccggcctccgctccggccgccgccaccgcccctgttttgtttccatggcgacaggcggcgcagggcccgctccaaacataacgcgctgtggaaaacatgctgctcgggggacccccc

SEQ ID NO: 468666 - DNA, 122 bp, Homo sapiens
cactccagggcttctctgagcccgcagccggccagctcagcggcccggggttggaaggaacgcaacatccatgcctgcctggcggtctcagcctctgaggagacgacacagggagctttgga

SEQ ID NO: 468667 - DNA, 122 bp, Homo sapiens
aaaccgaaaaacaaaaaacacacaaacaaaaaaagtaacgtcaagaaccgcaactgctttcgcaccaacctaatacctacaagaatgcctattgggtggtccatgctgggcactgtaatttc

SEQ ID NO: 468668 - DNA, 122 bp, Homo sapiens
tgtggttcttggagaaagttggaggtggtggtgatttcagtcgccttggccgccttgagccggagctgagcggaggcactgggccgagcctgcttcccgggccttcctaccatgccagggct

SEQ ID NO: 468669 - DNA, 122 bp, Homo sapiens
tgcttctcccctcctccctggcattctcatgcatacagtcaggccactaagggaaccagtcgcatcagattatgttttcttagctaagacccttatcttttctgggtcttggtttcttcatc

SEQ ID NO: 468670 - DNA, 122 bp, Homo sapiens
tgctgctgcggtgttaggtgagttcaggccgccgccatcgcttctcaagcgcaccagccgcgccccgccccgcgccacacgcagcccgcgcccccgcgcaccacacgcaaccgcccggcgtc

SEQ ID NO: 468671 - DNA, 122 bp, Homo sapiens
ctggcacctgcaaaggccagacagcggtgtcaacactgctggcagatttaaaatcaccgtcgcaatactgaagctgggtcagggagctgaggtaggccaggctggaaaggcttggagaggtt

SEQ ID NO: 468672 - DNA, 122 bp, Homo sapiens
cgggagctggaggttctgcgggagcagctggccacggccagggccacgggggagcagcagcgcacggcggccgcggaactgggccgggcacgggacgccgctgaggcccgagtggctgagct

SEQ ID NO: 468673 - DNA, 122 bp, Homo sapiens
taatcctgaggatcagaaatttatttaagactctagggtcaggaatagtggcccatgcctcgcctgtaatcccagcactttgggaggccaaggcaggcagaatgcttgagctcaggtgttcg

SEQ ID NO: 468674 - DNA, 122 bp, Homo sapiens
ttcatggaaatcttggaagtgagaagttttatgtaaagtgagctttagagactgtgtggccgtagcattgctgatttgtgggctgcagaagtatttcttgtaggctgccctttaacattttt

SEQ ID NO: 468675 - DNA, 122 bp, Homo sapiens
gtgaatcataattaggagtttgaggaacgctcctgcggaagccttggagagtgattctggcgccaccgcctgcttggggccgcccgcagggagggagtcggggtgggcgcgtgtccgcggga

SEQ ID NO: 468676 - DNA, 122 bp, Homo sapiens
taaccagttcctgtcgcaagtggactttgagctgctgctggcccacgcgcgggagctgggcgtgctcgtgttcgagaactcggccaagcggctcatggtggtgaccccggccgggcacagcg

SEQ ID NO: 468677 - DNA, 122 bp, Homo sapiens
tctgggcgctaattgggcggagggcggtggcgctctggcacgcttgcgcggcgagtagaacgtgtggcggcggcggagatcgcgtctctttcgctccgtgtcccgctgctgctcctgtgagc

SEQ ID NO: 468678 - DNA, 122 bp, Homo sapiens
tcacgctttcgggggccggagaaaggtgagcaaccgtcccccttgcagagggcaaagaaacgtggaatccgaaatcacgcttcagtcgtcctgagtgactcctgtgtggatgggactatcct

SEQ ID NO: 468679 - DNA, 122 bp, Homo sapiens
aacacaccccgacttgctgcgggacctgggcgttttctctgaaactgttaacgatcgtgccgtctggccgcgaaaggaacacccaaaccaagaaagcgaaacacctaacagaaaatccatct

SEQ ID NO: 468680 - DNA, 122 bp, Homo sapiens
acaaaggcgtgagcacagatggagaccataatccaggctcagtcaacatgcaacggtacccggaacagacagggatgcgtccacaccacaaaggctaaaaaagatgattaaatggaagaaaa

SEQ ID NO: 468681 - DNA, 122 bp, Homo sapiens
agagagaagatgtttggaattgttctaataggctaagtgattccaaatgcaagtccatatcgcagactcctaggctctttgtgagactaattgactttgctgtagagttttggcaaagctct

SEQ ID NO: 468682 - DNA, 122 bp, Homo sapiens
acgccatctccctgggttagagactgcacagtgtcctcgccctggactgccacggggactcggtaggctggagagccatcagggttcgtcacgaacacctgtgatgtggggtgcaggtgggg

SEQ ID NO: 468683 - DNA, 122 bp, Homo sapiens
tgtgctcgtattgcgtatggaagccacaactctgccaaagccacaatttaataggtacttcgttctgagtgatgacaggtaattattttgccatcacaggctacgatctattagaactccat

SEQ ID NO: 468684 - DNA, 122 bp, Homo sapiens
ggatctgaccgcgggctctgcccaggaagaccgagttccttgagagcgacacctaagcgccggggaagacagggatagaagagacgacagccctttgataagagggtttttagactaacttc

SEQ ID NO: 468685 - DNA, 122 bp, Homo sapiens
cctaaagagatcattattgttacgacatagaaaaacctagccttgcagctgaggctgcaccgtgcaggcagagaccgtcgaggaacccacagcagaattggccatgggtgaaggctgagtct

SEQ ID NO: 468686 - DNA, 122 bp, Homo sapiens
acgcactccaagatctaaaccgagaatcgaaactaagctggggtccatggagcctgcacccgcccgatctccgaggccccagcaggaccccgcccggccccaggagcccaccatgcctcccc

SEQ ID NO: 468687 - DNA, 122 bp, Homo sapiens
gaagctgcagttctgccatcactcaagatggctgcccccatcaagatgaccggggtgtgccggggggaaaggggcagcatgatggtctgagatggtaagggatactgcaccattgcgggcct

SEQ ID NO: 468688 - DNA, 122 bp, Homo sapiens
cgcggctgaggagctgcccgagcctgcccctctgctccccagcagccacccgggcgttcgcgctcgggaaagcggtctctggcgcaccctctgccagttctcccacgcccctcggctgcccc

SEQ ID NO: 468689 - DNA, 122 bp, Homo sapiens
ttgggagggaacaaaaatgtgtccctctgaaatactcatcttctcaattagaggtgaccacgtgacccaggtctggccaaggaaatgtaggtgaaaagctcagagataatgttttctagata

SEQ ID NO: 468690 - DNA, 122 bp, Homo sapiens
acgtgggatgccaggaacgggccgggtgaggccggggtccctgcactcctttgctgggcgcgcctggaccgaactgaagggcccgggcgccgcgacctcgcagccgggggcgggatggtggc

SEQ ID NO: 468691 - DNA, 122 bp, Homo sapiens
gcggcggcggaggcaggagcagcctgggcgggtcgcagggtctccgcgggcgcaggaaggcgagcagaggtgggttcgggctccgttggctatgcatacatctccctttttttttttttaat

SEQ ID NO: 468692 - DNA, 122 bp, Homo sapiens
aaaaaaaaaaacttccttttgcgggtggcggcgaacgcggagagcacgccatgaaggcctcgggcacgctacgagagtacaaggtagtgggtcgctgcctgcccacccccaaatgccacacg

SEQ ID NO: 468693 - DNA, 122 bp, Homo sapiens
aagaaaaacagcagtgccacgaataccagtcataaaggcatcttcaccacaaagaggcttcggtgcacaggcttcaggaagtgagaccaactcctcccacaaatgtgacactacttaccaat

SEQ ID NO: 468694 - DNA, 122 bp, Homo sapiens
aagacagtcttctcagttggccgggacacataacattccacctccttgatgcaggggtagcggttacactcatacaaccctgggacactaaagccatagagaaaatattggccaaccaggaa

SEQ ID NO: 468695 - DNA, 122 bp, Homo sapiens
cgacgcggccgctcgtaagtgctccggatggaaactggtgcagggggcagcggcgttccgcggccggaagggaagggggaggtgccgaggctgcgcgccggctgctcctccccacccccagc

SEQ ID NO: 468696 - DNA, 122 bp, Homo sapiens
tgaggggatgtgggtctggtgggctagcagggtgcctgtagcgagtcagagccccatgagcgccctggagttggaaaggtggaggcaggaacagacagacccattcaggggctgccctgcct

SEQ ID NO: 468697 - DNA, 122 bp, Homo sapiens
cgtgcgctcccgccctggaggagtgggattggttctttcaaccatcaattgccttaggagcgcttctcattggcgtcagtcaagcgcggggcaggggcggagcaccggcaggcaggctccgt

SEQ ID NO: 468698 - DNA, 122 bp, Homo sapiens
ctcaacggcacgggaaattaacctgcttgttctcacgttaaatgctttatgaaaattcaccgggcgcaaaaagagggaagaaaacccaagtggttgtgcagtgcgcctgcctggcaccagtg

SEQ ID NO: 468699 - DNA, 122 bp, Homo sapiens
ctacagaaccaggatatctgcagctacggctgtacttgttaaaaatcacctcaggccgggcgcggtggctcagatccgcaatcccagcattttgggaggccgaggcgcatgaaccggggagg

SEQ ID NO: 468700 - DNA, 122 bp, Homo sapiens
acaggcgtgagccaccgcgcccggccgagatttgcctttatttttattttatttttgagacggaatttaactcttgtcaccaggctggattgcaatggcatgatcttggctcactgcaacct

SEQ ID NO: 468701 - DNA, 122 bp, Homo sapiens
tcagtctgtgagagtgtttcaggcaaatcctgctgagggttcggctttcgttttctgagacgtaaacctaatgctggaactagccctttcttatttggtttctagcttggaacttgctgctt

SEQ ID NO: 468702 - DNA, 122 bp, Homo sapiens
gtccagcattcacttcccacccttcagagtcgccttcccatcctccgcacccccctgcctcgcctcccagtgagtttctcttacagttggtcgccgccagccccagcggtgggaactgagga

SEQ ID NO: 468703 - DNA, 122 bp, Homo sapiens
cccgccaagggcccgctgcacctattcccgcagacgcgcagctgtaccggcctcagaccacgacctaccacaacccgccacgctccgtccaatcagagcgcgccgacggaaagtgccccgcc

SEQ ID NO: 468704 - DNA, 122 bp, Homo sapiens
cccgtccgaccccgccttacacacgcccacctgaagaagcgcatgcgcaagggactgctccggcgaccctcccggacgccagttccctacgctgccaacgttcggcctccagaacggcggtt

SEQ ID NO: 468705 - DNA, 122 bp, Homo sapiens
cgcggggccgtccgcgtctgcgcctgcgcgcaagagaggcggggccagcgctcggcatggcggagccagatctggagtgcgagcagatccgtctgaagtgtattcgtaaggagggcttcttc

SEQ ID NO: 468706 - DNA, 122 bp, Homo sapiens
gaggtttgatttaatctgtcctcctccctctgagccggctggctgcttaaatagtttgctcgctttgccttgtttttcttgctctagtgtggactctttcccctaccccgcaaaccttggtt

SEQ ID NO: 468707 - DNA, 122 bp, Homo sapiens
cgcctgggaccccgatcatcatccaaccctcgcctgggaccccggtcatcatcagcattacgccaggatgatcgctcatcatcagcgcctcctcgcctcggcccccggtcatcatccatccc

SEQ ID NO: 468708 - DNA, 122 bp, Homo sapiens
aggtctgtgaggagggcagccccgtgctcccgtggccaccgctcagccaaatggattcagcgagggtttttagtgtttgtgcctgtgtccccgtgtgcctgtttcctggtgaggctggatgc

SEQ ID NO: 468709 - DNA, 122 bp, Homo sapiens
tgtattttactttagaataatcaatgccgttaataattgtaggcagttcataatataaaacgttttcaagcaagggcaggtttggggaggaaggccttgaggaagattcattatatagtaag

SEQ ID NO: 468710 - DNA, 122 bp, Homo sapiens
atcctcctctcctatgccttcatcgtggccgacatcttgaagatcccttctgctgaaggtcggaacaaggccttctccacctgtgcctctcaccttattgtggtcattgtgcactatggctt

SEQ ID NO: 468711 - DNA, 122 bp, Homo sapiens
gttaaatgcatttagaaatccatagtactgattaaaggtagcaaccaccctaccctccagcgtccaggctgcgcttacatagctctcagcacaaaccgccgccctcagggggttgtgcctgc

SEQ ID NO: 468712 - DNA, 122 bp, Homo sapiens
tggcgttgcaggcaggatggggtggaggacgaggcctggcccagccaccgaccactccctcggcccgcaggtaccacacaggctccctggcctttggcgcgctcatcctggccattgtgcag

SEQ ID NO: 468713 - DNA, 122 bp, Homo sapiens
gctcctgctgcacctcctgctgcccgccgcagccttcctgctggtgctcctgcccgcggccgccgtcgtctacctgggattcctgtgccactcgagggtgagcctgtgccccgtgggcgggg

SEQ ID NO: 468714 - DNA, 122 bp, Homo sapiens
ctccacctttggttttgggggagtctctaagtgcccaaaagtttccctcgcaaatttgcacgtctaccactagatggcagcagaggacacagcaagtgagaacactccgaggcgcgtgcagc

SEQ ID NO: 468715 - DNA, 122 bp, Homo sapiens
cccctccttttctcattgccctggagacctgggtgatcaccggagaactgccctcggccccgcaagtcccgtcttgactcagtggccctagatccgaggttaaaccggaacctaggctttct

SEQ ID NO: 468716 - DNA, 122 bp, Homo sapiens
ccgagaagcgtctcgtgtcgaatttggcccccgcgccgagccggcgaaagagatcgtggacgtccatctttacccagaaagcgccacagttctacggcgcctgcgcagactacttcccaggc

SEQ ID NO: 468717 - DNA, 122 bp, Homo sapiens
aatccattccaggtagctcggcaccaactaagaaaaaaagcacaaagttctcagagctctcgaggaaagtggttgtccccgtaccaccatgcactgtaaatatccctcccctctctccctgg

SEQ ID NO: 468718 - DNA, 122 bp, Homo sapiens
aaaactcattgccggacatcgagttactcactttgatttgttttctttggaagaagcggccggcggcggcggcagcgccccaagctgggtcattaacatggcagcaacagcaacaaagacct

SEQ ID NO: 468719 - DNA, 122 bp, Homo sapiens
gacatctgttttcacaatgtggggctccttgtgcttgagagtgggcaccagggctgggagcgggagggggagctgctcgcgcaggctggggctcaccttgaagagctggacgccgatgcagg

SEQ ID NO: 468720 - DNA, 122 bp, Homo sapiens
acctctgggcccgtcccggcgaggttgctgagcacagtccagcacggtggagccagtggccgagggaggaggctggggagggaagggaccttcgcagctcttccaggagagtttggatctta

SEQ ID NO: 468721 - DNA, 122 bp, Homo sapiens
gagcagtggggcccgggttctgcccgcctcttcctctgactgtttcctcatctggggtcacgggataagtgcagctccgcctccctggtcatgcaggtgactgtgaatgaaagtgtcttgga

SEQ ID NO: 468722 - DNA, 122 bp, Homo sapiens
ccaaattaccccagcttccaaaaggttgagaaatgctgtgtagctaatgcccccctgaaacgcctgcacctgtatacaggtgcagtgaacatgcctgtgtacacccgctccagcgcacacac

SEQ ID NO: 468723 - DNA, 122 bp, Homo sapiens
tactgtgtgaagctgtgcacctcaggggattctggtgagccaaagacagtggcatggggacgtttcctagggaaacttcctggaatctgattccaggactgggcccctggcccttttcctga

SEQ ID NO: 468724 - DNA, 122 bp, Homo sapiens
taaatgtagctcttcattatcccctctagggaagtgactgtcacaaaaacacacctgggccgataataaatgacttcaattatgtgatctaaatcatgaaccccacgcttgcgacagaacat

SEQ ID NO: 468725 - DNA, 122 bp, Homo sapiens
gccctgtctctacccacagaaacagactctgcccaaacaagtcctgcaatgcacagagcccggtggcaaacaagccacctggataaatggtgcccaaggctgtgggggtcctgggaggctga

SEQ ID NO: 468726 - DNA, 122 bp, Homo sapiens
ttctagcgtctcggctctggactaccaagttccggagcaagcagacagaccacctctttacgttcccgtaggccacgctccgggggcggggctccagtgaggatactgcatcccatggtgcc

SEQ ID NO: 468727 - DNA, 122 bp, Homo sapiens
ctgggacaggtgacaggcaagggcgtggagtctgttctatagtcgctgcctgccaggcaccgaactgcttacccccgtctttgaactcctcgcgcaggtagacccagcgctgggcgcacgtt

SEQ ID NO: 468728 - DNA, 122 bp, Homo sapiens
gacagtgagcccctcagtgaggcggctcaggcacacacccgagagctgggccgtgagaaccggcgactgcaggacttggccactcagctgcaggagaaacaccaccgcatctcattggaggt

SEQ ID NO: 468729 - DNA, 122 bp, Homo sapiens
cccctccgtcccccgcccccggcacagtccacagctgggtcagcagctgcctccgccggacgcagctgaccaggcccttcccgaccaggcgcctctaagtggcagatccccgagggggcggg

SEQ ID NO: 468730 - DNA, 122 bp, Homo sapiens
tgaaaacagatggcacacaaagactcccatgggaacggcccggcagcaagctggtgacagcgagcctccatcgccgggaaacagagctgcaggtgttcaggcaggggacgggttcagcagtg

SEQ ID NO: 468731 - DNA, 122 bp, Homo sapiens
gcatctctcgcgtgctcttgcttgcgcactaatttgtcctccaccgcctcccgttcaggccggctctcctgcggggcggggaaaggggtgggaagaggctgggagctgcggccgctgtgcca

SEQ ID NO: 468732 - DNA, 122 bp, Homo sapiens
aaaatgagaccgattgttgaagagttgtctaggatccttatgtgactggtaaccagcaaacgctgaaggccccggtcgttggacgtcagcaggctgtgccaggctgtgcactggtgaaattg

SEQ ID NO: 468733 - DNA, 122 bp, Homo sapiens
ctgggaagccccatgcttcccggccggagggcgagagccaagtgagcagctcgaggctgccgggggctgacgtcaggggggcgggggagggggcccggagcgcccgggcccgccccgccccg

SEQ ID NO: 468734 - DNA, 122 bp, Homo sapiens
gggcaaagcagtggggagtggaactgagtgaccccctccctggagtctctcccgcctccccgagtccctgtgcatggcagttttggggatctgaatccgccttctgtcccacacccaactcc

SEQ ID NO: 468735 - DNA, 122 bp, Homo sapiens
tcgggttgagtgtgaggaatccacctccccacccccaccccggcccacgccttccttccccgacgccccttctgggccttttgggttcctgtctcaactttgagttgcctatacatcttttt

SEQ ID NO: 468736 - DNA, 122 bp, Homo sapiens
aaccagagtcctgcatccttgtcccgaggccacaggctttgctgttttactcagtgaccccgggcaagctccttgacccccacgggcctccgtcaactcagctggaaaattgggtaaaaaga

SEQ ID NO: 468737 - DNA, 122 bp, Homo sapiens
gggaaagaaggaccttccgggcccataaggcgggaggcaaggagggcccctgggcagccccgcgcttgcgcgccaatcacggccgttatggatttcgatacgttaccaaacggtctcctaca

SEQ ID NO: 468738 - DNA, 122 bp, Homo sapiens
agacaaaccgatggctttgtgtcaaaccaaggccgccttcctcacctctgataagatggacgccttctgtcttcgcgttttcaggcacccggggaagacccacagaacaggctagcttgttc

SEQ ID NO: 468739 - DNA, 122 bp, Homo sapiens
attgccagcagtttggcagtgggaaagccagcttttggcttccagacaggaaaagcaaggcgtgctgaccacacacagcctgcacctcagtgaccctctggccagaggctgccttaggattc

SEQ ID NO: 468740 - DNA, 122 bp, Homo sapiens
gaattccatctgtcctgcagtaaacgatatacacagaaaaggatggtgggcaaagaggcacgttctatttagctgggctctggctcaagccccagtgtagagtcttgtgaactggagtagac

SEQ ID NO: 468741 - DNA, 122 bp, Homo sapiens
tgctgatccctgtgcgctgtggcccctgtgtccggggcactgtccttcggtgacaatgcccggcatgggaaacaatgcagacattgtcatggctggtcctggctcagcgtggggaaatgtaa

SEQ ID NO: 468742 - DNA, 122 bp, Homo sapiens
agggcgatgtttccagtgttgaggagaaagacgtgatggaaattaaagggacatgagcaccgactataacacatgctgatgccagcaaagactgcggcgccaggcgacggcaccgccctcag

SEQ ID NO: 468743 - DNA, 122 bp, Homo sapiens
gaagtgaaaacaatgagaggagaaaaattctgtgtgtcagttccatagtccccaggaggccgcataaagggaaggtctttttggacccattctgaggactgagtcattttcatgatttgagt

SEQ ID NO: 468744 - DNA, 122 bp, Homo sapiens
tgttatcatcatccttttgtgaatacaatatgcctgcagcagccagtatgcaaccatgatcgtctttgagaggaaaagtcttgtgctaaggatggcaggtcagaaagatggagccaatctgg

SEQ ID NO: 468745 - DNA, 122 bp, Homo sapiens
caggggggggcagaagggacgttgttctggtccctttaatcggggctttcgaaacagcttcgaagttatcaggaacacagacttcagggacatgacctttatctctgggtatgcgaggttgc

SEQ ID NO: 468746 - DNA, 122 bp, Homo sapiens
caatatcggaagacggatgaaatagagcgttatttctcgatatacagttaggcactcagccgtagatcttacagtcatgcatcatttaagatgacaggattacctcctgagaaatgtcttag

SEQ ID NO: 468747 - DNA, 122 bp, Homo sapiens
cttccaaagccgagccggctgcgctgtgcacgcggtcacgcgggctccggctgcgggaagcgagactgaggcaaggtccctgcaggctgcccacctacggccgaggccctgctctacggcat

SEQ ID NO: 468748 - DNA, 122 bp, Homo sapiens
cccggccatcaacaaacaatttaaactagacagcctggcatggtggcttacacttgtaatcgcagcactctgggaggctaaggtgggaggatcacttgagcccaggacagcctgggcaacat

SEQ ID NO: 468749 - DNA, 122 bp, Homo sapiens
ccagccgcggtcacacgcgggggcacgcaggacacccagccgcggtcacacgcgggggcacgcaggacacccaaccgcggacagacacgggggcacgcaggacacccagccgcggacagaca

SEQ ID NO: 468750 - DNA, 122 bp, Homo sapiens
ggatacatgtggctgccgtgagcctctagacgccctcccccacttccagcacttggctgacggatttgctggtctgtgacccctgccagaggcctgaaaatcttcgcagtttatgcaaagcc

SEQ ID NO: 468751 - DNA, 122 bp, Homo sapiens
ccgagcagtcggggagctcaggggggccctcccggggagagggtcgcgggctccttctgccgcttacctgtcgcgccgaggcaaagccgcagccgcgccgcggggtggctcccgggtttccc

SEQ ID NO: 468752 - DNA, 122 bp, Homo sapiens
acgtgccctctgggtgctgcggatgcacgctgaaggtagaagatcgctgcaggagatttccgcgtcgggcagatgaaagcgctctgcaagcccgggtgttatctgcgggccgggtccgcggc

SEQ ID NO: 468753 - DNA, 122 bp, Homo sapiens
cccatgtcactcaggatgaatggcttacccattggctatgcgctcgccactcaggtccggcgtgaactgtccattggtcggaatggcagtgattccctcctctgtcatctaggccggtagtg

SEQ ID NO: 468754 - DNA, 122 bp, Homo sapiens
ggaagctgaggcagaaggatcatttgagactagaatatggagcctgcagttagctgaggtcgtgccgccattgcactctggcctgatgacagtaagaccctgtctcaaaaaaaagaaaaata

SEQ ID NO: 468755 - DNA, 122 bp, Homo sapiens
tgcacagactggctctgtggctgctgggattatggggggtgatgtggtcccacacatcagcgctgctggcgctggtgaagctttggaaggggtgcttgggcaaggctgggactcgaaagaaa

SEQ ID NO: 468756 - DNA, 122 bp, Homo sapiens
gcctgcagggctccggggatgaaatgattcgtttgagtgttccagaaagggcaatccgaacgcttacagggcgaggccagtgcagcccagctccatcaccactaccaagccccagtttggga

SEQ ID NO: 468757 - DNA, 122 bp, Homo sapiens
tctgaggcattgacgtgcagatataagtacctcccctgagttagggactggtagaagaaacgggatgtggacatttcagtctgagaaagtcttgaggagcaggatgaaccagggtgtccttc

SEQ ID NO: 468758 - DNA, 122 bp, Homo sapiens
ggcaatggcaacaggggataaaagccgaaaggccagagaaaatctggcatgtcgtaagaacgagatggaaagcagatcatgaaatatgttcggtgcctcatcaaaaagcttagacttcatcc

SEQ ID NO: 468759 - DNA, 122 bp, Homo sapiens
cacagcacaccagaaactgaagcggggattgccccagcccttatctatgacagtcagccacgaagctttccaccgcagaacaatctccttcgcttgtttcctcatctgctgcagggaaggaa

SEQ ID NO: 468760 - DNA, 122 bp, Homo sapiens
agggccacgcagcggtggtggcagagttgaggacagagcccgggtaggcgaggcatggcgcgtcaggtgagataaagccaggcaagccaatgggagggaccgcgtgagtgggttgaggccaa

SEQ ID NO: 468761 - DNA, 122 bp, Homo sapiens
ggccgctgctggttgggagtagtggttgagctgagatgattatctgacccactaactgaccgaaccccaggacggaggttttgacttctctgtgtcaggagatggacagaatgatccttacc

SEQ ID NO: 468762 - DNA, 122 bp, Homo sapiens
cctaagagctgcaggcaacgtgatctgaattacatggaggacaagctccagctgactttccgtaaactcgcattaggattctaataggagacgacaggagcaggtggggataatgagctggc

SEQ ID NO: 468763 - DNA, 122 bp, Homo sapiens
tccgctcgcagaaggggcgggggccgcttccgagggccgggggaggtcgggactcaggtgcggagcggggtcggcccggagtaggttccccacccgcgccccgcgcgcccaggacgcgactc

SEQ ID NO: 468764 - DNA, 122 bp, Homo sapiens
tttctctcttcttctctaacttgggaaagaacttagtcttggggtgaacccaggcttgggcgccgcaggacctcttcccacggctctccactcctaccaggcactgcaaaaactgatccacc

SEQ ID NO: 468765 - DNA, 122 bp, Homo sapiens
ggagtccaagaccctgctcttttagagggtggggctaggagagcgtatttcgacgctgcccgccaacgaaccaatccccgcctaaagggggaggggatttaatctgtcgcctctccttccct

SEQ ID NO: 468766 - DNA, 122 bp, Homo sapiens
aacagtaccttaatttggcctgtatttattggacttggtgttctttttgctgtgagaagacggtgaaggtgattcttgaatgtttgttttctgtgttgcatcatgtttgtacaacacggtaa

SEQ ID NO: 468767 - DNA, 122 bp, Homo sapiens
ggcccgaagggaggaccccacagctctgggcgctctaggaggagaagccagaacccggagcgtttccagcgagttcccaggtgatactgatgctgctggagccagcacttcactttgagaac

SEQ ID NO: 468768 - DNA, 122 bp, Homo sapiens
gtggccagatgctgccctggccatgattcccctggctctaccatgcctggcctctgggggcgctctgactctcccgctagctgggcctggctgtggaaacctcacttcatcctgtgactgag

SEQ ID NO: 468769 - DNA, 122 bp, Homo sapiens
acaaagtgatctggcacagctgcagggtggcattgagtctgaggcttatggtgcagaagccgaagttaaagatgtttctagagcctgaagacttcctcttgagggtgagttgctgcctacaa

SEQ ID NO: 468770 - DNA, 122 bp, Homo sapiens
gaggccgggcagacgcaggtgtcccaggaccaaaatagcagtcagatgatcataaggccccgtggcagggcccccagggcaggctgctcacagctgctgcagctaaagataggcgtgaaggg

SEQ ID NO: 468771 - DNA, 122 bp, Homo sapiens
acagggatgtgttacaaattagtgctttttcatcttatttaacaccaaagccagggaatgcgagaggaaagtggccaaggcctgtcttcccggcaacttggagcacaaaagggatcctgccc

SEQ ID NO: 468772 - DNA, 122 bp, Homo sapiens
aatagctgtaaaattacacactcgcagctaatttgggtacgactcttggcatagcagccgcgttttaaggagaaataaacaaggcctgaaataaaagtcggcaggaatacaaatctgcagca

SEQ ID NO: 468773 - DNA, 122 bp, Homo sapiens
aactatgtgctataccatgaggaccataccacagaacacctgccccctttctgagttccacggaaaagaaaatatgaacagaggagtctttatgggtgattctggagcagaaatggagtctc

SEQ ID NO: 468774 - DNA, 122 bp, Homo sapiens
cgaggcggggccagggctgcgcgtggggctgggtgtcccattgaaaaggcggacgcactccggcagcccagcactctctcacttctggccagggaacgtggaaggcgcaccgacagggatcc

SEQ ID NO: 468775 - DNA, 122 bp, Homo sapiens
tttaccacccatttttttggaggcatagagatcttcattctcacagggatggcctatgaccgctatgtggccatttgcaagcccctgcactacaccattattatgagcaggcaaaagtgtaa

SEQ ID NO: 468776 - DNA, 122 bp, Homo sapiens
aggggcaccacacccctagagacacgcctctgcctcctgatagctgtgcccatcagacaccgtcaagctggcgtcctggtgctccctgcagcattctggccgagtggaaatccggcctctgc

SEQ ID NO: 468777 - DNA, 122 bp, Homo sapiens
gctggtgcagagggggtgctcccctgtgtccaaggctgccctggcgctggggctgctgggcgtctactgctaccgggcggccatcgggagtgtccggttcccgtggcggccggacagcaagg

SEQ ID NO: 468778 - DNA, 122 bp, Homo sapiens
ccaggaatatgaagctctcatgcactaagatcacacttgtgaatatcactgcactccagccgggtccaaacagcaagaccaactctctaaaaaaaaattacataataaaataatttaaaaaa

SEQ ID NO: 468779 - DNA, 122 bp, Homo sapiens
ggaaccctgagtgatacagctacaggtgctggctctgaggtaccaagagaaaagaaagcacgactccaagagcgatcgcggtctcagacacccctaagcacagcagctgcctcctcccagga

SEQ ID NO: 468780 - DNA, 122 bp, Homo sapiens
tcctgcttccacagagactgaaggttagctagacatgagcacttaaggtctttccttagccggtatacagccctgcacatgtgcgtggcctcctagagtctcaggaacatgtcacaactttt

SEQ ID NO: 468781 - DNA, 122 bp, Homo sapiens
tgggttacttttccttctaccttttaatttatatgaagtaaggtggagcgtgctggctcacgcctgtaatcccaagcactttgggaggctgaggtgggcagatcacttgaggtcaggagttt

SEQ ID NO: 468782 - DNA, 122 bp, Homo sapiens
tttacttgagtctttagcctgaagtagtctgtggaatgtaaaccaacccttctcccaccccgcccccaccctactccagaaaaaaaaaaaaaaacccgcaacggaaaaaaagtaatccgatt

SEQ ID NO: 468783 - DNA, 122 bp, Homo sapiens
caccccgggctcccacagagcccatgaagcgctggtcacagcccctggaagctgcagacccggcttttcgaggagcctccccgacgtgcagagcctgagaccccagagagcggccggctcgt

SEQ ID NO: 468784 - DNA, 122 bp, Homo sapiens
taaggctaaacagaggttccccttggcattaaatgtcttcttctgaaggcgactgaaactcgagaaatgaactccccgcctccccccttattttttggctattggcttgctgttgatgattc

SEQ ID NO: 468785 - DNA, 122 bp, Homo sapiens
ctaagagcttcgtcctggcacctgattggctctctttccagctccgcctccatctcctcccgccgcccgccccttggcgatcccacagcggcaggcagagcaaaatacgcaggcgcaggcgc

SEQ ID NO: 468786 - DNA, 122 bp, Homo sapiens
tcccaggtttgagggcggtcaggcggggtcaaggccaggcagcggggcgcgtctgcgttgcgcccgactctccgcggttacctgtgcctagaggtgatttgaagggcaggggccgagagatt

SEQ ID NO: 468787 - DNA, 122 bp, Homo sapiens
tcggtcagtgtgtgcgggattccgggcggcctcggcgcccaccagcaagcccctcacctccgcccagccccttcgcgtgccgccgcccgaccccagcccaagaggccccgccgcgccggcgc

SEQ ID NO: 468788 - DNA, 122 bp, Homo sapiens
aatgctggtgcaatttctaaaaataaacaaaaactgtatgggccaaataaaatatatacgcgagctgaattaggctagtggattactagtttgagaactcttatttagaaagatctgcctct

SEQ ID NO: 468789 - DNA, 122 bp, Homo sapiens
gagctgatgttgtgggattccaggtgggcctggttccgaatggacaggatcagacagagacggtcctatcccatgaagcagacaggccccagcagcacccctccccgcctcggtggggctcc

SEQ ID NO: 468790 - DNA, 122 bp, Homo sapiens
cacctgcaaccactggagaagcaacactggtccctgagagggcccggcacccccctttcacgccagaaccccgcacgccagcaccataggtgacaatgtcaggtttcatgcgaccgtagcct

SEQ ID NO: 468791 - DNA, 122 bp, Homo sapiens
cagtcccagctggcccaggcgccgcagcgctcccgagggccgtcgagcaaaggcgggaggcgcagccgggctgtcggtggacctgtaggtatcagggctccttggtcccctcctgcgggaag

SEQ ID NO: 468792 - DNA, 122 bp, Homo sapiens
cgtttgccatggctagaagttaaaactacacaaacgcaagatcaaaacccgagacccgcacgcccagatgaccgggacgaggccatacttcacatcttctctcacagactcacaattaggca

SEQ ID NO: 468793 - DNA, 122 bp, Homo sapiens
ggtccccaccaccagttggatttgggaacctcatctcatccttgtccttgtcccaggcagcgtcagaccccatccctgatgttgacagccagatgaggcttgagagccgggcatttgaaatg

SEQ ID NO: 468794 - DNA, 122 bp, Homo sapiens
tctcaaactgcctcctgtcgtgtccttccaccaggccatagccacggccgacgttcactccgtccaggatggtgcctgctgtcgtctggggcatggacaccatccgtgtcacatcgtatgcc

SEQ ID NO: 468795 - DNA, 122 bp, Homo sapiens
tccgcaggccaggatttggacataacttgtacaactccaaagccatttctcctagttgctcggctgtccctctctttgccttcctccctccagaggaggagggactctgatatcagcagatg

SEQ ID NO: 468796 - DNA, 122 bp, Homo sapiens
ggcctccttccccccgccgcaacctcctcctctgggggcgctggccccctctgctccccgcgccttaggctgagctacccggaggccccaggatctggttcctgggcaggagtaagcgctag

SEQ ID NO: 468797 - DNA, 122 bp, Homo sapiens
aaatctaccaacttttaatgatgaatgccaacaaatatactacagtaaacatcctactgccgagcttcaatattttctttacttacattgctcagagctagcatttcccagcagtaacacaa

SEQ ID NO: 468798 - DNA, 122 bp, Homo sapiens
aagttgtgtgggagtgagttgggtcccgtggctgccactgattggttgcgataagttacgcggcccaataagaaaaagaatgtacctttgctggcctatagaaaggggaaagcaggtgagtg

SEQ ID NO: 468799 - DNA, 122 bp, Homo sapiens
gggacggttcccggagggtgctcagcaccatgccgactactgctggctggcacgttcgcacgtggccatgtcagctccaaggaggatgctgacatcctgctggctggcacgttcgcacgtgt

SEQ ID NO: 468800 - DNA, 122 bp, Homo sapiens
agtcggtctttccctccctccctctctctcacatctccagaactataaaggcagctttgccggattatgattggcagaaacagccaattccttcagctaatcatcctcaagactttcaagga

SEQ ID NO: 468801 - DNA, 122 bp, Homo sapiens
acagaaatcataggcaggtaattgtgttaattactaccgctggcctttggctgatatttccgggcagtcagaggaagaaggaaatcggctgaatcccgcagtaccgcactttaatcgacctc

SEQ ID NO: 468802 - DNA, 122 bp, Homo sapiens
gcgttgcagggcagcgggatgggcgtgttttggataaacgtgccggggttgcttacaccccgccggaagctagaggatcaggacatccttgcccgtttctgccatcggcttggccagctgtg

SEQ ID NO: 468803 - DNA, 122 bp, Homo sapiens
gcccgggcagtggcgagccgtccggcccctccgctgcgtgtgtggggattaatgtcccggcgtggcaggtcagtgcagtgtgcagaggccagtattaatcgacagattaaagccaaggaaaa

SEQ ID NO: 468804 - DNA, 122 bp, Homo sapiens
tgacctcgtgatcctcccgtctcggcttctcaaagtgctgggattacaggcgtgagccaccgcgcccagccaaaatgaagtaatttttgttgttgttattttgttttgtttgttttgttctg

SEQ ID NO: 468805 - DNA, 122 bp, Homo sapiens
gctcgcagtggccaggatccccgacagtggaatgctgaggttagaactgaaaccgcgtttcgtgaagtcatcatcacgcacgggaaacaggtttggggtgaggggcggtccagtcctaagaa

SEQ ID NO: 468806 - DNA, 122 bp, Homo sapiens
atatgaatcatcaaaacaaacagcacacccctttccaccaggcctcttgcgctcacctcccgtcattcacagcaggggaacgagatgcatgctcacatcgagatgagctcggcatgggctgg

SEQ ID NO: 468807 - DNA, 122 bp, Homo sapiens
gcgaggccttccaggagcaggtcagacaacattgctcagccacccagggtcccagcgctacgcccgggcgccgcatcctggggcaggggtggatgcctagttgcaggggcttcccgggagaa

SEQ ID NO: 468808 - DNA, 122 bp, Homo sapiens
gctttgtgtgctgcttctagagggagaacgcctgagggggcggagatacagagtgggacgcgcagtacatcccaggatctctaggaccggggctccagattgggttttctcgagggaatgga

SEQ ID NO: 468809 - DNA, 122 bp, Homo sapiens
taaaggacttgccatcctgtgagattcattcagcttctttgtccgctgttctccaagggccgcaatgtagtgaaatgctctggcctaggaaccttacaaggtaggacgattttctaaaattt

SEQ ID NO: 468810 - DNA, 122 bp, Homo sapiens
gcagtaggtgagccggggctgggccagtgctgtccacagtccgcagagtgacctgcaggccgccttcgtggcctgagtgggccccggcacagttcccagagggatgccagtgtggcttccgc

SEQ ID NO: 468811 - DNA, 122 bp, Homo sapiens
aacatgactgcaggtggaacggcccccagtccaacaggaagccatcctcctcagaccctacgcctccacagcatcagcaccacctgtgagcttgttacaggtgcagtcttggcccacctggc

SEQ ID NO: 468812 - DNA, 122 bp, Homo sapiens
ggagcggaagcggaaacggcgccgctccagaccccgcccggcctgcgcggcggggccaggcgctgcgggcagtcatttccttagcaactcgccccgcccgcagggacaacggcccgcccaac

SEQ ID NO: 468813 - DNA, 122 bp, Homo sapiens
tttgtttggccaaagtttgggccatatcaaaaccatatagacactggcctgctagaaaagcgtcccttttctccatgccaaagaacagccaaaaaaagatagatcaaaacatcaagctcccg

SEQ ID NO: 468814 - DNA, 122 bp, Homo sapiens
ccgcggacgaggtactgcgcaggcgtgggagggtctgcgcatgcgcagaagcactccgggcgtgctgccggcggcggtaggtggcgcgcgggtccggcgggcggttggcttgagcgggaccg

SEQ ID NO: 468815 - DNA, 122 bp, Homo sapiens
tgagaagaaggcccaggtcctgcagcccggtgaaaagacaactgtggcctaccacgaggccggacacgtggtggtaggctggttcttggagcacgtggaccccctgctgaaggttggtcctc

SEQ ID NO: 468816 - DNA, 122 bp, Homo sapiens
caaatgtgtttggcatcaccaccattgctaaggcacagacgtaattacacacatcttgttcgaagtgaccctttactccgatggccttaggcttaggcaagctggggagaatcctgggaaag

SEQ ID NO: 468817 - DNA, 122 bp, Homo sapiens
gcagcgatctcgaacctttcccttatagccaaaccctggccaaggccacaaatttcaaatcgcctgaaaaccaaactgtctggcgcttaacggttacctcggctgagcgaaacccttggctg

SEQ ID NO: 468818 - DNA, 122 bp, Homo sapiens
caaaattgggaggtgcgagaggcaggatcaggatgcctccaggatgccttcagcccactgcgccccaccagcgccaagcctgtcccacaaagagtgcgggctggggacgcggctcaggtcgc

SEQ ID NO: 468819 - DNA, 122 bp, Homo sapiens
cggcgggacgtggaagggtcgaggttaaaccgaggtagtggggaggcccccagtgaaagacgcgagtttccggggtgctccctctagccagcagttaattgcaattctgccgggcgcggtgg

SEQ ID NO: 468820 - DNA, 122 bp, Homo sapiens
tccgggtcgcgggggctcctagggggttccttccacagctggtgcgcgtgcgcaagagtgcgtcgaggttgttccgcggcaatttatgaaactcggagccggcagtgagttgagggttcggc

SEQ ID NO: 468821 - DNA, 122 bp, Homo sapiens
gggaaaggggaacaatatctctctaccttgtggatcctagagcaccttgtcctgccaggacgctcaccctcacccccacaaggtacagatggcaaccagggtgccgcataccacccactggc

SEQ ID NO: 468822 - DNA, 122 bp, Homo sapiens
aggctaagatgaacaaaggaagggtcaactgtgcctcttccaggccgctgagtcctccaacgcctagctgtgctcaaccttgactgggtgaagccaaggcagggcctcaaggcaggtccaag

SEQ ID NO: 468823 - DNA, 122 bp, Homo sapiens
agagttaaacctgggttggagccctgcttcagtcatttactagcagtgtggccttagacccggcctcagctttgttttcctcacctgtacaatggagttaatcagagtccttgtagggaggc

SEQ ID NO: 468824 - DNA, 122 bp, Homo sapiens
gggagctgccctcaaggcctgacggggtgctgcatgtggccctgcccactgtgctcaccccgctggccccgccaggcccgccggggccccccaggcctccggggctctgtgacgacaggttg

SEQ ID NO: 468825 - DNA, 122 bp, Homo sapiens
aatttccaactcagttggcagtcgtgctcgcgagaagttaaaggcgaacaatcgacccaccgaaaagctgtgcgcagatttttttttaacagctgaactcaacgaaaacctgagtggtaaca

SEQ ID NO: 468826 - DNA, 122 bp, Homo sapiens
gggtgatggatgcacctggaaaatcgggtcacttccacccaaatactgcacttttccaaccggcttaaaaggtgcaccacgagattatatcccgcaccaggctcggagggtcctacgcccac

SEQ ID NO: 468827 - DNA, 122 bp, Homo sapiens
cgttcataattctcatctcatcctttaaaaattcttgtttaaggacattataaggagagccgtgtgcatatacaggttaggggcatgctaggcacacattccagtttctgtttgaatgactg

SEQ ID NO: 468828 - DNA, 122 bp, Homo sapiens
gtagtcccaacccccagagtagggagcggcggcactaggggatgttgcgcatgcgccatacgcctgcgcagaatcgagtgagtgggagactagtcaaaaaggctgacgtcatcgcacatgtt

SEQ ID NO: 468829 - DNA, 122 bp, Homo sapiens
ggagactcaaggggaaggcacctccagcgccggggactccgaggccagtgagtgccctatcgtgctgccttccccaatcttccccaatgtcctactggtcatatagtgagcatcccacgagc

SEQ ID NO: 468830 - DNA, 122 bp, Homo sapiens
aaggcgccagagcctcagggctaccgagagggggccctgccagcgggaggggtcacagaacgcggcagggctccttccaccgaggctatggcagagacacgctcccgggctccccaagtcac

SEQ ID NO: 468831 - DNA, 122 bp, Homo sapiens
tgggtggctgggtgggcagatggcacctgccagccccagtgaccagatgggggcccctatcgtacttcccatctgtcattcgttatgaatcaacagtggagaaaaccacacgtttgtgctga

SEQ ID NO: 468832 - DNA, 122 bp, Homo sapiens
gatgggtctggggagtgtgtcactgtcaccgcagataattgacaagggctgatcaaatagcgatgctttcaagtctgtctccaaagccccagaaaaatctgatgcaggggagagccttctca

SEQ ID NO: 468833 - DNA, 122 bp, Homo sapiens
gcggccctgcgcgaggtgcattgtttctgcgtggtgagccactcggtgctggacgccttccgcgcgcactgcccgcgcctgcgcacctataccctcaagctcacgcgcgagccgcatccctg

SEQ ID NO: 468834 - DNA, 122 bp, Homo sapiens
gggggccggccagggaggggccacggactccacgggaggttcggggggcgccttctctggcgggggagggtatggcggggagtggggaggcggctggcgattcctggggacgcctgggaaag

SEQ ID NO: 468835 - DNA, 122 bp, Homo sapiens
tgggtgggccgcctgcactgacggcgccatccgcctcctgccttgcagtgacctgaccaacggtgcagatgggatgctggccacaagctccaatgggtctcagtacagcggctccagggtgg

SEQ ID NO: 468836 - DNA, 122 bp, Homo sapiens
tttctctatcacagttatttcaaagaaaagaacatagtttgctttctaaagaaaaatttccgtctgttgatcttttgagggatgggcagaggatggagtctttcaagatggtaaggcttatg

SEQ ID NO: 468837 - DNA, 122 bp, Homo sapiens
tgatttatcttgtaaatgttatggctcgaggacaggagttgtgttttattcactgttacccgcaattctctagagcagcgcctggcacatagtggatgcttaataagtatttgagtaaatga

SEQ ID NO: 468838 - DNA, 122 bp, Homo sapiens
acaggaccctgcaaatctcccacaagtgtcagttatgcctccttctaggtggacctcaaacgagataatgcccaacagggcaagggtgactaaaacccaccatgacgaaacaacagggcaga

SEQ ID NO: 468839 - DNA, 122 bp, Homo sapiens
tagattttgtagagccgggggcctaggacgcagctcagcagcttcgccatggccccggctcgggccgctgctcttccagcagcaggtccccctgccggccccgccctccctgcctctgaggt

SEQ ID NO: 468840 - DNA, 122 bp, Homo sapiens
gcctctctgactgtctgtctgtctctccgccttgctcagctggcccgagataacttcttccgctgtggtgtgctgtatgaggactccctgtcctcccaggtccggactcagatggagctgga

SEQ ID NO: 468841 - DNA, 122 bp, Homo sapiens
tgcccacccctattaagatgaatcccaggtgtgtgcagcggaagacactgggctctttctcgctagaattcagggtaatagacacactaagccaacacgtgaagttttgcttcccctcagaa

SEQ ID NO: 468842 - DNA, 122 bp, Homo sapiens
ccaaggaaagccagggtgaacggggcgcccgggttgtcttctggagcgttccgaggagcccgcgctgctgaccctttgttggagcggggtgcattggctctcctccctcaacccgtcttgac

SEQ ID NO: 468843 - DNA, 122 bp, Homo sapiens
cggtagtgttaaaagtcatagagtggtcaagcgtccaggacatttggcaacaaggagcagcgtttgttattttagagagagctggcttagcagagggtggaggcaaagccagatgatgaagg

SEQ ID NO: 468844 - DNA, 122 bp, Homo sapiens
tctcccccaccccacccacctgcagttgagcagctgaacagaggccatgccggggcactccgaggcctgagacgaccacgcctgtgccgctgaggaccttcatcagggctccgtccacttgg

SEQ ID NO: 468845 - DNA, 122 bp, Homo sapiens
agcatctggctttcatttttaagtgccggcaggtgcaggggcaggcatatctcagggggccgtggcagatgaacgagatgtggcaaaagctggcgtggcactgttgggggtgagtttcacgg

SEQ ID NO: 468846 - DNA, 122 bp, Homo sapiens
ccaaaaacagatgttgaacagcagtaagttttgaatctgtcccacatttcatttcttatccgttttaaaaatgcagttccagagtgtaatttctacttaataaattatcctttcctttatct

SEQ ID NO: 468847 - DNA, 122 bp, Homo sapiens
actcccgctgcgcgcgaatcacgtctggcaggctgctccagcccgcagtccacacacccccgggcctttgcgccaccgcaccaatttgcatccccaacgaatgcgcgctgccctgatccccg

SEQ ID NO: 468848 - DNA, 122 bp, Homo sapiens
aaaggcccaggtgtgctgtgccaaagagctcagcagaggctcacgtggcccaggctggtgcgcccgctgtctcggtaaggggcgggttggtgtgttttccccttgtgtaccagagcacattc

SEQ ID NO: 468849 - DNA, 122 bp, Homo sapiens
ggacgaagccgcaaggactctcgtatcgggcccttgggactcgggaggtgccagaggcggcggctgctctggacctcggtgttcactgacctttgtttcacttgcctctgctcgactccgag

SEQ ID NO: 468850 - DNA, 122 bp, Homo sapiens
cacctcatctaaagaagtgcatccattattaattgagtaaatacttttgtcacatcatgacgtgctaccataactgctttattttttaaatttcttccattcacacatttttattaaagact

SEQ ID NO: 468851 - DNA, 122 bp, Homo sapiens
aaggccctgaggtgggagcatactgctgttcgtccctagctctgaagggggtgccctggtcggaatcagtgctgggtgcagcgaaagccgatctcacccgctccgcagggtgttcagcctgc

SEQ ID NO: 468852 - DNA, 122 bp, Homo sapiens
agccagagaagctttcacactgcaaacagcccgctccacctacaccccgactgggctccacgactccccgcaagtgccctgccacctcaggcacctgcccccacgcccactcagcgtcaccc

SEQ ID NO: 468853 - DNA, 122 bp, Homo sapiens
ccagccccttccgcttcgggctcgctgacttccggcttagggccgagggtggggaactgccgggcgcggaagcgatgggcatatctgtggcttattttcagcactgtcgcgcagacagtggc

SEQ ID NO: 468854 - DNA, 122 bp, Homo sapiens
gttacatgtccaaacacacaaactactgtagagaaagcagattgccagttttccttttaccggttatgcttcttgttttccaatcagtaatagtgtcactatatgaagtgcaaaggtaaaat

SEQ ID NO: 468855 - DNA, 122 bp, Homo sapiens
gctgggctcggcacggacgcagcttccaggtggggtactcggacccgggtcacgaagatgcggacagaggatgggccccgaactccagcacttattttatgatttgcacaaaaattttgtat

SEQ ID NO: 468856 - DNA, 122 bp, Homo sapiens
gtcgccagggtttctctccagttgaattccgtgttccttcaggttgaacagtagcttcagcggtttttcacgctcagaaatgatgaggcccaattccaatcttccctcccgccggaagtaag

SEQ ID NO: 468857 - DNA, 122 bp, Homo sapiens
ttcatttttggatgagtaaactgaggctcagataagctaagagattggtcggaaagagaccgaccacttggctattaagtggcatgaatggaatctgagtctctgaatttagtcctgaagac

SEQ ID NO: 468858 - DNA, 122 bp, Homo sapiens
cgccggtcccatcccagggcctccctgcagcaggctcgcacctacctcctccttacgcaccggggcgatgactgtccacatgtcatagcagccgggaagctcaaaggttgtcaccacctggg

SEQ ID NO: 468859 - DNA, 122 bp, Homo sapiens
gcctcaagtggtctgcccgccttgccctcccaaagtgcagggattacaggcatgagttaccgtgcctggcttcaaatgttatatttttaaaatagtggcccaggctgggttgcagtgaggca

SEQ ID NO: 468860 - DNA, 122 bp, Homo sapiens
agcggcaggcccagagcccagctctcctgaatctgagccggctctggagggagtgagaggcgccctgcggatagtggtgcctcttccaagatgtaaggtctgaggtcaagagatgtagactc

SEQ ID NO: 468861 - DNA, 122 bp, Homo sapiens
cctgccctgtcctggagctgcctccggcctggcccatgggctgcggagtcgatgatgtgccggccttctgcttcgtctgcttccacagggaggaggaagaggagctgctggaagaagtccca

SEQ ID NO: 468862 - DNA, 122 bp, Homo sapiens
cgccccgggggcacgtggagcggcctctggctcacctgcgcctcccgggccccagcccagcgccgccgcgtcaccgcccctcccgcggccccgccccagcccggctcattggctgccgctcg

SEQ ID NO: 468863 - DNA, 122 bp, Homo sapiens
ggcgcgagcgcccagggcgctgggagcccgtgggacgggcacggggagggcagagccagccgaggggagcggctgccgggaggtgcgctgagcagggtccgcagctaaggtccagcgcgatc

SEQ ID NO: 468864 - DNA, 122 bp, Homo sapiens
ggagcagggcgcggccacgggaagctttccttgatccccgcggtgggccaggctcccggccgctattttcaggcagtcggaaactcaagcacaggcacgccggggtggcagttattattttt

SEQ ID NO: 468865 - DNA, 122 bp, Homo sapiens
tctgaggtttcagagggacaggcagggcaaattagaatcagttacagaggcaggaaaaaacgggcagctgaaaatgtctgggaaatgtacttttatttgtcttgaggcaagaggtcaatttt

SEQ ID NO: 468866 - DNA, 122 bp, Homo sapiens
gggggcgtggaggcaccttgtcgggctgccttgaggctgtgccaactccccgggctcgcacgttttgggcagcaggatccatggggaccctggctcctgcaagaattaagacttgcggcgtc

SEQ ID NO: 468867 - DNA, 122 bp, Homo sapiens
accagcctcccgctgaaaggtgacactctgccagctgggttcccttagtcaccctgtgggcgcctgtcagcctcactcaagaatggagctggtggctgcatccccagtgacggtaagtggca

SEQ ID NO: 468868 - DNA, 122 bp, Homo sapiens
tcacattcagaattctcctgccaccaaagagaacctgaagttcatttacaagttgacgagcgggatacctacatggtgtccctttgcaagacgccagttagaaaataacccaagttgtaagt

SEQ ID NO: 468869 - DNA, 122 bp, Homo sapiens
gtggttagtgaggtcactgggtgtcactggcgcttgggaacctgcagagggcagtactagcggcagtgcccgcggggatggaggcagggaggggggacgatggcgggacgggtggcgccggg

SEQ ID NO: 468870 - DNA, 122 bp, Homo sapiens
cgctgtgagtgtaggctgtcgacagggttccagtggccctgtctcttccccaaccccacacgactactctggtgcctcaattctcctgacctataaagtaggcatgcctcccaggtgtgctt

SEQ ID NO: 468871 - DNA, 122 bp, Homo sapiens
gcaggtagacacatggaaccttctcctctctagtgctgccagtctggtgagaacagctaacgctggtcctccccgcccctcctcctctggctacaagatgaccactgaggattacaagaagc

SEQ ID NO: 468872 - DNA, 122 bp, Homo sapiens
gcccacgcagggggagtgcctcaccaacacataagtgtacacattcagccttccagaccccgagtgtgcgttctctgtgcagacgcctcctaacatgaacagccagtgggaggtcagtcttt

SEQ ID NO: 468873 - DNA, 122 bp, Homo sapiens
cgccgcgggctttttcaaccacacacacttctctgggcagtgcctgattgacagttcccacgaacccgccccacgcccctgattggatagggcgtcaggtcccgccccctgagggctgattg

SEQ ID NO: 468874 - DNA, 122 bp, Homo sapiens
gggacttggtgtggctcctactgggggctgcaggctgcctttctacctgtcttgtgaacgcgtagggtcgtggctctaagaattgaggcaaactctctttgttgaggagttcttgctttcac

SEQ ID NO: 468875 - DNA, 122 bp, Homo sapiens
ttgttttattgggtatgtgaatcttaaaagctgtttctatattaagcagccgcttcatttcgattaactgcaagccgttatgatccctatctgtttaactgaatacactgacagtccctcta

SEQ ID NO: 468876 - DNA, 122 bp, Homo sapiens
gtattcactcgccgctttcgttcctctccatgagcgccacggactgcagctgcttctaatcggctgtcttggccctgtccccagaattgcttcattaagactatatctgtctgtatgctatg

SEQ ID NO: 468877 - DNA, 122 bp, Homo sapiens
tcacgcacttgatcattttgcggaactgccacacggcccgagggctgatgccgctgtcggcggcggccactgcaagaagacatagccagagttcaaatcggtctgccagcaccccggggaca

SEQ ID NO: 468878 - DNA, 122 bp, Homo sapiens
gaggggcgggtgctgtcctggcactgactcagcttttcacagcgcaaggccgagcccgaacgacgcgctggctttaatggagatctgtcgcagccgttccatcccatctgcacatccactta

SEQ ID NO: 468879 - DNA, 122 bp, Homo sapiens
aaactctggtcacaccataatgtaacaatggccacagttttggtccagaccttcaaggcacgcttaggcaaatgctcacttatttcttggctgtcactacggatacatttcccataggaagc

SEQ ID NO: 468880 - DNA, 122 bp, Homo sapiens
atcgggaggcgacggaggtgctgcgcgcgcaacccgccgttcccgtcacggcgccacggtcgcagttggccacacagtgcaagtgcagcccaagccgaacgcccaagagggctccggggtcc

SEQ ID NO: 468881 - DNA, 122 bp, Homo sapiens
gtgttctgtgtgctgcttctgccgatctttccgcctccactgggcaggggcattccttttcgtccacctaacacaatcagaaccaaagcaggcaattaataatgtctcacttaaaaagcaat

SEQ ID NO: 468882 - DNA, 122 bp, Homo sapiens
taggggctagaggaaagataggatgtccaggacagctggacaaaagacaaagctatgagccgagagctttcctgacggttgagtggtcctttgcaatcagcagtgttttcacccacagctca

SEQ ID NO: 468883 - DNA, 122 bp, Homo sapiens
acgggtgctcttggctagctgggccaggctgctttgcaaaaaggccgtggcatttcaagccgccgagagccacgtgcggtgtccctttcctcgcttcctccccagtgatgtgcgtttccctc

SEQ ID NO: 468884 - DNA, 122 bp, Homo sapiens
ctttaactgcggctccaatctcctgaaacatcagaagacgcacaccggggagaagccctacgaatgcacgcactgtgggaaagcctttgcctacagctcctgtctcatccgccatcagaaac

SEQ ID NO: 468885 - DNA, 122 bp, Homo sapiens
ttcttcacgttagaggataaataagccattccctttgataggagcctggggctttccctgcgaggagggcactttgggagcagccttctcattagagggcaattagccgggctcccgcaccc

SEQ ID NO: 468886 - DNA, 122 bp, Homo sapiens
gggcccggccagctaggcaggcctcgccccgatacggtcgccatgcccaagagaggaaagcgactcaagttctgggcccacgacgcctgctctggacaagtgactgaggtggattacgccaa

SEQ ID NO: 468887 - DNA, 122 bp, Homo sapiens
atatttagctaacttttatgacagtaaactgttctacaatcatgtgtcgcttcacgatggcggtatgttctgagaagtccatcttaggtgcttttgtcatttgtgatcatagagtgcttttg

SEQ ID NO: 468888 - DNA, 122 bp, Homo sapiens
attccctacccgttcacctacgaagcccagctagagtctctcgtcttaatctttgccaatcgaatacacaaagttttttttttttttttttcacagagtctcgaattgtcgcctgggctgga

SEQ ID NO: 468889 - DNA, 122 bp, Homo sapiens
ggagggctttatttttgcttttcaacatcctgttctgcaggttccttggctctttttgcccgtatgccgaagagccgggcattgggacgggccatgcggagactagcgaaggctttgaaatt

SEQ ID NO: 468890 - DNA, 122 bp, Homo sapiens
tattagatatctcgcggtgctggggccacttcccctagcaccgcccccggctcctccccgcggaagtgcttgtcgaaattctcgatcgctgattggtccttctgcttcaggggcggagcccc

SEQ ID NO: 468891 - DNA, 122 bp, Homo sapiens
attaaaattaactcccctactggatattgaagaaagaaggcaggacggttgtgcaggctccgaagaggcggagccctcgttccgcagccaccgctgtctttctacccacagcagccgggttt

SEQ ID NO: 468892 - DNA, 122 bp, Homo sapiens
gcaggagaattgcttgaaccctgaagacggaggttgcagtgagccgagatcacgccactgcgctccagcctgggctacagagcaagactcagtctcaaagaaaaaaaagagaatgcagataa

SEQ ID NO: 468893 - DNA, 122 bp, Homo sapiens
cctgggtccttgctgcaggagtaacgggaggcactcacccctgtaggcccaggtttggggcgctcagcacagcagcttgctggttccatcctgcagcccctgctcacaatgtgccgattgtc

SEQ ID NO: 468894 - DNA, 122 bp, Homo sapiens
acagtgaaccgacactcggggctctgggctgggatgcgggaaagtcgcggaggttttcctcgccccacccactgcggcttggggaaggaggaggaggaggggtgggccatctgcccatccca

SEQ ID NO: 468895 - DNA, 122 bp, Homo sapiens
tacagggctctcaaggctcactccttcaggacaagcccctgccttgacaacttcatgggtcgtggtctccccttatccccaccccagcgctctctactctgttctctgaaccagccaccccc

SEQ ID NO: 468896 - DNA, 122 bp, Homo sapiens
atatctatctatccacccaggctggggggagtgggagccctggggcatagtaaagggcttcgatgaacacaggaggggaagggaagtacagagacaaatgcttagatatattgtatatctgt

SEQ ID NO: 468897 - DNA, 122 bp, Homo sapiens
tgcaggcccccgacagcgcagaagccgctggacctgcagctgactgaagcccacaaaatgcgcaccaggaaaaggctggtttccgctccgtttttaaagcatgagagaagctactgagaact

SEQ ID NO: 468898 - DNA, 122 bp, Homo sapiens
tgtaaaggatgaggcaatgccacgtcgacttctatcggctctactccaataagcaggcaacgctccctcagcagttgctagctttgctgcgggctttccctgttcccctgcaccagtgcgaa

SEQ ID NO: 468899 - DNA, 122 bp, Homo sapiens
gagctcgctgttttggctgtggtgccacttgcacaccggcatgcccgtgcttcacaccggcgcgccctcaccagcacacctgcacctcacaccggcacgtgcacttcccaccagcgtgtctg

SEQ ID NO: 468900 - DNA, 122 bp, Homo sapiens
gcccccagcagagagcacctcagcaggtgctccaagaacgatgttgccttggaaaggtagcgaggccctgaaacacagagaataagggcaaagtctgggctgctctcagagcctcagggccc

SEQ ID NO: 468901 - DNA, 122 bp, Homo sapiens
tgtgcgcaagcgtctgcgcgcgtattggggcaatgtgagctctgggggctggacttccggcgttgggactgtcacttggctgctcgcgtcaggccacaccggtggtctgggctgtggcgcgc

SEQ ID NO: 468902 - DNA, 122 bp, Homo sapiens
ggctcaccgaccggttgccaggaagtctacctcctccacgtggcaatcgccgctgctgctcggctccctgccacggggctgccccgactgtgcctccgcaggtctctctggttctgcccgcc

SEQ ID NO: 468903 - DNA, 122 bp, Homo sapiens
actcaacaagcagattttatggagaccccagtaaaaccccaaggatggcaataaataaatcgccagccggttctcccatacagctgcctcttccacaagacctcaagcctctgaaggcagag

SEQ ID NO: 468904 - DNA, 122 bp, Homo sapiens
acacagaaagacattttccagttatcttgcacacaagtgggcggcgggacccgttttggccgggaacgttgtcaggaacgctgtacaccacttccaggcggtcacgtccgagctgcccaggc

SEQ ID NO: 468905 - DNA, 122 bp, Homo sapiens
catccgtctgtgcccgccccctcacgccgtggcgcgctctcacgcttccccgcctccgggcgctccgcggtgccgaccattggctggctctgcaggtctcactatcctcactccatccgcgg

SEQ ID NO: 468906 - DNA, 122 bp, Homo sapiens
tgcacagaaacctgagcagcctctgtggtctgattgcatcattcatcactgtgggttctgcgcctgcatgctcagatgggaaatctctgctttgtttctttttctctttggcttttttgctc

SEQ ID NO: 468907 - DNA, 122 bp, Homo sapiens
ggacagccaggctggtggaggctgtgcaaggcaggggtgctgggtcatctgtccctaaagcgggtagccctcagctgggtaaggggctgggttactgagaaggagaaaagggaaggcagctg

SEQ ID NO: 468908 - DNA, 122 bp, Homo sapiens
ttggcccagcttggaattgtcaaagaaacacaaagctgaacactagttaaggagacaagacggattctagtcagtactactgcagtaaggaagagacctcagtgaaacctcagctcagctcc

SEQ ID NO: 468909 - DNA, 122 bp, Homo sapiens
ggcgccggggagaagctgccatgcctgagggtctttgctttccgagaaaccagagaggtgcggggcagctgccggctgaagggggacctggggctgtgtgtggctgagctggagctcctgtc

SEQ ID NO: 468910 - DNA, 122 bp, Homo sapiens
gcccctcctttcttcctgtccatcgctaccgggctcagaatgggtccctgcccccagctacgtttccatgagcacattcagtgccagacactgtcctgcccacccccaaagtggtgagcccg

SEQ ID NO: 468911 - DNA, 122 bp, Homo sapiens
tccctccctgtcacctccctctcaccaacccggggtctgagcccctcattcctgaccgtccgtgttctcaggagtggttgaggacacagggccccagcccagccctctgcaccccccagccc

SEQ ID NO: 468912 - DNA, 122 bp, Homo sapiens
cccgagcatccctaaatcaagacacattgcagggcctctaaaaggtacgttcagcagaaccggaatagaactcaggctaaatgctggtggtatggaattgggaacatgtaccaagtaaagac

SEQ ID NO: 468913 - DNA, 122 bp, Homo sapiens
cggtggagtgcgggtgggggggaagcggggagcaggagctactcgtgtttgatggcttcccgagttgccaatgtcctggtctattctgagtgaccgccttatttacaatatagggctcccca

SEQ ID NO: 468914 - DNA, 122 bp, Homo sapiens
agcattggcccttactggtggtgaatgatgctggctgggcatccaggtggagccctcgctcgcctggtcagggagtgcgtgtcaggggtgggagaagccatggatcccgggcagcagcaact

SEQ ID NO: 468915 - DNA, 122 bp, Homo sapiens
gcaaaagtctccttaaattacctgattgaaataaccaggcggaatattccgcggggccgccgcgtgccagggaagccgcctttggggtggtctgtcagaggcggtttgtgcattctgaggaa

SEQ ID NO: 468916 - DNA, 122 bp, Homo sapiens
gggcacgtcccgggaggcagacgggagcgagaccgggtggatgagctcagacagcggcaccggggcctccagcttcagcagggcgatgtccgcaccgccctgggcagacaggctctcgttgt

SEQ ID NO: 468917 - DNA, 122 bp, Homo sapiens
aactcacccctgagcagtgcggatacctagggactgacggacaggctctgcagtggcgcccgggggacgtgtcggaggcgaggcggggcggggcggtcccggaggcggggcggtctcggagg

SEQ ID NO: 468918 - DNA, 122 bp, Homo sapiens
tcattatattatttcaatttgtgaataactatattatatatcatttataaatgcatatgacgttatacacaaggttaaatgcaaatatcctctggtgttggcctggctcagatcagggaaga

SEQ ID NO: 468919 - DNA, 122 bp, Homo sapiens
ggattagactagaagcaggttggagaaatgacaaattatggttcatgagaggttgagagacgattatctcatgtcctgcttgcctccacagtgggtccacagaggcaaagatgggctaatgc

SEQ ID NO: 468920 - DNA, 122 bp, Homo sapiens
ccctttttcccgcccagactccacgtcttctgaaagagggcgtggcccgcaggaagttctcgcgttacggaaagtgaagtgtttccggctccggtgtcatggccggctcctaccctgaaggt

SEQ ID NO: 468921 - DNA, 122 bp, Homo sapiens
tcttcctccacccacctccaaaggcggaaatgacttcctttgcttccagagaattgcctgcgtttctctcttagaacggagatcactccatgtggggtgtgtgtactgcctccccacagggc

SEQ ID NO: 468922 - DNA, 122 bp, Homo sapiens
atccgcccccaactgtggtgtcgcgacaggtcctattgcgggtgtctgcggtgggaagggcggtggtgactgggagcatgcggggtaaccgcagtgggcaagggacatgggtggaggtgggt

SEQ ID NO: 468923 - DNA, 122 bp, Homo sapiens
gttcgttcgtacagggcctaaaacttgaaacacaggaggtgctaaagacatacttgttcacgtctccccttctctccccactttgtgaaatctctggcacattttttacatagaacactttc

SEQ ID NO: 468924 - DNA, 122 bp, Homo sapiens
ccaaggagacagagcctctggggacaacaggggctttcatctgggagcagtgaggacccccgagggggcgtggcagggagggggcaggactgctcaactgggcggctccacggggctgtggg

SEQ ID NO: 468925 - DNA, 122 bp, Homo sapiens
tgcaggcattttagaggtatctattcagttctgagaatggctcttgacagttgctggatccggccaacagtgaagggccagggcagtatctgaggacctggccctcagtctcccagaagaac

SEQ ID NO: 468926 - DNA, 122 bp, Homo sapiens
aagattaaaacaggagtcttcgcgtgagcaagttcagaggcgtggagggcggtgtgttcccgggaaggttgatgggtagaggttaggggcaagggcagggggttggaattgcattgatccca

SEQ ID NO: 468927 - DNA, 122 bp, Homo sapiens
ggccggggtgtgtgctggccgcaccgcgctgcagctcctatgcagccttctctcttcctccgcctctggctgccgcaggttctttagggccagatgcagatgagctggttgtactctggttg

SEQ ID NO: 468928 - DNA, 122 bp, Homo sapiens
ggaggcaggaatcccgtccttacaacatcgcgcccccaattcactcctagttaaccctgacgtcgccaacatagtgtctccatcacatatctgccacctccaagtgatggttaagccgatgg

SEQ ID NO: 468929 - DNA, 122 bp, Homo sapiens
tgtcaagatgtgctctttggcccagacaggtggtagttattatattatggcactgattcccgttttacagaggcagaaaccaattctttgaaatttcatgtgactaaggcaagtttatgcca

SEQ ID NO: 468930 - DNA, 122 bp, Homo sapiens
cccagcaccgccagctgcagtgccggcaggaatttggggggggtggctcctcggtgcccccggagcgctgtggacatctcccccggcccaacatcacccagtcttgccagctgcgcctctgt

SEQ ID NO: 468931 - DNA, 122 bp, Homo sapiens
ttttttctcggttctctagccattctgacccaaggcagtactcgggtctcactctagttgcgacctgtatatcttcagaggattctggaagggtggtaaattttccagtagaactgcaagtg

SEQ ID NO: 468932 - DNA, 122 bp, Homo sapiens
cgtctgggccaggatagagaggggagtaagatagacctttccttgctgttacagaacttacgtctttgttggagagacaggaaataaacaagtaagttaaaaacccacaatttggggtagag

SEQ ID NO: 468933 - DNA, 122 bp, Homo sapiens
gaagggtgatctccaggtgtttcatctttgcacccttgcttccagcaccacgcccacaggcgcttccagaaaaaagaaaaaaaaaaagggagcaaggaagccaggtttttcaacaacgaatt

SEQ ID NO: 468934 - DNA, 122 bp, Homo sapiens
gcagtcattgtcagggaggtaagccgggtcagtgcctcttgaaagacctctcctccagcccgggggctggctgacctcagaccctctccacttgctctggcagcatcctgaaagccatgaag

SEQ ID NO: 468935 - DNA, 122 bp, Homo sapiens
ggccaggcccgaggcccagagccgggagagcctggccggaaagacctgcagcatctgagccgcgaggagcgccggcgccggcgccgcgccacagccaagtaccgcacggcccacgccacgcg

SEQ ID NO: 468936 - DNA, 122 bp, Homo sapiens
gctcgcggctgcggctgcgctgaccgtagtactcctccaaggagtcgtcctggtagaagccgctgtgcgcccgcgactccgagcgctcgaagcggctcccgccccgcgcctcgtgactgttg

SEQ ID NO: 468937 - DNA, 122 bp, Homo sapiens
cgcccaaagctgctcccaggggctaggagctcggagctcccagtgtgggtctctgagcagcgcggggtgggcgctcccggccctccagcccccaactccctcgcgcacccgggacgggtgaa

SEQ ID NO: 468938 - DNA, 122 bp, Homo sapiens
ccagtcaccctcataatactccttgggtccgaaaaactggatcccataaccctgaaagtacgaagatgctactactcagggcgccccccaacaccaccaggaaagcccaccgtcttcccagg

SEQ ID NO: 468939 - DNA, 122 bp, Homo sapiens
cctgaaaatttgagacaggtctcagttaatttagaaagtttattttgccattgttgaggacgcattcccatgacacagcctcagaaagtcctgacacgtgctcaaggtagttgtgcacagct

SEQ ID NO: 468940 - DNA, 122 bp, Homo sapiens
atcaggaatgtgcaaccatctggcagttgactggtgtcctgtaggctgcttacctggtgtcgtgtagggctgcttacctggtgtccttcagggctgcatacctggtgtcctgcagggctgtg

SEQ ID NO: 468941 - DNA, 122 bp, Homo sapiens
cagggcccccagagggtgcggggggcggggacgctgtgacgtcacagagcgcccttctgacgttctcacggacccgctttgcctcgggggcccacgctggagcccacccagtactactaaga

SEQ ID NO: 468942 - DNA, 122 bp, Homo sapiens
attgcccctctgccttcttggttactaagcagttacctggcaaccatgcctcctccacatcggctgccgagccaagaggcttagcctgtcctccctcagctctcaagtctcccatggatcac

SEQ ID NO: 468943 - DNA, 122 bp, Homo sapiens
gcagacggatgaccgcttccacgagatgcacgtggctctggcccagaaggaccaggagatcgccttcctgcgctccatgctgggaaagctctcggagaagatcgaccagctagagaagagcc

SEQ ID NO: 468944 - DNA, 122 bp, Homo sapiens
cctctgcatttgatcttcaaatataagattgatttaggcctcaggtctgtcttttgaagtcggagcaaaaggttcaggtgctttgtaacaattatgtggtgttttctaaaccagattgcttt

SEQ ID NO: 468945 - DNA, 122 bp, Homo sapiens
gccaaccagactcagagaggggaccatacaagaacatgaatactggcaggcacagttcatcgtcatggttcaaagttaagagtctgccacacaaaaggagcagaacctttgttcattgtttt

SEQ ID NO: 468946 - DNA, 122 bp, Homo sapiens
ggttcagggtgcatggccgtttgctgaggtgctcggggtgcagcgggtcgcggtctgacccgttctctttggtcctagccccaagagcaggtggggcgagggcagtggacataggatgaacc

SEQ ID NO: 468947 - DNA, 122 bp, Homo sapiens
ccagcaccctggaagccagggttttaaatgctgccaatctcagacctttcccagccacatcgtagtgtgagatgatgtggcttctctctgggtcttgctcttcaagtcatcaagcccaccct

SEQ ID NO: 468948 - DNA, 122 bp, Homo sapiens
gcacacaggggaggagcagactctcccatcccctgccgtggcccttcagtggcctcctatcgctggggagaaaatccacactcatacccaaggatggcctggccggcttcatctcctcctag

SEQ ID NO: 468949 - DNA, 122 bp, Homo sapiens
cttctctgtggctgtccccttatttgcccaggccagaggctccagatgggctctggagggcgtgggatctgctcacagggccccgctcacagggccccctcttctctctaatggggcagcac

SEQ ID NO: 468950 - DNA, 122 bp, Homo sapiens
gcctaacaagaatattgcagtgttgatccttgccttctccttcatcgtcatcatcagtgacgtttactgagtatcccctataccccatgcagttttctgagccttctgtttgcactactaca

SEQ ID NO: 468951 - DNA, 122 bp, Homo sapiens
cccaatgccccctagcacccaaggtggtcttctctcaattgaggagctctttggcaagggcgggtctaatttctggtgtccctggaaccggccaggggtgtctaagaaagggactcaggctg

SEQ ID NO: 468952 - DNA, 122 bp, Homo sapiens
tttctggctgacttttatacttaatatcagtttagtaaacatggtttacttggagagtgtcgactgtgttatatatccatttgaagccaatgccgaaaacagatgaaaagtagtgtctcagt

SEQ ID NO: 468953 - DNA, 122 bp, Homo sapiens
aattagtccggtcgtgggtctggaacatccagaattgtggaagttgcttatggcgacctccggaatgagagtgtggaaaggggaagcgtcctggggaacaaaaggtaataagccactcttta

SEQ ID NO: 468954 - DNA, 122 bp, Homo sapiens
aacaccgtcccagggctctgcaggccactgtgagcgctggctccctgggcagtgctcctccgtgtggactgtgcctcaggccagggctcaccagctggggtcctgtccggaaggatgggatc

SEQ ID NO: 468955 - DNA, 122 bp, Homo sapiens
ctgagccagactcataatggccacggctgtaagagtaacttgagccagacccgtgttggccgtggctggaggagtgccccgaaccggacccatgtcggacgtggctaggagactggcgagat

SEQ ID NO: 468956 - DNA, 122 bp, Homo sapiens
gggggttacattcgactccatctgcaaacactgcagtggaaactaatggtcagtcgattgcgatttgcatctcattgaaatatcttccaaagcagccagagccttcaggcctgctgctgccg

SEQ ID NO: 468957 - DNA, 122 bp, Homo sapiens
ggtttaaacgttcccgtacacagcgcacacttcctgtggatcgaggtcacccctcagcagcgcctcccggatgcaaggagcaaacacgggttcacgtcctgatagctgagaaaatgactggc

SEQ ID NO: 468958 - DNA, 122 bp, Homo sapiens
gtgtataaggcactgtggggaccgtcgttcatggtgcacacctcatcgatgagcacagcgcgctccgtacgtgaggcgtgagtaacacacttctccacaacattgctgtaatgagataaaac

SEQ ID NO: 468959 - DNA, 122 bp, Homo sapiens
aaatagatcacactgtctttgccgtcattgaacttgcaacctaactgctgagtgaggacacgtcccttagagacaacaaataataacacctggtctgcacagaagaagatagtagggaccaa

SEQ ID NO: 468960 - DNA, 122 bp, Homo sapiens
gtaagtggcatgagaacggagaccttatcttctgcattgctggaccctgacacctggtatcgtggtagaccttttgcaaatatactgaacagatggatctggggcaacaatccctgtctcct

SEQ ID NO: 468961 - DNA, 122 bp, Homo sapiens
aggctgaggcaggagaatcgcttgaacctgggaggtggaggttgcagtgagccgagatcacgccagcctaggcgatagggcgaaactgtgtaaccgcccaccccgcccaaaaaaaaccgaag

SEQ ID NO: 468962 - DNA, 122 bp, Homo sapiens
ccatttaatattttcaaaccctggttgaccgtgggtaactgaaactgcagaaatggaaaccgtggataaggggggactattgtaatagcaaatggttgctgacagaggaagaggtgtaatgt

SEQ ID NO: 468963 - DNA, 122 bp, Homo sapiens
tgggaatttgcatgtcctctctctgaactaagattttcattttactggaggttgataatccgagacttgccatatccgttcacgcttcttcctggactttgcccgcaggataatttggtgaa

SEQ ID NO: 468964 - DNA, 122 bp, Homo sapiens
gttctgcattcctaggtatgaggacctcaccacgtcctgctctgcgcctgtcatcggccgcggtgtgtctcctcaggtgccgagctggtcacttccatgtacagcatggataaccgtcttct

SEQ ID NO: 468965 - DNA, 122 bp, Homo sapiens
gttattacagaaactaagtacactgaacacatctcgtgtgtcagttcaaagtcatctctacgccacttcttactgcagccacagaatcgatcacagtatacctcttgcttcccacactgggg

SEQ ID NO: 468966 - DNA, 122 bp, Homo sapiens
tctcgctccacgccccttccctggccacaaacccgccgaggcccccctctctacccggcgcgcctaccacaggcgcgacacctgtcaagccttgggacaccgaaaccgtacctgggaacagc

SEQ ID NO: 468967 - DNA, 122 bp, Homo sapiens
agtgtgatatatgtcttatcccttggaagtaacgttggcattgtgttgtgtgtccgttggcgctgtgttgtgtgtccttgtaaccttaaagtcttagcaatatctgcccaggtgcagtgctt

SEQ ID NO: 468968 - DNA, 122 bp, Homo sapiens
cagtgctggcccagcagtaccgggagcccctcctcctgagcacagtggcggcgcccagagcggcagacctcccaccactgcttccactggggaaaggccggggatgctcaacgcaaccttag

SEQ ID NO: 468969 - DNA, 122 bp, Homo sapiens
gtctgctaggcccctccctcatagccattgtctcctattctcacagcagtcctagaatggcgggaggtcatagccccattttacgggtgatgaaatcgaggcacagagggcagtgttatttg

SEQ ID NO: 468970 - DNA, 122 bp, Homo sapiens
cttggtgtcctttgtcgaagtggtcagcctatggtttgcagaggggcagcggtacagccacgcggcaggagagtgtgctcgcaacgccacctgcacccactacacgcaggtgagtgtgctgc

SEQ ID NO: 468971 - DNA, 122 bp, Homo sapiens
gcatccagggccgacgtctggatctgtagggagcgctgttctctgccgccctcctgtggccgctgagcccttcgcagatcgctgctgagaagattccgctcctccgcagagccgcgttcctc

SEQ ID NO: 468972 - DNA, 122 bp, Homo sapiens
gaacacaaaaataaataagacatgattcctgccctggggagctcacattgctggtggggacgtagctgtgtacaaagataatgacagtgccaggtggtaagtgctatggagaagggtgtgta

SEQ ID NO: 468973 - DNA, 122 bp, Homo sapiens
tataaacccaaaggctcctcccttccctgcctctggtagcccctcccttctcacttactacgcagctgaccagagaaaagacaaggggtgggaaggcactgagcaggactgagtggggagta

SEQ ID NO: 468974 - DNA, 122 bp, Homo sapiens
cagtatacttttagtagttattttaaagtgtactccttctacttacgaaaaataaaagttcgctgtggaacagcctcagacagacccttcaggagtgattccagaaggaggcattgttatca

SEQ ID NO: 468975 - DNA, 122 bp, Homo sapiens
caaatccaccccggggaggagcgtccgaggcggccctcgggcgggagcctgaagacagcccgtgcctctgtgacccagccaccgtcggatccgctgtgttgattaccctttcctatggagaa

SEQ ID NO: 468976 - DNA, 122 bp, Homo sapiens
gtctacccctggtcaccttaccccggactccagcaacagcccgctctccccaaccctccccgggagcctcctcactgctgccagagtaatggcctgaaacactgccctcatcctccacacgt

SEQ ID NO: 468977 - DNA, 122 bp, Homo sapiens
ctcaacctctttaaataactaagagtattgacagttacaaaagaccagtctggccaacatcgtgaaacctcatctctactaaaaatacaaaaattagctaggcatggtggtgggcgcctgta

SEQ ID NO: 468978 - DNA, 122 bp, Homo sapiens
cccccctccccccagtgcgcctgtgcggaggccctcttgattatgtgtgccctctccgggcgcccgcgttagcggccgggtggaggtggggagggaagacgctgaggaggaggaggaggcgg

SEQ ID NO: 468979 - DNA, 122 bp, Homo sapiens
ccgctcacaacccggcgtcgcccacgacgtcactgtcgaccgggcttctccatcatattccgacaccctttcattcgttagcccctagttagtaggtgcggcaagggtgtggcgtgggggca

SEQ ID NO: 468980 - DNA, 122 bp, Homo sapiens
agggccacctggtgaggcttctgttgcatcatcctgtttctctgctgccctccaggggggcgatgccgctccacgctcctgccatgctcctgccacagccacactggggagtccctctgcca

SEQ ID NO: 468981 - DNA, 122 bp, Homo sapiens
gcctggagaccccctcctgtacccaggaatctccctttctccatccctcccagccctgcgcggggacctacgcccccaggcggtgttttccgccctaacccacgctccctcccaacggcacc

SEQ ID NO: 468982 - DNA, 122 bp, Homo sapiens
ggaaatttttctgactaagacagtttgggtcatagtcatactgaaaagtcacatcagttacggattttggtaaacaaattacttattccaaagatacctatcacacaccatgctctaagcca

SEQ ID NO: 468983 - DNA, 122 bp, Homo sapiens
ctggtgaagtcacaggggtgttcccgatgctcccccaccacacaatcctggcacacgggccggtcacagaactcacagaacagcctcagttcctctgcagggtgaacaggacacaggatggg

SEQ ID NO: 468984 - DNA, 122 bp, Homo sapiens
ccgcagctgctggcccgggtgctaatcccctcgccgcctggggcttgcggtgccggccagcggctccgagtgcagggcccgctgaggccacgtccacctggaactcacgctggcccgtgaaa

SEQ ID NO: 468985 - DNA, 122 bp, Homo sapiens
tcacctctcatcaccttaaggcatcctgtaccagcctgatctgggggcgatgactgcagccggcaatcggccattaccaatggtgtctttctgggaccctttctacctgtcttaggtattaa

SEQ ID NO: 468986 - DNA, 122 bp, Homo sapiens
gggacccatcttcttgggagcaggggaagggaggtcaggggactgcagtggggaaggggccgtggatggttgagcccgaagctgtcaacatggccagagtcatctgcagggcctcaaactgc

SEQ ID NO: 468987 - DNA, 122 bp, Homo sapiens
ttgcctggcagagaaccactgcattagcccttgcacctctggatgcctcgggctcttgttcgattatcctatagtgtgtcctgaaaggtgaggcttgcgtagacagcaaaggaagtccttgg

SEQ ID NO: 468988 - DNA, 122 bp, Homo sapiens
agtgtcaaacttgtcccacactccagtgccagaggtgctgagggttctcttgggcaggaccgttcagcaaagtccacagagcaaaatgggagcttggccttaaaaggggtgagcaagcagga

SEQ ID NO: 468989 - DNA, 122 bp, Homo sapiens
ccatcttccatattcacccccacctccttcaaaaaactcgtatcaccaagacttctggaacgttccttttactacatgagaatttttttgaggtttcttttctttgaaacactctctcatag

SEQ ID NO: 468990 - DNA, 122 bp, Homo sapiens
ccaggctggtctcgaactcctgacctcaagtgttccacctgcttcggcctcccaaactgccgagattacaggcgtgagccgccgcacccggccccagccccaaattaagcctttttttaaaa

SEQ ID NO: 468991 - DNA, 122 bp, Homo sapiens
ttctctctgtggctggtgggctcagccccaatccttgctactcaaagtgtgattgtggtccgaggaccggcagcatgggcatcacctgggagcctgttggaaatgcagaatcccagactgca

SEQ ID NO: 468992 - DNA, 122 bp, Homo sapiens
tttgaatctactctgttctgccctgcttggccagctcctggcgggacaggggtccaaaggcggcagggctttgtttctgccagggctagagtccctcctgcccaagttgagcttgagctctg

SEQ ID NO: 468993 - DNA, 122 bp, Homo sapiens
caggtgaagcgcagggtgatgtcggccgtgccgttgtagagctcccgcttcatctgggcacggctggggggactgatgcgccacagcgccccggagctgccctcaatctgcgccgtgacgat

SEQ ID NO: 468994 - DNA, 122 bp, Homo sapiens
agcgttgagaagattcactgaccattaggaaggggcctaaccatcaggaaggaggcccttcgggttaaaaactctcataaatggagtggcctacttttgcagagatctttctgggagccctt

SEQ ID NO: 468995 - DNA, 122 bp, Homo sapiens
aacttgaccttcatgaagccctctctggatagcattcttgggaagtggcttgtgtattgacgtccacagataactatttcactggtcagaataaggttaagcaataagcatagccatgcaga

SEQ ID NO: 468996 - DNA, 122 bp, Homo sapiens
ccactacctattctcacaaaatttgtttctcaaagttaaaaattacaaatggctggcctacgatgttcctgaatcagaaaaacctaacttctgattaaaacctctaaatgtcactatttctg

SEQ ID NO: 468997 - DNA, 122 bp, Homo sapiens
aggccggggccgagcattggggactgcggggacgctccatgtcgggtcgcgaatcctgaccggcgtgtaatgcagagaagcgagcacttccgggccgaatgggtgcaaccaccatgggggag

SEQ ID NO: 468998 - DNA, 122 bp, Homo sapiens
ggaagcaaaaatgacaacctggagcgcacagaggagtttgaagcttcgctcaagtgcagtcgctttcttctcctgcccttctctttcgctcccctgcaccctccccagccttcccccacccg

SEQ ID NO: 468999 - DNA, 122 bp, Homo sapiens
gatgatcccggacgaccagcacagcccggatctcatcctgcccctgcatggactgaggaacgtcaaagccatcgactatgacccactggacaagttcatctactgggtggatgggcgccaga

SEQ ID NO: 469000 - DNA, 122 bp, Homo sapiens
ttttcctgcagtagaaatgttcactgacatcctgaagatgagctctctagaataaaaatccgatgaacttttctttggagatgaggggacattcgtttatctccgctgggctttctctcaaa

SEQ ID NO: 469001 - DNA, 122 bp, Homo sapiens
gaagacttattggtttcaacaccaccttggaggcattatggccattagggcccctaatcacggaatgcagactggccagagagatgggagcacctggggctggtatttctagtcaagaggga

SEQ ID NO: 469002 - DNA, 122 bp, Homo sapiens
cacaggaacccagtgcatcacaaataggaaacaccagcctgtgacaggcagctgtaaacccgtcagtaaatctgattttcagttccctgaagggtttgcatgcctaaatacctcaatcctga

SEQ ID NO: 469003 - DNA, 122 bp, Homo sapiens
gccttcccggggaaatttcagcacgagatgtgtgcggattcgtgtcggtccctcggaagccgtttcttctgaaagagaccaaggtggcgtcccttggaaaccaagatttgtacctggtccga

SEQ ID NO: 469004 - DNA, 122 bp, Homo sapiens
catggcccccagcaatgagcccattggccagcgcattggcgctatctacgcgctcctgaccgatggtgcttgtgtcccgggagaactctcggaatttgtctcggagcatctggtagaggaag

SEQ ID NO: 469005 - DNA, 122 bp, Homo sapiens
ctgccaggctctgtcccgggctctgttaataccacagtgaattcgtcccgaagccagccccggggagtggggagtggacgtaaacaggtcttcacactgctgccctgcactccctcggaacc

SEQ ID NO: 469006 - DNA, 122 bp, Homo sapiens
tgcacacacattcatattctttctcctctctcagcattctggatgctattctcaaatcctcggtgatttgtggagcatccggcgaggaatgataaaaagccttgcactctttttctcaaaca

SEQ ID NO: 469007 - DNA, 122 bp, Homo sapiens
gatgttcctctccctgtgtccaggtgtgttcccattgttcaactcccacccctggacactcgctttttcaccctcctgccagcttttctgcttagacctggacacagagtgcagcgggaaac

SEQ ID NO: 469008 - DNA, 122 bp, Homo sapiens
tcgatttgctgagcatacttctcagatgtaacagtttcctctggattcagaaagctgtagcggatcagaccggccgcagaccgcaaacagtgaccatgacctttttctggtgcaagtttggc

SEQ ID NO: 469009 - DNA, 122 bp, Homo sapiens
ggcccaaggctctctgactccttcccagatcctctcggcttagcggctgaagactgacaccgcccgatcgcctcgaaagccccctagaccatcacggacgccgagcttcaggtaactctcac

SEQ ID NO: 469010 - DNA, 122 bp, Homo sapiens
gcgttgagcgagggccggggcgcgagggctccggggcgggccggcggggactgcctctcccgctggtcacctggggttgaactggaattgttcaatagaggcctcgaggccctccatgatct

SEQ ID NO: 469011 - DNA, 122 bp, Homo sapiens
gacccaggaagacctcgtgggtttcccaggaagacagagactgggagccattcttcccggcggcagcggctctcggcctgtccttgtccccacacaagcccccactgctgcgccgtccctcc

SEQ ID NO: 469012 - DNA, 122 bp, Homo sapiens
ccagttctcatgccctttcaagtcccgggctggggggtagcagtggaggctggggttaaccgccgtccgtctcaaaggcctcattgtggagctgcaaacacgaacgtccttgaaatgtgagg

SEQ ID NO: 469013 - DNA, 122 bp, Homo sapiens
aggtatttgagtgtctgtttccctccctgggaaatcatgaggaccgaaacgctccttgtgcgctgtagctctgaggtggctgtcatggcccggacggcgggggaggcgaggatggttgtggg

SEQ ID NO: 469014 - DNA, 122 bp, Homo sapiens
ttgcctgaatttctcttgctcggaatcctgacatattcttgaagaaggggaaaaagacaccggatttgtcttatcgtttggagctttaaatataaatgactggatgttttctcaacatcctt

SEQ ID NO: 469015 - DNA, 122 bp, Homo sapiens
aaggaactttctcagccggataaagggcatctataaaaaagctacagctaacatcatactcgtattagtccatttatgcattgctttaaagaaatacatgaaactggataatttataaagaa

SEQ ID NO: 469016 - DNA, 122 bp, Homo sapiens
gaagtgtggagggagaggcgggtgtgggaactggggctgcgcgcagcgctcgccagccagcgcgagttccaggtgggcgcgggctcagcgggccccgcacccccggccccgggcagtcaggg

SEQ ID NO: 469017 - DNA, 122 bp, Homo sapiens
ccctcgttgttctgtgtccttcctaagcactatgccctaggcccccccgagagcactccccggttctaactctacacgggtatttgtaggtcttaagttgcaggagggcagggtctgtttgg

SEQ ID NO: 469018 - DNA, 122 bp, Homo sapiens
cggccacctccctgtcgggcagacttcctgttctcctgctcacagcagggaggcagtcgccgagccggtcagcagcgtgcacggagatcttcactctgcgcccagccccgggacacaggtgc

SEQ ID NO: 469019 - DNA, 122 bp, Homo sapiens
tctgcattgttcatgaggagttctgtttttcatagttgatgggagtttatagtgtgcctccggggttgactctggctgtgtcagcaatgtctttaggactgacagaatttttccgtgccgct

SEQ ID NO: 469020 - DNA, 122 bp, Homo sapiens
ggttcgccgcctcaaacctccctccggaagcaagctgctgtgccttgtagcgtgtggatccggagccgattcccagaacacgaaggggggaaaaaacgcttctaatgatccctcagaacttg

SEQ ID NO: 469021 - DNA, 122 bp, Homo sapiens
ttgggatatttgtgaagtgatggcccaggatttctctctctgtttttgacacctgtttcccgaggacttttatgttaaatgcaaaacacctgaaaaatacagtactctattggaaggatgca

SEQ ID NO: 469022 - DNA, 122 bp, Homo sapiens
tgggtaagaagctgctgcagttctgagcgtcctaaaggcccctccagcctgagggatgcacgcacacccatcccatctccaccccacagagggagatcggcccagggcagggcaccggctca

SEQ ID NO: 469023 - DNA, 122 bp, Homo sapiens
aggggaagggcacatgcctacgtggcccgccccctccaactgcagggaggatacagtgagcgagaacacgaagagacccgaaccaagcaggccgccctggatggtgagccactcggtggagg

SEQ ID NO: 469024 - DNA, 122 bp, Homo sapiens
aagtggaggtgacgccaaaatgaagcaggcgtggacctcgaggatctcattgcagacccgcggagaaccggagctaaggggccggccgagacgggccgggaggatgctggagacgccagaag

SEQ ID NO: 469025 - DNA, 122 bp, Homo sapiens
agaggctgagatgcgcggtgcgcggcggcgagtggcggagcgaggggcggttttcagaggcgctgtgtctgtgtgtcccctcagtgctgaggttcgctgcaacatcggcagaaacctggctg

SEQ ID NO: 469026 - DNA, 122 bp, Homo sapiens
ccgcaggtctcgtccccctaggcctctgtagtgtgaccaggagaacggattctcctcgggcgatctccatccaggtcctggggccggcagccgcggcaggggaacctcctgcgctcgggagg

SEQ ID NO: 469027 - DNA, 122 bp, Homo sapiens
gactgccctgagctagacttgtgaccaaagccagaagactggcctgagccagacccatgtcggccactgctggaagaccgaccggagccagacccatgtcggccatagctgggagactgccc

SEQ ID NO: 469028 - DNA, 122 bp, Homo sapiens
caaagtggcttcatatacagtcttgcttgatcctcatgcagcctatcatcaacaatgaagcgtcagccccctgatcaccgggaaaccatgaaagagctgccactgagacatgtgatggtctc

SEQ ID NO: 469029 - DNA, 122 bp, Homo sapiens
gcccaggccgtggtagcttccgcgcctagggataaacttgtggtagctcgcgggggacaccgctctcccaggcgctttctacgcgctgtgcaccctcggcctaggccccggcgcagcgactc

SEQ ID NO: 469030 - DNA, 122 bp, Homo sapiens
ctcaagcaatcctcccacctcagccttctgagtagctggaacctcaggcatttgccacctcgcccggctaattttttgtatttttagtaggaatggggctttgccatgctgcccaggctggt

SEQ ID NO: 469031 - DNA, 122 bp, Homo sapiens
gccgcgagggctatataaagctcgggtctcggacctactggaactggtcaagattgcccgcgagctggcagcggccttccgcccagctctgcggcgtcatggagaacgcgggaggcgcagag

SEQ ID NO: 469032 - DNA, 122 bp, Homo sapiens
cagctgaccgcagacactcacgtgacagctcggggcccacgcccgggtttgacagttctgcgcagaacttagtcccgcccccgcggctggtctcgccggtttcttcacttggaaaggcgttt

SEQ ID NO: 469033 - DNA, 122 bp, Homo sapiens
atccctccccggactccggctccggctccgattgcaatttgcaacctccgctgccgtcgccgcagcagccaccaattcgccagcggttcaggtggctcttgcctcgatgtcctagcctaggg

SEQ ID NO: 469034 - DNA, 122 bp, Homo sapiens
ttcaactgggatggggtgcatttggtcagaggaatctaaatccatccccttctgtggcctcgtcccctcctttatctggaaacctcacctatgtggcaagggcaggatgttgggaaaaccaa

SEQ ID NO: 469035 - DNA, 122 bp, Homo sapiens
gatcacccaatggagcactcccctgacctaggaaaggggacactggacagccacaacttccggcaaatgcccaggacaggtggttcctggtgacctgcggcagagcaattccagcagggtga

SEQ ID NO: 469036 - DNA, 122 bp, Homo sapiens
tcagccttacacaggaggggtggcagcttgcgtctgctcctgccggtattcaaaatgaaccgactttaggaggtccccctggggcatttgtcatcaggctgaggccatgccctgaattgcaa

SEQ ID NO: 469037 - DNA, 122 bp, Homo sapiens
cttcttttggtctggcttccttccctcagcgtcattattttgggctccttggatgcgtggcgtgtgctgggcagtgttcccctgcgtggatgtcgcgtttgttcctccatttgcccgttgga

SEQ ID NO: 469038 - DNA, 122 bp, Homo sapiens
aacacccacgtgtggggtgatgttttcccaccacggtgcagcgggttagcagctgacccgcgctcccaccaaacctaaaaccactctctaatgggctttacggtatttacattttgaatttt

SEQ ID NO: 469039 - DNA, 122 bp, Homo sapiens
tcacatttgtagggtctctctccagtatgaattctcttgtggttagtaagtgctgaggagcgcctaaaggcttggccacattcttcacacgtgtagggtttctctccagtatgagttctctt

SEQ ID NO: 469040 - DNA, 122 bp, Homo sapiens
ttggtgccaggatttgggtaccgtaccacggtttcctgttttcaaatgtattaattgatccgcaaaggacatcttttggagacaagaattcagacagactggcacagcctggacctccgcca

SEQ ID NO: 469041 - DNA, 122 bp, Homo sapiens
cgggccgcctgcaggtgattaggctaatgagctgccccgggggcgcggagaccggcctggcgagcggattacccggcgcccagctgctgccggcggagactcccaggagctccggagaggaa

SEQ ID NO: 469042 - DNA, 122 bp, Homo sapiens
acatgcactcctctctctctgtctttgacaaattacttttgaaagatcattgatccctggcgtaaatggtgttaagagtaagatggactcgggtagggatgctcaggaatccagtcctgtac

SEQ ID NO: 469043 - DNA, 122 bp, Homo sapiens
cctccgagctcctttgagtggtcaggctgggtgttgggggcctgggagtgaactgccacccggacagccagctacagggtgtgctcagaggcttaaggagacaaatgccaaaaactactggg

SEQ ID NO: 469044 - DNA, 122 bp, Homo sapiens
ggaggctgaagcaggagaacggtgtgaacccgggcggcggagcttgcagtgagccgagagcgccattgcactccagcccgggcgacagagcgagactctgtctcaaaaaacaaacaaaagaa

SEQ ID NO: 469045 - DNA, 122 bp, Homo sapiens
aaatgtcccagagaaggtgaatagttaaaaaaacaattaaataagaaaataagaaggcagcgtccaggccccacccctgtaccccagagcctcccaggaaaggtcaccaagcaggtcagatc

SEQ ID NO: 469046 - DNA, 122 bp, Homo sapiens
tgttaatgactgttctgaattcaccaaagagagttttctgttatatttcagaagtacttacgtcctggttcagaaatggaaaaccatatcataacagagtggaaggctgggtgagcacttgg

SEQ ID NO: 469047 - DNA, 122 bp, Homo sapiens
ccaggctgcaggctggatgggaaggataggcttttccacagaaacttaggtgtttgcctccgaggcccactgcgcatgccctggagggctctgtgggttccgccttcagttttgcttttcac

SEQ ID NO: 469048 - DNA, 122 bp, Homo sapiens
gggaggttttgcaggcaccatcccactgaaccttcacaacacagctataatgcagattaccgataaagaaactgaggctcaggtaagtaacttgctcaaggttatacagctaaaagcaatag

SEQ ID NO: 469049 - DNA, 122 bp, Homo sapiens
cgcaatttccgcccccgccacagtcttgggagtgggcgggctcgagggctgggaggaagccgaaagctgaccgagaggagaaagaagcccgcccccggaagtccctcctgtctctgcagctt

SEQ ID NO: 469050 - DNA, 122 bp, Homo sapiens
cagtgtctctgacctgcaacgcctagatgctagtagcaccgccctcctagttgtgacaaccgagaacatctttaaacattgccaaatgtttcctgggggtgcagtcacccctggttgagaat

SEQ ID NO: 469051 - DNA, 122 bp, Homo sapiens
cgagccggacgatgataccctggatctgggcgaggtggagctggtggagcccgggctgggcgtcggcggggagcgggacggactgctgtgcggggagacgggcggtggcggcggcagcgctc

SEQ ID NO: 469052 - DNA, 122 bp, Homo sapiens
accgggggcgccaaaaagccgcgacggcgtgggggcaaaaagccgcggcgggcaaaaagacgcggcggcgggcggcaaaaagccgcgggggcgggggagcaaaaagccgcggcggcggggag

SEQ ID NO: 469053 - DNA, 122 bp, Homo sapiens
gtgtattgccgaatatcattttaatgatacaagtattagcagccattatttttgggtggacggattacgggtgaattattttatgttattcagaacactgggctttggaatcaatcagaaca

SEQ ID NO: 469054 - DNA, 122 bp, Homo sapiens
tcgctctcccagctaaggcgacagcgctgccattttggatcctgttcagccacgggaagccggcgtttgcacacattttcggacgtcatattaaagcgcaccggacgccgagacttctggga

SEQ ID NO: 469055 - DNA, 122 bp, Homo sapiens
caagatgatgttaatgcctatttacattttaagatgagagataaatgatcttgcataaaacgtttatcatttctgagagtgagatctaatgtgtatcgagaaagtggtttccaaactacaaa

SEQ ID NO: 469056 - DNA, 122 bp, Homo sapiens
gatggaaaacgaaggtcaggctgcccagcagacagtggctggcgccagaggtcagtgcagcgaggccgtctcggtgcacggctggtaagacccggggtctcccaccagcgcatcagctttgg

SEQ ID NO: 469057 - DNA, 122 bp, Homo sapiens
caaatgtattaaacaagctaaatacaaatatatcctctcctagacagtttgtagtgaaaccgtagccccaaaggcaaggaaaatatttttttacaggcaaggggataaaacaattagactaa

SEQ ID NO: 469058 - DNA, 122 bp, Homo sapiens
gaaaaaacaaagcagagaaaagaaattcctccccagcactctcaggcatttggaggacaccgaagaacttgggagtcagctgcttcttgtgtgcagccatgaagtctgtgcactccagtccc

SEQ ID NO: 469059 - DNA, 122 bp, Homo sapiens
gggagccccctttctgtgaaacgcatgccatcttctccatttgtcagtttgatgctgtaacgtacatggggttttgcaagagcttcaaaactgtctgcagacgtcaatttcgcccccctccc

SEQ ID NO: 469060 - DNA, 122 bp, Homo sapiens
aaatttctctgcttctctccacagatcctcctgaggatcaaggtcagtgctctcccagaacgttcaaaagcagagagaatcattaccttctagggctaatgtatttccccaaaatctccaac

SEQ ID NO: 469061 - DNA, 122 bp, Homo sapiens
tcaaagcagagaaatgatgacctgcagtcttaaagagctgttgattgcacctggggctcccgtggccggcgcccatcgagcagcccatcctggctgttcccttgttcagctgattttctttt

SEQ ID NO: 469062 - DNA, 122 bp, Homo sapiens
ttcttcctttgacaactgcttcagtatttctcacaaccccagctgaagttaactgacatgcgcacacacattgaggtttcatgaaactttctgttctcaaataatcacacaccatagatttt

SEQ ID NO: 469063 - DNA, 122 bp, Homo sapiens
tgtgtggccctgtgctaggaacctggagtagagcgtgtgctccgagatcttcgcatcttccggatctttgaggggacaaatgacattcttcggctgtttgtggctctgcagggctgtatggt

SEQ ID NO: 469064 - DNA, 122 bp, Homo sapiens
gggagctcccgcggctctcgcagcgcagctagaacttgcgtgttccctcagcagtgagttcgcagttacgggtttgttgccagaattaaaaaagccccaaacccttgccccgcgccccgcgc

SEQ ID NO: 469065 - DNA, 122 bp, Homo sapiens
ttttgattcttcatttttctgttttgatgccagttcctcctcaggattattttcaggtgccgacagcggggactgcttgctgttttgggtgttattcagtggcctggaggcaggatgaggta

SEQ ID NO: 469066 - DNA, 122 bp, Homo sapiens
cagggttcgtggccatgcagggctctagacagcggcgctgcagagcttcctgaggtcggccggggccagggattgccctaattacacttcttcctctgcccagtctctccctgctacctgca

SEQ ID NO: 469067 - DNA, 122 bp, Homo sapiens
aatggagcattgagaaaagatggaatccagcattcattctgctctaaaatgcttggcatccgtttatattattcacacacataatcatttcttgagttagtttgtgttcttatttagaatac

SEQ ID NO: 469068 - DNA, 122 bp, Homo sapiens
agctcaggagcagagggacagccacctgccaggggagtgccgaattggacacacagagaccggaaagggcctgggggagggacgtggcacaaggtgggggacagtgtcaggggtggggcagg

SEQ ID NO: 469069 - DNA, 122 bp, Homo sapiens
aggccggccgtgctaccaaataaggcacctctcctgcagggagctgggacctaagggactcgcgctgggcacggggcaggcggcgcccatgtccccttcccacggtgcccagagggcctgtc

SEQ ID NO: 469070 - DNA, 122 bp, Homo sapiens
cgcgccttgcagaccagacacggccccgccgagccccagcagcaccgcctggaatgcatgcgtgtgttctcagagctgcaccaattacaaagcgttttgcctaaagattacattataagtca

SEQ ID NO: 469071 - DNA, 122 bp, Homo sapiens
ctgcggggctagagcggagcccgggctgcgaagcccggccccggactgcgcgcatgcgcccgtctttcatacctgcactccggacgcgcccttcgggtctgcactgacaatgacttgcttgc

SEQ ID NO: 469072 - DNA, 122 bp, Homo sapiens
ccctatcccagaaagctccccagcccttccctacctcttcacccccttctaaaatagagccggtaactcaaatccatgggctctacggcggcctggcagaacccctgtcaatagggacataa

SEQ ID NO: 469073 - DNA, 122 bp, Homo sapiens
tccacctgcagtgcacgggggacagctcgcatttcggtatgctaagaatagtccgggttgcgctaagagcccgaatgcgaagggtatggaagtcgttctctgcggaggccccgctggcaccg

SEQ ID NO: 469074 - DNA, 122 bp, Homo sapiens
taatggcatacacacaaataagcttaagtctttaagtcttgaatcttcaaagattaactccgacgtgtaggtaaaattaagccgatgtagccagttcattatattgggcccaggggcataag

SEQ ID NO: 469075 - DNA, 122 bp, Homo sapiens
aaggaagctccttggaaagccgagggtcatttaatcagagtccattccccaagaagtccccgtcgaggagcacttaggcagtcaggtcctgagaggcagacggcaccatcagggccaaggca

SEQ ID NO: 469076 - DNA, 122 bp, Homo sapiens
cttcccttctgtttccttttccctccccctggagctgtagcggcagcagcagcaggaagccgagccgggttgagcgactcggaggcgagcggaggagctggaatatggggagtcagcgagga

SEQ ID NO: 469077 - DNA, 122 bp, Homo sapiens
cactgctgcaatgggctctgagctggagacggcgatggagaccctcatcaacgtgttccacgcccactcgggcaaagagggggacaagtacaagctgagcaagaaggagctgaaagagctgc

SEQ ID NO: 469078 - DNA, 122 bp, Homo sapiens
tgggactaagcattgaagaagcattaatgtactccttccagagactggattctgacatctcgctggaaatccaggcccccctggaagatgaggtgacaaggaacctgtcactccaggttgct

SEQ ID NO: 469079 - DNA, 122 bp, Homo sapiens
ccacaggtgatctgtgccgttctcattgtattctcaactctcatcccttccaggttagcccgatccctttaatgcaaggatcggtgccgggaggaaagagagcgtgggccactctggaacgg

SEQ ID NO: 469080 - DNA, 122 bp, Homo sapiens
cttactaaatatagtggatataaaatagaacacctgactttgctcttagaccataacccccgaacttactatgttcatatatttgtattgaacaatcttttaaaagcaaaaatgtaaatgat

SEQ ID NO: 469081 - DNA, 122 bp, Homo sapiens
aagactttgtttttcttttgctactcaaaagaaagctggaataccaaaaatttttacttacggatatcaggtcttagttaagatcgtggtttgaattcaagcatctaattttgcctactctc

SEQ ID NO: 469082 - DNA, 122 bp, Homo sapiens
ccgcagcgtgcgctaccccatctccaaggcccggcccaactgcggtggcaacctcctgggcgtgaggaccgtctacgtgcatgccaaccagacgggctaccccgacccctcatcccgctacg

SEQ ID NO: 469083 - DNA, 122 bp, Homo sapiens
ggggaggtaaggatctagcactgattaagcaacaaccttgtgcccagtgtttaaatatttcggctctttaaagcctcacaatttgtttcattcactcactattcctggtgctcagcatatgt

SEQ ID NO: 469084 - DNA, 122 bp, Homo sapiens
ccctgtccaatcagggacattgacgtgggaactgtccaatcaggagcgcagcttgagaggcggagggggtttccgggatctggcggggcctttgtcttgtgctccagctggagctttggtcc

SEQ ID NO: 469085 - DNA, 122 bp, Homo sapiens
gagcggctggagattgcccgagagaggctggccttccagcgccagcggctggagcgggagcgcatggagcgggaacggctggagcgcgaacgcatgcacgtggagcacgagcgcaggcgcga

SEQ ID NO: 469086 - DNA, 122 bp, Homo sapiens
catttaagcagttagcattatttttggaaaattttaaacttgtaccttattcccttatttcgaactctggaaggcccatatcctgggagaaggctggcatggctgatccattcctatgaccc

SEQ ID NO: 469087 - DNA, 122 bp, Homo sapiens
ctgcgcttgtggtgagggccacacagctcagcccccgcaaatcccggatggactcatctgcgcccccgaagatggcttccctcacatccaattcccggtccagatcggactccagggtgttt

SEQ ID NO: 469088 - DNA, 122 bp, Homo sapiens
gtttggaacaggagtcacacactcaaatgcctgcagggattgggctgttaatgcaaatgacgaaatgagctgcatgtgatcctaggagtggggaggactgcggggagaattgtggcaaagta

SEQ ID NO: 469089 - DNA, 122 bp, Homo sapiens
aacccatttcctccgttcattcctaacttgagggcgtttatttacttttatctacgcatgcgcactcctggctgctagagagggcctcttcgcccggcggtcccgccttctgacgtcgacca

SEQ ID NO: 469090 - DNA, 122 bp, Homo sapiens
ctcccttccccttcagcagcgatctcaagataaacagctggggaagaggagctgtggaaacgtccaatcagggaaggttattaacccaggattctaattatggtgttgccctgtgtctcttg

SEQ ID NO: 469091 - DNA, 122 bp, Homo sapiens
ccaacccccgggctatggaccagtacccatcagaaaccaggacgcacagcaggaggcgagcggtgggcaagtgagaataaccgcctgagctcacttcctatcagattagtggtggcatcaga

SEQ ID NO: 469092 - DNA, 122 bp, Homo sapiens
aaaagatagcttgaaagtacacagcttgtctgtgcctggctcctaaaaaacaccacagaacggccaatcctttgcctctggcacccacacagcatgcatgccctgaagtgaaatctttcata

SEQ ID NO: 469093 - DNA, 122 bp, Homo sapiens
ggcttggccacccagtagaggcactgcacccaatatgctgtagtagaaattggggcagctcgttcaggttagctgagccttaaattcctcatctgtacactcaaaataataatctcagccct

SEQ ID NO: 469094 - DNA, 122 bp, Homo sapiens
ctacaattcaggaacagccaaatggaagagaggcataggacagactaaggggaaaaggggcgcggagcttccataccctcccagagcctgctagcctcccagcatgtcaatgtgttcactaa

SEQ ID NO: 469095 - DNA, 122 bp, Homo sapiens
gaaatgctgatccataacactctcctgccaccaagtgaacttctgtcagcatgacaactacgaaaaccttactataaattcaaagcagcaggcatattttttgtagagtagatctagtggca

SEQ ID NO: 469096 - DNA, 122 bp, Homo sapiens
ccttggagtaaacgggaggcaggaggctgttttctagcagagcccagaagatgctctggccgacggctcccgggatcttggccggcggtcactcgcgaccatccgcgacgcccccaaaatgg

SEQ ID NO: 469097 - DNA, 122 bp, Homo sapiens
gggcatctttggacttcaggatgtattctcaaccagtccagtagaaactaaacgctttgacggtgctggagcctttgccttcgcggggactgccgtttctgcgcactctaagatcgctgcgg

SEQ ID NO: 469098 - DNA, 122 bp, Homo sapiens
aaccccaatagtggaaagctccagcaggatgccctgagccctgggtcttcccagcagaagcggtggaggatccgcccctcgtttcccacccccgcgccccaccctgttcccgccccttctct

SEQ ID NO: 469099 - DNA, 122 bp, Homo sapiens
tccctctcttcagtccagggagaccaacctgcaaaatatgtttaaatacagtagacacatcgcctcaccacaggtcagcaaacgaaaaatgcctctttagaggttacagacgaataaccatt

SEQ ID NO: 469100 - DNA, 122 bp, Homo sapiens
tagagcttctgtgaacattcttgttcatgtctattggtgcatacgtgcacgcatttctttcgggtaaatatctagaagtgtaactaacggcaaactgttttacaaagtgatccacaaatgta

SEQ ID NO: 469101 - DNA, 122 bp, Homo sapiens
cctgacctcaaatgatccacccgccttggcctcccaaagtgctgggattacaggccactgcgcccagcccgagagggtctttttaaaacagtttacgacttttaggcgtaccctgtcaagta

SEQ ID NO: 469102 - DNA, 122 bp, Homo sapiens
cctgttcacgtccaaattgtattgggatgtagaactcaattccatcttggagtagttctccggtaatgagaaaattcataccaggccctattttcagcctgagagtccccttccggcccctt

SEQ ID NO: 469103 - DNA, 122 bp, Homo sapiens
agtccgccaattatcatttccggtgattttctaggaaaggcgtcaactctctggtctaggcgttcccttaaactctccgccctcctcctcgcggctcagccttctaggagtttgcgtgcgtt

SEQ ID NO: 469104 - DNA, 122 bp, Homo sapiens
gctttcatcactgctgagaactagtaagacagaattatctttaccctgagatgtgttgggcgcagacgtgtatagtttggtatcacattcaaaatctacattcccttcactgttcatgtctt

SEQ ID NO: 469105 - DNA, 122 bp, Homo sapiens
taaaacatttgctttgttacaaaataaaagccacattccagggaagtatacaaagggcttcgcacactgagatgccgctccctgccacgggaggctggacgactgcacgggagaaaattcca

SEQ ID NO: 469106 - DNA, 122 bp, Homo sapiens
ctgtccagcatgacatagctagagtgtaaaatatatgggatttgagcccatgtggcctaccgtagaacgatgctgttaatcacttcatactgcctgcgacttaaccaatgtgttgtcataga

SEQ ID NO: 469107 - DNA, 122 bp, Homo sapiens
aaactctgaaggctttcaggcatatgttatcttgtaaggatacatttttttcttttgagacggagtttcggagtttcgctcttgtccgccatgctggaatgcaatggcgtgattttggctcg

SEQ ID NO: 469108 - DNA, 122 bp, Homo sapiens
ctcacattactgtccatttcatctgctacaacacaaagatggaacgctgttatcaagtaacgctctgttctgcgcctgcagccactgcacagcaagctaaattcttgggaagcctcacttcc

SEQ ID NO: 469109 - DNA, 122 bp, Homo sapiens
tggatttcccgtgattgccaccattattagcattgacttttccttgaaaaattggcgccccgtggccatgggccgacctaggcagtttctgcagggacgagcgtgagttttgtaccgcggtt

SEQ ID NO: 469110 - DNA, 122 bp, Homo sapiens
accccctcactctcttccctgcagcggcagagcggggcgctggtgccggcggcgggcgtgcggcacatcagccaccggcgcttcctggccactttcccgctggctgccgtgagccgcgccga

SEQ ID NO: 469111 - DNA, 122 bp, Homo sapiens
cttggcgtctgctctggcctccactcttgccatgctcgaggagccttcagcccgccactgcgctgtggggtacccctctctgggccagcccaggccggagccagctccttccgcttgtcggg

SEQ ID NO: 469112 - DNA, 122 bp, Homo sapiens
tgggagttgggggccgggctgggcgtccgagcacctgaccctcgagggggcgggcggggacgggttcccagctggacgcccctgctctccggtgccagaacagaacaaaattggggggccgg

SEQ ID NO: 469113 - DNA, 122 bp, Homo sapiens
taaagaaatttccccctttaaaaacaatgccaattgtctcattgattttttttcttgtttcggaaaatatagttatttttcaaaaatgatttagttcatatatatatatatatatattttat

SEQ ID NO: 469114 - DNA, 122 bp, Homo sapiens
aggttgtgtgtggaccctgagtgtggggagtactgttttaaatatggtgccaaggtaggccgcattcaggacttgaagttggtaaagaagtcagctacgcagaagtcacggagatgcacact

SEQ ID NO: 469115 - DNA, 122 bp, Homo sapiens
agaggggcggtacgcaccacgggggaagccaatgagaaaatcaggcccagccctagggggcggtgctgtcggtcacatgcgcacctggggcgggtggtggcggcggcgcgggcaccgcgagc

SEQ ID NO: 469116 - DNA, 122 bp, Homo sapiens
gtgacgtcaggcgcccggctgctcctcacttgctctgagacaggtgcggcaagtctactgcgggctggtccgggctcctcaggttcagacccgaccgttatccagtcggttcgtggagagga

SEQ ID NO: 469117 - DNA, 122 bp, Homo sapiens
tctggaaagagaccagaagctctctgagttagacgaccgtgcagacgcactgcaggcaggcgcttctcaatttgaaacgagcgcagccaagttgaagaggaaatattggtggaagaattgca

SEQ ID NO: 469118 - DNA, 122 bp, Homo sapiens
ttttcagtcaaatgccctacctagccacgtgaagatcagcgtttccaggcagacgcttttcgaagattccttccaacaggttagatcatggtgcccgaaaccagtggcaggccgacgccctc

SEQ ID NO: 469119 - DNA, 122 bp, Homo sapiens
ggcccacaggggaactgcttgttgatgacaactgacaatcttcatttcaccttgaaactccgtcctggtccaggtaagcatgttctaagcccagttttataggggtgctactctactggggg

SEQ ID NO: 469120 - DNA, 122 bp, Homo sapiens
gcgtgttttaagagagggtcatggggcacgagactgaccgggcccctgcgggagttactgcgcatgcgtgccgtgggcccgggaggagtttgccggggaggagtgggtttggaatcggggtt

SEQ ID NO: 469121 - DNA, 122 bp, Homo sapiens
ggggagggggggggcaaaagaaatgggaagcctcgagggtcaaactaggcgaaagaagttcgcttttagaggaagagaggaaattgaggccggaaagaagatacctaagctttcagacatgg

SEQ ID NO: 469122 - DNA, 122 bp, Homo sapiens
gtggacgactcagggtggtccagaaagtctcagaaagatgagtaagtggagaccgaagggcgagaaggacctggggggagctttcttcgacagagcctgagacctcaaagcagcttagtgtg

SEQ ID NO: 469123 - DNA, 122 bp, Homo sapiens
gacaggggccgggacatggctgcaggagggcgggccggactggactgatggtagaggggacggcggcctcagcactgcctccagccaaggagtggagctccccagcctcaaggggatttaaa

SEQ ID NO: 469124 - DNA, 122 bp, Homo sapiens
tctgatagaaaggaagtggcagtgggagttaccaccacaccacggggaccctgacgtttccgtggtgtgtgtctgtcagggagcaacgtgagaagagaaaggtgtaaaaaaatgaagaccag

SEQ ID NO: 469125 - DNA, 122 bp, Homo sapiens
tttaatgtttgttcaagtaaaaaaaaaaatgtccttcaccccttgttggcagtcagtcaccgggggaaagtgtatcagctggtggatggtggaacccattccaccctgtgctcctgggctac

SEQ ID NO: 469126 - DNA, 122 bp, Homo sapiens
aggaagtcattctcggtgctgtggcctggggaccatcacgaactgtcctagagcgcaatccgaatgcaagcaggggagaggaggccccagcaggctggatgctgctacggggagtgacggtc

SEQ ID NO: 469127 - DNA, 122 bp, Homo sapiens
aacccaagttacagagaaagttcgtaacttttttattgaattattgactctgccgcgtgtcggttcgtcggctttcaactccagtctgtcaatgcccctgtgtaggtggggtccccaggtct

SEQ ID NO: 469128 - DNA, 122 bp, Homo sapiens
gagaagatttggacgtgcgcacgcccgtgcgccgggtcccttctccacaccatcgcagaccggggccacgcagaccttccccgcagccctgaaagtgagttctggtctctgccagcccggct

SEQ ID NO: 469129 - DNA, 122 bp, Homo sapiens
cccgccgggcactggttcgtggagcgtggcggttacgggcggtgcacagcgcccgcagcccgctcctagcgagctggccccacgcgggccctccgcacccgctgcccacaggagcgcaggct

SEQ ID NO: 469130 - DNA, 122 bp, Homo sapiens
gcccctcctccgctgctcctggctccggaggggacccctggtctgtcttgtcagtgtagacggttggcgttttctggggcttgttgtcagtgcaatcatacagtgtgtggtttttattgtct

SEQ ID NO: 469131 - DNA, 122 bp, Homo sapiens
aactataaattccacaattccctgcggttaaggtagccgcgccaactacggacacccggtcgggtcaataagtacctgcgcggccaaagtgcctagcatggtgacaggaggagccgggccat

SEQ ID NO: 469132 - DNA, 122 bp, Homo sapiens
agagcctcgcacatgcctccgccccgccccgtactcacccgggaccgcggcttgggctcacggccacttccgaccagggaggtcctgcccgaggtgccccgcctgcaacccggccggcggcg

SEQ ID NO: 469133 - DNA, 122 bp, Homo sapiens
gctgccaaaaacagttaatcccgctttaaaaaaaaaaatgaaaaaaaaaaaatctccaagcgccctgtgtgtgggtcgcctcccccaatcaagctgccgaagacagccagccccgcttcaaa

SEQ ID NO: 469134 - DNA, 122 bp, Homo sapiens
gaaagagcgagactccatctcaacacaacacaacacaaaacagtgggatttcccaaaggtcggcaagaaatctaagcagatcccgcagcgatgctgctccgaggccataggtccccatggga

SEQ ID NO: 469135 - DNA, 122 bp, Homo sapiens
ttaagtgcgggaagcggcggggttggcggcaagcagagagtgaacgccggggcagcggcgcggagtcccgcccgacagcctccggaccgcgccagcaccatggacagctcaggtagcgctgc

SEQ ID NO: 469136 - DNA, 122 bp, Homo sapiens
ggcaccgccactcagctctgcgacggccggccccgtgcggccccagcccgccctcgcctccgcaccctggggagccacctgtccacttcggagccgctgtcacagcccccaccagctccggc

SEQ ID NO: 469137 - DNA, 122 bp, Homo sapiens
acagtcaaaagtcagtacaacttaaatatggcagtttatctcaggacatctcccagcacacgtcttcctgagagcaagctgctctcaaaaccaaggcaatgggaaaatggtcagaaacatga

SEQ ID NO: 469138 - DNA, 122 bp, Homo sapiens
tctggggctcaaacttgctttgtcagaagccctccaaccaagcatgcgaggctggtgacacgtgggagggcatggaggccccagcattgtatgccaaccaatgggagctgcagacaaccaat

SEQ ID NO: 469139 - DNA, 122 bp, Homo sapiens
tagagccactaagaagcgggacccagtgagggctaaacgtggggcgccgggggcgtggcgcggggcgcaggtgcacgcaggttggccgcgggcgcgcggggtccggcgggagtcccggggtg

SEQ ID NO: 469140 - DNA, 122 bp, Homo sapiens
agttcttgaccagctcccggtagcgtgggcccaggaaccgggtcaccatcgcggcggagtcgcaccctcaggatgaccctgtccagctgacccggctacactgcgcaggcgcggccgcggcg

SEQ ID NO: 469141 - DNA, 122 bp, Homo sapiens
cagcagttttgctcctgggtgcagcaggtgaagcagtcccccgggcagcaccccatggtccgggcccgtcagctcgcaggtcggtaacgcagccggagttccccacgactgacggtggccag

SEQ ID NO: 469142 - DNA, 122 bp, Homo sapiens
gagttgaaattccccaacctgataacttttctccaagttttcctgagaacacagctcaagcgcctcttcacagtctcctaggcacaacgatttggtttctcccaagtctctctcatccgcct

SEQ ID NO: 469143 - DNA, 122 bp, Homo sapiens
gcggcggccgcgctggggggcgtgaggcgagcggcgcggagagcggcaggggcgaaacttcgcgggccagatgcccgagggcgcggcggcgctgccaggctgccgctgctgcccctgcgggc

SEQ ID NO: 469144 - DNA, 122 bp, Homo sapiens
ggggtgtgtcttctgcttctttaacctggcaggggcggttcaagtggccggggaaatcagcgatttggagggtcgagggctggtgctttgagagagacgcggagggcagagagggattcccc

SEQ ID NO: 469145 - DNA, 122 bp, Homo sapiens
tgtgtctgattagaagggacacaacattattctcacttgagtagagaaactgcccttcaccgaccagaatttttattcatacaaagaatcctttggcacaccaaattttcaagctcatgtga

SEQ ID NO: 469146 - DNA, 122 bp, Homo sapiens
ctgctcgtggtaccccaaagcaggcagaaggccaatgaggggaaggtgaggcacctggggcggagaaaaaaaccgcagctttgagaagcggggcctgggtacccacggatgaaggtaccttc

SEQ ID NO: 469147 - DNA, 122 bp, Homo sapiens
cttacctttaatggcgactgaaaagttgccacgagttcctgatcattgtggtaggtgctgcgtgaagctgagacgtgcgtgagccacatcccagggggctttgagcccccaccgcggcggcg

SEQ ID NO: 469148 - DNA, 122 bp, Homo sapiens
aaaaatccccatctcactatatttcaagtgctattttagccccctgttgtatatttgatacgttagtgcctgggcactaattggtaccttgtgaaaggacgaaattattctgggtttgcact

SEQ ID NO: 469149 - DNA, 122 bp, Homo sapiens
tcagctgcctggccttccacccgcactgggtcagtgtggcggtgggtgggggtcgggggtcgggggctggggtagagggatgggaggcaaggggacaaggcagcaggggtcctgcctggcta

SEQ ID NO: 469150 - DNA, 122 bp, Homo sapiens
tgagggtggaatcagaatctattttgaaaaggcatccccaaatggcagtctgatggactgcgggtttggataccactgctgtaatgtaaccctctttgtttagatgaggaaactgaggttca

SEQ ID NO: 469151 - DNA, 122 bp, Homo sapiens
aatctctgtgcattgctaatagggttcctgcaagcacagcacaccagactccaccagcaacgtctaggtctcccacttgctcatggcagggggtaatgtcttgggagagcaatagagaaggg

SEQ ID NO: 469152 - DNA, 122 bp, Homo sapiens
ccaggaggcccgggctgtggatcgccaggaggctgcagcctgatcccagcgtcactgctgcgacaggcacctccctgcctggattctgccgcatgggtgacgcgtcgcttcccaccttcgtc

SEQ ID NO: 469153 - DNA, 122 bp, Homo sapiens
ttgtcctctactcctaggctctgctgctgcttttcccaccctccaatagcttaggttctgcgtggtgctcccagcgccctgtcctttgctgatgatggtgtcatgtataattcagtgtcaga

SEQ ID NO: 469154 - DNA, 122 bp, Homo sapiens
gctgcaggccggactcggaactgcccgggacaccgcctctgggttctgagtcccgagcgtcgttgaagcatgagaggaactacatcagaccccaaaatagtctctcctaggaagtcaggatg

SEQ ID NO: 469155 - DNA, 122 bp, Homo sapiens
ggccgggcgtttcgtcagcggggcaacctgcgtgggcatttgcggctccacaccggggagcgtccttaccgctgcccacactgtgccgatgccttcccccagctgcctgaactgcggcgcca

SEQ ID NO: 469156 - DNA, 122 bp, Homo sapiens
cgatctccctccggcctcttccctcggtgtcccggctcctctggcaactgggcgggaccgcgagcgtctagaccgcagcgctaaaatgcgctcagccaatccggcagctggcgcagacacgt

SEQ ID NO: 469157 - DNA, 122 bp, Homo sapiens
acgcggctgggagcccggaagtggtagggacctctggaagggctggtgttcatccgcttgcggaggaaagccaggtagttcaacttgtttctgtagaaattgccagaaatgttgatgccttc

SEQ ID NO: 469158 - DNA, 122 bp, Homo sapiens
aatgtcgtcaaaatcaaaactgagtcactagtgttataaaaaatccctgacaaatagagccggaaaaggctatagagttcttatgcttgtatgcttaataacaaaactatctcagactctac

SEQ ID NO: 469159 - DNA, 122 bp, Homo sapiens
acccccaagacggaagaggatggccgcggcggctctgaggagattttggtcccggcgccgcgcagaggcgggcgacgcggtagtggcgaagccgggagtgtgggcgcggctgggtgagtagc

SEQ ID NO: 469160 - DNA, 122 bp, Homo sapiens
ccaactcgccacccatgggatcgactgccctcagctgcccggcttggagtgcgtagccttcgccgcgtggcccaggagaggagcgagacaccaaggcgtttcgcggactccgcgcgcaccag

SEQ ID NO: 469161 - DNA, 122 bp, Homo sapiens
cgggatggccgccagggggcgctgcgccgccactgcccagaaattgggcggcagtgaggtcgccgcaaggcttcccgtggaccctgcaaaacgtggcgtgggcattgcacaccattgtactg

SEQ ID NO: 469162 - DNA, 122 bp, Homo sapiens
ctcactgctaccaaatgacaacttgtctctgtgttaccagtacccagcacgcatggtgcccgggactgcatgcacacatctcaagcagtttctgaagacacagaggagaaacactgccttag

SEQ ID NO: 469163 - DNA, 122 bp, Homo sapiens
caggtgccaggctgggggacagggctatgtctccagccgggttccagtctaaggggagaccgctaaaagaatgcgtggggagcccctcctccataggcccctgcccctgggtggactgcctc

SEQ ID NO: 469164 - DNA, 122 bp, Homo sapiens
tcctgccacattccagctgctggtctcgcacatagccgtctaacttccccacacatcagtcgtcatcctacagctgcagacgagcagagcaaagagagaacacatgtgtaaggcacttatcc

SEQ ID NO: 469165 - DNA, 122 bp, Homo sapiens
taagtgtattttcaaagtgcatttttgacttacaatattttccatttatgatgggtttatcgagaagtaaccccactgtaaatcgaggcgcatctccaatctagaaggcagctactccttaa

SEQ ID NO: 469166 - DNA, 122 bp, Homo sapiens
gcttccctggtgggcaacattccatatttgctctcagaactcactactggaggaattaagcgtgttatgtgtgactccctgggggagggctctggaagcttgacgcctggcttagcctggac

SEQ ID NO: 469167 - DNA, 122 bp, Homo sapiens
atcccagtcacttcctgaattctccgaggagctgtccacccgtctgggttctgggtaaggcgggtcaggcctcattggtttccggcggccccaagggcgaggtagccagccaccaagccgtc

SEQ ID NO: 469168 - DNA, 122 bp, Homo sapiens
ccttcaatcaataaccgcatgacaattttcagagccagccttcactggaacatactctggcgcaccctaatagtgcaattataagaactaaacccagtactccaaatgagattacagtcgca

SEQ ID NO: 469169 - DNA, 122 bp, Homo sapiens
aattatccaagaagacgtaacaatatcccatatgtatgcacctgatggagagacaaaatacgtgaggcaaaacccatagaactgcaaggagaaatagatggatttactatcatagttggaga

SEQ ID NO: 469170 - DNA, 122 bp, Homo sapiens
gaagcgattattccccggcgtctggcggggccgggggcgggctcgcacccggaggagacacgggtctccccgagcccacctttgatcgcaccgccccgccttcccagcccctggcccgggag

SEQ ID NO: 469171 - DNA, 122 bp, Homo sapiens
cctctcctctccttggtgatcacaggtgtctggtgcccttcagggacttgaatccaagctcggaagtcaacaccgcaaacctactcgaatctccttcaagtctcttgctcacttcctgttac

SEQ ID NO: 469172 - DNA, 122 bp, Homo sapiens
gcgggagaagggccctgcagggttggactttgcagaaactgcccgcgaaggactcggccccgagagtggcatgccccaaagccacattttgaagacaaagtcttcaaaaatgtataatgtaa

SEQ ID NO: 469173 - DNA, 122 bp, Homo sapiens
gggggcaaagtggttgtgattatctgaagggctgctatgtagatgaagtattaaacatgtcgtaggcaaggtttagaggagaatgtggtacttaaccttctatagatcccacaatgaaatga

SEQ ID NO: 469174 - DNA, 122 bp, Homo sapiens
aaatggaggccatcagatgttaagtaaattgcctagaatatgatggatttgcagatgaatcgaagtttctcagactccacagtctgttttgagattttatgtgacgatttcagaattaacag

SEQ ID NO: 469175 - DNA, 122 bp, Homo sapiens
taacacggtgaaaccccgtctctactaaaaatacaaaaattagccgggcgcggtggcgggcgcctgtagtcccagctacagtcctcagaggctgaggcagtagaatggcgtgaacccgggag

SEQ ID NO: 469176 - DNA, 122 bp, Homo sapiens
gcgacacagcgagacaaaaaaaaaaaaaaaaaaaaaaaggccaggctagaaaggacagagcgggactaccccggggatactgggctaaccctgagcaaggggacagctaatgccaatctgta

SEQ ID NO: 469177 - DNA, 122 bp, Homo sapiens
cccccacacctgcgctgcggtgcagaggtcttaggatccgagggggctgccggtctgggccggcgcgttcaggccccgggcggtggggcggcctcggcgtgcgtggctcggttgcctgcagg

SEQ ID NO: 469178 - DNA, 122 bp, Homo sapiens
gtcttatcgtaaagaattgttaaaatttaggatagggaaaaaactatttaatggatgaagcgagaacagcaggaagaaaaggagggaaggtagttttctagtacaagcatattgagaagaat

SEQ ID NO: 469179 - DNA, 122 bp, Homo sapiens
atgtgtctcggctttcaatttgggcagacctacctctctcctactcgctggttcgtcagccgctctgttcaatcgtaggagcgctcctggtcggttcccgcagtgccttgcggctgtaatgg

SEQ ID NO: 469180 - DNA, 122 bp, Homo sapiens
aaaaaaaaagtggggggaaaaagtgcttggagctcccaatttcagcccgcgaaagtctcccgactcattgctattcttgggctcaggaaattgcttaaacgcgatctgattgccagcaacgt

SEQ ID NO: 469181 - DNA, 122 bp, Homo sapiens
aaagaggagaaacactggggagagcacccggaagcgggggcgaggacgcagatcgggggtcgacgtcaagaaagaaggcgggaagaggacaaggtcgggagaggaggaggaggggagcgagg

SEQ ID NO: 469182 - DNA, 122 bp, Homo sapiens
ccgcgcggcgggagtggttggagccggagggcggatctgtgcctggccgagggtgtccgtcggcgtcactcaccgtcctcggcccgcctctgcgtccactaggagcggcctgaaagaggccc

SEQ ID NO: 469183 - DNA, 122 bp, Homo sapiens
agacctggtcgggagtccggcggctagagttgattgcaaggggcctgttgctcgactgtgcgttaaagaggctagagggagcctaggtagacgtggggcgcaagctggagccggcagcttgc

SEQ ID NO: 469184 - DNA, 122 bp, Homo sapiens
gggctcaagtgatcctcccacctcagcctcccaagtagctggaactgcaggcatgtgcgacgacacctggctaatttttaaatttttcttgtgtaaggataaggcctcgctatgttgttgtt

SEQ ID NO: 469185 - DNA, 122 bp, Homo sapiens
tgcccgtgcccgtgcattggaccgggtgagaaagtgtgggtggcgtagacactctacacccgagaaaatcaagctcaaagcacatgccttccataggcaaaaggtggggctcccagccatgt

SEQ ID NO: 469186 - DNA, 122 bp, Homo sapiens
taggcgtgggagtgctaaaaagctaaactagcattaaaatatcattaatcaaagcttgttcgtagaaggaccccccactgagatggctacaggcatgggtgccactgcacggattcagcttc

SEQ ID NO: 469187 - DNA, 122 bp, Homo sapiens
ccaagcagcctagatctataaaagaggggagcagaagaaaacctatccaaagcctctacccgcatacctcagagcttggggcttccattggggggagcatctgtgtccaccagcaacaccca

SEQ ID NO: 469188 - DNA, 122 bp, Homo sapiens
ttggttgtctttttttatttgcagtttcagccggctgctgtttcctagcccattgtgccacgtaaggcttctccactgcgcggagtaggtagttattaacgctgaattggcttctggtacag

SEQ ID NO: 469189 - DNA, 122 bp, Homo sapiens
caagtcctgttttcatcagaaatcccgggggtggggagatctgcgttgcctatttgtggccgggatgcttgtttggggaccatgaagtcactggagtccagttctttttcctggaacttccc

SEQ ID NO: 469190 - DNA, 122 bp, Homo sapiens
agagaaccagtgtgtgcagccaatgttaatgtgacaaaaagtgcagagttagtcccagagcgtgaagtcctccctgtcctaggcccaggtggaggccaggagctgctccccgggctgcctgg

SEQ ID NO: 469191 - DNA, 122 bp, Homo sapiens
tgtgggggcaaatttgtgccaggaggggagctcgaccggtgaccctcagagccaggtaggcgtaaggagtaaatctccttcttcccggtgtttccttcccaccccctcgaaccattgctgcc

SEQ ID NO: 469192 - DNA, 122 bp, Homo sapiens
ggctaacctgatttacattcccagtgacagtgaataggagttttctattgtctgcagcctcgccagcatttgttaacaaatatttatatatttcaggcaaagatcatctgttagtttttatt

SEQ ID NO: 469193 - DNA, 122 bp, Homo sapiens
ggagaaactgattttctattcataaaatgtgcgcctctctgcgcctgcgctggcgctgtgcgcctttgcgagggcggagctgcgttctcctcaacacagacccggattgcatcgtgagggcg

SEQ ID NO: 469194 - DNA, 122 bp, Homo sapiens
gtacctccaaagtttcagaatcggacgaaggaaaggtaggaaggagcgcaccggggctggcggaagcagtctctgccgctcttcttaatttcaggaggttgctgggacgcatgactcacctt

SEQ ID NO: 469195 - DNA, 122 bp, Homo sapiens
ttagtttaactgtccgtaggtgacttgtgttaactagctcaatcagaccctctaccttgccgcaaggacagaggactttctgtatcctgggttcttgcctcggtgtaccggaagaatcggat

SEQ ID NO: 469196 - DNA, 122 bp, Homo sapiens
ggagagcagggatggggtgaaccctgactagagtccacagcatcggtgattgccttaggccgtggggaactccctccgtccccttgtcctattgtaaaacagcagcatgcttgcgcacgtcc

SEQ ID NO: 469197 - DNA, 122 bp, Homo sapiens
ttctaatcgctgcagctctggagatgtgttcaaaggctctttcctgaccacaggctgagccgggtcacaagtgaaatgcagttgctgtgaagggggaggggtgtctggaatttttggatggt

SEQ ID NO: 469198 - DNA, 122 bp, Homo sapiens
atggcataaaaacttggtattgaaggagttaaagggtctcccacacccctttgcatgaatcgttcttttgtgtacacagctgcagtggcagcacgggtcggaaaggaaatggttagaggaag

SEQ ID NO: 469199 - DNA, 122 bp, Homo sapiens
ggcggtgctgggactgggcttgcggggtcccgcgggaggacccgcctcaaagagccggcccgatcatcgcctcctagaatacccagctcaacgtctacctggagtcggctctacaggacgcg

SEQ ID NO: 469200 - DNA, 122 bp, Homo sapiens
cgtctcctatctactgtatcacctttcttgctaccaagcttttacttacagcgcatattccgtttagtagagtaagatggaatagcaagagtatgtaacattgaccctaggtcagtggtctg

SEQ ID NO: 469201 - DNA, 122 bp, Homo sapiens
ccttctgtcctgacgtgtttgagttctggtggcggacctgaaaccgggtgtggatgttcccgtcttgagggtggtgggggcctgggtgtgtgggccgggaaaacgtgtccttcctcggggtt

SEQ ID NO: 469202 - DNA, 122 bp, Homo sapiens
ggagtcttttagtcctcaaagagtccttaagtctctctctctacttaattatagctatcacggaagagctggcttcatgtgaaaaatatggtcttcgctaagctttaaagtttctatccaaa

SEQ ID NO: 469203 - DNA, 122 bp, Homo sapiens
cttcctgtcctagacacacacatacacatgcacacacacacgtgcatacacagggacacgcgccgagggccgattcacagatgtgcagaacagatacagctgtgacagttgtgaaaatactg

SEQ ID NO: 469204 - DNA, 122 bp, Homo sapiens
tcttggcggtgcgccacaggaactctccggtggtcgggttgtagatgaagagcttccactcggcgaggctctggttgagggactccttcttcatcgtgtgcgcgcggacgacgaggggagcg

SEQ ID NO: 469205 - DNA, 122 bp, Homo sapiens
ggaatgggtcggaagcgcgtcccggtgagtttcagggagcgtcccttaggtttccgggggcggcgttgaacctccctagccccagtcttcccatcccaggagacccgcccctagtggctcga

SEQ ID NO: 469206 - DNA, 122 bp, Homo sapiens
catcgcttttgcagtcaggcgttggattgggtgacgctcctgtcctcaacttttcctcttcgtcccgccttccttgcctccgagccctcaggattggctgagcttctccttctacctaatcc

SEQ ID NO: 469207 - DNA, 122 bp, Homo sapiens
gatgagcccctcgaggagcggcgcggggtgtgtgggagaacaatcacgggctccggccaccgtgcacagccacgcacaccggctagcacagtggggagggcagctccaggtgcctgcacacg

SEQ ID NO: 469208 - DNA, 122 bp, Homo sapiens
catatgtcaaagcatgtatcctgtggggtgtgtgggcctcagggtctcagaatgtggatccgtgctatgcccgtgctcacagttgtctgtatgtctcaaaagcacatagatccccagttatt

SEQ ID NO: 469209 - DNA, 122 bp, Homo sapiens
cccatcaatccctgggatcattttgctacacttgatttatcatgtagctatccatccctccgtccctttatccagctattaatttgtcttatttttggtgcatgtcaaagtagattacagac

SEQ ID NO: 469210 - DNA, 122 bp, Homo sapiens
agtgcatattcccggggaggctcccctctgcgcctgtgggcctcgtctcctcgcagcttccggcaagactcacagtagcacaggcttcgctttggcggaggcatgaaataatcttctgcggg

SEQ ID NO: 469211 - DNA, 122 bp, Homo sapiens
gcgatgggaaagtggcccagagtcagggctcgggagatgcactgtggctcgggagatgagcgccatgacagagatgggaaggtggcccagagtcagggctcgggagatgcgcgccgtgacgg

SEQ ID NO: 469212 - DNA, 122 bp, Homo sapiens
cgttccccctgaaccaattgccaatgcccagtggtgacagcggcgaggcttcttgcagcgcgaatccgtccatcaacacgcaaaggcctaggattcgtaggcgccccaggtgggcggtacca

SEQ ID NO: 469213 - DNA, 122 bp, Homo sapiens
ggatcccacggtctgacctgggctggcccacctggcagctggggaggcccagctgtgccccgttcttcctccccttctggtcagggctaatcatgaggcaggattattgtccagctcagccg

SEQ ID NO: 469214 - DNA, 122 bp, Homo sapiens
gagaagctggttttagagcctgtgaatcagtcttgagttttctgtgcctgactctcctctcgcgttgctcttccgacgcgcgcacagggtgtgtctgcccagggctgcctcctgcccagcaa

SEQ ID NO: 469215 - DNA, 122 bp, Homo sapiens
gcaggcagcagaatggaggccggggagaagcctgcagactcaggttcctgctggggagagcggtagagactagtgcagaacagggccaggtcttggacttctggcctcaggccatcctctcg

SEQ ID NO: 469216 - DNA, 122 bp, Homo sapiens
catccccgaccagggcacgcggcattctgggcccgccaatccagctgtgggctcaggccacgtggcacactgggcccactctgggctcaggttcctcagctatgtgggccgacacagacttc

SEQ ID NO: 469217 - DNA, 122 bp, Homo sapiens
gtgatagccttgaccttcttgaaagtacttacataagaagatcttaaccagggccgggcacgttggctcacgcctgtaatcccagcactttgggaggccgaggtgggcggatcacctgaggt

SEQ ID NO: 469218 - DNA, 122 bp, Homo sapiens
cgtcttaccgtcctggacaaagactccaagtcgaaggagacaaagcttgtaacgcaatcacgggaatcacgcagctgactgcgtcgcgcaccaacaacaaaatggagctgacagctgctgcg

SEQ ID NO: 469219 - DNA, 122 bp, Homo sapiens
ccgggaaatgaagtccacaaaagcctcagagtagaccgcgggaatgatgggcgggaatgacgggtcacgctgtacgtcgggaaatggagtccagggtaatctgtcagccgactgtacgacgg

SEQ ID NO: 469220 - DNA, 122 bp, Homo sapiens
ttgctctctctctcatccaccctgttagcagcctctcggctgagcgggagaccacacactcggaccacacagcgccagctgaactccctcgcacgcaacatctacaagctgtcactctgcag

SEQ ID NO: 469221 - DNA, 122 bp, Homo sapiens
cacatgctgccaccacagccccgggtgggcagagagcagggccggccgcccctcactactcgccagtctgaaaggcaggagcagcttcccccaggtccgtcctcctcaccggaatctccggg

SEQ ID NO: 469222 - DNA, 122 bp, Homo sapiens
cctgtacccacttaggacttgttctacgaagacgaagatctccggaaagtgaagaagacccggaggaaactaacctcaacctctgccatcacaagggtgagcctcaaaggtctggggagtgg

SEQ ID NO: 469223 - DNA, 122 bp, Homo sapiens
tacttgggaggctgaggcaggagaatcacttgaacccgggaggcagaggttgcagtgagccgagatcatgccgctgtactccagcctgagcaacagcaagactctgtctcaaaaaaataaaa

SEQ ID NO: 469224 - DNA, 122 bp, Homo sapiens
acacgtgccagagttacacataccacacatgcacgcgcagtcacacaccacatgcagtcacgcatgctgcactttgagcagatgagtagggatgagatgacctgttcctcctgaggcgtctg

SEQ ID NO: 469225 - DNA, 122 bp, Homo sapiens
ttcattgacaattgctgtgctctgaactagcgctatgatggcctgttgtgcggggacaggcgggttgtggtgaaagctgcagtcgtgaaaaaggctattgtttaatctaccccgtccctcgc

SEQ ID NO: 469226 - DNA, 122 bp, Homo sapiens
gattcaactagaaattaagaatggcccccaaacagaaagccgggcctaggaaccaattagcgcaggtcaagtccctacccggactcattttttttcagccctcaggaagtaggggcctctct

SEQ ID NO: 469227 - DNA, 122 bp, Homo sapiens
ctttggtgtttttagtcatttccttagaatgggttagttatttttctaaggaacaatgtgcggaacattagaaatgaattgtgactaatacagcttttagcagaaaataaaatggaagagta

SEQ ID NO: 469228 - DNA, 122 bp, Homo sapiens
ataaaccaccttggagtggtgccccctggagttgtgcaatgtggcagccctgagtatcggcgctagattttatacccgagttcatctgcctcaaaagcctgagctacttgcactatgctaag

SEQ ID NO: 469229 - DNA, 122 bp, Homo sapiens
cgagcggggagaacgaggccgagagtcggcagggcccggactcggagcgcggcggcgaggcggcccggctcaacctgttggacacttgcgccgtgtgccaccagaacatccagagccgggcg

SEQ ID NO: 469230 - DNA, 122 bp, Homo sapiens
tgcgggctgcagtggcgggagttagcgtcggcgtgccgcctgccacagcactgccgcctgcgtggcaccgacgccttcgcttctgcattttctggattgtggcttctccacattttgcaacc

SEQ ID NO: 469231 - DNA, 122 bp, Homo sapiens
gcgaccgcgtaccctgacacccccgcggaattccctccgcacctccaggcgggtgcgatgcggcgccgcttttggggcgtattcaactgtctgtgcgccggcgcgttcggggccctggccgc

SEQ ID NO: 469232 - DNA, 122 bp, Homo sapiens
cactgtgatcgtgagactgcagacccgctaataaaatccaccccaacaatcgctgtgtgccgctttagtgcgctcgccgtcggctctacctgcgtgctttagctccttctcgcctgatcctt

SEQ ID NO: 469233 - DNA, 122 bp, Homo sapiens
tctggtcggaataggactgtgcattcccaggcgtggagaggtgcccacttgaggaatgggcgtggacggggacaggggcgggcgggcaggcaggcgcctagcgtacctgtagcccctgtctc

SEQ ID NO: 469234 - DNA, 122 bp, Homo sapiens
caactgagtcactactccaaaagggtcctgctccagcctggctttcaatggaaatggaggcgctccaagaaaggatggataagctaaaacgttacatacatactctagggtgaaacttatca

SEQ ID NO: 469235 - DNA, 122 bp, Homo sapiens
gaaagcaggggaaggggcggggcgagggtctggcctagtctcctccagcttcgtggagcccgcctggggcgccgctctcccgcccccgcccctccacgggtccagctgggaactggctatgg

SEQ ID NO: 469236 - DNA, 122 bp, Homo sapiens
tagtagcccccaatcacccagagctagagaattgcacatacattgtggcgcctgttgactcgaacacaagtgctcgcagtgatgattcaaaacacgcactgattcagcatgctctgatgtgt

SEQ ID NO: 469237 - DNA, 122 bp, Homo sapiens
aagagctgggctttcccggggtccaaattggcacccacgtcaacgagtgggacctgaacgcgcaggagctctttcctgtctatgcggtgagtagcggggctgctcagccaacgccagccgcc

SEQ ID NO: 469238 - DNA, 122 bp, Homo sapiens
gtcctggaaggagaagatgcctgcgtggtcgtcgtccaggatggtgacggtggccagcagcggcgccaccagccgccccttgggccgcccgccgccgtccggctcgaacatgccctgcgcgt

SEQ ID NO: 469239 - DNA, 122 bp, Homo sapiens
caaaatttccccaagagaagcgcaggaagggtggaaatgttgatagtaaatcattaagggcgagggaaggaaaacaggtaggggctgccttcggaaccaacatgtttggctatctggaacca

SEQ ID NO: 469240 - DNA, 122 bp, Homo sapiens
aaaaaagtacattaaataatcccatgtatgagccttagagatattatcaattgctgggcgcggtggctcacgcctgtaatcccagcactttggaaggctgacacgggcggatcacgaggtca

SEQ ID NO: 469241 - DNA, 122 bp, Homo sapiens
tggtttccgctgtgtctcctgttacaatgagaacatgtactgcataaatttaattggctacgttaatgtgtaagccttttctgcaaagagatggatccgtttctgaatattctgcagaaggg

SEQ ID NO: 469242 - DNA, 122 bp, Homo sapiens
agcccggcctccgtgcctggctcagagccggaagagctccgcagcctccgtcagtcacaccgagcccagcctggggaaggccccagaagcaggagtgtgcagcctcacagaccgcacccggc

SEQ ID NO: 469243 - DNA, 122 bp, Homo sapiens
tcagcctctcttaacggaccttccaggcactgctgagaaaaccaggttaatggtttcctgcggcagcaatgagcagaagcagggccatctccagactccagagaagccaggagagggctggg

SEQ ID NO: 469244 - DNA, 122 bp, Homo sapiens
ccttggcacagagtcactcagggctcatggtagatgcttagcggtcacagccagtagctgcgcagtgtggcagcagctgagatccatactgcagcctgaaagttgtgtttcagcttctgagg

SEQ ID NO: 469245 - DNA, 122 bp, Homo sapiens
gacacgccggatgtggctccccggccggttggaggcctagcaggacactgggctgcgggccgggggtcaatggtggcgggcagccggggccccgggctcgggagctgtggcggcagccgcag

SEQ ID NO: 469246 - DNA, 122 bp, Homo sapiens
acctgcgcaggcgcagaccatgaccgaccccggggcgggggcgcagcgtgacgctctgggcgccgctgggatccgagaagaaacccttttaaagcaagcatggcaatttcttctaaataagc

SEQ ID NO: 469247 - DNA, 122 bp, Homo sapiens
gtctggagcggccgctgcgaggaagacagctgcagcgggggaggcgcggccagggctgcgcgctccgcggagccggcggggccgggaacaggtgatcccagtgggagccccgcgccctgccg

SEQ ID NO: 469248 - DNA, 122 bp, Homo sapiens
ctggccactctatttacagtaactaatgcatccacgcataagtatttggctcttaagtagcgtctttagtgattcacatttacatgtcactccggttacatgaatgagggctggaagctggg

SEQ ID NO: 469249 - DNA, 122 bp, Homo sapiens
agcgcacccccaggggtctgcattggtcacccgggtggggacctcgagctcccgagaagtcggtccatgctgtttagccacaggcaggagtggggaactggtaggagacagcttgcttttat

SEQ ID NO: 469250 - DNA, 122 bp, Homo sapiens
ttcagcttaaaatattcaatatgtcaaagtgctgtattttgtgtagggtgtcctgaaccccgtcactaacctctaactgaaagttaggattttcttcaattctgaacatagttcataaacca

SEQ ID NO: 469251 - DNA, 122 bp, Homo sapiens
tttctgagtcatcacctaaaagacggtcctatagagttgcctaaccagctttggaatttgcgtgagtgatacgtaagcctttgtcatgctaaaccactaacatttctgggttagtctgttct

SEQ ID NO: 469252 - DNA, 122 bp, Homo sapiens
ccccctctcctcccctagaaacacaatccttgcctctgccgtctcccagtgtcccgggggcgtatctcctgccagcctgcacattcactgtgggttcagcccgcctgcgatttcactcttgg

SEQ ID NO: 469253 - DNA, 122 bp, Homo sapiens
agaactgagtttggttttaaacggccaagactgtaggaggggcctggcccctacttcgggcggggctagggctcgggttacaccaaccaccacgagggcggggcagtggccgggaatagaaa

SEQ ID NO: 469254 - DNA, 122 bp, Homo sapiens
tacatctatgtcacctccgtgcctgagctgctccccttcagtagggcctaagagggagggcgtcacagaaaaaaatgcccagcgtctgggtgggctgtgcaagttcccagggagagagacaa

SEQ ID NO: 469255 - DNA, 122 bp, Homo sapiens
gggttaatgttgcgtgttcgctgggggttaatgtttgccttatgaccaagtctctgtgtccgtgcctctctccattttctcttcctacctcaaacccagcaacttagaaaacggctgtagcg

SEQ ID NO: 469256 - DNA, 122 bp, Homo sapiens
ttttagtgtgaaatgaactcccactagtggcaagccaatcagaacagtatgtttattacacgtggttcaagtcatgagccaacttcttttaaattggtttgagacaaatgagaatctgtgaa

SEQ ID NO: 469257 - DNA, 122 bp, Homo sapiens
agaatacgaaatcaaggtacaatcagaggatgggagggacagaaagagccaagcgtctctcggggctctggattggccacccagtctgcccccggatgacgtaaaaggaaagagacggaaga

SEQ ID NO: 469258 - DNA, 122 bp, Homo sapiens
ccttcctcttcttttaacatgttgtattttcaaatgggtttttttctcaaggagccctcccgctgggcctcagtctgggtcctcagtctgaatcggccttcactgctttgaggcacaggtca

SEQ ID NO: 469259 - DNA, 122 bp, Homo sapiens
gtgttggatgataaggtttctcaaaaagccaaaaacaggaggcgggagggagaagagattcgattctaagtctcctactgccgggttctacggggagaaactgactgcggctcgaggccaga

SEQ ID NO: 469260 - DNA, 122 bp, Homo sapiens
cggtaaagagctaacttggtgttgctcaacccttctcacactacaagtcccgggaagcctcgcgatgccctaatcctttgtttcccaccgtgccccgcgcggcgcaggcgctgttactcagg

SEQ ID NO: 469261 - DNA, 122 bp, Homo sapiens
aaattttcaaaccatcctgtctggtgttggttgattaggttgtgtctgtgggaaccaccacgtctctccccacacccaagcattctgggtaacacaggctaggcctctcctgttgacctgag

SEQ ID NO: 469262 - DNA, 122 bp, Homo sapiens
gagcgggagcggggggcgaggtcggctggcgccgggagccccgcgcgcccgcccagcccgcggctggatgtcagctctgacagcttcgacccgctgctggccctgtacgcgccccgcctgcc

SEQ ID NO: 469263 - DNA, 122 bp, Homo sapiens
cacacgcagtcttacacgcggtcttacggtcttacacacgcagtcttacggtcttacacacggtcttacacacgcagtcttacacacggtcttacacacagtcttacacacgcagtcttaca

SEQ ID NO: 469264 - DNA, 122 bp, Homo sapiens
ctgtctcacccacactggcctgcaactcgccagagtgccccaggcttttcagcttttgcacgggcccttccctctccaggctctctcccctggatctttgcttcagctgctccttcttgaca

SEQ ID NO: 469265 - DNA, 122 bp, Homo sapiens
gcggcagcggcagagggaggtgctgggggcggtggcatagcgcccacaccgcgtggtccccgcgcgcggctgggctggcagcgccccaggcagcgcgcacggtaagcaggaagctgcggccg

SEQ ID NO: 469266 - DNA, 122 bp, Homo sapiens
tttaagagctccctggcagcagagctggacacagggaagtcagtgggacctttgtggccacgaaacaggtctcacccagaaaggaaagcggggtcggctcgcccgcctgccgcacgcttccc

SEQ ID NO: 469267 - DNA, 122 bp, Homo sapiens
ggttccctcttattgctcaggctggtctcgaattcctgggtttaagtgaaccgcccgcctcggcctcccagagtgtgaggacccgcctggcctaaaataatgttatcacttaattcttttca

SEQ ID NO: 469268 - DNA, 122 bp, Homo sapiens
ccagattctccagctccttccgcaggtgttcagcctctgcttgtagctgctgttccacctcggagggccctgctgggggctccgggtaggggttcagctgagaaaggaagcggccttccgct

SEQ ID NO: 469269 - DNA, 122 bp, Homo sapiens
cagggaaacagattgaacctctcggggttgtcaggcaggtcctgttggaggtaactgtaccgcacttgccgcagattatcagagaggatcaggctggggtaggccgtgtctgggtccagagt

SEQ ID NO: 469270 - DNA, 122 bp, Homo sapiens
gctcatcgcgggaggtgctcccgatctcctggctgaggctgtgactgccaggcctccccacgcaaagacgctctcgtcttccccgccccgcaccgcgctctcgaacgaagctgctgcacgca

SEQ ID NO: 469271 - DNA, 122 bp, Homo sapiens
gcgggccagcccaccaggccccggcagcctggaagaggcgggactcgagttcagggggaacgcccacgtcccgggaggggacaggggccggagacaggggcgaagacaccttcgaaacgccg

SEQ ID NO: 469272 - DNA, 122 bp, Homo sapiens
tgaggtgggaggcgctagaaaccacttagctacagccaaccgcccaatgcagcactcgctcgctccccccgccagcggaagcgtccgcgaagcacaatgcagcactgagccgcggtggaggt

SEQ ID NO: 469273 - DNA, 122 bp, Homo sapiens
taggactctgagggagaacagtgtagctggttctttaagtaagctacaaactagaatcagcggctgcaactggaatgatctgccacagcaagggtgaagtgagaatgacaggaacaggaggc

SEQ ID NO: 469274 - DNA, 122 bp, Homo sapiens
ggagccgactgctctcccctcgccgggaccagtcccaggctgatagccctactggtggagcgcgaggacaggaagataacccaaggggaaggtttaaaatcctctttttggtttatctggtg

SEQ ID NO: 469275 - DNA, 122 bp, Homo sapiens
atcaattcgctctcaggctcaaagctgagagtggccccctcggctgggcttggctgggctcggctctcctctcccactgttaccaggacgactgtctccccacagcctggctgtctagactg

SEQ ID NO: 469276 - DNA, 122 bp, Homo sapiens
tcagggagggaggagagactggaggacctgaggcccacgggggcggggccaggggcggggcggggctctggaagggcgggcgagactgtggaggacctggagctggcgggggtcagggtagg

SEQ ID NO: 469277 - DNA, 122 bp, Homo sapiens
ttcacaggtatctcccaacaagatcagcatcccagctgggtgggggataaaatacagggtcgtgagtttcctctagcagaaggattgttgccaatgattaccccttagattgcatcactttc

SEQ ID NO: 469278 - DNA, 122 bp, Homo sapiens
gctcagtggccctaccccagcacacctgcaaaagcatgtcccctggctcaatgcgcccgtcggccgccacagccccacccttcatgatggagccaatgtagatgcctccgtctccccgctca

SEQ ID NO: 469279 - DNA, 122 bp, Homo sapiens
accccgagtgtggccccgtcaaagactagagcgaaggtcactgaaatgacacaagatcagcgaggcccagggcgctgccgctcacagaatgcggagacacggctgcctcgcgtcccttccct

SEQ ID NO: 469280 - DNA, 122 bp, Homo sapiens
acgggctcctgcaagggcggggaatgcaggtgctgggccccgcgggaggagcagccacagcgggggacagggaggccagagccgagtggagaggagtgcgggactgaggaggcttttatccc

SEQ ID NO: 469281 - DNA, 122 bp, Homo sapiens
cgcccgggggaccacgaggcagggcgcccgcagagcccgcgtcgtgcgccgcggcccgggcgggcgctccccactctgcttctagccagcgagactccgagctctctgctcgttccgcgccc

SEQ ID NO: 469282 - DNA, 122 bp, Homo sapiens
gccttttgtcccaataaaaagttagcaagaggaagctactaacccctggtaaaacctccacgtcttgctttcgccaggagctctccccctgtttcaagtctgttcctgtctttcgaccagtc

SEQ ID NO: 469283 - DNA, 122 bp, Homo sapiens
ggttctcgagtgcaatgctccgccctggggcggggctggagggaccaaaggctacgtgcgcgccttgcgcttcccccagctcctctgactggggcgtccgactggagctcagccgcgcttgt

SEQ ID NO: 469284 - DNA, 122 bp, Homo sapiens
ggcatgctgtgagaagttcaagccatgtggagagacgatgtaaaggagtaacaacacattcggcttagcagcctcatctgagatcccagaccataactagcaccagctgcagccagccattt

SEQ ID NO: 469285 - DNA, 122 bp, Homo sapiens
cgggccccggaggaggggcgggggctgcgggggtttcgggggcgggctggacagacgggtcgccgggcggcgccgggacctcaggtctgcggacccctcctccctgcgcatcgcccttctcc

SEQ ID NO: 469286 - DNA, 122 bp, Homo sapiens
acaggccatggatgagttctacaagagccaggtagaagagcactgtcctgggtgtgctcccgagcacccagctcacatccatcttatttgacagcttcagtgaggcaggccttgaagtccag

SEQ ID NO: 469287 - DNA, 122 bp, Homo sapiens
agtgggcgaggcgcggaggtctggcctataaagtagtcgcggagacggggtgctggtttgcgtcgtagtctcctgcagcgtctggggtttccgttgcagtcctcggaaccaggacctcggcg

SEQ ID NO: 469288 - DNA, 122 bp, Homo sapiens
aatagtcattcatcaagcctcaccttcacctgatctttcattcacattaaagtctgacaacgcatactccttgtgtactttcttattctctgattctactttgtgagtcaaatttgctggtt

SEQ ID NO: 469289 - DNA, 122 bp, Homo sapiens
atccgctggggtggaggagccatctgcacttcatcttcttaaagggactgtcaggcaggtcgtgccttaatgcggcacattccttattctaaatattcccagagcattttacagcggctcac

SEQ ID NO: 469290 - DNA, 122 bp, Homo sapiens
agcggtgggctgaagggctcctcaagtgccgccaaagcgggagcccaggcagaggaggcgcggagagcgaacgagggctgtgaggactaccagcacgctgtcacctctcactaccatgtcct

SEQ ID NO: 469291 - DNA, 122 bp, Homo sapiens
ccagcaccaggtggactgcagtgcagtggatgggccagcggcagccggggagaagccccccgacatcagcaggctggggtctgcccaccagggcctccccacatctgcctttgagggtgcct

SEQ ID NO: 469292 - DNA, 122 bp, Homo sapiens
acagcttccagctggtcacctgatcaatcatacctgtcattggcctccgtgtctagagcgcgattgcttttgtttgtttgttttcttagtttgcttcactgctttactggcaggctttcttg

SEQ ID NO: 469293 - DNA, 122 bp, Homo sapiens
gctgctcctcctcttcttccctcttgggctgctccatggggtgctctcccagatgctctgcgtcctgccagagcatgggacagtagagctcttctacttttggcgctcctcagtgctgtttc

SEQ ID NO: 469294 - DNA, 122 bp, Homo sapiens
gtgtgcagagggccctagagctgagaggccgcggacggagtaacagctggattctgaggacgtggaagaggccacaccacgcagcagaaggaaggaggaagtgtacccggagctgaaaccag

SEQ ID NO: 469295 - DNA, 122 bp, Homo sapiens
gcatgtccttaggttttacccattcatcaaactgctctgctgtgagagagccaagttcaacggcagtttcctttaaggttgatccattttggggtgttgtcttagcaattctgctgttttgt

SEQ ID NO: 469296 - DNA, 122 bp, Homo sapiens
tggcacaaaaggcaccaacattccctttccaaaccatccatcaccatgggtggaaggcagcgccacctgctgcccatcatattatggctcacatacccataatttccttgcggtgctgaatt

SEQ ID NO: 469297 - DNA, 122 bp, Homo sapiens
gaagatgacttaccaatcctagatttgggaggcagacgttcatcctctccctctttctctcggattcgctgccagtaatacacaatgggctctgtgccagaggatgactcacactgcaaagt

SEQ ID NO: 469298 - DNA, 122 bp, Homo sapiens
accccgagctgctggcttctcaaactccgctgctctttggttcagggctcctggaacagacgagccccccgctcccccgtctcttcaaaatggatgaatcaaaccagccgaaaatgcgccaa

SEQ ID NO: 469299 - DNA, 122 bp, Homo sapiens
ggatagtactgaaaagccatggtcaagtgagcggaaccctggttcagccacttcactctgcgacctcagacaacttccagaatttatctgggtctcagtttgtccttctgcaaaataggagc

SEQ ID NO: 469300 - DNA, 122 bp, Homo sapiens
gatcagttaagcctgcaagttgggttaagtttaaatggagccttgtagcaaagccagagacgaagaatgatgcagatcctgtgtaagctaataaaagagtctccatgaatagccttattgta

SEQ ID NO: 469301 - DNA, 122 bp, Homo sapiens
agccccacccacacacatgcacacgtgcacacatgcacacatgcaccaacactctccagccgactggaaggcctatagggaaaggagtggtccagaccctgaaggaagcagacagggtacct

SEQ ID NO: 469302 - DNA, 122 bp, Homo sapiens
aactcctgggctcaagcaattctcccacccgagtagctggagtataggttctcaccaacacgcacagctctttatctttgactttctgtttcatttctctattccctcattatgcttcctgg

SEQ ID NO: 469303 - DNA, 122 bp, Homo sapiens
cctcttccgctaacttcccggcagcgcgccgctcagggtgggggccccgagggctggggccgtcggcttccccctggggatcccccgcttcagagaaagccaagcgttaggcgcagccaaag

SEQ ID NO: 469304 - DNA, 122 bp, Homo sapiens
gtccctggaaaagagtgagcttctgcctatgtcctcagcagaaggctgcctgtccctgatcgccccccctaaccccacctacaggaaagaagactacagagggtgcccgtggacttctgtca

SEQ ID NO: 469305 - DNA, 122 bp, Homo sapiens
cctactcgctccgacggaggggctcctgcaactgcgctgtaccgtaaatatttgctgaatcgatttgacttttacttgttccaatttcgcttttttgttgttttgtttttttgtctttttac

SEQ ID NO: 469306 - DNA, 122 bp, Homo sapiens
tgcatcgcgtaacctcattttaacagctgggcttcaccacgtcgtggcacgtcagagctccgtgccttctcgctgccaagggatgtccacgtgtggccgggctcacggcgcgtctcactcac

SEQ ID NO: 469307 - DNA, 122 bp, Homo sapiens
cgcggcgaggacaggagagcccggctgcgaggtcgggaccctgaggcccaggggcgggtccgcggcgtgcggggccctggcggctcctctgtgctgcgctgggctccgggcgcgcgggatgc

SEQ ID NO: 469308 - DNA, 122 bp, Homo sapiens
gtgaccgccgtcttccctgccttcgccttagccctgctccgtggagcaggtgccgcagcgcgcctggtctggtcaaacccaggcctgctgactgtagagtgtgggattagcccgggtcggtc

SEQ ID NO: 469309 - DNA, 122 bp, Homo sapiens
cctggagagctcaaattcagtcacttgctcacttttctgtttgttttttcctccgtcttacgtgcatgtgtgtgtgtgccatgcacacccacgcacacaatccacccagagttccacatcag

SEQ ID NO: 469310 - DNA, 122 bp, Homo sapiens
cactgcgagactcacacagccccccaacccccgaggccgctgcttatctgctgtacggggcggggaccggccccctcatcctagagctgtcattggactgcggaaacccagaccttccaccc

SEQ ID NO: 469311 - DNA, 122 bp, Homo sapiens
acgcccggggccgtcccggagcagggcagaggcttggtccagcctgtggcagtgagcagccggtgggacagaggccacaacaaggccaaaggcgtggtggggagggcggggggcgtctctct

SEQ ID NO: 469312 - DNA, 122 bp, Homo sapiens
tcccggcgcggcctccgccctggtcccgccccccgggagtcgcccgccctgacatcatcccggttatgtaagagccgcggcttccggttccttgctccaccggtaaggcaaggggtctcggg

SEQ ID NO: 469313 - DNA, 122 bp, Homo sapiens
aaagatgactcagaacatgacatctgtcttcatgtgaaagaatgggtagaactgatgtggcgctacgaattatctgtagggcaaaggactggaagttaaatgaagatagattttaattcaaa

SEQ ID NO: 469314 - DNA, 122 bp, Homo sapiens
aagccccatatcccagcaagaagagaccagggagtcactgcggttacttgctcatgcccacgcaggcctttctgtggatctccacacacagcacctccgactgcgaccgcacagctcctctc

SEQ ID NO: 469315 - DNA, 122 bp, Homo sapiens
tagcctagagtacagctgctgggcagaacggaggtgtccctgccagcgtgccttccttgacgctcctctggccatgttttaaacaccaggaggtttccagcggcttccccaggcgtagctcc

SEQ ID NO: 469316 - DNA, 122 bp, Homo sapiens
agggcaggatctgcagggctgagaaggtgaacccggtgagggcggctgaagctgtcaccacggccacactgtgggacaggcatgtggcaccggcagccacagggaaagctgccacactggcc

SEQ ID NO: 469317 - DNA, 122 bp, Homo sapiens
gccatccgacaagtaagggtcgtagaagagcacgttgaagccgaaggccttggcccgcagcgccactgcctgccccacgcgacctggtggcgtcaagacacagtgtgagacccttgctcacc

SEQ ID NO: 469318 - DNA, 122 bp, Homo sapiens
aactctgaaaattcaacagtcaaaaagacaaaacaatccaattagcaaatgaccaaaagacgtaaacagagatttcaccaaagattgcatataggtggaaataaggatggcaagtaagcacg

SEQ ID NO: 469319 - DNA, 122 bp, Homo sapiens
aaggtttaactccatccacaccagcgacaagctgctaaccatccacgcagcctgcctgcccgggagaggatggggtggctcagcacagcctcctgggccttccaccaccaggagaaggctgc

SEQ ID NO: 469320 - DNA, 122 bp, Homo sapiens
agcttgtccttaaggctcaccacctgcgtgtggtccttgcctagaagctcatccagcttgcgatcctcccggcgctctgagatgctcttttcctcctccacgggctgggggtcctttcccct

SEQ ID NO: 469321 - DNA, 122 bp, Homo sapiens
tataatttctttacctcacattagccctggggcacagacttgcaaggtttgcagtaggaacgctgcccaagagtttgcagggatgtggcatttcccaggaagcctttattcagagaggcaag

SEQ ID NO: 469322 - DNA, 122 bp, Homo sapiens
gagccatttccacgaggccgagcttgaggcgcgccagcttcctcatcaggggcgtgttgacgttctgcaactgagggggtcaggcatgcctctgaagcatggaagcttctggtaagcctgaa

SEQ ID NO: 469323 - DNA, 122 bp, Homo sapiens
ggctagtaaactttcatctcagactaaacttctttggatcgggtgagggccattaagcggcggggtggcggggaggggacaagaagccggcattgactacgcaagcaggggcctagtttatc

SEQ ID NO: 469324 - DNA, 122 bp, Homo sapiens
gccgtaacagacagtcccagggttcatggtgggtcttcctgattgagtgactcaggatcccggattctcttcaagctgtggtctctgcttccttgggacttccagagtgccctgatgtccca

SEQ ID NO: 469325 - DNA, 122 bp, Homo sapiens
ctccttgtataaaggccgcgcttgggcccgccctcctcacagccccggagcgcggcctgccggggaggtggatctcgcgctccccacacagtcacactccgcgcactcacacacttggaagc

SEQ ID NO: 469326 - DNA, 122 bp, Homo sapiens
ccacccccgcccccaacccaccccggcaccagtcgcccgcatcgcggctctcgctaagatcggccctaagagagaatggaaggctgtttcctagaaaggagcattggtggcggctgctggga

SEQ ID NO: 469327 - DNA, 122 bp, Homo sapiens
caaattccattagcaaaatgttaaaatattgtatgtaggcacttagttttttaaggtaagcgaatactacaatatcagggaaaacacactgtggctgtgttatatcaaaaataatagtaaca

SEQ ID NO: 469328 - DNA, 122 bp, Homo sapiens
ctgttcaaggtaatgaggtagaatcatcttgcctctcagggcgtgagtctggctgaccaacgaacctgccattagactgtcggcaatgacaccataacctcaagtgctgccatttcccattc

SEQ ID NO: 469329 - DNA, 122 bp, Homo sapiens
ggcaagaggtccacaaatacaccactccccactgcccccaccccccacccctcccccccccgcccccgcttccttggccaaagtgggaataatgggccaggctttattgtctttccttggga

SEQ ID NO: 469330 - DNA, 122 bp, Homo sapiens
gaatcacttgaaccccggaggcggaggatgcaattagccgagatcgtgccattgcctgggcgacagagcaagacttctgtttaaaaaaaaaaaaaatcatggtagggccgggcacggtggct

SEQ ID NO: 469331 - DNA, 122 bp, Homo sapiens
ggagttcctaccagacggcctttccctagggttcataaagaccctttcaagccaccctcccgcgcgccgcgttaccacacgcccacctcctggttgccgcgactacacctcacgaacttttc

SEQ ID NO: 469332 - DNA, 122 bp, Homo sapiens
gtcagaagttgaacaacaataaaaccttttcctatcctgtcggccacattcacgaactcccgggctcccacgcggtttatttttaagacgctggtttaaatttctcgagttacggggggaag

SEQ ID NO: 469333 - DNA, 122 bp, Homo sapiens
cttcgggacgccgatgaggaacgggtggatgattccttcaggacgcagatgaggaacgggcgaatgacttccttcgggacgccgatgaggaacgggtggatgattccttcaggacgcagatg

SEQ ID NO: 469334 - DNA, 122 bp, Homo sapiens
gcgttgctgggtggcaggtaagtcctcagggggacccttccccaaatcagggaataagggcggcttcggaggctggcgccactcttcactgcccgcgtgacctgccagtgccttgcgcattt

SEQ ID NO: 469335 - DNA, 122 bp, Homo sapiens
gggagacagacaagaggggaggttatgaggtcacctgggagaggtgtgggttccagctcccgtcgccactccccgactggatgccagaacgagcctgtcgtctttcacctccagacagcagg

SEQ ID NO: 469336 - DNA, 122 bp, Homo sapiens
ggccgtactgcaaactcggtgcggcgaaggtttagttcaatcacccggttctagaagccgcgtcgctgagccgcagcgcgtcgcgcccgggcagcgggtgaacgcaaaccccgccctccagg

SEQ ID NO: 469337 - DNA, 122 bp, Homo sapiens
gagaagagtggtaagccagcatcttggcggcgcccgggtttcaacccagaggagcaggatcggaagcattgttaagtacagaggtctttggagttccttatcatctttgtaagtaacccatg

SEQ ID NO: 469338 - DNA, 122 bp, Homo sapiens
cgcctccgctccgccaactccgccggcttaaattggactcctagatccgcgagggcgcggcgcagccgagcagcggctctttcagcattggcaaccccaggggccaatatttcccacttagc

SEQ ID NO: 469339 - DNA, 122 bp, Homo sapiens
gccgactcacatggcgggggcagcgggtggaggacttggcagcggcagtgatggcggcggcggctcgcgctggctccgactggcgctggctgcccgggacggaaagatggcggccgcgcgtc

SEQ ID NO: 469340 - DNA, 122 bp, Homo sapiens
acacacgcgcccagggaaggccaggtgagggccagggtagccctctgcacgcccctctgccgcggcccaagcctctgtcctgcctcctcctaggctccaggacgcacgtctgcaccaacccc

SEQ ID NO: 469341 - DNA, 122 bp, Homo sapiens
cgcgcacacacgcacaggcacacaagcatgcacatagatgccccctgcaatctcaacactcgcgaccccacgcagtggagatctacagactttcgcctacgccacggggttgctatggggac

SEQ ID NO: 469342 - DNA, 122 bp, Homo sapiens
tgggtgtaagatttcattgtccatcaggaaaaaaatggaaataggcacagagggaatcagcgtttatttagtatctattattggggggctctctatattgtcatctcatttggcctttaaca

SEQ ID NO: 469343 - DNA, 122 bp, Homo sapiens
ctaggtgcctccgtccagctccggcttctggcccggaggctgctcatctgcccctacccccgctgacttttgggaggagcaacacctttcaggtcagcattgctaaccctaaactttccccg

SEQ ID NO: 469344 - DNA, 122 bp, Homo sapiens
gttctagttgcttgttttacattttttcacatttttcagtgcctgctaaattttgtacaacgattatgaagatgtgatattggaaaaatacaaacacttacttttcttcactgatagaggga

SEQ ID NO: 469345 - DNA, 122 bp, Homo sapiens
acgggctgcatgtgctccccgcccccgagaggcctgcgtcatgcggtctcgcccgctctgcgccaggcgtcctgctaacgtgtcctggagggactctcagttcctcccgcccgcatcctgcg

SEQ ID NO: 469346 - DNA, 122 bp, Homo sapiens
ttaaactgccctgatggctagaacattagacattaaattctttatttcagtgctttataacgtttttatatcacccatagtttctttgacagctgagcttgtagcattggtatttgcttgac

SEQ ID NO: 469347 - DNA, 122 bp, Homo sapiens
gcctggggcttagtcagctggaggagggtgtcatccccagagcctactatgtgctgggcccggtcctctgctattgtatcatcttcagagtgccctgcgacaggtggtggtgtcagcattta

SEQ ID NO: 469348 - DNA, 122 bp, Homo sapiens
ggcgacggccgcagccacttgttttggatctttctggcaccttctctattattacgcctgcgtcacctcgcccctcctccttcccccaactcgcgcaggtgcgaccgccacgccccttcggc

SEQ ID NO: 469349 - DNA, 122 bp, Homo sapiens
ttgagaaagtcatctgaagcatttttggggattaaggtgataccctaaaaccccggagggcgcacgtaggatcaggtgcacccttcctgcagcgccttggtgtctgcagccgtggcggcctc

SEQ ID NO: 469350 - DNA, 122 bp, Homo sapiens
tccgcgggtcagtacggcccctgggtccacgtggcgcgaaagtaggaggtgggatctgggcgtctcgggtcggtcggaccggggaggttaaaggggaggattcctgatctttaggggcgcgg

SEQ ID NO: 469351 - DNA, 122 bp, Homo sapiens
ctgcagagaccactgtggcgttgaaaagaggtgtcgtcgcgaccttcggcgccggagaggcgaaacaagagggggtcttcgggccctcaggtatggctcagccgcccaaggcgaagcgcacg

SEQ ID NO: 469352 - DNA, 122 bp, Homo sapiens
ctgtgtttacaagttatccaaatgtctaactgtataataaagaatttagctatgtggactcggttcgaagatgggagaataggaagagctccagtctacagctcccagtgtgagcgatgcag

SEQ ID NO: 469353 - DNA, 122 bp, Homo sapiens
ctgcgaggtggaatgcttggggccagggcagggccgctcagctggctcctcggctgggaccgccggaggttgggaccctttccaggctgctccccccaaccctcatcgtgcaggatactgat

SEQ ID NO: 469354 - DNA, 122 bp, Homo sapiens
ttaaactgctgctcgcaaggaagtccaggccgagaggcttccacagaagcagggacactgcgggggaagttgcaggggacactggaggagacacggtgggctacaccgagacaagcgctaac

SEQ ID NO: 469355 - DNA, 122 bp, Homo sapiens
ggatttgcaattccaactcaggtctgtgacgggccatgttgccatgggaacattgacttgcgtgccttctcctatcagagaaactctgtttaggatatttacattttatcagtcaaggttac

SEQ ID NO: 469356 - DNA, 122 bp, Homo sapiens
cgaactcctgacctcaggtgatccacccacctcagcctcccaaagtgctgggattacaggcgtgagacactgcacgtggccgaagctgaatgatgtattcagggacacatagactagacagt

SEQ ID NO: 469357 - DNA, 122 bp, Homo sapiens
tgcttaggaaactgtgtggtttcttcattagttttaaagagaaaaatcctacagagaaagcgtcttaaagaaaaaaatggtcttaagagagagtataaagcaatttcagaaggtgagatcac

SEQ ID NO: 469358 - DNA, 122 bp, Homo sapiens
agaaaccattctctgtctactttctcagcttgcaccatcaaagggatatcaagaattcgccgtttacttcggttgaaaaatcaagtcccgggctcagagtccccctgccctagataattcct

SEQ ID NO: 469359 - DNA, 122 bp, Homo sapiens
cttcctgcacaaggccaagaaccgcatggagcctggtgggctgcggcggacacgggtgaccgactcctccgtgtctgtgcagctccgggagtgactggctggctcctctgtcctgaccccac

SEQ ID NO: 469360 - DNA, 122 bp, Homo sapiens
aagcctgcctcgtgagcacggcaagagctctgccagggcagtcccagctggcccaggcgccgcagcgctcccgagggccgtcgagcaaaggcgggaggcgcagccgggctgtcggtggacct

SEQ ID NO: 469361 - DNA, 122 bp, Homo sapiens
agcaacatcctggggtttaaactccacccacgcccgatctggctgtctagagggattctacgcctgcgtgctgccgcctccccaagaggcattcaggttattggagaactaatctcatctca

SEQ ID NO: 469362 - DNA, 122 bp, Homo sapiens
atcaagtgactgcacctcccctgccagattgcacttggctttgtcggggttttaacttaccgatttcacagctgcaagcacgttaataatcctcccattaagactgtgtccatttgcaacaa

SEQ ID NO: 469363 - DNA, 122 bp, Homo sapiens
acctcgtgatctgcccgcctcggcctctcaaagggctgggattacaggcgtgagccaccgcgcccggccttgttcatttttaaaagtcgaaaacttcagcagaagaagagcaaggaggtgaa

SEQ ID NO: 469364 - DNA, 122 bp, Homo sapiens
tggcattggtccctgaagtcacagccttagggagcacattaggaacctcttctgcttacacgtggagcctagaaatgatctgctgccctggctgacatctaacctggacagtgagtgtcagt

SEQ ID NO: 469365 - DNA, 122 bp, Homo sapiens
tggctcccttttgtcacgggtttcaaaggctcaccctaacgttcacgtgcattttcccagcggaggaaagatggttgttcttcatcagagtctggggcccaagaacgcaggctccatctcct

SEQ ID NO: 469366 - DNA, 122 bp, Homo sapiens
ggatgaccttcctcatctcctactggggtgagcagatcggacagaagatccgcaagatcacggactggtgagtcactgggaacacccgccccaccgccctgctccccaggcccctgctgtca

SEQ ID NO: 469367 - DNA, 122 bp, Homo sapiens
aatcaggataccccaaaggagtggaatcttattccttcccagtgctgtagtcccctcttccgccctagcctaggggatcctctgtcgccggagccactggaaccctaggccgtgcagggtaa

SEQ ID NO: 469368 - DNA, 122 bp, Homo sapiens
agtgaggggccttggcgtcttgggttcctgagagatgacattgccatatgtggctcttcacgactgtcccacaggccctcagctggaatgtggcagaactgggagctgaatccaggacagtg

SEQ ID NO: 469369 - DNA, 122 bp, Homo sapiens
tgtcctgcagcgcatggtagaagtgaggccaggctgggcagacacccccacccactgccccgaaactgcctgctgttttatcccagatttgcagcggatcatcccatcacctggcccatttt

SEQ ID NO: 469370 - DNA, 122 bp, Homo sapiens
cgcgggtggaaggtgaaggtcgagggaggtcaggctgcttctgcgtgtcctgacggctggcgtgttctcttgagatgggctcgggctacttggccagcttcaatttaagccacagtgtctcc

SEQ ID NO: 469371 - DNA, 122 bp, Homo sapiens
ttggccccctttaaatccgaccagaggaaggggcggcggtcgcgggcgcagcgggcccctcgttgaagtgggtgtcaaacgaaaagcatgacagtgacactcttgtcggtctttaatctaaa

SEQ ID NO: 469372 - DNA, 122 bp, Homo sapiens
cgccgccgccgccaccgccggcggggaggatcgccgaggaggaggaggcggaggaggaggcggcggcggaggaggatttcctgccgcccccaccacccccgcccccgcctccgccgccgccg

SEQ ID NO: 469373 - DNA, 122 bp, Homo sapiens
cgcctgaaagcgcggcgcagtgatgatgggggcccggggttggtctgacagcagcagctccgtggggcgccggttcccgcggccccgcccggtgccccacaccgcacctccgggacgtagct

SEQ ID NO: 469374 - DNA, 122 bp, Homo sapiens
gggacgaggaacagcgtgcggggcggccagcaccgcagtggaaaggcacagcgctgctaacgggtaattattagaattaagaaattaaacgaattagcacagtgtcgggggttcggatgccc

SEQ ID NO: 469375 - DNA, 122 bp, Homo sapiens
attggggcgcgggagaggccgggggtgtggcagcgttggcggcgagcaggggcctgggcgcgctgggggcggggccagggtgctcggctcgcggggactggcctccttcggcagctggaggc

SEQ ID NO: 469376 - DNA, 122 bp, Homo sapiens
cgctggagtgcatgggggctgcgtggctaccggttctccctgctctcccaccaggaggagcgggtgctctcgggggtgctggaggcgtccaaggcgctgctggaagagcagctggaggctgc

SEQ ID NO: 469377 - DNA, 122 bp, Homo sapiens
gcgacacccacgcccacaccttatccgggtgacacccacaccttgcacccacaccttatccgggcgacacccacaccttatccgggcgacacccacaccttatccgggcgacacccacgccc

SEQ ID NO: 469378 - DNA, 122 bp, Homo sapiens
gcgcgggggccaggagtgcccgggggattgagttgcagccggggtggtgtcggggtttcccggctcagcacattctcccctactccccacagccgccccgatattaatagccctgccgcagc

SEQ ID NO: 469379 - DNA, 122 bp, Homo sapiens
agtgagcctcctgcctcagcctcttgagtaactgggactacggatgcctgccaccatgcccgactcaaatttattttgtgttttgaggggctctccaaggcagtggtaaggaacagagagat

SEQ ID NO: 469380 - DNA, 122 bp, Homo sapiens
cccggaatcgcagccctgtgcacggcagcagtggcacccacccttccatggcttgtggtgcgagtcttcaagtgtctgtggatgcggcccacaggaaactgtagcccagctctctgtgagcg

SEQ ID NO: 469381 - DNA, 122 bp, Homo sapiens
cggccgcgttttgttcttttaaatgaattagtggagaacagaaactctcagaatgttgcacgtgatatgcagaggtaacagtctgtctgtgttctgggtattagcaaaacaggcactctcac

SEQ ID NO: 469382 - DNA, 122 bp, Homo sapiens
tttctggattatcctgcccctctctgccctagtgaatcttaagaaagttcacaatcagtacgacaaatcatgtgtgtcctgactagcgctgatttggtggaattatttccagtttagatctg

SEQ ID NO: 469383 - DNA, 122 bp, Homo sapiens
ccaccagggggtctgtgagcatccccgtgaagatgacccggtacgtagtgaggaagagggcgccctcagctgggagcagtgctggccaccccgcactgcccgccctcgcaccctcctcacgc

SEQ ID NO: 469384 - DNA, 122 bp, Homo sapiens
ttgacttcattttaacctaagtaacactttaaagaccctatctccaaatacagtgacattcggagatactggggtttaagacatatggatttttgggtgacacagtttagcccgtaacagct

SEQ ID NO: 469385 - DNA, 122 bp, Homo sapiens
gaggttaatgcaagagaacgtaacaatcctaaatgtttacatacctaatttcaaaatacacgacacaaactgatagaattgaaaggagaagcaaattcgcaattatagttggagatttcaac

SEQ ID NO: 469386 - DNA, 122 bp, Homo sapiens
aaaactacgccctcctggcccagaaggcaaaagtctcagccctttggtccgtctaggtagcgttggttaatttgcagaatctgaaatggaggcaatacgtaataaatccaaaatactgcttc

SEQ ID NO: 469387 - DNA, 122 bp, Homo sapiens
ggagccgcttcgggccttctgggcatgtctgccatatggctccaggtttgtttttctccccggcactctgacggggagggctcccggcatctcctggcgtccgggtagaggacgcggagggt

SEQ ID NO: 469388 - DNA, 122 bp, Homo sapiens
caggggttactctacaatagtgaacggtgtactctcctcagaaacaaatcaataggcgcgcgagagaagggatggggtaaaacaacaggaccaggtgagtgggctccaaggtgactaaacgt

SEQ ID NO: 469389 - DNA, 122 bp, Homo sapiens
gttgactgtagtgccactggcaggaccatgtgcccaggaaatccaagactcatatttggacgaaagctatgtccacttttcaactagtacccctacccaaattaccatagcaaccaaaaaat

SEQ ID NO: 469390 - DNA, 122 bp, Homo sapiens
tctcccgcccccacctccagtcctcagtctccaaaatcctcagctctgctcaaaagccagcgcccccggctgggccctgcccccaccgcagacaataggagcggctgggagcgcacagggcg

SEQ ID NO: 469391 - DNA, 122 bp, Homo sapiens
agaggcagcgagcagtggatgaggacagctcaccaggaggccatggcaggtttcctggggcggggaggaagtgggaacagagaagaggaggaacaagtacgtgtacattgcagcacacacct

SEQ ID NO: 469392 - DNA, 122 bp, Homo sapiens
tgtccaccaatatgctctgtgactagcagtcaacacaatttcatacccagccagtcattccgcaggcattttggatgataatgttcccattctcagttcctctgtgagaatgtgcatgtcat

SEQ ID NO: 469393 - DNA, 122 bp, Homo sapiens
tgcgagagaactcttcaggtgtcaccaaggtgggaaggtgctacgaggcgaggcgccgagcggcgacccccatcccgctcgcccggagtcaacatggccgccgcgcagggaggcggggctgc

SEQ ID NO: 469394 - DNA, 122 bp, Homo sapiens
ggacaccatcacccatcaccagccccgccggcggatgtcagcacacacacctgcactcagcgccactccacagccactgtggggtccggagcagctgcccccgcacttgggccgcgtggcct

SEQ ID NO: 469395 - DNA, 122 bp, Homo sapiens
tgtatgtttctatcgccgatttccgtttgatgtacagttcacagctaatccccgagcgtgcggtttgccatccatctagctttgcctggcggtgtctgggatgttgacctagccagttacta

SEQ ID NO: 469396 - DNA, 122 bp, Homo sapiens
aaggggtgacagatggcacctggaaaatcagttcactcccacccgaatactgcgcttttccgacaggcttaaaaaacgccgcaccaggagattatatcccccacctggctgggagggtccta

SEQ ID NO: 469397 - DNA, 122 bp, Homo sapiens
gcaaagtgctgggagtgtaaggatgagtgaccggtcacgtgcctgggagaagctcagaatcggtactcgcctccacactgtgccatctggctctgggttctgagagtcagggagaggaatga

SEQ ID NO: 469398 - DNA, 122 bp, Homo sapiens
ctcagaaccacattcctgctccccagccctttcctccgcacccccatgcagaagcgcggccgccagctcacaaaggatagggagggatattgctcttggcatttgatgggaagcatctgctg

SEQ ID NO: 469399 - DNA, 122 bp, Homo sapiens
ctcaggctgggccgaggtctcctaccttgagaaacagagctcccttagaggccagggcatcgtcgttacacttgttggggtaacagtgataggccacgtccatgatggggtagcggctggca

SEQ ID NO: 469400 - DNA, 122 bp, Homo sapiens
catcactagttcatcagtgacactagaaactagacatttgtgttctgtacatcaatcaatcgctaaagcaccaacacactgtttggaagtttgttttgttttgttttaattccagccactga

SEQ ID NO: 469401 - DNA, 122 bp, Homo sapiens
tcccatttttagattgaaagtacctatgaatagaagctctaatggtttcttcccttatctcgtgttctattctgcgcaattcctggagcgggcagtccccgccttggagactcctgccttac

SEQ ID NO: 469402 - DNA, 122 bp, Homo sapiens
gaagaccgggccgcccccgccgccggggcgggaactcaccttctctgaggcaggggcgggcgtctacaactactgtcccccgccccgccaacgccgccagccaggggataagccgcggtgga

SEQ ID NO: 469403 - DNA, 122 bp, Homo sapiens
cctatattggtctagatggagcttgggaccacggctgccaggaaacgctcagcggggaggcggagggaaggaagggctcctgcaccagcagcacagaaaagcagcaccgatggtccagccgg

SEQ ID NO: 469404 - DNA, 122 bp, Homo sapiens
ctcctccactccagagtccggcctattcctttgcagggtctcatgggtcacttctacttccggctgctgtgatggagaagacaagacaaggttaaagccaggctctggcagcacatgtaggg

SEQ ID NO: 469405 - DNA, 122 bp, Homo sapiens
tgtatcggtgtgtgcgtgtgtgtgtgtgtgtgtgtgcacccaatgtgcagcctgggagtgcggcagagttggaattcattattcagcagccgccggctcccagataaagctctgtccagctt

SEQ ID NO: 469406 - DNA, 122 bp, Homo sapiens
gcttagccgactcttactcctcctccccgcaatcgtcgggtggttagttgcacagcctcgcgcatgggcacttttgttatttttcattatgtagtctgcagctgctggaggaaagacaagaa

SEQ ID NO: 469407 - DNA, 122 bp, Homo sapiens
aataagattgtgcttatttgcagttaaagtgatggcgatgttgacaattaagtgtacatgcggaaccaaataatggagcagtcccattttatcaccagtgctagccattttctccacagggc

SEQ ID NO: 469408 - DNA, 122 bp, Homo sapiens
cgggctcggggcggccgggacgaggaggggcgacgacgagctgcgagcaaagatgtgccccgggacccccggcaccttccagtggatttccttgcggaaaggatgttggcggtccctgtgac

SEQ ID NO: 469409 - DNA, 122 bp, Homo sapiens
gatcaagttctgcgcctgaagaggctgccaaaactcaaaagcggggcctgggaaggccgccgagagccatgagctgggctgggccgaaagaggccactgggaggcaggaggagctgggcctg

SEQ ID NO: 469410 - DNA, 122 bp, Homo sapiens
ccccggctgggacttggagtcccttatctttccctggtttggtacatgacccggaagcctcggctggccgttgcgtcatccatggcgccggcgcagagcgagaaggaggtgggaacgccgtg

SEQ ID NO: 469411 - DNA, 122 bp, Homo sapiens
ccacttccgcaggctggctctgggctgcacgaggctggcaatttcagcgctgagggctcgcgcacagctggactctgccgtggacagtctgcagctcccagacaccacctctgctccagcca

SEQ ID NO: 469412 - DNA, 122 bp, Homo sapiens
atgccagggccttccagaactccgttccttgctaggttgggaccctgaaaccgtccacagcgcttagaagccttttccaccactacaaagcctccaacctcgacctccctgagcaaacttca

SEQ ID NO: 469413 - DNA, 122 bp, Homo sapiens
tttaccccgccgcacagctggcagtgccccgcccagaggtggcctggggcccagcgagggcgcgcagaggggagtggaggcgcgttcccgctcgtggctccgccccggtgctactggaggct

SEQ ID NO: 469414 - DNA, 122 bp, Homo sapiens
tctctgtacctaatctgaagacacgatggtccaaatggccacccctagaagaccttacatcgaatgagtcctgactcaatgcaggactcaattcaagctgttcccaatatgagatagctatc

SEQ ID NO: 469415 - DNA, 122 bp, Homo sapiens
tagggtcaaagtgaggtgggcagcaggtgtgggggccaggggactcggggacttcctctccggctgggcccgcctgacgtgggaggcagccagggttaatcatttccacgaagccttgaccc

SEQ ID NO: 469416 - DNA, 122 bp, Homo sapiens
agcttgcgaaatgcaggaaaggcccggctggctacagcccggctaacggctcagaaagggcgcccctgataggaatacccccacctcaggcgtggcccagacaaacgcgataaagctgtggg

SEQ ID NO: 469417 - DNA, 122 bp, Homo sapiens
cttggctgataggaaagaggtggttgacctgactctggagtccttgtgggggtggggggccggtgacaggtatgtgtttctgtgggagagtcagaactgtaaatattttccaaaggcgtaat

SEQ ID NO: 469418 - DNA, 122 bp, Homo sapiens
caaccgggaattattatgccagcattaccacgttggttgtacgatctaagaaaataaccacgtcacaacaaactcattatccttcccccctgaagttccgcacccatgatgcacttttctca

SEQ ID NO: 469419 - DNA, 122 bp, Homo sapiens
tatgcatgtcaaacccaaaacactgctcccgaaaaccgccccagattccagatgtacagccgcagaaaggacagaactcctgaagtgcacctgcacgtgggtctcctgctttccagggcgct

SEQ ID NO: 469420 - DNA, 122 bp, Homo sapiens
tgctcaagccaccatgcatgaaggatgctctccagctacagagagatgaacccagctgtgcgtggaggcttttcaattctaatagaggaaccaagaaatgtcccctttgaaaggagaagtgt

SEQ ID NO: 469421 - DNA, 122 bp, Homo sapiens
ccgtctccaatgctggtcacctgggcttgcgctgggatcaggactcagtcctggtggtcacggctcactcaggacctcccaggattggtttaggaaggagacctgacgggaacctgcagggg

SEQ ID NO: 469422 - DNA, 122 bp, Homo sapiens
agcagggaggcaggtgtggggtcctgtctcaggcctggtcctacctctggccccccaggccggccgacccctagaatcaagtgcctgtggacagcgatgactccagcaggaaagctgtggtc

SEQ ID NO: 469423 - DNA, 122 bp, Homo sapiens
gcaagtgaaggaaggggtttgcgaggacaggctgtagggagaggaaagcgtgggcacaggcgggctcagtctccacttggtcttgcctaagtagggggggtagggcttgcacacgaaataat

SEQ ID NO: 469424 - DNA, 122 bp, Homo sapiens
gaacggtaccaagataacacaaaatctcgaataatcatctggatggtgcggttgatctcccgttccagctgcctttctgcctcagggcatggaggacaggtggccaacgggatgaagcgttc

SEQ ID NO: 469425 - DNA, 122 bp, Homo sapiens
tgagaacaaaatactgtttccccttaatctctcaaatacttaaaaaacataggccgggcgcggtggctcacgcctgtaatcccagcactttgggaggccgaggcgggcggatcacgaggtca

SEQ ID NO: 469426 - DNA, 122 bp, Homo sapiens
atcgcctgggaccaaccacacaggccacagccgctttccatgtcctgcccgggccgtcctcgccatcgcgcacaggtttcctggctcctcatcgtgcctcgggtcctgtgccgagagcttcc

SEQ ID NO: 469427 - DNA, 122 bp, Homo sapiens
gaagggtgcactgagcaagtttggggaggtctacccaccacaccagggtctagatttcaccgtgaaggcaaaaaggcctgaatatttctgaataggaggatgacacagaccaacctgtgtta

SEQ ID NO: 469428 - DNA, 122 bp, Homo sapiens
ggctagaaggtaaaaatagcgatcaggggtatgggggtgcgcatggagacgcccgcggagcgctggcgctggccagcggagcaggaggtgaggtcggcggagctgggaggaccgcgcctggc

SEQ ID NO: 469429 - DNA, 122 bp, Homo sapiens
gcccccgccccgtcccatctgcgggctatggaggctgagtccccggcaggggtggcctagcgctgcctcccctggcatctttgcccacctacagagcggaggccgagggcagagggtgaggg

SEQ ID NO: 469430 - DNA, 122 bp, Homo sapiens
cctcccccacacaccacattgttgttccatccttctctgtgcctttgggcaaggactctccgttctgtagggaccaccaggtggaattaaagtctacactcctccaagagctgatcttgggg

SEQ ID NO: 469431 - DNA, 122 bp, Homo sapiens
atgctttttcaccattgagtatgatgttagctatggacttatcttttgtggtttgtattacgttaagttccttctatgcctaatttgttgagagttttttttggtcacgaaaggtaccgaat

SEQ ID NO: 469432 - DNA, 122 bp, Homo sapiens
gaacccgggaggcagagcttgcagtgagccaacatagcgccatctgtactccagcctgggcgacagagctgtctcaataataataataataaaaatacaaaaaattagcttggcgtggtggt

SEQ ID NO: 469433 - DNA, 122 bp, Homo sapiens
ccctcctcccccaccccaagggccagcccagatgttgagcggcttttgctcagacagcaccggtgcccccgccctgcaagcacacactcagcccttaagccagctgagccgccaaccctggg

SEQ ID NO: 469434 - DNA, 122 bp, Homo sapiens
gcctgaactgacctcaggtgatctgcctgccttggcctcccaaagtgttgggattacaggcgtgagccactgcgccctgactacttggatttctttgtgaaaaaggatactgaaggtttggg

SEQ ID NO: 469435 - DNA, 122 bp, Homo sapiens
ggacacatgggccagcaggatggacttggacttggctcctttgcagcagcccagggcatccgggctgggatccgtgaccaaaggtcagggcagatctgaggaaagtgttgctttcatgggtc

SEQ ID NO: 469436 - DNA, 122 bp, Homo sapiens
ggtcaagagtctgcggcctgggtccatccacccgggctgtcctctcgttctcttgttgtgcgatgacagtggcagcgcccgtgacacacagctatcccttatacgatggaaccccacttagc

SEQ ID NO: 469437 - DNA, 122 bp, Homo sapiens
ttccgcatgtgcccgccgccccttccgcgcgcgcccaccgccccttccgcgcgcgcccaccgccccttccgcgtgcgcccgcctgtggttttcatgctttttagtcaagcgcccgcaggccc

SEQ ID NO: 469438 - DNA, 122 bp, Homo sapiens
actatgcccccgagggtgggtgcccaaaggtacggagacctgggtgtcacgcggaaagcccggatgcacagttctgagggacgcgaggtgccagggtcactctagcgcagcccgcaggaccc

SEQ ID NO: 469439 - DNA, 122 bp, Homo sapiens
gacccaggcgggcaaaggagtggtacaaggtgagtgtcacgtcgctcaggctgtggatgccgtcaggctcatcgtagacattctcccagtaggagcgcaggcccggggtacctgcagggtag

SEQ ID NO: 469440 - DNA, 122 bp, Homo sapiens
gctaacacggtgtaaaccctgcctctactaaaaatagaaaaaattagctgggcgtggtggcgggtgcctgtagtctcaaatactaaatagccgggcatggtggcgcacacctgtagtcccag

SEQ ID NO: 469441 - DNA, 122 bp, Homo sapiens
caccctggtgctgggccctgcatacagcaagcgcctaatacctgcttaaatgaaagtcgtcgaggctcacaaggtgggtgggatccagtgagagccgggatcccgcaccacgccctctccag

SEQ ID NO: 469442 - DNA, 122 bp, Homo sapiens
tccgggtgccatcacgggtcctgcagatggccatgcagggctcctgcccacgcaggccaccgtatgttcaggacacgcactgggtctcagagccactggcccaggcagaagtctccttgagc

SEQ ID NO: 469443 - DNA, 122 bp, Homo sapiens
acatgttgctatctcataatagcagctaacatttatgaagtattcattgtcatgaggcaccgtacatagatttctaatttaatccttacaacgattttattagggagaaactgctattagac

SEQ ID NO: 469444 - DNA, 122 bp, Homo sapiens
aaaaaaatcagctatgagcatctctcttctgggacacctcatggcacccctgggcttttccgaatccacaccagcactcactgggtgagtgactttcctgagtagtgttctccacactctgg

SEQ ID NO: 469445 - DNA, 122 bp, Homo sapiens
cttagcctcctgagtagctgggaccacagtcatgtgccacaacacccagcaaatgttttgcgttttttgtagagacagggtttccccatgttgcctttgctggtcttgaactcctgggctca

SEQ ID NO: 469446 - DNA, 122 bp, Homo sapiens
gccgggctgggacaagctccagacggccagggtggtgtgggtttgcagtgggagggctggcgcgggggccctgagggctccctggttcccatcttatcaagatgctggactcggtgcttgaa

SEQ ID NO: 469447 - DNA, 122 bp, Homo sapiens
ggtccagtgcgccctgcgggcatctcctcccgattcagcctcactctccctgccaggcagcgaaaggcccttattgttgctgtgcttgttgcttttgtgggtccttcctactccactacaga

SEQ ID NO: 469448 - DNA, 122 bp, Homo sapiens
aagaatgtcagtgatcataactgctgcaccgctttcttgaagactttataggctccctctcgtgggaccctccgcataaggccagaaggcgagattactatccacattttacagaggtggaa

SEQ ID NO: 469449 - DNA, 122 bp, Homo sapiens
tccagtaaccaaaatggaaagtattctaccagctgtcgatggttccacaccctgacacatcgttaaaaccttagcttctgcctaaactttaaaccttaataatatttggcggtaggggaggg

SEQ ID NO: 469450 - DNA, 122 bp, Homo sapiens
gggggcagctctccctccaagtcaccccccgtgctggggccacagcaggccctgtctgaccggccctgccttgtggtcctgcataagccactggacaaactgctcatcaggttggtacagag

SEQ ID NO: 469451 - DNA, 122 bp, Homo sapiens
gggttctggtcccgccctgaggcagagctgcccccttccctgttatgtgcagatggcttccggaaagtggtccacatcgagcagggcggcctggtcaagccagagagagacgacacggagtt

SEQ ID NO: 469452 - DNA, 122 bp, Homo sapiens
cgggttggagcaagggtccaagattctaagggccaggactcagctccagaagctcgatcccgccccacgcgttcctgctccggccaggggagggggctaaggaccggcgtccccagtcggcg

SEQ ID NO: 469453 - DNA, 122 bp, Homo sapiens
ctcagtgaatgaacacagcgtgggagaattagtgtgtgtggtgcccacgcggcgcgtgctcggtgaatgaacacagcgtgggagaatcgtgtgtgtgtggtgcccacgcggcgcatgctcgg

SEQ ID NO: 469454 - DNA, 122 bp, Homo sapiens
gcctctcacccttcctccctcacgtatattccattcaaagactgtggatttcccctaggtcgacttgagaattttctagagttcccagtaagctgctgaggatgaattgggggttggtggaa

SEQ ID NO: 469455 - DNA, 122 bp, Homo sapiens
tcggacttggcatgttgggcagagcctcccctgagaaaatagaagggacatcgaggcgtacgaggccagcatagctcctggctgggccactgctgtccattccatctggctcctcccagtcc

SEQ ID NO: 469456 - DNA, 122 bp, Homo sapiens
tcgtgggcctcctcggagcctctagtttggaagtggctctcatgaacttaccgtggggcgcgatcattggcagcactgactttttgtttggggaaaatcacgatctatggcctaagacggct

SEQ ID NO: 469457 - DNA, 122 bp, Homo sapiens
tttttgttttcgccacccagctaagaagctgcccaggagtgggcagaacctcagtgtagtcgcagtgccctcgcctgggagggtgtctccgggaggagattgaactcgaatgttaagaatta

SEQ ID NO: 469458 - DNA, 122 bp, Homo sapiens
tttgcttgtgtggtttgaccggcagggataggcagattcaaatctagcagcctagagccccgggctgggtacctggacctataccttcatagctgccttaggctcaacttttcggcggggat

SEQ ID NO: 469459 - DNA, 122 bp, Homo sapiens
gtcatcctccagttgaagtctgtgtgcctaccaagaatggccggaggactcgctgcttgacgggagggatgctccagcttggtctccagggacaactgtacctggagataaagtctggatac

SEQ ID NO: 469460 - DNA, 122 bp, Homo sapiens
caggaagggaattgaaattcccgcagtcacgtcacagaaatcttagcagaacctcatcatcgcccaagggaactgggagtggcgggcggggaggacgcgggttgtgtgacgatcaccgataa

SEQ ID NO: 469461 - DNA, 122 bp, Homo sapiens
aggcggagcgcaggacccctcaggctcggcccctccatctccaacgcgaactgtccgggccgtcgccactccttcaaagggaagatttgaaaagcccgcccctggcaggagccgcagaggac

SEQ ID NO: 469462 - DNA, 122 bp, Homo sapiens
gggggcgggtgcaaataaggacaggaaagggaagctctggaggaaaggggtgggatccaccgagcttcgtttcacagatccgttccctggattgccactgcgagtgatgtggcacacggagt

SEQ ID NO: 469463 - DNA, 122 bp, Homo sapiens
cagcggccgaacccggaagttccgggccgagttcctcgtgccaacgtgtcttgtaaggtgcggctagaaactggggacatggcagcgcctggcccagcgctctgcctcttcgacgtggatgg

SEQ ID NO: 469464 - DNA, 122 bp, Homo sapiens
cggccaatgacagggcgcagggccagagatggtggcgcggactggctggctcgtgccgcacgcctccttcccgccctcggtggcgcacgggggcggggcccgctgccgtaaaacggctgggg

SEQ ID NO: 469465 - DNA, 122 bp, Homo sapiens
gtaagactagatccctagctgagctgaaactgaattttcctcccatgtgggaggggaagacgcttgtttccatatgcacggagtgcctttgcacctgtcctagattgatatttttgtaatgg

SEQ ID NO: 469466 - DNA, 122 bp, Homo sapiens
ttattatagtaatagaaacctgcttactgctgccttgtttgctacctgtacttcttcaaacgataaaaagcttcatcgctattttagttcaccaaaatgcttcagcacaagtgtactatatg

SEQ ID NO: 469467 - DNA, 122 bp, Homo sapiens
catttattcacacccatgatacaaggtaggcaaaggtggctgctagtctcttcgtcagtacgatcctgcattcaaaataaagcctaagaccaaaagaacagaaacgtatttaaatataaaaa

SEQ ID NO: 469468 - DNA, 122 bp, Homo sapiens
taccagcacattcaaaagcagtgatggtagctgatgcaaacaggacagaaatcaatctgccgtacaaaccccagactcgatggaacaacataaaaaaatcaaaatatgtgttgatctgattt

SEQ ID NO: 469469 - DNA, 122 bp, Homo sapiens
atccactctcctagagccacagaggctactgtttcatgattttcttcttaattttgattccgtttccttcactgtctcctttctctcacacctttaaacctgatgctcactagagcttcatt

SEQ ID NO: 469470 - DNA, 122 bp, Homo sapiens
gcgcaggccggtgggagtcaagaaagggggaggggcgggggatcttccactttctcaccccgagtttctttgcttgcttgccccgagtatctgtcaagaggcagccctctcccctcaaggcc

SEQ ID NO: 469471 - DNA, 122 bp, Homo sapiens
gacgctggttggagactggatctcacctggacagcaggtgtgtgtgcgcgccggggtgtccggcctcgtccttccttcctccctaagtccccgaggcagggtcctcccactgccggcctccc

SEQ ID NO: 469472 - DNA, 122 bp, Homo sapiens
agaaaatcacacatccaggctgactgccttcaccttaaacttgtgacaacacactggcggcgagcacttcccacccccgtgaccacacactggcggcgaccatttcccacccctgtgaccac

SEQ ID NO: 469473 - DNA, 122 bp, Homo sapiens
tctcccgctctcgcgactcctggcggtgaaggacggaagatgatagccacatttcttcctcgcccttcccctaggttccctgtcacagttccgcccttactactcccacttccggccaggga

SEQ ID NO: 469474 - DNA, 122 bp, Homo sapiens
atctggctcccacaggctcacccgccccctccagatgacataccacctgagcaaggcttccggaagtagatgatgagaacaatgcccacgatgatgcccagcacacccaggccaaaggccac

SEQ ID NO: 469475 - DNA, 122 bp, Homo sapiens
catggtctgcttataaatattcattgggaaaaatgggatcacatcattatgccagtcctccgggaaccctcgctgctaatgaactcttgcagcacatgttagtaataatgggcttccttatt

SEQ ID NO: 469476 - DNA, 122 bp, Homo sapiens
gtcgggcggcggctgctccggactctggccaaggcagcaactcagtaaccgaacaaaaggcgaagagacctgacagccaagccacgcccctcgccacctcgaagctccgcccctgggggaga

SEQ ID NO: 469477 - DNA, 122 bp, Homo sapiens
cctcccctgctgtgatttccgcagtgttctccataggcgtaagatgggtcatcctctagccgagggggagctgcccagctgaccactggaagctgttctccagctgctcccagcccagacca

SEQ ID NO: 469478 - DNA, 122 bp, Homo sapiens
gcaattttgactaaacgcagctgtcaagccctcaaatgagaagaaacattagccagctggcgtgacaggagagcagctatcagttccatcggccaggttttagttaccggccttgacgccaa

SEQ ID NO: 469479 - DNA, 122 bp, Homo sapiens
tgtaggagccgccccacagtgcagttcccaatttggacccctccccaagaccccaccccacgcacccccactcagggctgcttccgagcctgcggttgtcatggcaacccgtgcctggctct

SEQ ID NO: 469480 - DNA, 122 bp, Homo sapiens
acaaaaatgggaggttcaggcaaagagattcctttttcaaagaaaatgccgtctaatttccgaagtattgtatttccgccttcctttgaaatccctgagcagctctttcctctctgagactt

SEQ ID NO: 469481 - DNA, 122 bp, Homo sapiens
ccgcctcgtacggaggggggagctcagcaggatagagcaggccggggctattgatggccacgtcatacaaagtgccgaatggagacggagcaaagtccaggtggaggcccctgaaaagacag

SEQ ID NO: 469482 - DNA, 122 bp, Homo sapiens
tctcctttgtgggatgagaatacactccttcccttccatcactgcagacctcagagtggacgtccggtctcctgtgcgggacaagaatacactccttcccttccatcactgcagacctcaga

SEQ ID NO: 469483 - DNA, 122 bp, Homo sapiens
ggcgggcactcctgtgagtctcggggattgatggaatgacccaggtggccgagggtcgggcgggagcccggaggtcaaacaagtgtttgtgaggggccggagattgacggggtagagcccag

SEQ ID NO: 469484 - DNA, 122 bp, Homo sapiens
cccgtgtgtaggaagggcatcgcttctttccctcagtacagtggacacacctggctctagcgggcacacgcggccaacctcaaggcagtgctctctggtttgccacagtctcacatttgtct

SEQ ID NO: 469485 - DNA, 122 bp, Homo sapiens
gggccgaccgaaggggatctacatttgagggccgaccgaaggggatctacatttgaaggccgaccgaaggggctctacatttgaaggcctactgaaggagatctacatttgaaggccgactg

SEQ ID NO: 469486 - DNA, 122 bp, Homo sapiens
gacaatggtcctctctcaggcagctgctctctggggttagtgtctggaagccgactacctcgctatttccatcactgttctgatagctgacttctagcctaggaaagcagtccaggtaggaa

SEQ ID NO: 469487 - DNA, 122 bp, Homo sapiens
cgggcgggtggactcaccatggcataatagttgctgttcaccatgagcggccctcgtcctcggaggtagatgtactcctcccaccagtcgctcacctagtgggcgcaaacaccagacaaacc

SEQ ID NO: 469488 - DNA, 122 bp, Homo sapiens
gcagtgttggtggtcacaacgtgtggtagggcatgacagtgggatctggcaggtagagaccggggttgctgctgaacaccccacgctgaacaggacagcctcccacagcagaatcatccggc

SEQ ID NO: 469489 - DNA, 122 bp, Homo sapiens
tctgtggctacagcgtggcacgtggcatgcgggcagcgtgcatgcgagggtgcaggcatgcgagacgacattggcagcagacaaaaataaagaaccctggacgaagcttaagaggagataca

SEQ ID NO: 469490 - DNA, 122 bp, Homo sapiens
aagccgctttcctctcctttctccctcccccttgtctgcgccacagcccccttctctccccgccccccgggtgtgtcagatttttcagttaataatatcccccgagcttcaaagcgcaggct

SEQ ID NO: 469491 - DNA, 122 bp, Homo sapiens
acagtgtaacttggcttagactgccctctagtgctgaaacagctgcagtgactgactacacgcttagggaactcatcatcagtcacctttcaatttgtagaaaatctcctgaagatagatgg

SEQ ID NO: 469492 - DNA, 122 bp, Homo sapiens
cggcagcgtaggagggcgggcccgggctgcagcagtcacgaaaactccgccggcggcgcccgaggagttgctaggggaatctgctccgcctctaacccggcacacgcaggcccacctgcttc

SEQ ID NO: 469493 - DNA, 122 bp, Homo sapiens
agggaggagcggctgggctgcggagcctcttgccttcactgcactctttgtctgacaccacgaaaagaccgaagatcaaagaggcccccgagcgggacagaaaaaggggtggggcggcgggc

SEQ ID NO: 469494 - DNA, 122 bp, Homo sapiens
aattaagagtatagtttttgcttatgtcatttatccagtgaaaaatgttcctaataaatacgtgacagttaaaattgttctagagaagaatgtttattaacagacaagacagtgcttattgc

SEQ ID NO: 469495 - DNA, 122 bp, Homo sapiens
gactgacagccacaggcccctttgagtgactccagcacaggctacctagcatgtaggtttcggggctttgcaggggctttctcttgggcccctcccaggctcagcaggcctgtcagactggg

SEQ ID NO: 469496 - DNA, 122 bp, Homo sapiens
cttccccgtccccgtcacctctccttaaggagcaggacctagggtggcttttataagctacgcaggagggagcacccaggtttccaagcatttctcacccagccctgaagtgtgcccgctag

SEQ ID NO: 469497 - DNA, 122 bp, Homo sapiens
ctgcgagaagcccaggaaggcaactcacagctgaggctgatgtgctaagatgttgagcttcgatatctcaccccggtcacccgagcggcctggccggggaaggcatctgactcccagaggac

SEQ ID NO: 469498 - DNA, 122 bp, Homo sapiens
cgcgaggtattctcggcggtgattggggcaaacggccacggactacacttacttacatgccgcgcgaggcgcctccgccgccggggcaaacggccacgaactacacttcccgacacgccgcg

SEQ ID NO: 469499 - DNA, 122 bp, Homo sapiens
ggtgaacaaagacatcttccttggcgtcattcctgtggatgaatccgtaaccattccggacgttgaaccatttgacagtgcccaggactcggagtgccagcagcaccagcttgttcgcgtga

SEQ ID NO: 469500 - DNA, 122 bp, Homo sapiens
ctggctgataaatacttgaggctttgcatcccatacactgtctgtggcaacccctaactccgctgtgtagctcaaaagctgccatactcatttataatacataaatgaatgggtgtgactgt

SEQ ID NO: 469501 - DNA, 122 bp, Homo sapiens
taattgagcggctgcgacacgacgaaggtgccagtgctcatggcggcgacaggagagggccgaagactgcgaagaagcggggagagcgcggccaggcctgctcggagaaacatgagtggcgg

SEQ ID NO: 469502 - DNA, 122 bp, Homo sapiens
cagatatcgtgacgtgcgtgcagagcagcaggaagtgaagacacgtgcattcctgccttccgtgaaggagtgcccagttcaagaggagcctgatggagccctgcctgtcgaggctgtatgcc

SEQ ID NO: 469503 - DNA, 122 bp, Homo sapiens
gctgtgaggccaccaggaggagcagcagcagatgcagaggggaagtgaggccgactcctccgagccaggatcacttggcctactggagaatagcaaggaggccaggaagcaagggagagtgt

SEQ ID NO: 469504 - DNA, 122 bp, Homo sapiens
aagtgaccacccaccctgttcatccatctcttcctttccattatcgtccctgcctagaagcgaagaccagtatttctgatgcctgtttgcctccagacaccccagcagctccttgggtaaaa

SEQ ID NO: 469505 - DNA, 122 bp, Homo sapiens
ggtcctccccaggtaactctggagggcgctgtggaatattgctgtgatttgccccttactcgtctttcacccatgttccgccttgattcggcataaggacagactgctccagtggggccttg

SEQ ID NO: 469506 - DNA, 122 bp, Homo sapiens
accaacttctgtgcctcctcagatggggatttatctggatctctgtggttccttctcagccgaaacaggtccagtatcccagtcatttcttcaaatgctgataggggtatgttggaatccga

SEQ ID NO: 469507 - DNA, 122 bp, Homo sapiens
ggctggcggatcactcgcggttaggagctggagaccagcccggccaacacagcgaaatcccgtctccacccaaaaaatacgaaaaccagtcagtcgtggcggcgcgtgcctgcaatcgcagg

SEQ ID NO: 469508 - DNA, 122 bp, Homo sapiens
gcatcagagggccctctaggctcaaggctattgccaaaggcattcctgtttatggcttcacgatggaaccaaggaggctctcgcagactcctagggctggtccttcactatggctgagagca

SEQ ID NO: 469509 - DNA, 122 bp, Homo sapiens
agcctagaactgccgggatggtccaggaacgtaaagatgtagagatgtgggagccaggggcgtagtgatgcaaggatgcagggacccagagactacgacctcccaacccccggcccgcgccc

SEQ ID NO: 469510 - DNA, 122 bp, Homo sapiens
atgggatattcttttgtttcgggtgttttgcgtgttgttttttcgtgggattgattttagcgggttttgctctgtaagtcctggtctttggggtgagttttgattttgtgtaattttgtact

SEQ ID NO: 469511 - DNA, 122 bp, Homo sapiens
tcaagcgatatttctttgtcaaaactcttagctggaaagttcctctgcatatccagagcccgccgctttcgtagtcagatttctgtatgccctttttctaaagtcctaaccgcctagctcct

SEQ ID NO: 469512 - DNA, 122 bp, Homo sapiens
ctttggctcgagctccaggtgcagatttaggttcattttcttttgttccgccacacaattcgaccggttccgcaactgagctcgggtcgcgaggaagccaagtgggcttcacaggaaagacc

SEQ ID NO: 469513 - DNA, 122 bp, Homo sapiens
ggtccccacgaagctgagcatgaggcggatccggcccatttgggggtccccacgagccctcgctgaccacccacacccatttgatgtggttgctctcaggataaaccacccagggccccaag

SEQ ID NO: 469514 - DNA, 122 bp, Homo sapiens
tcctgaatattgatatgttttccagcctctcctcctgcgctggcccaaggactcattttccgtccctgcttcctcactaaaaagagggtgcccaataattgcttgttccatacagaaggcag

SEQ ID NO: 469515 - DNA, 122 bp, Homo sapiens
ctctcattcttgttccctttgctacagcaatactgccatcttgctgtgaaatgtgcacaccgattttatttccaacactgtatttttgtgctcgttgttccttgtgcttcactccctcccct

SEQ ID NO: 469516 - DNA, 122 bp, Homo sapiens
aacctgtctccatccatctctacaaagaatgtggcacaatgtaggaactcagtgaattttcgtgattaaaagacgagataatacaggtgcacaatctgcaaaacataaaatactccataaat

SEQ ID NO: 469517 - DNA, 122 bp, Homo sapiens
cctggtccaagtcacttggaccctgtgcctggatggcggccagagcctcctaattggtctcgcagcttccatccttgtcttctgctgtctagtttcaacagggcagtctgagtagtgctttt

SEQ ID NO: 469518 - DNA, 122 bp, Homo sapiens
ccaagcggcgtggcccgcgggtcatggccaaaggagaaggcgccgagagcggctccgcggcggggctgctacccaccagcatcctccaaagcactgaacgcccggcccaggtgaaggtgagg

SEQ ID NO: 469519 - DNA, 122 bp, Homo sapiens
gcctccaggcctagtccgaggccgagcagcagcagcagcgccaggcccagagcccctgttcgccacgctccaacctgcgccatccaaccgccgctcatgctgtccccacagcggcgccggcc

SEQ ID NO: 469520 - DNA, 122 bp, Homo sapiens
gctcggcccagaccctcacagcccacgcactggtggagctcaggagccttaggaactgtgcggctgcaggtcagcctcaaagcatccaggttcgctgcaggaggacacctggaaaaaaatct

SEQ ID NO: 469521 - DNA, 122 bp, Homo sapiens
gaaaataatcaggctgactttgatgggagctttggtggggactccgagggcgacactgtgcggcgacccttggcaggtgctttgtttgccgtcggggccagcctcactgacaaggctgaggg

SEQ ID NO: 469522 - DNA, 122 bp, Homo sapiens
atccgggcgtgacacttgaccgcgtctgccggcccctccccttgtccgtcccctccgcgccgctggcgcgcgccttctgaatgccaagcattgccataaactccggggacaaaagcctgggt

SEQ ID NO: 469523 - DNA, 122 bp, Homo sapiens
gcgcctcctgtgtgtggccggggccggtgtgagggcagcgggcccaccgcatgcctggcccgccccagggcctcgagccacttcctcaggagctgctggcagctgcagcgacggcgcaccca

SEQ ID NO: 469524 - DNA, 122 bp, Homo sapiens
ttccttgagattaaatgacagtttccctgaccatcatcttaaagcacgcctatggtggatcgctctagaatgaaccataaacccgaagttctctttaagctttagtgaaacgaaatagtaaa

SEQ ID NO: 469525 - DNA, 122 bp, Homo sapiens
tctaagctcctctgatagccggtggcagtctctaatcctgctccctgcttcattcggctccggggaagcagaatgaaagggaaacagagagagagagagagagaaagagagagagagagaga

SEQ ID NO: 469526 - DNA, 122 bp, Homo sapiens
agagactcaaaaggaacagcaggtgggtgtaaaccccttcagcaaccccagtgcacaggccggccctgccaaggcaatgtgggtatcactgttgacctaagagactggctatgctttggagg

SEQ ID NO: 469527 - DNA, 122 bp, Homo sapiens
ggccttgcgccaagctggacgaataaaatacacggtgaagagagcggggccgcgcagtgacgggcttcccgccaggggaccccacccgcaggccctacagtcacctgcacccaaaggccctg

SEQ ID NO: 469528 - DNA, 122 bp, Homo sapiens
acatgcacaattcaaatggaatttcagctcatccactaattgttcctttaaaaacctgggcgggatgcagtggctcacacatgtaaccccagcactttgggaggccaaggagggtgggtcat

SEQ ID NO: 469529 - DNA, 122 bp, Homo sapiens
cctgggtgccgcctctgagtagggcgggcgaggaggcagccaaggcggagctgatggctgcgccgagggcggggcggggtgcaggctggagccttcgggcatggcgggctttggggggcatt

SEQ ID NO: 469530 - DNA, 122 bp, Homo sapiens
acctagccaccttctccccagagctgtcgactggctgttgaaggccaatttttgtgcctacgcaggtcctcaacacagaacaaaacaaaaaaacaacaaaggccgggctaatagctatttat

SEQ ID NO: 469531 - DNA, 122 bp, Homo sapiens
accctgggagccccgcgctgcccctccggactcccgaccctcagccccgggacacccgcgcggcccctcaaaccagggaccactgccccgcctctcatacaaggacccctcccccatacaag

SEQ ID NO: 469532 - DNA, 122 bp, Homo sapiens
tcactggggacccccagggtctggcagttccaaagaggtgatggtgtccagtgtgtgaaacgggggacagggaggcgggggcgtccccaccagtctccatccctctggccaactgtccgccg

SEQ ID NO: 469533 - DNA, 122 bp, Homo sapiens
ccccgcttggggctttgggactcactgtgccctctggaatgttctccttccgcatcagcccgccccctccctcacttcctacaatcccacacccagccaggacattcctttttcctcccctg

SEQ ID NO: 469534 - DNA, 122 bp, Homo sapiens
agctttcaatcactagttaatataactgctttaaatttacagacagtgggagtagctcaccgttacccaagtatgcttcatctcccaaaccaaacaacagctacatgttcaaacgggagccc

SEQ ID NO: 469535 - DNA, 122 bp, Homo sapiens
tcagagaataagtttgtattttctatgtcagtttgcactaaattaatttacaaacaaggtcgctgaggctttgactcaactgttaacactttctgagagtgagattcttttgattagggtct

SEQ ID NO: 469536 - DNA, 122 bp, Homo sapiens
gtgctggaagaaaagtactaataaataccaaagcacaaaccacttaaatagtgcacaattcgatgtgaagtagaagattcaaaatgactcagtgattattaatctaatgctctaaaatacga

SEQ ID NO: 469537 - DNA, 122 bp, Homo sapiens
ttttctttcttttttacacaaacatagtcattgtagactagtttagaaaacatgaattaccgaaattactctaaaactttataatctgcctcctagagagtgtcgatgttatcacctgggta

SEQ ID NO: 469538 - DNA, 122 bp, Homo sapiens
cggctaattttttgtgtttttagtagagatggggtttcaccatgttagccaggatggtctcgatctcctgacctcgtgatcctggctaatattttttgagtgcctattatgttctaaactct

SEQ ID NO: 469539 - DNA, 122 bp, Homo sapiens
ctggtggcgagcccaagtggttgcctcctacgaggagaccaacgaagtggagattcgatacgtggactacggcggatataagagggtgaaagtagacgtgctccggcaaatcaggtgagcgg

SEQ ID NO: 469540 - DNA, 122 bp, Homo sapiens
ctgactttgctttagtgaaattgactttttccttgattaatttagaattcaatgacctggcggggaagttatggcactggggatttttggtttccattgcttaacaggaagtcagagagagc

SEQ ID NO: 469541 - DNA, 122 bp, Homo sapiens
cgcccggccacgcccccgcgccggagcgggtttaaatccccctgtaaataatccacccgccgcctggggctggtgctgtgagctctgcttgccttccgagacaagttagaaggcaaacacaa

SEQ ID NO: 469542 - DNA, 122 bp, Homo sapiens
gtccccccgatcttcaggctccgaccccaggtcctgggagtatcgttcaggagaggcgtccgaggagaaggaggaaaaggcacacaaagaaactgggaaaggagaagctgccccagggccgc

SEQ ID NO: 469543 - DNA, 122 bp, Homo sapiens
caccgtcctccacccccgaagcatcaacatgtgtgcatgcagtgtgtttgtaaatgtgagcgtgcacatatatgtgggtgaacacgtgcatatggtgtgttgcttctgtggctgggccaggt

SEQ ID NO: 469544 - DNA, 122 bp, Homo sapiens
tcaccgtcgacgtaaacctgagggaagcgtgttctctcactgtcaactttgcaagggaagcgtgttctcgcgctcactgtcgacgttgtaaacctgagggaagcgtgttctcacactcactg

SEQ ID NO: 469545 - DNA, 122 bp, Homo sapiens
gggagagacgcccgcaccgggaggcaagttgccaccaagtttgcttcccttcgcaacctgcgggaaaaatcccttctaatgcctcccgggggttgtcgcctccaagaaggtgggggccagag

SEQ ID NO: 469546 - DNA, 122 bp, Homo sapiens
cattatcgtagccattttacagatggggaaatcaaatcataacttgccagaactcacacacgtcatggtgacagattgagcattcaaacccaggtccatctgaccatagaactcaagctctc

SEQ ID NO: 469547 - DNA, 122 bp, Homo sapiens
cttgggagccgccgtgggtcgcggactggcgtggccagtgtggaaacttgggactgtttgcgatttctgggcgtgggaccgagttccaagtgacaattctaaaacttcaccttacagcctag

SEQ ID NO: 469548 - DNA, 122 bp, Homo sapiens
attcaaaaagaatatcccttttatagtttgtgccttctgtgagcaaaactttttagtacgcgtatatatccctctagtaatcacaacattttaggatttagggatacccgcttcctcttttt

SEQ ID NO: 469549 - DNA, 122 bp, Homo sapiens
aaatcttagacgtaatcccagctctgccggtgactcagcttccctggatcttggtttcctcgtctgtagactgggcataaccctacaggttcatgtggggtgggtggcgcgcgctagcggtg

SEQ ID NO: 469550 - DNA, 122 bp, Homo sapiens
tgtgagcatcttaccggacagtgctggatttcccagcttgactctaacactgtctggtaacgatgttcaaaggtgacccgccgctcgccggggacaccaccgaggcacatccggagctccta

SEQ ID NO: 469551 - DNA, 122 bp, Homo sapiens
gaacgcttgctgagggcgctgctgtcgttggtgttctgtaccgcgcctgcccgacgctcacggctccgggggcccatggccagaagagactcaggaatggcagtctgtcacggttgtgagcc

SEQ ID NO: 469552 - DNA, 122 bp, Homo sapiens
ccagagagaccgaaagtcccaccagagggtacagagctagctcagccctaatgccggccccgcggtgcctttccgagctcacggcctcccctcagcatccgggtttcggcctcggagcgcca

SEQ ID NO: 469553 - DNA, 122 bp, Homo sapiens
tgatcatggtgccgcccaagaaatgggccctcagcgggcggcagggcgccggatccccagcggtggtgaactgtacacagcccaccactcgcgttgccggcagcgctgtggccccgtcgtcg

SEQ ID NO: 469554 - DNA, 122 bp, Homo sapiens
catccctgccgccccagtcaccgcccttcttgagccgggaatcccgcccacgccgcgccacgctccgcccccgggtgagggacttgacctccgcctggcaccctggcgtaagggtgattgcc

SEQ ID NO: 469555 - DNA, 122 bp, Homo sapiens
gcccgtcccagccccgcgctcccgcactcgcccccgcggcgccctcaccttctcgcacagcgtccgcacttggttctcgttcagctgcttacactcgttcagctgctcgacccactggtcca

SEQ ID NO: 469556 - DNA, 122 bp, Homo sapiens
agcctggagctgggggcgggggcagggccgcgattggctgagaggcggccagagggcgggcgggggggaactcaaggcctgcttgatacgtccgccattttgggcgcttcgctgatggtgtc

SEQ ID NO: 469557 - DNA, 122 bp, Homo sapiens
ctctgcactgtgtttctgcctccagttatgtggggttttctgcacccacagccactctggcgccagctgggtgtcctgtgtttccattcagctctgacatcaattacctgacgttagcgcag

SEQ ID NO: 469558 - DNA, 122 bp, Homo sapiens
gtcctgggccacgtcaaggactgcgcgcttcgtcataagatgtgaagacgttaaggggaccgaagtggacacggtcagattcgtcttggaaaatgttgatttccgtttactttagtagggag

SEQ ID NO: 469559 - DNA, 122 bp, Homo sapiens
cgtgcgttctctctgttgttagtgttgagtttctcaggcttagcttggaaactgtagccccgtctaacttctcgtgtaggatactgacgtgcctcccttaacgctgcaataaagaaagctgt

SEQ ID NO: 469560 - DNA, 122 bp, Homo sapiens
aaaaaatggcagaggtggccgcatcggtgaactgttcccctttctccctctgggggcacccgtgagtcagaaaacaggcatagaccaggaccatttactgaacaggatttgggggcacctgg

SEQ ID NO: 469561 - DNA, 122 bp, Homo sapiens
cggcatcctctcaggagggccggtccgggtctcagcgcgcctcacggaagaggatggcggcggatactgcccatgccgcaaggccgcaaggatgacctacctgttcaccagcgcggccgaaa

SEQ ID NO: 469562 - DNA, 122 bp, Homo sapiens
ccgccactgggaggaatttctgtaaatagcagagtccggttcttctttcctattggacggcggtccaaccaatcccaaggcatatccgccgcgcgccggagctgaggttgcgcatctttgtt

SEQ ID NO: 469563 - DNA, 122 bp, Homo sapiens
tgaaaaacactaccttcaggaataccagacacctactaaattatagtacttagcagaagacgacagatgaatggcatgacggtgactataatgaagtatgttggagttggtaaggcagaaag

SEQ ID NO: 469564 - DNA, 122 bp, Homo sapiens
tttggacgcatttccagctttctctgaaccgggctggcttcctagcagatagggcgggaccgtcgggttgagtgacggccggtggcccgccctgggcgtgacgttgttctagtgttgttgcc

SEQ ID NO: 469565 - DNA, 122 bp, Homo sapiens
ggtttgtgagcagcccccggtcccctgccgctccgtgagaaatcaaacttcaggcactgacgaagcatgaagccagcatcttaggaagaggtagtgacataattacaaggtaggaccaaccg

SEQ ID NO: 469566 - DNA, 122 bp, Homo sapiens
gctctgctggagaacgtgctcctgtgacgtcttttctgccctcagcctggctatggatgtcgggggtgaggtctcctttccctgactgcggccatggaagcttgacgcgggacctccgcaca

SEQ ID NO: 469567 - DNA, 122 bp, Homo sapiens
aagcgcagaacgtggtgactaaaagcagaagagaaatcatgagggcgctcaggcgtcgcacgctctgctccgtggattctcactcccgccgccgcaccctggcctcgcctgaccctgcccgg

SEQ ID NO: 469568 - DNA, 122 bp, Homo sapiens
gggctggcttttaaaacaccgaaaacccagacaggaacggtgtccatctccaaccccagacggaaactgtgcccgcacccacaagaaaagcagtcctttgcccagagcaaccaaaccctgaa

SEQ ID NO: 469569 - DNA, 122 bp, Homo sapiens
ttgggagcgcgggccgtgggcgtcgctcggccttgtccgcggcgtccccgctgccggccacggcgctcagcgcttgtgctctgtattgcaggtctaccccgagccccggagcgagagcgagt

SEQ ID NO: 469570 - DNA, 122 bp, Homo sapiens
ctctttcctcactacccaaactaaaccttaaggctccattttccctggcgactcttcgagcgcccctctgcttctgtagaggggtcgagccatgtcaaggtagaccctgtgtcggcccgtct

SEQ ID NO: 469571 - DNA, 122 bp, Homo sapiens
tgtgtgaatgggttcacaggttcccagggtggctgcactccaggactagggcaattggtgcggcagggaatttaagtggctggggcccaagtgagatgagctgaattcgtttcggcagcttg

SEQ ID NO: 469572 - DNA, 122 bp, Homo sapiens
ggcctgcagctccatgcccctcaggttgggtgcaatgcccctggtgcagattctgctccccgggccctctctcaaacacctgagcaggcttgtgtctcccaggggaggtcgtcccccgctac

SEQ ID NO: 469573 - DNA, 122 bp, Homo sapiens
gagtgagaacccggacgagaagacgtgcaggccccacgctgtgtgcactcaggcagcccccggaccaacccacaggggtttcagtgtgatcagctctgtctacaacaaggtgtaaagaaaca

SEQ ID NO: 469574 - DNA, 122 bp, Homo sapiens
tggagactaaaacataatttagtttggaagttttgtttgcagatgttggagcacctcattcgatctctggagacccccagggtggtccccagccagacatgggaattaataccttcaacaag

SEQ ID NO: 469575 - DNA, 122 bp, Homo sapiens
tctagcaggactcagccaatgtagctccaggtccctccagtcaccctgtaggggccaaggcgtggccaaggtggggccagcagctaggctcagctctgcctgcccactggtccaggctgatc

SEQ ID NO: 469576 - DNA, 122 bp, Homo sapiens
ggccactaacctgtcagcaagaatgtgccagtggtcgcggggctcatcctgcgtgtcccccgaccctgtcccgtccaagcacaggggtctcccagctcccaccaccggggcaattgcattct

SEQ ID NO: 469577 - DNA, 122 bp, Homo sapiens
cctggcatcacgtcaccttgcttcgctactttgggaaccatcagctgcctctgtgggggtcgggggagggctcagctctggaactgggttaaggctgaaaaatattcagaaattggccatgg

SEQ ID NO: 469578 - DNA, 122 bp, Homo sapiens
acaaacacagcagtctgtataaaaataccgtgtatcatttactctttctgcagctctatacgataggcaggagaggcttatgtggcagcacaagccaggtggggattttgtaaagaagtgat

SEQ ID NO: 469579 - DNA, 122 bp, Homo sapiens
cgagctaggcagggagtcggcgccaggctgggtggtgctcggctacgcggagtgggcgagcgagcacgcgcctgcggtggccggcggtcccgcgctggagggcgctggcgacgtcgcggccc

SEQ ID NO: 469580 - DNA, 122 bp, Homo sapiens
ggtgccggggggaagcgggtgagcaggggctgcggccctggcagggactgtcggagtggccggggcaggtgacctgggcaggtggcccggagcgcgcgcaggcgcaggccccacagatccag

SEQ ID NO: 469581 - DNA, 122 bp, Homo sapiens
caacagggccagcaggctggtagactgagggctgtgggcgtagactgacacctgatggggcgtgtggatcacgagagcaccagcctagcccacggcaggcagccaaactcaggcctcaccta

SEQ ID NO: 469582 - DNA, 122 bp, Homo sapiens
aactgagagcaatcatctaataagattagcagtaaggaggttatggtgcccttagtgacccgagctctgtgggatgatggggttgggagcaaagcttaacaaacaatgggagggagagccaa

SEQ ID NO: 469583 - DNA, 122 bp, Homo sapiens
gccccgcagctcctcctgcagctgggagtctggccaggacagcgtgcagagagaagaaaacgggatcgctgtgtccgccaccactgcacccaccactcccttgccacggtcccccgtcaaca

SEQ ID NO: 469584 - DNA, 122 bp, Homo sapiens
tagatctgaccttggtctgcctgccaggtggaacgtgtgatcaccattatgcagaatccacgccagtacaagatcccagactggttcttgaacagacagaaggatgtaaaggatggaaaata

SEQ ID NO: 469585 - DNA, 122 bp, Homo sapiens
ccgtcgggtggtaaaggtaagaaatcccggtgcctgggctgagaccctgcccacttctgccgttacgaaccctgtgcccttgagcaagctgcttagcttctggcgcctcaatttcagcaact

SEQ ID NO: 469586 - DNA, 122 bp, Homo sapiens
cctccctgcagactgggctcaggttgaggagggaccccgcctccagagcaatgagcgcggcggcctcgggtgtgtgaaagctccagccccagcctccgtccaccgcagggtggcctgccacg

SEQ ID NO: 469587 - DNA, 122 bp, Homo sapiens
ggggacaccatcgtcaacgtgcagcagatcgacgacggctggatgtacgggacggtggagcgcaccggcgacacggggatgctgccggccaactacgtggaggccatctgaacccgcagcgc

SEQ ID NO: 469588 - DNA, 122 bp, Homo sapiens
tgccacaaccagagctcccgggcacagaatccaggggcacaccgcttgtctgggggtctgcgctttgcacctcactgcctattatcccagagtcctgagctgttccttgccccagtatcaga

SEQ ID NO: 469589 - DNA, 122 bp, Homo sapiens
ggaaaagctggaatttgggaagtgaaggtggcctcggggtagaacttacctagaccagagcgaattcatcctgaagaactcagagaaagccggtgcaggaagtgggttcccgctctccctgc

SEQ ID NO: 469590 - DNA, 122 bp, Homo sapiens
aggaactcaccatgctttttcagaaagttgctggtgaataaaagcattcggcagcgtcgtcgcttcactgtggctcatacatggtaagataagacttggaggtatctacagtgcttttcaga

SEQ ID NO: 469591 - DNA, 122 bp, Homo sapiens
gggtcggggctccctggcgaagggagtctgtctgtcccaagccgctttcgttccagaaaacgtgccagagggcaggccgtcttaatacagtgaaagaattgaggagactggaatgaatggta

SEQ ID NO: 469592 - DNA, 122 bp, Homo sapiens
gcacgtgggggagtggggaggtcaggaaattgggggcgggggtgttggcccctctccagccggggagtcgcccccattgctgcagccatcagcctggccctgacgtgggagcacagtgggcg

SEQ ID NO: 469593 - DNA, 122 bp, Homo sapiens
tcctctacaggtaatagtttatccctagagacaagctaattttcattattttcctatgtccgtttgttgacatgttatcaattagcaattagtaatgaggggaatctgactaggggctcaat

SEQ ID NO: 469594 - DNA, 122 bp, Homo sapiens
ccctggtgcccgagagcgccgccggcagcaccatggacagcgccgggttgggccaggaggcgcccgcgctgttccgcccttgcacccctgccgtctgggctcctgctccggccgccggcggc

SEQ ID NO: 469595 - DNA, 122 bp, Homo sapiens
cacttgatgtctgtctagggctccccgaggacctgagccaggagagcaggcggctgagcccggagaagcacagcaacctgcccccgagtctgcgcccgctgcgctcactccgccgagaaaaa

SEQ ID NO: 469596 - DNA, 122 bp, Homo sapiens
ccggcggctggcagtgggctcagtcgggggtgcggggctgtgacctagaggcttcagtgtcgatccccgaggtgttcgcgcgcgccagctgtcctcgcggccgcctgcgcgctggccgcctg

SEQ ID NO: 469597 - DNA, 122 bp, Homo sapiens
ccgcctgcggacccaccttgtcgttgttggcatatatttggcccaggatccagccctcgccgccccacaacccccgctgggattcggggggaaagtagatgggaatgggcacgtcctccaca

SEQ ID NO: 469598 - DNA, 122 bp, Homo sapiens
ctccctctgctgtgaggtccctgcctcattgctgggacttttgtctcaaggccccggcctcgtccttggtcgtccagcccactggccgcagcagtgggggccggcgctggtggtcagtgctc

SEQ ID NO: 469599 - DNA, 122 bp, Homo sapiens
tgcgccggtgggacttggtgctctgggttctgtgcaccacccggacactctggtggctgccgatgctgccgcgctgggacaccgagccccctctgggcaccacctcctcctcctccgagtct

SEQ ID NO: 469600 - DNA, 122 bp, Homo sapiens
cgggccccacctcgcggcccgcctggccggccggaggagcagcggaggccgagcactccccggtctcgggttcaacttcaataaaagggcccagcccgcccttgatcacgcggcttgcctga

SEQ ID NO: 469601 - DNA, 122 bp, Homo sapiens
gatgggaagcaggaatccaaagcgcagccactcgatgacatgcagggggggccggccggccgggggcagcaggtcacagcccagcaccacactctccccagcccggcccaccaccgatacca

SEQ ID NO: 469602 - DNA, 122 bp, Homo sapiens
cggctgcggggcccgccgcaaagagttaagagccggttcccgagacggcttcggcggctccgggtccccagaccccgctcgccgctcctgattggctgagcgcctgtcagtagtaaagggta

SEQ ID NO: 469603 - DNA, 122 bp, Homo sapiens
gacagggagtggagtgcggctgtctcagcagatgtgggtttcctttcaggatggagagaacgtgctggaattgggtcctgtgatggttgcacaatgttgtgaggattaaaaaccactgaact

SEQ ID NO: 469604 - DNA, 122 bp, Homo sapiens
ttcccggagcgggggcggaggaggcagcagcccggagaggctgcttagccaccagatgtccgcgggtggcccgcgcggcgcgggcggaggaaggaagggcggctctaggggcgtcctggcta

SEQ ID NO: 469605 - DNA, 122 bp, Homo sapiens
cagagcaatattccaggtaggcacgtgggcggcacaggctggcctgggaggcaggggcagcggtcagccccgacatcagtcctgtggccccaatctctgccccctggccgtcccccgctcac

SEQ ID NO: 469606 - DNA, 122 bp, Homo sapiens
cctcctccctacatacagagccagctttgctagggcctcgccggaatggggtcagaagctcgggaccgagtcaaatgctgggcacagagcaccagcagcagggggctgatgggcagggaagt

SEQ ID NO: 469607 - DNA, 122 bp, Homo sapiens
agtatgggtcaggctaagagtaagtttgctaattacttaagcctggtgcggccgttattgcgctgcggaggggtaattgtgagtacccaatatctcacatctttgttccatctggtagaaaa

SEQ ID NO: 469608 - DNA, 122 bp, Homo sapiens
gttgaatgtaaagactatgtaaaaaaggcaaaggtaaagatcaacccagtgcaacagagccggcccttgttgagccagattcacacagatgcagcaaaggagaacacctgctactgtggtgc

SEQ ID NO: 469609 - DNA, 122 bp, Homo sapiens
agcaacagggacagatgaaaaacaaaatccaatcagggcgataaatggcggggggcaggacgtggtggtctccaggctggcttcgtgcgttcttgcttttgtcactgcccccctgttacatg

SEQ ID NO: 469610 - DNA, 122 bp, Homo sapiens
tttccagctgattctgttctgatcctggatgagggggtactgaggagtgtgtagaaaaggcgaggaaagcaactagcagaaatctccaagaggctcggcccacagctcctcattaagggcct

SEQ ID NO: 469611 - DNA, 122 bp, Homo sapiens
gcggcgaggcggggcggggaggagggggcgcgccgctctggccccggcactgcgcgctctcgccgccctgtgtatgccacggcccgcctcctccagggaggctgcccaaattcaacgccctt

SEQ ID NO: 469612 - DNA, 122 bp, Homo sapiens
cacagaagcgtggaggggaggccggaccccaggcagaggccccagtgcttgggcccgtggcgcacacccgcgatgtgggtcccacgcacgcctcctgcactgcagcgtcaccagcacaggcc

SEQ ID NO: 469613 - DNA, 122 bp, Homo sapiens
tttataattgaatttttaaaactaaacatctgcaaccctgtaccacgtcctccactttctcggcagggagcatgagctatgggcatgagctaggaagctgtctgcagggagaacccagacag

SEQ ID NO: 469614 - DNA, 122 bp, Homo sapiens
cactcaaaacaagaaatgccagggggtggagagaagcagcacaaggaatcccacggaggccgacacatctctgtgtagcgcaaagatggtttttagggactcttgttccaccacggtctttt

SEQ ID NO: 469615 - DNA, 122 bp, Homo sapiens
aggaaggaagccaggcaggaaggcgagcggcctctgcgtgtgtgcgcgcgggtgtgagtccgcggagtgtgtgtccgtgtgtgcgtgtgtgcgcgtgtgcgtgtgcgtgtctgtgcgctccc

SEQ ID NO: 469616 - DNA, 122 bp, Homo sapiens
tcacagaccagggggtgtcgaatgagtcctacagcaggacagcaaacaagaaatgaggcgcggggtcagggaacgcgctcaaaaaaggaagaaaaatcccactcttcattcgaaatcaggcc

SEQ ID NO: 469617 - DNA, 122 bp, Homo sapiens
cgtcggccgaattggactggagtagctgcagcaactgcgacctggcagcaagtaaccggacgaaatggacagatggccgtggaggagaagcctgacctgactgagggagaggactgatccga

SEQ ID NO: 469618 - DNA, 122 bp, Homo sapiens
taggaaaaaagcaaattttggtcaggtcatatcggcccaccatttaacacagttttaaaacgaatatggacattaatttagtgcctattatgtgtttagtcactgggctaaactgagcagaa

SEQ ID NO: 469619 - DNA, 122 bp, Homo sapiens
aaagcaatcagtggacgtatttttaaaagaaaactcatttaccacgcaggcctctggagtcgttgatggaatagccctcctctgaatggaaatagtggtgtgatagcctcccaggagttatt

SEQ ID NO: 469620 - DNA, 122 bp, Homo sapiens
catttcaggagttctcagagcccactgtgcactgcatagcttccctttccagagttcccacgccacttgtaggcttcactcagagagaaactggggatccagagagatgatgagttaactga

SEQ ID NO: 469621 - DNA, 122 bp, Homo sapiens
agtgtccaacggcacccatgtcaacatcctcttctctctcaagacatgtggtacagtggtcgatgtaggttcctcctggagggcacttggggaatgaccaaaagccggttatttgggaggca

SEQ ID NO: 469622 - DNA, 122 bp, Homo sapiens
cactgttctccaccctgacagagtctcattctgccaggctggtgtgcagtggcacaatctcggctcactgcaacctccgcctcccgtgctcaagcaattctcatgcttcaggctcccgagta

SEQ ID NO: 469623 - DNA, 122 bp, Homo sapiens
agcccccacactgcagcaagaactggctgcgccaatctctttttattctaagagtgaagtcgagcatgggcagccaggcagctggagccagggccctacctgtcatgaattggaagccgggt

SEQ ID NO: 469624 - DNA, 122 bp, Homo sapiens
cctccgggtccccgcccggcgcgtccagccccgccagcctctatgggcatgcaacccagccgcgtgcctccctccggctgcaaacacggaccaatcgtctccgacaccttgagacgcacagc

SEQ ID NO: 469625 - DNA, 122 bp, Homo sapiens
tctttaaaaggattccaaagagctcttccagctctagtgtttagtggttttgcatagtatcgcagcctcacctaggcctggacacgcgctcctcctgtcaccacccgcggagtgtgtgatta

SEQ ID NO: 469626 - DNA, 122 bp, Homo sapiens
ctctgtacatacaaactgctcactactgaagggaaaaaagaatataatccttggtgtctgcggattcaaaggggagaaacgaggctgtcaggtggtatccaaaaactggtacatgtatgttc

SEQ ID NO: 469627 - DNA, 122 bp, Homo sapiens
gtcactcagcgtcacatctttagggtccatctgtgccgtggcgggagtcggcgcttccttcgtctttgcggctgagcgctgttctgccccgtggacggagcacattttgtgcacgcacccct

SEQ ID NO: 469628 - DNA, 122 bp, Homo sapiens
ggggcgggagagtgggcggagggtgtggggccccactccacagccccaggtttgctgctgcgctgtctgcttggagattaaaatgaaacgtgacttctaggtgagacgaatctgtgtgtctt

SEQ ID NO: 469629 - DNA, 122 bp, Homo sapiens
gggaaaaaaaaaaagaggaggaggaggtttccctgatgctgggaggagggaaaggaggaccgatcgttctcagctgctgatcatctttagctaagtgctacacggggacccagcctggggag

SEQ ID NO: 469630 - DNA, 122 bp, Homo sapiens
ttggcaaaaaaaacctgttatttcttgatcttttggcaccattttcgcacttaataatggcgtaatttctcttctatttgttttctatttgcccatctgttcttttttctccttttcctgcc

SEQ ID NO: 469631 - DNA, 122 bp, Homo sapiens
ttatggaaggcatcaagcaagaaatttgataggcattctcttcactctagaaatcagccccgtgggacaggggtcttgccctttattctctgacagcggccagctcctagggcacgcttggt

SEQ ID NO: 469632 - DNA, 122 bp, Homo sapiens
agtttgggctcaaacccagggttgtctgtctccaaggttgctttgaaaaccactgttgaccggggtacaaaggatgctatccagaaccctagcaactcaggctggagggcagtgaccccaac

SEQ ID NO: 469633 - DNA, 122 bp, Homo sapiens
ggaagggttgccactgtggagtcagggcctctcctctgaggctccagctgcagatagccacggttcctgctgacagtcgagccaaggtcttcccgaacgatggctgaaaaagcctttgtaaa

SEQ ID NO: 469634 - DNA, 122 bp, Homo sapiens
tagcttggacttcctcaagcatgctggcctcagggtagttgtgcctcttctgtgataattcgggactccatgagaccaaggtgaagctgacaattcttttaaaggctacccctggaaccagc

SEQ ID NO: 469635 - DNA, 122 bp, Homo sapiens
catatacagacacagacagaacatgcctgtttccatttaaatttgctttttggatgaaatcgtttacataagtaggaccataggttaagtgtgtccatgttgaatgatttggcaaatgaatc

SEQ ID NO: 469636 - DNA, 122 bp, Homo sapiens
gccaccatgtagttctggaaacggaggatgcggtggtagatgtccagttctgtcagctcacgtttgtggatgcagatctggtgctccttctgcgtctgcacgatccgggcctgcacttcttg

SEQ ID NO: 469637 - DNA, 122 bp, Homo sapiens
accaggttccattgcccagcttggctgatgagatcactggcagagtaccatgggtgcagacggggcctgctgtttcaacatgttctcaggagggctcttgcccacatttcttggagaggtgt

SEQ ID NO: 469638 - DNA, 122 bp, Homo sapiens
ttcctgggctcaagccatcctaccacctcagcctctcacgtagatggaaatatgggagtgcgccaccaaacccagctaattttttattttttatagagatggggtctcgccatattgcccag

SEQ ID NO: 469639 - DNA, 122 bp, Homo sapiens
gagatggccactgcatccagcgtcgcctcctggtgctgcgggcccctgacggacagaggacgctcgacccctgcccgccaccgcccagggagtcagcccgactcccaggcacccgcccctct

SEQ ID NO: 469640 - DNA, 122 bp, Homo sapiens
tcaggagcgggtcgtgattgccgacgatctcccgcacccgttcggtctgacgcagtacagcgattatatctactggacagactggaatctgcacagcattgagcgggccgacaagactagcg

SEQ ID NO: 469641 - DNA, 122 bp, Homo sapiens
aatggcctcagaacacagtgacaagagaggtgggcagattttaggtggtggggtggcttccgcaaggcaggggatgccgtgccttgagtacttgactgcccacagctgcatcttatgcctgg

SEQ ID NO: 469642 - DNA, 122 bp, Homo sapiens
ctactaattctgcatccacagattcaaccaaccacgcactgaaaatatttgggaagtagccgagcgcagtggctcacacctgtaatcccagcactttgggaggctgaggcgggtggatcaca

SEQ ID NO: 469643 - DNA, 122 bp, Homo sapiens
tgcacggtcaccgggacggggcttatggggtgtggcacggagcagaggctctgcgtggcccgtgtctgcatccggctgtgggtttttgtgtgagccgacagctgtgctgctgaagggaagag

SEQ ID NO: 469644 - DNA, 122 bp, Homo sapiens
tcccttcccaaaaatatctttaggagaagcgagttctctcggcgtggaagcagtgtttcccgcaaaactgccagcccgccccccgctcacgcacagacacccaatttcccatatacagataa

SEQ ID NO: 469645 - DNA, 122 bp, Homo sapiens
atcatttaaaaactaaaaaagaaaaacaattttttttcaagggcctgagaaaggaaaaagcgaagtcaaaagaattacagttgaccattgaataatgcaggagataggggcgccaacccccc

SEQ ID NO: 469646 - DNA, 122 bp, Homo sapiens
agctcttgccttccacctactaagcagtttttctgtggttagctgtgtgacataaactatcggtgtattaatttgctttcactagattcccccccccccaacaacttagtccaagaacatac

SEQ ID NO: 469647 - DNA, 122 bp, Homo sapiens
cccaccctgccgtcgccccggagtcccccaagctggcacagctagcggctcacggtcacacgtctgtcataggtttgagggctgaattctgaccggggcagagagtggaacgagctccaagt

SEQ ID NO: 469648 - DNA, 122 bp, Homo sapiens
gctgagaaacctgctatttccatatgcagaagcttgccagagctgcatctgagcaagctgcgaagagacaactggcagcagaaagatgcatcagcaccagggaggtatcagagcaggtcagc

SEQ ID NO: 469649 - DNA, 122 bp, Homo sapiens
tgccttgggtgtcttggagatgacttggcgccccccggagccccgtcatggctgtggctgcgtccacaacactgcatcagcagagtcctggggaagccatttaggaatctgaagcccgggat

SEQ ID NO: 469650 - DNA, 122 bp, Homo sapiens
tctgtggggtccgctgcgcccgggacccctcccaaagccgagggcaagaaggagtggcttcgcgcgctggctccccgggcctgtgcctcttccacgcctggccttgcccacccagtgcagac

SEQ ID NO: 469651 - DNA, 122 bp, Homo sapiens
tggtatgctcactttatacaggacacatctctctctgcttgtttgaggaatgacggtggtcgctgggattccgtgaagggcagcattaaggagaaaaatcagcattctgggtgcgggtctgg

SEQ ID NO: 469652 - DNA, 122 bp, Homo sapiens
agtacagtccctgcagtatccagaaagtgtttaaagtaccaaatacaggttgtattagtccgcgttcacgctgctgatgaagacatacccagggctgggaagaagccctcttaattggactt

SEQ ID NO: 469653 - DNA, 122 bp, Homo sapiens
gtggcgcgtgcctgtaatcccagctactagggaggttgacgcacgagaatcgcttgaatccgggaggcggacgttgccatgagccaagatcgcgccactgcattccagcctgggtgacagag

SEQ ID NO: 469654 - DNA, 122 bp, Homo sapiens
ggcaggggcggtggagcggggccggaagtgaggctagcggagccccgcagtggcggctcgcgctcattggccgggagcagcgcggtgggcgggacggagctcggcggtctgcgctcggttgc

SEQ ID NO: 469655 - DNA, 122 bp, Homo sapiens
cgcaggcgagcaagataacgtgggtcttggtggtctcggtcatggtgcagatgggtccttcgcggtggtctaggggttgcctctctttttgtgtctcgttgtgtctgcagagggagaaagga

SEQ ID NO: 469656 - DNA, 122 bp, Homo sapiens
aaacccgggacggatccggagcggactcgtgccctgctggcggggccgggggtcggggtgcgccctgggcagctgggtggcctcaagccctactggcgagactccgccctgtgtcccggctg

SEQ ID NO: 469657 - DNA, 122 bp, Homo sapiens
gatattgatggaaacccctgagtgcacgcccgtgctgggcgcaggggaaacagcgacgcacgggacaaaacaagcttgcagaacagcagggggcagagaggctgtaaacaagccaacgggct

SEQ ID NO: 469658 - DNA, 122 bp, Homo sapiens
cacagccggggagggcgcgcccgacctgaccccaaagctatcagttggggggggggtccccggggaattagaagctgtctcctcccgggcatctccgaggggcacccctgcctctgccccct

SEQ ID NO: 469659 - DNA, 122 bp, Homo sapiens
agggagggagggagggtgggtgagctggctgcgggagccgtggggctcagggtttcggggcgtgtgtgtcggggagggcggggggaggtggctgaagggacgcgccgctcggtgagcgcgcc

SEQ ID NO: 469660 - DNA, 122 bp, Homo sapiens
ggcgggccaggtcccggtgggtggtctcgctgacgaagcagtagagcacggggtcggcgacgcagttgaagctggtgagcaggagggagaagtggtaggcgttgaaaacgcccttggcgaag

SEQ ID NO: 469661 - DNA, 122 bp, Homo sapiens
ccctggcagggccgatggtacatgctcactcagtgagggggctccagaggtctgtgggtacgaacccaagggctggtgcccaggggcaatcagcttatgtctctgagccttgggaaacagtg

SEQ ID NO: 469662 - DNA, 122 bp, Homo sapiens
agagcagaatgggggtggagcgggtgctgaccggggcgctaagcagtgtgtggggtggagcgggtgctgactggggcgctgagcagtgtgtggggtggagcgggtgttgactggggcgctga

SEQ ID NO: 469663 - DNA, 122 bp, Homo sapiens
gtatatacagaagacagacagatcttcttggcccagaaattttccagttctcctactttccgcgccttcttcgtttggggtgtggtttgagtgctttggttttatttcgttttgttctagtt

SEQ ID NO: 469664 - DNA, 122 bp, Homo sapiens
atgaaatagggctttattttttctcacttaaattggaaggtaggcagtctagggctggtgcgatctccactgtgtcactgggctgttgcccttctgtcattctattctgccatcctaggcaa

SEQ ID NO: 469665 - DNA, 122 bp, Homo sapiens
agcacacgcagaggcagacaatgcacctgcagggacgaggagaacaaccagcacgtctcgcgctcctcaagcccaggctctctccctgggagtgctcaaattcaggctctaaagcagagctt

SEQ ID NO: 469666 - DNA, 122 bp, Homo sapiens
aatccaaaattatccttcagagttgccacataacccaagagcctcttggagttagaattacgacctaaaagtcgcacacaagttgcaacctgctgtccaggcctctgtttgtcactaatact

SEQ ID NO: 469667 - DNA, 122 bp, Homo sapiens
caacatgaaggtcaggcagagagagacaaatgagagcagctcagggaaaggaggttaccacggtaacaagcaggagggactgctatttggaaacagacctaatctttctcctccttctccct

SEQ ID NO: 469668 - DNA, 122 bp, Homo sapiens
ctcccacctgtacccagggtctttcctggccatcgcgcctcctgcagcccagggagccaccggctttcctaagctgctgtgggaactggcctgaggtccaggcgctgtccattgtgccgctg

SEQ ID NO: 469669 - DNA, 122 bp, Homo sapiens
tcatccactctccatcgggaaggctcagactgtttccaaagtccagtgtccctttccctccggtcctcatctgctctccatcaggaaggctcagactgtttccaaggtccaggtgtctttgg

SEQ ID NO: 469670 - DNA, 122 bp, Homo sapiens
ccaacgccagtgctgggcaggcagggctcccgtctgctttgttcactgctgtctctccagcgtccagaggcccagtgtcggtgggtgggcactggctgtgcttctgtggagtgggggcgccc

SEQ ID NO: 469671 - DNA, 122 bp, Homo sapiens
cctggagtaagggcatcagattccaaacattactatgtagttgccccatttgggaagtttcgtagcaacaaatttgttgggttctttctcccctcccctggtttagaagcaaaccagagctg

SEQ ID NO: 469672 - DNA, 122 bp, Homo sapiens
cagccaatcgctgcgcggagagcaagttgactctctgctgattgggtcccagtgagtcagcgcctccacccacaggactatgcctcagactacaactcccaaggagccttgcgcataaagga

SEQ ID NO: 469673 - DNA, 122 bp, Homo sapiens
acaatgttttctttcttgagacaaagcaaagcaaaacaagaatgacaggcaatttctgttcgaggttcataactaagatgcaacaaacaggtggtatggtatttcttctctaagctcctttc

SEQ ID NO: 469674 - DNA, 122 bp, Homo sapiens
ctggtccttagaaggcaagacagcccccttccagctgggggatcaatctgctgttggctgcgccagggtgcggctccctcgggtctggcctggtcgtggatccagttccttcacagctgcgg

SEQ ID NO: 469675 - DNA, 122 bp, Homo sapiens
atatgttgaagccctaagcctccaatgtgactgtatctagagatagggcctaccctaatccgataggacttgggtctttctaaaaagagaaagaggccgggcgcggtgcctcacccctgtaa

SEQ ID NO: 469676 - DNA, 122 bp, Homo sapiens
tcaggcgcccagcggtgctgggcggggctggggcacgaccgggagcatgcgcagagcgcgcgtttcgcccatcgcgcacgcgcacacacctgctccgcccccacgctgcgtgccgctgctgg

SEQ ID NO: 469677 - DNA, 122 bp, Homo sapiens
gttctttgagttacattttactccaaattaccattttaagaaccctatgaatctgcgaggcgggcatcgcttccgtggctaggtctggaatgatgttcgagtggcctttaatgtctccaaag

SEQ ID NO: 469678 - DNA, 122 bp, Homo sapiens
tgtactctcagaaatgctccgtctcttcagctttgaaatgacatctctgtcaaggtctcccgccgcccagttcactccatgggcccaacgctcaccaaaggttgcccgagtttctctacaga

SEQ ID NO: 469679 - DNA, 122 bp, Homo sapiens
tggggggtcttcacgttctcgtggcgcggcgcaggcgcactgggtcctcggcgcggaccgcgcagactgaataataaaaggggagcggcgaagaggcaggaagacaagaccatgtcgaaggg

SEQ ID NO: 469680 - DNA, 122 bp, Homo sapiens
tatttcaagtgcattgcactcgggcccaaatgatgcacacagccccctctccagtttgagcgagcagcatgccaagtgcttaaaagctgcaccggggatctcagagtggcttctgcccgtct

SEQ ID NO: 469681 - DNA, 122 bp, Homo sapiens
gggaggtgaggagcgtctctgcccggccgccccatctgagaggtgaggagcccctctgcccggcagccgccccgtctggaaagtgagaagccccctccgcccggcagccactccgtccggga

SEQ ID NO: 469682 - DNA, 122 bp, Homo sapiens
gggcagtctcacacactactgagttgtttcccagcagccgtcaatacagaccttccactgcgtaagcccactgcattgccatttaataaaacagcaagaaaatgagagagaaaaataatgag

SEQ ID NO: 469683 - DNA, 122 bp, Homo sapiens
gggtggcggcggccgggcggcgtggagctcgggcgcggcgcgggccccgggtcgctccgccgctctctcacagctcctggcgtcgccgctctccagcgccagcgtcagcggccagcccgcct

SEQ ID NO: 469684 - DNA, 122 bp, Homo sapiens
attcctgaattcattccattacaccatattgctgtgcgtgtgtgtgcacgtgtgtgcttgcgcccgcatgtatgttgaatgggagtgtgggcaggtcagctagaacatcagctgcaattcac

SEQ ID NO: 469685 - DNA, 122 bp, Homo sapiens
ctccgccggggaaaggagtgcggccagggcttggcgcccgcagctgggcagatcctcggccgctcctgaggcggggacgaagggcgcgacccgctgcggccacagcgggttacgggctgcgg

SEQ ID NO: 469686 - DNA, 122 bp, Homo sapiens
ttgatgtgcccatcctcagctaaaacccagagctggcatgttggtcatccccacctcagacgggacgcccagtccagagctggtgagccctgggccagcctttgggcctggcctgccccatt

SEQ ID NO: 469687 - DNA, 122 bp, Homo sapiens
accccgggggcgaggaattcaggaccctcggcggggcaagggcctatagggttccgaactcgcaggagggtcgctcctcccctactcgctttttcccggcaccggaaggccccgcccactgc

SEQ ID NO: 469688 - DNA, 122 bp, Homo sapiens
ctgtcatgttttcaatcagggacagctcttatttgaggtcttgccatgtgatatggacaacgataacatgaacaggtaccaatatttagaggtcctaggatgtctcaggtgctgttctgcgc

SEQ ID NO: 469689 - DNA, 122 bp, Homo sapiens
gccccagggaccttctctccagccaggccctgcccagcgaccccctgcagctccgacactcgctgtagcaccgccccaaccaagctccttcccaggtgaggatgggatgtgtggggctccgc

SEQ ID NO: 469690 - DNA, 122 bp, Homo sapiens
ctccaatccctggaaaaggcaatcgagcgccctccggaccgctgcgcacagccccggctccgacctggcgcccaaaacagagctagtcctagtccctcgcgcggccagtttggccgggtgtt

SEQ ID NO: 469691 - DNA, 122 bp, Homo sapiens
actccagccagcgattgctctttgagcaaagctttgcctagcccgctgaagtccccgctgcgcggagccctccgaaaaaggctaccaaggtgcacagaggctcacagagggatggtgaccac

SEQ ID NO: 469692 - DNA, 122 bp, Homo sapiens
acagaaacctcaccgttttaactgccgtaaagcgtgcagtgtggtggcgtctggcacattcgtagcactgtgcaaccatcgctgccatctggttccagaatctttcgttgccatccccaaaa

SEQ ID NO: 469693 - DNA, 122 bp, Homo sapiens
tttcctgagacttattttggggactctggaaaaatctgtgagtgtcttggtttctatacccgtgtgctattgtgtgagaacccagcctttccttcaattcagacccctcccctcacccctca

SEQ ID NO: 469694 - DNA, 122 bp, Homo sapiens
cttcatgtttaagtgtgtacatgtgcgttaaccttgatgatgcgtgaatcccgagggagccggtggcatacaccgttagcttaaccttagcttaaactagctgaaggctcctgtgccatgtc

SEQ ID NO: 469695 - DNA, 122 bp, Homo sapiens
ttatttctatgagtggttatgagaaccaagctattagatagcgggaaagcacacagtaagcgttcaaggaactgctattgttattaaaagcctcctttggaagaaggacattgaggcccaga

SEQ ID NO: 469696 - DNA, 122 bp, Homo sapiens
acttgaagaagggagaaacttctagagtggttcgaatggccttcagccggtcccgataggcgatctgggaatagaaagaggaccagatttttaagcgccgcgtggggaagggcagtgtcaga

SEQ ID NO: 469697 - DNA, 122 bp, Homo sapiens
ccgactcattgctattcttgggctcaggaaattgcttaaacgcgatctgattgccagcaacgtgcaggagaagtggggggtccgggtgtcagtttctttacgtgcagcgctcgccctcgcgc

SEQ ID NO: 469698 - DNA, 122 bp, Homo sapiens
ctgccaagccatgaagagcgaggtgttctgggaaagggcgtgagctgcattttccagctgcgctcactctgcagggagactgtgacgcccccgccgctgtgcccgcagacgtgcccggcctc

SEQ ID NO: 469699 - DNA, 122 bp, Homo sapiens
ttcaagcgattctcctgcctcagcctcctgagtagctggaactacaggcgcgcaccaccacgcccagctaatttttgtgtttttaggggagacgggtttcaccattttggccagggtggtct

SEQ ID NO: 469700 - DNA, 122 bp, Homo sapiens
gaagaagacacaagacagaagtcagcgtgggtgggagtggtcacagcacagtgctgattccgacttccagatctgggcagtagagaaacacatgtcagagcccagcactgtctccaccaccg

SEQ ID NO: 469701 - DNA, 122 bp, Homo sapiens
aagtcagggtgctggggtccagcccaaggcgggtgctcgttgatgccaggatgaggcatgcggtggccagggtggtggtgagggggccccatttctgcaaaacagagacttgcctcaggacc

SEQ ID NO: 469702 - DNA, 122 bp, Homo sapiens
ctgctgcctgctggactcaggggctgtgggagatgacacctgtggcaaaggctgtgcccacggaggagggatggtgaggaattcacagtagagtcattcatttatccctggactgaccgggg

SEQ ID NO: 469703 - DNA, 122 bp, Homo sapiens
cagggggacgtaatgtttccgagaagaaggacagaaagaagactgggagacaccggaactcgaaagaaaatcggtaacaaaatgtgggttcggccaacagtgccctgtaggcctgaaatttc

SEQ ID NO: 469704 - DNA, 122 bp, Homo sapiens
acctcgtgatccacccaccttggcctcccaaagtgctgggattacaggcgtgagccactgcgcccggccaaccctgagttatttctgttgctcaaataatacagatgaagaaactgaaattc

SEQ ID NO: 469705 - DNA, 122 bp, Homo sapiens
cgtgtttgtttccggaatttcaataaagctcgattcggctcgaagaagaccccgttcttccgggaaaatggcgactcccgctcgtgccccggagtcaccgccgtccgcggatccggcgctag

SEQ ID NO: 469706 - DNA, 122 bp, Homo sapiens
ttaacaagactttaatgccatcgagatgcctcacattggcacggttgcgtaagaatcgcacggtcccatgaaatgaaattgagagagctttttccggcgcctggttggttggggcggcctcc

SEQ ID NO: 469707 - DNA, 122 bp, Homo sapiens
ttcctgccagggcctttgccatctctcgggaaatcggaacctgcgctttgaaaacggggccgcggggccaaataggcgggttttcagtgtgtgttgggggtgggggagggcaactgaactac

SEQ ID NO: 469708 - DNA, 122 bp, Homo sapiens
agaccccgggcgtcaacaagagccccaacgagtagacagacgcgtgacagacgaggcacgcgcaggtttacaaggggctgccacgcctgtcaatccccgttagcgtctccaccacctgggtg

SEQ ID NO: 469709 - DNA, 122 bp, Homo sapiens
acatttaatagcaaagattaaattgccttaatgaacgatttttgtgactccatcaatactcgaatcgctttagccactcctctcacgcacttcagtcgcagaatctgcagcgagcacagagg

SEQ ID NO: 469710 - DNA, 122 bp, Homo sapiens
accacccatgctcctggacttccccttccgccggcacttgtgcgtcacttccgggaagagcgcatctcgccaaccagaattgaggagggtgtagccagtgctaagttcgcttgcggctgacc

SEQ ID NO: 469711 - DNA, 122 bp, Homo sapiens
ccggttttcccttccaagcgtcaatgtttcttgttcccaggcggcagctagagcagaaggcggatgagttttggacagaagaggcttccgttgaggggcgtggcgacgcagccgcggtctga

SEQ ID NO: 469712 - DNA, 122 bp, Homo sapiens
gagccggtccctggtcctccgcgcttgccccgcccccaccgccctccactggctcggctccgccccagcggcaacgccccgcccccaccccgcagctctgccccgcctcgcctctctgcggc

SEQ ID NO: 469713 - DNA, 122 bp, Homo sapiens
tttgtcagacccagcagcctcctgaagatgctgcataaacacatttaacctttaaagggtcgggtggcagccccagggagggaaagctcaacatcctcacccctggggtaagcccccctccc

SEQ ID NO: 469714 - DNA, 122 bp, Homo sapiens
gccccgcgcgcagcagtggccattcgcaaggctaccctggtgaaggtggcctttgacttccgtgcatttggaagtcctttgacttccgtgcattcgtctaaaataacgacaatcataataac

SEQ ID NO: 469715 - DNA, 122 bp, Homo sapiens
taaagagaagtatgctcctacacgttacagagctaataatggtaacaacaaaagcctatgcgtgcttctttaccatttatttctgaataagtaatatattcacatagttcaaaatgcaaaat

SEQ ID NO: 469716 - DNA, 122 bp, Homo sapiens
cgcgaggggctcctgggggggcagggcgccccttccagccccactgtgccccggccttgccgtcccctcccattgggcctgcacctaggctgccttgtgcccaaagccccgctgccaagcag

SEQ ID NO: 469717 - DNA, 122 bp, Homo sapiens
ttctggatgggctccatctctgaaagagaggggcaaaagggttggggaaggggtagctgccggtcttagtgaagggtccccgaggcactagcgtgtcctcacatttgtgctgcctgcttccc

SEQ ID NO: 469718 - DNA, 122 bp, Homo sapiens
attttgagagcccacacccctgacctgagtggggaggggttgagcctctgggccacagaccgcaggtgctgactcatggcctctgctgggcgatataaaggaaccagcccaggggcttccta

SEQ ID NO: 469719 - DNA, 122 bp, Homo sapiens
ccccaacatgccacaaaggccaggagcaccacgctgagcgtgcgcagcaaggccagcgagcgcggcttgcgacgcgcccgggtcgaggtggtccccgcagtcccgggccgtgccggcaggcg

SEQ ID NO: 469720 - DNA, 122 bp, Homo sapiens
gtgttctgctgatatttctattatgataaaagacttaagacaagtgactatatagaaatacgtatatacacacaagaatgaaagagataaacagtaagggaggtagggcaggaatttttctt

SEQ ID NO: 469721 - DNA, 122 bp, Homo sapiens
ggggtggagggttttggaggagaacacattcaaacagcaaacttgctccctgcccccaaccgtgtttcagtatttttcttggcaaggtcaatagaagcatggattgtttacagctgggatgg

SEQ ID NO: 469722 - DNA, 122 bp, Homo sapiens
atctacctgttactgcacatacctccaccaccactatcctaaaaactgatgttgaaaatacgcattattccagtagacagtcaacatggctcatactggatactcatcaatggaagttacat

SEQ ID NO: 469723 - DNA, 122 bp, Homo sapiens
aatgtaatttgtttccacattcttgtaagcctcattatgtatcccagggacagttaatatcgtcatacgaattcacaggtgaggaaatggaatcacagagagattatgtactttgcataagg

SEQ ID NO: 469724 - DNA, 122 bp, Homo sapiens
tagcatccctgctgttgggacaggtctggaatcagatgaaaggtggtgatggtcttgtcacggtctcagcctcattccacagttacagacttggccagatttctggggaagtcaacctaaaa

SEQ ID NO: 469725 - DNA, 122 bp, Homo sapiens
tggcggctgcgccccgggctgtggtttgtttctgggtcctgtccgcgccaggacaggcaccgaaacttgggggaaatgagttgagggaggcacttggggagttgacgcctcccggggtcgcg

SEQ ID NO: 469726 - DNA, 122 bp, Homo sapiens
agccaccgcccccggccccttggcctcttaagtaagcaacttcccagggatgccaaggcacgggagagaatcaggataaacaaggcagtatttaaaaaaattaaatcagtaagctattgccc

SEQ ID NO: 469727 - DNA, 122 bp, Homo sapiens
gtttctaatctacttagggatggcgtcaatacataggaagcagtgatggaattcaatggccgtgcattgctaatggcatcctagctggccaggagctcaggggtgcagggacctgtagttgg

SEQ ID NO: 469728 - DNA, 122 bp, Homo sapiens
cctggacgtgctacttggctatacggatgctcatggcgacctgctgcccctcaccaacgacgacagcctgcaccgggccctggccagcgggcccccgccactgcgcctactggtgcagaagc

SEQ ID NO: 469729 - DNA, 122 bp, Homo sapiens
gctggtccccagaagaagccagttgttggctgtgcctttggggcagcggagtctggagcccggatcatccatcagggctatcagccttgtttgggtttttcagtggaagctcattcacgtat

SEQ ID NO: 469730 - DNA, 122 bp, Homo sapiens
agggctccttccagaaggcaggcagggtgcacttagcccggggcagggacccccatgggccggcgggtcctcctagacccgcctcagtcctggaaaccccgaggggacgacagcggaagccg

SEQ ID NO: 469731 - DNA, 122 bp, Homo sapiens
agtctctcagagccggcttgagcttggaggcccctgttttgcaattccagacacttgcttcgttctcagataggtaaacattaaattctttaagaaagggaatgaattaagaagatggtatt

SEQ ID NO: 469732 - DNA, 122 bp, Homo sapiens
cccatgccgtgtcgagcctgagccccacgtttcataagggattagggtcactggagctcacgaggccgcacctgttcctggctgggtgcgcttgggcactttgcccgtctacgcctggaact

SEQ ID NO: 469733 - DNA, 122 bp, Homo sapiens
acagcttgaaaagcactttttactacatacacattttatgcttaaaaagttaacatgatacgaaactgtgattagaaaatatctggtctggatgtgattagtaaggatacaagataatgttc

SEQ ID NO: 469734 - DNA, 122 bp, Homo sapiens
cacctggttgtcgccagggttcccacatcctccggtcccctgtgcctgtcatagtccttccgcctcccgcttctggtccacttcgagcgccggctcctcgacgctcgcctgggtcaccaccc

SEQ ID NO: 469735 - DNA, 122 bp, Homo sapiens
cagcagccctgggggagggggtgtctccttgcccactcggaggtctttgcgacttggatccgcctggtggggctgcgtgccagcagccccttccccctcatgccacatcctgccctgagctg

SEQ ID NO: 469736 - DNA, 122 bp, Homo sapiens
ggttctggtcttgcctctgcctctaacctacatgcaagtgagttgtcctctcaggctgggcgtagtggctcacacctgtaatcccagcactttgggaggccaaggtgggaagatcacttgag

SEQ ID NO: 469737 - DNA, 122 bp, Homo sapiens
agcagggcgcggcttccctttcccggggcctggggccgcaatcaggtggagtcgagaggccggaggaggggcaggaggaaggggtgcggtcgcgatccggacccggagccagcgcggagcac

SEQ ID NO: 469738 - DNA, 122 bp, Homo sapiens
gactctgatgtgagtgctgggaacatcctccagctttttcatggcaagagccggatccagcgtcttaacatcctcaacgccaagttcgctttcaacctctaccgagtgctgaaagaccaggt

SEQ ID NO: 469739 - DNA, 122 bp, Homo sapiens
aaagagaacaaattgtcagaggaaacacgccctccccttcttaccttgcaagtaccaggccgaggaggctgtgaatggggggtttgggacagccgggctggagaagggatgcagagggagct

SEQ ID NO: 469740 - DNA, 122 bp, Homo sapiens
tctccttacaatcctcactgcaccgagaccttcgcacctcaccttccatcactgcccttccgccctcactgcccttggtgagcttgagttccatggtccatcagcataatggatgctcaaat

SEQ ID NO: 469741 - DNA, 122 bp, Homo sapiens
gtccccgggctgtgctgtccctggactccacgtatggggagcatgatccgcactgtagctcggaacagcagaaaggagaaccccagcaggaacacgcgttgcaggaaccccaccgccgaggc

SEQ ID NO: 469742 - DNA, 122 bp, Homo sapiens
acacatccagcttcagcatctcatctgctctgactccccagggacgtgtctgtgctcctgcgtgtgaccagggtgagtggcaacctgggataccagaggggtatgagcaaggcagagggatg

SEQ ID NO: 469743 - DNA, 122 bp, Homo sapiens
tatctgaggcacagctcttccctgacttataggctttgacactgctgttgaggtttgactcgaagcccagagttttggtgtggatgagcagggacaaattgctgagcatgaagaagagtaaa

SEQ ID NO: 469744 - DNA, 122 bp, Homo sapiens
caggtcgtacacgtagagcttcaccggatagagattcggcggctccattgggacccgtggcgacggcggccacgacggccctcgggcacccggcagcggcttggaccttcccgtacccgacg

SEQ ID NO: 469745 - DNA, 122 bp, Homo sapiens
ttgccgcgcgccggtgagtcaggccgggttttccctccgcctttggggcaggcgatcgagcgccgcggagcgcgtccctccctcgccaatccggctccggcgccggcgcccgcccgcgtttt

SEQ ID NO: 469746 - DNA, 122 bp, Homo sapiens
taaagggataggagcatccaagccgagatgaaaaatacaccaagccttctgctgaccttccgccgccaacagcaccttctctcctaaggatgctccctggccgccagactttctgtgcagtg

SEQ ID NO: 469747 - DNA, 122 bp, Homo sapiens
tggtggggtgggtctggcagtggcggtgccccgtgccaggggccagtgctgcttcatacccggcaaactgacctctggcctttgttttgcctgctgttccctgcgctgaccgggctgacctg

SEQ ID NO: 469748 - DNA, 122 bp, Homo sapiens
ggcagcccagcaaatctgtgggcagagagtggagaatcttggtggatgaggctgcggcggcggcaggagcatctagaaacgggagcgagctggactggaacccttccccttcctggccaccg

SEQ ID NO: 469749 - DNA, 122 bp, Homo sapiens
ttccccccaacgatgggatgccgggaggccgagtcccgccaggtttctttcagggtcctccggggtcactgccctcgccgcatgcacagcctccacctcacaatcctagcagcatgatggga

SEQ ID NO: 469750 - DNA, 122 bp, Homo sapiens
aaagctggttcaggaaccaggtctaacccctaaacccctcagcctcaattaaagacgattcgaccctcccccctatgttgaacacccatgggagattgttctctccgcacacggaataaaca

SEQ ID NO: 469751 - DNA, 122 bp, Homo sapiens
caatttttatgaataattttccccagtactgtgccagattttcagcattcattcaatggacggtagctatggcaaactcctattccctctaactcatgaacctacaagatatctccccctcc

SEQ ID NO: 469752 - DNA, 122 bp, Homo sapiens
tgcaagaacatccatgcttctagtccagataatgttttttaaagcagcttgatttggaagcgtgtgtaattctgaaatacgaacaagcagaacttttccagggggtcaaatgcatataggaa

SEQ ID NO: 469753 - DNA, 122 bp, Homo sapiens
cccagcaatgcaagaataaataatttccacttgtgcttcatcagctgagtgagtgacacacggggatgaggcggcagggagggtggcgagcggcgcggagggcacatccgtccctcccatgg

SEQ ID NO: 469754 - DNA, 122 bp, Homo sapiens
gatgattggtcgatgagcctagcgatccaagccaagaccccaccctcacaccgcccccttcggttttccaacatcccaggggctgctgattggcctgtacagaagagggctggttctccagc

SEQ ID NO: 469755 - DNA, 122 bp, Homo sapiens
cgggtgtgtgggtttctggctgctgagcttccctgtggatgccctccctcactgcaaggccggagtggaagagggaaagcaggtgatttcatgaaagagcgcctttctgcttcatgaggttt

SEQ ID NO: 469756 - DNA, 122 bp, Homo sapiens
tgcccgcccctccgcccctgccccctccctcccccgcccggggccttcccgggccttcggcggctgcaaagaaaaaaagagagagagaaaaggggggaaaaaaaagcagcagcggagggagc

SEQ ID NO: 469757 - DNA, 122 bp, Homo sapiens
ctcgttcaccagggggcaccgtctcctccctgctccaaagctgacaccccaggtggtcaccgtgaagcatgcagattctcagaggctgcatctcaccaagttcttccccgaagggtttgagg

SEQ ID NO: 469758 - DNA, 122 bp, Homo sapiens
cctggaaggtctaaggagcaggccgcaggctctgggaacggagcccagtgggctgggggccgctggggacctgccaacagctgtcagggggcctggccatcaggctgggaaggtgaggggag

SEQ ID NO: 469759 - DNA, 122 bp, Homo sapiens
gtgtgatcatggttcattgcagcgctgactgtgtatctcctccaactcttaaattattcacgtctcctatctgacttcgcttggcacaccaatatccttgagaagcaataatagttctgcca

SEQ ID NO: 469760 - DNA, 122 bp, Homo sapiens
agcctggtgggttcataagccggtgcatacccccaccctgcacgtgctctcccgggtcggcgcccagtctggtctgggacccgcatcctcgcgctgacgcctcctggtgtccccacggtgct

SEQ ID NO: 469761 - DNA, 122 bp, Homo sapiens
catcaagtgtccactcaagggtggggagcacagacaccctgcactctcagaagagtctcccggggcagaacatgcagccctgaggacgggcctgggcaggctgagaagggtgggcaggtgtg

SEQ ID NO: 469762 - DNA, 122 bp, Homo sapiens
gaactgaactaagagcggaattgaaatacaccaggggtttccctgcaggaattgttccaacgaggtatccacgggtttcaagatccgttgaaatgcttcaggtgtggtttgcattctcaccg

SEQ ID NO: 469763 - DNA, 122 bp, Homo sapiens
gtggaatggcgaggcagtgacaagacagcactgccataaatctcttactttctttccaaacgagctctaattttaagctcaacgaccaaagacggagaggcagtcgctttgagctactcctg

SEQ ID NO: 469764 - DNA, 122 bp, Homo sapiens
acccagcccaataaagcacgctactgggctacagccaagcaaggttatgttacatataagcgccacggtggctgaaaatctagttcctaagaaggcaacttaacagcaagcctgtctatcat

SEQ ID NO: 469765 - DNA, 122 bp, Homo sapiens
catggcctcatggagagccatggtccccaccagcgtttgccttgggcaggagcagttggtcgcactccgagaggccctgcttgttctttctgtagtacaaccagcccatcagtagttacttt

SEQ ID NO: 469766 - DNA, 122 bp, Homo sapiens
ccccgtcccgcctcccgctcgcctccgccgcggcgcgtcgggccggggcgcgccgagcggcgagaaattgtttccactgcaaacaaaaaaaggcgacacatgaccaggcaggaggaggggaa

SEQ ID NO: 469767 - DNA, 122 bp, Homo sapiens
aggacctctaagacaatttaaattccccctgtgtcaaatcctagaggctaccaagaataccgcgtgccggaggagacaagttaattctcaataacaaaaaatgattcaagaatgacctatga

SEQ ID NO: 469768 - DNA, 122 bp, Homo sapiens
cctggctctaccgcttactcgctttgcgaccctcataattgacaaaagccctctcggtctcggtttccttatctgtgaaatgggacaataacagtggctaccttataggattgtgtgatgat

SEQ ID NO: 469769 - DNA, 122 bp, Homo sapiens
gcctgtgtctgctcagcttgttgggggcgggggcgggcgggcgggcgggcgggcgccgggcgctgccggtcacgtgggctggctcgatcacgtgggcgcggcggtcacgtggcgcgccgctt

SEQ ID NO: 469770 - DNA, 122 bp, Homo sapiens
ctatatggacaagatttccttaccacggtttagttcaataacaccagtttcccagccacacggttcaagtaccagttaccatcgtaaattacctgtgagtaattgaataaagtacaagcttt

SEQ ID NO: 469771 - DNA, 122 bp, Homo sapiens
ggatgtgcggggcaaccagcaggccctgcgggcccagctgcaccagctgcagctccacgccgccgtgctacgccagggccatgaacctcaggtcagctcccacccaggcaggagactggggg

SEQ ID NO: 469772 - DNA, 122 bp, Homo sapiens
cagctgccctctggctctggctgtggctcccgcctgtccggcagggcccagggccagcgtcgggcacagggcagctcccactggtctcggcaacacacccagccgcctggtacttcctccag

SEQ ID NO: 469773 - DNA, 122 bp, Homo sapiens
ccagcgtctcttttctgtattcttacaactttgtggcaaccacctctactggccccacttcgaccttccttcctgatcaccacaaagtaagctgtgtccatacctgggatccagcctctcca

SEQ ID NO: 469774 - DNA, 122 bp, Homo sapiens
gatgtgcttgggaaagctccctccccctccttccccaagagaggaaataaaagccaccttcgccctagggccaagagttgggccccgtctgagcttttttcaactctgtttggtaactaaca

SEQ ID NO: 469775 - DNA, 122 bp, Homo sapiens
tcttcactggcctaaaatcaaagagtggttgcaaggaaaaatctgacattccaaccttttcgtttgtatttctgtggcagggaggcaagatgacttctctgccccaagcttggaacagctaa

SEQ ID NO: 469776 - DNA, 122 bp, Homo sapiens
cgcggtaaccaagattcctgctgagcttaggtcacagtgtgactgcaggaggaccagccgcgatgggagagtgcctcttaaccatcccagttatcaggtcccccgggggaggctggggacac

SEQ ID NO: 469777 - DNA, 122 bp, Homo sapiens
ccagagtgggggtgacgtgccagcccccacctcaccggaatgctgggaggagcgtctccacggaaggagctcactttgtcagctgtaatgtgctgtgactatcgtgtgagttcccgggtcac

SEQ ID NO: 469778 - DNA, 122 bp, Homo sapiens
gcggcagggcggggcttcggcgccgggggcggggccttcagcgggcgggcggggttttggcgccgcgaggtggcggcagcagagcggcgcagaagggagggggcggctggccgcgcggaagg

SEQ ID NO: 469779 - DNA, 122 bp, Homo sapiens
cggctctaaacccggggactgggcgaggttaagaggcagtaagttgggaggaaaaggtggcggctccggcaacccagccaatgcttccgccgctagaaacgtctgctccacttagaaacaag

SEQ ID NO: 469780 - DNA, 122 bp, Homo sapiens
accggcttggagcaagcaagactctccacccacaaactgcatattctttaaagtcactgtcgctttaggctcagatcttaagatttcgggagccagttttctgtggcgggggagtggtcgga

SEQ ID NO: 469781 - DNA, 122 bp, Homo sapiens
tagttgacgatgcaggccaaggactgctggtgggcttccctgctgggcaccaggcggtagcggctgatgaccgtcactgtgccattggggttccggatctcctggtactctgcctcaccttt

SEQ ID NO: 469782 - DNA, 122 bp, Homo sapiens
ttaaagccctcacaaacacaccaagaccaatcacagaaacaaccttgttggtgaggatggcgctatattggagtggattgcagatggccacatagctgtcataagccattgccacaaggact

SEQ ID NO: 469783 - DNA, 122 bp, Homo sapiens
ttctgaattcctcaaagaattgtcctcaaaattgtatgactgttgacaactgcagtgtagcgatcagcaaattctctctcaggtcatctttgagtgggttggctctgaggtccagtcaggtt

SEQ ID NO: 469784 - DNA, 122 bp, Homo sapiens
ttgggatcttacctatgcccacagcttcaatcaccacccatacaaacaatacaaacctgacgcccagactgacatctccagcttccacctctgttctgagctccagacctatgaagccacct

SEQ ID NO: 469785 - DNA, 122 bp, Homo sapiens
caaccaaatggaagatcaagcaaagatgtattggccaaataatcgactccatttgtctggcgtgcctcagccacttgcttcacatgactatttctatgaggctaatacctcgttacaataac

SEQ ID NO: 469786 - DNA, 122 bp, Homo sapiens
tccggctttgcagacagcctgagctggctcacttgggtgaaggggaccccgggaggaagtcgggtggacgcgagctgtccccagcgccggctgccctgccgcgtccgctcgcagcagctgcg

SEQ ID NO: 469787 - DNA, 122 bp, Homo sapiens
tactgggccacagtcatgaattcatcccctactgccggtggctgacttggcctttcctggcgtgagtctgggcaccagcctggccccattgtgttcactgaggtggagacagcagctgcccc

SEQ ID NO: 469788 - DNA, 122 bp, Homo sapiens
atcacgcaactgcttatccatgtagtttctgggcacagagcagcccagtccctccccagacgaagggccactcctttcccagcccacctgccgggggctgagctagggtcccttgcgtcctc

SEQ ID NO: 469789 - DNA, 122 bp, Homo sapiens
ggacagggggcagagctacagggacatggcactttcactccaactcaacctctgtcaccccgatgagctctccccatgctcgggaatcttggggtccaaggcctctctcttctccatctcct

SEQ ID NO: 469790 - DNA, 122 bp, Homo sapiens
gcgcggttccgccctcggcttcgactttagctgcctccagagggaacaggcctggtgtagcgaaacctggtatgtgagaaatgtgtctgtcctgctttattaaaacaacacaaaccccacat

SEQ ID NO: 469791 - DNA, 122 bp, Homo sapiens
gacctcaggcatccacccgcctcgacttcccaaagtgctgggattacaggtatgagccaccgcatctggcctaaatgtacatattatttaaaggactgtacagataagtacagggccaggtg

SEQ ID NO: 469792 - DNA, 122 bp, Homo sapiens
atggagatggcaggggacgaggcctaagagatgtagacagcaggtcctgtctgcttaggtcgcaaaggggaagaaggggcgggactcggggtcctggactggggctgggaagggtccgctcc

SEQ ID NO: 469793 - DNA, 122 bp, Homo sapiens
accgtccggcggcatcaacaccttgttgttctgtgtgcaccaccccacggggtgcaaatccgcgatgactacgtcacaccagaagtcggccctgcggtcctccccgtaaccgcagtagcgca

SEQ ID NO: 469794 - DNA, 122 bp, Homo sapiens
tgagcccggaactcccggccctgcactctgatagatacatcgcagagctggccctgcagacgctgctgattgagggactccaagagggcactggtcacctcagggaaggacacatgtaccac

SEQ ID NO: 469795 - DNA, 122 bp, Homo sapiens
aaacaaaaccgggcgagtgtgtgcgtctctgtgtgtgttcctgggaacaacagaacggggcgtgtgtgtgtgtgttcactcctggggggggctgcgtgtgtgtgtacgcgcgtgtgttcatt

SEQ ID NO: 469796 - DNA, 122 bp, Homo sapiens
ccgtcggtaaacggatgaagagacggcgtggcgtgcacacccatggaaagggcgttcggccgggaagaggcgtgcagccccaccacgcaccggaaggcctggaaaacagtgcagggcagaca

SEQ ID NO: 469797 - DNA, 122 bp, Homo sapiens
aagaggtggaaccaatttcccactgaagaagtgtgcctgggagcctgagctcgtaaccaccgcttgtgacgatgacaatgcctggcagtcgtcatcctgtctggcccatggatgaaatttaa

SEQ ID NO: 469798 - DNA, 122 bp, Homo sapiens
tgcacagctcagctgtggagccagcagctccgactcatatttccaaatcccaacctccctcgcacatctggttccggagttgcaccggcacagactcctctggttacggctgttgcagcctc

SEQ ID NO: 469799 - DNA, 122 bp, Homo sapiens
ctttcgtgcagcatcaatctactgcggcactaccggctgcggcgggggacagacattgtacgggggtgagggaagggcctcagctggaaatgccctgatttagaaccgggcccgggacgggc

SEQ ID NO: 469800 - DNA, 122 bp, Homo sapiens
tttcttttgtttgccaggccaagattgtccacgtctccctggatggcctgtgcgtctccccgccagagggctttctcatccggaaggggccaggcaactgccactttgattttgctcaagaa

SEQ ID NO: 469801 - DNA, 122 bp, Homo sapiens
gctctgcgattcaaatgattattttaaaaaggatgaaccagatgcccgtccatgggtcgacgatgaaacaagctgtggtccgtccaaaccatgggatgcgactcagccatcaaaagcaagga

SEQ ID NO: 469802 - DNA, 122 bp, Homo sapiens
gtctgttttctctcccaggccccccatgaggtccttaaaagcaaagatatttaaaaagaacgaaagaaagaaaaaaaccaaaaagcaaatccttggaaatgccttaaaggactctccagaga

SEQ ID NO: 469803 - DNA, 122 bp, Homo sapiens
ccattgcatttctaattccaggcacagaaagatccgaagaaggaccgtcctcttgcacgccgcaagtccgagctgcctcaggacccccacaccaagaaagccttggaagctcactgcagggc

SEQ ID NO: 469804 - DNA, 122 bp, Homo sapiens
gcttttaaaaccatcagatctcaggacttactcactaccatgagaacgctatgggcaaaccgcccccacgattcaattatctcccactgggtccctcccacaacacatgggaattatgggag

SEQ ID NO: 469805 - DNA, 122 bp, Homo sapiens
ggtgtggggcgggccaggagcgaagagaggccttcctccctttgtgctccccccgccccccggccctataaataggcccagcccaggctgtggctcagctctcagagggaattgagcacccg

SEQ ID NO: 469806 - DNA, 122 bp, Homo sapiens
cttgccaagactccacctaaaactttaaaaatgcctctacttgctgggcacagtggctcacgcctgtaatcccagcattctgggaggccaaggcaggtagatcgcttgatctcaggagtctg

SEQ ID NO: 469807 - DNA, 122 bp, Homo sapiens
cgcgcggcctgagagctctcgggaaactcgaaaagcagccacagctggcgggcgaaggcgcggcggggcagggggcgctcgggcggcaccgggcagccctcgtcctcgcgcaggcgtgccag

SEQ ID NO: 469808 - DNA, 122 bp, Homo sapiens
aaccgcctcgacccgcagggaccacaggctcaccatgctgctgcgtgaatccctggccaccgctggctgccgcaccaccatgatcgcccacgtgtcggatgcgccagcccagcacgcagaga

SEQ ID NO: 469809 - DNA, 122 bp, Homo sapiens
cccaggccctctcccacctacagagaccctcccctgccccctccactccggggcctgtgccgccagaaccgggctctgcccccatacgctgccctcgcagcctggcggcctccgctgtggct

SEQ ID NO: 469810 - DNA, 122 bp, Homo sapiens
gaggtggtgaagacgcggctgcagctgcagggggagctgcaggcccggggcacctacccacggccctaccatggcttcatagcctctgtcgctgctgtggcccgagcagacgggctgtgggg

SEQ ID NO: 469811 - DNA, 122 bp, Homo sapiens
acggaagtgcgtcgcgtaaggaaggcgtctccccccgctcctgggaggccgaccgcctggcggttcaccccaaagaaaacccttcagagcaaccctgggaaagaggtgctgccgacgattat

SEQ ID NO: 469812 - DNA, 122 bp, Homo sapiens
cattatccctagaggtcatggaccttacatcctcactgcagtcacctttggaaacaagaccgaggcctgtagaaggaaagcggaaggatgtaagagctgttcatgggaattccattcaccac

SEQ ID NO: 469813 - DNA, 122 bp, Homo sapiens
ggctccggaatgataatggccggcgggtgctttgtatgcgcgaccagcaggcctctgtgccgggcactgtggcgctgccgttggggccggcagacctgcggtcctgcctctccaagcagggc

SEQ ID NO: 469814 - DNA, 122 bp, Homo sapiens
aagagaggaagtgccctgagatgaggctctgtgaggaactgaatggctgcaacctcatgccggccccagacgggaccacgaaccaccgccagccacaccaggcaatgtgcaacggggtcctc

SEQ ID NO: 469815 - DNA, 122 bp, Homo sapiens
gttggtctttcgcaattggctcgggctgcagtgcttgctagctcagagatctgggagggacgaagtccagaccggagcaaagcttcctagttctgctttgcgcagcccccacgcggtgtgtg

SEQ ID NO: 469816 - DNA, 122 bp, Homo sapiens
ttcgccgcttctctgccctcacctccacctccgcctctggcctctgctcacatgcacagccgcaaactcagctccaccagcgccctcgctccacaggaagggagagggagggcattcgccct

SEQ ID NO: 469817 - DNA, 122 bp, Homo sapiens
attccaacggcggtagtactgatgctccagttcgaaggccaggaaaacagaatgtaaagccggtgacttccaagatatatgtaaccaccaaagtacatgcttaatgacctagtgaagtgagc

SEQ ID NO: 469818 - DNA, 122 bp, Homo sapiens
ggcgctggaggcaggtggcggtaagttgagtgctctgatccagggtttcgctcagagcggcggcgaaggagaaattcccctccccaaccaacaggaggcgccgaggggccatggcctccacg

SEQ ID NO: 469819 - DNA, 122 bp, Homo sapiens
accatagtgcaccacacccttgaactccagggatcaagccatcctcttgcctcagcctcccgagtagctgggaacacaggctcataccactgagtctggctaccaataatttttattttaac

SEQ ID NO: 469820 - DNA, 122 bp, Homo sapiens
cgacgcggaggcagggagccgagccagggagcggagccgagcgagcggctgggccaagggcggggcggcgcggacggcggcggcgcggacccgcctcccctcctgcgcgcccggcccggcgc

SEQ ID NO: 469821 - DNA, 122 bp, Homo sapiens
ctgaccctgggatgccagggaacaagcacacagacgacttatagcagtctccctggcagacgcagctggcccctctcctgcatttttcaaatggtgcctgtgattagaagagggaggcactc

SEQ ID NO: 469822 - DNA, 122 bp, Homo sapiens
tagcttttcttgcagcagggtctctacaggagcccagtccaggctttctgagcatgctttcgaaggctcaggctgtctcccagggccatcacatacagtgctacaggttgtgaactgcatga

SEQ ID NO: 469823 - DNA, 122 bp, Homo sapiens
cccgagcgctggattccagcgagtgccacccacgtgtaaacatcctttagaggggagaagcggctcacttgcttatctcgagggttcatccgagccccgcctctggattcttttaggtttag

SEQ ID NO: 469824 - DNA, 122 bp, Homo sapiens
gtgttacggctattgagagaaacagtggcaatacacagccaaagccctgagtttctaatacggcgccacctcttatgagctgtgagatcttgggcaaagtaactaacctttaagtatttgtc

SEQ ID NO: 469825 - DNA, 122 bp, Homo sapiens
aaaaagcaaaaacttgaactagtgcagataagcagcctgctgccctcatacttcagcaaacgtcccattcaggaggctaaacatatgcccaaacttggcagccactcttaactgttgaaatg

SEQ ID NO: 469826 - DNA, 122 bp, Homo sapiens
ttttgtcttctgtttcctaattctgccaagttattctttttttaaaaaaggcacagcacacgtggcaatctaaaatccagagtttttcttggcatcactgattatgcttttggatgaatgaa

SEQ ID NO: 469827 - DNA, 122 bp, Homo sapiens
ctcgtcctaaaggcagaggcagggaagacagcgctgaagaggcgtcccaaagagattggacgtctgaacagtcactgcctgccccaacctctttcaggaaggttccaggtctgtgccacact

SEQ ID NO: 469828 - DNA, 122 bp, Homo sapiens
gccacgtaccttcatacctggggtccgtgcggagcaccccggggttcacgaggtactggacgaggacatacagcaggatggcgatcaggcagagcatgccagctgtggccgaggccacagtg

SEQ ID NO: 469829 - DNA, 122 bp, Homo sapiens
gaacgcaagagcgtcgagggcttttgtcctctgacaagtgcacactcccccaggcacccacgtggaatttcaaacccagtcacttcttccggaagacccataaatcgctccttattgttgtg

SEQ ID NO: 469830 - DNA, 122 bp, Homo sapiens
cagacggggtggcggccgggcagaggatgcaatctcggcactctgggaggccaagtcaggcggctgggaggtggaggttgtagcgagccgagatcacgccactgcactccagcctgggcaac

SEQ ID NO: 469831 - DNA, 122 bp, Homo sapiens
taggaagctactgtgagcacggggattctcagcaggtgcgtctacaaggatcgtgatccccgcctgagaacacagtgcccctggggcagcctcagagccgggagcagggagcagggagggag

SEQ ID NO: 469832 - DNA, 122 bp, Homo sapiens
atgtgtgtgagtgtgagtgtgcatacacgtggggggaagggggacccggggacccgcatccggtctcgtttgccaaggcaaagccccgcctcgcattcctctgagaaggaatcttcagcgtc

SEQ ID NO: 469833 - DNA, 122 bp, Homo sapiens
cgacgacaagagtgatgattcggatgttcccgaagacaagagtgatgattcggatgttcccgatgacaatagtgatgatttggaagttcctgtgccagcagaagatttgtgtaatgaaggcc

SEQ ID NO: 469834 - DNA, 122 bp, Homo sapiens
cgcgggacgggggctgcgcatgcgccttcatttcgtcagcccgctgttgcgtgctgccagcgggaactgtgtaggggtagattttcgctgcagtgttccccgagcctgttagacgcagcgcg

SEQ ID NO: 469835 - DNA, 122 bp, Homo sapiens
ctggcaactcctgtggaaatctggagagcaaccctggggtcgcagctctgcctgcagctgcgcctgctccatgcagtgaaggggtgactggagggcccacggcaggcagctgtcaccccacc

SEQ ID NO: 469836 - DNA, 122 bp, Homo sapiens
taaccgaaacgcggaacggcttgcttattagacacctcgaacgacagggcagggaggaaacgggatactcgctgcccttcccagtcgcgcgtgagtcaaaaggtcctggcaggagatgatgt

SEQ ID NO: 469837 - DNA, 122 bp, Homo sapiens
cgccaccatcatcagaccttcgtagatagacacccagagaccttggtctgagtgagctggcggcatggagcgactgagcatgtgcagctcccacatcgctatataaagatggggatgaactc

SEQ ID NO: 469838 - DNA, 122 bp, Homo sapiens
atctcacctccagatcctccccaaagttagcaggacaggcagaagaagtcgtttttgccccgggcgtaactcaggatctgatatactgtgggtgtttgatattttctgaagtgcctccacaa

SEQ ID NO: 469839 - DNA, 122 bp, Homo sapiens
ttttagggggaggggaaggcctgtgttagtcttttgtttttgaaacagggtttgctgtcacgtaggctagaatgcagtggtgctgtcatggctcactgcagcctcaatctcccgagctcgta

SEQ ID NO: 469840 - DNA, 122 bp, Homo sapiens
tccccagggtctggcgtggtgcatcaggggcctggtgggggcttaccgaggatgacgggccgtgtgtggttactgagctcagccttgggcgtggtgtgcggggggaagagcacattgaggag

SEQ ID NO: 469841 - DNA, 122 bp, Homo sapiens
aaacgaaccccgccgcctattggccggtgcgcccgccgctcgtgccgcacctcgacgtcccgcccccagctgccttttcggcacccacacccggatgcagcctcaccactggctgaacactc

SEQ ID NO: 469842 - DNA, 122 bp, Homo sapiens
aggaagaagggccctgctggtcacacaggacccagtctgcggtgggggttttcccgccaccgccccgccctccctggggcccccacctcaccctctcctggcacccttcaccgtcaacctgt

SEQ ID NO: 469843 - DNA, 122 bp, Homo sapiens
agggaaagaataattaacatttatataaataggaatgccaagagaggccagaatgcatctcgtggcttccagtttcagagtaatggaagggcaaaggagaggggataaacacccttgttggt

SEQ ID NO: 469844 - DNA, 122 bp, Homo sapiens
cccagcccccagccgccgccgctcccgcagccccggtcccgcgcctccccgcagccccggcgcccgcctacccgccaggcaggcggtggtgtcgatccacttgagcagctgccccgcgctca

SEQ ID NO: 469845 - DNA, 122 bp, Homo sapiens
agccccagggagaaagccccggagcaggcgcccttctcagggattgtaggcttagtcacacggcgggggcgccctcggaggcaccggacctcagctctctggacttcccgggaacctggctc

SEQ ID NO: 469846 - DNA, 122 bp, Homo sapiens
ttcagaaatgaaatactatagccccctagcgagtattctcccagttctgtctctggcaaccgaagaatagactttggagtaagtggctggtcagccagcttcaccgccaggtgccagtctga

SEQ ID NO: 469847 - DNA, 122 bp, Homo sapiens
gaacccgcggagcggcggggggctccaggctggtgggagaccgtgtgcggccggagcctccgcagatgccgcccctaccagcccggctcccgcctccccgccccctgcccgagtccccggac

SEQ ID NO: 469848 - DNA, 122 bp, Homo sapiens
ggggcaacgtagttctctctggcggtcgcagggggcactgaggagcgtcccctaaatcaccggcgccgcgaaggctcatgggcgtagtagttctcaggtcggcgggctgtggaggtgatcag

SEQ ID NO: 469849 - DNA, 122 bp, Homo sapiens
cctcaccctgcaggagccccggccgtaagcatcagtgaccccctcaccctgcaggagccccggccccatgcccacgccagcccatggaggtagccctggcgtcctcagagccccccggccct

SEQ ID NO: 469850 - DNA, 122 bp, Homo sapiens
tattccaaggatgtgcattccagacagagagaatagtaagcgcaaaggttctgaggctgacgctggtttgacatgtttgagaaacatccaggaggacactctggcttgagcaaagtgataga

SEQ ID NO: 469851 - DNA, 122 bp, Homo sapiens
ttggagacggtcctgggcctcctccatgcccagggtcaggctgtgcaactgtcaggttagcggcggcatgtggtgtctgggcctgtctacttcgttgtccgtgagctgctggtggccctagc

SEQ ID NO: 469852 - DNA, 122 bp, Homo sapiens
tacccctccctctcttccctctgcaagtcaaaaagcaagccacagtgctaaacaggaagacggtcacaggacagtgtttatggtaaaaccaaagtatctcagagattggatattttgcaata

SEQ ID NO: 469853 - DNA, 122 bp, Homo sapiens
tctggagtttgttctttctgatgttccgacgtgttcagagtttcttccttctggtgggttcgtggtctcgctggctcaggagtgaagctgcagaccttcgcggtgagtgttacagcccttaa

SEQ ID NO: 469854 - DNA, 122 bp, Homo sapiens
tgcggtactacgaagcctgattagacacaacgcggtactacgaagcctgattagacacaacgcggtactacgaagcctgcttagacacaatgcggtactacgaagcctgattagatacaatg

SEQ ID NO: 469855 - DNA, 122 bp, Homo sapiens
ggtgccctgggggtcctacttggggagccaaagctgagggcgttgggcgtgctgaggctgcgaccgccgacccgggcagtgaaggggacgtcgtcctctcgcggacggggctcctcctcgct

SEQ ID NO: 469856 - DNA, 122 bp, Homo sapiens
gtgctctaactgtgggaacatagaggcctgacacagcaggggagaggacacattgcacagcgcctttatcatagggtcagctggtccctgtgttgggaggtcagtgagagaagttgggtgct

SEQ ID NO: 469857 - DNA, 122 bp, Homo sapiens
tccgccggcctccctttcctctcccaggcaccctagccgggaatctggggtctgggtccacgcagaattaagaggagaacctgagaaagggcgggggccgggggttcagacccagcctcagc

SEQ ID NO: 469858 - DNA, 122 bp, Homo sapiens
atgtctcagacccaactgcagagtgacctcctttctcactcggacctagaaggcctgcatcgtacacagcgttcccctccaccacagggaggttctgcggtggctatgcctgcacctcccct

SEQ ID NO: 469859 - DNA, 122 bp, Homo sapiens
catgaactaagactatccgtagctcttggattagtcatgccattgaagaggaggagaagacgccactgggctgtgcctggcagggagtctggagtttctggtttccaagctcaggaaggcgt

SEQ ID NO: 469860 - DNA, 122 bp, Homo sapiens
ctgtcattaaaccaatcttgacccgggctctgaaggcctttgacaatctacagtcacaaacgtggcttagaagtccaaagttgagtacaggtgacatagccactgaatcctgttctgaaaac

SEQ ID NO: 469861 - DNA, 122 bp, Homo sapiens
gctagtgaggtgtgaagaataccagcaaaggatgttatcctgtaagtcaaataaagaaaacgcatccaggaggagggcatgatcaaatgggtcaagtgatctgagtcttctataatctttag

SEQ ID NO: 469862 - DNA, 122 bp, Homo sapiens
acgtggggtgcgaggacaggggatggctgggacgctgggctcacctcttcacctgtctgccggtagggccacaggctgcgacctttccgtgaaaggagagtaagggctggggcggaagcctg

SEQ ID NO: 469863 - DNA, 122 bp, Homo sapiens
acaggcgcagcggccgcagcagcagcggcagtcacaggcacatcagcaaagaggtacagtcgaggcatgggcttgggttgcatcctttgccgggaccgagattcctcacttcttccactctt

SEQ ID NO: 469864 - DNA, 122 bp, Homo sapiens
aaaagtcccacatggctacagcctagagttcaagggggtggaagaggctggaacagtgtgcgggacccagctcgtggaggacttagtgaaccaaggtaaggctcagcttttgttttattctg

SEQ ID NO: 469865 - DNA, 122 bp, Homo sapiens
cagtttttgcaattaaccaagagaaactctcggaggctcccgtgagcacccttaggtggccgggaacgcattccccatccctctttcccaggccaacacccgcacatcttgcaggtctccgt

SEQ ID NO: 469866 - DNA, 122 bp, Homo sapiens
ctgtgaacactgttgtggggctgctccctgtgtgtggctctgcctcagaacccacagagtcggctggctcccagacctactctgtctctggttacaagtcagtgtcttatttactggaagtt

SEQ ID NO: 469867 - DNA, 122 bp, Homo sapiens
agagtttgttaaagatacttcggcaggcagaagggtagggaatggggaatgctgattggtcgggttaaggatgaaatcatatggggttgaagctggtttttcttgctgtcttctgttcctgg

SEQ ID NO: 469868 - DNA, 122 bp, Homo sapiens
atggcttttccctgtttttggacataaaatgccatgggacagcttttttctttttcgtggcggcaggatcaagagtatagagtctggatttggagatctttgacgtgtgctttgcttcacct

SEQ ID NO: 469869 - DNA, 122 bp, Homo sapiens
gccagaaccgcagcgtctgggggaagccagagagtcggtaatcgcttcggggatgtaaggcgacagacataggacccccgagctcgcatcagcacccttcggctgcctcccggggtgggggc

SEQ ID NO: 469870 - DNA, 122 bp, Homo sapiens
gcgctgaaggggggcacacaccgaggcgcagcccgcacccccagtaggctgagagggcgccggggacccgcactgagagtcaaggcagccccgcttccctacccatagcgccccccgggaga

SEQ ID NO: 469871 - DNA, 122 bp, Homo sapiens
cagtaggagctgaaacaagaaggcagcgtgctgtcgtgtgtgccctcagctgggaaggtgcgcatccagtgactcccgcatttcaccactctgtgcgtgtccacgaaagccccacggagact

SEQ ID NO: 469872 - DNA, 122 bp, Homo sapiens
gcgggcagagggttaaaagaggaccacatcacagaccagacgccgaccgaggagtgagggcgggccagccccgcactggctgccgctccaacggaggtcaggacagggagcccccctcaact

SEQ ID NO: 469873 - DNA, 122 bp, Homo sapiens
cccacccccactttagttgcgtgttccagcctctccgccccgcccctccccgccctgaaacggacgtgctttttagaggagtccactgggcttggagtcagtggcaataaccaggggcaata

SEQ ID NO: 469874 - DNA, 122 bp, Homo sapiens
aatctgtgtctggctttacacaaggtaaagtaaacttctcatatctttaggacatggggtcgtttcataactttgagccaggcttgagctaaagttagagtcttatcctccctggaaactgg

SEQ ID NO: 469875 - DNA, 122 bp, Homo sapiens
aagccttcctgccgcattggggtggcccctatgggccgaggcgcttgggtcccatgcatgcgcggtagataggcacttttgcccttggtgggggacttctctcttgccatttgtgttatcct

SEQ ID NO: 469876 - DNA, 122 bp, Homo sapiens
caggttagaatgttcacatgaggcccacgcataagacagagtaagaattactccaccaaccgctcagacagacccaggacaccttttgtgagcatgttacctctaccgaaggctccctaaga

SEQ ID NO: 469877 - DNA, 122 bp, Homo sapiens
gcggccgcagcgggagcccgggagcgcagggcgggcctggaagagctccgccccaaggggcgcggccaccccggaggcgggcgcacggctgcttctcattcattgtcttgacaagagcatct

SEQ ID NO: 469878 - DNA, 122 bp, Homo sapiens
ctgaaggcggcgtcgacggggagctgcgcgtggctcccagtttcctggttacgtgcgcgccggcagagccaaaacctgcagccgaaactcccgcttctccgtaaggattaaagggcgggcgc

SEQ ID NO: 469879 - DNA, 122 bp, Homo sapiens
tgccgtcacagaccccgcctcccgtgcctgagccccatttctctgggggccgggctgcctcgcgtggcccccgcctgactaaagccatgcagcttctcggccggctccatccgctggctgcc

SEQ ID NO: 469880 - DNA, 122 bp, Homo sapiens
gaccagcttgaagtgagtttattcttgtctgtataatcaccaatgttatttccaaatgtccgtgaaattatctataatcctatctccttgcttgctttggtaggagtatagctaacaatata

SEQ ID NO: 469881 - DNA, 122 bp, Homo sapiens
tgcccccgagaggggctgctctgctcctctgccccttccccaaggagccagaggcagctgcgagagggggagtctttataaagactctcgttctaactgccctgagcccagaaaccacggcc

SEQ ID NO: 469882 - DNA, 122 bp, Homo sapiens
gcacctcgggggttaagcgctggtggctgcacacactcatgctcccggctggggcgcctgcggcaccctgggggttaagtgctggtggccggacacattcacactccatgcccacgtggttt

SEQ ID NO: 469883 - DNA, 122 bp, Homo sapiens
ggattgcttgaggccagcagttcgagaccagcctgatcaatatagcaagaccaggacaggcgcggtggctcacgcctgtaatcccagcactttgggaggccaaggcaggtggatcacgaggt

SEQ ID NO: 469884 - DNA, 122 bp, Homo sapiens
gcgcagcgccccgggaccccgagaggccgccgcggcacatccagacctccgccgctcccgcgccctctcaaccatcctgggattcccgggcccacccgacccagcggcgcgaccctggccct

SEQ ID NO: 469885 - DNA, 122 bp, Homo sapiens
tcaataggtcaccctccggcaccacgtcaaccaatgagatgactaccgaagtgttaaatacggaggcacgtggagaaagcccttcctcgcttcaggctcaggaatgccttagagagattatc

SEQ ID NO: 469886 - DNA, 122 bp, Homo sapiens
tcgaagttgcatgtgtcggtggcaccttcgaaatccggtgtaaaggggggcacgctgtcccggagaccatcccagtcgaggccaaagaagaagggatgtgtccggaagtcgcctgctccacc

SEQ ID NO: 469887 - DNA, 122 bp, Homo sapiens
cagcctcctcggggcaccaggcagcctgcggagagaacaaggggagataagcttgaagaccgtggaccagcacaactgcacctcgggcagagccagccatctggaagggtctacgccccacc

SEQ ID NO: 469888 - DNA, 122 bp, Homo sapiens
accagagggccaatgggggcggaagatttgattgaagcatagggtattaacaagagaaaacgatcaatggtttgaatcagatttaagttcacataggatgggcctagatgaggggtccaggc

SEQ ID NO: 469889 - DNA, 122 bp, Homo sapiens
tgctctgccctggtacctgggaccagggccatgcaccattgctttagagaacacctgctccgacccaggtcctgcaccagggatttcccaccagctgaatcagacacagttgctgtcctcag

SEQ ID NO: 469890 - DNA, 122 bp, Homo sapiens
tgccccatccccttgccggcttcattctccgtccctgggtcgagctgtggcaagatttctcgatgagggcagagggcgagaggcgtgagaaccatctacttaaaggtctgcgggcaccctcc

SEQ ID NO: 469891 - DNA, 122 bp, Homo sapiens
gacatcgagtccacctgctctggggacccggatgactgctataggttttgttcactgtggcgtccccagaacctgcacggcgccgggcactgagcgggcgctcacatgtgcgtccaatgaac

SEQ ID NO: 469892 - DNA, 122 bp, Homo sapiens
aacgcctgcgcaaacgcgcgcgggaggcgggcctggccaacttctgaacaggaagcagttcgctcgcgcctaggttggcgcgggctgggaggtgttccagccctttaagatgttgcgcgtgg

SEQ ID NO: 469893 - DNA, 122 bp, Homo sapiens
cgctgcggcccgccgtcagactggctccctgcatgacctgtggagtgactgtacctctcccggcgtcggagacggggaacgctccacggccctcgtgggtgttacagggacgcgacagtgcg

SEQ ID NO: 469894 - DNA, 122 bp, Homo sapiens
tccgtggcgcaggctccgctgtacagagacatagcctgaggccgggaagctgcggatgagcgagcaggatgcaggccacgtgcactgacactcagcagacgcccagcaccctctccaggcca

SEQ ID NO: 469895 - DNA, 122 bp, Homo sapiens
tacaatttggactgtttttcctctacaccgctgatatgcaaagtgtagtccctgaaccagcggcctcagcatcctgagggaatttgttaaaacgccaaatctcaggccttacccagacttac

SEQ ID NO: 469896 - DNA, 122 bp, Homo sapiens
attgcgaattaatgaaattaacctaatcttttccattcggcagccgggccgcgggccggccgagctgggcgggcggcctaattgccttggttaatctcattaattcctttgtgccgccgcag

SEQ ID NO: 469897 - DNA, 122 bp, Homo sapiens
aaaagcccactcgcactccctcccccgactttcgcagccccgcacatctgacgtcaaagccgtcccgtagaattttccccggcagttccgacagtctcaggttctttcagcttcatcttctt

SEQ ID NO: 469898 - DNA, 122 bp, Homo sapiens
aggcgccttcctgatcactcacggacgtgcgcacagtgggaaaagttcgagtggcccaggcgcatgtgcccagccaaggcggaacagaggcctcctcccgcatcatggggctcctgtccttg

SEQ ID NO: 469899 - DNA, 122 bp, Homo sapiens
cttttcccccgacccctgtttatctcttcgccttccagaagttcttttccatcaggccgtcgcaccttgcgtgggaaggagcaccccacttggaagcaggaggcggggttcagatcttggcc

SEQ ID NO: 469900 - DNA, 122 bp, Homo sapiens
attccttaccccgcattgagggaggtgacggggcctggcttttgacactcagtgtttttccgttccaaattgcacccgctggaaaatgtgctcttccagaggaaaaacgattgatttattct

SEQ ID NO: 469901 - DNA, 122 bp, Homo sapiens
ccccgcgagccccacgcgtctgtgacgccgctgatgcgcagacgccgcggctgcaggccccgcccctccgtgcccctcgcaaggccctctgggagttgtagttccagctcctcctcgggccg

SEQ ID NO: 469902 - DNA, 122 bp, Homo sapiens
caggaggcccgctaggcggctgcaggcgctgtgatggccacctgggggcggccacgtgagcgccacgccgtgcgcccgccaggccagccccgcccctgcccgcccgcttctgctcaacctag

SEQ ID NO: 469903 - DNA, 122 bp, Homo sapiens
cttttcttttattcttgtctgttctgcctcactcccgagctctactgactcccaacagagcgcccaagaagaaaatggccataagtggagtccctgtgctaggatttttcatcatagctgtg

SEQ ID NO: 469904 - DNA, 122 bp, Homo sapiens
agggaggcagggagggagagagggaaggaagagaaggggagagaaagggggagcaaagaccgaaagagacccagagagatacagcttgagaggagaaataattaaagggggagggcgaccag

SEQ ID NO: 469905 - DNA, 122 bp, Homo sapiens
ggccatggttccatccagctgggcagtgtcaggcctggagatccaaggtgagggcccacccgacacaggatgtgccacctgggcctgccagggaaggacccggggttctaaaagtgaagctg

SEQ ID NO: 469906 - DNA, 122 bp, Homo sapiens
accttagtctctccagtccagtccctctcagattccagagccacataagtgttcccagggcgcagctcctacctcatgggtgtaaaacctataatgaatggcttctcattccctataaagaa

SEQ ID NO: 469907 - DNA, 122 bp, Homo sapiens
ggtcatggccgtgcctggatgcccagatcctgcagcagacagaagcggaggggtgaggcacgggagccagatggcccgaggccccagggactggcctgcccattcacccttcagcccaacct

SEQ ID NO: 469908 - DNA, 122 bp, Homo sapiens
cttctgcaatgggaagaaaggcacttctggaattttctactcaacttttcccctgtattacgtaaaataggattaagaagcaaaaaaaaaaatttttttagacggagtctcactaggttgcc

SEQ ID NO: 469909 - DNA, 122 bp, Homo sapiens
gctggacagcctctgggtatctccacaccccacccttctcctgcctttcagaagagtaaacgcaggagaacgccctgaggccccggaaggaaagtgacaggcagcggctgagctggggcgac

SEQ ID NO: 469910 - DNA, 122 bp, Homo sapiens
tgatcttttccgaagcctttgcacaagctgtaaccctccctctctatgacacccaacaaacgccaaagcattctttaagacacagcttgaaagccactcctgagagatcctcccagctcccc

SEQ ID NO: 469911 - DNA, 122 bp, Homo sapiens
tgctttaaaaaaaataaaattttgtgttagaagttttaaaacatttggaaattctagttgcggcttcagatttcataattcagatgatgcaacaggatggaaccattgtcaaagagaatgca

SEQ ID NO: 469912 - DNA, 122 bp, Homo sapiens
ttcagggaagaagacactctctcacgttttcccttttctgtcacctcaggtctgacattgcgttctggaaactaaaccagtggattaatggaaaagcaaacaaaatgtccacccgaggatgg

SEQ ID NO: 469913 - DNA, 122 bp, Homo sapiens
tcttgttctcactctgatcactgtgctgcttcttgtggcatctcagagagtcatccctgacgaaggaggcgccgcaggtctcacagcggaaggccctctgcgtcacgatcttggccacgtgc

SEQ ID NO: 469914 - DNA, 122 bp, Homo sapiens
caatcacctaaaagatgtgactctcctcacttgcctggactctgctcagaatagagatttcgacacatcagtgggttcaacacctaggtgatgcggctcttccttcttttctgggctcttcc

SEQ ID NO: 469915 - DNA, 122 bp, Homo sapiens
cagcaaagtgaagatctaggagtctgttccccttgaacctgtgtggacctgatcaaacctcgagggaaaggtaagagaagagcacttagtggaccaggtgaatggagtatgatccgggtagg

SEQ ID NO: 469916 - DNA, 122 bp, Homo sapiens
tatctctgctcctctgtgggtcaggtcctttccatccctgtctggggtcctccccatctccgtgttcaactgcggtctgtctctccgtttccaattcaggaactggtaccccgtgggtccat

SEQ ID NO: 469917 - DNA, 122 bp, Homo sapiens
cactgccgtgtgatatcgggcgtcttgcttcaatttcctcccgaggtcttgagggatgaccgggagacagatcgcttgggtttgaacgcaggctacaccaaagcactacgatgcggcgttgg

SEQ ID NO: 469918 - DNA, 122 bp, Homo sapiens
aaacgcatgccaaggtttctaaaaagctcccgctgtgacactctctgtgtcctccccgggcgtggcggcctcctggccagggacacccgaccccgcgtggtccgggctacccaaggacgtcc

SEQ ID NO: 469919 - DNA, 122 bp, Homo sapiens
tgggcccaaactgtttctgtatcttccgtcctctcgtctttcactttcagttctcagcttcgccacctgcttctcactcgatttttcacggtcggttttgctatatcacctcatactctcat

SEQ ID NO: 469920 - DNA, 122 bp, Homo sapiens
ttttaatttacaagattacagggggtcctgtgaagcatccctggttttccaagacaccttcgaaagtaccatcaactttgacttttctagatcttttttcatcttacttgtggtttcaccct

SEQ ID NO: 469921 - DNA, 122 bp, Homo sapiens
cgagcggcgaggtggacgcagaggatggcgagtgtagcgatggtgctctgggcagggagccggggatggcgacaggtgcagagccggccagcgacctgggacctggcgggggcggaccagtc

SEQ ID NO: 469922 - DNA, 122 bp, Homo sapiens
caacccttcataaatacgggtccatatacagaggctccagtttacacaagacaaaaatggcgtggaggtaaatccctttcagcagctgaatagaaggctaagatggccgcgacgtttacact

SEQ ID NO: 469923 - DNA, 122 bp, Homo sapiens
ggggtaggggcggggcgtccgagccaggccacgccccccggactcgcgcccccctctcagcggcagagccagccagcctggggccgcctcgcacttccgctcaccagccggcttgttcatat

SEQ ID NO: 469924 - DNA, 122 bp, Homo sapiens
ttttagaacaagacttagcctgtaagtgggagaagagggagaacttggagggtacaggggcgcagggtgcagagcactgatcagagaggtgcgagggaaatgcagccactccataaggacca

SEQ ID NO: 469925 - DNA, 122 bp, Homo sapiens
ttttgttgttctctgcactgcagagatatttgctgtcactttgttgtcagacccaggaaacgttgtctggctcccagaggtcagtgactcatggactcacggtagacacacagattgtttgt

SEQ ID NO: 469926 - DNA, 122 bp, Homo sapiens
agctcggggattaggagagctccgggctgagcggagcgactgctggtcggtgacaggcctcgcccgggagtggagccgtagctagtggggaggcggaaacaatacaactaacagcaaatgtg

SEQ ID NO: 469927 - DNA, 122 bp, Homo sapiens
cagagaaggcatttggcccttgaagtaacatttacttgagaggttgggacaattctgtcacgcttaggacaagccagctgaccctgagcccaggagcaccctaggactgcagcacagaaaat

SEQ ID NO: 469928 - DNA, 122 bp, Homo sapiens
gagaagcttaataaaagaaacagttgctccctgtgaggacttgctaaaacaaaccatttccgttatttgacaccgcattcagaacatgggagaagaggaaacaaagtgccactcaagaatgc

SEQ ID NO: 469929 - DNA, 122 bp, Homo sapiens
gtggaaggaaaacacaaacgagtcagaggtcccccaccacgggcaaaagtgcctctcgaccgcacatgcgtggggcccagggcaccctgagcatccatggctcgagaccacagagtgcctcg

SEQ ID NO: 469930 - DNA, 122 bp, Homo sapiens
attaatttccttctctctagatgactggtactttagctttttagcttctgcaataaaatgcgttccttctcagcatttctattcataggaatccctgaatcacttctgtcatgtaaggtgcg

SEQ ID NO: 469931 - DNA, 122 bp, Homo sapiens
aggccctcagcccctcactttatctgctcgcacagacctcggcctggcaagcggtgggcccggcgcctgctccacattccccaggaagccagctgggaacacagccgccctgctcccggacc

SEQ ID NO: 469932 - DNA, 122 bp, Homo sapiens
ggctgatgtgctaagatgttgagcttcgatatctcaccccggtcacccgagcggcctggccggggaaggcatctgactcccagaggacctgcagcaagcactttgcagctgcctctaggccc

SEQ ID NO: 469933 - DNA, 122 bp, Homo sapiens
ctggatgagaacaaaatgtcaagtgtgtgccgagaggcgcaggccagccccttttcctggcggggtgatgatctggtcagtttccgagcaccatgtgctgagaatgatgcgtgcattcagag

SEQ ID NO: 469934 - DNA, 122 bp, Homo sapiens
gtttaagggatttgaaatgcaaggccgtctgggactccactgccacggatgggcaccaggcggcgccggtcggatccgtcccgggactagcagggctttgggcagcaacccgcagggagccc

SEQ ID NO: 469935 - DNA, 122 bp, Homo sapiens
acgaggctggggcggggttagttccaggggcggggcctgttataagagcgaggcataaaccggctggggcttgatgcgggggcgaggcctctcaaagacagggtggggctaaaccaaagtgg

SEQ ID NO: 469936 - DNA, 122 bp, Homo sapiens
ttgcctgggtttgaaagccagctccataagcccctgtgtaacttcagctgcctgtgcctccgtttctcatttgtaaattgacacattaataataaaatgacttcaaaagatttgtgtttatg

SEQ ID NO: 469937 - DNA, 122 bp, Homo sapiens
gccacagtcttgctctgaagcagtattaagtcaagcagggaggccgggcgccatggcttacgcctgtaatcccagctacttcgaaggctgaggcaggagaatcgcttgaacccgggaggcgg

SEQ ID NO: 469938 - DNA, 122 bp, Homo sapiens
gagcgggtctctggctggtgtctgcctgcccgtcggcatcggtggtgctgtggtgctgcacgctgtgctacagagccatctccgcgtccctccctgcagtcctcctcagcggaatctgtgag

SEQ ID NO: 469939 - DNA, 122 bp, Homo sapiens
tccctgcaacaatcctcaactggccccgccccaccaatttggaaccccgcctcctcaacccggaaccccgcctcccccagtgtggccgcttttccgacagaggcctgcccgtgattggctgc

SEQ ID NO: 469940 - DNA, 122 bp, Homo sapiens
gatccaccggcctcgacctcccaaaatgctgggattacaggcgtgagctaccgcgcccggcgggaatcttaaaaagtttaataaatggaagcagggtagaattgtgcttaccagggacaggg

SEQ ID NO: 469941 - DNA, 122 bp, Homo sapiens
gccatttcgaaggaggagccgttccacctctgcctcttgatgaactgggcttcatggatgcggggcttcctggtgaccggctcgaagccggcctccgtctcccaggccacagccacaccccg

SEQ ID NO: 469942 - DNA, 122 bp, Homo sapiens
taaaattacggagaaataaaatgactgcagcctttgagcgctggtttgtcctaggacaatcggatttcaccgggtaacgtatatgcaaacagacacgtcccgtttatttcattgtttgcact

SEQ ID NO: 469943 - DNA, 122 bp, Homo sapiens
acacctctgggcacgtggaatgtggcccacccaggggtggctcagatcctgtctctggatcgcagaggccccagcctaatggagaaggcaggactaacacacagagaacaactgagaacccc

SEQ ID NO: 469944 - DNA, 122 bp, Homo sapiens
agtctttcttcctcctctccgccccctccctcccgccgccgccgccgccgccggcgcggccgggaaccctcaccggcctagaaagagggcgctaagcgcaactagcagcaagaccaacagcg

SEQ ID NO: 469945 - DNA, 122 bp, Homo sapiens
tttttttaagctacaaagaaaactaatacattcttgaagtgatcaccaaagatccgagctcgaaagcgtttctcggtaaaacactatgagtgccctccttagcgtgttaaaatcccacagaa

SEQ ID NO: 469946 - DNA, 122 bp, Homo sapiens
ggatggaatcaaaatctctcaggggcttgggctgcaggactttgacctaatcagagtcatcgggcgcgggagctacgccaaggttctcctggtgcggttgaagaagaatgaccaaatttacg

SEQ ID NO: 469947 - DNA, 122 bp, Homo sapiens
gcctgtgcgcatgctgaaagcaggggcgggaccggggcggtcttccagcagggaaaatggcgctggccatgctggtcttggtggtttcgccgtggtctgcggcccggggagtgcttcgaaac

SEQ ID NO: 469948 - DNA, 122 bp, Homo sapiens
aagaggatggttggggtatctttcctgatttagcctcgaactccctctcacctccagagacgattcagggaaagttagagaaaactttgtccaggtttctcagtttacaaacaagtaatccg

SEQ ID NO: 469949 - DNA, 122 bp, Homo sapiens
gatgggcatggcaggcgctcgctcgctcctctctcgctccctcgttcgctccctcacacgcgcggagggaggcgaagcccgcagcagccacttcccaactttccaaacttcccagcgcaact

SEQ ID NO: 469950 - DNA, 122 bp, Homo sapiens
gtggaggatcgagttcaggtcggaggaggctcagacggctggggggacttgtggtctccccggtctgagaggggaaaattcctgggactctggctgccaggaaaacacagtccccaggtgcc

SEQ ID NO: 469951 - DNA, 122 bp, Homo sapiens
ccggccaaaaacaattttttgaacacctgtaaaatgctctagtatcaactacttgagtcacgaggagcagtccttatttacaacccaaccaaaacactaataccggtggaaaacagactgaa

SEQ ID NO: 469952 - DNA, 122 bp, Homo sapiens
tggttatggagaacaaagaaattggagaaatgtgaagcttaagcttctgctgtgctgcagcgaagaagtctgggaagtttaggaagatatcctcttgattaaatggggctaaatgtcagcag

SEQ ID NO: 469953 - DNA, 122 bp, Homo sapiens
cttctccctgaacctcagttgcttcatgtgtaagatacaggtatatcatcctaagatcttcgtcagctttgacaaacatcctaggaacccattctaactcctcattgccatgtctcctccag

SEQ ID NO: 469954 - DNA, 122 bp, Homo sapiens
gtttgaagatgcagagcctgtagattcactcattctagattttatagtttcactaggcttcgtttttctttatcctttttttttttttttttttttttttttttttcagagagacaggttct

SEQ ID NO: 469955 - DNA, 122 bp, Homo sapiens
ggttcagtggtcctcaaatgcaactcacaaaatatcatctggggaagttctgaattaagtcgttgagagtgttacctgggcatcaggatatttaaaatgagaatctacaggtatgttaatgt

SEQ ID NO: 469956 - DNA, 122 bp, Homo sapiens
tcatttctgcccacgtgtatctgccttgagtgttctaaggcacttattcattcatttgttcgtttgctcacttgcccgtcaaacatctgagtgctgactgcatgtcaggagtttaaataggc

SEQ ID NO: 469957 - DNA, 122 bp, Homo sapiens
aaagccctgctgcttacaaatcatgacttctgaggcgggcaaggacgccacgcccaactccgtaaatggcaggtttgcccatgcgcgcgtccttttggtgggcgcagacccagcgcgcatgc

SEQ ID NO: 469958 - DNA, 122 bp, Homo sapiens
cctgtcttcttcaatgggttgcttacgcaaaggtaaggccggttatcagtgctagggagccgcagatcagcagccccagaaggcggcttgccagcattttctcgggctgcagaggctggagg

SEQ ID NO: 469959 - DNA, 122 bp, Homo sapiens
gagtcgggattccctgggagcagagctccaaactctttcccgcaccagcgagcccgcactcgcatgatacccagacctgcgctcgacctggccccagatccccgtgccaagggccacagcct

SEQ ID NO: 469960 - DNA, 122 bp, Homo sapiens
agaggaggtgcagtggtcagcaccatgcaaggtgcacagagagatgggtccaccgagagccggggctgccttggtggtttgtttctcctgattcgatatctttgtcttcccatctccttcct

SEQ ID NO: 469961 - DNA, 122 bp, Homo sapiens
tggacgcctggcgccccagatctgggcctgggtgaaatgcctctcaatcactggcgcgcacggagcagctgtacctgcgcccacatgggctgagagacagggacggttatagccatctcgcg

SEQ ID NO: 469962 - DNA, 122 bp, Homo sapiens
ctacaatggccacgtcggtctgggtgttgagtgctccaaggaggtagccactgccatcatcggggccgtcatcctggccaagctctccgttgtccccatgcacagaggctactgggggaaca

SEQ ID NO: 469963 - DNA, 122 bp, Homo sapiens
ttaaatgcacagctgcttttcccaactgcagttttctcttttcccattagatggcagtaacgcaccatctctcttcacacagggtcagcggtggagggtaagttgaacagaaggcccactgc

SEQ ID NO: 469964 - DNA, 122 bp, Homo sapiens
ggacaggaagacaaagtcaaacatgtgcttggctagagcacaggaaaccctgggagcccacgaggaaaaacacaggcaggatgttaggggaggctttttgcaggaggtggtgcttgatttgt

SEQ ID NO: 469965 - DNA, 122 bp, Homo sapiens
tggcggggtaccagcaggcagcaatagcaagcggggtggagaggagcagggccaggcccccgagccgtcgccatggcaatccagcctgctttccagtagcttataccacccacgtggagtag

SEQ ID NO: 469966 - DNA, 122 bp, Homo sapiens
cactggatggtaaatgaacaatgagagacttgtattatatcagggagcagtcactggccacggaacagaatgaggggaccagactatactggtcaaaggaatcttcttcaggacacgctctt

SEQ ID NO: 469967 - DNA, 122 bp, Homo sapiens
gcagggccaggggtgttgggggtacagggacaatgtacctggaccatttccagtttacaacgagtagaactgtgaggaattcaagcagaccttcctggaaagccatggaaattcaggtagaa

SEQ ID NO: 469968 - DNA, 122 bp, Homo sapiens
aatctccccagcggatcacaatgtgcagcggagacagaggctccgccagcagacaagtgccgctatccccgtctcacacacagaaatggaagcgctgagaggttcagccacaggcccggagt

SEQ ID NO: 469969 - DNA, 122 bp, Homo sapiens
cgagcttaactacaacgccgctaacagccaatcctcgcgagaggagccgccggaagtcgtcgaaagtgcaacgcaaaagagccttttggatcatagaggcacagtcacttccggcagctaga

SEQ ID NO: 469970 - DNA, 122 bp, Homo sapiens
gcctgcgctcggcttcaagtacgactacgcggcgggcggcggcggtggcgacggcggcggcggcgcaggacctccgcacgacccgccctcctgccagtcgctggaatccgactccagttcgt

SEQ ID NO: 469971 - DNA, 122 bp, Homo sapiens
actttcaagtcacaatgctctctcctaaggcctttcctctttcctggtctcactgttcaccgggtgtcctcagagctgtggcctccccagccctgcacgtgccaggctgcgccctgagagca

SEQ ID NO: 469972 - DNA, 122 bp, Homo sapiens
cgctttccctgggctgctctgtcatcccaggtttcagcactcggaaatcgcttgggcccccgcccagaggcggggcttgggtgggctgaccactcctctggcctccaatactgtcgctgaca

SEQ ID NO: 469973 - DNA, 122 bp, Homo sapiens
gccccggactccacagagccaagcgaggcagggagcgcccccaagaaagcagctggcggccggacgcggggctcgcgcttgggcttccagctcttgggggctggggcgggcggatcgttgga

SEQ ID NO: 469974 - DNA, 122 bp, Homo sapiens
acctgtaggggcagcagtctgggggacaaaaggatgagttttggacttgttgagtttgaacgatctggaagacattcacatggatatgtcaaaaaaggcatttcaagtgtccagtttaggag

SEQ ID NO: 469975 - DNA, 122 bp, Homo sapiens
cgccgcgctctgtgggcgcctctgctcctcgctggttttcatgcagccacactgggtacgcgacatggggctgacatgtcgctggaaatcgcctgtgagtcattaagaggtgggagaggcag

SEQ ID NO: 469976 - DNA, 122 bp, Homo sapiens
taagggatgttcccctaaaccacaccaccccacctcgttcagattctgggaaacccggcacgcacataccctgcacaataacaggcagggtgaggtctctaagccccgaagatcgctctctc

SEQ ID NO: 469977 - DNA, 122 bp, Homo sapiens
tgcgcctgcctgggagacagaccaaactgcagctccctgcagaactggctcctggagtcccgcccacgtggtgctccttgatagggctaaaggctttcaatttgtccaatcagcggccgcgc

SEQ ID NO: 469978 - DNA, 122 bp, Homo sapiens
gggatgactctgagcctggccacagggcctgtgggtcatggagaaggcagtcatcagtcccggcatgtggcctattcaggaatctgggtgtcatccggatgaattagcgttcacattttttg

SEQ ID NO: 469979 - DNA, 122 bp, Homo sapiens
ggcctcgctggggccatagaaccacatcctgaacgaaggagtctccagacattttggagtcgccccagccttggaccacaagagagtggtcactgcccccacctctctgtccccaacacaag

SEQ ID NO: 469980 - DNA, 122 bp, Homo sapiens
ccacacttggaaccgcacaagtatgcagctaactacttccgcttccgcttgcgtcccctgcgtccctggctcgaggttttccgccattttgagtgtggccctagattgttctcaatactctg

SEQ ID NO: 469981 - DNA, 122 bp, Homo sapiens
cagccagttattatacaaacatcctcagtttggagctggagtgtctgctctggatacagtcgattctgacatcaattaaatatataaccagacacgtgcagtggcggggagggtcccctcac

SEQ ID NO: 469982 - DNA, 122 bp, Homo sapiens
gcgcgcgggcccggccgcgattagcataatgtagtattttcagtttcaacaacaccacggcgattggcggccgccccgctgccccgccccgccgcggcccggcccccgcgcaccgcccattg

SEQ ID NO: 469983 - DNA, 122 bp, Homo sapiens
cccagacgctgagccacctcaagcgcaccgtggagaatatcaaggtagctgggagggtggcgggccggccaggtctcaaggtcccaggtgctgggtatggtcatggaccattgttccatgga

SEQ ID NO: 469984 - DNA, 122 bp, Homo sapiens
cataacccgtaaagaggccaggcccgcgggaaccacacacggcacttacctgtgttctggcggcaaacccgttgcgaaaaagaacgttcacggcgactactgcacttatatacggttctccc

SEQ ID NO: 469985 - DNA, 122 bp, Homo sapiens
tgggtggcgggagacagagccagctgtggtgatggggctataaaaggggccctgacctcacgagatccacctgcatcccacagggctggccgtgggcagaggcacagctgtggccaatctgc

SEQ ID NO: 469986 - DNA, 122 bp, Homo sapiens
aatatggcgctcagccccttcaccctcttctggagggctgggggcaggtgctgcccgctgcgtgctgacctttgccctgccatttgcagtttatgaggcgctttcctcatcccattatctca

SEQ ID NO: 469987 - DNA, 122 bp, Homo sapiens
aaactgccttcggggaaaacgagaacaggaatcaagcttgtgttacctgtcggagccgcccggctaagcaggggcgctgcccagctccccctgccccccagagccggtgaaggcggtgccag

SEQ ID NO: 469988 - DNA, 122 bp, Homo sapiens
tctccactggagtctgtagctccaataatccgctccggctccaaacctcgagcaaagcctcgtggcttttctgactgtaaaaacaagatgggtagaacaattttatctatatgggactatta

SEQ ID NO: 469989 - DNA, 122 bp, Homo sapiens
gacccggagctgggtcggaggccaggctggggctcgggccagagcggccgggcctctgggcgcgggagaaggagggcgccccctctccgctcggggtcgtgtcaatgctttgcacttggggc

SEQ ID NO: 469990 - DNA, 122 bp, Homo sapiens
ctataaagtgtacaagtggtaaaatgcagaaattaaacagttatgcttttccattagccacgccctcacagacagcatctggcttacaaaaacaaacactgaaagttacaacaacaaaagtg

SEQ ID NO: 469991 - DNA, 122 bp, Homo sapiens
ggaataaacaactcacatgaacggccaagggctgaagacagaagtggtgctctccatcttcgtcaggtgctcacggagggcccacagcacatctgatctggtcaccacggggatccgtggag

SEQ ID NO: 469992 - DNA, 122 bp, Homo sapiens
ggtcgatgggactgggcgccgtggagcagggggcggtgcttgtcagggaggctcgggccgcgcaggagcccacagcggggtggggaggctcaggcatggcgggctgcaggtcccgagccctg

SEQ ID NO: 469993 - DNA, 122 bp, Homo sapiens
cagctgaggccttccgggatggagcaggtatggctggggccttctgggatggagcaggtacggctggggccttctgggatggagcaggtacagctggggccttccggggaggagctgacgca

SEQ ID NO: 469994 - DNA, 122 bp, Homo sapiens
tcccacatagactgggactccctgaaagcagaggacaggtccaaccctttgctgtgtccccggcacccagcacaagcctggccctgaatggcccatctgttggctgaactgaagaaatcatg

SEQ ID NO: 469995 - DNA, 122 bp, Homo sapiens
cccagcccacggcggcccgcgagggacaaaacgcgccgcgcctggttccccgcccacggacgcggtgactttccagaacgtcttaaaggcaacgcactctgactcaaggcccagggaggctg

SEQ ID NO: 469996 - DNA, 122 bp, Homo sapiens
ttcggcaataacaaggaacgaagtcctgattcacgctccaccgtggatgaacctcaaaaacgtgatgctcgtgaaggaagccgctcatgaacggccacatgctgtaggattccgtgtatatg

SEQ ID NO: 469997 - DNA, 122 bp, Homo sapiens
gagtaaacgaggtggggtggggaacaccccaagtgcgtgcgtgctgggggctggggggcacgatctccgttctcccgggtgccccagccctagcgcacgcctccgctcccccgcccccttcg

SEQ ID NO: 469998 - DNA, 122 bp, Homo sapiens
tcagcggctggggaggcggggccttaggcattatccaatgagggacgctgggccggaaaccgtccaatcaggcacgcagctggagcgaaccacatggtttctgggggcctttgtttctcgct

SEQ ID NO: 469999 - DNA, 122 bp, Homo sapiens
ggatctcagggactctgggtcctagggactcggtggggcgcgtctcagcagtggtgtgcacggcttgggctgagaggcccttcctcagatcccttccttcctcacccctacccattcctttg

SEQ ID NO: 470000 - DNA, 122 bp, Homo sapiens
acctcgtgatccacccaccttggcctcccaaagtgctgggattacaggcatgagccaccacgcctggccaaaaaaatatgttttaaatgtcccatttcaccattgccaggcaggcattcttc

SEQ ID NO: 470001 - DNA, 122 bp, Homo sapiens
ggctcactgtatctttgcctttactctgtgtctttacaccttaggacacaggttggaatccgatgttttatgggccactgtcctaacttcattgttggacatttcccagttttccactaggg

SEQ ID NO: 470002 - DNA, 122 bp, Homo sapiens
tgggcccgcatttctcagcccttgggcggcggatgggaccggccgctgtggagcagggggcggtgctcctcggggaggcttgggccatgcaggagcccacagcggggggtgggggaggctca

SEQ ID NO: 470003 - DNA, 122 bp, Homo sapiens
ttcttgctgggaactcctgccctgcggactggaatgggtaccgagatgaaatgctgggtgcgctccggctccccccgcccgccccggggcagaaggtttagggctgggaagaactctgatta

SEQ ID NO: 470004 - DNA, 122 bp, Homo sapiens
gatgagaatccaagctgcaaactgggcggcttgggcaactgttttcttaaccaccctccacgttgtggcttacgtcttttagcaccgccctcagggcaaaggatggtggtcagaggtaacta

SEQ ID NO: 470005 - DNA, 122 bp, Homo sapiens
gacaggccccctggcgtccacccccacaggcctcctaccttggttttgtcgtccaccactcggagcccatcggctgacacccacaggacagacttcacggactttcggcccatctggaggga

SEQ ID NO: 470006 - DNA, 122 bp, Homo sapiens
gggctgcctggccggcgcggcccttcccgtcgtgccccgggctcctcggaagcagcctcccgctccttcagacgtcggactcctgagtttcgaacctgccccgcggtttccccctcacgctg

SEQ ID NO: 470007 - DNA, 122 bp, Homo sapiens
tggggaacgtagtgcagacttgcagagaacgagtctcttggtcctgtgccgtagcatttccggcggaagttgctgggcgcggaaagccggcaagacctttttttccgccatcatcgctcacg

SEQ ID NO: 470008 - DNA, 122 bp, Homo sapiens
gacctgcggttggtaatgtcaaataagagaagaccacctactgagttcctgtagtaggcgcgagtgatggatctaaaacacaagaaagaagtaaagagtaaaggctgtgcccaaacttctgc

SEQ ID NO: 470009 - DNA, 122 bp, Homo sapiens
gcaggtaggctgtgtatactccacgaggatccctaaggacctctgcctggagacatgagtcgaaaacagaggaagcccacagcaaacccgtagatgagcaagaagccagtgtcaaatgcttg

SEQ ID NO: 470010 - DNA, 122 bp, Homo sapiens
ctgcggggcattgcaagcttggctctaccatgacatgccaggcacggggccagggccccacggaaggccccagagcagataggccagggttcgattctggccaccactgcctggccatatga

SEQ ID NO: 470011 - DNA, 122 bp, Homo sapiens
tccagccagccccgggatctataacactctctccgagtgaagacacagaggtgatgagatcgggtaacccacgggcgcccgagccccagccgcgcaagctcacgattgggccagaagtgagg

SEQ ID NO: 470012 - DNA, 122 bp, Homo sapiens
gcgcccaagcaacaacgtctgcacccaaacccagtcctcagaaccgcagacgtggccctgcgtggcttccggctcgtcgccacgccccctggccaatcacggcagaggactatccgccagcc

SEQ ID NO: 470013 - DNA, 122 bp, Homo sapiens
aagcaggtaaaaagaggcttctagctcaaagccccactgccttcgggcccctccttttagcgctctgctaatttcggactctcgcttggggtcccaggcgcttaaagagataccttacaaaa

SEQ ID NO: 470014 - DNA, 122 bp, Homo sapiens
ggaggctgaggcaggagaattgctggaacccgggaggcggaagttgcggtgagccgagttcgtgccattgcaccccggcctgggcaacagcaaaactccgtctcaaaaaaagaaaagacagt

SEQ ID NO: 470015 - DNA, 122 bp, Homo sapiens
atccgatgaattgaattattctgttttctttgagtccactttgggttaagcaccccctcccgctctccccagcaccgccatcagaagattagcaatggagagagaaggggatgaactcgcct

SEQ ID NO: 470016 - DNA, 122 bp, Homo sapiens
gaacagctggaagtgcacaggtggggttcactggtcggcgcaatgagggaaaacacacagcgtagggaaccacagggcatctcagtaagatgctgttaggaaacccatggggtttggcaggg

SEQ ID NO: 470017 - DNA, 122 bp, Homo sapiens
tgcatgcagctttcataatagtaacgataacactagtatattagagaaagtatagcatcgcggttaatagcacagatgccaaagacactgcctggtgtgaattctggctatgctgtttctaa

SEQ ID NO: 470018 - DNA, 122 bp, Homo sapiens
aggccacattggaaatcccgggcatgctcccgccggcggagaaggcccagacaaaatgtgcgccaatcaggatacagacttggaggacgtttaccctcaggaccaataagagggagggcgga

SEQ ID NO: 470019 - DNA, 122 bp, Homo sapiens
cacagcgcggccgaggcgcaccttgcgccacacactgctcttttactggagaaagcgggacggccgccacggacggcgcaacccctgcgtgcgccgcggatcgacgcctgagggcgccagca

SEQ ID NO: 470020 - DNA, 122 bp, Homo sapiens
ccctgtgatacacttcttaatactcagggaggaagaggatgatattactcccaatacagacggctgcacaccctctgtacacggagggtgtacaatccgtctgtgaaagagttcataatctc

SEQ ID NO: 470021 - DNA, 122 bp, Homo sapiens
agctagtgcatggtgagcagcatgaaatccagacagggggcttcggaggatgtggcaaaccgccataaatatgggctacggtcacatgctgggccacagggagaggtgagttcagcgacaaa

SEQ ID NO: 470022 - DNA, 122 bp, Homo sapiens
ggcttcccaaatgaaaagcctgacttcagttactgggtgggaacaggaaaaggagtctgacgcagctagaaactaaaactgaaccagactcataactcagcgagaactgcaaactcctgatg

SEQ ID NO: 470023 - DNA, 122 bp, Homo sapiens
taagataaagggctctttctcacgatgaaacaggagtgcaaagacagtgtccgtttaagacgaactttgggtcacaatcacgggtttctgcatgaaactgatggtgctttgctgtcagctgt

SEQ ID NO: 470024 - DNA, 122 bp, Homo sapiens
gcctgggggcttaaagtgccaggagagcgcgaggctcagccaaggagtaatgaacagggccggggcggggctgtggctttaccggaccagcctcaaacaaagatgctttgagcagagcttca

SEQ ID NO: 470025 - DNA, 122 bp, Homo sapiens
tgcccgactgggcgaggccccaagctggcccgggagaggactctgcgggcgaagtggctgcgcaaggagagaacttttcctgcacaaggaacgcctcgtggggagacccaaggcaggagcgg

SEQ ID NO: 470026 - DNA, 122 bp, Homo sapiens
tccgaccgcgcacaatgggccatggagttcccgttcgatgtggacgcgctgttcccggagcggatcacggtgctggaccagcacctgaggcccccagcccgccgacccggaaccacaacgcc

SEQ ID NO: 470027 - DNA, 122 bp, Homo sapiens
agtaaatatcactgttgtacctaattttgtatttggaattttgcgggttttttcttaagacggccccacagaactgggatcttccctgacccctgccctcagggagctcccaggatccacag

SEQ ID NO: 470028 - DNA, 122 bp, Homo sapiens
gtcttaggagcaaaactggtttttggcgaacatctccgggttttctagacatcggtaatacggattttttttaagcagcatttttcttttaagtgggtcactgggcggtcttgttgttacag

SEQ ID NO: 470029 - DNA, 122 bp, Homo sapiens
gtaacaaaagtgtcagaatttaagataagaaaagtgttgcaaattgggttctcagggaagcggactgagatggggtgtagcatataggatgcttattaaggagagcccttgggcacaacacc

SEQ ID NO: 470030 - DNA, 122 bp, Homo sapiens
gagagtgctcaagtacccgctgctgctcaaggagctggtgtccctgacggaccaggagagcgaggagcactaccacctgacgggtgaggcggcggcggcacctccgggcgagggcctgcaca

SEQ ID NO: 470031 - DNA, 122 bp, Homo sapiens
cgccagggcgctgacagtctggctcttggaggtaagatgggcgtggctgatcccgaactccgcctgcgtttgcagaagcgaagggaaccgagcgagcggagctgagctcgggtaggccgcgc

SEQ ID NO: 470032 - DNA, 122 bp, Homo sapiens
gtcacgactgaaactcgctgcgtcatgaccctcccaccttcttccgccgctttttaattacgccattctccccgagcgccgattggacagctcctgcacagccgcgcgatgacgtgtcggaa

SEQ ID NO: 470033 - DNA, 122 bp, Homo sapiens
tgctgccgtgtctgtgagaaggtgggcagagggttcaagaaaggaaggatttgggatcagcgtaccagggttggggagacagggcaggagcccagctttttctgcattttccactactttcc

SEQ ID NO: 470034 - DNA, 122 bp, Homo sapiens
agattccaattccagcggtctcagtggcctgaaattctgcatttctcacaagctctcagacgatgctgatgctgcgagtccatggaccgcatgtggagaagcaaaggtcctcatccccaggc

SEQ ID NO: 470035 - DNA, 122 bp, Homo sapiens
tggcgctgggcaggtcctgcaggtccacctcctccatctcgcagtcaatgaagctccagtcgccgccgccctcgtccgcctcggccgcccccgagaggggcgcgaagggccgcagcgtcacc

SEQ ID NO: 470036 - DNA, 122 bp, Homo sapiens
tgcccaggctggtcttgaaatcctggcctcaagcagttctcccaccccagcttcctgagtcgctgggattacaggcatgagccacagtgcccagcccagcaccctattatttgaagataaaa

SEQ ID NO: 470037 - DNA, 122 bp, Homo sapiens
caggtgagcgccaagctctagccccaggtcgctcccttatgcttcaagcaagctttgcagcgcagccaattgccaggggctgtcccgcctactccccgtcctcgcagccacttgcctgcgcg

SEQ ID NO: 470038 - DNA, 122 bp, Homo sapiens
agaactggttatatgagacagcatatacatgaacatttcagtgtctgatgcttcatcttacgacctgtttcacgcatttcaattgtcaatctgaaataaaagcatcttacttgaaatttcat

SEQ ID NO: 470039 - DNA, 122 bp, Homo sapiens
aaggaagagtgttcttgcctgggagcaggaatgtgttcagtggggcccctgtgcctgcggcggcctggccacagccaagcaccgcgactcaaagtgtggtccacggaccggtgccagtccgc

SEQ ID NO: 470040 - DNA, 122 bp, Homo sapiens
actgtatgtctaggacacacaaatgaaacgatgcagtgattttccatttaaatttggtgccggtgtcctgaatagattggagatgggaatagtggctgccaggagattagttaaggagagcc

SEQ ID NO: 470041 - DNA, 122 bp, Homo sapiens
ctggggagagaccctggtaccgggagaggagacgcggtcaggaggctggggacgggaaggcgccacagcctgaggccgagaaaacaggcgcccccggatcagtgctcgttttttttggtttg

SEQ ID NO: 470042 - DNA, 122 bp, Homo sapiens
tgtgcgctaagcccaggggcgggggtggggcgatgcggggtgcaaggccagggcctgcagcgcagagtgcggaggtgggggctgtgttctgggggtccagggagggagggcccacctctggc

SEQ ID NO: 470043 - DNA, 122 bp, Homo sapiens
tagcattcgcgcttctgaatggctaatggtctctaagcgtaggccctaggctacctggagcgcttccctttactttggaagagaaaacaaagtttaaagctggagtctcaagggttgaatcc

SEQ ID NO: 470044 - DNA, 122 bp, Homo sapiens
cctttcttaactctattagtggccgctggatttccagctggacagactcatttgaagacacgattagaagagatcagattggctgtggaagatggagctacagaaatcgacgtggtaattaa

SEQ ID NO: 470045 - DNA, 122 bp, Homo sapiens
atgtccagcggagggcagcagtgcacatctttagaacgggattctcattacagattggaccgacaatcaacctgagaaattgtacgctgcgttccgtgtcgctgcagtcaggctccggccac

SEQ ID NO: 470046 - DNA, 122 bp, Homo sapiens
ctccgcgaaggtcagcttgtatcggcctccacgggggtggtagggaaagaccacgcctggcggggggcgcacgggatcagcaggtacaccccagcccaccctcatgcacctgacgtctgggg

SEQ ID NO: 470047 - DNA, 122 bp, Homo sapiens
ctttagttagagagagaaagcgggaatgaaaccagcaccctcaagacgactctaaatggccggtagcaattggctgatacaaacaacctgcatgaacagaacttgagagccactccccgctg

SEQ ID NO: 470048 - DNA, 122 bp, Homo sapiens
aacatggagggaggaggtatagatctggatttgtgcctcggcactgccacatcctaactgcgtaaactagacatagttgttttgcctctgtgagcctcagtttcctcatctagtaaatgaca

SEQ ID NO: 470049 - DNA, 122 bp, Homo sapiens
acactcctgggctcaagcaatcctcccagctcagcctagccaaagtgctgggtttactggcgtgagccactgagcctgcctgatttccatttaaagttgtgggtcggggcagggtgtggtgg

SEQ ID NO: 470050 - DNA, 122 bp, Homo sapiens
gcaacatggcaaaccctgtctctacaaaaaaaaaaaaaaaaagtaaaaataaattagccgcgtgctgcggagcacacctctagtcacagctactcagcaggctgagccaacaggatcgcttg

SEQ ID NO: 470051 - DNA, 122 bp, Homo sapiens
cccgacgtggctggtggggggcactcgagccacaccactgctggtgaccagcggcggggccgaggggttcaggcaccgtctctctgacttctccctgtgaaataatcaagcacaggaacaag

SEQ ID NO: 470052 - DNA, 122 bp, Homo sapiens
ttaccgttgattggaccaaattgttactcccttattttcattggaccttacggcagccggcgcgcgagagttacccaatcagcaagcgctccgcctcctgccttttcccgccctccgctccg

SEQ ID NO: 470053 - DNA, 122 bp, Homo sapiens
ggttcaggggaagagagaggagggggaggtgcagagagctctatgacatcctgtttacagcgaggcaagatgaatcattatctctgtgcgttttgttttacttatctgtgtatatagtgtac

SEQ ID NO: 470054 - DNA, 122 bp, Homo sapiens
ccctctctgataggggatgcgcaatttggggaatgggggttgggtgcttgtccagtgggtcggggtcggtcgtcaggtaggcacccccaccccgcctcatcctggtcctaaaacccacttgc

SEQ ID NO: 470055 - DNA, 122 bp, Homo sapiens
agaggagaagggaagggaaccgctcaactacccttcgggaaaccaagtttccaaatatgccgccctcttcctggtttgcacaaacggtttagggcattcgttccggtttcagggtggggtat

SEQ ID NO: 470056 - DNA, 122 bp, Homo sapiens
ctcttcacttgaatccacactttcaacaactcggtaatgtgatactggtgcacatgcagtcgccctgctctggaaggcccttataagcactgtccccacctagcactttccacacttgctgc

SEQ ID NO: 470057 - DNA, 122 bp, Homo sapiens
gagacggataaagacagagacccagagaaagccagatatgttgacagacacagagacagacgccagagaggaaggcagacaaagagacgggtggagacaaagactcccaccaagagacgcag

SEQ ID NO: 470058 - DNA, 122 bp, Homo sapiens
gcccccttaacagtgacccggcccgccccttccggccgcagcgcggggcacgccgggaagcgccgtcggccagcacacagcgaagccgcgactggatccccgccttcctgcttagactggca

SEQ ID NO: 470059 - DNA, 122 bp, Homo sapiens
tcggggaacctgcacagcccagggaaaatgaaacccgcgggaaaacaggaggaggagtcacgcaccctgggctcagttctgccatgcacaagacagtgatgctctgggagtctgcaactctg

SEQ ID NO: 470060 - DNA, 122 bp, Homo sapiens
ctgcttcaacctcaaaggggatggggggctgagtggtgccagaggagcagcaggctcgctcggggagagtagggccttaggatagaagggaaatgaactaaacaaccagcttcctcccaaac

SEQ ID NO: 470061 - DNA, 122 bp, Homo sapiens
tttactggatggataaataggaatggggggtagataggcgggagagtgagtagacaaatgcgaaacaggaaaagcttgcgccaggaaaaacagtgaagagcgaaatctccagacccccgatt

SEQ ID NO: 470062 - DNA, 122 bp, Homo sapiens
atcccgtatttttctcccccttccgtcacctcccgaaagaagaaggcagcgagagcccggcgccaccggcacaacaaaaagagcaaagtgtgtgatcttcctcgccggctgcctcccgctct

SEQ ID NO: 470063 - DNA, 122 bp, Homo sapiens
agagggatcggccacaccagcacagtaacagctgcacaagcaagggtctgagacacgccgcgaggaaggggtgacggtgtagctgtgctcaccacaccatgaagcccctgaaagcaagtctt

SEQ ID NO: 470064 - DNA, 122 bp, Homo sapiens
gttggccagaggagatgtggcgaaacgcgctgggcgggggaggcctctgccggggtggaccggggcacctgctcacattcccgcagcaacgcaggctcaggctcacgcttggatttgccctc

SEQ ID NO: 470065 - DNA, 122 bp, Homo sapiens
ctgccttcctccacggaaacagggatctggtacctggaggagagggacttctgcacacgtcggcttcagatcacgtgagaaaaacgtcaccagtgggctcgggtccctagttcccctcccac

SEQ ID NO: 470066 - DNA, 122 bp, Homo sapiens
tttcagcccgcgaaagtctcccgactcattgctattcttgggctcaggaaattgcttaaacgcgatctgattgccagcaacgtgcaggagaagtggggggtccgggtgtcagtttctttacg

SEQ ID NO: 470067 - DNA, 122 bp, Homo sapiens
tgtgagctgcgtcaggtaaagcacctagggtcagaaagccacctctcctcctcttctccgcgaccccactttgctacacaaacgcaccgagactccgaccgtccccagcctccggtccctca

SEQ ID NO: 470068 - DNA, 122 bp, Homo sapiens
tagttacctggaacttctaaaagaggctaccaagcgagatctaaatctttcggatgaagacggcatgactcctactctcttggcagcctaccatgggaacttggaagccctagagataatct

SEQ ID NO: 470069 - DNA, 122 bp, Homo sapiens
tcccccatccccgctgcgcctacctggggcgctcatgctccgccagccagctgcgcggggcgcctcctccacgcaggcctccggcttcctccaggcgaccaggccctccgtccccccgggcc

SEQ ID NO: 470070 - DNA, 122 bp, Homo sapiens
taatagacctggttaggcaggcaggcaggcaagggactgatcccatggagcctggtgggccgtattaaggacttttattggatttcgagcagagaagcgacgtttgggttgtgttttaagaa

SEQ ID NO: 470071 - DNA, 122 bp, Homo sapiens
tcacggcggtctgttccgggtcccgctcctgcacgagcaaccagcgcgacagctcgtccccgccccgtaatctcccggctattcggggcccttcgccgagatttctcccggaccagccccgg

SEQ ID NO: 470072 - DNA, 122 bp, Homo sapiens
tgtgcccagggctgcatctgcaaaggggcgtcagagaagtgcagctgctgtgcctgatgtcgggacagccctgctgtcagatgaaaacagaatgacacgtaaaatccaggattttttttttc

SEQ ID NO: 470073 - DNA, 122 bp, Homo sapiens
agctgaaatgcgccggggctgaggggcgcctcctaaccagcctagcactccaggccagaacgccagggagacaagcctccagtttttagaaaacaaaactgaagttcatcgacttgttcatt

SEQ ID NO: 470074 - DNA, 122 bp, Homo sapiens
agcaggactagagcccaggcaatcccacgccagagccagctgctctccatctctcaatcacgtttgaggagcccccacaataaccagaatctccgggagatttgcttaaaatgcagattccc

SEQ ID NO: 470075 - DNA, 122 bp, Homo sapiens
tgctgcggccacaacgcagagtactaaccactatacgatcacggcgagccactaaccaggcggcgcgctacagctggatttaatgcctcttgaaataggaatggctatttcgtgctactttt

SEQ ID NO: 470076 - DNA, 122 bp, Homo sapiens
gctcgccttcctctttcagaagactcgaaatcggccagcaggtctgcgagatttgaaacgcgactgttactccttgttttccggttctggccgcgggagcctctcgagaagcgtggaaagag

SEQ ID NO: 470077 - DNA, 122 bp, Homo sapiens
tacagtaggtctggcctcaagctgcttcaagctaaggtctgaggctggcttctcaatgcacgtccatgctatctcccagggcccttgtagcagaaagagcaccttcaaggttcacccacaaa

SEQ ID NO: 470078 - DNA, 122 bp, Homo sapiens
tttgggactggcagcatattcatttagttatgggcataattaagtcttgatgaactctcacgcatcatggggctcctagaattctttgctcctggggcattgtgaatgctatatgcaaatgg

SEQ ID NO: 470079 - DNA, 122 bp, Homo sapiens
gctccaccccctctttgggcacccctggcttcttcaagttcccacccgaaacccgcccctcgggcagcttccccggctctgcccagccgagtgcacccagcctggacctgtattcaaacacc

SEQ ID NO: 470080 - DNA, 122 bp, Homo sapiens
gttgtccgtgtacacagatgggcttcggggcctgtcatacgtgctgttcgtgtacacagacgggctcctgggcctatcacccgtgctgtccgtgtacacagatgggcttcggggcctgtcac

SEQ ID NO: 470081 - DNA, 122 bp, Homo sapiens
attagccaggcagctgggatgcaagagccagggtacgtgtctcacagagctgcacagagccgggccgttcccgaaacgccgagcacctcgcaaggcgattagtagcatgggaaacctagcca

SEQ ID NO: 470082 - DNA, 122 bp, Homo sapiens
aatatggtaattttagactccctgattggaaaggattgcagagcgggttgtgggggaggacggcagtttgatttactccgcaggagctggttccgagatggctctccaccctctgtgcacgc

SEQ ID NO: 470083 - DNA, 122 bp, Homo sapiens
ttgtctatggaggtagtggctggagttggtacctatgctgatgtcgttgatgggatgacacgtgtggagaagcatgttggaagttgactgtctctggcacaggctgctagggaatgaaaact

SEQ ID NO: 470084 - DNA, 122 bp, Homo sapiens
cctttatttcttgctcctgaggaagcagcagaagtgggccttctggaaaacggtgagcagcgtagccctgtgtttctcatgcagcgggggctgcaaagcctgctctggccatagtgagctaa

SEQ ID NO: 470085 - DNA, 122 bp, Homo sapiens
caaggcttgaccaattggatatccgccttgcctagcagacccaatcagaagtctcattctcggctttgtcccgcccccaaaggcagaggccgcgggaagtctccgcccacgccttggaatgt

SEQ ID NO: 470086 - DNA, 122 bp, Homo sapiens
ggggggggttccagcatcaccagtggcacttcgtgtgggtcctgtggtactattcaaacacgagaaatacgtgagaactgcaagaggtcactgtttcctaccgaacgcgatgtactgaagag

SEQ ID NO: 470087 - DNA, 122 bp, Homo sapiens
aggcctcctcggcccctccttgcccacaggcagctgttgctgctgagcctcccgggaccgcggcctcaagcctcccaggggaagcccccagctaccctcagcgcctcgggaggcgactgtcg

SEQ ID NO: 470088 - DNA, 122 bp, Homo sapiens
ttgaagccaagattggccccaggcgctgatgcatctaggttgttggtggcgtgttcctcccgggcaggagagctagggtccaggttcacgaagagtgcctagcactgccatgctggctttct

SEQ ID NO: 470089 - DNA, 122 bp, Homo sapiens
ccctggctcagcgaccttggcccttaatcgcccaacgccgattcctcaaaattccggctgcgctgaatcgggctgcttttgccgccgccccggcagttgggccctgtttccgccggcgccct

SEQ ID NO: 470090 - DNA, 122 bp, Homo sapiens
aggggaacggtggagaaaaggggccagatggcagcggagccgagtctgcgctgctgtggccgtttcctagggccaccgtgacaaatggctagtggctttaaacagcagaaagccgttctcct

SEQ ID NO: 470091 - DNA, 122 bp, Homo sapiens
tgtgccaagtacttgccgacatcagtaacactgaaagaatcagaagaatagcaaaatgtacgtagtgcttaccatatgccaagcactgttctccgtgctcacatgtgttaattcattgcttt

SEQ ID NO: 470092 - DNA, 122 bp, Homo sapiens
aatgagagagggaagcacttctgcagaggacttctggaacctgtggttaagaggagccgccggcgcccacccgcgctgggacgtgaagaggagacttctgggtagtgtagtcatacgtgagg

SEQ ID NO: 470093 - DNA, 122 bp, Homo sapiens
cggggtgcgggccccgggcgggagcgccgaacacggaatgttttcttaaagggccagttccgagctgcgctgaaaagggggggggggagaggggggagagataagtgagacgaagaccgaga

SEQ ID NO: 470094 - DNA, 122 bp, Homo sapiens
gtgatccgctcaccttggcctcccaaagtgctgggattacaggcatgagtcactgtgccccgccaggaaattcagtttctgaaaatacacctgtggatctctagcctagaaaaagggacctc

SEQ ID NO: 470095 - DNA, 122 bp, Homo sapiens
acagaggctgggactctaggagcagaggacacacagcagtaaggacgagaccttgacctccggctgcagcgagagacaaaggaccgaccacatcccggaagccgacctgtcccctccagctg

SEQ ID NO: 470096 - DNA, 122 bp, Homo sapiens
aaagtgtgggtacgcagaaacccgcggcaggagagccccaagtggagcgcagtctgacagcgtctgtctctgaactcgtgtcggaccgaggggacgccacccagcgggcagggtgacgtcac

SEQ ID NO: 470097 - DNA, 122 bp, Homo sapiens
tctctcattatggttttcaatgataaattttagtgttcatatttcagttccccaaaaagacggtaaactctgaggcgtgggagatcaaaagccaggcagttgtcagaatcttgccagtgtaa

SEQ ID NO: 470098 - DNA, 122 bp, Homo sapiens
actgaaagcaaagcttccactgggttgttggagccaccgagctcattaacaggatgcaggcgagatgagtctgaaagtgcaacatgggagcacagtgagtaattaaatcccaggtcatttaa

SEQ ID NO: 470099 - DNA, 122 bp, Homo sapiens
gccttggaggtggaccctcacccaaaagtgcaaactgattggtggattttgagggctgggcggaaacggaaaaggctaagggccaatgggcagaaagcgccggcggcgaacccggttgtttg

SEQ ID NO: 470100 - DNA, 122 bp, Homo sapiens
aacgaggaaaggggggtctcaccgtgcggaggcttcgatgacagacgtgcttctgggacccggggctctggcgccctgtcggtaaacaggtccatgatctctgcaggcccatgggctgtggg

SEQ ID NO: 470101 - DNA, 122 bp, Homo sapiens
aggaaggccagtggaaacacaaacttgtgaaatacccgatgctaatatcccacaactgcccgcctgggaggggaccttctctcgcggcgccagctcctggagcctggtgggatctctgtagg

SEQ ID NO: 470102 - DNA, 122 bp, Homo sapiens
gggcaaccgagcagctgcagtgcctctgcacctgctctgtccccaaccccgggagggcggcgtctcagggcaggacagggaagtctccctcacttgtcccctgcaacaggggctgagccaca

SEQ ID NO: 470103 - DNA, 122 bp, Homo sapiens
aaatcaatctgatttcaggcgacatggtaactcagtgctgggcaagctggttttaatttccgcgtggctgagacccagcttcctctactcactggagcacccctctttcccagctgatgctc

SEQ ID NO: 470104 - DNA, 122 bp, Homo sapiens
tacacgaggcccagcagggcctggcatccaactgaggtcaccggtagaccggggtaaatacggtagactagggtaaatagagcagaccggggtaaatagagcagaccggggtaaacagagta

SEQ ID NO: 470105 - DNA, 122 bp, Homo sapiens
gtatgagcagcacacatacctctggagccctggccaaagttagtggctgagcagaagacacgtgcttcgcctccataaagtcgtctgcgtggcacgtcagaagcctgcagtcctttcaactt

SEQ ID NO: 470106 - DNA, 122 bp, Homo sapiens
aggctgccctgtgctctccccagctaagcatggtgtcagggtgtatgcctgcagccctcacgttatgtttgcaatgccccagctgcgtagatctttaagtatggcagaatgtccgtcttctg

SEQ ID NO: 470107 - DNA, 122 bp, Homo sapiens
gcgtggaaatccagtccggctgaccgactggagggcagcccaggcccggccagggtgactcgctaagtgtggttggggtggatttcgttttcctaaagtggcctgagtctgtcaggttatcc

SEQ ID NO: 470108 - DNA, 122 bp, Homo sapiens
gagtgaggccaagagtccaggaagcccaccaggctcagaggcccccagctgtgcagacagcgcggcggccgcacactgggctgggtagaagggcgccacggtcaggaacctgaggatgtcgg

SEQ ID NO: 470109 - DNA, 122 bp, Homo sapiens
gtcgctcctggttggtgcgtggctcaggctaggtcattgaaccgccggccacgccgggggcgctgggaaaggggatggggccctccgccctggcgggagagagcctgaggcccctctgcccg

SEQ ID NO: 470110 - DNA, 122 bp, Homo sapiens
ccaaaataaccttttcgggttcaggtcggcggaaagccccgcccgaaggggctatggctccgcccacgagcgcaaaagacccgccttccgcgtcacgccagccaccccgcttccctccccca

SEQ ID NO: 470111 - DNA, 122 bp, Homo sapiens
cgggggtgcatgtccttctgcacttcccaaatgccctgagctcactcccaggatgcctgtcgtgtttattataactggttctccacaggcttgtcggtgctccacgccagcagcacaaacaa

SEQ ID NO: 470112 - DNA, 122 bp, Homo sapiens
ggggcggcgcgacgcgcactcaccggtgagttccatggccgccagtgtccggacctcccgcggctgcagccggagtccctccctgctgttccgcagcaccaatctagggcgtccgcgcccaa

SEQ ID NO: 470113 - DNA, 122 bp, Homo sapiens
aggcttacaacatcagaaatttattctctcccagttctggatgccacgagtccaaaatcacggtgtgggcagcacgcagcacactccttccggaggccctggggaggatccctccctcttcc

SEQ ID NO: 470114 - DNA, 122 bp, Homo sapiens
agtgctgaaaaggaaccacaaaaaaacaaaacaaaacaaaacaaaaatacagaaggaagacggcacactagaaagcactggatatttaagcatcagaaatatctcaaggaagtgcattcagg

SEQ ID NO: 470115 - DNA, 122 bp, Homo sapiens
aggaaacagtgtgtctggcacagttcagggcatgagataagggcagtgggttggaaggatcgctgggatgaataatatatgaggaggcaggagcaggaaggacagaccataaagggcctgag

SEQ ID NO: 470116 - DNA, 122 bp, Homo sapiens
aaaagacactgaggtctagaaatagctccgtggagcagaatcagtattgggagccggtggcggtgtgaagcaccagtgtctggcacacagtaggtgctcattggctcccttccacctgtcat

SEQ ID NO: 470117 - DNA, 122 bp, Homo sapiens
cttctccctctctgtccccctccccctccctgtccttatctttcccttctgtctccatggcgactcaccacctcggcttgcctgcatcccagcctctgccagggattctgagccgggctcca

SEQ ID NO: 470118 - DNA, 122 bp, Homo sapiens
ggcttctccagctgacagtgtccgcctgtccttttgtccccgtccagtttgaggagcggccggagtgtgggctgctggtaggcagcctgctggtcctgggccctcggagggaggtgagaccc

SEQ ID NO: 470119 - DNA, 122 bp, Homo sapiens
cactttggagaaaatgggctcgtttgacaggatggcctggtgagggaacacaggtactaacggtaacaggccgatgaacactcaccactggcatcagggtggagctcagctgactggacact

SEQ ID NO: 470120 - DNA, 122 bp, Homo sapiens
tccgggttcagggtggctctatggcgagaggctccgggacggagagacgggatggttccccgaggactttgcccgcttcatcaccagccgtgtggccgtggagggcaatgtccgcaggatgg

SEQ ID NO: 470121 - DNA, 122 bp, Homo sapiens
tgccactgtgggaagaggctacaatatcgaattttttttatatgctgcagctgagattgccgccgaaacgcacttcctaattcgcagtgaccttcttaacacttctcctttcctcctcctag

SEQ ID NO: 470122 - DNA, 122 bp, Homo sapiens
tagtgacacagacttcaggcatgctctgtgcctcatggatactgacacagacttcaggcacgctcagtgcctcgtggatattgacacaggctttgggcacgctctgtgtctcatggatattg

SEQ ID NO: 470123 - DNA, 122 bp, Homo sapiens
gctcccccacctcccacacttgctcctccaggcctctcccccatctcctcggaaccaaggcgctgcacctggaaaagtgcagcagagcaagacaggacttttcgggcagtggtggtggggca

SEQ ID NO: 470124 - DNA, 122 bp, Homo sapiens
ctctactccttcagggaggaagatatttcatcatttccagaagtgattagaccttgctatcgtgtttctgagtgagaaatcagtgtctgtgggggaaaccgtcagctctcttgtgattctaa

SEQ ID NO: 470125 - DNA, 122 bp, Homo sapiens
gtcaagagtagggcctggagcccgacgtcctgggtctgaattctgcttagcccctttggacgaaaacttaacactcaatgccacttctttcctgtatgtgaaatggggctgatcaccacagt

SEQ ID NO: 470126 - DNA, 122 bp, Homo sapiens
gcatgactgcagggaaaacatgagactctcaacgaggtacccaggctaggaaagctcccacggggccctctgctgacccgagggccataaaacagagaagtggttttcctgtctcactgaaa

SEQ ID NO: 470127 - DNA, 122 bp, Homo sapiens
aagacctcttcaaagggtgtgtgtgggtcagggaggaagctcctcggtatcacccccacccggggttccttggcgtgtgtcctaacgagtccttggaagctcacagcaggcatgtggggagg

SEQ ID NO: 470128 - DNA, 122 bp, Homo sapiens
agcagaaccctccccggcactggggtagttgctggtaaagccctgagggtcccgccagcgcgtgagttggaagctgaattaccgcgagaagtacagtcttgccgaggagacctctgggaagc

SEQ ID NO: 470129 - DNA, 122 bp, Homo sapiens
tctggggctcccactcccgggacacacacgcgggctggcttacacatgctcttgctctctcgcgctctgggagagcgcttatatgggcttcatgaggctaagtaataaacactttgtcttca

SEQ ID NO: 470130 - DNA, 122 bp, Homo sapiens
tctctgacatgaaccagctttcagagtctaacgactagatttgactttcagctgctcggacggaggcttcaactcagcctgaactagccgcgtggacagcagccgtagccctcacaaggcgt

SEQ ID NO: 470131 - DNA, 122 bp, Homo sapiens
acctgtttgaggtccattggcatgggcgggttaaaccatgttctgccagacggggagcagcgtgcgccgggtcgggtctgggccgtgggctgagaaccggactgcgatgttgcggccctgcg

SEQ ID NO: 470132 - DNA, 122 bp, Homo sapiens
agcagtgagtccagttacctggagacccggacttaatggatcaggactggtccctacccacgtgacacagatgtggcattctggttcgttattaaatcctggattcacagcctgggacattg

SEQ ID NO: 470133 - DNA, 122 bp, Homo sapiens
cctcacccacggggctcgggatggccgcactcacgccttacccacagggctcgggatggccgcactcacgcctcacccacggggctcgggatggccgcactgtgacttccgtgcctgagaag

SEQ ID NO: 470134 - DNA, 122 bp, Homo sapiens
gataggggccacccccagcccctcgcatcccctctgctgggccaacagaggtcctgtacccgggttccctgtctacaccagtggctcccacgggtgactatgtcccccaggggacatttatg

SEQ ID NO: 470135 - DNA, 122 bp, Homo sapiens
agatgcaggatccagacagagtttaatcagctgcgaaatatcctagacagagtggagcaacgggagctgaaaaagctggaacaggaagagaagaaggggctacgaattatagaagaggctga

SEQ ID NO: 470136 - DNA, 122 bp, Homo sapiens
gcggtgtcctgccacgacgccgccgtctccagagccaccacacagttgactgtccttacccggcagtgctcaggacctcagccgataaaccacaacctggacttgccgcctccttctccagg

SEQ ID NO: 470137 - DNA, 122 bp, Homo sapiens
attcctttctccccgaaggggttaaatgtccttccagcgctgctgctgtcctttcactcccgttcttttccgccccccaacaaccgcgtggtcggcttggaaaggcgaactataattcccag

SEQ ID NO: 470138 - DNA, 122 bp, Homo sapiens
ttttttttttttttttcagtttcccttttttctcctatgcctataagaaagttcatatgtcgcgtcatataaacttttcttttttttggagatggagtttcgctcttgttgcccaggctgga

SEQ ID NO: 470139 - DNA, 122 bp, Homo sapiens
tgacattttgttactcagctccaggaaactaagggagaaaaagcaaatggggaagggaaacgggatgctgagggttatgtttgcagtttagactaaagagccacttggacgtcctcactaag

SEQ ID NO: 470140 - DNA, 122 bp, Homo sapiens
tgtgtgtgggtgtatatatacacacacacatatatatacacacacacacgcatacatacacgtgcaaggcatctgttaggagctgacacttaaaataaggccagagagagtggatcggtttt

SEQ ID NO: 470141 - DNA, 122 bp, Homo sapiens
gggctgaaatatacacgctcgcacagctgagtgctgttcatagtaaatggcacaaaagatcggagagtcttgaaaaaccggcgcagaaaagcaaggacttgcccgctgcctggagctgtgcg

SEQ ID NO: 470142 - DNA, 122 bp, Homo sapiens
cccgaaagcccccgggtgcagggtcccactcctgaggctcctgcgccaggcccaccccagcggtcttcgtagctcctgggacagcagtcagtctcgtacccccatgcccggttctggttatg

SEQ ID NO: 470143 - DNA, 122 bp, Homo sapiens
tcccttctggaaaaacagcaaccttcaaacttcagtgtctctcagctgagctgttgcctacgcccgaggatgagtgtctgcgctaaacaagagctgcccggatcggctgcccttgccctggc

SEQ ID NO: 470144 - DNA, 122 bp, Homo sapiens
tatcatcttttcagagaaatcttctaactttctaatccaaagtggaactcccctgctccccgttactttctgtaggtctgtcattgttgtttccataccacttattactagctggcattatt

SEQ ID NO: 470145 - DNA, 122 bp, Homo sapiens
tgaaacatagacacaatggaagtgttccatatgctcacctgacattggattgcttctactcgataagggttaaaactcttttggcatttacaacagagttgtttgaaataaacctaaagaga

SEQ ID NO: 470146 - DNA, 122 bp, Homo sapiens
tatttgcctttttggcccagtgtccacttagagttgccgtgggactgattactacacaaacgtctttagagctgtgcaaattaggaatcagctcaatattgcttaggactgacagagctagg

SEQ ID NO: 470147 - DNA, 122 bp, Homo sapiens
ccggctgcttccccacccagtcccgcaggccgcccgggaaaacccacatgcaagcacacacggtgccaccattcacctgcgcggtctccggcacacccagggcccccgcaggggcccagagc

SEQ ID NO: 470148 - DNA, 122 bp, Homo sapiens
acctacatccagaattcagagccttttcttattgtcatacatcaggcattgcttggccaccgttaattttaatattgggtgtccttttgtcaaaggaaatttggggatctatacgtggctct

SEQ ID NO: 470149 - DNA, 122 bp, Homo sapiens
ggcttaagctccgatacctgctgcgagcttcccacagctccttcctctgacctttcgtggcgctcctcgcagccaagtgagcagagcactgctagccggccaggccggttgtcatggagacc

SEQ ID NO: 470150 - DNA, 122 bp, Homo sapiens
ttctggtggccctgaagcaggtcgtgcttgtccttcctggatttccccgcatccttatcccgcttggcgcctcggctgctctggcttttacctggcttctcctctttgcttttcccacagga

SEQ ID NO: 470151 - DNA, 122 bp, Homo sapiens
aaaatcattaacatttaatttatgattgctgaggatctttgcatttttccaataaaaatacggatagaataacagtgagaaagtggccacggatttacagatgctctaaaatatgatataag

SEQ ID NO: 470152 - DNA, 122 bp, Homo sapiens
gaactgtcgaatggtgaaaaaagaagtagaaatcgtggcccacctccctcttggggtcgtcgccctcgagatgattatcgtaggaggagtcctccacctcgtcgcaggtacttgagagaaag

SEQ ID NO: 470153 - DNA, 122 bp, Homo sapiens
gggacgcctcccccacccccaaaagcacgcaaacaggaaagacttcagccaatggcaggccgcctatgcggggcggggccctggcgctagccaatggtaggcagtgtagggtgaggggcggg

SEQ ID NO: 470154 - DNA, 122 bp, Homo sapiens
cgctgagcagcggggcgggaccaaaggaaaggaccaagctcggttgaggcgcggcccagccgcagccgcagtcacagcctcagccgcagcggccgtgctacctaggtgatagcggagcggct

SEQ ID NO: 470155 - DNA, 122 bp, Homo sapiens
tcgccgggacaaccccaccgccccgcaagtccagcccggcctcgggcacggtagggtttgcggttaagcttgtgacctttagacttctgaatattcatatgtatgaaatgtgatatacataa

SEQ ID NO: 470156 - DNA, 122 bp, Homo sapiens
cctacaagtggcctacagggcacaggtgaggcgggactggacagctcctgctttgatcgccggagatctgcaaattctgcccatgtcggggctgcagagcactccgacgtgtcccatagtgt

SEQ ID NO: 470157 - DNA, 122 bp, Homo sapiens
tgcctcgccagcgctccccccaggcggcctgccgcggcgtcgagcggcaggaagcagccacgctcaaaccggtttcagctgctccagaccaaactgccaggccaccccgcggggcggggccg

SEQ ID NO: 470158 - DNA, 122 bp, Homo sapiens
tttggcctatttttcaactgtctaaattttcgccgccaaagtcgccaaaaccgcctccgccgcagcctcctcaaaagccgcccccgccgccgctgcagccaaagcctcctcctcctcctctt

SEQ ID NO: 470159 - DNA, 122 bp, Homo sapiens
tctcctgctgtgggcggactgagcctgccgccaggtgtcttaacagtgcttgacttggcccgcgaccacttaagcctaggagcctaggctatttttagccatcttctagaatggtggttctt

SEQ ID NO: 470160 - DNA, 122 bp, Homo sapiens
ttcttctaatgtgatagaatcctccagttttgaccagaacatgacttccaagaacagaggcgtccttgtatctttcatggccatgggactgagttctggctattgcagagtaagcgtaagtt

SEQ ID NO: 470161 - DNA, 122 bp, Homo sapiens
ggcgggcggacgtgacgtaagtgtcgcggctcgcttggagtggaatgtgtcagggacagtcgggacttctaaagggaggggaagggccctatgattgggctgtgacgcgtgagcgcattaat

SEQ ID NO: 470162 - DNA, 122 bp, Homo sapiens
aatatttaatgaaataaatacaaatatttaaaatacaaggaaactgaaagtaataagcgacgcgaaacaagaaagaaacataagggaaaaagagaatttaaaaactgacaaccagcaatgaa

SEQ ID NO: 470163 - DNA, 122 bp, Homo sapiens
aaatagggtgactccatctcaaccaccctcctccctgtactcacccaaccaactgactctcggagattgcccaaccaaagagcagaagttcacagaatatctcttcttgggtcagcacccaa

SEQ ID NO: 470164 - DNA, 122 bp, Homo sapiens
gaaggtgattaagttttaaataccaaagtttaatggattgcagtgagatttctgctgatgcgcagtgactctcaggctgccctgtagtgacgtccagccggtctcttgctcagtaagcagat

SEQ ID NO: 470165 - DNA, 122 bp, Homo sapiens
aaatatttatgttgttgactcctcccgcaaacttgtcctctgatcattttgtgttgcagccgtgaaacaggcttgctggacgggaagaaatgctgcagagagagtggctgactcaaacccat

SEQ ID NO: 470166 - DNA, 122 bp, Homo sapiens
gctcgcgcccggagaggaggggccgctggcgcagcgccccgggaccccgagaggccgccgcggcacatccagacctccgccgctcccgcgccctctcaaccatcctgggattcccgggccca

SEQ ID NO: 470167 - DNA, 122 bp, Homo sapiens
agcagcgctgggcacaaacatgggagggcctcgtgattgggactggggcattcacaggcccggcaggctggtgagccggtgcctggcaggtggggaggacatggtgtgagaggcggcctgcg

SEQ ID NO: 470168 - DNA, 122 bp, Homo sapiens
ccatcttcagactccagctactgggttgccatagagacagcaaacaactcctggagcctgcgcagaagtacagctgggcggacttgcaggtggcggtggaggcaagtcctctgcggggcgga

SEQ ID NO: 470169 - DNA, 122 bp, Homo sapiens
gctccttttctccccgccctcagtgaacagcatccatccctctgtcgcagccactcgcgccgtgtgactctatcatataacgatttgtcttggggtcttgtctgaaataatttgaactgcca

SEQ ID NO: 470170 - DNA, 122 bp, Homo sapiens
ccagggtcattaacggaccatgggctgctgggaaacggcttaggagcagcacccggctggcgctggccggccggcgccggggactttcttccgcctggccagacagatccctgttttttgtt

SEQ ID NO: 470171 - DNA, 122 bp, Homo sapiens
ggattggaagtgaggctggcatagtttaccggagtcagcaaaataaagaaagagggcagacgtcatgtgttcctgacaatggggagccacagagagcatggctatgggggaagctgttggct

SEQ ID NO: 470172 - DNA, 122 bp, Homo sapiens
tcatgaaagaaatgcaaagcaacctgtctgtggttgggggtgtagctcagtggtagagcgcgtgcttagcatgtacgaggtcccgggttcaatccccggcacctccaccagttttgggagtg

SEQ ID NO: 470173 - DNA, 122 bp, Homo sapiens
tcactcaaatagagctgagttagtcactcagctcttggacctcagattcttattcttaaccgctagggggatggagacagaagtcacaaactcacatgccaccagccatatgatgtaaacat

SEQ ID NO: 470174 - DNA, 122 bp, Homo sapiens
ttacacacaccagcgttatttattctatcagtctttggttactctatctggcgttctcgacgccgtaataacaagttcgtgccccctcacaccgccccctcattccgcacatccctcatttc

SEQ ID NO: 470175 - DNA, 122 bp, Homo sapiens
cccggtcgctatcgcgagctccgccccggagcgaggaaccagcgggcgcggaagcctcggcgccccgagccgccagccctcggagctgcgctgcggctccgcctccccattggccccgcccc

SEQ ID NO: 470176 - DNA, 122 bp, Homo sapiens
attggggcccaggccctgcggagggcgggggaagttgtcttcttttttttccggaggggccggtaaacctggtggctgaacggcaagatgaatttcctccgcggggtaatggggggtcagag

SEQ ID NO: 470177 - DNA, 122 bp, Homo sapiens
gaaagaaaatataaattaaaagtaacttaagagacatgtcaatgcactgcagagagtatccggatttatttactcttgaaaatttccatgacaaggccgggcacagtggctcatgcctgtaa

SEQ ID NO: 470178 - DNA, 122 bp, Homo sapiens
ggaggcggggccggggccggaagtcacgtgctgtgacagtagctggggtgaggccgtcgtcgccgcacgggctggttggggctgtgtctgtgggaggcgccggggtgatggcggtggagact

SEQ ID NO: 470179 - DNA, 122 bp, Homo sapiens
gtgagagcacgtgtggcccttcagagtagctgaaatatctccgcagctgcagggagcccacgcaggaggctgcttcagcggcccttgagaaggctggtagtgagggcccctggccagaatca

SEQ ID NO: 470180 - DNA, 122 bp, Homo sapiens
gctgtgcgcaggcgcagtggctgctaccgcaggcagggggcggcaacatggcggagtgagcggcggcgtcggggcttcacaacaacagtggtggccgtagcagcggcggcagcagcgtcaat

SEQ ID NO: 470181 - DNA, 122 bp, Homo sapiens
gagcgctggggctagtacagctcggagggactcagctcttcccggaagacaggtagagggcgtggggtgggggcggcaggatcactggggaagggcggccccggcaaacatttgcggcctga

SEQ ID NO: 470182 - DNA, 122 bp, Homo sapiens
cccagccaattgtatggacagtcttttgcctggcgtgggggccaagtggacaataccacacggaggacggtgctgaaaatttcaaaggagaaccgtctgaggcggctttggcatttctcctt

SEQ ID NO: 470183 - DNA, 122 bp, Homo sapiens
atccagtagtattcgcactccccctacctgtctgcgcgtaaggggccaggggctttaaggcgaaagtgtgaggctttagcctaaagtgagactatttagccgggttagaaggagacgggtta

SEQ ID NO: 470184 - DNA, 122 bp, Homo sapiens
gcagagtcggagcagaaattgtgtggacaaacgctcccgggttgcccggacgacaggccccgcccacttgagctccaggaaaagagcgcagccgcgcggaggctcttccggccggcgccccg

SEQ ID NO: 470185 - DNA, 122 bp, Homo sapiens
ggcgcggagccgggcgggccgggccgggcaggggctgagctgcgctggaactgggccgggcggcgccgggcccgggagggaggggcgcgcggggggcgggggcagctctcccaacgcggggg

SEQ ID NO: 470186 - DNA, 122 bp, Homo sapiens
cagctggggagtagtggatgtctgcaaaaaccagaagcggcaaaagcaggtacctgctcacgcccgagactttcacatcaacctctttcaagtgctgccctggctgaaggagaaactccaag

SEQ ID NO: 470187 - DNA, 122 bp, Homo sapiens
gccctggcaaggacatgacctccccgccccctgccccttcatcccatcagccagccgtagcgcggggaccctgccctgaccccgggatgaccttgaaccaccgtcccctccaggggcctggc

SEQ ID NO: 470188 - DNA, 122 bp, Homo sapiens
catatcccggacaagacccagaagggaagcccccagagccaagggtaggagggccccacccgggtctcagccactcacttctccagggcggatccgagacactcacaggcctcagggagggg

SEQ ID NO: 470189 - DNA, 122 bp, Homo sapiens
caggacctgatcaaggggaccgcctccggtccccggccgtgggcaccgggacgagcacggcgtccccacgccatcgatgtgtcttagagccggagagtctggtttccgaggacccacagtcg

SEQ ID NO: 470190 - DNA, 122 bp, Homo sapiens
acgccttccaaaagagcctcaacgactccatccagcctgacccgctctgtctgcacaactcgtcactctttgctctgcagaatctgcagccctgggaggaggatagttccaaggttcccgct

SEQ ID NO: 470191 - DNA, 122 bp, Homo sapiens
atattatttgctttctaggaacaaaatgtattagaatatgatggagaagactaacgaaaacgggtggctgtgctgactcctcacgacttaggaatgttgatggtccctggtctacacaattt

SEQ ID NO: 470192 - DNA, 122 bp, Homo sapiens
ggcccggccaggccttactctctccctcaggggggttgttaccttgtgtggggctgggggcggggcggcgggaaggggtcggggcaaatgagcccagtggtagtggcggtggcagcagcagc

SEQ ID NO: 470193 - DNA, 122 bp, Homo sapiens
agaaaggctacagaggtcaattcagtggaacacggttctcccaaacagattttgtaattccgaaaatccacgcatgcgcaaacatacgcatacactcccatgttcctggacagtttatagct

SEQ ID NO: 470194 - DNA, 122 bp, Homo sapiens
gaaagaccacccactaattctatctacccactgccattctcaagagttaaatcttgtttgcgtggactcatgccagggcattccgggtggtaagatgctatttgcttttgatggtgcaagtg

SEQ ID NO: 470195 - DNA, 122 bp, Homo sapiens
ccggagcgggacctgtgagtctcagcctcctcccaggccatgttctcaggcttttgaacccgggagatacagcttgcattgggccgagatcgagccactgcacaccagcctgggcaacagag

SEQ ID NO: 470196 - DNA, 122 bp, Homo sapiens
gggctgggtggtgtcctggcaggcgctgagcggagatcttgcaggcagtggccttgtcgtcgaagtctggcctttcccgaggccggaaagtgatgctgtcagcgctgggcatgctggcggca

SEQ ID NO: 470197 - DNA, 122 bp, Homo sapiens
atggtctttacctgggtggctcaggtcccatcagctggacccaacatctgttgatgccaacgatattcattgtgaagggtccttttccatgggagcccacgtgagtgacagaggtaagcata

SEQ ID NO: 470198 - DNA, 122 bp, Homo sapiens
gataatgagtccaacgtgaggataaagtatccaatcagtgaaggtctttttagagtgaagcgctcataggtggtttagggaaatacactaagagtcaagggactgatccaatgaggacccag

SEQ ID NO: 470199 - DNA, 122 bp, Homo sapiens
gtctctacaaaaaatacccccaaaaaccacaattagccagacttggtggtgcacaggtcccggctacctgggaggctgaggtgggaggatcccctgagctctgggagttgttgaggctgcag

SEQ ID NO: 470200 - DNA, 122 bp, Homo sapiens
gcttcaccacactggcctccttaatgttccctaacacgccagccatgctctgccacaggacgttggcatttcaattttctccccctgcaagactcttccccgctaacctagaaggctggctt

SEQ ID NO: 470201 - DNA, 122 bp, Homo sapiens
tacatcctctgtgatattgttcgtaatatccaatgcgggagatgacgttgctcccagtatcgaagggcgtgtaccccctctctctgtattgttgttcatgatattcaaggggggagatgact

SEQ ID NO: 470202 - DNA, 122 bp, Homo sapiens
ctcaggctctatcaccgggaaactgtccatatttgcctttaaggatatgcaaatagtgaacgactccttcactgtgaaggctgagaaactaacacaggaaaaaactactgaaaaccagtcag

SEQ ID NO: 470203 - DNA, 122 bp, Homo sapiens
ggtgatccgcccacctcagcctcccaaagtgctgggattacaggcgtgagccaccgcgcccggccagaacattagttttaaacttcctaacccttgggagaaggcaaaacacttgatgaaat

SEQ ID NO: 470204 - DNA, 122 bp, Homo sapiens
ggccggcccccgagagccgccgacatgaagaaagacgtgcggatcctgctggtgggagaacgtgagtccgcaccctctggccggcccctgagtccctgccctccctgcccctgcagcccctg

SEQ ID NO: 470205 - DNA, 122 bp, Homo sapiens
tgccgctgtaagagctgtgacattcgccgggaaagtctgcagcttcagtcgtgaagccagcgagatcatgaagctaccagaaggaagaaactcaacacgtccgaatattagaaggaacaaac

SEQ ID NO: 470206 - DNA, 122 bp, Homo sapiens
tcctgtgcgtgactgactgcgagcgcctaagggactctggccaggctgctggactcggggcgtcgccggggaagagtttaagggagctggagatgccccgcaccaagatggcagctggggga

SEQ ID NO: 470207 - DNA, 122 bp, Homo sapiens
ctccccacaacctcacggatgcaaacatccacgagctggcccggaagacggaaggctactcgggcgcggacatcagcatcatcgtgcgggactctctcatgcagcccgtgaggaaggtgcag

SEQ ID NO: 470208 - DNA, 122 bp, Homo sapiens
cagcatgcctgtagttttcagcgagtcacctaccactaggaatggggtcctcactgccagcgggttagtaggtgatccagtttcaaaactgcattttagttcagttttcttcctcctcagat

SEQ ID NO: 470209 - DNA, 122 bp, Homo sapiens
ccggagacttaatcctcgttagtgatgatggtgagcgccatagtaattcactggagccctcgttagcctcgtggggaaacagacatttaggagaatgcctaacacatgtagagctcttgcta

SEQ ID NO: 470210 - DNA, 122 bp, Homo sapiens
aagacgagacccggagctcgggctgaagggagagacaaaggccccgccaatcccggaagccgccctgtctgctccagctgcatgcctgattggacagttcccagcccagcgtccctgactgg

SEQ ID NO: 470211 - DNA, 122 bp, Homo sapiens
gaatgtaggaaaaccctccccgctaattcccaccacccctactctgcctctggtcacaggcgatggagtccaggcttgagccaaatgtaaccagcccgcaagggtcaagagggccccagggg

SEQ ID NO: 470212 - DNA, 122 bp, Homo sapiens
tggggtgacgtaactgtctgcatgcagctggtctggagcccggaggctgtgactcccctccgcccgcctccgggcaaagtgcgcggaggagccggcacggcgaggctgaagttagagaggcc

SEQ ID NO: 470213 - DNA, 122 bp, Homo sapiens
ctgtgcagccgtttctccaggcatgagacagagctggtggtgtccgtgcacaggtgcacacgcatgcacacacgtaagcaccggtgagcacacggacacattacaggactgcgctcactctg

SEQ ID NO: 470214 - DNA, 122 bp, Homo sapiens
cagctgtactaccactggcaggccttgcagatcctagacgagctggcagcgaagctcaagcgcaggatgcggaaatcttcctcacatcaaatatttgaaaacaaactagaaactgtccaacc

SEQ ID NO: 470215 - DNA, 122 bp, Homo sapiens
aagtgaatttttgctaagcgagcaatacccgcgcttcggtaagaactgtcacgcttagagcgggccaaccagcttccaccatccagatggcggatcctagattggcagcctgcgtctctcta

SEQ ID NO: 470216 - DNA, 122 bp, Homo sapiens
cactttgggtttggttaatttgctggaaaagctcacaaaactcaggaaaacggacatttacgagtttattataaaggatgttacaaagatacagatgaagagatgcatagggggatggggac

SEQ ID NO: 470217 - DNA, 122 bp, Homo sapiens
ctgtgtcgttttgtggcggaatcacgttctgttgtgtgtatacaccacgtttttcttgtccgttcacctgtgatggactcttgggcgtctgccgtaggccgctgtgaatgctggcggcggtg

SEQ ID NO: 470218 - DNA, 122 bp, Homo sapiens
aactccaattagccaacagtggacaagcaataaaaataaccacacatgatacaacatgcacgaattttattattttttttttgagacagagtctcactctgtcacctggtctggagttcagt

SEQ ID NO: 470219 - DNA, 122 bp, Homo sapiens
atcttggccgctacgtgtgacgccacacgtagcagagagcgcagccgattggctgggagacggcagcccaggagaggcgcgcgaagccagagacaggagggtatgcaggagaaaccaaggga

SEQ ID NO: 470220 - DNA, 122 bp, Homo sapiens
acccagtccccaccccccgagagctggcggccagctcaggatgccaggcggccaggcgggcgccctgccaaattccgcgttcctctccaggagacggggagttgcgtcccaggctcgggaaa

SEQ ID NO: 470221 - DNA, 122 bp, Homo sapiens
atcacacactgaactgccctcctggagtgaaatacaccacacaatgcttaactgtttccccgctggtgtttactggggaagcactattatctcaggtatggaacaagcaacagaaggcaggc

SEQ ID NO: 470222 - DNA, 122 bp, Homo sapiens
cgccaatcaaagcaggtgcctgtctccgagcgtgtgcgtggaaagcaggtggagggtagccgggatcttgcttataacaaacccatcacacacgggggaaacttttgcaagaaaaatgatta

SEQ ID NO: 470223 - DNA, 122 bp, Homo sapiens
gggtggtgctggggggccccctggtgccgtgggctgggccagtggggctggtggggctggcgtccaggccgagctggcccagggtggagctgttgaggctgcgcagccaggccctgacggtg

SEQ ID NO: 470224 - DNA, 122 bp, Homo sapiens
agacaacacgttactaagattagaagacctagattataatcctagctatcactattttgacggaaaatatgaattttaacatgacaatgaaataacagtgaaaggagtttgtcagccactcc

SEQ ID NO: 470225 - DNA, 122 bp, Homo sapiens
tgcacatctttgctaaaccccaaaactagctcagggtactcctgggacctcaggacttcacgcagagcaaccaagaaaaaagacacttccccattgccaccaaaacctcctggccattcatt

SEQ ID NO: 470226 - DNA, 122 bp, Homo sapiens
attaaaacatgaacaacagctacatttctaagagggcagaataattagcaaattcaagaacgaagaatctggctgagtatggcacctcaaacctataatcccaatgctttgagaggctgagg

SEQ ID NO: 470227 - DNA, 122 bp, Homo sapiens
gattgtaaccttcgcactaggcatccaagaacgtgctttggacacactcggcggtgggagcgggtgcttggtttgcatcagggatgaggggtggagtagcgaaagcgcccggagcgcgcact

SEQ ID NO: 470228 - DNA, 122 bp, Homo sapiens
ttccgtggctggttcggatgcctctcccccctcctcacaatctgcctgccagcagtgcttcgtgctctgctgaggcccaggagcactttgtgaattttcttagtctgtctgatattatcaaa

SEQ ID NO: 470229 - DNA, 122 bp, Homo sapiens
attttaattgtatagcaattatgtgctcagtagtaatcaaggggaaattcagtagccaatcggcttttaccactgtgaaatgtacagactttgtggttcacagggtagaagacttctgtttt

SEQ ID NO: 470230 - DNA, 122 bp, Homo sapiens
gatggtgaaaaggtcaggaagaatgaactatttcatctgtaagtttcatttgagcccgaacgttctatgaaaggaacccatcagttctcaatgtatttgtctccttgcttctctgcacttgt

SEQ ID NO: 470231 - DNA, 122 bp, Homo sapiens
catcacttcataacccagtatagtaggtgtagatggtctatcttcccaattcactgtttccggattttgttcttcagtgtctcttggtctagtagaatactcaatggaagaagctgtacctg

SEQ ID NO: 470232 - DNA, 122 bp, Homo sapiens
gtcaaagaaaggaatcaggaagttttagctccaagagtcatgcttgtctgtccaaggccacgcagtcagcaaatgccagtggggtgcccttggtctgtctgactccagagccagtgcacatt

SEQ ID NO: 470233 - DNA, 122 bp, Homo sapiens
tcgggaggctgaggcagaatggtgtgaacccaggaggcggagcatgcagtgagctgagatcgtgccactgcactccagcctgtgtgacagagcaagactccgtctctaaataaataaataaa

SEQ ID NO: 470234 - DNA, 122 bp, Homo sapiens
gctctgcgagccactggcttctcccctttccacaatgcagggagtggtccccacggagggcgtgagtccctgcccccacttcaggtattagcttgttctgggcttcggctattaccaacagc

SEQ ID NO: 470235 - DNA, 122 bp, Homo sapiens
aggcagcgtttccgaagccaggactgtggttgtcggcctttgagttcccttgaacgcaatcggagaccaggcgtgtcccgccagacccttcagacccaggctaaacccaaatctgggtcgcg

SEQ ID NO: 470236 - DNA, 122 bp, Homo sapiens
cgtgccacttccgcttccttcttctcgagccttctggaaagattctacccaatgggcagccggtccccggagaacggccgccgttgccatggcagcgacagggccgctcccgtgccattggc

SEQ ID NO: 470237 - DNA, 122 bp, Homo sapiens
ccaccatccgggccaccatcatgaggtccaacctcccactccttctacttactttccactcgctcagccttctggtgaatcaaaatctgatcaatctggaaagagaggggcggcgcgcacat

SEQ ID NO: 470238 - DNA, 122 bp, Homo sapiens
aggcgtcggcagagctatgctctctgaaggccccaggggagagcctcttcctgccttctgcgtggcttcgggtactgccatagcccttggccctcccgggctcggagaccgtcgctgcactg

SEQ ID NO: 470239 - DNA, 122 bp, Homo sapiens
tttatcagcttgtggttcagttccacctcggggatgtagactggctttgttgagattcctcgcagttttgatgctttctggaacatgccagggggttagtgcaggcagctctggtgaaacgg

SEQ ID NO: 470240 - DNA, 122 bp, Homo sapiens
aagatgccacattcctgcagcctctcttggtgcagtggaatacagtcttgggcgaggtggcgtggatgagctggtgaaagaggatgctgcccacatccaaaggctccagaggatcctggcct

SEQ ID NO: 470241 - DNA, 122 bp, Homo sapiens
tggggttgttacggcctgtttggggttgttcctctctgttcggggttgttactgcctgttcggggttgttactgcctgtttggggttgttcctctctgttcggggttgttactctctgttcg

SEQ ID NO: 470242 - DNA, 122 bp, Homo sapiens
caagaaggtgtggagaaggcgttagggtcccggcacccacgggtcagggcagaacgccaacgagtcgcactgcgggtctccgcggcttcggtttccatgacatggtgacgccggcggcaagg

SEQ ID NO: 470243 - DNA, 122 bp, Homo sapiens
gaagctcagggcacagaagagctgatttgggctcaatgaaggactaaattttctcctgggcggcttctcatgctttgaagaagtctgccaaatctgagaaatttggcacatggcagactcta

SEQ ID NO: 470244 - DNA, 122 bp, Homo sapiens
ctgagaaggtcccttcggtgaaggcgagttccgggacaacagagagggccgcaccgtttccgagtctctcggaggctcagttctcagcgcaccattccccacagctctcctttttactttac

SEQ ID NO: 470245 - DNA, 122 bp, Homo sapiens
ctgtgctgagagtataatcctgcgggctccgcagagaagtggccggcccggagagggtgacgtcacctccctctgcgcgtgcgcttgcggagcgagggcggtgcctgccaaactgatgcaga

SEQ ID NO: 470246 - DNA, 122 bp, Homo sapiens
agtgcgggacataccacactgcacgctgtaatgatctcacagccacagcctgtgctaccgcggtgagctcaagtgtgtcggtatccgcttaaaacaccgtgtgacactaatcgtctccgcgt

SEQ ID NO: 470247 - DNA, 122 bp, Homo sapiens
ttcagccctccccggtgcttcccggtttataacttcatctactcgtgacacgtgggggtccgccgccgccactggcagggtgccttgagtgcttgagttttcgcccccagcacaggtggaga

SEQ ID NO: 470248 - DNA, 122 bp, Homo sapiens
gtggtgtcccagtggctgcggccacgccaggcattctgccccgcggcggctgcacagggacgagaactgagaacccctgctcaaccccatccggggtgactgccaaatgcctatgccagcgg

SEQ ID NO: 470249 - DNA, 122 bp, Homo sapiens
taggcagaagttcacttccattgcagcactgcagtgcaggcacctaaagatcaaaggggacgtggaaatataaaggctttgaatatctgggtaagaaagaacagctcctctcaaataagatg

SEQ ID NO: 470250 - DNA, 122 bp, Homo sapiens
aattaagccttaaaccactcaggaaagaaaagcaaaaggcgcgtggggatgtttgcactgcgcccctcccagctgctctggccccggagcaggccagccgcgagccgccccactcccagccc

SEQ ID NO: 470251 - DNA, 122 bp, Homo sapiens
ggagtagcaaggcgggcgggtagaggccgacgcgcgcccattggccgactcggctgcgggcgtccccgtggccacgtgacaataacaccgctccagccgggggcctacgcgcgggagaaagt

SEQ ID NO: 470252 - DNA, 122 bp, Homo sapiens
aaggcaccccctagaggaacatgcacttctggactggccccaggttccagcttgggttggcgggcgtgccagcagctcagtttgaaacctctcacattgaatcaagggccagaagcagggcc

SEQ ID NO: 470253 - DNA, 122 bp, Homo sapiens
ctgtgaaaggcacactgtaacatccacaaccaaatcctctgaagtcctgtcagggcaggccgagcgttcatacacactgtcaagagagagacctcaagcacaaattacagagaaagaaaaca

SEQ ID NO: 470254 - DNA, 122 bp, Homo sapiens
ggacccggcagggccaggtttgggccgcgagggccgaggagcagcgaggtgcaggggctgcgagggccgagccgggcgctgagggtccggcagggggcgtggagggggcggggcccggaggg

SEQ ID NO: 470255 - DNA, 122 bp, Homo sapiens
accagcctgggcaatagagtgagactctgtctctaaacaaagaaagaaaggaataccttccggaacgaatgaatgaatgcatgcttattttgcaaggttgccaggaagatgtaaataatgca

SEQ ID NO: 470256 - DNA, 122 bp, Homo sapiens
aaaaaccttaaagtgaatcatgtttattcaatttccaaacaagtgcaaagacccaggcagcgtgcttcatgtttggactcttgaagaacacacatggaaaaaaaaaaagaaaaaaacctctt

SEQ ID NO: 470257 - DNA, 122 bp, Homo sapiens
gctctgcagcgcgggggagcgcaggctggaggccgggccactgaggtggccccggctgagcgactggcgtcggtttctcctcctagcgctaggcgggagtgggaccccgggccacagcaaga

SEQ ID NO: 470258 - DNA, 122 bp, Homo sapiens
gtgcaccgtcatgatgagggtgtcccccgggcctggggaacagggcaggaccctgcttcccggagggaaataatgaagactccgccagcctgccagccagaaagagatgccccacggaaggc

SEQ ID NO: 470259 - DNA, 122 bp, Homo sapiens
aatgccttcttcactttccacagctgaggggagaaatcaggaaatagttcctttaatattcgaaggccaggagccacgaatgaacgacccagacagtaacgggtaggacctgctgcccatgg

SEQ ID NO: 470260 - DNA, 122 bp, Homo sapiens
atatttattcttccccatgttctaataaatgatatctctaaaccaagcttgtccaacctgcggcccataggctgcgtgctgcccagggtgactttaaatatatcccaacacaaattcgtaaa

SEQ ID NO: 470261 - DNA, 122 bp, Homo sapiens
ggccactctgaggctgcctacaaactttctgctgagtgccgacagctgcttcctgctctgcggggagttcttccagatcctgatcaaggcacagagaattgatctatcagattaaccaggaa

SEQ ID NO: 470262 - DNA, 122 bp, Homo sapiens
actgaggctcagagaggttaagtcacttctccaagatcacacagctaggataccacattacggtgggcaccatcatcaaagatcactcatttatcagatgcctaattatccacagcaccttt

SEQ ID NO: 470263 - DNA, 122 bp, Homo sapiens
gcgttgagagatggagcccaaagaccagccactaatggtgagcgccctccctcgtgttcccgcccccccagtctgcgagtgcccgacgccgcctcccaagcctgcaaccccggcgacccctc

SEQ ID NO: 470264 - DNA, 122 bp, Homo sapiens
gtacacgcctggggagacggggcctcactgtcagggggagaccagccaggctgccctcaccgcgttctctctgtctttcgcggcagccctgcagtcctggtcctgatgagtgggagccacag

SEQ ID NO: 470265 - DNA, 122 bp, Homo sapiens
agagaatggcgggagcaggcacggaaccggcttttcctccttcctgcagcgtgattggcccgcggctcagggaggcgaccaatgagtgctctcgcggagagcgacggggcaggccaatatgg

SEQ ID NO: 470266 - DNA, 122 bp, Homo sapiens
acctcctcaaccgccacggcacccaagagacgggcatggctgcctgcaccttcaccctctcggtagcgaagcacagctcagagaaatggctcccacgccaacctgaggtgtgaccttgagcg

SEQ ID NO: 470267 - DNA, 122 bp, Homo sapiens
tggtagaggataaatactgttacccttatccctggtcacatccagggagacgcggtccagcggcccaggcgggggacagtgccgttctagaggtccttgagcccctccttcctcaggatctg

SEQ ID NO: 470268 - DNA, 122 bp, Homo sapiens
gagcagcgttgggcacagccgggcgggctggcagaagacccgtgggtggcgaacagcccccgtggaggctcggttcacccaccgccaacagtgccccggaggctcagttcacccaccgccaa

SEQ ID NO: 470269 - DNA, 122 bp, Homo sapiens
ggaagtggctgagtcaggaatgctccttccaaagacaactttattatccttcagtagagacgcatacactgcagcagcttgaagtagggaggcttctggaaactgtggggatgaaccaaaaa

SEQ ID NO: 470270 - DNA, 122 bp, Homo sapiens
ccgttctgcccaggtgcctggggcgaggtgccaaaggttctctataaagtgcccggctcccggcccacggccactcgccctccagcttctgccctgcctgctgtgtgcggagccgtccagcg

SEQ ID NO: 470271 - DNA, 122 bp, Homo sapiens
catcgacggctagatcactcgaatgacaccctgacacgaaaaggaccaactagcaacgtccgggacgcagctgaaatgctgcaggcacggtgcggggacaggccccggcgggcagaacgcgg

SEQ ID NO: 470272 - DNA, 122 bp, Homo sapiens
cccagaaaaatgcaccaaacttaatattttgcatccacagacgccacagggacaagagcccgtgatgtagagtttcagacaatacatttccacatgggtcattttacttgtggtagccattt

SEQ ID NO: 470273 - DNA, 122 bp, Homo sapiens
caacctcggcacatgctcacgggcaggtggtgtggcctaggaacccacaggcaagacacccggccggtgcagtacaggacagggggcagtctagaagctaagcccaccacccatcagaacaa

SEQ ID NO: 470274 - DNA, 122 bp, Homo sapiens
agagcgctgtcaagctccattcctgactgcagcaccagaaggctggtctctcccacagaacgaggatggaggcggggagggatccgttgaagagggaaggagcgatcacccaaagagaacta

SEQ ID NO: 470275 - DNA, 122 bp, Homo sapiens
aaccccagcgccgcgcgctccgtgtgcccggggcgccctctgccggcggctgcgacttcccgagcgcccgctgtgccctcgcgggcaccaacctcactcacaagggttccagcgaccgccag

SEQ ID NO: 470276 - DNA, 122 bp, Homo sapiens
aactgcttggggcacgttctttccgcgctcttgactcctacgcgccggcctatgacagctcggcgggagcatacagacctgcctctagactgctaagtgatagctgtaatgaccaattaaaa

SEQ ID NO: 470277 - DNA, 122 bp, Homo sapiens
gcggccgttgggggctgaggccgggtgagagcggccgagaccgagggctgggtgggggagcgggcctggtgaacatcccgcgtcccaggcagccatccctgttcgtccccgcagcagctgcg

SEQ ID NO: 470278 - DNA, 122 bp, Homo sapiens
gattgtaagattatatgtattataagtatataatacatatacaaaatatgtgttaatcaacggtttatgttattggtaaggcatctggtcaacagtaaagttttgggggagtcaaaagttat

SEQ ID NO: 470279 - DNA, 122 bp, Homo sapiens
ggtgaggggtgggagccgcgggtgcggcctcctgaactgtccccacctctgcctgcagcccgaggagctgactaatgctctggagatcagcaacatcgtgttcaccagcatgtttgccctgg

SEQ ID NO: 470280 - DNA, 122 bp, Homo sapiens
ataaccttcaaaaggagcactactgaacactagctcaatgatactaatatctttgttatacgcaatttaagacattttgccataaaattatatgtaagcaactacaaaaatacttaaagtgt

SEQ ID NO: 470281 - DNA, 122 bp, Homo sapiens
cgcccagagctccagccttctcggactcttcagggtgcaggatggagcctggggccttcacggaccaatcaactggtaatggggagaaggtagggattcccatcagcaaaatgccagggtgt

SEQ ID NO: 470282 - DNA, 122 bp, Homo sapiens
cgcagccccctactcctacgactgcacgaaatactgacgtgtcccgggacctcccctccccggcccgctccggcttcgcttcccagccccgacccaaccagacaattaaggggctgcagaga

SEQ ID NO: 470283 - DNA, 122 bp, Homo sapiens
aagagtgtgttgccctcatctctcaagttcttggtctgcgggggtcctgatgaagccagtcgcctctgtcagtatttggaaagctgtctactaaagctgtgtctttaacaccacaatctcac

SEQ ID NO: 470284 - DNA, 122 bp, Homo sapiens
agtggggcagccatgacgaggcgttggcggagaggtacggggcccggggaccagggtggccgggagccggcgagcagtgcaggagggcgccagggccagcgtcgtgctgcaagccaacgagg

SEQ ID NO: 470285 - DNA, 122 bp, Homo sapiens
ggtgtccacacgtctcgagcatgtgccggcggcatgcatgttggtgtgcatgtgtaatcacgcctgctgcgatctacgtgcggggacggggggggggtccatggcccggtgaggtccaggga

SEQ ID NO: 470286 - DNA, 122 bp, Homo sapiens
ggaaactgcatatagttagggactttatctacactttctaccacaccccacatcccgcatcgccattatctaccccagtaggtgacataaagtagtgactcattgaatggaatgcctgtgtt

SEQ ID NO: 470287 - DNA, 122 bp, Homo sapiens
caatcgcccggcaggccaccatcttgagctgaagaggacagcagtggagagcgcctctaacgggtgcggccgagcggaggacttttctcccgtagcctggcagccaggcgcctggagcactg

SEQ ID NO: 470288 - DNA, 122 bp, Homo sapiens
cttccccctttgcccagttcttacctgctcctttctgttttatgtgaccctagcttggtgcgctgtctgtgccctctgccaacagtggaggcagcgaggatgaagaggagtggcaaggggtg

SEQ ID NO: 470289 - DNA, 122 bp, Homo sapiens
caggctgaggagttcaccaggtcatttcatggcagagctgaaatgaatggcatatgttcccgaaagccaattcttaagaagttctggagcacggcaagtaggcacttacacacatttatttt

SEQ ID NO: 470290 - DNA, 122 bp, Homo sapiens
cagcctacaccgctaggaagccaacttcagcgagctcaatgaggggaccaaactggggctcgctttccaaacgctccgctccaaaatctgactctctctccagccccgatctcagtgtgagc

SEQ ID NO: 470291 - DNA, 122 bp, Homo sapiens
gagcaaacaaacaaaaacaccccaacagaacaatggcaaaaacaactggtaggatgttcccgttgagaaggattcccggatcacctaaagattcctcctgtcctctactgggtgttgctgcc

SEQ ID NO: 470292 - DNA, 122 bp, Homo sapiens
ggctggcactgcgtgctgcgcctcctctgagcctagcactctggcctcacagtcggtgctcgtagcatttcagctgtatgactctaacagcaattacagtcatggccttcgccgccgccacc

SEQ ID NO: 470293 - DNA, 122 bp, Homo sapiens
agcattttaaaaagtgttttccctcttccttaatctccccgtaagggttttattacaggccgtccagaccctgacccacacagcgttcgcagcacgtaccaattttaaagcctcgcgtgtta

SEQ ID NO: 470294 - DNA, 122 bp, Homo sapiens
ctccacacgtggttccctggctgctccttgtggctccacctcgcgggttttcccgcgcggcgtccacgctgggctggtgtctggttcacagtgccgcctactggagttgacatatttcgcag

SEQ ID NO: 470295 - DNA, 122 bp, Homo sapiens
ggctccagcctccaactcccccttctcctggtcctctaagccgggaacagagcagctcagcgggagataccagagaccctaaactggcgtgaggcctgctcggcatgcacatggggttacgc

SEQ ID NO: 470296 - DNA, 122 bp, Homo sapiens
cagcgagaattcgagcgtggcacccatgggccggcactgctgggggcccgctgcaccctccgtagttgctgaaccaggtgctaagcctctcactgcacggaccagcagcgccggcctgccac

SEQ ID NO: 470297 - DNA, 122 bp, Homo sapiens
cctgacctgggagtgtaccgctgtgtgtgcccagcacgcataacgtccccagacaaaccgcggccgatgcccatggacacgagcgtgtatgagagcccctacagcgacccagaggagctcaa

SEQ ID NO: 470298 - DNA, 122 bp, Homo sapiens
tcatctattcttaccctgccagtttcttgtcacatgggctgtaatttaagaatatttcaccgtagctaaacttactattttaaaaatgatgttattaacaataaactccattttgttctgca

SEQ ID NO: 470299 - DNA, 122 bp, Homo sapiens
tgccccgcgggaaaggcctctgccctcccgctccgggccggtgcggggcgtcacaaggcacgacccccagaatcccggcgtgccacgtggcctctcacgggacctggggcttgaaggttctg

SEQ ID NO: 470300 - DNA, 122 bp, Homo sapiens
ttggttttatttccaaacacaggaagctcttactcctcagaaatgtattcctcacatcatcgtccggggtctcgtgcgtattcgatgcgttcaggaagtggagagaatactgtattttatga

SEQ ID NO: 470301 - DNA, 122 bp, Homo sapiens
cagagtccccagacgggttcagccccagcggtagcagcagaagcagacactgcagagctgcgcccgcacaccacgctgccacccagtggtttttgctgacttttcatttcaagccaatttgt

SEQ ID NO: 470302 - DNA, 122 bp, Homo sapiens
aactcttggcctcaagtgatcctcccatctcagcctcccaaagtgctaggattacatgcacgagcctccgtgcctggccgagccatttcgtttgaaggcaaggattttgttttaattatttt

SEQ ID NO: 470303 - DNA, 122 bp, Homo sapiens
cctgccgagtcccagaagctgggttgaggactctcccgctgctgagctttcccactcacacgcacacgcacacctgcgcgagctctcccaggagggcaccgcccccaaccagcggggtgcac

SEQ ID NO: 470304 - DNA, 122 bp, Homo sapiens
accggcaggggagccatagctcagcccctacccctggctcatgacgccaggatgagctgccgggatccacagcctgaccccacacctgcccagcaaccacgtggccggcagcagtcccccgg

SEQ ID NO: 470305 - DNA, 122 bp, Homo sapiens
cagtgcttgaagtcggtccctcccaggtccccaatctaggtcaccagcggggaagggctgcgctgggggtcgctagagagggtgaggggcgggctgtctgcttccgaggtgggcgaggagtg

SEQ ID NO: 470306 - DNA, 122 bp, Homo sapiens
cagaccaaagtatgcctgctgtggaactcccgcccctcaggaagttgcctcaagagataccgctgatttctatgagactccccctcaccaggaagccgcctcaagagctataaaactctccc

SEQ ID NO: 470307 - DNA, 122 bp, Homo sapiens
ggtgtgtgtagacccacctgctgctgcatccggccgctgggctccagcgctttccggattcgaaagcaccctgtagttcttcccaatggccctggctcttgcccagctcttgcccagctccg

SEQ ID NO: 470308 - DNA, 122 bp, Homo sapiens
caaggcagccctggccactggtggaacgggttctctgaacgactgagttccatttttacacgaagtaggcctggggctcagagctggtgggggcagtcgtccagctgaaattcaactacata

SEQ ID NO: 470309 - DNA, 122 bp, Homo sapiens
tcctaataacgtccacacaaccccaagcagggcctggcaccctgtgtgctctctggagagcggctgagtcaggctctggcagtgtctaggccatcggtgactgcagcccctggacggcatcg

SEQ ID NO: 470310 - DNA, 122 bp, Homo sapiens
gaaacctccacctccgtcagtgctagcggcccctgctctgggctgactcgcgcatctccacgatggctgcggcaccagctgtttcttcggtggctaaagctctctggtggaaataagatggg

SEQ ID NO: 470311 - DNA, 122 bp, Homo sapiens
cagtaagtgaaataggcttttgaaatcactgacaaagcttttaaggagcccatgaacttgcgaataacagctacagaaggttttaattagcgtgctgtgaaacaaaagtcacttgacctcta

SEQ ID NO: 470312 - DNA, 122 bp, Homo sapiens
tcaaaaaggacaactttaagcagctttctcaaagcaaaaggagggtgtgtctttgaaaaacggaaagaattccaacctctgttcttggtgaagtatcctgagcggccctaaagaggtctgaa

SEQ ID NO: 470313 - DNA, 122 bp, Homo sapiens
tttttttttgagacggagtttcgctgttgttgctcaggctggtgtgcgatggcgccctctcggctcaccgcaacctacgcctcctgggttcaagcgattctcctgccttagcctcctgagta

SEQ ID NO: 470314 - DNA, 122 bp, Homo sapiens
cacggcctggtgtgtcatcatcgccacgctggtgtgcaggtgagcgcggtggggcggggacggagggcggggccagagggggcggcccgagggggcggggctggagtggggtgtgtgtgggt

SEQ ID NO: 470315 - DNA, 122 bp, Homo sapiens
aagcgttgcccaggagaccaccggcctgcaggaagtgttgccctggtgacgtcaccagtgcgcgggagggacaatggggcattgttctggggtcggtgagaccgggagacagtctcccccca

SEQ ID NO: 470316 - DNA, 122 bp, Homo sapiens
gaatgccacagataccctgaatcctgcctggatttcagtgccctctcactggggtctcaacgcgtcagcccaaatcagcctccattgtctctagttaagaaatacgaggcttggctggatgt

SEQ ID NO: 470317 - DNA, 122 bp, Homo sapiens
ttttcttccactgaatgtagttggggagacacggccttaagccttgagcagagaaagagacgagaaactgttggctcacttacaaccaagtgttgtgtttatgttttaggtttttatgaaac

SEQ ID NO: 470318 - DNA, 122 bp, Homo sapiens
tatcattccgaggaagggatgggcataaatcatattgggaaacaactgcatcggctgtcacgtgacgtgaagacaccagttactttgattgccacaaagccataggtactgctaattctctg

SEQ ID NO: 470319 - DNA, 122 bp, Homo sapiens
ccatcttggcttcccaaagtgctggaattagaagcatgaaccaccgcccccgcccctgtccgaacatttttaaaccactatgcagcttaccactcctgtgggacaagagtgcctggtcctat

SEQ ID NO: 470320 - DNA, 122 bp, Homo sapiens
gaattagcttgtccctccatggggcacaggaaaagccaaaaatatacctgctgtctccaccgaggaattgagcacccctgtcagatgtcatttctcaaagcccaggacccactgggcagcag

SEQ ID NO: 470321 - DNA, 122 bp, Homo sapiens
ccccgggaagctggcactggctgagctcagctctgtgggcctttcttcagcactgtgggtcgtaaaagctgccttttctttgaaaactgcctgcgtcctctgggttcccagcgttggtggga

SEQ ID NO: 470322 - DNA, 122 bp, Homo sapiens
ggggccgggtgcgagcgcagtctcccgcggagccagaaggggaagagaagtgagaaaaagcgtccactaaatggatcaaggccgcgagcgcacatctcaccccaaagcgcccctgtccagag

SEQ ID NO: 470323 - DNA, 122 bp, Homo sapiens
gtttcccactattacaaagcgaggctggtgtggatcccgctttgtgctctgtggaccgtccgcgggagattcctaagaaacaggcctccaggccgggcgcggtggctcacgccagtaatccc

SEQ ID NO: 470324 - DNA, 122 bp, Homo sapiens
gacgggtctctttcagctccgccatcctgaccgccaaaaaatgcttggattggctggggccggatgaggacagccacggttgagctggaaccgttccctatttttttaaggccagcgctgca

SEQ ID NO: 470325 - DNA, 122 bp, Homo sapiens
tggaaaacatagatagaatcattctcagaaacaactttgtgatgtgtgcgttgaactcaccgtctttaaactttcttttggtagagaagttttgaaacactctctttgtaaagtctacaagt

SEQ ID NO: 470326 - DNA, 122 bp, Homo sapiens
gaggcaggagaatcgcttgattcctccaccagggaggcacaggttgtagtgagctgagatcgcaccaccacactccagcctggcaacagagtgagactccatctcaaaaataaataaataaa

SEQ ID NO: 470327 - DNA, 122 bp, Homo sapiens
ttctgtatggtagcccagaggccagaagaggggctctgttcctttctcttgtttcctttgcgctatccaggtgacgctggcacagccttcaaagagcagcagaagtaatttgctcccagcgt

SEQ ID NO: 470328 - DNA, 122 bp, Homo sapiens
gacaccagagcagcttgggagcgtgcgcagcccatctttgacagccgagcaagggcgtcacgcaggggtgatgctccagaggcggcgccaagcgcaggccctccccggagccagctgcctgg

SEQ ID NO: 470329 - DNA, 122 bp, Homo sapiens
ttgaaaatgatacatggattcctcttccaaggcaacaggattcattatactcagacttcacggcatctacatagcatccactgaatcaagttttggttggtggtatacagactgctgcactg

SEQ ID NO: 470330 - DNA, 122 bp, Homo sapiens
atgccttctaaaatcagaataaacacagtgcagcctgggctacagtcatctttctaccaacgcagttatgaaacatcattcgtaatactttagcccagaggagggacccacagaggctgtaa

SEQ ID NO: 470331 - DNA, 122 bp, Homo sapiens
caaaaacaaactgcttgatgttgtcatggaaaacctggatctttgcattctatggtttcacgatggattacatccaggtcacaacctaaggaagacagctggcaaaaagccaaccctgctgg

SEQ ID NO: 470332 - DNA, 122 bp, Homo sapiens
gggccccgcttaccgaatgcctgctttgtggaaacatcatgtcaatcgcggcggggggcgcgggctgcgccccggctgtgcgccccggctcgggctgctgggggcgccgggcggccgcgcct

SEQ ID NO: 470333 - DNA, 122 bp, Homo sapiens
aacactggctcacggtgtatcttctgttcttggaacagccttttattataaacatatcaacgataaaaatacttactccaaaatgcaagtctgtgaacacatcctataaggcagatggaaag

SEQ ID NO: 470334 - DNA, 122 bp, Homo sapiens
gctgcagacagcacgcgtttcccagaacgagggccacacgttaatattaccttagtgcagcgcttctcagagtgcccccacctgccgcagcagcagcagcatcaccacctgggtgggcgttc

SEQ ID NO: 470335 - DNA, 122 bp, Homo sapiens
ctccgtctgaggctactatcttgctctggaggagggagtgagaactggatcactggttagcgtggtaactgttttggacaattgcatagccacagccaggaacacagaaggcagagaggcag

SEQ ID NO: 470336 - DNA, 122 bp, Homo sapiens
atgtctctagtgaaagcactggctctgcccccagccctcatggctcatgctggcatagggcgcctgctccacagcctgggcaccatcttcagacaagtgcccggtggcaactgcctgctggc

SEQ ID NO: 470337 - DNA, 122 bp, Homo sapiens
tccacaggctttcatttatttacttaagtatttttagcccagtagcagtttccagtccagcggctcctcagatctttcgccggctgtccgccccacctgtccgtcagcacgcgagccaatga

SEQ ID NO: 470338 - DNA, 122 bp, Homo sapiens
cgggtgcttttcccagggctccacactgcctccccgggagacaggaaggcttaagtccagcgctgccctctccgatcccgcttgtcagggagacactttatttcccggggcagccccgtacc

SEQ ID NO: 470339 - DNA, 122 bp, Homo sapiens
gcggattaggctccgttttatctccgctccttcagagacaaaaggggggctctgcataggcgcatagccatgaggcatccgcgactccagcctgcgttgtgcggtaaggagcctgccaccca

SEQ ID NO: 470340 - DNA, 122 bp, Homo sapiens
gggcagggacaatcctatccggaggtgaggctcaaggtggggcggggccacaatggaggacggggcctgcagggaagacccgagaaggagggctgcgaggcaggggattgggggcgggggcc

SEQ ID NO: 470341 - DNA, 122 bp, Homo sapiens
tggggcagcctcagcgcagcttctcgggtggggcggggcgctcggggcctaaggcgcagtcgcaggctggggagggggctcggctcgccggggacgcgcccaggagagaaagcggcggcagg

SEQ ID NO: 470342 - DNA, 122 bp, Homo sapiens
ttgaaggtggctcgtgtacccaggttaagccacgtgtctctaaaatgttcatttaggcggcgctgtgttacctgcgggaatccccgacctgcggctcctgaccacgggccaccccgcccaga

SEQ ID NO: 470343 - DNA, 122 bp, Homo sapiens
ctcaatttagaaaactggcctggctacagtcattattaaccatagtcattgttgcaaactcgggacagtctaggccaaattctcaacagaagctcagcatggaaattggagggattactgaa

SEQ ID NO: 470344 - DNA, 122 bp, Homo sapiens
cacgtgtctgtgtgtgcgcaggcgccctcttgcctactgcgggagcaagctgggggaagccggattaggtcactccaaggccctaaactttagatgtcaagcaatggtgagggaacaccagc

SEQ ID NO: 470345 - DNA, 122 bp, Homo sapiens
ctcaggcctgactcttttcggggtccccagaatcgctcaacacaattcttccagaagcctcgggatgcgattaaaggattgccagatttttcgaccggtcgttttgtcgaatcatttagttc

SEQ ID NO: 470346 - DNA, 122 bp, Homo sapiens
agaatcaaatgcttttgtgtgaaaacacttgctagagaaacaaatgtttgttttggtaatcgacatttggactgttggaacattaccacttaagatattggtttgagaaatatacatttaat

SEQ ID NO: 470347 - DNA, 122 bp, Homo sapiens
gctagagatgcggccgccgccgcgcccgccgccgtgtcccccgcggccgctgcctcatgtcggaagagctgccgccgccaccatctccggcccctgccccgcccgctgtcactgacagacgc

SEQ ID NO: 470348 - DNA, 122 bp, Homo sapiens
agggtttacgcgcccttgatgtttttcaaacagaaaggggaagaatagacctttctaccccggccatcagaggacggctgctgtgctggaagcatgaattcactgtcgctaagaaggccgca

SEQ ID NO: 470349 - DNA, 122 bp, Homo sapiens
gagtcctcactgcacagcaggtacaagcggaggctgagagccgcagtcccaatacagatccgcctgatctcaaagcctgcgctctttatcattgcaccagcggatcccggtgggctatcagg

SEQ ID NO: 470350 - DNA, 122 bp, Homo sapiens
taagtgcccattaacacatgagtatatgaagaaaatgtggaatatatatacaacagaatacgattcagccataaaaatgaaatcatgtcatttgcggcaacacggatggaactggaggtcat

SEQ ID NO: 470351 - DNA, 122 bp, Homo sapiens
gccccagactttgccctggcctatcccgcgccgctcctcaaactagacccgccccgacgtcgccctggcctatcccacgccgatcctcaaacgaggcccgcccccgatgcacaagctccgcc

SEQ ID NO: 470352 - DNA, 122 bp, Homo sapiens
gcctgggcaacacggtgaaacaccttctctactaaaatacaaaaaattagccaggcgtggcggtgtgtgcctgtagtctcagctacttgggaggctgaggcaggagaatggcgtgaacccag

SEQ ID NO: 470353 - DNA, 122 bp, Homo sapiens
atcttgtcacgatgatgggagcaagagaagagaactcattgtgcaagtagaggaaggaatcgattgttaggggctcagtcttgcaaagaacactcttgcacatagtagacactccaatattt

SEQ ID NO: 470354 - DNA, 122 bp, Homo sapiens
attccaccacctcggacgcctctctggcccagaagcccaacaagcctgctgtgcccgaggcgcccatcgcaaagaaagagcctgtgccacggggcaaaagcttacggagccgtcgggtgcac

SEQ ID NO: 470355 - DNA, 122 bp, Homo sapiens
taccaaccagctgcaatacctacacaaggtagtgatgaaggctctgtggaaacatcagttcgcatggccattccggcagcctgtggatgctgtcaaactgggtctaccggtgagtagagaca

SEQ ID NO: 470356 - DNA, 122 bp, Homo sapiens
gcctaaactgtgcagggcacaaagaccccaggtttgacctgcagagtccccaagcttcagcggctggtggttcacttcattttttttctggcggggcaggaggaagggaaagaaagagggct

SEQ ID NO: 470357 - DNA, 122 bp, Homo sapiens
agcacggacaggtctgcgactggggcccccagggcttctcacgttcctcacaatgcaagacgccagtcccatggctgccgtccggcgctgcctgggatcggggcaggcaggctggacatttg

SEQ ID NO: 470358 - DNA, 122 bp, Homo sapiens
aggaccctgcacccagccactgccttgaccccgaccagagctcctggcctagacccaggacgcctcgaggggattccagcgccttttccggcgactcctccgctctgagctggtccctcctc

SEQ ID NO: 470359 - DNA, 122 bp, Homo sapiens
catggccttgccttgcactgggtgctaagtcatcggagatgatttgaagtcctgggggtgcgtgtgcaacctctgtacaaactctaggccatttcacatccgggacttgaacatcctcggat

SEQ ID NO: 470360 - DNA, 122 bp, Homo sapiens
ctgccggtactccaggtagttttcctgcaccaaatcttgggtgagcagcttcctgggatgcgcaaagacactgtcctccctcccatcagatgcctccaacacactcagctcctcccagattt

SEQ ID NO: 470361 - DNA, 122 bp, Homo sapiens
caactcctggccagcttcagcccctcaatcccgcctcgaagtgctgcgggcagagccccacgcagcccacccgctgcccttctaggcatcgtgggctggaaggaagggaaacccgccgatgt

SEQ ID NO: 470362 - DNA, 122 bp, Homo sapiens
atcagttaggcacaaaaaggccaatccaggctgagtctcctgctcattccttggcgccaccggctctaactgaaggtggcggcttcgggtttgcagcccatggcttgccctaagttccgaca

SEQ ID NO: 470363 - DNA, 122 bp, Homo sapiens
ctccccgtacccttaggtggggctcccggtcactgccaccacccctcttgctgccgaagccggctccctggccacctggtgccctgccggggtattccaaatctgggcagcagaagccggcc

SEQ ID NO: 470364 - DNA, 122 bp, Homo sapiens
gattttgtttccttttctaaattcagaaatatcctgggatgcaacagctttctgagttgccgggcaaaacatccaacagcttttggcctctgtctccaccctgaagagcatgaagtcagcat

SEQ ID NO: 470365 - DNA, 122 bp, Homo sapiens
gcacggcccagtgcggtggccgaggggccgggcctagcacaggcctccgggggaagctggcgccgctgtccgggggcttcctctgccgggccgcctccctggccgcggggctacctgcgatc

SEQ ID NO: 470366 - DNA, 122 bp, Homo sapiens
ctcaggcggtgctggggcggaaggtaggaacctcccacctgctcctggccccagggggcgcgcatgcccagcgggagcgcatcttcacctgcggacgtgaggctgcagcgctgccggcccca

SEQ ID NO: 470367 - DNA, 122 bp, Homo sapiens
gggcccgggcgagcggagcgggctggtccctggggcctgggatctgcgcattctgggggccgccgacatgggggcgggtggggcttgagggtgacggtggggcccgagtcgcgggcactgcg

SEQ ID NO: 470368 - DNA, 122 bp, Homo sapiens
gcagctgccctggctatccacgctcctctctgattggtcagctaagtgcgcatgcgcatgcgggtgaaggaccttgggggccacgacccctgctgacacgccttccctctttccgtaaggga

SEQ ID NO: 470369 - DNA, 122 bp, Homo sapiens
gagaaaacccacacagacagggaaagagcatgcagactccacacagacagtgaccccagtcgggaatcaatgttatctcaaggttaaaatgaagtaacactgaacaaaatgaggttaaggac

SEQ ID NO: 470370 - DNA, 122 bp, Homo sapiens
gggaaagttcatccaaacccaaatctgggctacttccttgtgtctaggtcttgcccaagtcgaccagaggaaatgctccagaagctgatccctagacagagcctttgtttttttgttttgtt

SEQ ID NO: 470371 - DNA, 122 bp, Homo sapiens
gttaagattctgtttaaactttgtcattatttctcagacgccctttttaaatgccttaaacgtgcctccattgaaatgtatatgaactttttctctcttcctttcaatatgttgttgctatt

SEQ ID NO: 470372 - DNA, 122 bp, Homo sapiens
tcgttatgttgcccaggctggcgtgctatgcataggtgcaatcataatgcactacagcctcgaattcctgggatcaagtgaccctcctgcctcaacctcctgagtagttagaactacaggtg

SEQ ID NO: 470373 - DNA, 122 bp, Homo sapiens
catacttatagcaataaattattccttgggtatctgaggttcaaatttaactctgtgggccgggcgcggtggctcacgcctgtaatcccagcactttgggaggccaaggcgggcggatcacg

SEQ ID NO: 470374 - DNA, 122 bp, Homo sapiens
taggaaggtagcagatctggcttcctgtgggtcctcctcccagaagccctatggctgaaccggatctgagtttcctggttcctgtctggcagaaggggagcagatctcctccctgcctcctc

SEQ ID NO: 470375 - DNA, 122 bp, Homo sapiens
ctccccttcctggtgtccacagaagcccaacgtcactagctggggtgtgtatggctcacacgtaggccaggctgccctaggcttggtgtgcaagggaggggcccctacttacttgtggcctg

SEQ ID NO: 470376 - DNA, 122 bp, Homo sapiens
cttagccagggggcgtctttcaaaaggtgacctccatgctgtgctgtcgtgggtgtgagacgtgctcatggccttccactgccatctctcccttatctgatgcctaaagtcacgatggggac

SEQ ID NO: 470377 - DNA, 122 bp, Homo sapiens
agccatcccgtggccgggctgtggccctgtggtgtggccctggctgctgaggcactgagacgaagctccccctccaccgggagcggtccggcgtcactcgcctgcacggctgcctgctgaac

SEQ ID NO: 470378 - DNA, 122 bp, Homo sapiens
cccgtgccagcccggaacccgcaccagcctgcaagcgccacgctcagccccggctggcttcggcgcctcccgctccacacctccctgagagcagagggagcctgttccggccttggccagcc

SEQ ID NO: 470379 - DNA, 122 bp, Homo sapiens
tgaccagggctggattagcctcatggttatggcccatttggggtgtggacatcagcttctcggatgaaggtgttagggttagcagagggcagcggtaggaaggaaggtgtcagatctataat

SEQ ID NO: 470380 - DNA, 122 bp, Homo sapiens
gcatgagggttctgggtgggggtgcttggtgacaacacatccaaccgctgtcctgccagccggggcactcaccgggtagtaatcggccacgttcttgacctgttcatagtcgtcagcccgag

SEQ ID NO: 470381 - DNA, 122 bp, Homo sapiens
cctcgcgcgctctggcggagctcgggagcggggaccggtagccgactgcctctgggacagcggtggcgtctctgtgcccgtttagtggagttggagggaagctgcgaggaggcgcaggaagt

SEQ ID NO: 470382 - DNA, 122 bp, Homo sapiens
gaagccacgcccctttctttgcagttttcaggagggcaggagctctgttttattaacccacgtatctcttgggcctcacatggtgctttgtgccaagtttgaactgaataaatgtttattga

SEQ ID NO: 470383 - DNA, 122 bp, Homo sapiens
ggaagaaaacgggtttggcggcgcggagaaagcgccggaaaacacagcagcgctccgtgacgtcacttccgcctccagcctcaaacctggaggagcgctcgggaactgcaacctcagccgag

SEQ ID NO: 470384 - DNA, 122 bp, Homo sapiens
cctgcctgattctcctgcctcagcctgcccagtgcctgcgattgcaggcgcgcgtcgccacgcctgactggttttcatattttttgggtggagacggggtttccctgtgttggccgggctgg

SEQ ID NO: 470385 - DNA, 122 bp, Homo sapiens
agactggggaaggggtagggggttaagggatcagagggcggcgtcctggccccgcaggcacgtgccgcgcccttcccccgggcccaggcccgcacccgcccgcctcccgtccgtgcaggcct

SEQ ID NO: 470386 - DNA, 122 bp, Homo sapiens
ttcactttatctctgggtgggcttctcactccttttccagtgcttcaacaaaaggtgtggcggggactggcccctttctcacagcccactgcagtgggatgagagtcccaaacggatgacat

SEQ ID NO: 470387 - DNA, 122 bp, Homo sapiens
aaacaagaagggagaaaagggacagaaattagagatacagtaagatggattgacagttttcgaagacctagagaaagatgacagcacgaagagagacagggagaatccgaggtaaaactgtt

SEQ ID NO: 470388 - DNA, 122 bp, Homo sapiens
caccttcttctctatctcccagctgggtggtggggggcaggtactaccacccccagtgaccgaggccagctcccatggccatggccttatggagccaccaccctggcccaggctggcttcct

SEQ ID NO: 470389 - DNA, 122 bp, Homo sapiens
ccgggcgagcgtggacagtcaatcccaaggcgcgcgcagctgggcttcgcagtggggctccgcgcaggcggcggcgcggcttaagcctcgggggcggggcccggggtggggcctgcggggcg

SEQ ID NO: 470390 - DNA, 122 bp, Homo sapiens
gctggggaaaatacacagacgtttgtcgatgtttttctaagcaagagtagtcaacatattcgttttcttttagatatatatatattagttaccatggcaaaccaaacgtgaatgtggtccga

SEQ ID NO: 470391 - DNA, 122 bp, Homo sapiens
ggaagggggacagaaatggccatggcctccaggagcttattgtttagaggaagcaacagacgtgtaaatgatcgagtacagtgaaatgttggaactgctgacagttatctacgggaacagtg

SEQ ID NO: 470392 - DNA, 122 bp, Homo sapiens
agctagagctgggatttgaggatccagttgactctaggacccacactcttcccccttacccgaccctcactgtccttgccacaaacatgggtcctgttgctgaagggctcaccaggcaccat

SEQ ID NO: 470393 - DNA, 122 bp, Homo sapiens
tgactgcgtgggacgcgttctccgctgcccttgcttccctcacgtggagcggagagcaggcgctgagaaggggccctgcgtggtgacccactagggttagttcagagccttgtgcacacaga

SEQ ID NO: 470394 - DNA, 122 bp, Homo sapiens
cggcgacgctggcccttgggcgctctggggcctacggaggccttaaaccccaaagattggcggggacgaagggccggggcactcgagcgagcctggagcgggcaaagactgcgttgcgactg

SEQ ID NO: 470395 - DNA, 122 bp, Homo sapiens
taaatattagcctcaaaggaaaaccttttgcagtaaaatgacaaaacttcatgtacttaacgcaaagggaaggggaatttcttttttgttttgagacagagtcttgctcagtctggagtcgc

SEQ ID NO: 470396 - DNA, 122 bp, Homo sapiens
cgaggcccctgcgggggactggaaatcccaggtcttgctctaccgagcgtaccctaggagcgggccgcgcatcggctgaagcggcgcttccaggcgggcgctgggctcgagcaccccagcac

SEQ ID NO: 470397 - DNA, 122 bp, Homo sapiens
aagtggggagccgcccagggcaggatcataaatgggctgatctgaggtctgtggtcctaccggagaagccaggcatggaaggctgactatatatccacggccaatggctccagagccctaag

SEQ ID NO: 470398 - DNA, 122 bp, Homo sapiens
ctcaactatgacccttggttgtgtccactccctttgagtgggtgtggaaagcatgtagaccgtagggagggtgggatgggaaaggctgtgggaactggggctcccaggacagactcaaaggt

SEQ ID NO: 470399 - DNA, 122 bp, Homo sapiens
gctggcggctgctgccctgcctgcccctcccgcctcgggggtgaaccttgctcctggagccggggcctggggtttcctcagcacccctgctcacacccggccctctgtggctgacagccggt

SEQ ID NO: 470400 - DNA, 122 bp, Homo sapiens
taaaagaaaaagggggtagcagaaaaaaatcaagtgctgagacaagtggaagatgggccccggtgagcagctgatcagtgtcagctcccatgatgacgttcccccagcccccaccacccggg

SEQ ID NO: 470401 - DNA, 122 bp, Homo sapiens
atactcaagcgcaaattcccgcagcgtgtggcagaactgcatgatgcgcacttcacgggccgcctgcggggtgtagcccaggtagagcaggaaggcatggaacctaggcaggtcagagtagg

SEQ ID NO: 470402 - DNA, 122 bp, Homo sapiens
atgactcgggctctcctggctgggaccaacagagctcagagcagaggctgaggtcactgtcgctttgaggaatctttagtcaggtgctggctgagaggatgcagattgaccaatcctgtggg

SEQ ID NO: 470403 - DNA, 122 bp, Homo sapiens
ctggcgcctgctgggcttgatcgaaggctgggtcttgtgcgtggaccaccgctccctcttcgtggggtcattggccacgatggcgggtctccatctctttctcgcttcccctcttttcctct

SEQ ID NO: 470404 - DNA, 122 bp, Homo sapiens
tttggacatctgtgggaaacaggtgggaagagggaggatggaggagccaaatttaagcatcgggtacttaggtgctcatctccaaggcaactgcattgctatggcaacagcagaggcagcac

SEQ ID NO: 470405 - DNA, 122 bp, Homo sapiens
accattcatctaccactgcttctgttctcataacttctgtttcagctaaaagggattcttcgctctcccatcatttatcctcaggcttttctggaagattggggttggaatggggtttgatc

SEQ ID NO: 470406 - DNA, 122 bp, Homo sapiens
tcccgacttcccttacccgtttggggatcttggccagggagtcacacatactgacatactcgggactatagatataaaccgggaccagcgactgcccactgtccgccggttcctccggctcc

SEQ ID NO: 470407 - DNA, 122 bp, Homo sapiens
gagcacgcccgcccactgcatgttaagggagcagtgagcagcatttatctcgggtggagacgtgggtggtttcacagagtgtggatctgccctcctctctctcacttgcctccttctgtaaa

SEQ ID NO: 470408 - DNA, 122 bp, Homo sapiens
gacgtgggaggcagccagggttaatcatttccacgaagccttgaccccacctgccttggccgctctgctcccgcctcccactgcccctcaggccagctcaggagccatggggcgctgggcct

SEQ ID NO: 470409 - DNA, 122 bp, Homo sapiens
aggtggacctaatcgagtcacacgagtccttagaatcagagaacctttctgagctgcggtcggagggagccgtggtggaacctttctgagctgtggtcagagggagccgtgatagaaccttt

SEQ ID NO: 470410 - DNA, 122 bp, Homo sapiens
agctgccccccacctctgctctcagaggtgccctgcccccaccagccatctcacaccccacgctgggctctcattggccactgacatcttgtctttttggcgtctgcagcccccacgctggc

SEQ ID NO: 470411 - DNA, 122 bp, Homo sapiens
agccaccgcacctggccccagatcccagttctttatgaccacaaaggttcattttcccctcgctcagctgttggttgggtgtggtttggttgagccaggctgtgcttcacttggccaagcca

SEQ ID NO: 470412 - DNA, 122 bp, Homo sapiens
gctttctcgccaaggaggcgtgacccaaggtgcaagaaaacccagccctgtggatcgcaccgcttccgttccttcttgccccgcacctccttggtcccgccgggatctcggcggtttaactc

SEQ ID NO: 470413 - DNA, 122 bp, Homo sapiens
actcaacttccacctccatcctctgaggaaatgggttttccaggagcttggcctgggcagcggtgactcgtggctccacacggaagtgactcaggtcccccgggagaaagcgagccgtgggt

SEQ ID NO: 470414 - DNA, 122 bp, Homo sapiens
cccagcgcacccgcaccatggccggccccagcctcgcttgctgtctgctcggcctcctggcgctgacctccgcctgctacatccagaactgccccctgggaggcaagagggccgcgccggac

SEQ ID NO: 470415 - DNA, 122 bp, Homo sapiens
tacctttccctttcgctcctgctccaggctccgcctccgccgtgtccgggccgctcgccccgcccccgctcgccccgcccctggatttgctccctcaaagcggaagtgaggccggactgagg

SEQ ID NO: 470416 - DNA, 122 bp, Homo sapiens
taccggcgcatcttgcgtactcccctctccccttactgcccccgggccaggaggacgtggcgacccttatctcccagctcagggtggactcccccaggacctgctcccctggtcgccctttc

SEQ ID NO: 470417 - DNA, 122 bp, Homo sapiens
ttctttgttggacctgatgggcaacactggctaatattcattattagtcctcagctactccgtgtgcagggaaagcagaaagatcatcacatgctcccttagaagctgcaaatattttttag

SEQ ID NO: 470418 - DNA, 122 bp, Homo sapiens
ccgccagggaggctgggtggcgagggcggggcggctgccgacttagccggcctgactggtcgggcttccggggtcccgctgctccctaggccccttgccccgattcaggctcccaaggtggg

SEQ ID NO: 470419 - DNA, 122 bp, Homo sapiens
tctgggcagtgagatggagagctcagcacccctggcctcagggagttttcctgggtgagtcgggaatgtgtgagagtgagcaggatgcaagcatggacttcaggaagtgggcgtacacggtg

SEQ ID NO: 470420 - DNA, 122 bp, Homo sapiens
tatcgcgtaccaggcacggtgcttggcaccctgtgcaaagcctactaaatgccaggcactcggaaatagtctcatcctgtgatggttaaagctgtggcacagatgagttctcagaaaaaggg

SEQ ID NO: 470421 - DNA, 122 bp, Homo sapiens
gattggacgcttagaagcagtcgggacttttgtgctagtgacacacttgattcaggaagacgggctcctgccaggctcagccggtgcctgagctccggggggtgtgcacacctcgactgtcc

SEQ ID NO: 470422 - DNA, 122 bp, Homo sapiens
cttggccccaggtttatttgtcttgaccatctgatagattgtgcccttctgagtagatcccgtattttactggctggcttgtattcaggatcctaatgatgcctgaatatttaccctgtttt

SEQ ID NO: 470423 - DNA, 122 bp, Homo sapiens
gctgggtgtcaggatgtgcttgatccaggggtcggcgacgcgggtgtcaggcagcacctgcgtggggcttcctcaggtgaagcaaggagacggagaggtgggttcggaggggctcagctgag

SEQ ID NO: 470424 - DNA, 122 bp, Homo sapiens
aataggttgtaaaagagttttaacatgctaataaatgtccccaataaaatagttttaaaacgttttgaatggggatcgtgtccataagggatatcatgctacagaaagttgtcacttactca

SEQ ID NO: 470425 - DNA, 122 bp, Homo sapiens
gccggcgccggcgccggcctcgggctccatgtccccgttgaacagagcctggcccggctccgcgccgccaccaccgccaccgctcagcgccgccatcttataaccgagagccggggcccgag

SEQ ID NO: 470426 - DNA, 122 bp, Homo sapiens
catgcgcactggcagacccttgctctttcgctggagactatgcgcaggcgcggtgcactgcgcgccggcacgagggtgttttcgacgttggctgtggggaaacagcaagcggcgtggacgac

SEQ ID NO: 470427 - DNA, 122 bp, Homo sapiens
ctgggtcctcactccgccctcccgccgttggatttgcgcccggggcggcccccgactttgcgccccgtagttgagttccgtttatggtctgatttccggcctctcgcctgctcgccccgccg

SEQ ID NO: 470428 - DNA, 122 bp, Homo sapiens
gtaagcaccagtaaacaacaaacccatcttggtgttctgtatgcttatgtttcattatgtcgatgatagtagagtatagaatttctactgtaagttcccatgcaagaaatcactgaaccatc

SEQ ID NO: 470429 - DNA, 122 bp, Homo sapiens
ccttccagtcaagcagggaaatcctgggtctcgtgtcatccccaggtcggctgtatgtttcgtcacctgccctccaactctccctgggctgggctggggagcgggagttgtatgactcttgt

SEQ ID NO: 470430 - DNA, 122 bp, Homo sapiens
cacagaggacgacccggaggtgggcggcccgtgctacacgctctacctggagtacctgggcgggcttgtgcccatcctcaaagggcggcgcatcagcaagctgcggccagagttcgtcatca

SEQ ID NO: 470431 - DNA, 122 bp, Homo sapiens
tccacaggatcgcggaaagaaactataacccattagcctcttcctgcgcctccgatccgtcgcggggccacggccaggggtctccccgccgccccatcccagcagctactacagtgacaggt

SEQ ID NO: 470432 - DNA, 122 bp, Homo sapiens
cggcagctgctcccggcactgatcctgctgggccagcggtggacttgcagggcccacatccggagctgcccactggtcctcgtgctgcacagccttggaggatctgaggctggctcagggtc

SEQ ID NO: 470433 - DNA, 122 bp, Homo sapiens
gcgtgtgtttgcgtgtgtgcgcgcgcgcgggtggtggtggggagaacatcgtgaacgtgtcgttctctaaatgctggcttattgcatgccaagtgaagcaaagtgtgtgtgtgtaagtgtaa

SEQ ID NO: 470434 - DNA, 122 bp, Homo sapiens
acagggctggcaggagccaagctcccaggagccacctcctgacggtacacggctggccagcgagtataactggggtggcccagagtccagcgacaagggcgaccccttcgctaccctgtctg

SEQ ID NO: 470435 - DNA, 122 bp, Homo sapiens
ccttatgtcagttgccttttgtctgtttctttcatcgtaagcaggaatctgtccggttcgcggctgcttcccaggcgcccagaccagcgaccagcaccgcgtaggcgctcggcacagaccga

SEQ ID NO: 470436 - DNA, 122 bp, Homo sapiens
gagataaaattagaaaattttaaaacatgcccagatgagaatgctaattagctagaaaagcggcacatgtgcgaaaatcttagaaaatttggtgtgttgtcatgatggctaaatgtgacatt

SEQ ID NO: 470437 - DNA, 122 bp, Homo sapiens
ttgctcacagccagccaggtctggggcctcacctctttgagcctcagtttgccccatctgcgtatgagtatcgaagtgcgggtggagtgagaggcccttcattttttcttaatgctgccaag

SEQ ID NO: 470438 - DNA, 122 bp, Homo sapiens
tcacagcccaacccggtctcccgcaagatggagccgggggcgggcccagggtgggcggggcgtctcgcgagcccgttaggatcgcggctgcagccgggaacacccccggagccggagagggc

SEQ ID NO: 470439 - DNA, 122 bp, Homo sapiens
tactctggaaacacagctcagggcatccttggggctttggtagaagaccccaccaactgccgggggaactagcaaagttatgcagttcctggagccctggaatgaatcctaaactgggcgtg

SEQ ID NO: 470440 - DNA, 122 bp, Homo sapiens
gcacaagccacaggctcccccttctcgctagtattccagacccaggtgggtaccctgcttcgcgttagccactcctcacctgctctgcggacaccgcccccttccccgcgccgctcccgctg

SEQ ID NO: 470441 - DNA, 122 bp, Homo sapiens
agtaaacctctcctaaagcacagggccccggctaagaaaacgatcattttcaggaggggccgggagttatgtatctgaagcagctttccaagcaaagccaaagttgactgtgttcttgtccc

SEQ ID NO: 470442 - DNA, 122 bp, Homo sapiens
gttcaaagccatgaaatacagcacttctggccaagaagtctaaatcacagccgatctacacgaggcggatggtccacaacgccaagttcctacccgggcactgagctcaacgctcgcacaac

SEQ ID NO: 470443 - DNA, 122 bp, Homo sapiens
ttctccgcactggcctgggcccgggctcccagccctccgctctgtctcgctggggcaaggcgtccctcactggccagttctgacattggtcccgggggagccgccttccacctgctggccct

SEQ ID NO: 470444 - DNA, 122 bp, Homo sapiens
ctgttttttccttttccctgttataagcctggatatcctgcagggagcacgtttccatcccggtagcagtgtgttgatgaaacccaaatttgaactgctggacaccccgccacgggccacat

SEQ ID NO: 470445 - DNA, 122 bp, Homo sapiens
gagggagagggggtacccgagggccacaagagtatgacggggctgtaagagctggtgtggcgggtgctgcccccctgctctgtctgcaccgcaagctcacctcctggctccgcgttcggttc

SEQ ID NO: 470446 - DNA, 122 bp, Homo sapiens
cgcgctttaggagctaggaaatgtgacagaggcggtgcctactgcctcgctaggaatggccgcggaggaggactggtcacgtggcgtggcttccggcctctggcgcgttcctattcgggaag

SEQ ID NO: 470447 - DNA, 122 bp, Homo sapiens
ataatagtttttagacattggtctgtgatcccccaaagagagaaaacaaataaagtgagccgtgtcagagtcccagattactgcccggagaaaacttccagaccacagtataggacaggaga

SEQ ID NO: 470448 - DNA, 122 bp, Homo sapiens
atcagaggaagaattagtccctggtagggacttccttttctcaggtactgtgtgcatctgcgacctcatttgactcacagcgccctgaaggtagggaccagtattatgcccattacacagaa

SEQ ID NO: 470449 - DNA, 122 bp, Homo sapiens
gtgctacattcactcatccatctgacctagttcttagcaatctcagaatctcagtcgcgtcgtcagatattccctctgtctgggttttaatcccggctcgtctaccttccggccgtgtgacc

SEQ ID NO: 470450 - DNA, 122 bp, Homo sapiens
cccaagtggcccacctcgccccgcagcgcctccctggcaacacgtcgctccttttccttgcggcgctgctgcaactggtggcgccaatactccagcatcaggcagctgcaggcggtgatgaa

SEQ ID NO: 470451 - DNA, 122 bp, Homo sapiens
atgagggtagaagtccagttgaaaacacacctgaaacagcagggtccaaacaccaggtgccgagagccttcctgacattgaaccttccttgaattcctgaggtaaaccttatgtgatcttga

SEQ ID NO: 470452 - DNA, 122 bp, Homo sapiens
cgccaagccagtgtcaccgggccatagtgagcggccaagccttggtctgccagagccggccgcaccagaaggatttctgggtccccagtcctggaggagcacacggtttacaccaggccttg

SEQ ID NO: 470453 - DNA, 122 bp, Homo sapiens
tttgcgcgaggtgctgcagtgacaatttcgagaaagcctgggctggcttcagatccaaaccgggatgcgaaagagcaggaaagggcgccctggagcccagcggcccgtgcgggtcgggggaa

SEQ ID NO: 470454 - DNA, 122 bp, Homo sapiens
ggccgtggcggtcggccaggcagcgcgcacaggggacggcccggggtcccctctgcgccccgcctcccgcagctctccgaagagctccgacaagtccaagagcttcagcatagacagcatcc

SEQ ID NO: 470455 - DNA, 122 bp, Homo sapiens
ggggcctcagccgggctggtggttggggggcggttacgctgaatccagctggggttggcgcgccgggagtccctgggcggagagacagggcggtcctcccaggatgctggggccgctacctg

SEQ ID NO: 470456 - DNA, 122 bp, Homo sapiens
tcacgtgacacgcctgactgccctgtggctgcgacccggacctggaatttctagagctcacggttcagggcaagcctggggcatgtagcagggcagagagggcaggtgaggtgtggaccaac

SEQ ID NO: 470457 - DNA, 122 bp, Homo sapiens
gaccgtgagccgcagcaaaggatctgcttattgcagttgcgtccggtgttgttcctgctccgcttttctgatttcaccctttctggactctgtcttcgtctcctgccacgcctcttaacatt

SEQ ID NO: 470458 - DNA, 122 bp, Homo sapiens
tggcgatgcaaacagggttgagctggttcaggtatgcatgtgttgaaatagacaagtctgcgtcctagagccctagcaacgatcccgaacaggcagctctttttcctggacgatttcccagg

SEQ ID NO: 470459 - DNA, 122 bp, Homo sapiens
caggttgtgatttccagttcatgctgggatagggcacctggatgggtgcccacaatgcaccggggcaggctatgtgactgccagctttgcagcggcatctggcatccgggccagcctccttg

SEQ ID NO: 470460 - DNA, 122 bp, Homo sapiens
tttcgaagtgcagggctgggggctgcatggaagtttccccaaggtaagtccaggagccaacgctgggacagcaagagccaaaactaggtttacaagtgatcagtagttggatgggagggacc

SEQ ID NO: 470461 - DNA, 122 bp, Homo sapiens
atacttcctccccatgtttaaaaataaccccatgaccgcttttggcagtcataggtgaggcgggcaccacctaaggcccccccaccccatgccgttcttctgaagtaagggtggctcactcg

SEQ ID NO: 470462 - DNA, 122 bp, Homo sapiens
ttggcctgtgctgtgtgcctggaacctttaggtgctgtggcttcgcagacccggacgcagcgtggaggccaagcggtgtctgtacaggacccttcagtgatgagggtggccaggctccagcc

SEQ ID NO: 470463 - DNA, 122 bp, Homo sapiens
caggatttgaacctgcgcggggaacccccattggatttcgagtccaacaccttaaccactcggccatcacagctccgaggacactttttgtttcagaggaagtcgtgttaggctctttgact

SEQ ID NO: 470464 - DNA, 122 bp, Homo sapiens
ctctccctgaatcaccgcgcgggggcgccctgccaggccccatgcggggctcccctttcccgggcatcctgctgtcactcagacaccgccttctcattactcgtgccaggccccgtcggcgg

SEQ ID NO: 470465 - DNA, 122 bp, Homo sapiens
tccacaatgacaaaacgtcctgcacgtgttaaaaactcaatccggaccagcttccccattcgcctgccagagcagcagttaaccttcccctgggatgggctccaacagcaggctggggattg

SEQ ID NO: 470466 - DNA, 122 bp, Homo sapiens
gctggcggggaagagccctgaggacctgccactgcgtctgaaggtgagtgaccaagaccccggtcaggccggagcctgcctcccaaggactcgcgcacctcaggcagggcaccttccaggaa

SEQ ID NO: 470467 - DNA, 122 bp, Homo sapiens
ccacctggcggtgccatccctcccctgagactaagcgggatatgggacgtgtgcaggagccgggatatggggggccgggtcggtggtaacagggaaacggagactgctgtggagcagtaggc

SEQ ID NO: 470468 - DNA, 122 bp, Homo sapiens
ttctttgaaaagtagcggtcaaaagttcgggagctctgcgatctaaataatcccgaggcacggaggagggggtgcgtggtctgtcgtggactcagagctgcgaaatgatttcttcagaattc

SEQ ID NO: 470469 - DNA, 122 bp, Homo sapiens
ccaactgcagagacacaggaaaggagcagtgcggagatgccggccaccaaggtctgtccccggacagtcctgccacgctggctttctcagtcagtaagcttctgaagcacagctcccagggg

SEQ ID NO: 470470 - DNA, 122 bp, Homo sapiens
ctgatgaagtagcttaccttcctgagactggaagacaagtctcctggctgcctaccaagacgagggtaaagcaaacagggaagaccagctggtttctgccttacctgcaagttgagctgagc

SEQ ID NO: 470471 - DNA, 122 bp, Homo sapiens
tgcctctgagtccaggagggtcgagggacgaggactccagacctcgaggctctagcaatccgggggaccccacggagctgtgtcagttgccccagacccctctcatggtcctgttgccccag

SEQ ID NO: 470472 - DNA, 122 bp, Homo sapiens
taccaacttctcctgcaataaggtgagttactgatacattaaggtctctgtatactcgtccgcccatcatttgtacatatttatgaacttcttcctgcagccccaaaagagaacacattaat

SEQ ID NO: 470473 - DNA, 122 bp, Homo sapiens
ctcgcctccctcccctgttcacggagattaccttctggcaaaggagcgcgggagagcggccgcggccgaggcggcacccagaccgcggctttgtattcattaaacacacattggagcttatc

SEQ ID NO: 470474 - DNA, 122 bp, Homo sapiens
tcagaccttctctgcgaatagctctccgggtggtaaagagatgcatcacatttaaaacttcgagacgtcctggattcacttagaaagatgggaagaggctcacgcctgtaatcccagaactt

SEQ ID NO: 470475 - DNA, 122 bp, Homo sapiens
gaagagagccctgtggaagctctatctccaggtgccatactagggtctgccatctggatgcgggagggacccaaaaatccaccttcccaagattttccttgtggtcgtggtggaagtgttag

SEQ ID NO: 470476 - DNA, 122 bp, Homo sapiens
tgacccatggtgatgtgacaatggcctccctttgaaaatgatgtatgtgagtataaatgccgttgccaagagcccctgcatttcaggctctgggtgcactcctatgagttaccctgcttcaa

SEQ ID NO: 470477 - DNA, 122 bp, Homo sapiens
aagaaaagaaaaaaggaaaatctctataatcagtagatccagaaacggagaatagtgaaacgtccttacttctgaacaggggcaaaccattccagaaggtcgctctcagtctctgtctctcc

SEQ ID NO: 470478 - DNA, 122 bp, Homo sapiens
gatggcagcctgagaacaggggacgcccaagggctgggatttgtgtgctccggaagaaaacggggtgtagaagtggggcctctgaaagagggcgaaaaggcaaggaaaaggagaaatgttgc

SEQ ID NO: 470479 - DNA, 122 bp, Homo sapiens
ttgcaccataccacaaacactgacacttcttaaacgctgcttctcatgccaactgtttcacgttatcactgatatcaataaattcaaactatcacgtggggtggtcccacctgccagccact

SEQ ID NO: 470480 - DNA, 122 bp, Homo sapiens
ggcctcacgcacacaggctgtgggccaggtcccagggtgccgaggtaggagggtgaggaacgggttcacaagcgcgagcccacaccctacagcacgtgggcagtgaccacacccggtgagca

SEQ ID NO: 470481 - DNA, 122 bp, Homo sapiens
tgttccacctatgcccaggaatgaaaaaggacagcttaaagattagaagcaagatggagtcgattaggtctgatttctttcacagttgtaatttttgcaaaggtggtttcacttctatgtaa

SEQ ID NO: 470482 - DNA, 122 bp, Homo sapiens
agttgcatcctgttatagacaatggtaagtgatgcaagctttttcagaattcagcttctacgatcttataagagacaccctgtcaaagctgtagctaaactaagggaatgactgccatgccc

SEQ ID NO: 470483 - DNA, 122 bp, Homo sapiens
tagggccggcgccggaaaacctaggcgcggctaaatgacgcaagaggcctcgcgcgcacgcgcagtgccgcaccacgtacaccccgcccccggggctctctcccgccgggttccggttcctt

SEQ ID NO: 470484 - DNA, 122 bp, Homo sapiens
gccgaatccccagctcacaatgccggcctggatccacgtatcattgatggggcagaccagcggccccccggagtcaccctgggggagagagagggagggccccatgaggtctgcattgaggg

SEQ ID NO: 470485 - DNA, 122 bp, Homo sapiens
attacactcctatattcctctttctgtctttgtgcaggccccagagctgggtaatagggccggggaaggcaaggggtaagagtcatatcttcaccctctagcaggggaggcttagatgacca

SEQ ID NO: 470486 - DNA, 122 bp, Homo sapiens
tcatttgccacttcacaccgccccgccccttccgtccccggaggcggccagcctcgtgtccgctctaggcttctcccggacgtctctttgtggtggcgttgagctcctctagcccgcgcttg

SEQ ID NO: 470487 - DNA, 122 bp, Homo sapiens
tggaggcctacggggaggccttggttggagtgtctgaggcctcagctgggcccctgcctccgcgcgcctgaccagcactttctcctcctttgcctggacgtcctcacgcctggtggtttccg

SEQ ID NO: 470488 - DNA, 122 bp, Homo sapiens
ctcaagcagtcctcccccgtcagcctcccaagtggctaagattataggcatgcaccaccacgccagttcatcttttaaatttgttgtagagttggggctttattgcccaggctggttttgaa

SEQ ID NO: 470489 - DNA, 122 bp, Homo sapiens
agggctgactcattactgagcagcatgagccactgcaggaagggctcctgtccctcatgccggcctggattttttttttttttttttttgagggatgggcacaaagatagtcactgggggtt

SEQ ID NO: 470490 - DNA, 122 bp, Homo sapiens
tgtttacctgttttgcttctagtatatcagtttggaaacagataaaattggcagtaaatacgtaattccagaatgatgaacactttattaagaggcatccttaaatggagcagaaaactgct

SEQ ID NO: 470491 - DNA, 122 bp, Homo sapiens
ctctggggacccctaaccaagcctgcgacgaatccccgttctgggcatctgcttcccgcccggctcccttcgtcttggaggatgagttggaaggaaccaggaaagcagacatcagggcgtgg

SEQ ID NO: 470492 - DNA, 122 bp, Homo sapiens
agacaagggaggggtgcaggctgaagcagcgcctcaacagccagggacatgtaggcaacacgagcaggcacagcgcggccaccactgtccacacgctcacacaagccaggcccgcagggcct

SEQ ID NO: 470493 - DNA, 122 bp, Homo sapiens
ctgctgcccgcggagcctcccccagtgactcgtgcggtccccaaaggagaggcgggaagccgagtcctggagaagcctggagacaatgggcaacaggggcattgggcctccgtccagccccc

SEQ ID NO: 470494 - DNA, 122 bp, Homo sapiens
gtgggtatcctaacggcatcagcttaacagggctgttgtgagaataaatgaaatcatgcacgtaaataaagcatgcctataaagcaatgactacataaatgttattctaaaaatagtcatcc

SEQ ID NO: 470495 - DNA, 122 bp, Homo sapiens
gcactcccaatacaccaggcagacactgagtacgagtctcggctggtgtcctagcaacagcgacgcgaccccgccccttcccgcgtacacctcctaccttattagcctggaaggggcgggac

SEQ ID NO: 470496 - DNA, 122 bp, Homo sapiens
gcagaggttggagtgacagccctggatacctccagccagctgttcctttcagataatgcacggaacttaagctgcagctgactggtgaagaggcgcccctcgggccctccgatcgggtggtc

SEQ ID NO: 470497 - DNA, 122 bp, Homo sapiens
gagtgggcacgctatggagttttctataagtaccagcccatcgacctggtcaggtaagaacgcgccacagcctgcgggaatcaagtccctactccgatggcagtcggataacatccctgtgg

SEQ ID NO: 470498 - DNA, 122 bp, Homo sapiens
gtcaggatatacttgggtgaccttcacactgtacctcctccagaggtacagaggtggtgacgtaatcactgccacagctgactggctatggcttgcttgataagacgccaggggctacctat

SEQ ID NO: 470499 - DNA, 122 bp, Homo sapiens
ttacccctctcctaaacccagctcattctttctcaattactttaagagccaagaagacttcgctggctctgatgggggaagccccctgaagtgggtgcaggacacaagataacatatgccaa

SEQ ID NO: 470500 - DNA, 122 bp, Homo sapiens
cctcatacccagttcttcagctcggccagcggtaactgaagcctcccagaatcctggatccgggcccctagtaccctctttcccagggacccaggagtcctgcctccagtcgcctgcacttg

SEQ ID NO: 470501 - DNA, 122 bp, Homo sapiens
ccgctcattcccctttttcactgaattaccccttagctcctgagtttaagtccacgtttacgcccaaccacactcttcacggttcaacgctccacccgccctccactgactcatctagaggt

SEQ ID NO: 470502 - DNA, 122 bp, Homo sapiens
acctctccaatatttaccagtggtcaagtcaaactcgttttgctcattaatggtataagtcggctggagctgagaattggcattatagagaatgtttttgagacagagtcttgctctgtcac

SEQ ID NO: 470503 - DNA, 122 bp, Homo sapiens
tgcccgtcagcggtatcagttgaggcctgttgtggctctgagtattttgtgtccccagcccgttgaccttgagacttgtaacaggtttcccttgggaattgcattcgggtgtgtttatcgcg

SEQ ID NO: 470504 - DNA, 122 bp, Homo sapiens
tccacatcttccggaaaaaatccaggtcttccagccaatatatgtcttcctgaagatccacgtcttccagaaaatccatgtcttccagaaaatccatgtcttccagtaacctcccagtcttc

SEQ ID NO: 470505 - DNA, 122 bp, Homo sapiens
ttatccgtgtagctcaggaatgaaatctcctgggctccagagacagacagcaacccaacccggtttgcattacaaagagaaaggagagcagcccattaacaattggccaggtaagaagcatt

SEQ ID NO: 470506 - DNA, 122 bp, Homo sapiens
tcctccttgaccatgtcgatgatctcgtcggggatgcgcaggtacttgatggtgctgccgcggatgtagcactcgggcatccgccagaacttgtccccgtcctgcggagaaggggagcaggt

SEQ ID NO: 470507 - DNA, 122 bp, Homo sapiens
aaagatgatggcctgcttgtacccctgctcctgagcacctgtttgacctcaaagagctctcgcttttggggtgtccgtctccccaagtctgtctagggggcaggaagaccttcatcagggtt

SEQ ID NO: 470508 - DNA, 122 bp, Homo sapiens
caagcgcctgaccgacctgcagcgcgacctcagcgacgggctccggctcatcgcgctgctcgaggtgctcagccagaagcgcatgtaccgcaagttccatccgcgccccaacttccgccaaa

SEQ ID NO: 470509 - DNA, 122 bp, Homo sapiens
taacccattcaatatatgtggacatccaaaagggtttaaaagccacctcctgccctggcccgttttctctcccttcattcttctgttttcagaaatacatgttgaatgtcagcttctgtatt

SEQ ID NO: 470510 - DNA, 122 bp, Homo sapiens
ttctcagtacagcatggtggctggggcaggccgagagaatggcatggagacgccgatgcacgagaacccggagtgggagaaggcccgtcaggccctggccagcatcagcaagtcaggagctg

SEQ ID NO: 470511 - DNA, 122 bp, Homo sapiens
cccttgcgccgggactgcagccgggtcttccgaagtgaggatatgctgccctctagaggccgcggggtgacatggcccatgaggctgtctgggcagggtgggttcgggtgggaggaaccaag

SEQ ID NO: 470512 - DNA, 122 bp, Homo sapiens
tttattgaataaatggatttaaagatgcatggctgcatttgaacaggtggagccgatgggcgtcaatagatttccctggaaatcataaaactagtggaaaaatgagaaaaccaagcagaaaa

SEQ ID NO: 470513 - DNA, 122 bp, Homo sapiens
tagttgggaccacagaggggtgccaccacgcccgggtaatttttgcattcttagtagagacgcggtttcgccacattggccaggctggtctcaaactcctgagctcaaccaatctgcccgcc

SEQ ID NO: 470514 - DNA, 122 bp, Homo sapiens
ctactgccccggaagtgctccttcagcgcagaggcgtgccggtgtgtccgagaaaacttccgagttaagccgccgctgaggccggaaggagctagacggcggtcgggtaggtgacggcttgg

SEQ ID NO: 470515 - DNA, 122 bp, Homo sapiens
acaggcagctgcagcggtgcagcccagggccctcgcagaagcttccccggggcctggcctcgtgctgagagaactctgcgctcctgagggcacctggctgtcatgcacacgtgctcacacga

SEQ ID NO: 470516 - DNA, 122 bp, Homo sapiens
ctaagagtttcctgcctgggcaaggaggaaagatgctacaagtggcccacttctgagatgcgggctgcttctggatgacactgcttcccgaggccacatgcttctttatatccccatatgga

SEQ ID NO: 470517 - DNA, 122 bp, Homo sapiens
ggtcccggactaggggcggactaggggccgctctgcctcccgccccctagtggttgtggccgctctgtcaccacggctcccggggcctctgtcggctccactttggttgagacgtctccaca

SEQ ID NO: 470518 - DNA, 122 bp, Homo sapiens
tgcctatctttactgctaacagcgtgctgctttgctgtatgtgtgccctgtggaatgcttcgtggtgctgctgcacacctccatcacctactgcggtgagggcccctgggatctgcgctccc

SEQ ID NO: 470519 - DNA, 122 bp, Homo sapiens
aaagaaagccggctcttgagtcagctggcaggagagcgaggcgaatgcgctggtgctggccgcaatggccccggttcaacgctcgctccagctggtcacgtcctcaccggggcggccggcgg

SEQ ID NO: 470520 - DNA, 122 bp, Homo sapiens
gactcactgcagcctcaaccttttgggctcaagcgatcctcctgcctctcctgggactaccgacggtgccatacccagctaattttataaatatttgtagagacagtttcactatgttagcc

SEQ ID NO: 470521 - DNA, 122 bp, Homo sapiens
gacccaaatccgaatcaaagtcacggatgccaacgataaccctccagtgttcagccaggacgtgtacagggtcaccctgagggaggacgtgccgccgggcttctttgtgcttcaagtgacag

SEQ ID NO: 470522 - DNA, 122 bp, Homo sapiens
cgccaggctggtagcgcagccgggcctcctgcctctctccctcgaggcccacggggtgcacggcttcctgcaggaccaggcctggaggcctacccctgggctaccctggcctcggtttccct

SEQ ID NO: 470523 - DNA, 122 bp, Homo sapiens
ccttagctacccagcccccgcctgcagtataccggggggaaggcgggaaccaacacgcagcgccattgctacatgccttaaagcactgtctggtttatgcacacagatgctctaacaagtag

SEQ ID NO: 470524 - DNA, 122 bp, Homo sapiens
atggctgaggcgtgggtgtcggagggtgtgcccctgaggtttctgtcccagtaatgttcacgcatgcccggtggtggcctttggggtcactgcccctctccccgccccaggtgcgcggggct

SEQ ID NO: 470525 - DNA, 122 bp, Homo sapiens
gccacggtcgcctagcaacgagcggggatgcgcggggcgcctgggtgggcgaggggtgctcgccgccgccgccgcgcgccctcgggcccccgggaccgcgggaaaacttcgcggctcctcgg

SEQ ID NO: 470526 - DNA, 122 bp, Homo sapiens
gcggcggccctcaggccagcaccctggccctgggggccgaagagcctcaggcaccaccgccggcaccatgctgcccacccgtgtgcgcccactgtcccgcaggcgccaggtagccctacggc

SEQ ID NO: 470527 - DNA, 122 bp, Homo sapiens
cggggccaggtgagaattcatccgacccgtggcttttgtagtctgtggtttctctggactcgctgctgtcttccggggcctggagtgcctggggtgttgctggcccaactcttccctgcaac

SEQ ID NO: 470528 - DNA, 122 bp, Homo sapiens
ggccttgctcctgcaacagcgggccactcaggaaattagtgcaaccctctgcccagcaaccgggcagcttgtgagtccttcaactgctcccctacaccctctcccagcaatcgcaagtgtgg

SEQ ID NO: 470529 - DNA, 122 bp, Homo sapiens
ccgagtccgcccaggcccagccagacgccttcagctgggagtgtactcaggggaagtggccggtaggattcggaatctccagccacggcccctggagaccggcatgtgggctgtgtgtgggg

SEQ ID NO: 470530 - DNA, 122 bp, Homo sapiens
cagatgagaaagctgagactcagggccagcaacccgggtcccagcggagcgcccggcacgcgccaacacttcagcaccagtcgcggtggccaccactgtgcgcggagatggctgcgacgcgt

SEQ ID NO: 470531 - DNA, 122 bp, Homo sapiens
acacatacaaactacaccaagaaaatgctcacaaaactcaaacaagtggggcagcaggtgcggtgtacagtggaccctcagtgcactggggccaccgtccagggttcctggcatctccaccc

SEQ ID NO: 470532 - DNA, 122 bp, Homo sapiens
tgtggggctgatgtggggcaaagagggaatggggccgccgggcctggatggtcgtcttgacggcgtcattgtcgccccttgtaggaaatccgccaaccggcccctagcctttcgccctcatc

SEQ ID NO: 470533 - DNA, 122 bp, Homo sapiens
agccttcagtaaacacccctctgatcagtcagcagccatcagcatcaaggtgagaccctgcgccgacagaaagactatgacttgctgaaggttcagatggttgttagcattttttaatcata

SEQ ID NO: 470534 - DNA, 122 bp, Homo sapiens
ccaccaaggcacgcaaggaggccattcatcttcactgcctctgccgaaaatatacgtctacgggagagccaggaatctctctccaagggtgaccgggttgggggttttgttgttcttcagcc

SEQ ID NO: 470535 - DNA, 122 bp, Homo sapiens
cacagagctggaaacccggttaaggagtattgtcctaagggcacagtgtcagggtccctgcgccctgaggcttggccgaccctggagccctagttttgctgttttctgtagtgttaggatca

SEQ ID NO: 470536 - DNA, 122 bp, Homo sapiens
atctgattttggttggagtgagggggcccaattggagcaatcctttcacctgggttggtacgcgctcccagcattataccgatttgtggcacatgcactactatccaggtgctgggtgtccc

SEQ ID NO: 470537 - DNA, 122 bp, Homo sapiens
tgaatccccgatccagagatgctcccggagaagctgctggtagctgaggcagtgcttcaccgcggatggcacattccccatggcggagcctggggcggcagtcggcgaggggagggagactg

SEQ ID NO: 470538 - DNA, 122 bp, Homo sapiens
ctcggcgatacaagggtcacggcatctggcccgtcgccttaactgcatcaaccgggtttacgaaacagcctgatttccagccccacccatcgcaactgcagctgtcaggtttcccggctcac

SEQ ID NO: 470539 - DNA, 122 bp, Homo sapiens
gcaagagacagccaatagaaagctgtcttagttggaggtctagtagaggaatccaatgagcgtagcgggtctaggcaaggggcggtgcgacggggaggggcagcggggagcggttagaggtg

SEQ ID NO: 470540 - DNA, 122 bp, Homo sapiens
tcacagtggcgtctccaggcccagctcccgcccaccccaacagcgtctcgcggctcaaggcgttctcaagatggcccttccaggccaagttcctgcctcccgccgatggcccgtgtgggccc

SEQ ID NO: 470541 - DNA, 122 bp, Homo sapiens
tccggacatggagctgtgccacttgccacctacatctgagagcctgcctacatgctcctgcgcggctgccaagctccagcacctgcgcatgccacgagtcacgggaatgaggtggaggcagt

SEQ ID NO: 470542 - DNA, 122 bp, Homo sapiens
ccctgctcccagagccagtagcagcccctgggtcttgcagtctgcatctcgggcttgccacgtgtgggagggtgagggtggggtccagggggagccgaggggtgctgaggcctcatgccctg

SEQ ID NO: 470543 - DNA, 122 bp, Homo sapiens
cctgcggggtgagggtggctcagggctgctggctgccatcgaagaggccatccgcatctccgaggaccctgcgagggatggcccaggcatccgcagggaccggcggcgcgagcagtgagtct

SEQ ID NO: 470544 - DNA, 122 bp, Homo sapiens
aacactaataataaaccagaacaattataacactatactgtagtaaaagttatgagaatgcggtctccctgaaaacaccttgctgtcctgtactcaccgaatttcagagcagaggactctga

SEQ ID NO: 470545 - DNA, 122 bp, Homo sapiens
agaaaatagccttaataatccaattatgttaatcaacaaaaaccaatttcacagactggccgcaaacctagagaaggcacctatcacagctaccattctacacaactctattgcctaacgca

SEQ ID NO: 470546 - DNA, 122 bp, Homo sapiens
agtggaggtttcgttttcttaagcaaggcaaaaagcggcgaaaaggcggcagcggcgccccgggggcgggggacgaggcacatcgatggtatcaacattattgatggggaaaagttcggggc

SEQ ID NO: 470547 - DNA, 122 bp, Homo sapiens
cttggggctcctccccaggctcgggtctccacggggccgtcagtgcgaggcgagggtccccggagtcatgtatgggggtccttccacaccatgagcccggcacaggcatggtcgtcagcccc

SEQ ID NO: 470548 - DNA, 122 bp, Homo sapiens
gggagagggctcggtggggggtcatgactgcctggtggggaccctggggacaggggcagccgcaggttgacgatctgggttccttcaccgaccacgcacgaagggtggggggaggtctgctt

SEQ ID NO: 470549 - DNA, 122 bp, Homo sapiens
ttggacttctttcagcagttattaaataagtggtttcctttttcaatatagaattgcattcgggctatccatagagtgcctgcaatttcaaatatcagaaaggaaaattaaaacgacggttt

SEQ ID NO: 470550 - DNA, 122 bp, Homo sapiens
attagtgctctggatgttgctgaactaccaaatgtttggaaagagtttcatcttttaaggcgagcatctgcctgccatgctgttgtcatttgcctggcaaacgcttattctgaatgggcata

SEQ ID NO: 470551 - DNA, 122 bp, Homo sapiens
gttccatgcactggcggagcagctctaggcggcggcttctactttcagtttcgtgcagagcgcggaggagccgcgagcgctgagggtgagtgccgggagctctgagggtgagtgccgggcgt

SEQ ID NO: 470552 - DNA, 122 bp, Homo sapiens
agccaggaaatctctgggagctgtagtgcggccagctggtccagtctcttcttaaagggacgctcttctgtccggagatgagtgtcgggccccgattctccatttcgggttcggtgagacct

SEQ ID NO: 470553 - DNA, 122 bp, Homo sapiens
actggggagatcaattatattgcctgatctgcaacctgatgtgtgggtaggaagttggggcggggcagtggaggaaaagtttggtcaagcctgacaaaaccccagcagctaatcttactcca

SEQ ID NO: 470554 - DNA, 122 bp, Homo sapiens
atcagacccctcatttgttcctcaaatggagcaattcttatgcatgagagctgtggataacgcgagaaattagacggtttaggtcccctttctcctttgagaactagaagaacaaccccaac

SEQ ID NO: 470555 - DNA, 122 bp, Homo sapiens
gccagcgtggagttcctgcaaactcgcctcaatcaagggcggtgtgtcctgccaatccagcggcttcctccaaggggaagcggcctcttcagctgccacagcactgatttcaggcggctcag

SEQ ID NO: 470556 - DNA, 122 bp, Homo sapiens
ctgcgctcggctccggcgtgcgctgaactgagcccacccggcgagctcgcggagccgccgcggctgctgccacggctactgccgccgggtcatgtgataatcaggctgcaagggctcaggct

SEQ ID NO: 470557 - DNA, 122 bp, Homo sapiens
ctctcagccttccttcttccgggccgctttcaagcctgggcttctggaaatacgcaggcgcgagatgaattgtttgattggctattcattgtgatgcacccacgagctgaagctccgtctaa

SEQ ID NO: 470558 - DNA, 122 bp, Homo sapiens
tgacattatcggcatgaataaaagatgagatctgctaggggtggctgtcaggatcctccccgcacaggcgaggctcccggcaagactgacagtaagaggctctgcgggaaggagctgggcgg

SEQ ID NO: 470559 - DNA, 122 bp, Homo sapiens
aaacttcttgagtccacttgcttccatatcaggcctttgtctcattaaaacaagcacatacgtagtataaatcctactctaaaagcctcaaaaataacgtcaatcttcattggagctctccc

SEQ ID NO: 470560 - DNA, 122 bp, Homo sapiens
tacaatttggggttctgaaaatatgattgccaaatttacagcctcatttcaaagcaagcacgctcccctctcaccctcaaacatagacgcagcaacatcagccacaccaccagagcagcaat

SEQ ID NO: 470561 - DNA, 122 bp, Homo sapiens
tccttcgcggtttgctattttcatttcctgttcgtcaaagcagcagaggagatcaaaccccgttcgtgtgtctttcctccacggataagcttgggaggtcattgttttactgccctcacatt

SEQ ID NO: 470562 - DNA, 122 bp, Homo sapiens
ggagcagatgtggggtagcctttacgaaattaggaggaggggaggcagtctggtttagatcgtgaactacccaaaggaaagttacttggcatgacttcgattgtgtgttaagataattttta

SEQ ID NO: 470563 - DNA, 122 bp, Homo sapiens
acccacaaggtcttgtggaaagtcactaacttaaacatgattattcagctttttttgttccgtggatgtaattatacaaagaaaccatctgaaattctaagaatccattttttctctacaaa

SEQ ID NO: 470564 - DNA, 122 bp, Homo sapiens
tcttgtgtgaactcagagtgagaacccactcatcaccaaggagatggtccctgccattcacgaggaatccacccttgtgatgcaaacacctcccaccaggccccacctgcagattggaggtt

SEQ ID NO: 470565 - DNA, 122 bp, Homo sapiens
aaaaaaaatcacggtttgtccatattcttaggcacttaaaccttaaaaatagatttcaaacggcttttatcaagctgtgaagaaaaaaaatagttccacctcctacctcataaccagagccc

SEQ ID NO: 470566 - DNA, 122 bp, Homo sapiens
atttgttcaatttaacaagtgtttatggagttctgcctctgtgcaatgtgctaggcatgccgggggcacaactgtaggacacagttctctgtggagaggccttttgtggagtaggaagtggg

SEQ ID NO: 470567 - DNA, 122 bp, Homo sapiens
accccttaatcctccttggagaccttgaattctgtggcccaaggatctgcatgccacggtcgtgtttccactgatacatggccctgtgccatgcgtgtaggcgggatgagaaagtaggaccc

SEQ ID NO: 470568 - DNA, 122 bp, Homo sapiens
actccaaggcactgctgaacagtttctgtttaatgagcagccattgaagcctcccaatggcgagaatgagcctgcatctttaccgaccccactccacagacgaggaaactgaggctcaaaga

SEQ ID NO: 470569 - DNA, 122 bp, Homo sapiens
ctcggtctgaccacctctcaaaaggatggagcagaacacgcaaaaccacagggaaccggtcggcagagtgcaggatacacaagcccattcttcagctgaactaagaaaagagcgtcggcgtc

SEQ ID NO: 470570 - DNA, 122 bp, Homo sapiens
gttattcctttttcctctgccttaggaaagcgcgcgagagggaggggccggaacaacgaacgctggttacctaacggtccggcccagccagtcaggttcccaaagcccacaccgcgcgggcc

SEQ ID NO: 470571 - DNA, 122 bp, Homo sapiens
ggccttcttacgtcatcgtaagcctaagccaatccgtgaagtgcactttgacaagctacccgcccctaatttgtcctttcaccgccagcctaagccaatagtgtggctgcatgtaaatgaga

SEQ ID NO: 470572 - DNA, 122 bp, Homo sapiens
atgtgcctgagccactttctgccccttctgagatgaaacaggtcaggatgctggttattacggtaaacgcactttccgcccaagcccttcaccagcatggattcccgtcccaccgcgcgtgc

SEQ ID NO: 470573 - DNA, 122 bp, Homo sapiens
tttgcagtggttatggtgaggcagttctcttttatgttcaataattctcttcagattttacgtatatcttggttaaatttaatgggattcttgagtataactgtaatttgaattcggtatta

SEQ ID NO: 470574 - DNA, 122 bp, Homo sapiens
gttaataagcttccttcctgttgtccatgggtttctaaagcccagggtcaggccagtgttcgtctttcctccgtgaggacctaccctgagatttgcaactatcttagtcttcttttctctta

SEQ ID NO: 470575 - DNA, 122 bp, Homo sapiens
cctggagaccagaggctcgaaaaccccgccaggactccgggcttctgaccacgggccgcgcggaacctcttctggactcatctgccagtcgcctaacagcatagacccccacccccaacaat

SEQ ID NO: 470576 - DNA, 122 bp, Homo sapiens
ggagagggagccgaggccgtgacttagggctggcgacgattaaaccaagtaacgagacaccgggcagatgtgttttcattgccctgtaagataaatgcagtgttaagtgcctgacaacttcc

SEQ ID NO: 470577 - DNA, 122 bp, Homo sapiens
cccagcccgaattcgcacccacagatcccggagcgaggccacaggcagcgaggcagcttccgctccagcatcactgtggtggccacgacctggaaggaggcaggagatacaggaagaactct

SEQ ID NO: 470578 - DNA, 122 bp, Homo sapiens
gagcatgcagagccttgggagctgcaccattagcaaggactccttccagatctccacgctcgtgtgctccaccaaactgactcagaacggtgcgttcgagaggagaaacacactcaccccag

SEQ ID NO: 470579 - DNA, 122 bp, Homo sapiens
ctaggggcacacctgtagttgaagaaattgggtttctcattgctgcaaggagaacgcacacgtaggaacacagtgacatatttcagtaaaagagttagatttattataggatttgggctttg

SEQ ID NO: 470580 - DNA, 122 bp, Homo sapiens
cttacagaaaagttgcaagagtagcacagagaagctgcggggccgcggccagtgcctcagcggtgggaacctgcggggccgcggccggtgcctcggcggtcggtgttttgtcgcagagttta

SEQ ID NO: 470581 - DNA, 122 bp, Homo sapiens
gataaaccagatatcccctcatatgctcacgtgcctgacactccagaagtttcacaagaccgaggtggagacactggagtgttttaagtggagagatgacacattctgactcccaggagcag

SEQ ID NO: 470582 - DNA, 122 bp, Homo sapiens
catgctacaccgatgatctcgaaaacattttgctaaatggaagcagccagtccaaaagaccgcatattgtttgattccagttacataatatgtccagaataggcaaatccatagaaatagaa

SEQ ID NO: 470583 - DNA, 122 bp, Homo sapiens
agacagacctagcctgggcaacatggcgaaaccccctctctataaatacaaagaattagccgggcgtgctcgctcgtgcctttggttccagctacgaaggaggctgaggtggagaatctctg

SEQ ID NO: 470584 - DNA, 122 bp, Homo sapiens
aaaccacgcgatgggcgttgggaagcaccgtaattacagggttgggaggcaggatgcctgcgctgagggaggaggtgcttttcaaacctgggatgcagctgggacagtgtcagctactaccc

SEQ ID NO: 470585 - DNA, 122 bp, Homo sapiens
ggttcccccaggcaagtgcttggttctggagttgtcaggctccatttgctgagggtccatcgctgttgtgatccatatgcttagtgtcttcctgagaatctgcacagcccagagtttttgaa

SEQ ID NO: 470586 - DNA, 122 bp, Homo sapiens
ccagaacacttaggtggcgccgggctttggtgcacgcgcgcagggcatgcggacaggcaccggagaggctctattttgggcattacttcgggaaggcggatcttcttgcagggtccgctgat

SEQ ID NO: 470587 - DNA, 122 bp, Homo sapiens
tggggattgccttcctccccaaagttgccagagccagaaccagacacttcagaagacaggcgagctccattgttcggggcttctgcagggtgccggggacgtgctgggctgggtgctaagcg

SEQ ID NO: 470588 - DNA, 122 bp, Homo sapiens
atgataactgataaaagaaaaacatccaataaacatatcaaaaaaacacagagcaccgggcgcggtggctcacccctgtaatcccagcactttgggaggctggcggatcacgaggtcaggag

SEQ ID NO: 470589 - DNA, 122 bp, Homo sapiens
tcacccccaccctcctgcccgccgacagacgcaaggcctcactaatcgatggccgcgccccgcccactgaggatcgttgccactggcaacgacaagcccaggcctgccctctgcatcccgtt

SEQ ID NO: 470590 - DNA, 122 bp, Homo sapiens
acagcaccccccaactcacccacagcagccgacacagccccaggctgactctaacaagcacgcacaaaagcagcgagaaatggcccatgctgctttctgggcaggacactccatcccgcaga

SEQ ID NO: 470591 - DNA, 122 bp, Homo sapiens
gctgagaagcaggtgcaggggcagtgggagcctggcagcagggagggcatggggggcacccgggacccagcccctcaccagggcctgagctccgggacagtgcaggaccaggggaggttggg

SEQ ID NO: 470592 - DNA, 122 bp, Homo sapiens
gcccaggccgggcgcacgtcccaggaaagcaggtttccgcaaatcagaattcctccaaggcgaggcaggggcctttcagctccctaccttggcagatctggaccttggctacctctttaact

SEQ ID NO: 470593 - DNA, 122 bp, Homo sapiens
ccaaaatgtaggctacaaccataacttttatatcctaattattagccttggtgaaatgatcgtgtgtataacatttaatatgctgtaaaatgggatttcaaataccgaacctataagcatct

SEQ ID NO: 470594 - DNA, 122 bp, Homo sapiens
acagcagccccgcaaagcgggtgggtgagcccagaaaagactagtcccaggagacaggcgcgcagggcctacttacgatggtgtcgcaccagaactcggccacctcgtgcacccgcatggag

SEQ ID NO: 470595 - DNA, 122 bp, Homo sapiens
ccatgtgcatcgcctcctccatccacttttcggtctcctctgccgacaccgagcacgcgccgcttgcagctggcttgggtgccgccttcgcctccatacccagccaccactcagctacagag

SEQ ID NO: 470596 - DNA, 122 bp, Homo sapiens
ggtagctcctgaaccattgttgtcctctgattggttgttcccttttcggctctgcaacaccgcctagaccgaccggatacacgggtagggcttccgctttacccgtctccctcctggcgctt

SEQ ID NO: 470597 - DNA, 122 bp, Homo sapiens
attgctgagggtggacaatctatacctgtcctcttctctcccaaactccaaaaatgtaagcgccctaagggcaagaggtctttatttattttgagacagggtctgtctgtcactcagggtgg

SEQ ID NO: 470598 - DNA, 122 bp, Homo sapiens
cagatccagtcggttagcctaaatccgcactgcgcgcaaggaagaaaccctgacgcccatcggggtgtgcacttcggcgtcctcttttgtaaaggggaatgatcacacctgccttttcggat

SEQ ID NO: 470599 - DNA, 122 bp, Homo sapiens
gtttcttcccttgtattattcctttgacagataacagcacatgtgactgaaaagggaattcgtgccagacataagagaagtataattggtgtcagaccatgacattatccccctcattagat

SEQ ID NO: 470600 - DNA, 122 bp, Homo sapiens
taatataataataataataatgatagcaaccacaagaagaacaataatgaccagtcttcccggtatccttcagtacttttactcctggcaaaaccaagcagcacgccgcctgattttccgga

SEQ ID NO: 470601 - DNA, 122 bp, Homo sapiens
aagaagacaacatgtctgaatttttgcagagcaaagggtgatattgctccatttggatggcgcttaatagaagctttgactttaggaataggatgcagggctgtctttaggaataggatgga

SEQ ID NO: 470602 - DNA, 122 bp, Homo sapiens
cctgccttcctcattcctttcccagcccaaccaccaaccacctggccccggccccagccccggccctggcccaccaccccggcccctgagcctggccagggaaagaatcagagccagagggt

SEQ ID NO: 470603 - DNA, 122 bp, Homo sapiens
atctctggcctgggcaccgtggctccttgccaaggccggcaacccttgatggtggcagcacggagcagaccgagcccccagccgacttacccccgaggcctcgcgcctcccccttcacagca

SEQ ID NO: 470604 - DNA, 122 bp, Homo sapiens
tgtctagctaatcaggtaggggacttggagaacttttgtgtctagctaaaggtttgtaaacgcaccaatcagcactctgtcaaaacggaccactcagcactctgtaaaatggaccgatcagc

SEQ ID NO: 470605 - DNA, 122 bp, Homo sapiens
taaaagtaaaaacaattaatataaaagtgaatctggagagaaaaacagttgcagcttctccgtaacactaggaaattctggatctctgtccagagtgacaatccttcctagtggttctcaaa

SEQ ID NO: 470606 - DNA, 122 bp, Homo sapiens
gccacatcacggatggaaacgctgaggccaatgggctcaggttcgctagcagcaggcagccggccctggtgtgcccgctgtggcctgggtgctctgcatacccccgcgcgcgcttgctctgt

SEQ ID NO: 470607 - DNA, 122 bp, Homo sapiens
ctatctacggctaggctgcgcctgcatcaggcgtggtgattggcaggcgcctacggcccacgcagagatggccgcgtgggggtcggagcgccaacttctcagctccccttctcccatgaccc

SEQ ID NO: 470608 - DNA, 122 bp, Homo sapiens
cttgcagccctcttgtttccgtgtatctacaccttcttctcttggccagaaggatatttacgttttggttcacagcatttgaagccaaaagttcagcccttcgaactggtttgctatacaaa

SEQ ID NO: 470609 - DNA, 122 bp, Homo sapiens
cctgccttcactggcctctctgaattccacattccaactgaacccccacagaggtgagcacgcagcagcccctaacggtggcccggtaccatctgccattttgctgcttgccttctccgagg

SEQ ID NO: 470610 - DNA, 122 bp, Homo sapiens
ggcccgcgccgagccaggctttctccacggtgcgtgtgggagtgcacagaggggcctcgacggcttttctgtatgtgttataaataaaccccaatagtggaaagctccagcaggatgccctg

SEQ ID NO: 470611 - DNA, 122 bp, Homo sapiens
agtctctgccccagtggatgagttgtgttctgtgcttctgtgttctgatcttgtgtcatgcgtattagctttcttcagcccaccttcattcaaacaaaggtgagtatggtttctatgagata

SEQ ID NO: 470612 - DNA, 122 bp, Homo sapiens
cctcaaaaggccccaggcctactgtggttttttctgagaggctcccagaaccaagtggcacgttggtttcctgtgcgtctgtgtctttgtgcctgtatctcgctgggggacttcacaggaag

SEQ ID NO: 470613 - DNA, 122 bp, Homo sapiens
gacatccatttataaaatcctatagacaattacagttatcataccagacctctaagtgtacgtattaagaaaaagtatacctcctcaatgccttttttttttttagatagattcttgctctg

SEQ ID NO: 470614 - DNA, 122 bp, Homo sapiens
ccgctgcgttttgggtcggcccagtggctccggactggaagcctggcagcgcagccaccccgtccctctgaccggccttttggttccctgccacacacgtcctgactcccagccacactcct

SEQ ID NO: 470615 - DNA, 122 bp, Homo sapiens
ctagtatactgagtgacaagttagaattccctgcctagaaagtatttattgggccgggcgcggtggctcatgcctgtaatcccaacactttgggaggccaaggcggccggatcatgaggtta

SEQ ID NO: 470616 - DNA, 122 bp, Homo sapiens
ccgtgggggtggggggcgtgatgatgatgtcgggcacgtccaggtgcttgtcgttcaggacgggggcctcgtcgtggctgctgctgctgctgctgacacacatttgaaagcctgagaagcca

SEQ ID NO: 470617 - DNA, 122 bp, Homo sapiens
cgcagcgtcggtcctctgggagaagaggactccccgcgctccctcggtggcgctggcgtgcgcgcctgcagctcccgttcagacttgtttccagcttgtccagatgaacgcttgtcaccaaa

SEQ ID NO: 470618 - DNA, 122 bp, Homo sapiens
accaaccagcgccgaaggggctgggggctgagtgcagaccccgaagaaggactggctcctcggtgctgatggctgtccttctaaaccagaggggagtccaaaagcttcagtgcaggaggaag

SEQ ID NO: 470619 - DNA, 122 bp, Homo sapiens
aagactgccccctggtgggcgggagccctcgggaggcccgcaggcccagcgtcctgcgcccgtaatccctcaaaggggcttctctggaatcacccccaggccctggggccaggatcgaggct

SEQ ID NO: 470620 - DNA, 122 bp, Homo sapiens
attggctttggaattagatcaatgtgggttcaaatcccagctcagccatatctatgaaagcgtgacttgcagataggtgaccacaaacaccacagccgtaatgatgataacgtgcctcatgc

SEQ ID NO: 470621 - DNA, 122 bp, Homo sapiens
agggcccaacttctaaatctttctcactccaaagtctgcggttttgccagctcagtgtcccgcccccaccaccatctgattatactggggcatatttcgtgcaaggcctagaacaggcaccc

SEQ ID NO: 470622 - DNA, 122 bp, Homo sapiens
agtgaaagtagggctcatggaagcaagcgatccatggagatgtaggtcagatccatttcacgtggttccaggcccatcctgtggttacttccccaggtccagaatgcataactgaagtacat

SEQ ID NO: 470623 - DNA, 122 bp, Homo sapiens
taatacctctgaagctagaaaatcgctcacgattaacacgtgccgttaacggagtcttcccgcctctcgcttcccttcccctcccccctgcggcgccgacacagacgcggccctcggcgcca

SEQ ID NO: 470624 - DNA, 122 bp, Homo sapiens
cacccctcagaagctgattcccccgcagccaacgggccgcccttcccccgcgccccctgccgtcccacccgccgcctcgcccgtgatgccaccgcagacccagtcccccgggcagccggccc

SEQ ID NO: 470625 - DNA, 122 bp, Homo sapiens
agcggcactcacttctcgggtcttcgtgagcattaagtcaatgaacccagggcaccaaagcgcgcaacacgcagtaggcgctcagttagtggcgcctcgctctgtactccaggaagcccaac

SEQ ID NO: 470626 - DNA, 122 bp, Homo sapiens
atctctgtgcctgtcatttgcatttctcttctttgtgcaggcttttcttcctccctttcccggggcccaggcgccggcattagcatactgcgccccgcgcgcctgctgcagggggccccccg

SEQ ID NO: 470627 - DNA, 122 bp, Homo sapiens
gacctaaggcaggtccagggtggtgcctggtggacatgaagaaggcagcaactttcagagcgagcgtcagaggggcttgtaatgaacagaattgccttctgatgatgtcaacatatctaata

SEQ ID NO: 470628 - DNA, 122 bp, Homo sapiens
tgagagcaataagggacagagacggagagagaatgaacagcagccttcagtggtgaaggacggaggaaccacgagaacaatctaagatactcagaccaaggggttggggcgtatgagtctct

SEQ ID NO: 470629 - DNA, 122 bp, Homo sapiens
agctgaccatgctcaacacagtgtgcaagatccagggccaggtgaagaaccccggctacccgcagttggaggggctcctgagcgagtgcctgatccgccaccagaaggagctgggcaacgag

SEQ ID NO: 470630 - DNA, 122 bp, Homo sapiens
gccccgcccccgcagacagaggccggaggctggctggtgcagcgatgtttaatggcaattcgtataaaccaagcccatgcacaagtagaaagtgcccgtggagccggcaggaggcccccgcc

SEQ ID NO: 470631 - DNA, 122 bp, Homo sapiens
tcgcagcggccgctgccctgacccgacgggtatcagccggctctccccctccacccaggacgacatgaacgaccgaggccagggagtcctctccttgggcctctgcatccccccatccttgg

SEQ ID NO: 470632 - DNA, 122 bp, Homo sapiens
agtttttaaagttcagggcgaggaccagtttgtatttggtgcggagtatcacatcctctccggaccctaacaggatgtgtcgcctgctcgctccaaccccacaaacgccgtctgggctggca

SEQ ID NO: 470633 - DNA, 122 bp, Homo sapiens
ctcctggcgttctggccggctagccaagcgctggactacatttcccagaggcacggcgtccggagcgctggactacatttcccagaggcaccgctcccggagcgtagcttcatttccgttag

SEQ ID NO: 470634 - DNA, 122 bp, Homo sapiens
acatgggaacaagcccacatgggatatgatcacctcatatccgcaaggtctgagatgccacgggatttgctcagtactcacatatatgcaatctgaaatttcaggcaagttagaagtctatg

SEQ ID NO: 470635 - DNA, 122 bp, Homo sapiens
tctcctcctgggaataactgtcatttcctatccacactgccagaaattttatcaatgtagcgttctttcctcaaaagcctttttggaataaggaaagtggggaataaattataattaatttt

SEQ ID NO: 470636 - DNA, 122 bp, Homo sapiens
cttcggccctcctagaggaaagactttgccttcacacgcgattactttcactggagatcacgacccggagacgctggcgactgggccagcgcctcccatttcggttcacctccagttcaccg

SEQ ID NO: 470637 - DNA, 122 bp, Homo sapiens
ttctcctgccaggaacctccttcctccctctccccaggaacaccaagccacacaggattccgggaggcacaagatacctgttgagaccagtaagcaaaagattaatctaaaacagcagcttg

SEQ ID NO: 470638 - DNA, 122 bp, Homo sapiens
agattgattgagcccagaaggtagaggccggaacgtcaaggctgcagtgagccatgattgcgccactgcactccagcctgggcgacagagcaagaccctgtctcaaaacaagaaagaaattt

SEQ ID NO: 470639 - DNA, 122 bp, Homo sapiens
atttcctctcttggaagtggaggccctgaggcttctgagcgcgcagggctgctgggaggacgagtaagaaaagcgggtgaagcacagagcccaaggctccgtgtggcccccccagtcagctg

SEQ ID NO: 470640 - DNA, 122 bp, Homo sapiens
ggttctcgatgggcactgagttgttgaagaccagcgcccacagcagccacacggacttgccgatagtgaaagctgggcccccggactctgggggcaagaggcggggggatgctggagctcct

SEQ ID NO: 470641 - DNA, 122 bp, Homo sapiens
tgtgatcatgtcgtgggctttccgctccgcctcagacacggccttctgcagctccgtcatcgcctggcgcttcacctcattgacggcctcctctgtgtgccagtcaggccaaaccagacaag

SEQ ID NO: 470642 - DNA, 122 bp, Homo sapiens
tctactaaaaatacaaaaattagccgggcatggtggccggcatctgtagtggcagctactcgggaggctgaggcaggtgaatcccctgaatcgaggaatcagacgttgcagtgagccgagat

SEQ ID NO: 470643 - DNA, 122 bp, Homo sapiens
accccccccccaggctgacccgttcctcgctctgtcgtccccaggtggaggaggagctgacgcacctccagaagaaactaaaagggacagaggacgagctggataaatattccgaggacctg

SEQ ID NO: 470644 - DNA, 122 bp, Homo sapiens
ggcctcctgcctcccgaaggcttgcacaggcccagcctctgcctcacagcggactctccacgcccagctcgctctcgcctcactgcggcctcccgagtccaaagctcctgcctctccgccac

SEQ ID NO: 470645 - DNA, 122 bp, Homo sapiens
cgggagctgcggtggctccggccggttgtcctggcacacaaggaggcgaggctatgcgttcgaggccaacctaggcaaaattggaaaaaaaaaaaaaaatcagtatcagaaataatgcttga

SEQ ID NO: 470646 - DNA, 122 bp, Homo sapiens
tccggggatgcgcgcccggtctggaaagggaggccctgccatgcggcgccgcccaaagggcgcctgttcctgcagctgctgggagccgcgcacgcctgctccagctgggctccgccgaggcc

SEQ ID NO: 470647 - DNA, 122 bp, Homo sapiens
tgaccttttcttgctgggcttggcattcccctggctgggctgggtgtttccccggtggggcgtgcactttccctgggtggtggagggggcgtgggctctccccgggtggtggggggacgtgg

SEQ ID NO: 470648 - DNA, 122 bp, Homo sapiens
ccagaggatgttttcattgttgagctaaatgaatctgcaagtctatgctgccctctagggcggcctacagtgcctttaggcgagtagcaggagcaacacaaaacttaacagaggtttccctg

SEQ ID NO: 470649 - DNA, 122 bp, Homo sapiens
ctcctgcaggtgattttttttttttcatggctgtaggcctctcaaatggttacggggagacgtgctcaaagcaatcacacccagtgtctgtcccgactcatggtgggagctggccaggggaa

SEQ ID NO: 470650 - DNA, 122 bp, Homo sapiens
ataccctcaggtaccctgaagtagtcaggaaaagtgtgattaatagattcattctcctcccgaggctaagtagaaccaaagaaattgcccaagattacatactctgctggggatcttttatt

SEQ ID NO: 470651 - DNA, 122 bp, Homo sapiens
gtcttcagggcttttgctcctgctattctctttccctgcaatgcatgttctttggttcttcgcattgtgggctgcttgaggtttctgcttaagtgttacctcctgagaatggccttctcctc

SEQ ID NO: 470652 - DNA, 122 bp, Homo sapiens
cctggagtggccccaggcccggacacggatgtgtagcaaaacggggtgcggagtggagcccgcagagagggaaccaggccaccaccacgtggtcactgtagggtccccctgcaggagcccct

SEQ ID NO: 470653 - DNA, 122 bp, Homo sapiens
gaagtctgtggaagaaaacttacattcacacataagatgactgcaagagagaagttaaagcgaagaaaagacaacacagttatcttctgccatgctctgggccatcaactgtgctgaagggc

SEQ ID NO: 470654 - DNA, 122 bp, Homo sapiens
agagcggagtgcgcctgggactgagtgtcctcctcggggactgcatgggccccgcaccgccgcctgccccgcgccacgacagcccagagcacggatgggcccagactgtcctacagccgttt

SEQ ID NO: 470655 - DNA, 122 bp, Homo sapiens
aaaaagaaaaagaaatataaaacccaaaccaaccaaataaatcacaggccggtgggcgagcggtaaggggtgagtgaaacacacttgggtgctttgcagggccctcccattccgtgcctggg

SEQ ID NO: 470656 - DNA, 122 bp, Homo sapiens
gtaagggcagtgctgtgtctcccccttttgactgggagctccctgggctgggacagtctccgcccttagcctgggagctccctgggcttggctgtggttccgcccttagcttggaagctcct

SEQ ID NO: 470657 - DNA, 122 bp, Homo sapiens
aaatagcttccagaaaagtgaataaaccacaaatggttgatttatttctgactctcagcccgtctctcacgaagacagagcctattgaccaaaaacttcaggatctgcatctgagcagatcc

SEQ ID NO: 470658 - DNA, 122 bp, Homo sapiens
gaagagctgtgtctggaaaagtaggcggccacaggcaagagcctgagttctgaagggtcccgggctccaccaggcggagcccagaaaactaacagccccagagaactggcaggaggcaccgg

SEQ ID NO: 470659 - DNA, 122 bp, Homo sapiens
ccgtgtttacctgaaagtctcggtcttcgttgaagcgggagaagcggtccgccattttgccgccttcactcctctcaggacgacgctctccggttcgctccttccctcctgcgacacccacc

SEQ ID NO: 470660 - DNA, 122 bp, Homo sapiens
atttggagtgtcttggaggaagctgatggagattatgggattgctaaagcctccttccaccggccacctcgtggtactatcactgctctcacaactttagaggggtccagtctcatcaagcc

SEQ ID NO: 470661 - DNA, 122 bp, Homo sapiens
agctgttaaaaggtttggaaccaaaaatattaagaacttccactgtggcaagaatttaagcgaaaatgattcacagcccagtgtgaaataacagaatgcagccatttgagaagcagttgtaa

SEQ ID NO: 470662 - DNA, 122 bp, Homo sapiens
gtgtctactttttagcctacaagttctgttttggggtttggagaataaggctcctacctacggtatggactcatgttctgtgcattgtggcactatgtaattcctttttttttgagatagag

SEQ ID NO: 470663 - DNA, 122 bp, Homo sapiens
agtcttgctctgtcgcccaggctgcagttcagtggctcgatctctgctaactgcaacctccgcctcccgggttcaagcgattctcctgtctcagcctcccgagtagctgggattacaggtgc

SEQ ID NO: 470664 - DNA, 122 bp, Homo sapiens
tcagaggcagtcagagctatcgtaaaggttaaaatatcgaggtccaccctgtgaggatttcgctgatattcggcatcaaacgctgcttcccttgctctgcaggcttccacgaatcgcctgcg

SEQ ID NO: 470665 - DNA, 122 bp, Homo sapiens
accccctagtcctccccgtcctcaggtggcgtctgcggtcgaggatgtaagcattctactcgttgattagtatcgtttccattgacaaaccccagactgatgaagaccactttcagctgcag

SEQ ID NO: 470666 - DNA, 122 bp, Homo sapiens
acttcagctttgctgggctctatttggccagtgaaactctgcctggttcattcgcacatccggaagccacttcacggggggccgtcgcaactggaaccacacacttggcatcggcggttgag

SEQ ID NO: 470667 - DNA, 122 bp, Homo sapiens
catgcccctcgcctgctataactcattgccctctgtcgcactaagtgtgtggttgtttatcgtttgtttatctccctactagaatgtctgctccacgagggaggggctttgtctctttggct

SEQ ID NO: 470668 - DNA, 122 bp, Homo sapiens
tggctgccgggggcgggaaagtgatttctcggaaagcagagcacttcgaagaaggcgggccgcgcgagccaagctgacgctattggtcggtgtggccgtcgctctgcgcaccgcccgtcccc

SEQ ID NO: 470669 - DNA, 122 bp, Homo sapiens
ggaaaactacactacttagaaggctgtgcattatgcgtacggcgggagctgggccaacgacggcctaggacggggacgtttccgacggctcacgccggtgggggcgggacttccgggttgct

SEQ ID NO: 470670 - DNA, 122 bp, Homo sapiens
ggcccgcttcatgtcgatccagttgtgcagcgtgccgcacagcgcctcctccgaggtgcccggctgctgcaccagctcgcgccgaggcccccacagcaggcactgcagcacgcgcttggcct

SEQ ID NO: 470671 - DNA, 122 bp, Homo sapiens
agacaccaacacactgaaggtgcataccctgaggccttccccaagggctgggattctccccgataggaggcagcccatctgcatcacccttctgggaggtgtaagagggaggggcctgtgtg

SEQ ID NO: 470672 - DNA, 122 bp, Homo sapiens
tgaaagtctggatcctgacacagaaactcgaagactttccccagtggctataatgggcaacggttatgttgatcttattaatggtaggtattcaatatgagtaaactacaattactcaaaac

SEQ ID NO: 470673 - DNA, 122 bp, Homo sapiens
ccacaagcaccacatgtgccctatatcctgtttatacaaggttcaggttcaacagggaatcgtgtgtacactgggaccctcttgtcctctgagagttatttagcactgtgtcgaaggcctct

SEQ ID NO: 470674 - DNA, 122 bp, Homo sapiens
ctactaaaaatacaaacattagctaggtgtggtggtgcacacatgtagtcccagctactacgtaggctgaggcagaactgcttgaacctgggaggcggaggcagaggttgcagcaaaccaat

SEQ ID NO: 470675 - DNA, 122 bp, Homo sapiens
ctgttccggccgtgggcatgggacatggcacagcctgctcgtccacgcttctgttccggccgtgggcatgggacatggcacagcctgctcgtccatgcttctgttccagttgcagcaggtgg

SEQ ID NO: 470676 - DNA, 122 bp, Homo sapiens
gcgcagtcgtcacactgccaaaacaaaactcctactcagaattcagtgttaacatacggtcgggattggggttcagtgcctaaaatgcagcaggaggaagatcttgggagtcctgctttctg

SEQ ID NO: 470677 - DNA, 122 bp, Homo sapiens
acctcaagtgatctgcctgcttcggcctcccaaagttaggattacaggtgtaagccactgcgcctagcaagaagctgttgttattgtaactattattcagttggataccttgtggtttgagt

SEQ ID NO: 470678 - DNA, 122 bp, Homo sapiens
aacaggcagcttcttcaatatttccagggccaatggccccaaaagggctcattccaagatcgaaataatcatctgagtctgaaatagctctgcctatgtcctgtggaagtttctcctggttt

SEQ ID NO: 470679 - DNA, 122 bp, Homo sapiens
tattctagtaactttctccccagtacccactccagaggatccagggcaaaagtaaatctccgaaagtgtttgtaggatgaagctggtgactcatgcctagtttatgagtggtaagtgttaca

SEQ ID NO: 470680 - DNA, 122 bp, Homo sapiens
cccatgttccgggcggggaacactcgagggtgctccaaggccagaggtcaatgcggggtgcgcgtgaataacctagggggacactcaggggaatgatggctcccccgagaggtaaagggtgg

SEQ ID NO: 470681 - DNA, 122 bp, Homo sapiens
cccggcctggatcccgaacagcaggtcgttaatggaggtgtgatggccgccaaccacttccgagtggcgctcccggtaggtttggtggaaggaggccgtcatcttgtgcttcttcttcttct

SEQ ID NO: 470682 - DNA, 122 bp, Homo sapiens
atacgccaaacacggggatcagtgtgttgtggaagaaagactgctaagtgagaggatgcccggataagcctcagctctgcctcgacccaggcacctggccttgcttaagtttgttttgtttt

SEQ ID NO: 470683 - DNA, 122 bp, Homo sapiens
actgcttggtgaattctggagttcggggctcctcttatcctgacttgacctacctgggggcgatggctgggtccctaggcagctctatctcccccatcccacctatccctgggactgcaaag

SEQ ID NO: 470684 - DNA, 122 bp, Homo sapiens
aaataaaagtcggcaggaatacaaatctgcagcaatgaggctagctcccccttccccacgcggcagccagcgcgcgcgtcactccttccacacatgcgcgctcacacgcacccacacataag

SEQ ID NO: 470685 - DNA, 122 bp, Homo sapiens
gaagatgatcttcccaagctctgtaggcttaaaccttcatcagacgctctgcagttctttcgtttcaaagggattacagggtggagttggaagtttccagtccttgtttttcagaatccaat

SEQ ID NO: 470686 - DNA, 122 bp, Homo sapiens
ggcttccgacggaggcgggaggcgggcgcggagttgccgaggtggcgggagcgcagggagcggaggaggcgggacgcagattgcgccggtgacagcccgaggctccctcccgcctccttgca

SEQ ID NO: 470687 - DNA, 122 bp, Homo sapiens
cccggctccggctccggctccggctcgcgatccggggccggtttctaaggctccggacggcgccggcagagtctgtcttaaagcgacagcgcgcacagccaggttccagcagtccctgcgcc

SEQ ID NO: 470688 - DNA, 122 bp, Homo sapiens
tctaagtccattccttactctccagcctccaaaattattaaattctaagttttgtttattcgggtgcctcaagcctgagtctcagcttaatcactttgtcccagaagcttttcctgactcca

SEQ ID NO: 470689 - DNA, 122 bp, Homo sapiens
caaacctcgcgcccttccgtttgcgcgcatggagccgggtgagggcggccgcggccaccgcgcgatggaggatttggaagctcagagccagctggtacattttgagaaatttagcaaaccag

SEQ ID NO: 470690 - DNA, 122 bp, Homo sapiens
aaacgagaataatggttatttcttgatttaagtgggagctggttaaattagcagtgacggcggtgttctgtctagtttgaaagggataatttcacacactcactaccaccccctgggggcct

SEQ ID NO: 470691 - DNA, 122 bp, Homo sapiens
caaaagtgctgtgtggaatgtgcatttgctgtgtggtgttagactcagtagggagctcaccgtccctgcaaaagtgctgtgtggatcgtgtgggttgagtgtttgccgtgcagtgttagact

SEQ ID NO: 470692 - DNA, 122 bp, Homo sapiens
ctctttttgctttccaggataaacatctgtctcatttcaccaactctccattggcctcagcgtctctcctctcagtagattcttcagaatactatcatccaagtcaagcagggaattctgct

SEQ ID NO: 470693 - DNA, 122 bp, Homo sapiens
tgggaaccatttaataagaggcctcaggtgcgggagccaactttttgaggctgcggagtccgagccattttaaccgctctgcatgcatccattctttcgttaatttaatatttactgcctcc

SEQ ID NO: 470694 - DNA, 122 bp, Homo sapiens
cccacctccgccttgcccatcttggcggccagctgcagcggcgtgaggccatcgttgttgcgagtggtctccagctcccagttgccactccgcagtaggatcatgtcgtacatgcgcttcac

SEQ ID NO: 470695 - DNA, 122 bp, Homo sapiens
attgtcacttgacccccccagctctgtttctaagtgctgaaagagctccaggctatgctacgggaggagaagccagctactgaggaaaagccagctactgagaaaaagcgggagtggtttac

SEQ ID NO: 470696 - DNA, 122 bp, Homo sapiens
cggtctccgctgaaggtgctgagcagcagaggctgcgcgtcagatgtgagtgcgtacatgcgagtggctccgccttggtgtagggtcacggtcaggaatgccaccttagacacgtcatctga

SEQ ID NO: 470697 - DNA, 122 bp, Homo sapiens
gctgtgcgaggtgcttgtgggccagcgcgagtttcgggtgggtgtgggctcggtgggccccgcacttggagccccagctggctccaggcaatgaggggcttagcacctgggccagcggctgc

SEQ ID NO: 470698 - DNA, 122 bp, Homo sapiens
ctggtcttgaactcctggccttaagatggcctcctctcatcttgacctcccaaagtgttgcgattacaggcgtgagccaccacgcctggccacctttgaagatcttgaggatacctccctat

SEQ ID NO: 470699 - DNA, 122 bp, Homo sapiens
gcctggactctcccacatacctgcctactttatgtaggatcaggacaaacacaccggccacgttgcagggcatagagtgtcggtgcatatatttagatggcagtagcaaggaacgcgtgcgt

SEQ ID NO: 470700 - DNA, 122 bp, Homo sapiens
tttccagccccaagggaagacacccttatggcctggtcttttaaggaaaaggggccaggtcgctgggtggcagaaacttgggcttgggagtcatcaccacttagcagctgcatgagcttatc

SEQ ID NO: 470701 - DNA, 122 bp, Homo sapiens
cgcgctgggcagggcgggcgcaggcggggccgggagccggggctgtcggggcggtgggggcgcgtggctcctcccgcccggtcgggaaataccagccgggcggggccggtccctcaggcctg

SEQ ID NO: 470702 - DNA, 122 bp, Homo sapiens
agctgagcgtgagaagtaatttggagatgaaaccctaaggaaagagtagaggcttttatccgagcaggaaaggacactcaagggctttgggaaggcgatgtaaataaatcgctttctggcat

SEQ ID NO: 470703 - DNA, 122 bp, Homo sapiens
gccactccaggactcagggagtggctggctttgggccagcccagccctccagatccaaggcgggtcccctatctccacaatcaaatggtgttctgcctccggccctgtccggggaccctgct

SEQ ID NO: 470704 - DNA, 122 bp, Homo sapiens
agaagtaggagcagagcagcgggatggccgtggagtagctgccagggttgtagcgcaggtcgatcaccagcgcagccgtgtccaccagctgttgccataccagccgcaccagctgtggcccc

SEQ ID NO: 470705 - DNA, 122 bp, Homo sapiens
accagacccaaaaaccatgcactcgggggtgggcggggccgcgagggcgcgcattaggaccgcgcggccgcggtccgccctctcttccggagggcgggcttcacagccgagccctggccgcg

SEQ ID NO: 470706 - DNA, 122 bp, Homo sapiens
acctcaaggggctggtggctggacccacgcggccgtcactgccccgacccagcagaaccccgtgggcgtggttgcacacgtctcccactaacgttcagcatcaaaagtcgggggatcgacat

SEQ ID NO: 470707 - DNA, 122 bp, Homo sapiens
tccgcttttccctactcccgagtcacagcttgtctccccgaaatcctaacatctcaaaagcgcccccttccagtttctatcctgagaccaccgctctcaagaagagacctcccccaacccca

SEQ ID NO: 470708 - DNA, 122 bp, Homo sapiens
agtgacggttgggctgtctgcacaggtgggccggtgcagcccgcaagcggacagcctgcccgttggaacaaagagtcatctaatttgtttaaagtccaagtgtaaagagacacggcaacttt

SEQ ID NO: 470709 - DNA, 122 bp, Homo sapiens
cgctgttgtcaccgagcgccccgcccaccgcgttctccgacccgcggccggcagggggctcgcggcctccgccaggcgtccttcggctccgtcagttcccacagggccttgtgcgacatggg

SEQ ID NO: 470710 - DNA, 122 bp, Homo sapiens
cccagggcgccccgcgggggcgtgcgcgccacacgcgtgcggggcaggctgggcgccgggcggcaccctcccagccccggcgtctatttaccaacaaactgccggcgctcagcagcggcgca

SEQ ID NO: 470711 - DNA, 122 bp, Homo sapiens
ggtggagctggcgtgtggaaaaagcaaccggctggcccatgtgtccgagccgagcacctgcgtctacgcgctgacgttcgagacccccctcgtctgccacccccacgccttgctaggtaggg

SEQ ID NO: 470712 - DNA, 122 bp, Homo sapiens
gattaggttgagtcagtgctaacctaattagcccccgattcctgaggtagcaaaaagtctcggtggaaaaactttcccccattctcacccttcctcagtcatcctgggagcgccattgtgtt

SEQ ID NO: 470713 - DNA, 122 bp, Homo sapiens
agctcccttagtctccaaaagaggagatccaagcaacgatacttcatgagcagtcggcttcgagagtcatcctgagttttcaaggctgacacaaatatcagtctaactacgcagtccacctg

SEQ ID NO: 470714 - DNA, 122 bp, Homo sapiens
caactgccccgacccccagaagtgcaaaacgaacaggctggcaagtgaccaaaagagacccggggagcatctgggcttccaaggtcctcggtacggcccaaggcagcgaaggacgcgcggct

SEQ ID NO: 470715 - DNA, 122 bp, Homo sapiens
agtcttccagcgagtggagtcactcttaactacatttcccaggattccaagggagccgcgcgctctgcgctcatcttcctaccagaaatcggcaagtcactgaccctcgtcccgcccccgcc

SEQ ID NO: 470716 - DNA, 122 bp, Homo sapiens
aaggctttctaggtattggtctctttccttcattcctaaaccagattggttgcttatttccgtcaagctgaaaccaaaagtaagcaaccaaaaagcaaccagcaaccaaaagccttgttact

SEQ ID NO: 470717 - DNA, 122 bp, Homo sapiens
ctgtacaaagtgccatggaaaacagaggtgggaacgacaaattctaccccggaagagccccgaaccctcagagcccacggagacttcatgcctgaactgagtcttggtaacacggaggaggc

SEQ ID NO: 470718 - DNA, 122 bp, Homo sapiens
ggcggtttcactgtcctgcaagtcctctgggctccacctgctccttccagtcctcggcatcgtacggggcggtttcaccgtcctgcaaggcccctgggctccacctgctcctcccagtcctc

SEQ ID NO: 470719 - DNA, 122 bp, Homo sapiens
cggtgaggcgcgcgaggcgtgtgctgccagcttctctcttccttccccggtccgccttcgcgcccttaaggagacagtccctgggagtttctgcctttggtctccagttattgttctcttct

SEQ ID NO: 470720 - DNA, 122 bp, Homo sapiens
tccgagctgccgcggccccggtggtcagagcgggcggccctctggctccggcgctgtgcacgccctcacaccccgacgtgaggggcttcggcccacttccctcgtgtggccgtaggaggggt

SEQ ID NO: 470721 - DNA, 122 bp, Homo sapiens
gggtgggaagggggcggggagtcacaagggcaatcgatctgtttctcttctcccaaacagcgccaatttcccagtgcaaatgggcttaacctggcggttgcccagagcagtaaggaatggct

SEQ ID NO: 470722 - DNA, 122 bp, Homo sapiens
ctggcctgagaagccaactcagactcagccaacaggtaagtgggcattacaggagaagggcgtctctaacatgcactgtagatctaaaatcttcgggaagatacagcatgagtttctgtcca

SEQ ID NO: 470723 - DNA, 122 bp, Homo sapiens
cacacgatcaaatgtgcacgtgcatctgcagacatgcacaagcagacacctacacgcactcgcagacatgcacacccacatgggcgaatgtgcacaccccccccacacagatagcacacgtg

SEQ ID NO: 470724 - DNA, 122 bp, Homo sapiens
aaacatgagggaaaaagaaaatacctgacctgaatgggccagactgggtgtggtggttcacgcctataatcccagcactttgggaggccaaggtgggaggatcacttgagcccaggatttca

SEQ ID NO: 470725 - DNA, 122 bp, Homo sapiens
cctcaaactgttgtgcagagcagctgcaccttttacattcccgctagccgcataggagggcgccatctctctgcatccttgtctgcacttgctgcggtccgtcttgttgatgacagccgtct

SEQ ID NO: 470726 - DNA, 122 bp, Homo sapiens
gaatctctgtcactggggcaagaaattacagctgtgaacctgctggttagtgttctgtgccgaggccttgaacttatgattaacgtggttgacgtttctgtccagctcatcccatgctcagt

SEQ ID NO: 470727 - DNA, 122 bp, Homo sapiens
tgaagctcggaggagctgcggcgcagcttcgggagcttagagctggggaagacgctgcggcgcgcgccactcgagcctgcgcggccgcttcccggcgcagcacccccctctcgccctctgcg

SEQ ID NO: 470728 - DNA, 122 bp, Homo sapiens
tgctttcctctctgcaagccccctgccctgcctgtatctgcaaggcctattggttctccacggagccggactctgactcgctccagcacaaaatgcctaagccctcggaggtgctccgtatt

SEQ ID NO: 470729 - DNA, 122 bp, Homo sapiens
gccacgtgaggcgagagctggttccaggaaaggggggccagagaccccgcagagtcgatgcgtcaggctgtggagtggggaatcatccttaaaccccacaatgtgcctagtgacctcccctg

SEQ ID NO: 470730 - DNA, 122 bp, Homo sapiens
ttgccggagctggagatgaaagggtggggcttgtttggggaaccgaaatcagccaaatcacgcagccacagaggaggccagggaagctctagaggcgttttttggccaaggggtgagcagag

SEQ ID NO: 470731 - DNA, 122 bp, Homo sapiens
gccagtcacagttcccgcttctgcaccccagggcctctgaaaactgtgaagtccatgctgcggtctccacgcccagtggctttccacgtctctccacatgacactcacctgctgcccatcac

SEQ ID NO: 470732 - DNA, 122 bp, Homo sapiens
ggcggtgttattcggagaaggaaaataaatgtctgcggttgctctgccgggctgcgggggcggtgccctggaaggaggggctgtgcatctgcaccatttctaggaatgtccgccctctggga

SEQ ID NO: 470733 - DNA, 122 bp, Homo sapiens
ctctcctggtactcgatgagttcccgggcaagtgatgggtaccgaggcgcctgcttcagccgggacttcacgttgaccaggcgctggctgtgagctgggtgagggagggagagagaaagaga

SEQ ID NO: 470734 - DNA, 122 bp, Homo sapiens
agagtgggtttgcctgtgtcgttgtgggttctctgatggggacacagaactgtggggtcccgggcagtaactcgagcccgcggaagacaggcatgtgtgggggctgcggcaccaggctgggc

SEQ ID NO: 470735 - DNA, 122 bp, Homo sapiens
ttccctgcagcggcagtagcggcagcggcagcgcttcagccatgtttgacaaccgaggcgcgctctgcgcttgcgcggcgcctagtgcccgctcctcccccgcccccacccgcgctggctcg

SEQ ID NO: 470736 - DNA, 122 bp, Homo sapiens
tacaggcgctccagcttggccgaacggaactgcttcgactggaacacctgcaccagacggcgccagcaggatcgcccactcctgggcaccgcgtcgggcgccacctcagccgtcccgcccgc

SEQ ID NO: 470737 - DNA, 122 bp, Homo sapiens
acttgaaagctagattcagtcctgaggaatggttcctctgttctgagtctacagcatctgcggaatggaatgatcactcttccaaggtgtgcagcagggtgtcaacactttcatatctgaat

SEQ ID NO: 470738 - DNA, 122 bp, Homo sapiens
tttgtgtaatttcatggagtagaggtgggagtgtgtgggctgattcggggtgatgcagttcgacagttggtgccaaaaaggaacttcctgttgacctgcttagaggcatgatcttctccagg

SEQ ID NO: 470739 - DNA, 122 bp, Homo sapiens
tgttgactggagtcgctcggagcccccggcgcgaatgctggatggctgggcggggaggagcgctcaggggcttcacgctgtcaacaccccactccgaagtgactcccgctgcttccagcagt

SEQ ID NO: 470740 - DNA, 122 bp, Homo sapiens
cttcctcttttttttctgacgcaaactaaattctccaagtcagcgtttctccagttccaccgtgctttcatttgtgtaccactcgctctccccctccccccaagaaccacgactacatctct

SEQ ID NO: 470741 - DNA, 122 bp, Homo sapiens
gctccccagcctgtgtagattctgctgtaagtgactcttctctgaaagactggcgcgaggcggctgcttctgactcctgtttcagtttaccctctgtgtgaaatctgtaactatccagcttc

SEQ ID NO: 470742 - DNA, 122 bp, Homo sapiens
cttccaggtcctcgcctgcctcatggcacagcagagctggcctggtttttatgaaactgacgttcattatcgtatcctcgtaaaaccagatctgcaaagaggagactctcagcaaatactga

SEQ ID NO: 470743 - DNA, 122 bp, Homo sapiens
cggcgtgaccttggacaagtggcttcgtctctctaagtctcctcacccgtgaaatgaaaacgcagcgcccacctcgcagggcgcgcgtggagcccgagtgcaccgctttgcgatggcgcgga

SEQ ID NO: 470744 - DNA, 122 bp, Homo sapiens
cgacctcccaggctcaagcaatccttccacctcagcctcctgagtagttgggacaacaggcgcataccaccacgcccagctggaggtcttactactttgcccaggctggactcaaactcccg

SEQ ID NO: 470745 - DNA, 122 bp, Homo sapiens
tttctatgtcctctccacaacgcagccgagcaaggtctcaggttccactccgtacatgcccggggtcctcagggatgggaccctgacaggcccaggaaaaccacaacaaagcctctgttcaa

SEQ ID NO: 470746 - DNA, 122 bp, Homo sapiens
tctctcattagagagaaatccgataaagacataatatgtgggccctggtgcaatggctctcgcctgtaatcccagctacttggaaggctaaggtgggtggatcgcttaggcccgtgagtttg

SEQ ID NO: 470747 - DNA, 122 bp, Homo sapiens
ggacaaaacacgtgtgtcccggagacacagcctgctgggtggagcgggctggcatacatgcgtgcacacggcagcagggggagccgggatgtggctcacatgcctggggctgctccgtggcc

SEQ ID NO: 470748 - DNA, 122 bp, Homo sapiens
ttccggtagcagccggttttcttccagtccttaaatctcacagcattctgcctgtttccacgtggcattgtatgagtgaggaaattattgtagcacatattgacaaacacttggctgatgat

SEQ ID NO: 470749 - DNA, 122 bp, Homo sapiens
gaacatcattatcatttcctgccaagctctttgattcatcaggatattaacaaataaatgcggccaggcgtggtggctcatgcctgtaatcctagcactttgggaggccaaggcaggtggat

SEQ ID NO: 470750 - DNA, 122 bp, Homo sapiens
ccaggggctctgcgatgatgctgaagcgctccacgaagtggcggtaggggaagacgaattcgatgaagtttcgcagagatagcttggagccaggggtagggtaccctgttatgatggtcatg

SEQ ID NO: 470751 - DNA, 122 bp, Homo sapiens
tggtgcagagcttcagaaaagtcctttccagatcccttgagccagggaggttaaggctgccgtgagccatgatcgggccactgcactccagcctgggcgacagagagagaccctgtctcaaa

SEQ ID NO: 470752 - DNA, 122 bp, Homo sapiens
gagctatacataagtaaaaattcatcaagttgtttaaaaacactcagttgtggccaggtgcggtggttcacgcctgtaatcccagcacttagggagaccaaggcaggcagatggctcaaggc

SEQ ID NO: 470753 - DNA, 122 bp, Homo sapiens
gatgtgctggccatggttccaggagatgagagggctgtggcgagcgttggaggctggaggcgagaggcaggagaagcaggacaaggaatcgggctccagcagtagcttatatattatgagag

SEQ ID NO: 470754 - DNA, 122 bp, Homo sapiens
agatagttcgaccacaacagcaccaaactgagactttgtccctaacataatcggaaagaccgaaaaagagttgggaggacattgtgttgctccgtgatacagtgttatttaaagtcgtgtcc

SEQ ID NO: 470755 - DNA, 122 bp, Homo sapiens
gcaacgcgcgccggcgcggggtgcattgtgaggaaatgcgtgcgcaggtgaaaccttcgtcggtctcctgggctccacgctgtgggcaaagccagttaatgcctttcgtttgcagtagagag

SEQ ID NO: 470756 - DNA, 122 bp, Homo sapiens
caggaccgagggcgaaaccggctgcaaggcattgtgggacattggaggacttggaatatgcgctagaaggctcaatccaagcccattggaagaggaagacgtacgcagcggagacagctgat

SEQ ID NO: 470757 - DNA, 122 bp, Homo sapiens
tacttaaaaaatatttaggttaaaaacaaccctgtcacttctactaagtcatttttagagcgtaatcattttaattcttctccctctaattttataaccacaagacaacctttccaaggaaa

SEQ ID NO: 470758 - DNA, 122 bp, Homo sapiens
ggtgtggtgaccgtgtgtggttggcaaggctgtcagcagtacacacagtgcagcaaccaccgtgtgtggtcagcaaggccatccacagtccacacagtgcaataaccgtgtgtggcgagcaa

SEQ ID NO: 470759 - DNA, 122 bp, Homo sapiens
cctaagaccgtccccgccgctcccctgtcctggtgctttaagggagagccgtatttaacacgtggctggtctcctatttgattcctggcttcctaatgttaaattttcttcacctcgcaaaa

SEQ ID NO: 470760 - DNA, 122 bp, Homo sapiens
atctgggggcggaggggagcaggactgggactgcttacgttttgtttctctttgagaaaacgtggtgggctttttcttgattggacttgatccccaccccccttttgcaggggagggaggga

SEQ ID NO: 470761 - DNA, 122 bp, Homo sapiens
cgcggggccggcaagcggcaggatctccaagctgcgtctctgatgcggctaggggaggcgcgcgatgaaggcccccctcttctccgccttctctctacgccccaccgctactacacgtcgcg

SEQ ID NO: 470762 - DNA, 122 bp, Homo sapiens
ccggccactttctgtgggccgtggggtcctcaaggagacggcccttgggctcaggggctgcgtttccacacgcgcctttcccagggctcccgcgcccgttcctgcctggccgccggccgctc

SEQ ID NO: 470763 - DNA, 122 bp, Homo sapiens
gagtgtcttcgagggtatcatcatttccggtttgttaatcttattcaccaaatgttctatcgctcgtaaggtaaaactgtaatataactaccatattaaataacaaatgttcattataaact

SEQ ID NO: 470764 - DNA, 122 bp, Homo sapiens
gtcccgacccggccgcagccctgccgcgaacgacggtacctgaggacggccccagatccgcggtgcccatctcagccctgctcacaccctgcatgacaaggggtaggagaaagaggagagcc

SEQ ID NO: 470765 - DNA, 122 bp, Homo sapiens
agtatagggaccgagaatcgggcggattgggctggccctggtaacaaaagccatccgggtcgccaaccgtcttccactgcaagaaacaaaccttccagtggctgggctccgcccttctcctt

SEQ ID NO: 470766 - DNA, 122 bp, Homo sapiens
aaggcctctcacagcgtaaacgcaggtgtggttgagaggagctctatctttactcctcatcgcctcggaatcacaaggatgttaggggctctgcagaaccgggaacgaaggccaagccggtt

SEQ ID NO: 470767 - DNA, 122 bp, Homo sapiens
aatgtatcaggatgtagccccatcataagtcgaggcacatctctgtttgagtgcctgttacgtgctggccatggtcccaggcctgcgggatgcagaggcgaggacagtgtttgagtttctag

SEQ ID NO: 470768 - DNA, 122 bp, Homo sapiens
acctgattgcgggccacgaggcgcaattcggggcggagctgctgctcaggtcggtagaggcggggtctccgggagctcagggaggtggagatgagggttttgggcgcgtgggccgccaacgc

SEQ ID NO: 470769 - DNA, 122 bp, Homo sapiens
gctaccatccgccgacatcttgtctgtaacctctgacctccgacgtcagcggaagtggaacggcggcgggggtagaaccaggaagtcttgtcaatgggcagggcttgcgatcttcgcatgtg

SEQ ID NO: 470770 - DNA, 122 bp, Homo sapiens
gtaaacacattataattggagaatggatgagggcgctgtaaggttagccgagagaaaggacgagagagagacccaaggtcaggagagtaagtttactaacctgccaggctgcttcaccacag

SEQ ID NO: 470771 - DNA, 122 bp, Homo sapiens
ccacgggctgtgtcaggtctccctgcctcacagaattgactagaagcacactgcacatttcggggagatgtgtttccaagaagccctaagcccagcctggcccagggcctcagtgtgtgtgc

SEQ ID NO: 470772 - DNA, 122 bp, Homo sapiens
acagttattggctcaggatggctgagaaattgcaagatacagtatgctgatgacataattcgagtcctttgactcgatcttgtctatagctagatgcacccctggactttctggttatgaga

SEQ ID NO: 470773 - DNA, 122 bp, Homo sapiens
tcgtggtgatggcacctaaagaagcagtgatgatagaacagggatgaatggcaactttcacgggctcagtgattggaccccggctgccagaaaactgacaccccttctccccaggccccatg

SEQ ID NO: 470774 - DNA, 122 bp, Homo sapiens
gctgtccatggtaaccagcttttgtgtggcttaaagcttgcatccattttctcctttcatcgttttcccaaaacaattccgtgagggctgttagccctgcttggtagacgaagaagccgatg

SEQ ID NO: 470775 - DNA, 122 bp, Homo sapiens
ggtacctccagggttcccgtggcggttggctgagggccatggcccactctgggtgcagaccgtctctgcagcccggccctcccctctgtgcccccaggcaagtacttctggcggctgacgcg

SEQ ID NO: 470776 - DNA, 122 bp, Homo sapiens
ccttcccaatcctggcttggctcctgggctccacatgctcatccttctttgcttactttccggttttctgcttgtgcccacaattgtgagccccatgaaaacatgaacttgtgtgtgtcact

SEQ ID NO: 470777 - DNA, 122 bp, Homo sapiens
cccagacttcagcgttccccacggctgtgtcagggctggggtggcttatccccctacagacgaaaatcaagatttaaaagcatactcttactgtggtttctctatcaaagcccatcaacgtg

SEQ ID NO: 470778 - DNA, 122 bp, Homo sapiens
tctgctctgaatccttcaaacttgttcttcaggagcttgaaatatctttttgtctaaacccgaatttcaaaatcactgccttgctaaagggatcaaatactccacctgcttggagatggtat

SEQ ID NO: 470779 - DNA, 122 bp, Homo sapiens
tacacgctgtgtggtacatagatccatacagctgtaatgtagacacagataaagcatacacgagatagcagccatgaggctgatttgtatataacaggcacttataggtgtttatacatata

SEQ ID NO: 470780 - DNA, 122 bp, Homo sapiens
cccccgggccgaagcccccagatttggcgggtccgccgcgctgggcgcggctccgcagagcgggcggctggagtcatcttttgcagctcgtctgcactgaggatttctccctgcttggcgtg

SEQ ID NO: 470781 - DNA, 122 bp, Homo sapiens
cttggtggccagggagtcaccctgggagcccggtcctgtgaccccttaatggattctctgcgctcctgggcgggccccttggtcgcatcggggcaggggaatcgcaataaggaaagtgtaat

SEQ ID NO: 470782 - DNA, 122 bp, Homo sapiens
actcttcacgttgaatgttgactttgtgtgtatgcgtgtgtgtgtgtgtgtgtgcacgcgcgcgtgtgcgtgttgacttcatggaattttgttttgtgaaattcccctccaatcgtgtcaga

SEQ ID NO: 470783 - DNA, 122 bp, Homo sapiens
tgggagacaagggagatgggggtaaaaagacctctgccttcagccgttcgcctggcatctcgcctcttcagctcctagtaccagggtgaaaggagggggctccctgaccgagtcctccccag

SEQ ID NO: 470784 - DNA, 122 bp, Homo sapiens
gtaaaaaggcccctccctaaccttgcgtcaattagctggtactgacaggactgggaaggtcgttgcaggccccatctgggcatagcaaggtatccttagtatgttggaatattgagtcattt

SEQ ID NO: 470785 - DNA, 122 bp, Homo sapiens
ggagaaggataagaaggacctgaggactcagtattgaatgaatctcatctttcagcttcacggtgatatctcatgtccatctaggtacagatccatggttttttggttcctgccctatcttc

SEQ ID NO: 470786 - DNA, 122 bp, Homo sapiens
gaacaagctcctccgaagccacacatggttgaaactcctctcccagtgacaacgacgtcacgtctcccaggcactggctcccttgggaatgtgtgagttgctcccctggggcaaagagcagc

SEQ ID NO: 470787 - DNA, 122 bp, Homo sapiens
gatcgcaggccgacccctccaccaagcaccatttcctcaaatctagttcaggttagccaacgcggacagcaacgctcccttcaacgctcctcctccccctagaacggaaaagacggaggaga

SEQ ID NO: 470788 - DNA, 122 bp, Homo sapiens
ggcgcccaggcccttccgacccccacctgcaccccctccctccctaggctggtcccgctccgcacccggaacgtgtccgccacgatctcagctcctcggtgattggtccatttggagaggcc

SEQ ID NO: 470789 - DNA, 122 bp, Homo sapiens
cgcattcacacgggcgagaagcccttcgtgtgcacgcagtgtggccgcgccttccgtgagcgccctgccctcttgcaccaccagaggatccacaccacagagaagaccaatgccgcagcacc

SEQ ID NO: 470790 - DNA, 122 bp, Homo sapiens
tccatgccagaggatccctcttccccctaagaaagactcctagagtctacaggcaccatacgcctcaatttcctggccctgggcttcactgtcctcacatcttggaagttcttccttctgta

SEQ ID NO: 470791 - DNA, 122 bp, Homo sapiens
gtgtgtcccaaagcccccagcactcatgccctgtgcaggcgccgagcagccggccctggccggggcggttccctcctaggcctgtccaggactcggcccccacaaacacatggaccgacaga

SEQ ID NO: 470792 - DNA, 122 bp, Homo sapiens
cagatctgggtttggcctaaggtggatggggagttggggggaggagtggcagtttgtgttcggaagtttcaggctcctaggaggaactctcaggcctggctgtgctggcccccttgaggagc

SEQ ID NO: 470793 - DNA, 122 bp, Homo sapiens
agccgcgtgtggagggagccactaccttgaggtccctgtggatgatgggcggctcctaaccgagcgggacccgcacacagaggcctcagcagccgctaccttgaggtccctgtggatgatgg

SEQ ID NO: 470794 - DNA, 122 bp, Homo sapiens
ctatgatctctccaggtgggaattagatttctgttgcttcaacaagtgggctggagcacacgcttacaagtttagggcagtcgacagcactcagaacagcttctgaaggggctcagttccct

SEQ ID NO: 470795 - DNA, 122 bp, Homo sapiens
ggttcgtgagctgggtttccaatggctcagtcgaccgtgtgcacaaacttgcgctttatccgccggggatcgctgggagcggagataaattcaatccccagggcaatcttggccccgcccgc

SEQ ID NO: 470796 - DNA, 122 bp, Homo sapiens
tgtctccgccgctgccccggcgggggcggccccggtgcccgccgctgctccggacgccggcgctccgcatgaccgacagactctactggccgtgctgcagttcctacggcagagcaaactcc

SEQ ID NO: 470797 - DNA, 122 bp, Homo sapiens
cagccgcagcagaaagcccccaacccaactgacactggcacaactgcaaacggtgtcatccgcacaactttatctcgctcctcgggctcccctaaggcattggacccatcgccgcgtctttt

SEQ ID NO: 470798 - DNA, 122 bp, Homo sapiens
caggagagaattaagagggtcaatggcatgagccttcttacaagctccattttggcaaggcgctgggcagccttaaggaccgacagcttttataggctctgtgttacatcagctttctggac

SEQ ID NO: 470799 - DNA, 122 bp, Homo sapiens
caggccaggcgcggtgcgctcagacctgtaatctcagcacagcactttgggacgccgaggcgggtggatcacatgaggtcaggaggtcgagacgagcctggataaagaggtaaaaccctgtc

SEQ ID NO: 470800 - DNA, 122 bp, Homo sapiens
cgatgtcctcgaccctcttacattagttccgcaccctgtcggagtcccagagcataatcccgggacgatgatagcaggaagccgattcgccctatatgcaaccactttattcaaaagcctat

SEQ ID NO: 470801 - DNA, 122 bp, Homo sapiens
agggctgtttcctgcctccctcccgccccactggcgtctaatcagattacccagcatcctcgggaagctagcctgccctcagccgttgggaaaacaatttatttggaaagaatttgctgagg

SEQ ID NO: 470802 - DNA, 122 bp, Homo sapiens
gaggtgagaggagagtcgacagtgagtgggagtggcgtcacccctagggctctactgggccggcgtctcctgtctcctggagaggcttcgatgcccctccacaccctcttgctcttccctgt

SEQ ID NO: 470803 - DNA, 122 bp, Homo sapiens
aactgtcagacaatggagattatgaggcagtgaactagtgagggtgttgaaaggggatggcgttgggagaacacatctgctgaagacaatctacatgctcatgactaaggcttaactgggag

SEQ ID NO: 470804 - DNA, 122 bp, Homo sapiens
gacggccgtcttaaggagtgtgagtgcacctttctttccatttaatcaagtgcctcgactcgcttctgcctctgacaaagcagaagcctttcgccgagcccggcaaccgagccttagagatg

SEQ ID NO: 470805 - DNA, 122 bp, Homo sapiens
agctgggactactggctcatgccaccacgcctggctaatttttcaatttttttgttgagacggagcctcactttgttgcccaggttggtctcaaactcctgggcccaagctatcctcctgtg

SEQ ID NO: 470806 - DNA, 122 bp, Homo sapiens
atgctcctactatgtgccaggcactggttgtaactgccatctgattggacgatccgtaaacgctgaggcccagtctgtgcggttcacttgcgttcctccacgcgccccccagcacagtggga

SEQ ID NO: 470807 - DNA, 122 bp, Homo sapiens
aggtctgtgtcttgagcttcttcgctccttccctggggacctcccaggcctcccaggctgcgggcactgccactgagcttccaggcctcccgactcctgctgcttctgacgttcctaggacg

SEQ ID NO: 470808 - DNA, 122 bp, Homo sapiens
cacaccgcgcgggctgcgacccctttaagtccggcttggatgacccagatccaaagtcatcgactctctagctgctatctctatggtaagttatcacttccggccggaagttgctgacggag

SEQ ID NO: 470809 - DNA, 122 bp, Homo sapiens
acacagttcttggacatgagttcattgatgcaggacatggccaggacccccagccggccgcgctcctgacccgagacacagttctggctgctgccgttaactgacgccatctttctggcccg

SEQ ID NO: 470810 - DNA, 122 bp, Homo sapiens
tttctatgttaacatgcttaattatgttggaaactgaatctttctttccagtaccacttccgctgtcacggtaaagtccgccatcagaagactgaaggagttgaaagaccagtagacgctcc

SEQ ID NO: 470811 - DNA, 122 bp, Homo sapiens
gccagcatcactggcccatgaaatgcgtccgtttcactcaaatcttcgtgcctccccttccgtgaataccattccatcatccgctgtcaactcctgccgtgtgctgggctctctaggtttga

SEQ ID NO: 470812 - DNA, 122 bp, Homo sapiens
ttatcctgcaagtgttcgagttcatggtactcagattacaagtttacactcctgtatattcgttcacgatgaattcgcggtaggcgaagcccgttcagtctcttcgattacctcaaagctgg

SEQ ID NO: 470813 - DNA, 122 bp, Homo sapiens
actgactgttgacccgtggataattgaatatttgttgtggtgttatgtagagctaggcctcgttctgagcatctctgttctggcacgggagcacaagaggtcttggccagggtaaaccagtt

SEQ ID NO: 470814 - DNA, 122 bp, Homo sapiens
agagccgggttgctctagtcctttgagaatgattcatagaggagggtcaggaaagaagaacggttcagtctgtgaaagcccccttaaaagactggacagttctccgagggagggagaggcag

SEQ ID NO: 470815 - DNA, 122 bp, Homo sapiens
ctggtctctttcttcccctctctccactttggattttcctctgctctggggctctcttggcgggatttttggactggaaggcggggaacctgatcctgcctttgactcaattacgccctgac

SEQ ID NO: 470816 - DNA, 122 bp, Homo sapiens
tgggaccgcgcaggaggaagcaaagagtttttcgagctagaccaacaggaaacacattgacggaaatgttgccatagcccatggggtggctttaactggccgcccccgcgggctgggtgtga

SEQ ID NO: 470817 - DNA, 122 bp, Homo sapiens
caagactcaaagaggcagaggttttgttctcaaatattttttaataaatagacgaaaccacgaaaccactagactgatggcagcaaactaaggtcagatgagaggggaaactagagaaggag

SEQ ID NO: 470818 - DNA, 122 bp, Homo sapiens
ctacaatttatcacaggatggtcgtgtcagcttttaggagctaacgtgagttttatgccacgtcatatgtgttagttctgtctcccaggccttttcccatccctcttctcagcatgtctctg

SEQ ID NO: 470819 - DNA, 122 bp, Homo sapiens
agcgggggtcctggaaattgccccggaagctcccagactcaggaggggaggggattttgacggtcacccgctgcatctcctacttatgggtgcagaagtgccctgctccgcttgcacatctc

SEQ ID NO: 470820 - DNA, 122 bp, Homo sapiens
gaagacgagaatccaagatgcttgctatgatcagaacaccattgccaattagaatcactacgtacataactagaatcagagcaaagaaaatgatctcaagtttggggtaaccagagagtccc

SEQ ID NO: 470821 - DNA, 122 bp, Homo sapiens
cggtacccagccgggaagccagctgcatggcagactcgcggggaggcgactactctccctcgacaaccaggaggttaaacaataactcggtcccacatggccaggacttgactcacaactga

SEQ ID NO: 470822 - DNA, 122 bp, Homo sapiens
ccgggccctggagggccgctgaccctgccggagataaaggatacagagagcccctccccacgtgtgtcttgtgtcttgtgtggcggccttagatccactcagtaccttgagccacagccctg

SEQ ID NO: 470823 - DNA, 122 bp, Homo sapiens
cagccccctaggtctgggacgcaggtgaggggcggtctctccttcccctggcaggggcagcgtaagggtggccggcggctgggactgtcccacgagggggcgcgtctcgggccctaggaccc

SEQ ID NO: 470824 - DNA, 122 bp, Homo sapiens
ctttgccgtcccactggataaggcaggccgagcctgcgctttggcccgggagcagagcagcgagcgccctcctctccgtctttggccttcaactctccagccagccgggggcagggggcggg

SEQ ID NO: 470825 - DNA, 122 bp, Homo sapiens
caaaagtaatttttcagaattttcagctttttcttattgtaggcatgggaataagaacttcgaagctcttacatgttggagccaaaattggaattcccatgcatggggttatgataaatagt

SEQ ID NO: 470826 - DNA, 122 bp, Homo sapiens
gtccctggttcgccgggtcctgcgcagcaatgcgtctgcttgctggtggaattcgccagccgccagcctcgctggcccaggtgcttgacagcatcaaaggtcaaagtgtgttcttcatgcta

SEQ ID NO: 470827 - DNA, 122 bp, Homo sapiens
ctcgtttgcaaacacaccggcctgatataagctggccccacttgcaatgtacgtaaaatgcggagagaactgcaggtgactcacgactttaacttcaagccagtaacatcctgacagcccaa

SEQ ID NO: 470828 - DNA, 122 bp, Homo sapiens
tcgtgcccaggcgccctctccgccgcgctccctggtggccgctcgctagagcacgcgcgccgcagacctagggtatttgcggatcagcgtcctcgcccatctcatcctccacactccgcccc

SEQ ID NO: 470829 - DNA, 122 bp, Homo sapiens
ggggtagacccagggcccagcacttctagaagagagagcagaggggctggggagatggcccgtggtccccacacagggagagaagagcatgtgcaaagtcccaaagcagagggcatctgggc

SEQ ID NO: 470830 - DNA, 122 bp, Homo sapiens
tgcaggcaatgtgttgccaagtgtctgggggcagtcacgtaatagaatcagtaaattcgccgcagtctcttctggtctgaaggtggcagcccaggtgctcctgttggatgcacattcattga

SEQ ID NO: 470831 - DNA, 122 bp, Homo sapiens
tcgcaggaacaagtctgaggacttgacaagggacacctatgtttgggagtggtcccagaacggtatccttaatctgccccttcactgccttcaactctcattgttctcctcaatacagtgaa

SEQ ID NO: 470832 - DNA, 122 bp, Homo sapiens
ggattccacttttgctttaccctcttccaatcaaactccacgcctccacccgaggcgccacgggtagaaagaagtggaaaggctacctgcatcatttggtcacactcagccatttcacagat

SEQ ID NO: 470833 - DNA, 122 bp, Homo sapiens
attcctttctgtatgctatagagactttaatcatctggctcttctgtgagtctcatatttcgtgtggttcctgtgcctatgcacgtaataaattttgattggtttttctcctattaatctgt

SEQ ID NO: 470834 - DNA, 122 bp, Homo sapiens
agggacaccggagaatgccaaatatcaaatacacttggatctgtttttcacagatccccccggcttttttgggggtctgatttcacaaaaggtctcagaacctaatagacaagttgtaatcg

SEQ ID NO: 470835 - DNA, 122 bp, Homo sapiens
gaaaggctcatccatggccacgtcgtcgtccggggcactggtgaagcgcagcagcagctccggccactggcgtcccagcttgtagggctggttcttgggtttcagctgcacctccagcagag

SEQ ID NO: 470836 - DNA, 122 bp, Homo sapiens
attgtcagggctcttcaaaattccacattgccctgtaaaatgaatgtcccagaacaatggcgtgaggtagtttacatgacaaaatacaagtctcccacctaggtttaaagccacattcatct

SEQ ID NO: 470837 - DNA, 122 bp, Homo sapiens
ggcaagtaccacatgacctcatctctatgtggaatctaaaatagtcaacctcagagaggtcgagaggagaatggtgggtagtagaagctagaggcagggatgggtccctggtagccggggaa

SEQ ID NO: 470838 - DNA, 122 bp, Homo sapiens
gtgctgggccgtgcgtgttgcacatgtcattttataatggtgagaagtttctgaggtaggcgtgaattcctaactttacagatgagcacactgaagtgaaccacttgcccaagatcacttta

SEQ ID NO: 470839 - DNA, 122 bp, Homo sapiens
cccttcccattgcaatttgcttactatatcatttgcttattatatctgcattgccatttacgtgggataaaggttgtttacccccaaaggtattgtatgtttgtctattttttttttttttt

SEQ ID NO: 470840 - DNA, 122 bp, Homo sapiens
aaggtagtgttatgggggaaggtaatgtagtctaaggtggggctgggagatggatggaggcgtctgcaatctgagagtctgagcatacttccttgaggtgacactgaaaggcttctgtgata

SEQ ID NO: 470841 - DNA, 122 bp, Homo sapiens
ggaaggaggggagaggtgcagcacccccattgtgcaggagcgaggggagccccgctggcacgccgcactgtgctgaggctgggtgttctagggtgaacaagccacttcgtctagtgggtgct

SEQ ID NO: 470842 - DNA, 122 bp, Homo sapiens
agtcctctaaagtgttgcataaggcaaagataacgttaagtctgtggaggcttccgttatcgggaaaagatgctgtagtgatcttttctgagtgtctcctacttgcgacaaggtggacttgg

SEQ ID NO: 470843 - DNA, 122 bp, Homo sapiens
gtctcttgtgtcacgtgtggtagtggaagaaattggctgtgggagcctttctccttgggccggaactgcccatcaccagttacggggagcctaggttctcgggacatctgggccttcagcag

SEQ ID NO: 470844 - DNA, 122 bp, Homo sapiens
agggctgggtggggagtttgcaaagccaagttaggataaactgcagcgaccagcccgaagcgtgcgttaccggcactgcagcgttttaccaactgcctggatgggaggaggaaaaagtgatg

SEQ ID NO: 470845 - DNA, 122 bp, Homo sapiens
gagctgagaggggaatcacactctataaaggttcgcataccccactggcggattcaattgcggcagtgacgtcacagaggccccgccccgcccccacaagagccccaccgacgtggggttgg

SEQ ID NO: 470846 - DNA, 122 bp, Homo sapiens
gtcttatgggagatttattgagtgttcatttcatagaccatgcttcttaatgagccaaatcgtgatccactgggcttataacgtcaatgagtgtagcttgagtaagaatgttgtttagaaaa

SEQ ID NO: 470847 - DNA, 122 bp, Homo sapiens
tcctgccccaatgagcgcctgtttgcctgagggctggccatgggctccctggagggctggcgagaagcctggcattgggctttcactgcccagccagccctgttctgccctatgagggcggc

SEQ ID NO: 470848 - DNA, 122 bp, Homo sapiens
gggaggagtgcgagggtctctgagacaggttgggagccagccccacctccatttccaaagcgggggtccaggcacaggaacagccaaacgcccgaaccagcggggttacctttgccacttca

SEQ ID NO: 470849 - DNA, 122 bp, Homo sapiens
ggtggagacagaagacacagagaacaagaaccaagttgaatcctccaggagagcagagtccgggcctcgtgaaggtagggggctcaaaaaacgtctgcctggaaggacagaatttttcagca

SEQ ID NO: 470850 - DNA, 122 bp, Homo sapiens
ttagactgcccttttatgtacaaagtactgtgcaaggcactttgtccctagtcagttctccgactccaccattatcactcctcctccagcctccaggcctcaaattgcagagcagacagatg

SEQ ID NO: 470851 - DNA, 122 bp, Homo sapiens
aggcgctgggggtcagtgcttcggacgctctgaacattcatctccaggatcagttcaaaccgtggccatagcaaggcaagcacctgttcccagtacctgtgggcttaatcagaatcagaggt

SEQ ID NO: 470852 - DNA, 122 bp, Homo sapiens
ggaggagaaaaatccctgttaactttctctctccacttcctcagattaaaaactccaccccgcccccagggccagagaccagctccggagagcagaggggtgagtcttcttgtccagttgtg

SEQ ID NO: 470853 - DNA, 122 bp, Homo sapiens
ggcagcacttgggcggctggtccattctctggatctccttggtggccggcagggagcattcgcccaggctggggcctggagcgcagacggaaggaattagataatttgatgtctgaggacag

SEQ ID NO: 470854 - DNA, 122 bp, Homo sapiens
ctgtggggacacgaaggatccggtcacaggggcggcctccggggaagatactgacagagacgccgccatccggggctccctgggcggggtgcgggcactggaaccttaactgatcccaacca

SEQ ID NO: 470855 - DNA, 122 bp, Homo sapiens
tggctcccgggaacagaaataggacatagaaagtaagaccattagacaccaacatggagacgaagtcactcaggaatcaaagaatcatggaaggaggcctggatactgaagggaacgggctg

SEQ ID NO: 470856 - DNA, 122 bp, Homo sapiens
cgtgaaggccggcttccagggccgccgcagctactctgagctggcggagggcgcggcctacgcgggcgcctccccgccctggctgcaggccgaagcggccactctccccaagccccgggcct

SEQ ID NO: 470857 - DNA, 122 bp, Homo sapiens
cataagtcagaaacaggaaaaattaacttgttcttcagcaatctaggttgacttcatgaacgagctggcgttcaaatgaatccttgaattgtggaaacagaatgttaaatctggaatgaact

SEQ ID NO: 470858 - DNA, 122 bp, Homo sapiens
caatgtctctcatgtctatatgtatataatttgtaaaagtgacagcagacctcctgagaccgtgtgagtgtggatttcattccctaaccagctcagtgtcaggggtgacatgctggggagag

SEQ ID NO: 470859 - DNA, 122 bp, Homo sapiens
actggttggaaccctcaccatgcagatgatgttaatgcactggtatagagcaaagcaacacgatgaaagaacctgggtccctgaaagactatgtggattagagccacctcaatgatctcaac

SEQ ID NO: 470860 - DNA, 122 bp, Homo sapiens
acagagcctgggcccgctctcttcagccgatctcaagcctgtccctcagaacgagaacctcgcttctctctgatccccgaggcgtaagttagtggcgtcacatccggtccccggggcttccc

SEQ ID NO: 470861 - DNA, 122 bp, Homo sapiens
cttctgcaattcttctgggaaacatgcagctctctctgtcccagctttttagccccagaacgttgctatgaaagagactctaacagaagaggaaataaaaatgacagaattcagctccactg

SEQ ID NO: 470862 - DNA, 122 bp, Homo sapiens
gtgttgatgagacacacactgtctgggaccttctgtgaataacatgattggcgttgtcaccgggataactgcaggagagatgtgaaagtgcttaggatgtagttggcgctcaggtcattctg

SEQ ID NO: 470863 - DNA, 122 bp, Homo sapiens
aacaaacaccaccaccagtaaaaatatccctgcaacaaacacaacgattccaattccttccgccaacccaatgttccacggcgtggacacatactggttgggcgcagcatcctcgcagtgac

SEQ ID NO: 470864 - DNA, 122 bp, Homo sapiens
gggcatcctgtgtcccttccacaggcggagcgtgtcctgttggccctgcggcgctacctgcgtgcggagcagaaggaacagaggcacacgctgcgccactaccagcatgtggccgccgtgga

SEQ ID NO: 470865 - DNA, 122 bp, Homo sapiens
gccctatctggaaggggcagagcccaggacagggctccatgtccacaggacggcgaggagcgaagaccatggggactgagtacacaggtaagagtgacagatgacggatgtggctgccggag

SEQ ID NO: 470866 - DNA, 122 bp, Homo sapiens
ccacatcgagctgcgtgccaccttccaaaggccaacaggccgggtgttgcagggggagtgcgatgtggctgcagggtgggcagctgacaataacctttcaaagcaggggggagcaggttttc

SEQ ID NO: 470867 - DNA, 122 bp, Homo sapiens
acttgagtttttgacctcttgtttaggccagctctttattaattattattatttttgaaacggagtctcgctctgtctccgctcactgcaaggctctgcctcctgggttcacgcaattctcc

SEQ ID NO: 470868 - DNA, 122 bp, Homo sapiens
tgagtgttgaattgagttgcggtgaatatagcccagacttgaatcataaaaacagaaaaacggccataaggacaaccactgcaggttacccgagtcagcctgtcagatggcggggcccagtc

SEQ ID NO: 470869 - DNA, 122 bp, Homo sapiens
gctcgccaatgcaaaggaggcccctcggggagacggcaggcagcaaaaggcttccttggccgggggtctgggcgtttggggaggggaggtgctcagagatagggccgaggatggagctccca

SEQ ID NO: 470870 - DNA, 122 bp, Homo sapiens
acaagcatgcgcacgtgcacacacacagctggctggctttgcgaggcagaaaggaattcacgtcacagggcagtctgagcttgttcctgaccacacacttagcttttcctttttgaacatct

SEQ ID NO: 470871 - DNA, 122 bp, Homo sapiens
ttctcgggaaaagtagatttatctctggtcaggcttcctttattaaagaaaagatctctccgaaatgaggacctaaagggtcctcatttagtaaacatatgcaaagcaattgcacagggtgc

SEQ ID NO: 470872 - DNA, 122 bp, Homo sapiens
cgaccataaaagaaactgagcctcggggacctagccggcttctggagagctttctggattcgcaagaggccggctgattgcatcactcgctcattcatgcccggagggaggcggggagtggg

SEQ ID NO: 470873 - DNA, 122 bp, Homo sapiens
ctgcccgcagaggagggggcacacgggatggcggctcccacgggtctcctctcatagctccgcttcccacctacccgcaccctccctcgggtctgttccccttgggtgcactccccttagcg

SEQ ID NO: 470874 - DNA, 122 bp, Homo sapiens
ccctggtgtccctggctcagcctctttctgccaggttgggagcagtcgggaattctgtcccggtccaacgtccccctcggcccccggggacgcagaggctgctgtcggcagagcagcagtcc

SEQ ID NO: 470875 - DNA, 122 bp, Homo sapiens
actcaaactgcggataaggggggactgttgtacaacagtctcaccatttgccggtatttccgaatcatttttagcttgtcttctcctcccttgttccttctttctgttcaaggctgctgatt

SEQ ID NO: 470876 - DNA, 122 bp, Homo sapiens
ggaaacacccttccagtttagcaactagccccagtgggaaaaggcacttctctcactctccgcctacatagagaagggctctgctgggtcgtcatagctcatgcctagtcctagggcagtca

SEQ ID NO: 470877 - DNA, 122 bp, Homo sapiens
gcctctgcggcacccgtgcatgccacttacagggacgcggtaacagtcttttccccactccgtgctccctttgcaaggaagcttcacctctgttcatgccaggaggatggatctatttcccc

SEQ ID NO: 470878 - DNA, 122 bp, Homo sapiens
ctcaagtgatctgcctgcctcggcctcccaaagtgctgggattacaggcatgagccaccgcgcctgaccacattgccatatctgaaatggctggattctcttaggtgcttttctttttcttt

SEQ ID NO: 470879 - DNA, 122 bp, Homo sapiens
gagccctgctccccgaaatcccggctggccaccccctcgggctccgcgccaccccaggagcgccccaagaaggcaccccctgcgtctcacgggaaccaaagggacagcccaccctccacccc

SEQ ID NO: 470880 - DNA, 122 bp, Homo sapiens
cggcgggagccaatcctcggcggcgaggcgcggccatgtttgtgcggggcagaaggtgcccggcttcttggcagtcctgttgatgagggccaggagtcctaccctagtccgccttccgcctc

SEQ ID NO: 470881 - DNA, 122 bp, Homo sapiens
cctccagagtccccagctgcaagggccggcgcacccacgcgcactggttgccaaatctcccgctttcaggccaggtgcggagcgcgcctcgacagtcctgaacattctccacttaacggctg

SEQ ID NO: 470882 - DNA, 122 bp, Homo sapiens
cctctgatggatgagaaacggcacctcatgattctttggctttgcgccctaacagtcactcggggccagcgtttccctgagtttgggatgggtcgtctcttctctgagaactcgtagctacg

SEQ ID NO: 470883 - DNA, 122 bp, Homo sapiens
gggtgtggtgggcacacagcagtgagccatgaggctggtggcccagaggcttggacatgccgtgggccccataggaagtgacagggcttgagggaagctcagtgtgagtgtgtgagcgtggg

SEQ ID NO: 470884 - DNA, 122 bp, Homo sapiens
cgtcaccgcgcatccaggagccacgtgtcaggagtcacgtgtcaggtgtcacgtgtcaggcgtcacgtggctggaggccgttggagcgcctgcgcagcttttccgcacgcgcctcgccggcg

SEQ ID NO: 470885 - DNA, 122 bp, Homo sapiens
ctaagcccatgtttgtgtgttttcttatgcctgtattttttttttattctttcagggaaacgttttgttctgttagtcttggaggccaaggctgagtgggtttatctctgtgcccctccagt

SEQ ID NO: 470886 - DNA, 122 bp, Homo sapiens
tgcaaacaagacccatgatggtaaaaactggcaaagcttgttaagaatagtaaaagctttcgggtatgagtacttactccatgctgccagacactgtgataaatgctttacaggcactgtaa

SEQ ID NO: 470887 - DNA, 122 bp, Homo sapiens
ctcagggtagctccagctgtccctcccgcagttggccctgtggtgttccgaagccggttacgtacgcctgagggccaggcgaacctcaggctctttgtcctactaaaaagcgcaggtatttt

SEQ ID NO: 470888 - DNA, 122 bp, Homo sapiens
cctgaagtttatgtaaaccacactgtgtttaatccttgcaacaatactatgaggtaagcgcgactatttcagttttacattcactataatggaggtttagagacccagagacatcaaggaaa

SEQ ID NO: 470889 - DNA, 122 bp, Homo sapiens
ctcaccgcgcgaccccgcctttttcagcaccccagggtgagcccagctcagactatcatccggaaagcccccaaaagtcccagcccagcgctgaagtaacgggaccatgcccagtcccaggc

SEQ ID NO: 470890 - DNA, 122 bp, Homo sapiens
agtcatttggccgtgcctcagccgaagagaggcggggaaaagcatcgtaatcagctgcgtcgccttttggtgacgccagagagtgcgcgtcagcagtttattagagagctctgtagccagcc

SEQ ID NO: 470891 - DNA, 122 bp, Homo sapiens
aatgactaagtataaaacctcctccagggttttgctgtctgcttttaagaacatgcaacccgaaagcagacaactatgtaagttagaacaggggatttatgagaggtgattaggcagtgcct

SEQ ID NO: 470892 - DNA, 122 bp, Homo sapiens
gggctcggtgatcctcaacatccgattgcaggtacatatttagagccatgactaagctaacggcctccggggccagcatgatggccgactcccagggtccgttgcggcgcggcggagcagcc

SEQ ID NO: 470893 - DNA, 122 bp, Homo sapiens
ctgaccccagggttgctcttgggggccgtgcctgccaagtatcgcgggacttgcgcacatcgcagaagcgccagctccagaagcagctggagcgcgctcggtgcgcaccgccccagcccggg

SEQ ID NO: 470894 - DNA, 122 bp, Homo sapiens
cggagacccacatccacacacagcccggagacccacgtccacatagagcccagagacgcacgtccacacagagcccggagacgcatgtccacacagagcccggagacccacgtccacacaca

SEQ ID NO: 470895 - DNA, 122 bp, Homo sapiens
cagtttacctttctgaagtccaggactccagggctgggaggccggctggccctgctgtcccgagtctccaaacagagcagctgctgcctaccgcctggaagaccttccaaagggggcctgcc

SEQ ID NO: 470896 - DNA, 122 bp, Homo sapiens
gtgtccgtgccggtcgttgtggctttgtgaaccaaggtgtacgctgggctgtgcgtgccccgtttggggtgtgttggatacctgtggaggcatgtgaattcgtttggttccgtaggcgtttg

SEQ ID NO: 470897 - DNA, 122 bp, Homo sapiens
gtggccaggcccgctctggccaggccctgcacctcctccccgccccagccaggttgcacccgatggtctccctgcccaaggaggagagaagagaaaggacgccccgagatggtggacatcgg

SEQ ID NO: 470898 - DNA, 122 bp, Homo sapiens
cacctgctctcacctgagcccacattgatccaagagaaactgcagacgcactgacatgcccggctctcaccatcacctccgccagcaatcctgtccaccgcggctctgtgtttctgcatggt

SEQ ID NO: 470899 - DNA, 122 bp, Homo sapiens
ctcctgatctgccgcacgatgagcggggagacgcctggacagccggtccactgcgctctgcgtcctcacctgggtggtcccgggggtgccaactggatgacagagtccttccctcctggggt

SEQ ID NO: 470900 - DNA, 122 bp, Homo sapiens
atagagctgcatcacaatcactgggaggtcgcgttagaactcagttctgcactctaccctcgcagttactgattcagttggtctagagtgggaccaaaaatttgcatcttcagtaatttcct

SEQ ID NO: 470901 - DNA, 122 bp, Homo sapiens
gctggactgctgccagccattacgtcaccaggcagagctgttcctctgctattgttgctgcgtttcttttattagaagcttatattccctcctgcatctcctttcctgtggctcgataagcc

SEQ ID NO: 470902 - DNA, 122 bp, Homo sapiens
acctgatgcgttaaacccattaccggcctaggtcagcctgaggttggtttgtcctggccgcggcagctcctgcgcccctccattgtggagggcgcccttccgtctgccctgcgtcactgggc

SEQ ID NO: 470903 - DNA, 122 bp, Homo sapiens
gctcaagggatactcctgcctcagcctcctgagtagctgggacttgcaggcaagtgctaccgctcctagctaatttgttttattcttagtacagatggggtcttgctatgtggtccctgctg

SEQ ID NO: 470904 - DNA, 122 bp, Homo sapiens
gagaacgggtcacggaaacagtcccttccaaagccggggccatcgtggggtgggcgagtccgccctcccaggccgggggcgcggaccagaggggacgtgtgcagacggccgcggtcagcccc

SEQ ID NO: 470905 - DNA, 122 bp, Homo sapiens
cgggtgcggtggctcacgcctgtaatcccaacgttttggaaggccgaggcggtggatcaccggaggtcaggatttcgaggccagcctggcccacatggcgaaaccccgtctctactaaaaac

SEQ ID NO: 470906 - DNA, 122 bp, Homo sapiens
gcagagttttgtactatgagaaaatgaatcagaagaaagaggcgaagggtgccacggcggcggcagcagcgcacgggctggaaacctgggttcagccctccagcgcagacacacatcacgag

SEQ ID NO: 470907 - DNA, 122 bp, Homo sapiens
ccaagctcctgcaggcctggcctaggaagccgccttttgcaacgtccgcccgtccaacaacgggatgagatgtcatctgcccagaatggctttatcagtgagaacaccatatcctggaatgg

SEQ ID NO: 470908 - DNA, 122 bp, Homo sapiens
cgggtcctgcagccccgagagccccccgcggctgcagcggcagctgtcacctcctggcctcgccccacagcacacctgagcctcctgggcagccccgagcccacagctcccagcagaggcgc

SEQ ID NO: 470909 - DNA, 122 bp, Homo sapiens
gagtgctccggctccgacaccaaagatactaatgactaccacattgccgaaataaatcaccgtcgctcaggaggggctccggcccggccggcggcctccaaacttcatttcacgaatttccc

SEQ ID NO: 470910 - DNA, 122 bp, Homo sapiens
gacgggaggccggcgagcctcgggacctctgaaagccttgaggaggcgcgggggtgagtgcggccctgaggaaacccaggtgccccgcccctccctttcttcctggcccgcgcctcgcctac

SEQ ID NO: 470911 - DNA, 122 bp, Homo sapiens
cagcccaggtcactcaggaagttggtgacaagttaggactcgaacccaggtttctcgtcacgtaattcaggaaaccttccagatcagaggaatgcacagcgggagtctctggagtccacagg

SEQ ID NO: 470912 - DNA, 122 bp, Homo sapiens
cctttcctggggggagcctcgctttccccgcctccagcctccgcccggatggcaggcgggcggggccccagtccaggccttgagacccagaagggagcgaaggtttttgctgcgccaacgca

SEQ ID NO: 470913 - DNA, 122 bp, Homo sapiens
cctctccagtcgctcctccgggagggcccagtgccacctgctgctccagcctcccaggcccggccctgccgcgccctccagcggccccaggacctccccaaaggccaggctgcagcctggtg

SEQ ID NO: 470914 - DNA, 122 bp, Homo sapiens
gggattttccaattgcttgtactattgcgcttgtctttgtatttataaataacattctttcgggtgctttcccatgcattatttgcagttaaatggtttccttgctaatacctcttactttc

SEQ ID NO: 470915 - DNA, 122 bp, Homo sapiens
ctacctctgacagcgcggggctcactagttaccgcccaacctggatccggcgcgtgtggccgctgggcacttggcacctccccaagagcttccacttggtttggtccccccacccgctgctc

SEQ ID NO: 470916 - DNA, 122 bp, Homo sapiens
agattggcttacaagtacactcatgtattgtcaggccataggtcctaactggctgttgcccggagacctcaattttttgccacatgagactctccatagagtagctaatagtatgttagatt

SEQ ID NO: 470917 - DNA, 122 bp, Homo sapiens
ccgcttcctcttggcgggtgggctgcagctatggagggcgagcctccacctgtggaggagcggcggcggctgcaggaggagctgaacgagttcgtggagagcggctgccggacgttggagga

SEQ ID NO: 470918 - DNA, 122 bp, Homo sapiens
ccttgctttttttttttttttgcggcgggataccccagcgactgaacgtgagccgcagaacgcaactacgttcgctctcctccccagacccggatccctccgcggccggcggccggcggccg

SEQ ID NO: 470919 - DNA, 122 bp, Homo sapiens
cctttccctgcattatcaccgctggctgccgggggccctgcagccaccaccgggtgtctgcgtgttgtccccgctgggtgaactgaagggaaagtgataaaggagccaactgtggaagggga

SEQ ID NO: 470920 - DNA, 122 bp, Homo sapiens
taatgcttagtcgactcctccactactgagggagcaaggcggagaagttttgatgcggagcgttgcctgaaagatgtttttgtagaggcattttagaaatgcccctgggaggttagagtagg

SEQ ID NO: 470921 - DNA, 122 bp, Homo sapiens
gaatggagcaagaaggtgagcaagtcgtatcctctgcggggactgtaggtaattgtgttacgcttttagggcctcaattgagagaacatgtcaaacgggagctcctgggattggagaattgg

SEQ ID NO: 470922 - DNA, 122 bp, Homo sapiens
tcacgaaagggggtccaggagacgaggtcagcgaaacgcgcctggtaaacagttaagggccgcgcagcactacccacaccggctcccgccccgggacctgcccccggggagtctgtcctgaa

SEQ ID NO: 470923 - DNA, 122 bp, Homo sapiens
aggagtcatcctcccaggcgaaatgaaaaaaataagaacggagtgagttggtcataaagccgagtacatttattcctaggttatgcctgttctaccttttgttggtgtgttaaatgccaccc

SEQ ID NO: 470924 - DNA, 122 bp, Homo sapiens
gagttgtcaacacagtgtggctttgtgctgcgcctctggagacgccctgcatcagggccacgcaagcgcttcctgctaaggaacggtctagatgagctcccggggcttgttctggaactgcc

SEQ ID NO: 470925 - DNA, 122 bp, Homo sapiens
ggtctccactgccctccaggctccatccacccgcctggtttcccgggtcgctgtggcccgcgctggcgctgctgttgatctgctgtgtgtgctgttcccgaagaggctccgggagcctgagc

SEQ ID NO: 470926 - DNA, 122 bp, Homo sapiens
aggccggggaggaggaagcagcagggggcggccacgtgcggcgcaggctgcagggttccccggagcgatgaccagggctgtccccgcagcaggaagaacgagcgtggtctcttgttccccgc

SEQ ID NO: 470927 - DNA, 122 bp, Homo sapiens
atcctctggaaaaaaagtctttgagcttcctttacagtgaccttactttggggactgaaccgttgcgactaagaaaacccctcctcaagtttaatggaacgatcacatgacacgtggttgac

SEQ ID NO: 470928 - DNA, 122 bp, Homo sapiens
tgaaaggaatggggtatggggtggaagcaggcaggaaggctggaggcccctctctgggggcgtgtgtctgtccctgaggtccctgtctggatgtctctgtctgttgctgcgcttggcggact

SEQ ID NO: 470929 - DNA, 122 bp, Homo sapiens
gcgcctcggtgagggcgggggggtggtccgcgcgggctgggggcggggcttatacaggggcggggcctcgtgagggcggggccggggaggcagtgggtcagggagcagtggtccagcggagg

SEQ ID NO: 470930 - DNA, 122 bp, Homo sapiens
ctcccacaacaaagaaggcgatgacggcaagagaaagctttgggtccccctcactgaaagcggggagaagaccaactcataccctcaaacgagagggggccctctctctctctcctcacctg

SEQ ID NO: 470931 - DNA, 122 bp, Homo sapiens
ttggagctcccggaccctcgcccaaccgccgtcgggggcactggattcgggcgggctctccgccctggcctctccgaacctgatccctgatcattaaaatgggaatgagtgtaataccacct

SEQ ID NO: 470932 - DNA, 122 bp, Homo sapiens
attgcaaggtttagccccgccggagctggggatttgcaggcgatccctctctattttcgtcgagagctgacatcacccgcgccgccgcctcgggcaactcctttaaccgccgccccccgccc

SEQ ID NO: 470933 - DNA, 122 bp, Homo sapiens
atcttttaaaaatgcaaattgctatgtactaaataaaatgaatgtaagtttgaggaagttcgttcagctggagctaataggcaatagtgttaattagtccaagggaatgggtccagtttccg

SEQ ID NO: 470934 - DNA, 122 bp, Homo sapiens
ccatcccaccacaggaagagccggaacagatggtggccaagcagtgacagcagtgtgtgccggtgcttgggcccactgcaagactggggacaaaacggtcctgagacccacatctttgcttt

SEQ ID NO: 470935 - DNA, 122 bp, Homo sapiens
gcggcagcacgagcggccggtagggcatgaacatggggtagccggtgtacagcaagtggccggagcgcggcggcggcggcccgattagggagtcgatggagaaggcagtgcccgggcccccg

SEQ ID NO: 470936 - DNA, 122 bp, Homo sapiens
tgggcctatcccagaagcctcatcttctagcataaagtcaaataagcctctctgttgaaacggtccagcccaggaaacttgtgcaagcagaaggaggatgatagtggccttcatgatttatc

SEQ ID NO: 470937 - DNA, 122 bp, Homo sapiens
acatcagcttctgacacgcagaggcctccatgggcgcgagctgcggaggtagatgtgcctcggcttcacgttcccatgcgccctggcgacctggggaccctggccccagccccaatacggac

SEQ ID NO: 470938 - DNA, 122 bp, Homo sapiens
cctcaaaaagccatctagtggatgtttgtggtttaacaatccctttcaataaatacttggcggacagatgctagggcaggctctcacaagggcgggctctcagaagagctgcccccaccccc

SEQ ID NO: 470939 - DNA, 122 bp, Homo sapiens
ctggacttttcatcttaagtgaaacaataagttccctttgtgcttaagctagtttgggtccgtttcctactgctttcaatggtaaatggatcattctttatattattttcatattgttagtt

SEQ ID NO: 470940 - DNA, 122 bp, Homo sapiens
gaggtagcggggagaacgggagaaccgcacccccggcgaggcctggtctggcttgagagccgtctctggctccagcagctgcagccagcccgcaagctcgggaactgggaggacacccggga

SEQ ID NO: 470941 - DNA, 122 bp, Homo sapiens
gcagagggagggtcccgattgcttgctggagagacatgtgttgggttcgagggcagggtccggctgcaccgaacaggcgctgcatgggaagatctgggaggacgaggcttagggaggcgtgg

SEQ ID NO: 470942 - DNA, 122 bp, Homo sapiens
tgttgtccttctacatttcaggaggcgctatcacacttggtgtgacatcaagataaagagcggaggtggatggggatggaagatgatgctcctatcctccctgcctgaaacctgttctacca

SEQ ID NO: 470943 - DNA, 122 bp, Homo sapiens
tcacaatgagataggggtaaaaccaggactagatgccaatttttatggatgtcagcccaacgatattccataaagtatttggcaatctggcaaaactcaatctgcattttaaaaatatagcc

SEQ ID NO: 470944 - DNA, 122 bp, Homo sapiens
caggaagtgggggatgtggggttggacaggaagctctatcctgggagcacagcagggtcccgtctctgtgggctgagcctgcggccaggataaggggagggaaagcagagggggccctggtg

SEQ ID NO: 470945 - DNA, 122 bp, Homo sapiens
tcgtctcgccaactctctagccccagcttcatctgcaaggtgggcgggctgcttgcaaaccggtcggcgtggggtggggtcgcaccctcggctgcagcggcccgagggcggctcctggcggc

SEQ ID NO: 470946 - DNA, 122 bp, Homo sapiens
tgaggcaggcagcagtggggcttgggccagattgtcccccaagccccagcggggatggcccggcaggccagtcccagctggagggaggcctgcagagggggctcctagctgccactgtgtgc

SEQ ID NO: 470947 - DNA, 122 bp, Homo sapiens
accaccagcagacacacatcatctgttgtacttgcttatttggcacatatgtatccacagcgcctagaacactgcctgtaacgtggaaggtgttcgatctatagagttttgtcgaatgaatg

SEQ ID NO: 470948 - DNA, 122 bp, Homo sapiens
tgccaaatcaagaatgagataatactcctcaggcagatacgaaagcgcacttgctgagcacgtgttagctcatcccagagttagacgcccaggtatggcctggataaatggttaggatgggg

SEQ ID NO: 470949 - DNA, 122 bp, Homo sapiens
ctccaggaacgccgaccactccaccttaggtatcatatgtaccacgtatgatacgtgccacgtatgatgccacataaattgggggttgaactccacagggcagatacggacctcggtggcct

SEQ ID NO: 470950 - DNA, 122 bp, Homo sapiens
ccagacccctgagagcctgtcgagggaaggttcgccggcccccctggagcctgagcctggcgctgcacagcccaaactcgctgtcatccaggaagcccggtttgcccagagcgccccaggtg

SEQ ID NO: 470951 - DNA, 122 bp, Homo sapiens
ctagagccatagaggaagcaaatctgtagaaagagagaaaaatgaagcagaggagagacacgttttaataccattcgggggcttgtttccaatcccaggtcagctctgcttgttttctttga

SEQ ID NO: 470952 - DNA, 122 bp, Homo sapiens
aggagtgcgggtgggccctaaggtggcggcctgaggggcagggaggacgttagttcacaccgggtgggacacaccatgctgaacccaggccaggtgccacctactgcactagtcgctctcgg

SEQ ID NO: 470953 - DNA, 122 bp, Homo sapiens
tgctttgcacgaggtgcagatgaacttgtgtctgcaaacaagacagaaaaccctaagtgccgcccgaccttcctcttttggggaacccgcactttgtcctgggagcgtgcccagcgccttag

SEQ ID NO: 470954 - DNA, 122 bp, Homo sapiens
aggctggggtctctcctttgaaaacgacgcgtttgcatcactttcctgagccagaatctgcgtcttatttaatttgcaagaaattcagagatatctaatttgcatggttttttttccccctt

SEQ ID NO: 470955 - DNA, 122 bp, Homo sapiens
atcatgttgtatgtccacttctttggcggtctccttcatataactattttgagtgacatccgtgttgttgctttttatcaacagttcattcctttttattactgagcagtatttcattacat

SEQ ID NO: 470956 - DNA, 122 bp, Homo sapiens
ccacaacacccggggactccagcgaaccacacggggtggatccaacagccgcaggggcatcgtggtcctgcggagacgccgcccgcccggaggcggcgctgtgacccaggttggagagtcag

SEQ ID NO: 470957 - DNA, 122 bp, Homo sapiens
gtctctggctgcgggcggtgggccccttcatggggctcacctggtggattcacattaaaccggtttctgtgggcacctctgtccttgctgctggtggggaagggaagccagatccagcaccc

SEQ ID NO: 470958 - DNA, 122 bp, Homo sapiens
ttctatcacccaggctggagtgcagtggcataatcgcagcttattgcagcctcgacaatccgtgctcaagctattctctcacctcagccttctgagtaactgggagctttccgcgggcagag

SEQ ID NO: 470959 - DNA, 122 bp, Homo sapiens
tgaaaggactgtcttgtgtcatggctgtattcctcagccggaatttggttggcgtacgcacgcaatgtgaagtcatcttattgtgctcatatttcaaaggcaacacatggaacagtgcccac

SEQ ID NO: 470960 - DNA, 122 bp, Homo sapiens
atgatttcccctgagtagccattacatctattaaccccgctaatccccttgacaagtctgcgcggctggcactgtattgacttaactgactctacctctccctcaggccccttgctactttc

SEQ ID NO: 470961 - DNA, 122 bp, Homo sapiens
gcgtggtagctagagccctgctgtcatcagcagtgccccaaacgcagtaggaacacgtaccgtatttcaaagcccaggcaggcagagaagggggaaggaactggtggcgcgctgtgacctgc

SEQ ID NO: 470962 - DNA, 122 bp, Homo sapiens
tcgccgcccgcatccaccgcctgcgcaggaagaaggccaaggtgctccccacctcctgcccgccccatctcggggccgtctcggctcctgtgtccactgcaggcctctgctggcctggttgg

SEQ ID NO: 470963 - DNA, 122 bp, Homo sapiens
ggcggcggcagcggcaactttgcggcaagctcgggccgggcttgcttgacggcggtgtggcggaggccccgccccaggcggcaggaacctggagggaggcggaggaatatgtccgagaggga

SEQ ID NO: 470964 - DNA, 122 bp, Homo sapiens
tactttcattagttgagaagagccaacaatcaaccggcctttttggtcagtaagctaactcgcactgtggcctcagaaaacccttctcttctggtacacaggaaagacttaacacgcagcca

SEQ ID NO: 470965 - DNA, 122 bp, Homo sapiens
cgcatgctccttggggcccgccgccttggccgtgcaagtgccaccgtaactggtgagagccgctggcaacccacccggagttgacaaccgcggagagacgcagacacccactgacctccagg

SEQ ID NO: 470966 - DNA, 122 bp, Homo sapiens
aaggatggggcgccagggtcaggctgtcacgcgtctgctcctgctgcagctctgaagcctcgcaggagccagccctggagagcagggccctcgctcagacacccgcgggcttcctgtgagta

SEQ ID NO: 470967 - DNA, 122 bp, Homo sapiens
gctgcctcccattggctccgcgtctctttcacaagatcagatttcgggctgtcaatcaggcggcttgctgccccttcccgcgggtctccctcgcccctctgccctagggggtgctcggccgg

SEQ ID NO: 470968 - DNA, 122 bp, Homo sapiens
tcaccgcagccttacctttagaactcacctctcccctgcacttcaacccgaagggtgggtcgccagagctggggaagagatgcccaaggctcccttgcgccctgacagcctcggactctgct

SEQ ID NO: 470969 - DNA, 122 bp, Homo sapiens
gtgaagcacgggtttctccaagttcagtgacgtttgaaagatgctgagtgtgtcacaaaacggtggtgttcctcagcaccctgagcggaggtgggaggtgactcatgagatgtctccagctc

SEQ ID NO: 470970 - DNA, 122 bp, Homo sapiens
cacctgttggacagactttggacccaaagagaatctgacccattctctctgaccctttaacggcctgactagtatgccttcccgcttttccttttgaaaaggaaagtcagtgctggttagat

SEQ ID NO: 470971 - DNA, 122 bp, Homo sapiens
tagcctcaagtgtgggggaaagaggacctctcaggggaggctgaagaggggcagggtctccggattctttgccatgactgtggaagactttccagggccctggctcctctgatcgcagcgaa

SEQ ID NO: 470972 - DNA, 122 bp, Homo sapiens
actcccaggtgattgacagtgcggagaccaatgggaggcactcttggccgacctacccagcggcgccggtaggaacgcgggagtggcggtagggagcgcgcgagggatcgcgggacttgtag

SEQ ID NO: 470973 - DNA, 122 bp, Homo sapiens
ggcggcctgccggcgctctaaaggctctgtctgtctgtctgactgtgggcggcctgccggcgctctaaaggctctgtctgtctgtctgtctgactgcgggcggcctgccggtgctctaaagg

SEQ ID NO: 470974 - DNA, 122 bp, Homo sapiens
aggccctggagggagagaaggtagggagatcggcgcccgccgggcctggcaaagaggcctcgggaaatgttgaacctgtatgtgatctcaggctcacactcatgttgtgggtctgtctgcct

SEQ ID NO: 470975 - DNA, 122 bp, Homo sapiens
cggcatttggatgtctggcgccatgtaccgccgcttacccatgactttaggctgcttgttcgttcaggttcaatacgctgtcgagagagaggctgataacatttttttcaggttggtataaa

SEQ ID NO: 470976 - DNA, 122 bp, Homo sapiens
ttactcatacagtacccttctggaagtttgatatttattttaaaaattatttctgtgagccgtttgggaggagggcaggcagtagcctggcttattcatttttatataaaagcaactagcag

SEQ ID NO: 470977 - DNA, 122 bp, Homo sapiens
taatggagaaagaggggcgtgcagaagccgagtcacttccgggagtggctggaacacttccggcgccgctagcgctgcgagatattcagggcagaagttacgataactcggggcggaaatag

SEQ ID NO: 470978 - DNA, 122 bp, Homo sapiens
ccatggcgagcgccatcgaatgccactcgccctacacgagccctgcggcgcactggagctcgcctggcgcctcgccttacctcaagcagccgcctgccctgacgcccagcagcaaccccgcc

SEQ ID NO: 470979 - DNA, 122 bp, Homo sapiens
tgggactgcagcagaaacccctacatcatggggttcctggaagggaccctctcccttcagcgacgcattgtgaggccatttctaggtaaaaaggtagaatttccttggattcctgaggttta

SEQ ID NO: 470980 - DNA, 122 bp, Homo sapiens
ctcagagattccactgatgatttccaggaactaccaaagccacggatcagctgagttacccgggctaatagcaggaggaaacagtgtcagagagggatctggctgatcttcaactccactaa

SEQ ID NO: 470981 - DNA, 122 bp, Homo sapiens
gggccactgaccgatcaaagatggctcctactcctgctgaatgggctgagttgcggtgcacgtgaagacctgtggcaaggaggatgccatctcgaacatcaatggatcggtgtgagaaggag

SEQ ID NO: 470982 - DNA, 122 bp, Homo sapiens
aaaggggctgaggaacccggatcctggtttttttcagctctgctgcaggggcggagttcacgctcaaccacgcaaatccttcggtccgcctgacgctataaaaaccaccttttttccactca

SEQ ID NO: 470983 - DNA, 122 bp, Homo sapiens
aaggatgggggagtgagaagcagagttcaacccgttgtgtccagctccgggggaatcacacgcctcccccgtccctggcctgatccctcgtcttggtcccggcagcctggggccgagcgtcc

SEQ ID NO: 470984 - DNA, 122 bp, Homo sapiens
aggagaagccggcgggtacgtgcccatcgttcaccatctcttctaaacacgaatgaaatgcgtgtgtcgtcctcacacactgaaggcaggctgcgtgcacggtctcctcctccgttgcgcac

SEQ ID NO: 470985 - DNA, 122 bp, Homo sapiens
aggactaggtacagaaataaaccgcggagcaagaagcacacagtgccgaagacagaaagccggaggagaagtcgaaaccgcctcctcagcctctgcgggagcgtggtaggggaagagtcaca

SEQ ID NO: 470986 - DNA, 122 bp, Homo sapiens
ttgtagaacttgagtaaaagtgtggtttgtatgttcttaagttgagcattttccccaattcgcacacgttttactgtttttttgttttttttttttttttttttttttttgagacggagttt

SEQ ID NO: 470987 - DNA, 122 bp, Homo sapiens
cccacaggctgctgccttgggcaggcccgctggcgtgtttgctgcaggtctggtgatgcccgggcggctggagtttctcgaggcaccgctgtgctgacagactggggaggagaggaggaggc

SEQ ID NO: 470988 - DNA, 122 bp, Homo sapiens
ctggcggttcacgctgcgctcgggcctctgccgggagggcgccctggcgccaaacccgggcgggcaggggggtggagagccgattgagtttattcccattcagaatttagaggctggtggag

SEQ ID NO: 470989 - DNA, 122 bp, Homo sapiens
cggttacgctgaatccagctggggttggcgcgccgggagtccctgggcggagagacagggcggtcctcccaggatgctggggccgctacctgattctgtcctttcaaagtctcagactcaca

SEQ ID NO: 470990 - DNA, 122 bp, Homo sapiens
tttttagattttcttcccctgctcaaatgtgaacagttctttcttgaactttgtttttgacgaaaaccaggagtttcagtttggctggtgcaagtcatttgggattaaggagagagaactgg

SEQ ID NO: 470991 - DNA, 122 bp, Homo sapiens
tcttacgtcacttccgttgcttaggagcactgggaagtgtagttcgttgccctctccaggcgcttaccaagcgctcggaaacgccccagggcgcttgcgcgtgggaggcgcgcgccctcccc

SEQ ID NO: 470992 - DNA, 122 bp, Homo sapiens
ctatgtaggtcggcgtcgggccaaccctctcctgtgcctctcgcctggggcctggcactgcgcaggggtcaataaacgggtggttggctaactgccctgccaccgtgcctgccagagcggcc

SEQ ID NO: 470993 - DNA, 122 bp, Homo sapiens
acagaaaggtcagcaaagaccccagcctggcagcccacagaaggatgcccagagaacggtcggattcaccggccaccaaggacacccaaacaaaacaaagatgagcgcccctacttgccagc

SEQ ID NO: 470994 - DNA, 122 bp, Homo sapiens
agggggcgttgacaggtgtgcagctgtaggggggccgccggccctggcacccgtctcctccgctccgtctaggctgcctggggtgaggagtgtttaccatgctgaccacggtccagggctga

SEQ ID NO: 470995 - DNA, 122 bp, Homo sapiens
gcattaaaaacgccataggctcggaccggaagactactattcccggcgagcattgtgattcgaagcctgccggaaccccgcggagaggggagggaaggagaaatagaggagagggtgggagg

SEQ ID NO: 470996 - DNA, 122 bp, Homo sapiens
ccctgggacacagggatagggcaactacagtaaacttttaatccacaaggtagctggtgacgtctcgcagccctccaacctgctaagtagctaaactggtgggttagacatttgcagctgtg

SEQ ID NO: 470997 - DNA, 122 bp, Homo sapiens
cctttgggctgggcttacagtgagcaccgtgtggggcttcagagaagactgctccagccccggcctcccaggagtctgagcatcctccgtggcctttgcaggagacggggctcaaggtgaac

SEQ ID NO: 470998 - DNA, 122 bp, Homo sapiens
aagccggggtcccacccccaatgtgctcgtcctaccacagccaaggctgggattccagggcgccggcagggctgctgccccaaacccgcggttcacttgcctggctactgagggccaaggcc

SEQ ID NO: 470999 - DNA, 122 bp, Homo sapiens
gagcaagggaggctcctattggagccgctacagcctcgttcttagcttaccgagaaacagcgcccgacacctggcccttcgcagctctcgcctttcgcagctctcgcctaacaggaaaggga

SEQ ID NO: 471000 - DNA, 122 bp, Homo sapiens
agcctgagaaatccccccgtaacttattatcactttggggttcggcctgtgtcccccgaacgctctgcaccttctgacgcagcctgagaatgacctgccctggccccagccctactctgtgt

SEQ ID NO: 471001 - DNA, 122 bp, Homo sapiens
ttctgattggttagcctaaggcttactctcatccaatcagaacatgtaacccaggaacctcggtatataaagcatgctaagggggagtcaggccattccagactcttctgcttctgtctgct

SEQ ID NO: 471002 - DNA, 122 bp, Homo sapiens
gaggcccgggagctcatgtactcgggagccctgctcttcttcagccatggccaggtaagccgtcttgcttcctcctgcatccctttctgctccgggcaggcaagtggaggtgggaatgacct

SEQ ID NO: 471003 - DNA, 122 bp, Homo sapiens
gctaagattaggccgatagccactgtccatgaccccgtaggcataagtgttcccactacccgtggagaacatatttcctgagagccgagtcccatgttcatccacgtagtagagtccaggac

SEQ ID NO: 471004 - DNA, 122 bp, Homo sapiens
agtgaaagtcgccacacatgtcaagctaaaggcagttgttgggttactaacaggacccagcgccttgcaaacatatgcgctaagctgtgtatacagatggcaggcagaataatggagcaggc

SEQ ID NO: 471005 - DNA, 122 bp, Homo sapiens
gaccccgtgcagcaggaggaggttatttagaataaggaagaatgcgccgggctcattggtcgctacaggggcataaattttttctaggattccagagtatggctgctccagtcccaggtgag

SEQ ID NO: 471006 - DNA, 122 bp, Homo sapiens
ccaacccaagaagtcttctcatctgtacctaatcccagcaaaggtatatccccgggaacacgtttcatgcacagagagggtactctcaaggctgcccggtttctccaagcagcagctgcctt

SEQ ID NO: 471007 - DNA, 122 bp, Homo sapiens
aggcagattcattggacaccacagagcttacatgtttgtggtgatgtgggtgtgaacatacgattatcgacagtgcataatgcttgatgaaaataatagatgctgatgttattgttttatgt

SEQ ID NO: 471008 - DNA, 122 bp, Homo sapiens
ttttcttccattacacttgatgaggctggccaaaaaggaaactgagctgttttcttgtcacggtgagcaatgggaagcttgagataaaccactggacagaaagaaaacactacaccatttcc

SEQ ID NO: 471009 - DNA, 122 bp, Homo sapiens
gggacagccgcagaaggggaagccaggtgagaacaccagcaccggccgagggctccgtcccgaaaggccttccccgctgctgcccggcttactctcgaagggtccagcgcccagaccgccct

SEQ ID NO: 471010 - DNA, 122 bp, Homo sapiens
gccagacgtcgtgtctggcgtgggcctgtacaaccctagaatcttaaagcagccgcatagcgaagctcctagaaacgcagatgatacgctcccagcgcgccgccatcttgtgaagccatcta

SEQ ID NO: 471011 - DNA, 122 bp, Homo sapiens
caagatttccgccaggtttcctcagtcatagacgtggacctactgcctgagacccaccgacgggtgcggctgcacaagcatggttcagaccgccccctgggcttctacatccgagatggcat

SEQ ID NO: 471012 - DNA, 122 bp, Homo sapiens
cccatccctggtggggaggggcgggacggggggctgcctgtcaatcagctccccaggaagcgctcagagccagcgcatcatctccgcggcaaattcggctctagaaataacttttttccttt

SEQ ID NO: 471013 - DNA, 122 bp, Homo sapiens
tccccaggcccgggcgcaggaccgctggaggacgcagcgtccagggccagcgagctcccccggcagcaggtccccaagccatgtcaggcatctccaccacggctgggcgtctgtgccaggcc

SEQ ID NO: 471014 - DNA, 122 bp, Homo sapiens
aaggacaggctgcactgagcatgtctgaaacggtaggcccgttagccccacccctaggaacgggtgcactccgcatgtgtaaaagggcaggacctttaccccaccgctagggacgggctgca

SEQ ID NO: 471015 - DNA, 122 bp, Homo sapiens
cattttgtgacctcatttatgcagcaaatctttactgagcgccaattctatgccagggaccgtcctacactctgaggatacaaaagtgaggacactactcttatctgccttcaggaggctta

SEQ ID NO: 471016 - DNA, 122 bp, Homo sapiens
aagaagtacacatgagccctattcccatagaaaaatgggaagtgaaaggagtggaagtgacggttatttgtgattgggacttgatcagaaattgtaacactgttaatgaatatgtactatga

SEQ ID NO: 471017 - DNA, 122 bp, Homo sapiens
acggagattagcctaagggcatggaggagggagggctgggtaataagaggaccatatgcacgggctgaggttttaccttctgggtcatctcggatcaccagcagcccgttcctgcacacaac

SEQ ID NO: 471018 - DNA, 122 bp, Homo sapiens
cccaagggagccgggctgcagagctggagaaacttccgcggctacgggtgcagttgccttcggttcccggttccgggccgacacccgcgcagggctgagacaggtgtctgcgctccccgcaa

SEQ ID NO: 471019 - DNA, 122 bp, Homo sapiens
cacctcggtcttcgaaagtgctgggattccaggcgtgagccgccgcgccggccttaacagcgcattttcaccagccccgccccggccgcgcgcggcactggaaaccccagcgccttctggac

SEQ ID NO: 471020 - DNA, 122 bp, Homo sapiens
ttatgaatgagcactcggggccagggttgggtaagggcaggccctcgttccagggctccccggaggcccaacttgaccgctcggtgaccactggtccggggccggggccaaacgcagcagcc

SEQ ID NO: 471021 - DNA, 122 bp, Homo sapiens
tgaccatccgtgtgtgtgaccatccgtgtgagtgaccatccatgtgagcatccatgtgaccgtccgtgtgagcgtccgtgtgagcgtgactgtccgtgtgtgtgaccatccatgtgagcatc

SEQ ID NO: 471022 - DNA, 122 bp, Homo sapiens
agaaagcagaaatacatgaaaaagtggtggaaaggagagaaaacaccgcggaagcgttaccggaaggtttttttgacgaccctgaggtagatgcaagagtacgaaaggttgatgctccaaaa

SEQ ID NO: 471023 - DNA, 122 bp, Homo sapiens
tctgccctcacctctcccccgaaaaccccctatttagccaaaggaaggaggtcaggggaacgctctcccctccccttccaaaaaacaaaaacagaaaaacctttttccaggccggggaaagc

SEQ ID NO: 471024 - DNA, 122 bp, Homo sapiens
ccccttgagatcttctaagctcctagtgtagcaccgggcagttagtaggtgtgcagtcaacgtctgataactgaatgggtgggctttccctttgtgttgctttctgctttggcccacagccg

SEQ ID NO: 471025 - DNA, 122 bp, Homo sapiens
ggaaccctggcctcctgccctcgggcctggtatgtacaggtcagcacggccagtttccaccgcccgtaacccaggcttcctgcccccggggctggtacgtacaggtcagcacggccagggag

SEQ ID NO: 471026 - DNA, 122 bp, Homo sapiens
acttaatcaacaggttttcctcttaaaatcctaaactttaagaagcactggaaggtaaaacgttctgaaggtggagagatacctctccgggactctaaaaatctgttgggggtcgtcagttg

SEQ ID NO: 471027 - DNA, 122 bp, Homo sapiens
ggggtctcttcaggagcaaccagaggagccttgccagaatcgtcaggctgaggcccaccgcgggggccgactgtgggaggaacgtcttgcccaccctagaagactaggaaagaatgctggaa

SEQ ID NO: 471028 - DNA, 122 bp, Homo sapiens
acttgtctccggattcgttttggaggaccagtatccgactatgctgaagcctgcggtggccgagaaaggcgtcagcaaacgaggccttcgggggtgtcatcttagagctccagcggacctcc

SEQ ID NO: 471029 - DNA, 122 bp, Homo sapiens
tccttttatgtgcctgtcctgagcgaagcagaaaatggtgcctgcggcggcgcggagccgcgctcagacacacaaagagtccgcgaaggatgcatttgcacacggcctcgggtcggaccctg

SEQ ID NO: 471030 - DNA, 122 bp, Homo sapiens
ccgcggggactgcgcggccaggagactggcggctgagaagcgcggacggactgaggggggcgccccgggaggaagctctggagcggccgctcctctcaattaccgagccaacattcagcctc

SEQ ID NO: 471031 - DNA, 122 bp, Homo sapiens
gaaagaaaggcgcgcttggaagacatccaagcaggcacgtgagtgttaaagagagaaggtcgagtgtcccgtataaccgtgatcctaggacttttataagcccgtcttttccccatgcgtct

SEQ ID NO: 471032 - DNA, 122 bp, Homo sapiens
ttaccctgattttcttgatgccaactgtactctgttctttcacacttttttgtgtgtgctcgagcacttttgttttcttaataaagaaatggaagtttgagtaacttacacaaggttactca

SEQ ID NO: 471033 - DNA, 122 bp, Homo sapiens
taagaaccgcgaggcttcaggcctccaggaggtgtcttgcgggggcagccgctctgacgtcgcctctgcccactgtgtctggatccctcgtgaggggcccccagaccagaggcagccgaaag

SEQ ID NO: 471034 - DNA, 122 bp, Homo sapiens
cctctcctactgagaaccagagagagcccctcaggttctgagaatgacgacattcaacatcgtactccaaagggggttaggtttgtgtgctaggggtgaacgctgtgcaatttaattctgtt

SEQ ID NO: 471035 - DNA, 122 bp, Homo sapiens
ctcgacccgctcgtgcgcggaggtgacaggccccggggtgcccagagctcggatggatggcgcgggtttggaacgcagggctgcgggagccgggggcccgaggctcgctcacctccgccgta

SEQ ID NO: 471036 - DNA, 122 bp, Homo sapiens
ccgtcccagcccctccgaggaagcggcgcggcttcctgcagcttgggctggggatataggcgcccccacacccgggcccggctcagcgccgccgccgctcctcgcctccttgctgcacgatg

SEQ ID NO: 471037 - DNA, 122 bp, Homo sapiens
ggagactgcccctttaagagcctcataatgggagagtcagaagagcccagaggtctcaaacggaaatgactggagaaccagcaagtggcataagtgtgtgaagtcagctggggcgagattgg

SEQ ID NO: 471038 - DNA, 122 bp, Homo sapiens
tatatcaaattgctttgttctgggaggtctatacaactgcgtattgcttcaggcccttatcgttgttaacttaccacttgttcaaagcacaggctttaagggtgtctttatcaattgatttc

SEQ ID NO: 471039 - DNA, 122 bp, Homo sapiens
gggccatggggctgggcccggtctttctgcttctggctggcatcttcccttttgcacctccgggagctgctgctggtgagtggcgttcctggcggtcctcggcggagcgggagcagtgggac

SEQ ID NO: 471040 - DNA, 122 bp, Homo sapiens
cagtgtgccttcagctgcagcagaagcagcccggaggataaaatgagaaccagctgcacacgggccctttaactcccaagccccacccctgggcttggcctgccttgccctgccgggaagtg

SEQ ID NO: 471041 - DNA, 122 bp, Homo sapiens
aaattgcaaaaaacgttgccagacagcgttcgctggtttgggccgtcactgggtatggctcgtgtccgtctagatattcagaggccgagcacagtcctcagtagggctgctcggcaggtaca

SEQ ID NO: 471042 - DNA, 122 bp, Homo sapiens
tcgggaggggcgtccaggcagacctcatgtgacttctaaaaccaacccacaaatctgaagcgtggcttgcgtggtcagccgcctgcctggcacccggtgaacagtttctcccggactctctg

SEQ ID NO: 471043 - DNA, 122 bp, Homo sapiens
aagcaaggcccccaaagccatcaggatggctccagagggggcccctaacccgcagggactcgctctgtacgtaatcactgaggaaatcattgtcagcctgcctgcactcacacacagacaga

SEQ ID NO: 471044 - DNA, 122 bp, Homo sapiens
ccacttcatctccacccccaaatcaggaagcagatgttttagtctctaggccaaactttgcggttactactaaatggacagatttttaaactatttagttcagagaggctgccttaaatttc

SEQ ID NO: 471045 - DNA, 122 bp, Homo sapiens
tattatccaataagagttgtcaaaaaggttccttgcgcagtggtcgtcatagttcagaagcgaccgggagcgtgtgtggtgcgcgcctgccttgaggccaggcctcagagaagggtgtccca

SEQ ID NO: 471046 - DNA, 122 bp, Homo sapiens
gatccaataggtttgaagccgctggtcctcgccttttactccttagctggacagcgggttcgggatctgccccatgactaaggctgaagtggaaagttgcgaagatagaacaagagttgttc

SEQ ID NO: 471047 - DNA, 122 bp, Homo sapiens
cttccgcgtgggcgcctcagaccgcggctccccggctttgagcagcgaggcgctggtgcgcgtactggtgctggacgccaacgacaactcgcccttcgtgctgtacccgctgcagaacggct

SEQ ID NO: 471048 - DNA, 122 bp, Homo sapiens
cgtccttcctggtcctgcgggtccaggactgtccgcggggttgagggaaggggccgtgcccggtgccagcccaggtgctcgcggcctggctccatggccctggtcacagtgagccgttcgcc

SEQ ID NO: 471049 - DNA, 122 bp, Homo sapiens
gggcttctcctccattgaaagcggctgggactccctggctgaggctgcgggctgctgcaccgtcaggatctgagactgcttctcagggctcactcagtatatctgagcgcgtctcgccagcg

SEQ ID NO: 471050 - DNA, 122 bp, Homo sapiens
gcgtgggcgttctgtggatgctgggcctccttctttcagtgccccctgaagtctgggtaacgccatccatcttccacccacatacagatcaaagggcttttttttccccgttttttcttcag

SEQ ID NO: 471051 - DNA, 122 bp, Homo sapiens
agcatggcatgccggggtgttctagctggaagtgccagctcccacctgcagccctggagccggcgaggtggtggcagcagcaggtcctttccttggtgtgccgctgcactgggcccagggtg

SEQ ID NO: 471052 - DNA, 122 bp, Homo sapiens
cggcagaggccctcaggtttcagagttctccaagtggggagaagggcggcctgctcagcccgcgcacccgtggcagcaccacagagggaataaaagcagggtaaacaatttgaagatcccca

SEQ ID NO: 471053 - DNA, 122 bp, Homo sapiens
tggggccgcagggtccctaagtcatgggtggggctgctgctacggaggctgctgcaaggacgagaaggggacggagggatggaggctcggctgcgtccgctcacctatttctggggaagagc

SEQ ID NO: 471054 - DNA, 122 bp, Homo sapiens
acaatattttagcagtacctacattctccttttttcttctttgaataaataaatgtggtccggtagttggaagaattttctagtagcatatcttaaaaatgactagttggctcgttaagcag

SEQ ID NO: 471055 - DNA, 122 bp, Homo sapiens
gctccccttctcaggcacgtccctctcgatgtaatgtgtaggatggaacttcttcccatgcgctctgtgaaggggccccgcagctccccagctggacagctgctctggagactttggcaggg

SEQ ID NO: 471056 - DNA, 122 bp, Homo sapiens
gcagctgacccacactaactccaaaatagttatccaaagacggcagaacagactctgtggcggtaagaccccaaatccagcctgaccctggtatagagacccaccgagagtccctccgaccc

SEQ ID NO: 471057 - DNA, 122 bp, Homo sapiens
ctcccggccaatcagggcgcgcgaccaaaatagcgccatataaaagctggatggcgggcgcggccggtgcagagcctcgcgctggggtggggttgcgcgcgcaggtgaggggggcggggccg

SEQ ID NO: 471058 - DNA, 122 bp, Homo sapiens
atttttattagtgatccaggagctcgtaaatggcatgttactattatctgcaaatgacaccgtatgggacaatgagcacataagaaggtaatgcggcagacagtcccagggagtcgaacaaa

SEQ ID NO: 471059 - DNA, 122 bp, Homo sapiens
ccagtcagaagtcccgaactgaggggaggcccactgtgaaccgtgccaacagtggacaggcgcataaggacgaggcgctgaaggaactgaagcagggccacgtccgctcgctcagcgagaga

SEQ ID NO: 471060 - DNA, 122 bp, Homo sapiens
atctggattatgccaggtggtctggagaagcgactcacttgcgagcttgctggaggagttcgtccttacgctgcaccagcatgcgctgtctctcatcagcagacttggagaagcggctccca

SEQ ID NO: 471061 - DNA, 122 bp, Homo sapiens
gtgaacagaatgccagccaaacagcagcggcaggcgcctcctcggggctctccctgcagccgtgcccacgctggctggggcagagactcttccgacagagcctgtatgcagagtggcgcgag

SEQ ID NO: 471062 - DNA, 122 bp, Homo sapiens
aagcagagatacaggccccatctagcacttgtgctctgggaaggactttgctctgggattcgctccaaatattacttctagcttcatgttcacgggcttcggaaacagtgttcctgggcctt

SEQ ID NO: 471063 - DNA, 122 bp, Homo sapiens
tccttccacttctgatgtgggggggacatttgcttttgaaaggctttccttgtcttcagacggtaaaatacgagttctccacatgtctgagtctggtacctcaagcatggatggatggggaa

SEQ ID NO: 471064 - DNA, 122 bp, Homo sapiens
ccctttttatcttcctgctttgttgtcactgaggatctcaatatgccagtaataatgctacgacataaaatacactataaagtagcattttcatggactttttcaagacaacttccactgag

SEQ ID NO: 471065 - DNA, 122 bp, Homo sapiens
tttgataaaattgctgtactcgtgtgtataagacacgaaagccgaggcctggctgatctgcgtcctcccccgtcagggctgtgcaggcctcggtgcgaacgctgcagctccatcagcagcca

SEQ ID NO: 471066 - DNA, 122 bp, Homo sapiens
gacgaccttcagcagtttcgacttggccgccgcaagcactgccagcacagccttcacatccgggcttttcaattgttccaaaaggtagttaaacttggagagtctttttttccagtgctcca

SEQ ID NO: 471067 - DNA, 122 bp, Homo sapiens
attcctgatatggccacaagagggagctcccaatggtcggctgcacctgaaagtcctgtccgtgaaaactgacaaagaaaacttgatttaaaaggcgtcttctgataaacctcagcatctcc

SEQ ID NO: 471068 - DNA, 122 bp, Homo sapiens
ccgtagctgtgcttggccgggaccttgtcaaagaactgccggagggccttgtggcacttgcggcggttgcagacatcgttggacacgctggtggtgcacggggtgatgtacgccgacctgta

SEQ ID NO: 471069 - DNA, 122 bp, Homo sapiens
cctgaagcaccagtttctttgtcctttgtaaaatggcctcacccttaaaggatttcataacgaagttgaaaacagagttatattgaagcatggctatagcatctgcttaatttagagcagat

SEQ ID NO: 471070 - DNA, 122 bp, Homo sapiens
ggctgaagtccacattggctggtaacagggtcagtaaataaggcggctcggtgacagttccggaggtacagatgaatacataacgtcagcttcctgcctgtccccataaccaggaggggtgg

SEQ ID NO: 471071 - DNA, 122 bp, Homo sapiens
ccaaggaaaccgtccgtcctagccaccccagcggctctggaatggtagagcaagaggctccgcccacgcaccgccgagaccaataacggaccgggagggttacggcgagtgcgcagagggct

SEQ ID NO: 471072 - DNA, 122 bp, Homo sapiens
tcgcctacgatggcaaggattacatcgccctgaacgaggacctgcactcctggaccgccgcgaacacagcggctcagatctcccagcacaagtgggaagcggacaaatactcagagcaggtc

SEQ ID NO: 471073 - DNA, 122 bp, Homo sapiens
tacttgtggagagaatagcatcgatctcccaacttgataccatttttactgccctccctgcgcttttccagtatgaaatggcacactcaggccaagctgtccctttggtttgcatagatttg

SEQ ID NO: 471074 - DNA, 122 bp, Homo sapiens
tggcagctgaccaggcgcctggccagccagaccctccagcagctgcccctgagggcaccacggctcctgccacccccgactcccccatctggagacagtggtggggggagacagtggctcag

SEQ ID NO: 471075 - DNA, 122 bp, Homo sapiens
ggtagggcagagcgcggagccggaggcacgcggggagggagcgctgggggcccgctgctgcggcggctctgcggggtcccaagcctccctggcctggaggcattctagaaagagcgcaggta

SEQ ID NO: 471076 - DNA, 122 bp, Homo sapiens
ctctaatttcatagatctggggtggggctccagaatttgcatttctaacaagttcttaggcgatgttgatgttgatgctgacagactgagaccacccattgagaacctctgcttaatggtaa

SEQ ID NO: 471077 - DNA, 122 bp, Homo sapiens
ctcctcccaggttccacaggtaacagacacgtaacctttccaaggcgggggcgctcaccccgcccggcttcctgcccattcagcctgcggcccgctcacctacagagttggatgaattcctt

SEQ ID NO: 471078 - DNA, 122 bp, Homo sapiens
tgccgagcgttttgcagcctgggagacccgggcttctctccccgcgggtcagcagggcaccgcctccacaccccagcctgccctcctagggacaggtgcgacgaacgggtaaatccggtttg

SEQ ID NO: 471079 - DNA, 122 bp, Homo sapiens
aaaagggctccagggagcctgtttgacccttctgcctcataccatgtgaggacgtagcaccgaagcaccatgtacagagcagaggaagagccctcaccagacaccaaatctgtcagcagctt

SEQ ID NO: 471080 - DNA, 122 bp, Homo sapiens
catcctctgcaaagcaggggcgaggtggaacttacctgtaggaccgtggagtctggagggcgcgcagctgtcctgagaccgggcctggcccacagcgggtgcttactcaatgctgatgtctc

SEQ ID NO: 471081 - DNA, 122 bp, Homo sapiens
ccaggggaggaggagccacgtggctgctggaaggcatcacagctcagcagcccgggaagacgctcctcgctgcccgcaggcagctacaggcatgaggctttcctccgacctccttcttgctc

SEQ ID NO: 471082 - DNA, 122 bp, Homo sapiens
tcgcaggcattaggggagccagggtggctgggacagcgcggctttgtccggcccctgcagcgacaggccacccccgctcccgccccgcgctggctccggggctcccccctggctggtttgct

SEQ ID NO: 471083 - DNA, 122 bp, Homo sapiens
ccgaggaagaggatttccctgaagaggcccaagaagtgctttcggaacctattccacattcggagaaacaagactgaggacttggcctcgctggcggccgaggggaaaagcctgccctcccc

SEQ ID NO: 471084 - DNA, 122 bp, Homo sapiens
tccccgccgctagcgcagcgcgccagcggcgcccaatcagtgagctttccgggtctgtgacggccttcggctccgccccctcgacggccataaaaagtcgcagcgaagcctgcacctccgag

SEQ ID NO: 471085 - DNA, 122 bp, Homo sapiens
ccctctgtacaagatatgtatgttatctccttaggaagaaagccacctgttagcgagaaccgtgccctgcccatgtgtacctgctcagaggctgagttctgagaaccatgtgattgagaaga

SEQ ID NO: 471086 - DNA, 122 bp, Homo sapiens
gcaatcccctctgctggcccgggcccaaggcccagcattgtggcttccgggggacctcggcggccccctgagaactctagggctctttggttgcccttgctatcctcagcctcaatcccaac

SEQ ID NO: 471087 - DNA, 122 bp, Homo sapiens
aagagcaaagtccccgcggggtggcggtcacgtcctcacgagatggggaggcagagtgatcgtgctacacacggtaaagaagtagactgtcctggggattcaacagcagtgagtcctctgag

SEQ ID NO: 471088 - DNA, 122 bp, Homo sapiens
acaacatccccaactgtgtatggtggccctggtaaggatgacatgaagtggatggatgagcgagaaacaaagggggacagattattaggactgggtcagctaagagcagtaatgggtgacac

SEQ ID NO: 471089 - DNA, 122 bp, Homo sapiens
gcatagatgtatacatttatgtgcttgtgtaggtgtaaacggtttgtgcgtgtgtgcccacgtgtaggaatgtgtgctcctgtgtacatgtgaatgctcacatacatatctccagcctgtag

SEQ ID NO: 471090 - DNA, 122 bp, Homo sapiens
ggcggccgcctccccattcaccccgagcatcccgaaacctggaaaggagcaaagctgaagcgatggccacgtgcatgacggcaggcagcctgcagattcgttgttaaactacactcacgccg

SEQ ID NO: 471091 - DNA, 122 bp, Homo sapiens
agtgctgtaaagaaatttagactggataatgtgatggaacgaagtgggagagtaataagccgtatgaaaatctggaatagagcattccaggcagagagaatagcgcgtgcaaaggccatata

SEQ ID NO: 471092 - DNA, 122 bp, Homo sapiens
ttagaaaagaaatcttaatctgtccatagcccacaggctgagatctccaaagccttgtcacgggactttaaatgtaaaaatcacattcaaatgtgtaaaatgataatgtacaagaatattta

SEQ ID NO: 471093 - DNA, 122 bp, Homo sapiens
aacaaagtggccagtcttcattccaagggtgggtttcatttctgctgacagcctggttaccggaagccagatgggcaaacaaggggttcctcaagcctgcaacacccctcaaaaacaaagag

SEQ ID NO: 471094 - DNA, 122 bp, Homo sapiens
ggtgcaagtggtggtgatccgggagcagtcgaggcccgtgacaaaaccaggatgacccagcgttttctaaccgcgctgaggcagtcgcctctccgggtcgctccactcccggactccggcag

SEQ ID NO: 471095 - DNA, 122 bp, Homo sapiens
aaaattggggcggtgcgagtaagtcgtttcctgctgtcgtcgtgagatttaaagacacctcgcgagacctcacctaaatcagtcacggggtctgccttggcgttgtggttccgtcttctcca

SEQ ID NO: 471096 - DNA, 122 bp, Homo sapiens
tcttcagggcgccgccttttaacaccgaccttcttgtcgttaaggacacacggctgggagcggctgcgggaaaggccgctggagcgtctcgccagctctggtgttgaggcaggtgtgctgtt

SEQ ID NO: 471097 - DNA, 122 bp, Homo sapiens
ggaaaaccgtaaggatgagaatccggtctcataccgtcaggcagtgctgccacaaccctgcgtcgcaactccaggatcagccccaagcacggctgaggggtagccctagggtcctccgtagc

SEQ ID NO: 471098 - DNA, 122 bp, Homo sapiens
ttactgaaactgtgtgtgcaagtggtaaaatatacacggcatgacgtttacgtggtgaaacgtgcgcggcacgacgtttaagtggtaaaatacgtggcatgacgtttcccatggcagccaca

SEQ ID NO: 471099 - DNA, 122 bp, Homo sapiens
tcttcctccttctcttcctcctcccagagcagtagagacgcagacatgccgcagctagagcgccgccgcggtcgccgccactgccggcccggtgcattgtgggaagccccgcacacgggaag

SEQ ID NO: 471100 - DNA, 122 bp, Homo sapiens
ttttgctgtgtttcctttctttttgtgcaggacgtgacttggcctccgatctagacacatcggtgtttttgtgagtcatgttctaacaggattgtgctgtgttgaaatgactgttgtttggt

SEQ ID NO: 471101 - DNA, 122 bp, Homo sapiens
ggaaactcgggctgctcccagaaagtgccttccgaggtcctatggtcagtgcagtccttacggggtggtgtgtcaagaacaggcgcgggaaagagtgtgtggtcagcatgaagtgggggcca

SEQ ID NO: 471102 - DNA, 122 bp, Homo sapiens
aggagcaggtgacacagggtggaccagagactcagcccccaggcgccctacccgggagaacgctgttgcagggcttgaacaagtgtgtcctggaaaatccacaaaatggagaacgggaagtt

SEQ ID NO: 471103 - DNA, 122 bp, Homo sapiens
atccctgatcgctgcacaggtggcccctggtgggctcggaagctgtatttgaggctgctgcggccccacccccagccaggtgacagcctccgcggccaccttcctgagcatgaactcatccc

SEQ ID NO: 471104 - DNA, 122 bp, Homo sapiens
agcaagactccatctcaaaaaaaaaaaaaaaaaaaaaatagaattaatgcttaaagtgaacgttaccatgacaaaagcagaaatagtcctccactgccttcctgagtatttccgtttcgccc

SEQ ID NO: 471105 - DNA, 122 bp, Homo sapiens
aaaaaaaaaaaaaagtctacctctgtgagtggagtcagggatttgccagagatgggaccacgcaggcatctctaatccaccatgtggagcaaggaggccaggaatcactgaagaaagctgag

SEQ ID NO: 471106 - DNA, 122 bp, Homo sapiens
gccgggacacggtccagacaacaaggaggaagggctggggaggcccggggaccccactcccgcctggccacccacacgcaccgctggcctcatccgcctttgaggacagctcctgcagtttc

SEQ ID NO: 471107 - DNA, 122 bp, Homo sapiens
cacccccttcctctcttgacaacttgctttctgccgctattggctgttgcacaacagtgacggttcttttgtccaataagtcagcaagacggtccccagggggaaggtttactcaaccatag

SEQ ID NO: 471108 - DNA, 122 bp, Homo sapiens
gggtctcgctctgtcgcccagggctgagtgcagcagcgctatcacagctcactgcagtctcgaagtcctgggctcaagcgatcctcccgcctcagcttcctgagtagctgggattaccacca

SEQ ID NO: 471109 - DNA, 122 bp, Homo sapiens
atgtttaattaattgtaacaacactaaattcttaacgtttaacatatataagctataacacgctttctagggaacaaagtgtgttgccctgcaagaacaagttttatatttgtttgctgaaa

SEQ ID NO: 471110 - DNA, 122 bp, Homo sapiens
agtgctggcaccgctgcacggtcacggatgtggcaatgcacccacagaatcaacaagccccggcacccacaaccgctgcctcctgagtccagcagagaaaggaaagtctagcccgacccaat

SEQ ID NO: 471111 - DNA, 122 bp, Homo sapiens
ggtggggccaccggcattacctggcggggattggctggatcctgggaagagcctttcctgcggggcggggccacctgcattacctggcggggattggccggatccgggggcgggcctcccct

SEQ ID NO: 471112 - DNA, 122 bp, Homo sapiens
tctcctcacccttctggagaatcagtgtggtagaagagcttgaaaaagtgctgggtgtgacgctgccagaaactaacctctttggaactgaagaaactcaaaaaattattggtgatatctat

SEQ ID NO: 471113 - DNA, 122 bp, Homo sapiens
cagcaagctggcctccctggttggcagggggagtgcttggcttccatctggcatggtttccggatgggagaaagcccctgagggtctggtggtaagtctgcgatgcttcccatcaggagagt

SEQ ID NO: 471114 - DNA, 122 bp, Homo sapiens
aggtctggaccccgcaccgcccagaccgggggccgggccccgggcgccccgcctcggccgcgctcccggccactcagagcccctcgagtcgtagccgagctccgggcctcgccgcagccctc

SEQ ID NO: 471115 - DNA, 122 bp, Homo sapiens
ccctctggctgccttttgcacctcgctttcaggtggaccgggggctcagcagtatgcaggcggcgtgcccgcgtccctcctccccataggctggaaggagccttaaccatgtgtctgcagga

SEQ ID NO: 471116 - DNA, 122 bp, Homo sapiens
tgccaggctggagccaaggtacggcgcgcacacacccggccccgtcctgccggcagcaaacgcccagtgctgtttcatctcagctttcgacctgcccacgtggggacgtgtatcacgcccct

SEQ ID NO: 471117 - DNA, 122 bp, Homo sapiens
gattatcctggcaacagccctcctcatcctctgcccctttggcctcatcctgggctcctacgggcgtatcctcgttaccatcttccggatcccatctgttgcgggccgccgcaaggccttct

SEQ ID NO: 471118 - DNA, 122 bp, Homo sapiens
atagtactactggtagctttctcctggtcacggccaattcaccaactaacacactgccttcgtagagcacgcaaagatgtatccagcttcatttttgactgatataaataccatcagccagt

SEQ ID NO: 471119 - DNA, 122 bp, Homo sapiens
tgtgaaaccctggatgcgttctgaaatccccaaggatgctgagagccacagacgtgtagacggaaagaaatcaaaccattcgcgttgctgatggtgggaggaagtgcgctgcagcccgcacc

SEQ ID NO: 471120 - DNA, 122 bp, Homo sapiens
gaaaatggaaagaagttggcagtcatccatcctcactaaacctattgctgcatttgctaccggtttctgttgaccaaataatgcaggcatgaaaatgagtgatagttctatgacttcctagc

SEQ ID NO: 471121 - DNA, 122 bp, Homo sapiens
ccctgcattcttctgagctgcccttctgcagtgtgctgagaaacaccccctagcttcacacggtccagagtccccctagacgtcgatgggaaaaggcctgagccatgcaccgcaggctcagt

SEQ ID NO: 471122 - DNA, 122 bp, Homo sapiens
ccgagagcggcggggaggggacttcgttggccctgggcttccccgaactcccgagcgcggcgcgggagccctcgccctgcgtacttactgctcacggtctgtctgaaacttggctgactggg

SEQ ID NO: 471123 - DNA, 122 bp, Homo sapiens
gtgtccagttcagagccgggggtctgtgtccagggacactcccctctgtccagtgtgaggcgcgtgggccggctggaggtccctccccgaaggtctgtctcacagctgtgggtgccgcagca

SEQ ID NO: 471124 - DNA, 122 bp, Homo sapiens
gtttgtgctggagctgccctgactgtcggttctgagcttggagctctaattagtgcccgacggggcatctcacccaccacgggagggcaggggcgaggcgcagcagcaatgtctcggagctc

SEQ ID NO: 471125 - DNA, 122 bp, Homo sapiens
gtggagataggggtcgcccctcgcgcccgtgcgtcccgcttccggcgcccgaaactgtgccgcgccggccggtgagtagaaagatgcgccttacagcctccaaatacagaggcagcagccag

SEQ ID NO: 471126 - DNA, 122 bp, Homo sapiens
tgctggtggagtgtttgttgacacccccgatgaaagtgtgcagcgtcccccaatccattgcgctggtttatccctaaacagacaaaagtgggcaaaggtttattagtggaagaggccttggg

SEQ ID NO: 471127 - DNA, 122 bp, Homo sapiens
tcctgctcctggtgccccaccacctctgactgcggtgctgagatcgaagaggccagtgtccgatccccgcttcccgtccacccggggctgcggctccggccccagtcgccccaccttccctg

SEQ ID NO: 471128 - DNA, 122 bp, Homo sapiens
cagggccggcattacctggtggggaaggctagccccggcatctctggcgattgtttccgtcgcagagccgcacctctccctgcccaaccgggtacccacaaggcccctgctccaccggctcc

SEQ ID NO: 471129 - DNA, 122 bp, Homo sapiens
gaggtggtggggcggggccggaacgtggagtgggcggggcctgaggctgtggggcgggaccggagcgcgggatgactggggccacgggtgtgggcgaggcctgacgcggtgggcgtgccgcg

SEQ ID NO: 471130 - DNA, 122 bp, Homo sapiens
ctttcggcgtcgctcctgtctacgagcgggcaaggaaggtccccaagagctgtcggggtccggcgcacctgggtctgtatagaggtgagttctgagcgacacaggccatcttctgtgtccct

SEQ ID NO: 471131 - DNA, 122 bp, Homo sapiens
tgtttctgtttcactttcaggattcttcagctatttggcaaagttgaagacataagttcccggttcacaaccattttctccattttacagagggagagacgtaaggcagaagaagattacat

SEQ ID NO: 471132 - DNA, 122 bp, Homo sapiens
gctccaaaccaggtctcccctcctcttctctcagtctgtgatttggggagttaacccctccgctgccctctgctggtgaacgttccgcgtgccgcttgctgcctgaagccgcggaatccact

SEQ ID NO: 471133 - DNA, 122 bp, Homo sapiens
cctgtgagcctcatgctctggttggtctcacctccctcatcccatccaagctgacccattcggtgtccatttctctcagtcagtggacagcaggcacaaattgttgatctgatgagctaatc

SEQ ID NO: 471134 - DNA, 122 bp, Homo sapiens
tgctgtgggcgttgtggcctcgggcgggatggcgtttggttcactgcgtttcccggccggcgtctccttctgtcatgaaatgctcagtgcccacgcacggtccatactggggtttggtaccg

SEQ ID NO: 471135 - DNA, 122 bp, Homo sapiens
caaagatgacccttgtgacagattaacatttcagggccgctacctggagaatggacggctcgggacacgcgtgggagccgggaggccagtggaccagactggcagagccttcaggtgagaca

SEQ ID NO: 471136 - DNA, 122 bp, Homo sapiens
ctgctgccacgcaggcgaggggagcctttgatgctgccacatcgcttagagctggggtaccgggtcacggctgaagacctgcacctggaaaaagagaaggcattccagcgcatcaacagtgc

SEQ ID NO: 471137 - DNA, 122 bp, Homo sapiens
ctgagtgggtctgtcctcggtggtggattagcgccgcttcgtggcggaaagcgacctctgcgcactcacatttagagaggcagggtcgagattgcgccaaacagaaatacgccccttagaat

SEQ ID NO: 471138 - DNA, 122 bp, Homo sapiens
ctttgcttggaatctgatgaagtgaacagcccagattgttttcttttttctttgccagtgcgtgcatgtgtgtatgtgtttctgtatgtatgtatatatataacttctgtgtgtgtgtgtat

SEQ ID NO: 471139 - DNA, 122 bp, Homo sapiens
tgtctccaagttaattttcatttgatgggaaagaggctaaaaactaaatcaaacactggtcgataagctgtgggagtccccaaagcctggatctctgtggctggtgatggcaaggacagtga

SEQ ID NO: 471140 - DNA, 122 bp, Homo sapiens
gcatcctcctacttagcagatagggggacttgcaggaggggtcgggggtcagcggtggtgcgcccagcgctggcgttggacccagcagtgcctgaggacgtcaagttccccggggtggatgt

SEQ ID NO: 471141 - DNA, 122 bp, Homo sapiens
tccaggaggtgcgcagggtgcgagatatatggtgacaatagcagaggctccgcgtggtggcgggggaggggacatggagaggattttgttgttacctagaacccattccttctaagtgagtt

SEQ ID NO: 471142 - DNA, 122 bp, Homo sapiens
cttaaaggcttgggtttccaggaccaagtccagatacgggctgtagacagagatgagctgcggacagtgatgagctgcagacggtcaggagctatagatcgatttgcaatttgctcttcaaa

SEQ ID NO: 471143 - DNA, 122 bp, Homo sapiens
agtaaattagataaaaggttgagactgaaggttttgttatctcagcctcctcacagtacccggatgactaaagtcagccattttaaaggagacagatggtgtggtgagaggggatgtcccct

SEQ ID NO: 471144 - DNA, 122 bp, Homo sapiens
agggaggcaggatggagcaagggcaggacactggaggtggtgcccagcaactccggcgcgcgcttgcttcccaggctggaaaccttggcccaggctcaacctgtctgagctggaccagtcca

SEQ ID NO: 471145 - DNA, 122 bp, Homo sapiens
ctctgtcttcagggcccgggcaccatgtacccgccactcgcgttctctatctgcagggcccgggcaccatgtacccgccgcccacgttctctatctgcagggcccgggcaccatgtacccac

SEQ ID NO: 471146 - DNA, 122 bp, Homo sapiens
ggtcgacgccttcaggcgagaggccgtagattccctggttggagtcccgtttcctggtgccgggatcagggctggcggtggggcgggggtggcggggcgggggtgcgggggagccggctggg

SEQ ID NO: 471147 - DNA, 122 bp, Homo sapiens
cctggacagccaggggctcctcgggccctgtgctctagaaggcccattctatgtctgcttcgccagcaccctttccccatcatggggcagatgcccaccagccctcactatctactgcttga

SEQ ID NO: 471148 - DNA, 122 bp, Homo sapiens
aaattctgggcccagaccaacacaaatgacacttgtcccttttgtccaactcttaaatgacggacctgactggggaggaagaagaagagaaactgatgtgaacaggaagcgcgggttcaaga

SEQ ID NO: 471149 - DNA, 122 bp, Homo sapiens
accgcggagccggcctctccagccacctggcggcccggcagcgtcagccaggtgcgcgcccggccccacatcctctgggtcacgcccccgaggccgcaaggcgtctgagaagcagccccggc

SEQ ID NO: 471150 - DNA, 122 bp, Homo sapiens
gggtgtgcgggggtctctgctgagcgaggctgatgtgcgggctctgggaggcctggcttgcgacctgcctgggcgctttgtggccgagtcggccgaagtgctgctaccccggctggtgagct

SEQ ID NO: 471151 - DNA, 122 bp, Homo sapiens
gagttcttgctgtggttgcgggttgcccagaagtccccccgaggtgctgtccagttcccccggtgctgaaatcacgcccgaccgaaggactcacgctgcccagccaatggcgctggaaaatt

SEQ ID NO: 471152 - DNA, 122 bp, Homo sapiens
gtccaagtcggagccgccgcggaggccgcgctcgcgggtatataggcggccgccgcgccccgccccccgattcctggaactgcgcggccggccttcttgtaatgtttagtcactactcgcag

SEQ ID NO: 471153 - DNA, 122 bp, Homo sapiens
tcttccatttgtttggggtgattgggaggtgagttttaaataagggtctcagctctctaacgggtaacaggctccaggtgggagggccaagagccccagatgccactcctcccgtggggtgt

SEQ ID NO: 471154 - DNA, 122 bp, Homo sapiens
acagaatccccctgcagttctcaccctgggatctcccttaagggtgggaggaacccccttcgggtctgcctctggagtccccacttctagaagcacctggtagcaaggaagagcggggacct

SEQ ID NO: 471155 - DNA, 122 bp, Homo sapiens
gggggaggaaaacaggccgctgctgcacggggggacgagcaggcaacaaatccaggcctccgacattaccagaatgttctttaaagacactgggctttgcttaaaatatacattatgggccg

SEQ ID NO: 471156 - DNA, 122 bp, Homo sapiens
agctcttgcctgtcttgtttgctaacctttaactgcagtagatcgcgttgacagctctatcgaaaaatgcaaaggcgagtacacaatcctagcaggaacaatgaaggaataagtgaagagtc

SEQ ID NO: 471157 - DNA, 122 bp, Homo sapiens
tctcagcaggatggacgtgatggatggctgccagttctcaccttctgagtacttctacgacggctcctgcataccgtcccccgagggtgaatttggggacgagtttgtgccgcgagtggctg

SEQ ID NO: 471158 - DNA, 122 bp, Homo sapiens
caggcctcaccttgaacccgataccgcccttcttacagcacaggcaggccagcatgaggacgatgacggcgaagagcccggagaaagacacagccaccacggcgagggaggatggccaggac

SEQ ID NO: 471159 - DNA, 122 bp, Homo sapiens
tcaaatttccatgaagtcattggagcccgacagctcccaggcctggcagctcccaggctgcggagagcagcactgtggctgggggagggggccctgcacaccccgagaggctgggctgtggg

SEQ ID NO: 471160 - DNA, 122 bp, Homo sapiens
ccaagaggaaaggaaagtgcggcggccctggaacctggatatcgcgcgaggcaagctgcgcgcgggcgggcgggctatggcgcaggcgggttgtggggccggcgctggtggcggggcccggt

SEQ ID NO: 471161 - DNA, 122 bp, Homo sapiens
agcgccgcggccgggagggaccgagcggggagcaaggcctgcggggaggcgcaggatggacgcgttggctgtcatgatgtaggacctcctgacctagaaccatgcccggcgcagggagaaca

SEQ ID NO: 471162 - DNA, 122 bp, Homo sapiens
gggctcttctctgcctccccaggtcgtccccaccttcccccattcggaagccacaagtctcggagagactgccccacccccaaaagagccccaaaacttgggagatggggtgtcttgaaact

SEQ ID NO: 471163 - DNA, 122 bp, Homo sapiens
aggagcacttaggatggtgggagggggaggaaaggaggaagctaactaatagcttgcaagcgtgtcttctaaaaagtgtgttaaccaaacaagctgccatcccttaatccctcccactcctg

SEQ ID NO: 471164 - DNA, 122 bp, Homo sapiens
gcagagccgcttcccacttcccctcctccctgctccctccctttcagcctctgggttctgcggagataaagggaggcagggatttcctttgcttaactctttggtgatccagtggggtcttg

SEQ ID NO: 471165 - DNA, 122 bp, Homo sapiens
gggaagaaggaaggcccggagggaagccgccatcagctcagccacccacaacggccgccccgccggctgttcccagcagggctgtgcccctctagtccttggatggattttgcagagccttc

SEQ ID NO: 471166 - DNA, 122 bp, Homo sapiens
agtgatcctctgcctgcttctcactccagggaagaaaatcaaagcaggtcccatggctgccgtctgataatcactatggacaccacacaccagccagcatcagggctgtgtccaattagcca

SEQ ID NO: 471167 - DNA, 122 bp, Homo sapiens
gtgttgacacaaagttccgttgttgttgttggctgcgccttttttgcttccatctcacggcgcccaacttcccgctcccactgatggaagaagctatatctgctccaagcaagaggccaacc

SEQ ID NO: 471168 - DNA, 122 bp, Homo sapiens
ttctcctttctccacctttttgttcttcctgggccctcagtggattggaggatgcacacccgcattgcagagtccagtgcaggtctcttctggaaacgccgtcacagacacacacggaagtc

SEQ ID NO: 471169 - DNA, 122 bp, Homo sapiens
ggctgcaatactggccgtgatcagcagatggtgagcgagcgcttatttcaaaacgggctgcgattctcttaagtccccacgtggggcgggtttgcgactcccctgtgcatttctcagaagaa

SEQ ID NO: 471170 - DNA, 122 bp, Homo sapiens
tcacccagtggatcccgcaccggggctgcaggtggagctgcctgccagtcctgcgcgatgcgctcacactcctcagcccttgggcagttgatggacctgggcgccgtgcagcagggggcggt

SEQ ID NO: 471171 - DNA, 122 bp, Homo sapiens
aaaatcagagcggagatcagaaccatcatctcctggtcttcctattttgcaagcagcgcccggtacacacctgttggatacacagcttgaacacaggacctaattgttcgctaggcatgaac

SEQ ID NO: 471172 - DNA, 122 bp, Homo sapiens
ccacctcctgggttcaagcgattcttgtgcctcagcctcccaagtagctgggattacaggcgcaaaggttttagctttcttactgggatggataggcaaagaatgtctgttccatctttcag

SEQ ID NO: 471173 - DNA, 122 bp, Homo sapiens
gggttggggggcaaccccaggcctccccctctgcttattttcctgaaattctgtgattaacgggaatgtcgggtgaatgcctggattctcaggattaagccttattgcaaatctagaagaaa

SEQ ID NO: 471174 - DNA, 122 bp, Homo sapiens
cagctttggccccatgtctgctgtgttctgctgtcagcccacacatctgtgttgtacagccgcagctgccggtgtctggttgggatgcaggtccgcccagaatggaagaccgctggggactg

SEQ ID NO: 471175 - DNA, 122 bp, Homo sapiens
cctcgggggcccttgaaatagccactaggatcgggaaatccaactttcccagcggtgcagcgaggaaaaccaaaaggaacggagccggaggctggtggcgagggagcgcggaggcttctcgg

SEQ ID NO: 471176 - DNA, 122 bp, Homo sapiens
agggcagaggcaggtatcaggctcactgcagatatcaggggcgcgggacactggcggcctcgcctccgcggcagggccgggccgggccgggctgggctgggctgggcggcgagagccgcggc

SEQ ID NO: 471177 - DNA, 122 bp, Homo sapiens
atgtaccaggccaaagcgctttacactcattacctctcccgatcctggataacggggagccgaagggcccactttaaataacgggtaacagacctgcaaaactaagcgattcggtcaagcgc

SEQ ID NO: 471178 - DNA, 122 bp, Homo sapiens
gcctctgcctggcatgtgccgagactctttatgcccagaaggaggatgctgggcataaatcgtggcatgtgcaaaaacagtgtggcaaggtgagctgctcctatcagcgaacagcgggggga

SEQ ID NO: 471179 - DNA, 122 bp, Homo sapiens
tcccgtgggctctgaccaccgctctgccctcttctcacaggaaccagcgaccactcggcccggcgtaaccacgcatgtccactggtcacctggtggccttcgacaagaacgtgtgataaatc

SEQ ID NO: 471180 - DNA, 122 bp, Homo sapiens
agactcaggacacaaagtcccaggctggtccagaacattctgagcagggcagaggagccccgtccatggcggctggggcagtcccgcaagtgagagtcggggtgggaggagctggaggctct

SEQ ID NO: 471181 - DNA, 122 bp, Homo sapiens
ggaggtgagcacagcatcaggcaggagggttctacaggcaccaagtctcgcccttctcggcgtccacatgcctcctgtgccgagggcagccaggcggtggtggcttctcgtggcctttctgt

SEQ ID NO: 471182 - DNA, 122 bp, Homo sapiens
gttgggggttgtctggtgagttctgccatttgtaggagaactgagctcgctggtggtcctcggacaagaggagcttggggtgggaagtctgagggtctagagaaatgtgagctgtggggata

SEQ ID NO: 471183 - DNA, 122 bp, Homo sapiens
ccacggccacattcaggccaacagaccatccctccttccacagaggagaagcgcatctaccgggtgcctgttttcacagcgcccttctgccaggccctgctggaagagctggagcacttcga

SEQ ID NO: 471184 - DNA, 122 bp, Homo sapiens
gcccacaccccgcctggtcacgccccctcccccgcgcgccacgcccacagtccgcccctgcgggcccgccgcgctcctcgcccggcctcgccacgcctacaacccgcctagccacgcccaca

SEQ ID NO: 471185 - DNA, 122 bp, Homo sapiens
tcgagggacacggacaggcagggggccggcagctccgcgcccagcaggcgccagggcagccgcacccccacacgcagtcagaggcatcgcctgttggcgacgaagcccaccccatggccagt

SEQ ID NO: 471186 - DNA, 122 bp, Homo sapiens
agacctcgtgatccgccctcctcggcctcccaaagtgctgggattacaggcgtgagccaccgcgcctggccatcaatgtttatttttaagtagcaaaagagaactcagcagtgttggagaac

SEQ ID NO: 471187 - DNA, 122 bp, Homo sapiens
gtgaatttcctccctgacagctgcggccaggagccgcacgtcctgcctggcgggcgtgggcggttctgacctcggaggcacagctgcagggtctgcagtcctctgggaacttcctcctccca

SEQ ID NO: 471188 - DNA, 122 bp, Homo sapiens
agcaacggagaaggctgcgttgggcgcatgctaactagccctgtgagtgagctgtaggcccgcgccggagatcattccacagcactgggtgggggaaggggcggtgggggagggagtggctt

SEQ ID NO: 471189 - DNA, 122 bp, Homo sapiens
accgagttgtggaggtgaggggtaaaaaccaccacagaatcactacccgtttgtcttgaccgtgagatcattactgtgcaaacccttaaactaaagtaacagctgtcaaaatacagacaata

SEQ ID NO: 471190 - DNA, 122 bp, Homo sapiens
taattgcccacctgcattctgtatgttggtctaggtgacttgtaaaatttccttctaggccgggtgcggtggctcatgcctgtaatcccagcactttgggaggctgaggcaggcggatcact

SEQ ID NO: 471191 - DNA, 122 bp, Homo sapiens
gaccggaggggaggtctgggctggggacttggcgggcaggtcagggtcccaggaagtagccgtgaggattggcaggcaggtagaggaggggtcccggagcttcactgtggaaagcagggaag

SEQ ID NO: 471192 - DNA, 122 bp, Homo sapiens
taaaattctccatatacactacccttcaatccgtttgtgtgatctgattcttccatgatgcgagacaagaacccaagtgccgagagggcaggggcttggacgctgctgcggggctcgcatag

SEQ ID NO: 471193 - DNA, 122 bp, Homo sapiens
aaaaaaaaaagagatatgaaacctcaaaatatgccacttttggccaggcgcagtggcttacgcctataatcccagcactttggggggccgaactgggtggatcacttgaggccaggagttcg

SEQ ID NO: 471194 - DNA, 122 bp, Homo sapiens
tcaggcctgcagggggagtagatgaggtcagtcttttgcaaacctggttccttcttgccacgccccgcccacagccccactgtgtgtgaaccaagagagttggaaggccttctgcagacgga

SEQ ID NO: 471195 - DNA, 122 bp, Homo sapiens
tcggttggcacgggggctggtgctgcagttgtgtctctgtgccctggttagaagctgccccgcacggccagctcctgcggacacctggagtggggggggggggtccatcctaggaggagccg

SEQ ID NO: 471196 - DNA, 122 bp, Homo sapiens
gtgcctcaaaacactgaaaagattggagtttcgggtcaggagctctggattaaaggccaacgggaatcttttaaacttcttggttgtgtgtgtgtgtcggtgtgtgaagtcagaggcagacg

SEQ ID NO: 471197 - DNA, 122 bp, Homo sapiens
ccgatatttcctttttaggcgctccagagtccatttctcctgcgcagaccagccctcttgcgcattcaacaaaaccacgggcttgtaaggtctttcataccgctccacaaattcttccacag

SEQ ID NO: 471198 - DNA, 122 bp, Homo sapiens
tagaaaatttgggtagaaaatccattccccatgcagagaacccctggcagaatggctctccgctgtgaggatgttttgttctgaaattttggtatgcattgacaaagacagtagatgctcct

SEQ ID NO: 471199 - DNA, 122 bp, Homo sapiens
gcgcttcaaatgcgctacaaactggcgcttcagatgcgctacaagcacgcttcacgcgggcgacaaactgatgggagctacaactggcgcttcattgcgctataaactgatgggcgctttat

SEQ ID NO: 471200 - DNA, 122 bp, Homo sapiens
gattttcatacgggattgggaggtgcagcctcagggggtggtctcagggggtctggtctacgatgctgaggaggaggttcaaggggataaagggaggtggccccaactccctcccttccagc

SEQ ID NO: 471201 - DNA, 122 bp, Homo sapiens
tggggagcggccatggggcaggtccccgagctgaagtcgctcggccgggagacgagtacccgccccgcgggagggcccggacccgtgcttccggcgccgttgccggaagcggaagtgcccgc

SEQ ID NO: 471202 - DNA, 122 bp, Homo sapiens
ttcctgttggtctcccagggacagactggtcttacttcagccagcagggcctccagccgccgccggagggcagcattctctcggcggagctgctggttgtcagccagtactgcttgcagccg

SEQ ID NO: 471203 - DNA, 122 bp, Homo sapiens
cactcctgcgcgtgtgcacctctccctgcgtgcgtgttcgcgcgtgcgtgctcgcacatgcgcgccacctccgcactgccctcgcttcctgcgcctgttcaggtcatcgcttgctctggttc

SEQ ID NO: 471204 - DNA, 122 bp, Homo sapiens
ccaacttgagggaggaggctggggccgggcaggcctcttctaggcccacggggtgggggccgggcttaactcctcagtgaccagagcccgcagtgctgggggctgtggggtcaggcttcctc

SEQ ID NO: 471205 - DNA, 122 bp, Homo sapiens
cagccccagggcctggagttgcaagtgggcggggcggggccactggagctgtgacagcatcgagagcctcggtgactcacgtgggggccctctgtttcctccgggtgtgtcacgccctgggc

SEQ ID NO: 471206 - DNA, 122 bp, Homo sapiens
tggagggtggtcacttgatagcattccatgtctatcacccgggcagtgaaagaggagccacgagatgaggaggaagaggccaagatgaaggctcctcccaaagcagccaggaagactccagg

SEQ ID NO: 471207 - DNA, 122 bp, Homo sapiens
aggtaagcaaagataatgtcttcttccccggagaagtttgcatgagctaagatgtcctcccggagagctcagataatagcaaactttctgcttccaacacagaggggagataaatgatcact

SEQ ID NO: 471208 - DNA, 122 bp, Homo sapiens
acgcccagcccgcctgcgccccctttatacgcgcgggccccacccccgtgcgcgcgggcccggccgcgattagcataatgtagtattttcagtttcaacaacaccacggcgattggcggccg

SEQ ID NO: 471209 - DNA, 122 bp, Homo sapiens
ttccgtttctttctgaatctacaaaatgcaatgatgtgcgtccaatgccctcgcatcacccgtgttattctcggttgctctgtgggttaatagtgctcctttctgtggctcacactgcttac

SEQ ID NO: 471210 - DNA, 122 bp, Homo sapiens
cagaggggcactgtggccagagaaatgcttccacggcccaaagcccctgcctcccccagacgcccccagaccccaaccccgagtgagcaggacgcagaccctgggccagcaagccccaggga

SEQ ID NO: 471211 - DNA, 122 bp, Homo sapiens
gtccaacactttgggaggctaaggcaggtggatagcttgagtccaagagttcaagaccagcgtgggcaaaatagcaacatcctttattaaaatatatatgtgtgtatacatatatataaagc

SEQ ID NO: 471212 - DNA, 122 bp, Homo sapiens
gctgcggcttcttcctcataatgaaggggccaattgtgctgttggtgggtgtatctgaaacgccctctgccaccatggccctaggctttcctttggcctgttgatttggtctcatgtcaggg

SEQ ID NO: 471213 - DNA, 122 bp, Homo sapiens
cgccatccacaggatctccctcgagaccaataacaacgacgtggccatcccgctcacgggcgtcaaggaggcctcagccctggactttgatgtgtccaacaaccacatctactggacagacg

SEQ ID NO: 471214 - DNA, 122 bp, Homo sapiens
gcaggctgaggttggggcgggggaaggtggaagcgggggtctggggttggggtgcgcggccgccgctgtttttggtcaagatcagaactggggagcctgggtgtaaatcgctgctgggccac

SEQ ID NO: 471215 - DNA, 122 bp, Homo sapiens
atttatgagtggccgctcgagtcacgtgactctatttaaggctcccttatttgggaagagcgcataggataaagaaagagatatctccacctataaattgtccactttggagaacaaaaaac

SEQ ID NO: 471216 - DNA, 122 bp, Homo sapiens
ctgtgcttggccaagcatgatgctttgggacaatagtagtgcaagggttcccaagaagtccgtggggagtggtggccccctcattcactggtacttatctggtctccctcacaactgactgg

SEQ ID NO: 471217 - DNA, 122 bp, Homo sapiens
ctgcctaacgtgctttcacagatatcctggaatattttccctttaacaccaagcacctgccgcatcccagacactggcctgggagctccacagacagcccggcacatgcctctgtcctctcg

SEQ ID NO: 471218 - DNA, 122 bp, Homo sapiens
ttcactactccgcgaattgaaggcggcaggagtctttgtctcatttacacacagtgcctgcgagagactcttagggcagaagaacgccgtcgtaaaaatccgtgcggaatttgaaagtgtgc

SEQ ID NO: 471219 - DNA, 122 bp, Homo sapiens
agcgcggacccgggagagagctctcattcaacgctgaggccactggctcacagatctccccgggtcaccctgcgaagtgcttggtcccccccattcccagccctgcagcagcaacaaacggg

SEQ ID NO: 471220 - DNA, 122 bp, Homo sapiens
cctccgctagactgctcggaagacccggaggagcggagttttcctaaggcagcatccgagcgccctcgctgcgcatgctcgggggaggcggattccgggtccggagttggaggctttgggcg

SEQ ID NO: 471221 - DNA, 122 bp, Homo sapiens
tccatgtgaccgtctgctgaggtgtgggtgcctgggactgggcataactacagcttcctccgtgtgtgtccccacatatgttgggagctgggagggactgagttagggtgcacggggcggcc

SEQ ID NO: 471222 - DNA, 122 bp, Homo sapiens
gcgttcctggcgactctgcagctgtgtgcagttttcactttaccttaaaagcctctcctccgcccgctgagttctcgactgaaattcgcccctgggcgtcaggcaagcgggtcttcccaaca

SEQ ID NO: 471223 - DNA, 122 bp, Homo sapiens
cagctctgaggagagatgtgtaagcagctgtacctcctgtggagctacctcttcctctagcggtctgtgggactcagccagcttcacaagattcaggaaatgaggagggcggggtgataaaa

SEQ ID NO: 471224 - DNA, 122 bp, Homo sapiens
ccgccgcctgcaagcagagtttgtgcgtggacgggggctgggactgccatctcgggataccggtggaactcgggctgccccgcataagccggtcctcagtcttcccatctgtgaggtgggcc

SEQ ID NO: 471225 - DNA, 122 bp, Homo sapiens
agctctgcagcggggacctcctgctggcccacatggctgccagagcccatgctggcatgacgctccagcaggtcggcgtccctgcgggacacactaccggtgacgtggctagcatcaccctc

SEQ ID NO: 471226 - DNA, 122 bp, Homo sapiens
tcaatatgcggtgtcactgctttccctctcactccctccaaagcctaattggctgtgacacgcgggccagctgttgtgagaggtggagcgcggcgggcgttttccaggacggaggctgaggg

SEQ ID NO: 471227 - DNA, 122 bp, Homo sapiens
tattattttagttgatttcctatcaaccagaagtgttcactctgaactcttttgcagaagcgccctgttgcatcctgccacaaggcctttgcacatgctgctcccactggtgtgcccttcag

SEQ ID NO: 471228 - DNA, 122 bp, Homo sapiens
gtggagatgtttttgtgacaggaggaaagggatgtactgacatgaagcgaatacgtgtaccgaaaaatctggaagaacatacattaccccttatagacttgtcgaatggctcagctataatt

SEQ ID NO: 471229 - DNA, 122 bp, Homo sapiens
ggtcttacccgccagcaggtggcgaaacacgattttctgtcctctgcggctgagccctagcgtcccctcttctctaaggcctttcgcctagttccagcctggatacgcttccatagcaaagg

SEQ ID NO: 471230 - DNA, 122 bp, Homo sapiens
cacatctggaattttctaaccaagggcacagaaataatttcgaacaggcattatgagaaccggatggctaatcgcttcccaaccctttcgtgacggccccgatgtgccgagtccaagtcccc

SEQ ID NO: 471231 - DNA, 122 bp, Homo sapiens
cagtctcaccgtaggcctcgtcatcctcgtcccgctgctttccccccatggctcagtctccggagtgattggagccctggagacctggcgtctcacctgctgcccgccccgccctcccacac

SEQ ID NO: 471232 - DNA, 122 bp, Homo sapiens
ccacgcacctgaggcagagacggcggtcgggcgcacgtggagggctcgggctggtggaggcggtccacgctcccacaacccaaccttcatcatcttcacactggagacgggtaaaatgcatt

SEQ ID NO: 471233 - DNA, 122 bp, Homo sapiens
ccgcggggctgggctgggctgggccggggcggacaggggcgcgcagaggcgcggggcgggcgcaggggggccggccccgcccttccttcttccctccctttcccggcgacccctccgaggcc

SEQ ID NO: 471234 - DNA, 122 bp, Homo sapiens
agcatggggacgctcctgtccttgctacatgaactgtggccctggctgtctcgtcctatgcgaggaaggcccagtgggaagctgtggaggacacgcctctgcacacaacggctgcacacagg

SEQ ID NO: 471235 - DNA, 122 bp, Homo sapiens
ggtgctgccccaggcaggaggcggacaaggctcatttggaccccccgaggccggtgcaggcgggcttgggccctccaaaggctcagcttttgggtttctaagtaaaatattggaataataaa

SEQ ID NO: 471236 - DNA, 122 bp, Homo sapiens
cattacaacaaccggactattccgtaggctctgggcacctgtagtcacgaaggggatcagcgtgggcagcccccttaccttcctggagaaacggtgcgccgagatgggggcggagtggggca

SEQ ID NO: 471237 - DNA, 122 bp, Homo sapiens
ggcgctccggggcggctctcgcgcatgctccggggccaggagccgtgcagctgccacggccgcagctcgctctgttcggcgcccgcccctgcgccagtcttttaaaccggctcggaggcggg

SEQ ID NO: 471238 - DNA, 122 bp, Homo sapiens
tgtgtttatctgttttctcctgtggtgtgggggactatgtgagtctaagcaccaatcacacgcatacatgtctacaggtatttctgcattacccaaaattctcttacaaaacatcgaacttt

SEQ ID NO: 471239 - DNA, 122 bp, Homo sapiens
cggggcgggaggcccggccgggtccgctaggacagcggggccgctgggaagttgtgagagcggcgctcgggggcgcgcttgcgtgcacgagggcccgggccgcgagcagccgcggccgtccc

SEQ ID NO: 471240 - DNA, 122 bp, Homo sapiens
ggggtaacggaaaccttggccaccttctacgaagactagagagggtcaaacctatcagaacgcgattatgttgcaaacgatctttgtctttatgtgccaacgaaaggcaattagataaataa

SEQ ID NO: 471241 - DNA, 122 bp, Homo sapiens
tcccctaaagtgagagtggaagaagaaaaaaggagaaggcacttatttgctcatgtgagccgtgtacagttccttcagagctcagagaggcactatgcagtgaatcaagccaggtcagctgc

SEQ ID NO: 471242 - DNA, 122 bp, Homo sapiens
tgattactttgtctccttgactctccatcctagagttacttggatgccttttcatagcctcggttaatttgtttcctgcattttttctggcagcaattcaaaagatcattgattattttccc

SEQ ID NO: 471243 - DNA, 122 bp, Homo sapiens
gacacggggagcgctgaaagcctaatagggtcctggtaccggggcaaacctggggcccctcgagtaacgagcaagaagaccggggcatgcccgctgagagtcggctgtggggccgggaaagc

SEQ ID NO: 471244 - DNA, 122 bp, Homo sapiens
ccacgagttgtcccatactcaacctctagcgaactgaaattacctaacgggagagctcaccgaccccaaggttcagaaagacctcgcgtggacagacagtaaacttgcttggccagcaccac

SEQ ID NO: 471245 - DNA, 122 bp, Homo sapiens
gggtgctcgttcccctgctgcgcagccactctctcccctgcgccccacctttcagctttacggcgaggcatccggcctcacctgttagcagaagcaaacatgaatcaagcccccatttccaa

SEQ ID NO: 471246 - DNA, 122 bp, Homo sapiens
cctgcttgtctttcttcatggctaaccgaattcttcagatatcctgaatgcatgggggtccgtttcaaacatttttttagtgttacctagtgatgtggcataatcattgatcctggcacaaa

SEQ ID NO: 471247 - DNA, 122 bp, Homo sapiens
ccgacagctgcttgacgagctcagggatccgctcccactggcactcggagcggcagcgctcgatctccgtctccagccgcgagcctgccttcttggtcgccatcgcggcctggccgggcccg

SEQ ID NO: 471248 - DNA, 122 bp, Homo sapiens
cagaaatgagtcaccttccaaactgttgccagatccacatagaacagtcccaattccaaccgtggactgtttgcacatgtgagattcagaacctcaccagtgggctttgtgcatgtgtgaga

SEQ ID NO: 471249 - DNA, 122 bp, Homo sapiens
gccgccggctcagtcccagcaccgcctcccccaccacccgaccccggggtgggagcccagcgggctctaggagggccccctagccaccccatgcgtggccttgagcaagtggcttaatctct

SEQ ID NO: 471250 - DNA, 122 bp, Homo sapiens
gacacgctgatcctgccctgccgccacctgtgcctctgtacctcctgcgccgacacgctgcgctaccaggccaacaactgccccatctgccggctgcgtgagttccccggccggctgttctg

SEQ ID NO: 471251 - DNA, 122 bp, Homo sapiens
tgaaagggcaggacagctcagcctcctccctgaacagccgaaggacactgaagacacccccgcgctctcacgccccagcacgtgcacatggagactcgcaacaggggtctccgcaacggcag

SEQ ID NO: 471252 - DNA, 122 bp, Homo sapiens
gccccgccacggttccggccccgccacggttccggcctcgccacggttcctgccccaccacggttccattcccaccacggttcctgcaggcatttcatgtaatgcaattattcttccctgca

SEQ ID NO: 471253 - DNA, 122 bp, Homo sapiens
tcaaaaggccccacctgccgtgtccatggcggactcccaatgcaaaccgtcccacttgtccgtgggttaattccatccgactgcttcccagatcaatcacacgtggggagcccccgggcgga

SEQ ID NO: 471254 - DNA, 122 bp, Homo sapiens
aaacgccaccaagcgctccggaacctcagggcaggacccgccgcagcagcaggtaggacccgctgggggcgcacagcccacctgagacatcgtaactacaagtcccagcaacccttggtgcg

SEQ ID NO: 471255 - DNA, 122 bp, Homo sapiens
ggaagatagagcagcaatgttcagggacctgatgtgctcagagaggctcccagagcactgcgtccactgcaggatctttttggtttttgattcattcaagaaatatgaatttattatctcta

SEQ ID NO: 471256 - DNA, 122 bp, Homo sapiens
tctagggagagaccatagagccccggcggcggcgacggcagctagggcggcccccgacagcgctttgcacatgcgcagagagtactacgtggttgccctacgacacttccggccgatgcctc

SEQ ID NO: 471257 - DNA, 122 bp, Homo sapiens
atgggaacactaggtcagagcccccttttataaggcttattttatactatcaaacagatacgaaagaacatcgttctaaaaggcaaatgttagcttttcttcatcctgattctaggcatgtg

SEQ ID NO: 471258 - DNA, 122 bp, Homo sapiens
attagacgtggaggtggaagcatccccacgagaaccatttcctcatgatgctcctgtcaccgggaagtgttctaattttaactttatttttattttaaaatttatttttagagacagggtct

SEQ ID NO: 471259 - DNA, 122 bp, Homo sapiens
ctcgggcgggagggggcagttacacggcagcggctcgagatggcccatccaagagactggcgctttccaggctccgaggggctccgggaacttgtcaaagaagttctctgaaattgttcaga

SEQ ID NO: 471260 - DNA, 122 bp, Homo sapiens
tgtggtgtgtggtgatcacaaggctgcaggcagctggtgaagggagctgctgcgctttggcgtgatatgatagtgaagtaatgcttctcgtcgtagtccactgtccacgccatcgttacagt

SEQ ID NO: 471261 - DNA, 122 bp, Homo sapiens
actttactacacacattgccttcttgagagcattggtataggtggaatcctgacctagtgcgagccctgttctgacagcccaagcccctgatgtattcagtgcctttggaactgtgagctag

SEQ ID NO: 471262 - DNA, 122 bp, Homo sapiens
tacgtacaaatgacgtattcctaccccttttggcaaccagatttccgttggaagatgcaacggttccggtgacggtagcaagttctcgcgtccaggcatctccgcttccgctcggggcgcaa

SEQ ID NO: 471263 - DNA, 122 bp, Homo sapiens
ttcacgtgtcgccagggccggactgcgagtctctttgcggcgctacactagagcagagtacgagtctgaggcggagggagtaatggtgagtcccgcgtggccccgaggcctgcaggcccggg

SEQ ID NO: 471264 - DNA, 122 bp, Homo sapiens
ggaagaacgtgtacgccccaggcctccgtaaccatggctgcgaggggcggggactgggagcgcgggtcctgggccggggtgcggctgggaggaatcggtcctccactgtcccagccggcccc

SEQ ID NO: 471265 - DNA, 122 bp, Homo sapiens
cacagaggtcatgaggaagtcagggcttctagacacagcctggccaacaggtgcatgacccgggtgagaataccagcacctgggaggcatccgttggtagggctgctggtggttacattccc

SEQ ID NO: 471266 - DNA, 122 bp, Homo sapiens
ctttcttgcccaggctggtcttgaactcctggcttcaagcagtccttttgcctcagcttccgaaagtgttggaattagaggcgtgagccactgctccctgcctagacttaagacaccatcct

SEQ ID NO: 471267 - DNA, 122 bp, Homo sapiens
gctcctctgggagtgcctccatttccctgtgcgtacaagcccacggtgccgtaggatcaccggtccactctgcgcggcagcaccgcaccccggagccgcagctcttcctcccgcttgcccga

SEQ ID NO: 471268 - DNA, 122 bp, Homo sapiens
caccacggccaaggtgctgccatgccaacacactttctgccgccgctgcctggagagcatcgtgtgctcgcgccacgagctgcgctgccccgagtgccgcatcctggtgggctgcggcgtgg

SEQ ID NO: 471269 - DNA, 122 bp, Homo sapiens
tccccttcagaccagaagaccaggggggcctccgcaggtgagtccccagccttcactgctcgtggggatctggaggccagtccccagctccctctctcctcagaaccccagccccttttcct

SEQ ID NO: 471270 - DNA, 122 bp, Homo sapiens
aagtataaaatgaaatgatctccaagacatataactggattaaaagcacgaaaagcaaatcgtaggatacatactgtatatcatttatggaaagaacaaaacaaacacaaaaatacaactgt

SEQ ID NO: 471271 - DNA, 122 bp, Homo sapiens
ggggaccaaatccgggccagggagttcctgggcacctgacatggttggattccccaggtgcgcgtctacagcccgtaccaagactactacgaggtggtgccccccaatgcacacgaggccac

SEQ ID NO: 471272 - DNA, 122 bp, Homo sapiens
agtcctttctttacaacataagctctgtaggaatggttctccaagtaaagctgtgtgtcacgttttggggctaggggtgcctcaaagctgcacctacagagagatctgaaggcaaattgccg

SEQ ID NO: 471273 - DNA, 122 bp, Homo sapiens
cagccagggattccccgctccgcgccctcatcaccccccggaaaccacaaccgctgcgcgcgcggctcggacccccacccgccgctcccctccagcagaccctaggcctccgggaaaccgcg

SEQ ID NO: 471274 - DNA, 122 bp, Homo sapiens
agaaaagaaaggaaggaaggaagaaaaaaatcatttcaagggtaggcgacgggagccttgcggtttagccgctagtcaacggatgggggggagtggtagcaaaaacataaaaatggggacaa

SEQ ID NO: 471275 - DNA, 122 bp, Homo sapiens
aggttggtgggataagaaccttattctgttccaccgcaagaatacctttatctgtacatacgatttgtcctacaggttctttgagttctagaaaaaagaaatcatggtattaggacaggaac

SEQ ID NO: 471276 - DNA, 122 bp, Homo sapiens
ttttaaaagatgactcttgctcaaagtagagaacagacagaagagtagccagagtagatgcgggaaagccaggcagaaggccactccaaatactcccaacacctaccactgggatccaagag

SEQ ID NO: 471277 - DNA, 122 bp, Homo sapiens
gagcgccgggaagtggcctggtaacggctgggaagggactgcttgggctctgggaggccgcgcgggcccagcttgtgcagtccgggatcgcgtccccttgggagacttggcgaggggcgaga

SEQ ID NO: 471278 - DNA, 122 bp, Homo sapiens
aaggcagaaacccaggtccctgtcacccattcaaagccgtgtcactaagagtttgcctgtcgccatcattccagtatcctcagggagcatcaacgctctcccttcggccctgagtttagcga

SEQ ID NO: 471279 - DNA, 122 bp, Homo sapiens
gcctgtagctcggaaaattaattgtggctatagccgcctcgatcgctgtctccccagcctcgccgcggccgctccgggacgcgcccgcccgccgcccggctctccccccctttgggctgctg

SEQ ID NO: 471280 - DNA, 122 bp, Homo sapiens
gcacttgccacccttcacccacccagcctggatttcctcttggtctttgcacatttaccccgggggctgtgcttggtgcacactggcatggcccacttggtgatacttcctgctcctgcccc

SEQ ID NO: 471281 - DNA, 122 bp, Homo sapiens
cagagtaggttcagagaaacttcagggtgttccgtccataaatggttggataacatctaccgcagaagaaagtgatgtagaagaaactaaggaaggcactgaaatagctggactgctaacag

SEQ ID NO: 471282 - DNA, 122 bp, Homo sapiens
gctgagcgggttcccccctcctgctgtcctcgggactcgggcgcgggaccacgaccgccgcggctcaggaggcttcgccagtgaaaggacaaattggacctgtcccgaaagacaatttataa

SEQ ID NO: 471283 - DNA, 122 bp, Homo sapiens
gccatctacaagactttcaattatgttctctgagcttctgcaatgtcaatatattacctgcgtttcataaacaggatcagaagaatgttaaggctgacaggccctgggcagggaactaacca

SEQ ID NO: 471284 - DNA, 122 bp, Homo sapiens
ggcttccgggatttggcgcggcctttgtctcgctaccattggagctccaggtcttctcttcgcttttctgtgtcctctgctcctagaggcccaacctctgtgtccctgtgacctgtaggtat

SEQ ID NO: 471285 - DNA, 122 bp, Homo sapiens
ttttcaatagtaaacgagcaaagctccgcgcgcccaggtggcgcgagcactaggatctgtcggttggggtcctacttttacataacgcccccacaatgcccttcgccttcctcaacgtggcc

SEQ ID NO: 471286 - DNA, 122 bp, Homo sapiens
gggcttagcaagagtggttctgcaatagcagcttcaattctttgtgttgccacctgatggcgaccccaagtgcaaaagcagcaaggagcaggtccaatgaatgaagcgctgttagcttgtaa

SEQ ID NO: 471287 - DNA, 122 bp, Homo sapiens
tgcctggctttgcccctctcaccagccgtggaagccagcagtatcgagctctcacagtgccggaactcacccagcaggtcttcgatgccaagaacatgatggctgcctgtgacccccgccac

SEQ ID NO: 471288 - DNA, 122 bp, Homo sapiens
caagcggaccgaggaggcgaggctgcgctgagcatcctgggaatcgtagtgctcgctacacggtgccctctgcgcaggcgcacaccgagagccacttccggaacaagcgtcgcgtttctgag

SEQ ID NO: 471289 - DNA, 122 bp, Homo sapiens
tcaccctctccactctaggaatgcaggccaccccgagtggacagggcccggctgggagaccggcccctcggggctcccgcccggtccctggctcagtctggggcctggcctgtggggaggag

SEQ ID NO: 471290 - DNA, 122 bp, Homo sapiens
cttaacaaatcatgctaaattaacaactgctaataataacatttaaagactttcattccacgcagtgtcacatagcttgacaaccttgaattactatatttaatagcaacatagtaaattat

SEQ ID NO: 471291 - DNA, 122 bp, Homo sapiens
cgccggtgagcatttcccagaggaccatgaacgtgtgcgtcttgcggtcagtcagcccagcgtctgtgagacggtgcctgcttgcatggtgcagtccagagtgtattttgcaaacgtctagc

SEQ ID NO: 471292 - DNA, 122 bp, Homo sapiens
gtcagccgggctcgggcggagagaggagctgctacgccacagcccagcggcggccattcgcggaaaaagaggcagagcctgtgccagctacagcctcctccgagccaccgcgggcgggcggg

SEQ ID NO: 471293 - DNA, 122 bp, Homo sapiens
ctagactgctcggaagacccggaggagcggagttttcctaaggcagcatccgagcgccctcgctgcgcatgctcgggggaggcggattccgggtccggagttggaggctttgggcggccgcg

SEQ ID NO: 471294 - DNA, 122 bp, Homo sapiens
ttatccagagagccgggcatgatttccaaacacaaaatgcacccatttaaatgtaaccgacggtttctgacaagggcacccggcaccacagctgagattcagaacattcctctcccagatct

SEQ ID NO: 471295 - DNA, 122 bp, Homo sapiens
gcatggtgggcctgcaggagcgggtggaggaggccgccttagcaccttgtctctttgcctcgatcttttcctcgcaccttgagctgggtataaagccaaaccccggccttgcagaaaggatg

SEQ ID NO: 471296 - DNA, 122 bp, Homo sapiens
aactctgaggatgaattccacctaaagcctaacccagattacacctgagtaacctccttccgggacacactaacaacatccagcttgtgtcgttactgagagcaaagcacacttttatagct

SEQ ID NO: 471297 - DNA, 122 bp, Homo sapiens
tgacaagcaggggagagtgtggagacaaacgcgctcgttctggtgggaggagtggcgtcacggcggagccgggcagcagaaaactcatgctttgatggtagtccggctctctaccctacctg

SEQ ID NO: 471298 - DNA, 122 bp, Homo sapiens
tggaggaaatataaaacggattggatttgatcaagtagttactagtctttcttctggtgacgtataacctcctacttgtcagcttctagaagatgaatcaattttgtgaggacttggccaat

SEQ ID NO: 471299 - DNA, 122 bp, Homo sapiens
ttgtcatttaattctcacaaccctgtaggactattatttctcttttaaacatgagagaatcgaggttctgagagttaaataacttgaaccaaggccccacagttagtaaatggcaaagctgg

SEQ ID NO: 471300 - DNA, 122 bp, Homo sapiens
tgcatactacattttcagatattactgcaaaaccctttgcaattcgttacaaacgagctccgtatcatagatgtaaatgaccattctccggtattctttgaaaatgaaatgcatctgaaaat

SEQ ID NO: 471301 - DNA, 122 bp, Homo sapiens
cccccgcaatgggcgggatggagggcttcagcttccggctgcaaatggcgaggcggcgcgcggcgttgcccactggcctcggcatgggcctgcccacgcacccgcccagcgcgcgccggacc

SEQ ID NO: 471302 - DNA, 122 bp, Homo sapiens
gggttacatatcaggcttctctccgaagctcggctaaggcaacgtgcatccctctagagacgcactccggaaaccagccccgtgtgcggcgggcaggcacgctctctcacgcctcctctcct

SEQ ID NO: 471303 - DNA, 122 bp, Homo sapiens
atgtgcagagcccagggcatcctcccgtcccagcttcatgcccacagaatgtcacaggcccgtgggggacagctcaaagagtcaataaggcttcaaatgagcagtcgaggcacctgtgtggt

SEQ ID NO: 471304 - DNA, 122 bp, Homo sapiens
tgtgtttttggactgaatttacttgattattgtaaaacttgcaataaagaattttagtgtcgatgtgaaatgccccgtgatcaataataaaccagtggatgtgaattagttttacgtcaatg

SEQ ID NO: 471305 - DNA, 122 bp, Homo sapiens
gggtaggtaaacatgtgaatttcagtttcttgagcctcctccccagatctgtccttgccccgctaccgcaagtacccacactcccaccatcacaccacaccccctctcctttgtagtctgca

SEQ ID NO: 471306 - DNA, 122 bp, Homo sapiens
gtctgagcctccagtcgataagtttgaacatgtttacacccgtgcagctattactacaatcgatatgatagacatctccagcactcccaagagttttcttgtgcttctttgtaatgcattcc

SEQ ID NO: 471307 - DNA, 122 bp, Homo sapiens
ctgttctcaggccccaggctagtggggtttctgggctgggcgggggctcagagcagagcccgcagaatctaacaccgccacccccctcccaccccaatccctcaccaaccgcagccacgcta

SEQ ID NO: 471308 - DNA, 122 bp, Homo sapiens
gaccacatagtttttggaattaagtaaaactggatttcaatctcatctataccagctatacgaatatctctgagtttcagtttcttcttctgaaaaatagaaataataatattaccttcctt

SEQ ID NO: 471309 - DNA, 122 bp, Homo sapiens
gcggggagagagcctgcagccttcagaacagatattgctcattttctggcagttctcagacgtaggaaataagtcagcaccgaagcagtggttaagccggagggctcggaagaacggcacct

SEQ ID NO: 471310 - DNA, 122 bp, Homo sapiens
cacctagtaaccgcagagcgcctacctgccgcacctcggaaccgcagagcgcctacctgccgcacctaggaaccgcagagcgcctacctgccgcacctaggaaccgcagagcgcctacctgc

SEQ ID NO: 471311 - DNA, 122 bp, Homo sapiens
gcctggcgcccactggagacagacagacagacgcctgtcccccgggaccgaggcctgtgccgtccccacccgccccaacatggtgctcatccttgccgagacccctgcggtctgtgcccgcg

SEQ ID NO: 471312 - DNA, 122 bp, Homo sapiens
gccggctcttaaagggaacggcgggcagacgcgggctgggggggttgtcgcctctgccggcgcaaaccttacaaccttctccgtggggccggagttcagcgcgccgcaagatgctgggacac

SEQ ID NO: 471313 - DNA, 122 bp, Homo sapiens
taagaccttcatccatggaatctactatacaggaggatgcagtgggctggaggggatgggcgaaaatgggagcaggaagcctggcctggcttctggtcatggcctcctaaaaccttaaactt

SEQ ID NO: 471314 - DNA, 122 bp, Homo sapiens
acacgctgtcccccaatgccagccacaagcggggccagctcagggtgtagtgggtgaagccgtcctgcagctctgtgatccacaaggcggaggtggcagtagcacaggactccaccgctttg

SEQ ID NO: 471315 - DNA, 122 bp, Homo sapiens
gcccacccagtggcggagtcttctgaggggcgggtcgtgggcggggcctggaggcggagccggcgccgtcagtagtcggctgaggacggaggcggggctgggcctgggatggggcggggcct

SEQ ID NO: 471316 - DNA, 122 bp, Homo sapiens
ggcgggatctgcggccgcccggggccctcggccaacatcccagcatcctctgcgccgcgccggccccggactccatttcccagcggcccctgcggcctgccctagggctgcggcgcctttgt

SEQ ID NO: 471317 - DNA, 122 bp, Homo sapiens
gaaaagttcagggattgtgaaatgtgttttaggcataggtccaggatttttgatgggacacgtcttagtctcatttagtaagcattggtttccaaataagaagtgctatacttatctttgaa

SEQ ID NO: 471318 - DNA, 122 bp, Homo sapiens
caaaagcattccgtgcctcctggaggtatcatgatggcaaagtcatatcgatcagctccacggaagagtggctggtccccagagccacttagaggttctgtcttctggctcctggcagacgt

SEQ ID NO: 471319 - DNA, 122 bp, Homo sapiens
tgcaggacgcagacctgagcccagagcgccgcccaagagcgccttctcattccccaccctcgtctcccccagcctgagcacatcatgtctatcatggtccagtctgaagcagtgacccggag

SEQ ID NO: 471320 - DNA, 122 bp, Homo sapiens
aatgactactgaggattcagtgtcattaccaccagtagctccctctccttttgggtgaggcgactctaaggcccctgtgctatactgactcccagagctccccactggtactaagctccagc

SEQ ID NO: 471321 - DNA, 122 bp, Homo sapiens
tgtgtggctgtcagggactgtgagggccaactgagaatgcatgtgtgaatctggctgtcacgactttagttgtgattgtttatttatttatttgtttgtttatttatttatttatttagtag

SEQ ID NO: 471322 - DNA, 122 bp, Homo sapiens
accctcatgtccatgtttgcacctcattggctgtgacagaaatgagacatcattgtcacacgctggcctgagggtcagtgggccttgctttggacctcagtttccccaccagtaacagggtt

SEQ ID NO: 471323 - DNA, 122 bp, Homo sapiens
cacggacactacgaacctggccgtgtcagctcgtttgtgccttgttctttttgcatctcacgggaacgtttccatgtatggactttcgcatacttatcatttcttattaattttagaaactg

SEQ ID NO: 471324 - DNA, 122 bp, Homo sapiens
gccaagcgctactcctggtccggcatgggccgcatccacaagggcatccgcgagcagggccggtacctcaacagccggccctccatccagaagcccgaggtcttcttcctgcccgacctgcc

SEQ ID NO: 471325 - DNA, 122 bp, Homo sapiens
ttttccagggctgtgtcgagaattggggcttattgctgttccacgaggttcgctgagaatcggggcgcatccatggagagtccttgggcagttcctgactctctggttcaagggcattctct

SEQ ID NO: 471326 - DNA, 122 bp, Homo sapiens
gcgggactctctgcaatgggacccgagcagctctagagggaggcggcggccccagaaggccgttggctgagagagaccaggagccctcggagccgccgcgcgcatagcgctgtggagcaaga

SEQ ID NO: 471327 - DNA, 122 bp, Homo sapiens
cccaggtctgtgctgaacagaacgcagctccgccgtcgcagtgccctcagcccgcccgcccgggtctgacctgagaagaactctgctccgccttcgcaatagccccgaagtctgtgcagagg

SEQ ID NO: 471328 - DNA, 122 bp, Homo sapiens
cgcagcgggtacagcgttggcgcccgccgcgtgcactgggttccacgaggcgccaaacaccgtcgccttggactggaagctgcacgggctgaagtcggggtgctcggccagcgtcgccgcct

SEQ ID NO: 471329 - DNA, 122 bp, Homo sapiens
cttccttaaaactattctcaatcctgcagccaaagtgatcctattaaaacataaatcagacgtcactcttttcctcaatgccatccaatggcttcccatctcactcagagtcaaaaccaagg

SEQ ID NO: 471330 - DNA, 122 bp, Homo sapiens
gggggagagcagaggcagctggggaggggctgcggaaggaggaggctcaggaaggcaagccgacgccccctgtgtgtgtttctgtcctgagcctgttacttttttgacccccgatccgtctc

SEQ ID NO: 471331 - DNA, 122 bp, Homo sapiens
cagaagcagaaagctaaaggcttagtatttaaaagacagactcccattcttttggaggagcgacgtcagggaagaagtatgagattagaatcccatcattttaattaaattgtcttatttca

SEQ ID NO: 471332 - DNA, 122 bp, Homo sapiens
ggatggcggtggattctcccaggtagaaccgaaagaagcgagtcgcgccgaggatggcggcgacgacggcggaagagaacgctgacgtcaacactcagctttttataggcggacgccggttg

SEQ ID NO: 471333 - DNA, 122 bp, Homo sapiens
caacctcctcagtttacacaagaagaaaaggagatgtaggaaaaacttgctcaaaggtcacgtaacatgacgcaggcagagctggggttagaacctctgtttcttgagtcatcatcccagtg

SEQ ID NO: 471334 - DNA, 122 bp, Homo sapiens
atgtcgttttcaacctagaaagttcccaagcacgtagtaagcccggtgtgcacagaaccacggatggctccaacaccagcccggtacccagagaccgagccgccctgagcggtgggaaaggc

SEQ ID NO: 471335 - DNA, 122 bp, Homo sapiens
ctccacgcgggactgtgcacggtggccgacacccgcagggacgcccgccggacgagcacgcggagggccctcgcctccacggatgcaccatgccggtgtgaggagcatctgttcttcccact

SEQ ID NO: 471336 - DNA, 122 bp, Homo sapiens
atccccagccctcagcctctacagaccgtccccatattcagagcccccagttcttacccacgcaccagggcctgcgtaacattcacgtcctcacccctgcagcacctgccctgctatgatgc

SEQ ID NO: 471337 - DNA, 122 bp, Homo sapiens
ccatcttcagtgagagatcacaaagcggccaggcaggtgggagactgaatttgccttgttcgagagtaacgtttgaaaaccaaagaaataaagtgatgcagtgcccacagtgcttggtctct

SEQ ID NO: 471338 - DNA, 122 bp, Homo sapiens
acaatcttgaatcatgaagctactaaccagagccggctctttctcggtgagctcaggtggcgggtttgggaaagggctggggagcagtgtgtcgacaaggtgatacgaggcggaggtgtctg

SEQ ID NO: 471339 - DNA, 122 bp, Homo sapiens
atctcgcctgctacactgtgagttcagacagcacggattgaactcttcatcttttcgtgtcggcgtcctgcacagggccatcccatcactaagcgcgccacaaactcagcccagtattgacg

SEQ ID NO: 471340 - DNA, 122 bp, Homo sapiens
accctcctgtgccgtgtcccttcctgtccaccatgtgtcaggcccactggacacggtgcccggcagcttcacacacacaattcgcccttcgtcgtgcacgaggcagtgttccagcatgttca

SEQ ID NO: 471341 - DNA, 122 bp, Homo sapiens
accgtgtggtccgagggaccggccgctggaagagcgaagccgtttctctctaggctcggccgcccccaggcccagccctccccggcatacgcagcttcagcagccgtcctccctccctctcc

SEQ ID NO: 471342 - DNA, 122 bp, Homo sapiens
tcaaaaaggacagcctgggctccgtgcccatcccttaggccttgtgccagtaacaacattcgtgaaaacaccctccagtagggccgggtcagcctggaagttggggcggggccagagggcaa

SEQ ID NO: 471343 - DNA, 122 bp, Homo sapiens
aaaatatccatcttacatccacaagatggtgatctggggcgccaacgcctacgtcactgacgaagacagcatgatatatgagggtaggttctgcgaaggggagatgccgggacggcagatcc

SEQ ID NO: 471344 - DNA, 122 bp, Homo sapiens
gcggaaatgccaattgcccggttccaagatgaatgcctccttgtaccacgtgtctgacaccgctcacattccggttccacgtcagttttagctccgtccgcctccataggtcaagcttaaag

SEQ ID NO: 471345 - DNA, 122 bp, Homo sapiens
ctgcggcccgcgccaatgagcggcgggggccgaggctgggcttatttgcgggggccgcggcggcccgggtgcccgcgcgttagatgtgccgccgccgccgcccgggctcggcggagggggga

SEQ ID NO: 471346 - DNA, 122 bp, Homo sapiens
aaagagaggcccgacacagcggattcctttgtcattatctgtaagccgcatccctgggggcggcagggctgtcacccgatgtcccgagtcccagcccaaaagccccagcgcagagacagcag

SEQ ID NO: 471347 - DNA, 122 bp, Homo sapiens
cggcttcagccacagacaagtccggccaccgcaagtaaggcttagagccgggagtcggttcgcaccagccactgctcgctttatttccgccgctgaactccgccctccccttagccaaggat

SEQ ID NO: 471348 - DNA, 122 bp, Homo sapiens
ggactgtaaaatattagattgtatattacttgtattaagtaactggcagtaagcacttttcgagcatgttgtattaaatgggaatgcagcaaatgtattgagccagtacctttagggtgtac

SEQ ID NO: 471349 - DNA, 122 bp, Homo sapiens
aaattcctgtggttcccagactaggaagggttcactcggtgcctcaggacaattacaagccgagggagtctgaaagagccagtgttagtgtttaaagtgttatcagtttaatgaactactta

SEQ ID NO: 471350 - DNA, 122 bp, Homo sapiens
aatttcagtttaggccaaaatccccgcgggttggtcggggcgggagcggggctcggtgttcggggctgacggcgggggcgaggccatggttctcacaccatccagaggaagcatggctgcga

SEQ ID NO: 471351 - DNA, 122 bp, Homo sapiens
acccaatgtaatatttacataaacgatgttgcttgattcattatcgaagcttttcttttccgtcttccgtctccgatctgggcatcgtgttcattcgctgcacccctgcactcctctgttgg

SEQ ID NO: 471352 - DNA, 122 bp, Homo sapiens
gggcgcgggtcaggagcagctggcaagggcagcgcagcctgtggggcccttgggcgcggccggccgcagctccgggaagccacgtcagcccacgggcgctgcagctgcagccgccaccagca

SEQ ID NO: 471353 - DNA, 122 bp, Homo sapiens
gctctaggaactggtgagtgcgggggcgctgtgggagctgcagataagccagcgcttggccgggcacccgcgggccgcgcagcggggcagggaggcgcgcggccccagccgccctagggcgc

SEQ ID NO: 471354 - DNA, 122 bp, Homo sapiens
gttctaagcaactgacatacttacagcgtttggagccacgtcatggccttttgaggccggcgtgctgtgatattttcctacagagcacggtcacttccagaggcgagagaggcacagaattc

SEQ ID NO: 471355 - DNA, 122 bp, Homo sapiens
caaagaatttcgcaacattgcgattgcactggcttgagaacgaaggaagttagtcccttgcggtgatccgtcctttcatcctggcgtttgcctgcagcaagatggcggcggtgtcaatgtca

SEQ ID NO: 471356 - DNA, 122 bp, Homo sapiens
gagggggcttgaaatcacactggagctctacacagccacatgatgccagagctactactccgtgctgaccaaacttaggagggctcagatatgtttgttaccagtgtctcaaagccaaattt

SEQ ID NO: 471357 - DNA, 122 bp, Homo sapiens
cccagccctttcccctgaccatcagccagctctgccatttcctagcagtataataaaaggcgagtatcttaatctctctgcctatgtttctttttctttaaaatggtactagtatctatcta

SEQ ID NO: 471358 - DNA, 122 bp, Homo sapiens
aatggggattcttattctactcacttcccgaggagctcgtggattacattagatgatcttcgtaaattcggagtctaaggctgacactgctttataaagattaagtgtcacattgtcatcct

SEQ ID NO: 471359 - DNA, 122 bp, Homo sapiens
agagagagttggggggaaggaggatgggagagaaaatcagttccaccttaggaaaaaagtcgagttggttttagagcacaagagccacgttcaagtacacccacactggagcccacctgggg

SEQ ID NO: 471360 - DNA, 122 bp, Homo sapiens
cccacaagcacgtccttgcccccgggaggttgtttgccggctccaggatctccctcccggcgaccccggcctcgccgtcactcaccctccagtcccgggtgactcagaacgctcggccgccg

SEQ ID NO: 471361 - DNA, 122 bp, Homo sapiens
gggaaagttgttactagaacttctcactcctaaatatttgacagagtagcttcttcatgacggtcgtgactaacttagagctagaaaaatgtaactgggaaagttgttactagaacttctca

SEQ ID NO: 471362 - DNA, 122 bp, Homo sapiens
cattaatgaacctttagtcctgtgtgcctgtggctgactgccacaattactacttgagaccgtcactatgacagttattaccgttactacttgagaccgtcactacgacagttattgttact

SEQ ID NO: 471363 - DNA, 122 bp, Homo sapiens
tggtcttgcatggcactgagatgtgtggcacaagcaggcaccaagcccggagacacccgacgctcaccgttagactgggtagcatttgtcaagcgccgagcaaacagtggatgaagtgtcct

SEQ ID NO: 471364 - DNA, 122 bp, Homo sapiens
gcttaagcatttgcctgtccaagagagggatgtcctgacccacaaacacaactgcctgcccgtggggcagcagacccctgtggtggagacaggtggcagaacaacaacaacaaaaaaagacg

SEQ ID NO: 471365 - DNA, 122 bp, Homo sapiens
aactgaaaaaaggaaaccagtttctaggtgggctctgttgcctgtatttgactcactcaccgataacacactcataaactgacacacacataaactctgttgggctctcaggatataagaac

SEQ ID NO: 471366 - DNA, 122 bp, Homo sapiens
acgggattaatgattcaaacaatactacttatcaagatcctgcctttgggtatcttaaatcgtccttaggccaaagtgaagtgtaaatgagtgaaacaccctgccttttcgaatctagaatt

SEQ ID NO: 471367 - DNA, 122 bp, Homo sapiens
acttgcttcagacgacacagagcaagaggaactgaccatctcatgacctgtggcattgcacggtgcagtggacagaagggattatcctcagccagtcgcagggtcagcttaagttagttaga

SEQ ID NO: 471368 - DNA, 122 bp, Homo sapiens
tcccagtagctggaactacaggcgcttgccattaatttcacattttttcttttgtagagacgggggtctcgctatgttgcccaggctggtttcgtactcggcctcaagcaatcctctcacct

SEQ ID NO: 471369 - DNA, 122 bp, Homo sapiens
ttactaccttgctccaggtagtgctccatattgtacttcagtctacttccatcttggtcccgaaatattctatgtaaaaataatttattgattcttgcattatttcaatatgtagcctgcct

SEQ ID NO: 471370 - DNA, 122 bp, Homo sapiens
aatccccgcaggttggtcctggcgagggcggggctcggtgggcggggctggccgcgggggcggggccagggtctcacacccatctagaggatgtctgtctgcgacgtggggtcggacgggcg

SEQ ID NO: 471371 - DNA, 122 bp, Homo sapiens
gctggggtcccgggcgggtggggtggggtgcggcgggggcggcgccgcaggcgcgggtgtcgggggaggggtgggcgaggaccatggcgggtggcccggaggcgtgggcaggagggggccgc

SEQ ID NO: 471372 - DNA, 122 bp, Homo sapiens
ctgcgtagtactaagctcaaggcagcgttttgagttgaagggtctggcgcgtctggaaagcgcctgcgtattcctttcactgggggtggtgtcaaagcgggaaggtgggcgtggcttcaggg

SEQ ID NO: 471373 - DNA, 122 bp, Homo sapiens
aaaactctccactgtgagagttacccaaagctcagtgtccgtgatggtctacgtggcttccgaggtgatcgggcagtgtcagtcttcagctgctaagccgagaagatctgggaaggagtcag

SEQ ID NO: 471374 - DNA, 122 bp, Homo sapiens
ggaggcaccttggttgcagccggactcacacttccatctccgtgtgtaggtgtccatcagcggagaatggtctccgtggcaggccaaggtgcctcagattgaagtggagacgcacaaggtgg

SEQ ID NO: 471375 - DNA, 122 bp, Homo sapiens
ggagcagcggtttacctaaggaacgggccgcgcggtcttgctgcgcatgctctgaagtagcgcgcctgagcgttccgcaaggccggctccccggcggggtcgcgcgcgcggtcacggggctc

SEQ ID NO: 471376 - DNA, 122 bp, Homo sapiens
cactccattgccccatatccctggagggaagaaccaaagcgactcaaaaatgtactcccacgagaagaaaaatcaagctatttggagtccaaatggtaaggaggcccagtgacaaggaaagc

SEQ ID NO: 471377 - DNA, 122 bp, Homo sapiens
agggttccggtgccctccctgagattcacccggaacaagggctaagcggcccgcggagggcgctaggaaaaggcgcgacaccaagagcgagacagggacttgctgctccttaaaggggccgc

SEQ ID NO: 471378 - DNA, 122 bp, Homo sapiens
caagaggagcaaggaacaaaaaagactggttccgatcccggtgagggtcacttccaagatcggcctggcattacctggtactgggacagggcgggctcttcgccgccgccgctggggccccg

SEQ ID NO: 471379 - DNA, 122 bp, Homo sapiens
ctcctttcccctctacaacgacccagtctgacgctccccaacatccaaaggactacgcctcggaaggtgctcgaaagaggcagaagttcactcttcggtggaaggaaacccagtccatggga

SEQ ID NO: 471380 - DNA, 122 bp, Homo sapiens
ccaagagcactggcgtgcgggaggtgaatggggctctgtctcggagggggtgggctggcgcgggggcacaatgtgggctctgtgcctccgccctcaggccaagggctaaggaggaggcagcg

SEQ ID NO: 471381 - DNA, 122 bp, Homo sapiens
catggaaataaaaacatgtagccacgctgtgctgtgccgagtcacacacatcgcagtccacggaacaccagctatgcacgtggaaaggagaacgtgtagccacgctatgctgtgccgattca

SEQ ID NO: 471382 - DNA, 122 bp, Homo sapiens
tagtctgacaggtaagactccaggctctgcctggccagtgcctcccgccgggcctgcagccgctcgcagcgcggacagcttccagacttgaagcaggctttatggtaacacgctttacactc

SEQ ID NO: 471383 - DNA, 122 bp, Homo sapiens
ctcgtcgcgtggctccagcgctgctcctgacctttctgagcaatcagtgtcttcttacaacgttagagcgggaggactccccgttcacttctaggcttacgactaaccctgccttttgcatt

SEQ ID NO: 471384 - DNA, 122 bp, Homo sapiens
gttcttgccctgtgagactgggcggctgaccacctccccagcttgtacaggtcccagcagcgttttctgagtgtgaaagttttgttcagtgatgattcctacaccataccacctgctgcaga

SEQ ID NO: 471385 - DNA, 122 bp, Homo sapiens
ctgctcggaatagtgttctttggaacatactttgggaaatgctgacatgatggttaagagcgctggctttggtgtcagacccagattcaaattcttgctctgacgcttcctggctgtgtgat

SEQ ID NO: 471386 - DNA, 122 bp, Homo sapiens
acaaagctccttggaaggtggaaggggcgcccggtgtcctctgagctgcgatctcaattccgatgcttttcatgtggctgaaatagctctgtgcctctcccggtattgagaactgctcctgg

SEQ ID NO: 471387 - DNA, 122 bp, Homo sapiens
acagggatgtacctggtgagctgctgaacccgcaaatgctgctgccccagctctacactgcgccctggtgctggctgaccaccccctgccctcctgccggaccctggggcctcccaccccag

SEQ ID NO: 471388 - DNA, 122 bp, Homo sapiens
agagctgaaaaaggagagctgctcagagctgaaaaaacctgctcagtgacccttctctttcgtcctcatggtggcttcgtagagtgggtgctgttcccaaatgtacccattcgacaggtgag

SEQ ID NO: 471389 - DNA, 122 bp, Homo sapiens
ctgaggctgaggggggggcggtggtgggggggccacccggactcggcgggcagcgtggggcggggggccatgcggccgggctcccccctggcgcagcgggacagcggccagggccgggggcg

SEQ ID NO: 471390 - DNA, 122 bp, Homo sapiens
gtgatagagtattgtaaattataaacgaaaagtcagctgctttcttcagaaatttttgagcggtcagctttctttcactggtgattatggctagctgtgttgaaaagaatataaaagaagat

SEQ ID NO: 471391 - DNA, 122 bp, Homo sapiens
aagccggacgaggcgcgagagtggggtgggtgacgcgcgccagccacggagaatgaggctcgctatctgcgccctgctgtgcgccggggccctgagtaagtgagcgctgggagtcgaggtgg

SEQ ID NO: 471392 - DNA, 122 bp, Homo sapiens
gcagagaagacaccccaatctgcacgcccacagcgcctcgcccgccacccagtcccgcagcgcctcgccccccacgtgtctgtctgtgctcatgtggccctaagaggccactcctctgctta

SEQ ID NO: 471393 - DNA, 122 bp, Homo sapiens
ctaaagtgaatgtgcttgaacgtgctcttcaaaacgaaaggcagaaggggtcaagccatccgggattcagagctaggtaatccacaagaggaaacccaccttaaaggaaaatgggatctaag

SEQ ID NO: 471394 - DNA, 122 bp, Homo sapiens
tatcgacaaccgctttgctgctatgaaacgctctattaggaaaactgtgtcttcaggccacggggaggggaactgcagaagagtcgattcctttggagaagggttcgggcgggcaggctctg

SEQ ID NO: 471395 - DNA, 122 bp, Homo sapiens
cctctccctctctctccctctctcttctctctctctataaagaaccgtcaagttttagtgcgcattgctaattagtcaatttctctctgccttcacaggctggcgacttcgctgctgagctg

SEQ ID NO: 471396 - DNA, 122 bp, Homo sapiens
aatgatagcatgggaatggaagtttaaggagaaggtatatctgacatcagggtgaagcagcgattgaagatgggcaaaacacactggcttcttagaaggccactgtaaagacagaatagcct

SEQ ID NO: 471397 - DNA, 122 bp, Homo sapiens
cttgctctgtaagcaatgaatgcgggccccggggcactcggcctgccctggacctgctcacggggcgaccttcacgggcctagcctccaaagctgggcccaccgacgaccacgttcccccgc

SEQ ID NO: 471398 - DNA, 122 bp, Homo sapiens
gagctccctgctcccaagggacccgtcgcgttgcagagttgtccggtcgggcctctggggcgggcccggatcctggaccagggccagtctgtccgaaacccaccagtgagcgagcgggagag

SEQ ID NO: 471399 - DNA, 122 bp, Homo sapiens
gctttgttgtgttgctcagggcccttttaactctgtctgacctatgggaggggacagcaacgagggcttttatgactggaatgaactggaaacttggcctctgagagcccttaaaatgtttt

SEQ ID NO: 471400 - DNA, 122 bp, Homo sapiens
cggtggctgagcccttgctgcatgtcagctgccgtgcgtgtgttacttcattaaccctcacggaagccccgtggaggagctgcagttttatctctgccgtacagatgcagcgtttaaagcgt

SEQ ID NO: 471401 - DNA, 122 bp, Homo sapiens
atttataggacttagtccctatcttcaaagaggttatctgaatggtgagacaaaaatcaccgaaaaatacagctaaaagataatctagtcttgtgggagtatctatgaatgatttttagagg

SEQ ID NO: 471402 - DNA, 122 bp, Homo sapiens
ctaagtcacaatggacaacttttcctccccggagggggcccggaggggggggagcggtcgcgcctccgacgcgtgggagcttctcaggtgtccccaactacacctaacgcccggagcccaaa

SEQ ID NO: 471403 - DNA, 122 bp, Homo sapiens
caaatgccctttatgtggcttctttctacaggtgtgtctggcttgatggctaatatttgccgagcaaaatcaggtcaagtaattgagcgcagacaagatcattaagattccaagtttgtctt

SEQ ID NO: 471404 - DNA, 122 bp, Homo sapiens
ccgaagagaaagaaaaaatctacgtcgagcataggccgctacggcgggctgggagatacacggcaaagctggcaccgtgggcaccgagctgggaggtgggcgagccgcccagagcgagggcg

SEQ ID NO: 471405 - DNA, 122 bp, Homo sapiens
tcagagggccagagtaagtaatttgttagaagtcagcgttggcagcaagcactgtcttgacggatggcactattgagaagggaaaggaaacctatatttattaaactctttacagaaaagct

SEQ ID NO: 471406 - DNA, 122 bp, Homo sapiens
tcgcttgcggctgacctttctttggaatgtcgtgagttccatttgtcccagaatacggtccgctaccgctgtgacatgagtgttagggaaggcgggttgtcacgtttctacaagccttccag

SEQ ID NO: 471407 - DNA, 122 bp, Homo sapiens
cgcctctcagcaccgcctcttcccgcggaaccctgattggatgggactttaggacggagacggtggctgcagagagtcaattctcgtcgatagccagtgtgggcacagtcagtacctagact

SEQ ID NO: 471408 - DNA, 122 bp, Homo sapiens
ccacatataacccaaatgctgcatttagctagtaatctccactgcctcctcctcatcatccgtaaataacttccctggcaccttttactagaggaagatgcttttcttgagtttaactttgt

SEQ ID NO: 471409 - DNA, 122 bp, Homo sapiens
cgccccctcctcccggctgcacgcgccgctccccctttgtcccccaggccgcggggaccccgggcaccaacccctccagcacccgctgccccccagcccggtggacggcccctcgtgcccct

SEQ ID NO: 471410 - DNA, 122 bp, Homo sapiens
caatgccccgctgctcaaacctctaagggagaatggagatgggaaggctatatagagctccgaccccagggcagtgtctaggagtgattgtttacagcttctgaagccccagcgggcatgtg

SEQ ID NO: 471411 - DNA, 122 bp, Homo sapiens
gggcttgggacctgcagcctgccctgcctgagcctcccaccctctccatgggctcctgtgcggcccgagcctccccgatgagcgcctccccgatgagcgccgccccctgctccacggcgccc

SEQ ID NO: 471412 - DNA, 122 bp, Homo sapiens
aggcgggtgaggggcggggagagccagggggagcctccttcgccccgccccgccccgcttcggaccgtatcacgactcaaaggggggatcaactcttagcctccttagtcctccagcgtttt

SEQ ID NO: 471413 - DNA, 122 bp, Homo sapiens
caagttgctgatggaccaagaagcccacattccccacttctgcttggatccctctagtgacggggagctcactcacagatattctgtgacccccgctgcactctttagctgggctaatgtcc

SEQ ID NO: 471414 - DNA, 122 bp, Homo sapiens
acaccactcccaccaacttctaaccctccattgctagaaccgaatgttactggattttatcggttaacatatctgttctattctgagcaaggatggagcaatgtaacagtttggttatattg

SEQ ID NO: 471415 - DNA, 122 bp, Homo sapiens
atttcaaaacttttgttttaagggcaaaataacaaaggtaaacaaaggtaagcgaaccaccgccatcctgtttattctcaggacttcttggtgtttggtctcataggaaaatccaaaagcct

SEQ ID NO: 471416 - DNA, 122 bp, Homo sapiens
tgtttttgtgggaggccttctgcatggtcccgggaggtcaggcagcccgggagggcctcccggagcagaggctggagtcagtcccaatgccaacagtttcgaaccttgcccgcgggcactgc

SEQ ID NO: 471417 - DNA, 122 bp, Homo sapiens
aatgcatatccgaatgcagaacctggatttgttttccctccttcaaacacacacaggctccgccccactagcacagaccgggacagtctggggcagtctcgtcccgcagggcccagaaagct

SEQ ID NO: 471418 - DNA, 122 bp, Homo sapiens
atgatagtagcatcctttacttgggcttcagagcatagaaggtaaaaatattacgttttccgaggggacctcccaggtaggaggaagttcgggaatgtgcattaccactctaaaagcacttg

SEQ ID NO: 471419 - DNA, 122 bp, Homo sapiens
ctgaagtgcgtgcggacagaacccatcttttgctattggaggaactaaggttctcaggatcgtggtgcttgtccaccctgccggtcacgaggagcacagcggaccatgtgacccgcaacagc

SEQ ID NO: 471420 - DNA, 122 bp, Homo sapiens
ttgtttgtttatttatttgagacagagcctggctgtgtcgcccaggctggagtgttgtggcgcaatctcggctcactgcaaactttgcctcccaggttcaagagcttctcctgcctcagcct

SEQ ID NO: 471421 - DNA, 122 bp, Homo sapiens
aggatgcgaggtttagataggatgcgaggtttagataggatgcgaggtttaggtaggatgcgaggttttggtaggatgcgtggtttagataggatgcctggtttagataggatgcgaggttt

SEQ ID NO: 471422 - DNA, 122 bp, Homo sapiens
gcggccgggccggggtggggtggagcggggaggccgcttcccagacgcatcttcattccccgcgcgcggccgagccaggagcccggcgagcaggggcgacccccagagccaccccggagtcc

SEQ ID NO: 471423 - DNA, 122 bp, Homo sapiens
gagacctggtctcacacttaaatacccaggtggccccattttgttttattaaaccaatttcgtctctttgacccccagctcttacaatcacatgcccgattgcacagctttctcccttccag

SEQ ID NO: 471424 - DNA, 122 bp, Homo sapiens
tctctccctggccaggagacggtggccaagggacttgactttgaactaccaacaagctcacgtttggcagctgcaaagacaaaggctagacttttagcaggtttttgggggagcctggggca

SEQ ID NO: 471425 - DNA, 122 bp, Homo sapiens
atgtacagaaaaagtaatatgccaagattcatataaactgttaacagtggtttcgcagaacgtaagggagttaaaatcagagccaaggcttgtcaaaacggacagaaagggtttacaccaaa

SEQ ID NO: 471426 - DNA, 122 bp, Homo sapiens
ccagctcggcgcgttccggcaaggcgaggtactgagtcttctgaaaccttctctgtaatgcggccagctgaaagctggaataaatagtcctgggtttacgaactttctttggtttgccattc

SEQ ID NO: 471427 - DNA, 122 bp, Homo sapiens
agtgggcatatccctagccaggcactctccttcagaacacagataaaacaggtggccgggcgcggtggctgatgcctgtaatcccagcactttgggaggctgagatgggcggatcacgaggt

SEQ ID NO: 471428 - DNA, 122 bp, Homo sapiens
aagtggctcacactcatccacccaagtgagcacttttgcaggcccagcatcttttaatggcgacaaaacaagaataaagaatgtaagtgggtgtctgaacttgaccaacattttgatgatgc

SEQ ID NO: 471429 - DNA, 122 bp, Homo sapiens
tctggtaagcgatgcacctggaaccggcttgagtgacttaagggctcagcagtatctgcccggtggaaacattagtgtcatgctcatgccttaccagcagatggcagcaaaatgctgtgtta

SEQ ID NO: 471430 - DNA, 122 bp, Homo sapiens
agaggaactctccactaattgaatttgagatgactcactctaaactagggacttgaaactcgaaaaccttggcagcaataccttggcagtgaaattcttgggtcatattgtccagctcattg

SEQ ID NO: 471431 - DNA, 122 bp, Homo sapiens
tgaataactagcttccttgctatttgcgacatcagaatgcttagatctatttgatgccagcggactcaagccaggtcctctgtgctgtcatttttgtgctgtaaatgaagctgtggggagaa

SEQ ID NO: 471432 - DNA, 122 bp, Homo sapiens
aaaaaatgtttgtgtgatttcaatcttctcacatttgttaagatttgttttgtaacctaacgtgatctgctttggcaaatgttctgtgtgtgcttgagaagaatatgtgttctgctgctgtt

SEQ ID NO: 471433 - DNA, 122 bp, Homo sapiens
tgagacgctcaggtaccagctcgtttgtcaatcagcaccgagcatttcagttgtcaaagacgcagaggtctttgtgcaatgacagccgtcctccccgcccagagggcccccagctgctctgt

SEQ ID NO: 471434 - DNA, 122 bp, Homo sapiens
actcggtaggtggggatctcttggagacggcgacccaggcatctggggagccacagaagtcgtactcccttaaaccgtgagtttccgacggtttgttccatggcgcgggattgtgagggatt

SEQ ID NO: 471435 - DNA, 122 bp, Homo sapiens
gtggaggtgggacgatgcgtcacttcctggtcttttggggggagccgggatatataagggcggtgctcacgcagcgctctcgcttacacagtatggccggcgacattagctagcgctcgctc

SEQ ID NO: 471436 - DNA, 122 bp, Homo sapiens
ctccggtaggtctgatgccagacttttccttggccaggtcctgcagggggcggggcatcccgggcacgggaagctttctataaatggaagtggaagggagccggcctctgcgctcccgccct

SEQ ID NO: 471437 - DNA, 122 bp, Homo sapiens
gacgagggggcagggccggtgcctagggggtggaaatggccgagccgacttgttggaccccggtcctgctagattccttgtctgaatgggaaatgtcgccctcgcggtttcactcagatcct

SEQ ID NO: 471438 - DNA, 122 bp, Homo sapiens
gcaccatggctcagcatcccgaaccagagcaggacggacccacggagattccagggagggcggggggagaggatcacacagaaccaggcactgggagggagctggtcgcggtgatggcactg

SEQ ID NO: 471439 - DNA, 122 bp, Homo sapiens
cccagccccgcggtctctccagggcgtcgtagatcaaagtttggatgcgccggtacttggcgttgtttctcttgactgggcggctcagcggggtcttggccaggagcccgatgccctgcggg

SEQ ID NO: 471440 - DNA, 122 bp, Homo sapiens
gaacaagagagcagccactcctgaatgtggccttttcacagccaggtgcctctgaaacatcgtagctgttaatcctcataagtctcctgtagatcatattattatatccccattgtacaatg

SEQ ID NO: 471441 - DNA, 122 bp, Homo sapiens
tgacactgggaagagtgggggcttagccagggccgcggtctgtacaggagggtcccagcccgcaggtcacgggtctgcaggcccacagctaaccttcagagctgcacaagcgccgggagctg

SEQ ID NO: 471442 - DNA, 122 bp, Homo sapiens
agtgcattgctggagacttgaccataccctgtgcccttggctcagtggccgcctccctggcgcccacgggccacttaggtccacccttgtcctgggtatgcattgctgagaagcatgggttt

SEQ ID NO: 471443 - DNA, 122 bp, Homo sapiens
agcactgccatctgtgatcacacatatgtgtgcacacgtgtgcacttgattatgaagaggcgatatgtctggatggaacgcaaaacaaacagtccaagcaatcacctggagtgggtgttagg

SEQ ID NO: 471444 - DNA, 122 bp, Homo sapiens
aaagtgggggtggctctgcaggtcccgcttcaaggctgggtgaggttaactgaattaccacgcgaaaagcccttggtgaagtagttctcaccccaggggcaattctgtctcttaagggacac

SEQ ID NO: 471445 - DNA, 122 bp, Homo sapiens
tatgggagacacagtcatgggccttacaaagagcgagctaatgtgaagacattcagacatcgatttgaaaatcagtgagttcaaaaatagttaggttaggctgggtgcagtggctcacacct

SEQ ID NO: 471446 - DNA, 122 bp, Homo sapiens
gttcttgtggagagaagagagatcatgtcactctcaaatatccccaagtggtaccttccccgagctcctccaggggctccacactgtgggctctgctctctgcctctgtcttcccatagtcc

SEQ ID NO: 471447 - DNA, 122 bp, Homo sapiens
ggcccccggcccccgctcaggcttcagagccgcgggcgcatggggcgggagggggccgggcgctccccgcgctgagcggggctcccttgcaggctcacagtgccatgggcccggccgcgggg

SEQ ID NO: 471448 - DNA, 122 bp, Homo sapiens
tggggagagagcaaggcagccactcccgacccctccaggaaagagctaggagaacccaggcgtcaggctgcccagtccgagccccgtggtgacaagggcccctttgtgcccccctcccccgg

SEQ ID NO: 471449 - DNA, 122 bp, Homo sapiens
ggcagatccctgagctcattttctatgcctgaggtgcccggggaggctgcagcaggtcagcgagtgagtggaggggaagtcaagatgctaactgcttcttgacaccatgaaaggctgctctt

SEQ ID NO: 471450 - DNA, 122 bp, Homo sapiens
tagagatctttgcacaccttaactagcccgaggtccgtgtgacaagtccggtatgcactgcgggggaaatgcaccccaggcagaagccggcccttccaggcgtggcatcctggggcacctgc

SEQ ID NO: 471451 - DNA, 122 bp, Homo sapiens
aacccaacctctccttgctcaaactgcaggagggagcggccatcgagtttcctttgaacgcggtgacaggcttacaggtctgtgaacgaaagggcgcctaataagtgacgtgaacttcgacc

SEQ ID NO: 471452 - DNA, 122 bp, Homo sapiens
cgtccaaatggtttgcatgtctgcattttttactgctccgtttaatatgtatgcaaatgccggccggctgcgcccgccgcgcggctgcacagtcacacgcggcgccccattaaagcggccgt

SEQ ID NO: 471453 - DNA, 122 bp, Homo sapiens
caagtccaagacacccgctaagccacagcctcaggccactgccattcctggtgggtggggcgggtgtgattaagatgcaggaactggacttgagttcaagtgtggcggctcttcttccagtg

SEQ ID NO: 471454 - DNA, 122 bp, Homo sapiens
aaaaggcttctgaaatcaggcaatgcctttctaattcttacaccaacctctggagttgggcgacatggcttctcccctttctaggtcccatgaaagccatcttgctattactcacctttggg

SEQ ID NO: 471455 - DNA, 122 bp, Homo sapiens
cgctgcagcgccgcctgagcccgccggctgggcagggcggccgctgctcccacatctaggcgcacgttcaccctgtgccttcgcctgccaaggagtccttgctcgcgtcgcgcgtgtcgcca

SEQ ID NO: 471456 - DNA, 122 bp, Homo sapiens
cgctcgccccggccgtgctgaagcaacttccgccctgagaagggtggggcttccgtctcccgctctcgcgactcctggcggtgaaggacggaagatgatagccacatttcttcctcgccctt

SEQ ID NO: 471457 - DNA, 122 bp, Homo sapiens
gaatgtgttcgctggggtcccacgtatgctttttctgaaaatgctccacaaagcctaggacggcccccatgcctcgggtctgtccaccagtaactctgtacgcccggtgtgtccttgtttca

SEQ ID NO: 471458 - DNA, 122 bp, Homo sapiens
atcccagtgctcggggttcgggactctggaccagaaatgtgggcagcagctgggtacctgcgacttctgccccgtacctgcgcgcgcggcagagaggccttaggtcacgcgccgccccgcct

SEQ ID NO: 471459 - DNA, 122 bp, Homo sapiens
gtcccggggcgccgggcccgcgatcggagccggaggcaccgcacagcggaaagagggctccgcggcggccaggctcagctttgccgggaaaatgctggatttaactcccagtctgcgccaat

SEQ ID NO: 471460 - DNA, 122 bp, Homo sapiens
actaaccaattgtaccaagtttgccgaaacgcttacctgttctgaagattctgcttgtgacggggaaggtagaagctgctgcttttatagcccccaggatactgacttttttttaattgtga

SEQ ID NO: 471461 - DNA, 122 bp, Homo sapiens
gggccggggagggggccgggccccgcccgcgggcgggaggagacgggcgggaggcgggagcgcccacaccccgcccccgcccccggatccagcccgcggagcccgcggccagggcggcgcag

SEQ ID NO: 471462 - DNA, 122 bp, Homo sapiens
agcagccagctcatcccagtgactcacaggacacagccatccagcggcatctttccttgtcgaatgatactgtaatgaccttccaaagtgaagagtagcacattaaagtgattttattgttt

SEQ ID NO: 471463 - DNA, 122 bp, Homo sapiens
caccgcgcggcgccccgcacccctccacacttcccttcgggcgcggcgagttttcagcaccgcggacagcgcctccgcctcccgcctgaccctgcagtgtggcctccgcctgggacccacaa

SEQ ID NO: 471464 - DNA, 122 bp, Homo sapiens
gaacccctccttgagactcctgactcattccacatctctgactcacctataggtggggaacgtggggcagacaaactatgcagcatccaaggctggagtgattgggctgacccagaccgcag

SEQ ID NO: 471465 - DNA, 122 bp, Homo sapiens
catactccactaacatgaaatgggggatgtgcgcgtgcaggaacttgtggaacttctgcccgcagaatgcctggtcgagctctttagggccttagcatgcctcgccttgatgggtagcaaag

SEQ ID NO: 471466 - DNA, 122 bp, Homo sapiens
gccgccctccccccaccccccgtgcccggtctgcaggcctgcgggtgctgcgtggcgcggcggagtgtcccctgctctggtttcaggatggctcagcccagcgtcctccccgtccctgtcct

SEQ ID NO: 471467 - DNA, 122 bp, Homo sapiens
ccaccaccatggccaccacaagcagaccccagagcactgctgctgccccccatcccgccccggttccccactggccccttgccacggtccagcctctcctggcagcaactgtatcagaacta

SEQ ID NO: 471468 - DNA, 122 bp, Homo sapiens
tccacccgcgcccgcgcgggggaccaagggcccggatttaagaagagtgtgcctacaaggcggttgtcacggcaacgagagggcgggattgttcgagcgctgcggccccctcacgtgatcga

SEQ ID NO: 471469 - DNA, 122 bp, Homo sapiens
accccgcccagactgccgctcaggaaagggttgtgctggggccggggggcgaggggcgggcggctggacgcttccaggctctgctcggctcaccaaaacattccaccaccccctccccgcat

SEQ ID NO: 471470 - DNA, 122 bp, Homo sapiens
aagcagaaagcttggcttcagccacctctacagcccagaggactcctcccctgcaccagccggtaagacaactaatgtaatgttgaggaacactcagaactgtttctaagcctgtttaagga

SEQ ID NO: 471471 - DNA, 122 bp, Homo sapiens
aatgtgtggcctgaaggaggtgggggaggatgaagagtggactctgtactggacagactgcgctgtctcactggaacgagtcatggacatgaagaggtttcaggtacccatctcctgacctg

SEQ ID NO: 471472 - DNA, 122 bp, Homo sapiens
ttaatttttctttttttttttttcactcctggccttaagcgatcctctctcctcccaaagcgctaggattgcaggcatgaaccacttctctcggctaggacttttatttttaatggtcaact

SEQ ID NO: 471473 - DNA, 122 bp, Homo sapiens
ggggagaaaaagttgctcagaaatcaaaagatatctcaaacagcacaaataatggctgatcgttctgcaaacaaaaagttacataatagctcaagaaggagaagtcaacatgactctgaaca

SEQ ID NO: 471474 - DNA, 122 bp, Homo sapiens
aacttgtcatgcaatatgaagcactgttatctcttcctataagtgtgtgtgtagaagggtcgggggtatttaaacactctggtagaagtttcctacttttggaagctagggacgaatgtggg

SEQ ID NO: 471475 - DNA, 122 bp, Homo sapiens
cccaggggcagggcccgcggtccagaccagggcacccggcgcccacggcgacccaggcggcgccacaggcaacccccaccgggcgtcagatcctgcacgcccgcggggactgggagaggaac

SEQ ID NO: 471476 - DNA, 122 bp, Homo sapiens
gtgaactgagtaagcagagtggagggagcagagagcagaatactcacagaggagctgcagcgaaggaggaaggctaatcttctgggcagaaccccagagaggcgccagttcagtgaccgtcg

SEQ ID NO: 471477 - DNA, 122 bp, Homo sapiens
accagcgacgcccagggtcccctgggcctcacgaatgcgcggtggggaggcactttcattcgtggggggtacctctgcctcgccgtttctgttttccttccacatcacaggtgcctcgatct

SEQ ID NO: 471478 - DNA, 122 bp, Homo sapiens
aagttcgggctcggggtagctggggctctcggcgctaaaggcggggagccaactggccctcggctcctcccctctcgccctggacccagccccttctctcggcccctccctccacagagggg

SEQ ID NO: 471479 - DNA, 122 bp, Homo sapiens
tatagttggctccactgctggtgcttctcatgcagagtggagccacgggggacatgaggccgcccaacccagggtcagaggtctaagtaaacatggtggtttctgtttgatcttcctcttgt

SEQ ID NO: 471480 - DNA, 122 bp, Homo sapiens
ggaccagacacaggacatccaggcaggctggagtttcagaggaaggacatgactcccggacgcaggcatgtgcctcgcagtgacactgaaacccgcctggggtgcttagagttgacgccagc

SEQ ID NO: 471481 - DNA, 122 bp, Homo sapiens
ataagtttggagctgtactctcagctactcggggctggtccttgattttggctgcgctcgcgcacgctcccccttttctggccgccaggtcccgccttctaaatttccccaggtctccaggc

SEQ ID NO: 471482 - DNA, 122 bp, Homo sapiens
tcacaggtcacgccccgggggaggtgggggtcccagtctccgggtatgcctccgcgctgccgggtaatggtgggatctacttttagtgaggcggaggcttcaagccccagattcggggaggt

SEQ ID NO: 471483 - DNA, 122 bp, Homo sapiens
gccattgtatatttccagtactttgtgatttcatcgaacatgctttcaggctgctgtacccgcaaacatttcccttcagtagaaacaaataccgtctctctcaagccttctccacgcactcc

SEQ ID NO: 471484 - DNA, 122 bp, Homo sapiens
cacgaggatgctttggggagcagggcaggagacgccgtggggagcagggctcgagggcaccgtgggacccagggacgctgctgcttccaccagcggccctcgtggctttctttgtggaaaca

SEQ ID NO: 471485 - DNA, 122 bp, Homo sapiens
ccagagaacactatcatcgcagatgcttcatgtgaattgttccatttttaagacaaaggacgacagttggccttaaaaataaatctcatttgtgtttcttttggttgtggagaagtaaagaa

SEQ ID NO: 471486 - DNA, 122 bp, Homo sapiens
gtgagaactacagctgaaggatgttaatgtgtagttttagcctctgttaacatttatatgcggaacttaagtaataaaccttaatgtagttcttttatgattttcaaagtcatctggggtat

SEQ ID NO: 471487 - DNA, 122 bp, Homo sapiens
ctcttctgcgtggcctgctgcaggcggcacgtctggctcagcacacgtgatctgattctgcgaaaattacccgagaatgtcaggatacgacaaacactggtgagagccgtagctggaatgaa

SEQ ID NO: 471488 - DNA, 122 bp, Homo sapiens
cagtggccccgcccttaggagggcggggcctcggactgactctcgaatgtcccggatgtgcggtcttggaggccggcgtagcgctaagcttctcggcagcacctgcccaactctgtagaagg

SEQ ID NO: 471489 - DNA, 122 bp, Homo sapiens
ggcccccttcccgctggggcctgtctgtgtgctcacctgaatgcctctgaagacaccgtgcgtgtgtattctgtattgggctccgcagaggatgggcgttgtgtggttatcgctctcgtacc

SEQ ID NO: 471490 - DNA, 122 bp, Homo sapiens
ctcctcgcactacctctgtcctctctcactggccaaatgcaattcttggatcttagatttcgctgatagtctagttttctgtctcccacacttttcctgcttctgttgtgcttcttttccag

SEQ ID NO: 471491 - DNA, 122 bp, Homo sapiens
gggaagttgccaggggtgcccgtgtttgctcattcagcacatgtgaatcaggcaccttggcgaacaggctggacacctgggcacacgtgtggcaaagtttttaggttcacaggacagaaaac

SEQ ID NO: 471492 - DNA, 122 bp, Homo sapiens
cacaggtgcctgggctgcgttccaggaaagagaactgtccagggaaacagattaggttatcgcatggaagcctgagtcagaaatggtggttttggggtgatttggacaaattaggttagttt

SEQ ID NO: 471493 - DNA, 122 bp, Homo sapiens
caaacacattatctctctgtgtctcctcaacatgtcctctaacttctttattcttgccaacgacgccatcatctgaccagtcccatataccctatctgatgacgacagatagtttaaaaata

SEQ ID NO: 471494 - DNA, 122 bp, Homo sapiens
cggtgccttcgcccactgcaaatggccttgccgctaataacgactctcctgggtcaggttcgcagtccggccggaaggcaaaggaccccgaacgggggctctttcctgggccccagaaaagt

SEQ ID NO: 471495 - DNA, 122 bp, Homo sapiens
tagtttccacagacagatccttgaccaggactcaggcagtcagtgtgacaaagaggctggcgtaggaaaagagaggtcaggacaaagtcccaggccccaggcgtggctctctgggtctcagg

SEQ ID NO: 471496 - DNA, 122 bp, Homo sapiens
ccaaaaacccatgaaccctgagatcttcttctacccctaaagcctgatttgcagtccaagcgagtgggcaaacacacactctctggccaattcttcattatctgcatgtgggtcatttgtaa

SEQ ID NO: 471497 - DNA, 122 bp, Homo sapiens
ctggggaccccgtggagtagcctgtctcaggtccccgtggcccactgggaggggcgctcccgggatgaagccagagtaaatacaggacatcaggacattgttttctggcggtgggtctttaa

SEQ ID NO: 471498 - DNA, 122 bp, Homo sapiens
cacgttgtcttcggtagtcctgagcgccgggcctgaaggactcctaggcgtggagcagagcgacaaaacagaccagtttctagtgacagacagcggcaggacagtcatcctctataaggtga

SEQ ID NO: 471499 - DNA, 122 bp, Homo sapiens
gtagagattgattcattctagccaaaccacctctcttaacaaaaaaaggaaactgaaccccgattggcgaaatgtcttgctcaagtccataaagcgagaccaccggctgatctggaccctta

SEQ ID NO: 471500 - DNA, 122 bp, Homo sapiens
gtcttgaacttctgacttcaagcgatccacccgcctcggcctcccacagtcctgggattacgggcgtgagcacccggctgcccatactcttaatcactaccctggagtagttctcagtgctg

SEQ ID NO: 471501 - DNA, 122 bp, Homo sapiens
ggagggaggcaggatggcagcacagagcaagggcttcctgccctcctggctgcctgcagacgggagtggagaccgtcagagcaagccccagcttctttcagaggagggtagagtccaggact

SEQ ID NO: 471502 - DNA, 122 bp, Homo sapiens
ttctgttgctcaggctgtagtgcggtggtataatctcagctcactgcagccttgacatcccgggctcaatagatccaaccacctcagcctcgccagtagctggaacacaccaccgcacgcag

SEQ ID NO: 471503 - DNA, 122 bp, Homo sapiens
gatggcgtcaacgttgacctttgcattgtggggcgggaagttttctgtggccatctccggcgttctttataggcagcggcctagccgagagaaactacaactcccggcagggttcgtgcttg

SEQ ID NO: 471504 - DNA, 122 bp, Homo sapiens
atgaagatgttccagtcatggagattcccaccactaaaggaactgcagaagctgtaaattcgggcatgagaatctgaggagaaacgtgccgaggcaagaggctgggtagcccctgtgcagca

SEQ ID NO: 471505 - DNA, 122 bp, Homo sapiens
gcccagtcagtcaggtttgggggttcacaagcccccattgccggcgaggggtgacggatgcgcacgatcggcgttccccccaccaacaggaaagcgaactgcatgtgtgagccgagtcctgg

SEQ ID NO: 471506 - DNA, 122 bp, Homo sapiens
ccacgccccgaacgcaactgatttgttttcttacaaactcgctactgtgtagcggcaccgcgttgcccggcgcgcgaccttacggcgttccgcccacagggcctgcataaccagtggctgcg

SEQ ID NO: 471507 - DNA, 122 bp, Homo sapiens
ctgcacctacgtgctggtggaggagatcagcccctccgtggacaacttcggagtttacatcgacaactaccactgcgatcccaacgacaaggtgtcctgtccccgcaccctcatcgtgcgcc

SEQ ID NO: 471508 - DNA, 122 bp, Homo sapiens
gagaatcttggaaacagccaccagggtgggcggggcaagggctggtgctccaccaatcaccgagccagcccctggaagcgctgagccgtggccaatcggaacgcagcggcttcctcctagcc

SEQ ID NO: 471509 - DNA, 122 bp, Homo sapiens
gttaggagtcagttatctggttccccacagatgtgtctgggagcagctgggaggctgagacggcaggcaggcctttccttcttataactctgggctggaaaatctcatcaatatggaaaact

SEQ ID NO: 471510 - DNA, 122 bp, Homo sapiens
gaggctttaagaggcggggctagattccgctaactccctgtccccgcccaccgccgcttccgtgtcgcctacgtcacctccccatcacgggaccccgccagcctacgtgatgacgcaagtgc

SEQ ID NO: 471511 - DNA, 122 bp, Homo sapiens
ggggtagcggactacgctcttccagctgtcggacctgggaaattctcctgtgctaaatcccgtggcgctcgcgggtgtcgccgcggtgcatcctgggagttgtagttttttctactcagagg

SEQ ID NO: 471512 - DNA, 122 bp, Homo sapiens
atgcaatagggttttatgggaaaagtctgcctgtctgtgactaagcaccagagtagataacgtaacaatttgttttacttcgggaatgcattttaaatcaggaagagaagtttctgtcctac

SEQ ID NO: 471513 - DNA, 122 bp, Homo sapiens
cgtcctgtgaccctcggcccacactcccccttgggtggccctggcagggctggctaggtgcgttccctgcagaccacgggaagccctgtgcttgcctgggtcagggctaagctgtgcgccct

SEQ ID NO: 471514 - DNA, 122 bp, Homo sapiens
agcactgtgtgactgtactcccccgacccccaggacatccccacgcccagcttcccaggccggtcttctgcgcggctcaagtagcccaggtctccacgcaacaatgaagcgtgggcggcccc

SEQ ID NO: 471515 - DNA, 122 bp, Homo sapiens
caaaggaatctagtgacctacctagagggaagaaggaaaaacgtgataactctgagcagacggaccaaatgcttattctgtggggatagaagtagggcaacttatggcaacaacacgagcta

SEQ ID NO: 471516 - DNA, 122 bp, Homo sapiens
ggggtgggagtaggaataagttccactgcgctgaccccccactgctctccaatctgctcacgtgcaacaggatttcttttgagttggtctccgttgtgcacattgttcagcagctgtgcggt

SEQ ID NO: 471517 - DNA, 122 bp, Homo sapiens
ctttcttccctcctccctccctcccttcctttcttttttttggatggagtctctctctatcgccaggctggagtgcggtggcgcgatctcggctcactgccagctccgcctcccaggttcaa

SEQ ID NO: 471518 - DNA, 122 bp, Homo sapiens
agactcttcccagagccagcagcaagaacccgaggcattaataaacttgagatgtagcttcgcttaactcgtgcagagggtttccgtgtcacttatgtagaaactagggcctaatttcaact

SEQ ID NO: 471519 - DNA, 122 bp, Homo sapiens
gccgggattgcatggcgccgggggggctgtcggggacggcgagggggctcggggatcgagcggcgtcccgtgcaggcaccgtgaggcagcgcggagaaggggacaggaagcggcacctagcc

SEQ ID NO: 471520 - DNA, 122 bp, Homo sapiens
gtgtctcagaagtccattcctttttattgctttccattctgtggaatcactaccatttgtcgatccattcacttgttggtagatatttgggttgtttcctattttttataattatgaataaa

SEQ ID NO: 471521 - DNA, 122 bp, Homo sapiens
ccccacactcggagcagctggccggccctgccggccctgagcaatgagggacatagcacccgggccagtggctgcggacggtgtactgaatcccccagcagtgccagcccaccggcgctgtg

SEQ ID NO: 471522 - DNA, 122 bp, Homo sapiens
cctgctcacagcctccttccctctctccttctgcctcagatgtgaagttcatttccaatccgccctccatggtggcagcggggagcgtggtggccgcagtgcaaggcctgaacctgaggagc

SEQ ID NO: 471523 - DNA, 122 bp, Homo sapiens
taaacccgggaggcggaggttgcagtgagccgagatcacgccactgcactccagcttgggcgacagagcgagactgtctcaaaacgaaaacaacaaacttaagacacataacctgaggtgtt

SEQ ID NO: 471524 - DNA, 122 bp, Homo sapiens
ctcccataaccaccatgtgttgtgggagggactcagtgggaggtaactgaatcatgggggcgggtttttcgtatgctcttctcgtgatagtaagtctcacgagttcgttataaaaggcagtt

SEQ ID NO: 471525 - DNA, 122 bp, Homo sapiens
acgccatcctaggggtacctgtgtgtagcggggcggtggtgctggccatgctggcagctccgggaggtggggggctccatacgcggccccgccgccccccaggcctgggtgcggaggccgga

SEQ ID NO: 471526 - DNA, 122 bp, Homo sapiens
ggcggggcgctgactttcgggtcccgggggctgggacttgccagcggcaggggcgaggaccgcagaaaagtctcctgggaccccgggctagagcagagaatggcgcctgaaaggtgttggga

SEQ ID NO: 471527 - DNA, 122 bp, Homo sapiens
gaatgtgtcagtcacatccccaccttcccaattcttgtcatctcggttcaggaaggtgaacggtgttccgattccccgcggcgggggcctgtagtgggagctctgccccttccccgcctctg

SEQ ID NO: 471528 - DNA, 122 bp, Homo sapiens
ggaacctctctgtggaaaacacagacccttcatgacacgcaaactcgaagccggtgaggccgagtctcagggctgcgccaaccaggaagcctggctgtccaatgttccaaatctggatgtga

SEQ ID NO: 471529 - DNA, 122 bp, Homo sapiens
aggccagaagcagttcccagaatcaccttccggggagaggccaggcctcacctcttcacacgccccctgcccctggatgccccattacctgccagagggaccagcctgtcccgttctgagaa

SEQ ID NO: 471530 - DNA, 122 bp, Homo sapiens
aacttcatacacttgccatttaatatgctcttttatctaattttcaaaaactctaaaaaacggtgtatcatatggactaaataaagaacatgtgaattttattgctcatcatgaaactaaat

SEQ ID NO: 471531 - DNA, 122 bp, Homo sapiens
tctacgccaggtaacaaccaacggggagatctgccttttagctggggcagcctcggactgcgactgcaaaaacgatgtcaattgcaactgctattcaggagatgatgcctacgcgactgatg

SEQ ID NO: 471532 - DNA, 122 bp, Homo sapiens
cccttttgggttggggtgtatttaccacctgtcagagtgggtgaggaccaaaggggtgatcgtgtccaactctgttacgctacagtggggaaacagactggggagtgcccaaggtccctcag

SEQ ID NO: 471533 - DNA, 122 bp, Homo sapiens
atccttgctcctttcctctatacagagtgtcctttggctctcatggtttgtttcttgattcgtacttcctcttttgcttatttacagcattttcttctctactcccttttctcttcattgct

SEQ ID NO: 471534 - DNA, 122 bp, Homo sapiens
cttgcgcctcgcccagtgcccgtgtcccttcccggggacatctctccccagcccctgtcccgaggcctgagtggcaaggaacttcgcctgtgccccccaccccatgggctccggacgccccc

SEQ ID NO: 471535 - DNA, 122 bp, Homo sapiens
ccctcctgtccccgggaggcctggggatctgggctgggacccagaggtgcccaggtgaggcgaatcaggcagtccttgtgggcaggtggggctccgggggagtggaaagggtatgcgggcgc

SEQ ID NO: 471536 - DNA, 122 bp, Homo sapiens
cagtcacagccttgatccccttagaagggcttctaatcaggggagcagcaggaagccaagcgaggccctccttatcctctccacaaagcagaggaagctgcacccccttgctccaggcatcc

SEQ ID NO: 471537 - DNA, 122 bp, Homo sapiens
gctgccctagacattgcaggactgcggccgagcttcccggacacaggatcccccttctttcgaggccatgagagctgttgggttccctacttcgcacaagctctggaaatactgtgcctcga

SEQ ID NO: 471538 - DNA, 122 bp, Homo sapiens
ctgtaggcggggcggccgcgaggctgagtcaggcaggggaggccgcccccttgcggaggccgcatcttcttaagagccgattctgaactgaccactccttgacgggcaatcccggtggacgg

SEQ ID NO: 471539 - DNA, 122 bp, Homo sapiens
ggttcaaggagtaggtctggaaatgtttcttttcttctttcagatggagtctcgctctgtcgcccaggcgggagtgcagtggcgtgatctcggctcactgcaacctcggcctcctgggtgca

SEQ ID NO: 471540 - DNA, 122 bp, Homo sapiens
ttgtccctaaacgttaatgcataagtaaccttggtcaccaacagatgtgagggcacgtgacgttcgggctgcgccctccccgccccggccctgcacacagtagggccgcaccgcgctttgca

SEQ ID NO: 471541 - DNA, 122 bp, Homo sapiens
gcattgtgaaattccagcacacattttctatcgtgaatatacctacaaggcaaaatgttacgtctcagtttcaactaccaaaacaacgcttgttttctttttctctaaagaattctgcgtgc

SEQ ID NO: 471542 - DNA, 122 bp, Homo sapiens
gctacctggtgaccaaggtggtggcggtggacggcgactcgggccagaatgcctggctgtcgtaccagctgctcaaggccacggagcccgggctgttcggtgtgtgggcgcacaatggcgag

SEQ ID NO: 471543 - DNA, 122 bp, Homo sapiens
gccggcggagggcaggctacagtgagtatccaggcagctgggttctggcgggggagggcacgtggagaggagaaaccaggccaggcacagtgactcacacccgtcatcccagcactttgcga

SEQ ID NO: 471544 - DNA, 122 bp, Homo sapiens
aggagcaacaggcagctcagggtcccaggaacactcaccagctggcagcccctcgggaagcggctgggctttccacctgttcctgcatgctgggcacactctggcttagatgccctcttaca

SEQ ID NO: 471545 - DNA, 122 bp, Homo sapiens
gaactcacccacgtggccccagagggttgagggtgactcccggggatcttctgcttgctgcgtggcccgtggggctgtcactccgccctacccccgaaacagcggaagcagctgcctggagc

SEQ ID NO: 471546 - DNA, 122 bp, Homo sapiens
ccccgcccccgccagtgggtcgcacgcggattgccgagggcttgcaggcactcaggcagacgcagacagaaacccacatcgaccccccccctttccccgcctccagctgtccgaccctcaag

SEQ ID NO: 471547 - DNA, 122 bp, Homo sapiens
gtgcatcacatcaggtaaagttctctttgcttctgccacgtccagagctcaagggtggcccggcatgagttaaggctgttagatttgggagatctggcctttgaaacgcactcagcactcca

SEQ ID NO: 471548 - DNA, 122 bp, Homo sapiens
cgccgccgccatggtgtccccggtcactgtggtgagtgagcgagcgagcgagccagtgcccggcgcggctggagcccaccggcctggccaccggacttcggcaggccgagctgccgaagggg

SEQ ID NO: 471549 - DNA, 122 bp, Homo sapiens
ccgggcctcagtggtctggtctggaatgaagagtctgagccaggtggtcccaagcgctgccgggctcccacattttctgacaatgaggtaatcagtcacgtgcacttgccaaggtttgggca

SEQ ID NO: 471550 - DNA, 122 bp, Homo sapiens
cttgagtgggcttggcacggacgggaagtcagacgggtcaaccccagaccccggctgcagcgctgctcctgccggtacctctcccaccaccgcactggtgctttgttgttgttgttgttttt

SEQ ID NO: 471551 - DNA, 122 bp, Homo sapiens
gtgagtgcgattacaaaccaggagaggaagggtgaggaagcagggctatctgtgcacgcacgtgcaacagttactaagctcgtgtttctggggcaggcggaataggagctgggtgtttataa

SEQ ID NO: 471552 - DNA, 122 bp, Homo sapiens
gacctgtgagtcacggagctcccgggcaccatgctggccacaaatgcctaaggagccccccggaaccagctgtgggtcccgcaggcactcgcaggctagcggacacctttggaggactgaga

SEQ ID NO: 471553 - DNA, 122 bp, Homo sapiens
tgggggtagtcagggttctgagggggtggtggcaggagagcacttgaacaagagcaatgacgactgggtctacatgggaggcagtctggacttggggcaccccaacagaggcactaccaatc

SEQ ID NO: 471554 - DNA, 122 bp, Homo sapiens
ggccgcagggttgggagggctcttattggaagcaagaggcgccaggcaaggggcctggcacgtagtgggccttcattgaaaggtcgtccctcttccccttcgcctttctcttccacgacctg

SEQ ID NO: 471555 - DNA, 122 bp, Homo sapiens
ctgcaggagagctccttacctcgcttgcggttggctgccatttaaacgcggccatcggtccggccatcatccccttcacggtactagactccgggatggtgagatcctatagagggaggggc

SEQ ID NO: 471556 - DNA, 122 bp, Homo sapiens
acaagtgaaaggatactggagagagaaattacccatttctaaaaaaaaaccacactctgtcgtatctgtgttaatgttttctagcatgtactctggtttcaacagacacaaatttatatgtt

SEQ ID NO: 471557 - DNA, 122 bp, Homo sapiens
ctttggctcagatgtttaaatacttaaacagtttggaaagacttttttctgtgtgtatttcgttttgtttttttgtctgtgtgggcatgagcataggggaggttatactgaaaaggagaatg

SEQ ID NO: 471558 - DNA, 122 bp, Homo sapiens
gtacccgacgctgtctgggaattccgggcgtttcggctccttggtcgcagaggcaggaggcgtgcgtggcaggagggttcgggttatatactcctaggtcctgggacagaatagttacgacc

SEQ ID NO: 471559 - DNA, 122 bp, Homo sapiens
tgtttcactctgatgctattatttactcatccttttgcacaggaggtcactttgcatagacgagaagaacttgaggctgagcctctacctatggtctgttggaacctaaggaagccagttca

SEQ ID NO: 471560 - DNA, 122 bp, Homo sapiens
aataggaattctctttgttaggaggtggaatgaaagtgtccagcaaactccagccagcagcgttcgtcccttgatttagagggctatgatttctacaaagtggcccgactggcccgcgaaca

SEQ ID NO: 471561 - DNA, 122 bp, Homo sapiens
gtgctgagtctctccttggtgtccaaggggctgggatggcccagggtgcacaggtgtccccgggcagcctgcagatgcttctcgacgacacggcccctttgagttcgaaggtcagatctgga

SEQ ID NO: 471562 - DNA, 122 bp, Homo sapiens
cttgatctaccattgtgcagagagctgtttgtgccatctcaatctgcccccctcaccagccgcacaaggactgggggggaagaaagcgcccggcattcagatgctgaatagcaaattgctct

SEQ ID NO: 471563 - DNA, 122 bp, Homo sapiens
tggacctgggcggggagcaaagttcccacgagaagtcagccgagaaggctctggagttcccggacagcaaagcaaatgcagccggggtctgggctgtggccaggtggtgtggggcggcatgg

SEQ ID NO: 471564 - DNA, 122 bp, Homo sapiens
atgcctcctaaagagaggtgttgtcttagttcctgataacttttcagacatgggtttcagcgcctcatgagattcaataacaatcctggccttgattcctataagaaacccatatattctct

SEQ ID NO: 471565 - DNA, 122 bp, Homo sapiens
gtggagtcgggtgagtggagttgggtcgaagtcaagggtctggcttgaggttggtgccaccgcgaacgctaggacagggtcaggcggagcccagccgtcagggcgcgttgggagggccgggg

SEQ ID NO: 471566 - DNA, 122 bp, Homo sapiens
gtgtcttgcttacatgaagcttatcacgccaccctcagaaaatttccatcttatcatgggcggcattgtaaataatggaaaaaactgtctgaaactgtttgaatgttttcttagattatttg

SEQ ID NO: 471567 - DNA, 122 bp, Homo sapiens
acatcaatcttcgcgattttgcgatggagaagccaggtggtgactctttaaatgatctagcgccctctggtggattttcctggcacatgacattatttcatgaatgttcaaaaaagggactt

SEQ ID NO: 471568 - DNA, 122 bp, Homo sapiens
aggcggaggttgcagtgagccaagatcatgccatactgtacttcagcctgggctatagagcgagactccatctcaaaaaggaaaaaaaaatccttgtgaaatgtatgtttgttaatggtgaa

SEQ ID NO: 471569 - DNA, 122 bp, Homo sapiens
tcactcattcattcatccagagacaggcacagacaggctgtgacacaggagctggcaatgcggtctccacgtggccggaactgagcggctatctggaataaagggagggattgcagcggctg

SEQ ID NO: 471570 - DNA, 122 bp, Homo sapiens
tatacacagtttgattggcactcctattgacactttatttggtttgtgacttgtttgtctcggtgcctttctattaatatattttttctatttaaactaccctctttttttcagtacagcac

SEQ ID NO: 471571 - DNA, 122 bp, Homo sapiens
ttccttatgaactctttgaactcatcttgttttctggaactttctctagagggggtctcacgggtagtagacaccggaggatgctgctgcccttgtggggttcaggtatgaagtgatcaggt

SEQ ID NO: 471572 - DNA, 122 bp, Homo sapiens
aacaatccttatagttagcttaaaatgttgagtgcgttatggttacagatgatagtgtagcgggagtaaccttaggcctgcaaactcaaatgtgtaacaaagataatttttttttctgtaac

SEQ ID NO: 471573 - DNA, 122 bp, Homo sapiens
attccagcagcaaatggctcatacatatggtacagagatcagaccacaatgtcctcacaacggatataggaggtcagcaatagccaaatatccatgggatactcttttcctccagccccgtc

SEQ ID NO: 471574 - DNA, 122 bp, Homo sapiens
atctgccagcgcatgcttgacctaaatgagcttgtttttcacagcccgagtctgtggcttcgtccccacagttcagcgatcctcatctgtacgtgtggaacgccactggcaacagactgttg

SEQ ID NO: 471575 - DNA, 122 bp, Homo sapiens
atcatcacagatactggaatttgtctcagaaccatctggcatgcatcactatgcaaacgacgtcctcaccggagggagcccaaagggagattgctatctcaagcccccatgtagggtggttg

SEQ ID NO: 471576 - DNA, 122 bp, Homo sapiens
aacccagcccctgcggccgtcaccccgccagcctacactgccagccgccaccggggcacacgggcctctgcttgccagccaggagtgcggacaccatgttcccagctcagtgccaaagaggg

SEQ ID NO: 471577 - DNA, 122 bp, Homo sapiens
caaactcggactatcaccttaattcagaccctccctcccggagtgatctaggtcgtgtgtcgtctctccttctccgctgttgcagcacagatggaaatggaatgggtctcgcttgcagtctg

SEQ ID NO: 471578 - DNA, 122 bp, Homo sapiens
tttttacttacccacacaacgttaggagagtttttaatctaacgacaataaagaactaagcggcagcaaaatgtacttcatgtggcaaaatacatcaagcaattttctgtcccatttcactt

SEQ ID NO: 471579 - DNA, 122 bp, Homo sapiens
gctctcctgacccgccaagaccagagagccgttggcgccctccgcccgggcctgccggtccgtttattttaagaagctttgtgcgcctgctgtggggatttctgatccaggctgcgaagaat

SEQ ID NO: 471580 - DNA, 122 bp, Homo sapiens
agacctcgtgatccgcccgcctcggcctcccaaagtgctgggattacaggcatgaaccaccgcgccctgccaggatccttttaaaactacaaatatgggtgggcgtggtggctcacccttgt

SEQ ID NO: 471581 - DNA, 122 bp, Homo sapiens
cggctcacaggacagcttgctggggttgccagccggcccttgacttaaatagccctgccccgctgcattcctggcccagcccagcccagcccagcccacccctgcgtgtagtatcctccagc

SEQ ID NO: 471582 - DNA, 122 bp, Homo sapiens
taactgggcactaagccagcctgggcaggaatcatcggaagatggggcagggcttgaggtcgaggccttggtagcctgactttgcatccagttcctgcactcccagctctataccttctttg

SEQ ID NO: 471583 - DNA, 122 bp, Homo sapiens
tgaggactgactgtgtgtgtctcgctcaggaccaggagcaacaaatgttggcttcttccccggcaaagacccgcgctttctcctgggctccgggttcccggggtgggggtgggcgcagtccc

SEQ ID NO: 471584 - DNA, 122 bp, Homo sapiens
tgtgctctcctcctgcccttccaagcagggcagcaggcatgtcccagcccgggagccacacgtcagcctgctgagagttcccacctcccgcagatgacaggtcagagcaggagggctccact

SEQ ID NO: 471585 - DNA, 122 bp, Homo sapiens
gccttctcgctgcccagccccggggagggaggcggggccgcgaccccggcgcgggtggggcgaatgcgttcccagcgggtagcctgggactggtgcagagttccaagcccacggccccggtc

SEQ ID NO: 471586 - DNA, 122 bp, Homo sapiens
cggtgatgttgcggtgtagacacagggcctggacctccagaaccagcgatgccgcaatgccgcagtgtagacacaggacctggacctccattgctggcaggaatgcaaatggcatggccact

SEQ ID NO: 471587 - DNA, 122 bp, Homo sapiens
cctgggtgaggccggcaagtttggagcgtggtcagacaataggggcgtggctacggctcgcggagcgcaaccaacgctctagaccagacctgggctcgagaccataactgtttggctttaac

SEQ ID NO: 471588 - DNA, 122 bp, Homo sapiens
aaaagaaaagaaaaaaactaggagcaaactggcgcgcccggcagaacgccgttgtgcagacgcagaattaagatcttcacgccagatggagtgaaaaagcaaggagcagaagatgggtggga

SEQ ID NO: 471589 - DNA, 122 bp, Homo sapiens
ggcgggggtcttgggagaccctgtctcgccgcctttcggtgcagatgatgcaactctgggcggaggcgcggagagggaaaccgggacccagttgagatcctctgtccagagaggggagcgag

SEQ ID NO: 471590 - DNA, 122 bp, Homo sapiens
aggctgccctgcccagcagcttccctgggagcaagagcaggcagcctgccacgggtcccccggtgttattaaatagggattcaggccactcccggcacagcagagtccagaggagactccca

SEQ ID NO: 471591 - DNA, 122 bp, Homo sapiens
attggcctggaagtgacacaccaacttccattcacaactctttggtcagaactgttcacacggcccaatgacaaaggggtcaggaagtgccagatggaggagagccaaaaataattactaag

SEQ ID NO: 471592 - DNA, 122 bp, Homo sapiens
gaagtaaaaccgtagactgaatttacaaaatactgtggtgtggtatcatattgtaggcagcgttaatggatagagatggagtagagcatcagtaataagagaactaaacgtcacgtgaattt

SEQ ID NO: 471593 - DNA, 122 bp, Homo sapiens
ccatctctttagttgtctattggttgattttaccatcagtctcccctgtcctcctatcatcgccgctatatttgtgtctcggtgcatactctcattggccctacctgcagtcgctctacgta

SEQ ID NO: 471594 - DNA, 122 bp, Homo sapiens
gtgccacatgtccccacgagtgcgacacaagcaccagtgctcctgagctgcctttcttggcgtaccaagcagaatgttttaaaatgaagaccctgccccccagaactaaaccgcacccacag

SEQ ID NO: 471595 - DNA, 122 bp, Homo sapiens
agacacccctcagcctgggctcctctggacaccttaggccaggctctcccgccacaggcccggcctagcgccgcgggccattacttgggaccttgaagatctgctaagagtagttgttacta

SEQ ID NO: 471596 - DNA, 122 bp, Homo sapiens
cgaaaccacagtccatgttaccccctgcaaagctctgaacttgtgcactggcgggccaggcggcggatttctccccatagcggctgcactgcgctctggctggagagaaaagagggcagcgg

SEQ ID NO: 471597 - DNA, 122 bp, Homo sapiens
gacactggactgtcttttagcatccaggagagccctaagtcagctcttgacaaagtactgcgttttaagttcccagaaaaccttgagactccactgagaatttgctcacattctcctcttta

SEQ ID NO: 471598 - DNA, 122 bp, Homo sapiens
agtgtaagtgcctttgcctaacaggaggttcaccatcgtgggggagttggccactttcagcggcgtctcgcctttcctgttgctctgctgcgggttccctccgtaccgcagcagcagcttca

SEQ ID NO: 471599 - DNA, 122 bp, Homo sapiens
gctctggacctaccttcgcactgtgaatgtgaagatgagcctctttcacagactggattccgtcattgctttcactgctctttcgcctgctttagctagatttttgggtctgtgaaagttgg

SEQ ID NO: 471600 - DNA, 122 bp, Homo sapiens
tataatcactacaaattacagacctctttcctgtgtaatgatttttgccatttgcccttccgtgatctctaataggccaactacaaggacaattttttgatcagtaagaaccttggtctgtt

SEQ ID NO: 471601 - DNA, 122 bp, Homo sapiens
gcaacaccctaagggtgaagagaagctgcctgcctctgtgcaagacattatctgagcaggcgcctcatccagtgggacgatgccatccacatttggaagcaggctgagaaatgcttcggcac

SEQ ID NO: 471602 - DNA, 122 bp, Homo sapiens
gtccaaagtgatccctggagggggcagtgccagacgttttggggtccccttcctcagcgtcgcagctcacagctttcctcctggagaaacgccccctaacaccctcccggctgctggtggag

SEQ ID NO: 471603 - DNA, 122 bp, Homo sapiens
tggaagacctagctgacaggcgagggggctcgcggcggcgggcgggtacctggttgaccgcggcgtgctcccttagtgccaggtcccagaagcagcagccgatctggtttccgcactggccg

SEQ ID NO: 471604 - DNA, 122 bp, Homo sapiens
caacatggtgaaaccccatctctactaaaaccacaaaaattagccgggtgtggtggctcacgcctgtagtcccagctactcaggcggctgaggcaggagaatcgcttgaacctgggaggcag

SEQ ID NO: 471605 - DNA, 122 bp, Homo sapiens
gagcccagggatcccagcccggcagtcctccgtcagctgcttctgtttggatggcggggacggctgggccgacagagaggcccattgtctccgtcctctggggctctattgttggggcctcc

SEQ ID NO: 471606 - DNA, 122 bp, Homo sapiens
gctttttttttttttttattttatccctgtaacattgctgaactctgggttttttgtttccgtttttgagatagggtctcactctgtcgcccagggtggagtgcagtggtctgatcatggct

SEQ ID NO: 471607 - DNA, 122 bp, Homo sapiens
ccgttccttgaaggcaggctcccaggtgcagagcgaggaagaggccgcagtgaggctgagcgtgtgcctggtcagtgccccttggccgtcctttctgatgttggcctttgctcttgtgtagg

SEQ ID NO: 471608 - DNA, 122 bp, Homo sapiens
gaacagggaaagcggagaagacacttccttggggagaaacgccgcagcctcggccagccccgccactgcccaggaacaaagctgtctggagcctccccaggggcaagctggcctcagcgctg

SEQ ID NO: 471609 - DNA, 122 bp, Homo sapiens
tgcagctctcagaccctcccacttgtttacttcgtggcgagagggcgaacactgcgcctgcgcactctccgtagccggatccaccttcagcgtctgcgccacgtgactccgatccaccctcg

SEQ ID NO: 471610 - DNA, 122 bp, Homo sapiens
acagcttctgcgagtctgcgattgtggcggccggtatattcggcggtttacggtaatgggcgggccccaaatccccatgtggtcccgacatcattgacatggcggaatcccccatcaaaccc

SEQ ID NO: 471611 - DNA, 122 bp, Homo sapiens
ggtctgctggttgggaccacgggcagcgagtccacggcaggactcccgagcagtggctgtcgccggtcaccccggacggctcagggcaacacggaccgtggcgccccaggaaaggcgcccac

SEQ ID NO: 471612 - DNA, 122 bp, Homo sapiens
tgtccttgcacgcgctggcgcacatgcactcacactgtttacagcgcacacgctctcactcgctccaccacctactcgctggccaggccgccttctagccacagcacttcctacctctgcac

SEQ ID NO: 471613 - DNA, 122 bp, Homo sapiens
gtcctgcagagatgggaccattagctggcaggcatgtgtggtggaggggacaggggagcacgtgccatagttcgatttatttttaggtatgtgggagtcactaaaggcagtaagcaagggtg

SEQ ID NO: 471614 - DNA, 122 bp, Homo sapiens
tcctcgatctccgcctgcacctgggcccggcccttcagcaggcggtccatgttctccagccgctgactgtcccgaagccgcttgacctggttctgggctgcgctgatctgcacctggagatc

SEQ ID NO: 471615 - DNA, 122 bp, Homo sapiens
gagtagcagggacccccccccccaacggggtcagctcggggtaggacacagccgggaccccggttcacactgactctgggcggctgaattgattttgtactccctgcccctgcagcttggct

SEQ ID NO: 471616 - DNA, 122 bp, Homo sapiens
tgtgtgagagaggctgaaataatttcatcatcatctctgtgagggaagctttgtaacaagcgaagtgcaggataactccagaattatctacctggttgatgcagtttccacatagagaatgg

SEQ ID NO: 471617 - DNA, 122 bp, Homo sapiens
ggtgtgggatatagtctcgtggtttgccgttttttaagccggtctgaaaagcgcaatattcgggtgggagtgagccgcttttccaggtgcatccgtcaacactttctttgactcggaaaggg

SEQ ID NO: 471618 - DNA, 122 bp, Homo sapiens
cattattatggggcaactcactgaatgtctaaacagctgtcatctactgaacacctatcacgtgctctctctaccttgcccatttattccctctctacttagtgtcccaaagacacctcaaa

SEQ ID NO: 471619 - DNA, 122 bp, Homo sapiens
cggcggcgcgagcggccgggcttggtaggggagccgagcccggcccgggatcccgagcagcgagagtgtggggtacctaggcccctcacgctggacttcacagtctccgggccgcctgacct

SEQ ID NO: 471620 - DNA, 122 bp, Homo sapiens
atctcaggtgatccaccggactcggcctcccaaaatactgggattacaggccagagtcaccgcgaccggcctgcgtccatgttacttaaagtacaaagtaacctacaaagtaacccgccagg

SEQ ID NO: 471621 - DNA, 122 bp, Homo sapiens
tcccgaagggtcagcggaattcttcaggggtcccccagcccccggggtttgtggaattagcgcgacaggggaggtcggagggtgtgcggtttgggattcagcgtggaacagtcaggtgtagg

SEQ ID NO: 471622 - DNA, 122 bp, Homo sapiens
cccctcacgccgctgcggacgacgacaagcggccaatcgtccccgccccccgcggcccgccgccgcgccgaacctggtcacacccacaaggagaggagaaccctcgcagcccctcgctcggg

SEQ ID NO: 471623 - DNA, 122 bp, Homo sapiens
ggtttatgcctccaatattaacctcagcacagccaaagaaaatcattccattccattgagcggagtcagaaacatgactaggtcacgatcacaaccccgtgtgtgccagggtgaccgagact

SEQ ID NO: 471624 - DNA, 122 bp, Homo sapiens
acccaccgcgctgaccctgcctgcgcttgcgtcccgcgtcccgcatccggggggaggcggcgggcccgggtctctggggctggcccatttacttagttttgtttttgttgcatttgcttttg

SEQ ID NO: 471625 - DNA, 122 bp, Homo sapiens
agtcctaggagtggggccccatcccctggagaggccagcctgagacttcaggcacacagccggctgcatgacgactactcccgccgcgtctccaggagcactgagcaggacagcaggcgggg

SEQ ID NO: 471626 - DNA, 122 bp, Homo sapiens
cctcccgccttctcccgcacccccctcccccagcgccggccggtcggctcccacctgacccgccagtcccacgctcctcagggcctggatccgcgacccccgccagccccctaagctccggc

SEQ ID NO: 471627 - DNA, 122 bp, Homo sapiens
ctgcggccccttcacttccggtgccggtgccgctagggctgcgccatccccccagtcaatcggacaaccatagcctccaactgacctttctgacagctctgagactcctccggccacgacta

SEQ ID NO: 471628 - DNA, 122 bp, Homo sapiens
agtgcatgctctcgtttggcgaaagagaaggttttacgttcagaatattaaaagggaccccgaggacaaagcaggatctcggaaaataagatcacatccccaaacaactaaaaggacaaccg

SEQ ID NO: 471629 - DNA, 122 bp, Homo sapiens
caggcccgcatgggctgccgcagccgcgccatcacccagggccgacgggtgactgtcatgcgtggtcactgccacccgcccgacctgggaggcctggaggccctgaggcagcgggagaaacg

SEQ ID NO: 471630 - DNA, 122 bp, Homo sapiens
cagagacctaagccccctttagtacgagcccaagagtaacaggctcaggctggggcgggtcgcctgctcctgggctgccagccccctggaggccctgtgcgtgtgactctacggccaaagac

SEQ ID NO: 471631 - DNA, 122 bp, Homo sapiens
ctgagttaattttggccagcagggcaactgccctaattcagatagatttacagtaacctacgtacagtagatgcacatacacacagacacccctttgctggagaaacttaggaccctgtcag

SEQ ID NO: 471632 - DNA, 122 bp, Homo sapiens
ctactaagtttttaaaaattccctttatgcacccaagagatatttattaaacaccaattacgtagcaggccatggctcatgggacccaccccccgtggcactcatggagggggctgcaggtt

SEQ ID NO: 471633 - DNA, 122 bp, Homo sapiens
aagtaattttggagtatgattgattgccttgtgattgtactttaaattagcctggggtctcgggggcagatatgtgctctaactgcttattacacattttcagttttcgaaggaataatagc

SEQ ID NO: 471634 - DNA, 122 bp, Homo sapiens
agccctctccccaggccgggagtcgcccaagtgaggggctgcccagctgctcccctgccacgcaggccacccgggctgcctgcccctgctgcttgggacgtgtacagcacagaatgagtatt

SEQ ID NO: 471635 - DNA, 122 bp, Homo sapiens
acgctctgatattgacacaaagggccacggagtcaccactcactccacacacactcaccccgtgcccacttacccagggagggccaggaatgaggatgccactgtggctcagtgatggcgcc

SEQ ID NO: 471636 - DNA, 122 bp, Homo sapiens
gtggtgcacgtctgtaatcccagctactcaggaggctgaggcaggagaatcacttgaacccgagaggcagaaattgcagtgagactagggagtctggttaacatgtaacccctcaccacaca

SEQ ID NO: 471637 - DNA, 122 bp, Homo sapiens
acatcactgggtataattgccgggggctcgttattgtcattaacgtctcctgcatgcacacgggagtgcctttcaccccaactcacgcatcacaatgaaggctgcacctgtggggtgccaac

SEQ ID NO: 471638 - DNA, 122 bp, Homo sapiens
aaccagtctcctctctcaaaccaaaatggcctatttctaattcagataaaaccgtgacttcgaaagaccattgctgcaggcttcttattgacccctgactgtgattttatgattaaaacaaa

SEQ ID NO: 471639 - DNA, 122 bp, Homo sapiens
tgtgcccccaggggtggtgggtgggccctggagggcagagaggtgcctctagctggctctcggaagtcctgaccagtgacaattcttaagacaccattaagtgtccactggagccagggcct

SEQ ID NO: 471640 - DNA, 122 bp, Homo sapiens
agccattcatgaggggtccgccccgtgattgaaacacctcccacttggccccacctccaacgctgggggtacctttcaacatgagatatggagaggaaaacatcaaacaatatcagaatgat

SEQ ID NO: 471641 - DNA, 122 bp, Homo sapiens
atgttctgaacaggcgttctcacatttttcttccaagatgggctcaaacataaacagccccggatggtgggcatccggactccgggggcccattggctctatccggtgtttgtcacttcccc

SEQ ID NO: 471642 - DNA, 122 bp, Homo sapiens
ctgttgttgggtgctttttggtttgttcttgtccctttttcgtttgctcatcctttttggcgctaactcttaggcagccagcccagcagcccgaagcccgggcagccgcgctccgcggcccc

SEQ ID NO: 471643 - DNA, 122 bp, Homo sapiens
cctgctggacggcgctgaccccacgcagccagcggagtctcctgggaacagcccaggcgccggtgccgacttcaacctctctgctcaggcctcttgagttgcgttaccagcttaccatgtat

SEQ ID NO: 471644 - DNA, 122 bp, Homo sapiens
cgcctcggccatgttccccccatttccagggaggttggacgccgtggttcttaaagagggcgcgcgagaggggcgaccgcgagcccagctcacctcgagctctcagctcgctccaaggatgc

SEQ ID NO: 471645 - DNA, 122 bp, Homo sapiens
aggaaagaacaaagcccagttcgaaaccccgcccccggttctctgagttacttcagggctcgagttcgagccagtacaactgttacgtcaccggaatccagccaatcgcagacgacagaagg

SEQ ID NO: 471646 - DNA, 122 bp, Homo sapiens
cccccccgcccgcccccccatccccgcctcccgcgcccctcgcagcccggcacacgcgctcgggctctaggtactgggcgttttattggagattctgagttgttctgcttgtagtttatttt

SEQ ID NO: 471647 - DNA, 122 bp, Homo sapiens
ccgcctcattagccggtcggtccttacgggcatgagcggcatcacgtgccagcacctccgcggctcatttgggaccctggctcttacctaaacgtgtgagctgcagagccaccttctccact

SEQ ID NO: 471648 - DNA, 122 bp, Homo sapiens
ggggagtggaaactgatcctctgctactgcttctgctgatttcctctgcaaaatggctcacgctgctgcttctattaaaaaagttcgagaggctgatctggatgaaaaggaaaaaaatcttg

SEQ ID NO: 471649 - DNA, 122 bp, Homo sapiens
actttcccagcagcgggacgctgtcaccccgactcaggagctcctgggcccgcgggctcccggaagctgccgaccacgtgattcgctggctcagctcacgtgacaaagctcccggaggtggg

SEQ ID NO: 471650 - DNA, 122 bp, Homo sapiens
gcgtgcgtgcttgtgacaccgtttccagtgaattcggggaaacacacccctggagaaccccgtcctgctcctggcagactttggcccagctggcctgggctacgccatggaggctcacgtgg

SEQ ID NO: 471651 - DNA, 122 bp, Homo sapiens
cagaaatgaacaggcagaagtctccttggagactcgaagtatctgtgcagacgcagagcccgaaagcccccagtgctcagtaacgccgaggggagggtaactgcagtggggagcccgagcca

SEQ ID NO: 471652 - DNA, 122 bp, Homo sapiens
tagtgtcagttccctggggaccaggaagggcgactcttgcctgggagtcagtgcttgggccgtcgggtccgggtaagcgctgggggtttggctcgagaagatgcggataggtggcctagggc

SEQ ID NO: 471653 - DNA, 122 bp, Homo sapiens
ggacggcctgtggcagggccactccacacccctcagcgtccgggccacacagacacagaacgcaagagagagactgacccacccacgcaccggtacccatagacgcagagaccgaggcagaa

SEQ ID NO: 471654 - DNA, 122 bp, Homo sapiens
cggtgacaggaggaggttgtcgctcgctggcggggtgcaagcatgcatgtcctgttgcttcgctgcgcgaggctgaggcacgagttgctggattttgggggtggggagtgcggtgcttggct

SEQ ID NO: 471655 - DNA, 122 bp, Homo sapiens
gaaaggaaataaagtacacttggaggagggccaggtgggcatcttgagagagcaagtacacggttttgacctttgacttggggtttatatcttggcatgcttctgggggctgcgtcccttct

SEQ ID NO: 471656 - DNA, 122 bp, Homo sapiens
gctgcgctgcgtgttcaacgggaacgcgggcgcctgccgcttcggcgtcgcgctgggcctcggagccttcctcgcctgcgccgccttcctgctgctcgatgtgcgcttccagcaaatcagca

SEQ ID NO: 471657 - DNA, 122 bp, Homo sapiens
atcctctgaagacgctgccctcacagggcccccagtgaagacactgccctcacactcacacggcccccagtgaagacgccgccctcacacggcccccaggctaacccaagcccctcgcttgc

SEQ ID NO: 471658 - DNA, 122 bp, Homo sapiens
ctgggtcactgcgtccacttgataaaccaggaacctgatgtccagagaggccagggtgcgcgttcaaggccactcggcccgcagagcccacccgcgtccccatggctgcagtggtgagggga

SEQ ID NO: 471659 - DNA, 122 bp, Homo sapiens
ggtctaatgtgaaacacgtggagaagaaagcacagctcttcagtttgcatgtgtgagacccgaagttgtctttaattggttagaaagtttttacatcatgagtgaaaaacaaggcttttcag

SEQ ID NO: 471660 - DNA, 122 bp, Homo sapiens
gtgccccgctccagtgactgtcttcctggcacactctcgtgtcgttgcctatgaggctctcgctccctctgcaggagtagtgcacgacggcgccataggtaaacagctctccagtgaggacg

SEQ ID NO: 471661 - DNA, 122 bp, Homo sapiens
aaggcaggtccccggattgacaaaacaatctgggagaagtgcatgcgtgctttgcacgtccggcggagcgggagagcccgctcaacagcctagcggtagactcggggatagttggagaaggc

SEQ ID NO: 471662 - DNA, 122 bp, Homo sapiens
cgtgcccgcgctgggccctggccccgcccccgcctagggccccgcccccagggcccgccccggacgtgtcgttcttctgtgcctagccgcgcctcctacctctggccccgcccctcagggcc

SEQ ID NO: 471663 - DNA, 122 bp, Homo sapiens
gaagccatcagggcaatccaaggaccccacgtcaaaccaaacaggatggtggaatgacagcgggcggcgcctagggaatggggcaaatgagcgacgtcccggagccaaacgtgtcgggccct

SEQ ID NO: 471664 - DNA, 122 bp, Homo sapiens
tgtggataaacagatctctgatatccatcccctcctacgttcacacttcagtctatgaaacggttccaccacactgcaggctgcagagacataagggacgcgttggtgcctaacctggccct

SEQ ID NO: 471665 - DNA, 122 bp, Homo sapiens
cctgtcccgcccgcgccatcgcgcgatgcgtcgccgacgcttccacgacttccgcagctccggcagtcgcccgggcccggcagccccgcccctggccgaacacccctaaacccggggacacc

SEQ ID NO: 471666 - DNA, 122 bp, Homo sapiens
tgctggggcagtaaatgggttagtgtcacgaagcccagaggccctggccactgtcattgtcgctatgattgtgactgcgctgggaaggagggagtttccagccctgagggaggtgagcagga

SEQ ID NO: 471667 - DNA, 122 bp, Homo sapiens
atacacaccctacggatagggccgtgagctgtgcagggtctgaatgaccacagggcgtcccgggaatcacagtcgctgggtgagaaagtggccgcagtacccgggtgcaaggcagggaatgg

SEQ ID NO: 471668 - DNA, 122 bp, Homo sapiens
gaaacaatgctctttacctgcagcatgtcaatgcacaggcgtttgtctggcatgtagacacgaggctgtagtagggtcctgtcactccacagctgtgactctgaggcacttcatgtccccgc

SEQ ID NO: 471669 - DNA, 122 bp, Homo sapiens
ttgaacccaggaggcagtggtgcagtgagccgagatcgagctactgccctttagcctgggcgacagagcgaaactccgcctcaaaaaaaagaaaagataccgaaagctttggggtaaaccag

SEQ ID NO: 471670 - DNA, 122 bp, Homo sapiens
gagacagggaggctgccccatgcagaggcaaatgcagaggttcaggcccagccacaggtccgggaccggccctgcgggtgggctggtggtggctcccgccagcgtttctcacctgagcagaa

SEQ ID NO: 471671 - DNA, 122 bp, Homo sapiens
cctccctgggaccctagtggcgagcactcgccgctggccttctagggcaggcagtattgccgctccaggcgtgcggagtcggggagaaaaaaaccgaacacgtgtgctacccagggccccca

SEQ ID NO: 471672 - DNA, 122 bp, Homo sapiens
gcaacccgtgttatccctgtggaagccgattttcctgtaggaagatgattttgtaaagtgcgcataggaacccattacttaatagaagtcagttactccagccaggcagctctcccaatgtt

SEQ ID NO: 471673 - DNA, 122 bp, Homo sapiens
acaagaacacaagcaggtattccgtgaatggcgagggttcgcaaattaaagaactcttaacggcttttaaaggaaacaactgtcagctagagacagttgctgtcttgtaccactataagtcc

SEQ ID NO: 471674 - DNA, 122 bp, Homo sapiens
cctgccgcagagccgccttccgccctccctgggcgcccccgctagagggcccgcccccctcgctcagggctgggaggagacaaccaatccagcacgcagaacacgaaatacaacatcactct

SEQ ID NO: 471675 - DNA, 122 bp, Homo sapiens
tccatttcggttaagactgcccgtagtttcggtttttatgtagacccaagagggcaggctcggcgtccgcgtgccgcgtagtccggcggctccaggagcgcgagcggctgggcccgggcgta

SEQ ID NO: 471676 - DNA, 122 bp, Homo sapiens
tcgctgctcaacagaacctttatttggtgtgttgctttaattaaaggagaatgtctggggcgggtggttctctcgggcctctgcagagcgtgggagctcagcatcatccaggatgcagccag

SEQ ID NO: 471677 - DNA, 122 bp, Homo sapiens
catattgtaggccccagccatctccagttgtgtattcattcacaacccatgagctggcaccgggggattggcagacccttgttcctggaacttctcactggttatcacgcctaatgttggaa

SEQ ID NO: 471678 - DNA, 122 bp, Homo sapiens
ctttgttctttgcccacagcattcgttcttcttttctccttgcctgcctgtcttctttcccgctgttcttggccgtgggcagacccggctgatgtaaggactgcagcttttccctggcatac

SEQ ID NO: 471679 - DNA, 122 bp, Homo sapiens
cttcggaggataatgggtttcttcaaactcaaactcggtaaggatggacgacggacgattcgcttagagctggtggtggcggtggtcttgcatgccatccctgacctgttgcgagtcttccc

SEQ ID NO: 471680 - DNA, 122 bp, Homo sapiens
cacatctttctgcttcattttgatttcagtgtaactcgccgagtgaggactcttggcccacgctgggagcccgcagccggcatccgccaccgccgggcaggtgtgcgctgggcgggcgcgcg

SEQ ID NO: 471681 - DNA, 122 bp, Homo sapiens
gccagagagctggtatttcaggctttcagttccgtaaggtccctccgctgcttggctctgcggctgtagcgtgaaggcagacaccgacgatgcctccaggaaggacgtggccttgctccaaa

SEQ ID NO: 471682 - DNA, 122 bp, Homo sapiens
ccactctggggagcattccttcagggatgccatggcgcatacataccccggctttctcaccggtgtggggcaactgtgaggcatgccctccgcaggctctcagaggtcccaggtgccctcag

SEQ ID NO: 471683 - DNA, 122 bp, Homo sapiens
tgccctgccctggagtcccttcaagttcaatgttgcttggcaacttacaatgtgctattacgaccgtgtctgttattccccatgatgatcctgtgaacgtggtgtggattagtagatccatc

SEQ ID NO: 471684 - DNA, 122 bp, Homo sapiens
ggtcgctggcccctgctccagcccctaccccacggttagactgtctttgtcagctggagtcgtcccacatcctgccacctggcctctcagaaaagcagtggcattaagtaaggaaggagctt

SEQ ID NO: 471685 - DNA, 122 bp, Homo sapiens
gtccgtcccgccccctgggtgggggtggtcccggcggagaggctgcgaccggttctggagcgggagatccccttctctgcgggacccggagctccctccctcccactctccgtccctctttc

SEQ ID NO: 471686 - DNA, 122 bp, Homo sapiens
attatcccaattttatggggagtaattgtgctcactcggctcaccaccaagtcgccagagcgcgcctccgcaaggaagccctccaggcacttctactttcccggacccgcctcccgctccag

SEQ ID NO: 471687 - DNA, 122 bp, Homo sapiens
tcccagctaaagcacaggacacgcgggcagatgcacgggcgccatggcagggcagggcctcggcccctcagctaaagcacaggacacgcgggcaggtgcatgagcgccacaacagggcaggg

SEQ ID NO: 471688 - DNA, 122 bp, Homo sapiens
gagaccttggcaaacttccctcccccaaccgccggcgtgacttctgagttgtcactaatccgaacctgatattcaccagagctccttcggtcaccgacaacgctccccgctgctgccgcggc

SEQ ID NO: 471689 - DNA, 122 bp, Homo sapiens
agtttgccggggtggggaagggtaggatggggagacatctgtatttattcttttagagctcggggtctcactctgggctcaagcgattcgcccgcgtacctgggactacaggtgcgcactac

SEQ ID NO: 471690 - DNA, 122 bp, Homo sapiens
tggggaatggcagatctcaagcaaaacaaaatgggaatcctacagggcattatgcttcaacgatctgaggccacggggcatttaaaggtgttaagtcaagcaaataactatggtaagcttta

SEQ ID NO: 471691 - DNA, 122 bp, Homo sapiens
taactagcaggatagtctaagaagccctgtggaagcagagtcatgagctgtgaatggggacgtggcggccacacggccgcgcccacgccacccgcagtacggggctggggctggggctgggg

SEQ ID NO: 471692 - DNA, 122 bp, Homo sapiens
agagtgggaggaaggaaaagaaaagataattgatgagcaaataagaaaataagatgtcgacgagatgaaggcagtaaaagaggagggaaagataaagcagtttaggggatgcaaccgaattg

SEQ ID NO: 471693 - DNA, 122 bp, Homo sapiens
ccctcggcacttcagtccggggaacagcggtgcgagctccaggcccatgcactgaggaggcggaaacaaggggagcccccagagctccatcaagccccctccaaaggctcccctacccggtc

SEQ ID NO: 471694 - DNA, 122 bp, Homo sapiens
aatttctttgaggcaatggctgtgacctcagtgagcactgatgtgtgaaaatgagttagacgctcagaagtcactgctggtttcagaaaaaaaagtctttgaaagagtacctcaggatgctt

SEQ ID NO: 471695 - DNA, 122 bp, Homo sapiens
tcagggtaaggagcgcagcggtggagtgtgagggggaaccagaagggcggccagggccggcggcatgccatgccaggcagccccgcgccaccccggaacactgggacactctcatattccca

SEQ ID NO: 471696 - DNA, 122 bp, Homo sapiens
actgttcccatgcacattattctaactttttagtaactcacacgtgcattcttttttcaacgctatccttagagtgaaagtcagaaaaaaatactagaaactaactcagggctgagcgtggt

SEQ ID NO: 471697 - DNA, 122 bp, Homo sapiens
cctgcctcacttggttgtcgctgaggtagacgaggcaaggagaaatacgccaaacgtgaccgcgatggtcgctacactactgtcagtcagaaatggaggcgtcagctgaggctgcctccaag

SEQ ID NO: 471698 - DNA, 122 bp, Homo sapiens
tctctacccctcaagatcaattcatataagtcagttatttaagaatttgagaaaaatgtgcgtttgccttaatatgttatattatgttcatcaagatcctgactcatttgtgacatttgctg

SEQ ID NO: 471699 - DNA, 122 bp, Homo sapiens
tctaacgttaccagtaattttaaagctagcttattaaagattctacttaagtcacatgaacgtgaaaagcatttaggcttattatttaatttatgagtactctttaagtttaagctaaattt

SEQ ID NO: 471700 - DNA, 122 bp, Homo sapiens
tgccctgagcagcggagccgtgccccgcgcccgccgccctccccgccgtccccaccctcccgctaggttaccaggcaggggcaccccctttgggccgcccagagacctgcacacccacactc

SEQ ID NO: 471701 - DNA, 122 bp, Homo sapiens
cctccccaggcttcaaggaggtggccctgggccgtgaccctacttctgtcggcgtctgttcgggcgcccgcagaagccagactcttgggcagggaagacgctaaccgaggtctccaaagttc

SEQ ID NO: 471702 - DNA, 122 bp, Homo sapiens
aattaaattaaaatactgtaaaatacttcgatatctttcagggcctgccatctgtcatgtcggtatcctattgctacggagagtccgcctagacagtcttaagtctgttttgacgttaatgc

SEQ ID NO: 471703 - DNA, 122 bp, Homo sapiens
agcggccaaaaagagttgattgctattgggatccgctgagtaaagacacgggcaggggtgcgcggaggtgagaaaactgaagacctggaagatttttttttccttcaaaaacccgtttccat

SEQ ID NO: 471704 - DNA, 122 bp, Homo sapiens
tccttctgtttgtctttgcattctcattttccaggctattgcatacagcaactattcaaacgttttttggataccttcattagctatggcttccaaacttttggttaaaatagtaagctaag

SEQ ID NO: 471705 - DNA, 122 bp, Homo sapiens
attcctaccatgttaggaagatccccattgactacattgacttaaaaataatttggctgccgggcatggtggctcacgccagtaatcccagcactttgggagaccaaggcgggtggatcacc

SEQ ID NO: 471706 - DNA, 122 bp, Homo sapiens
gtcttggcagatctaaaaacagagtggcagcgaggacttcaacaccgcactttctgtacccgaagtaaaccgatatgtcccgattaatagcaacagggcacaaagggagtgggcctctgagg

SEQ ID NO: 471707 - DNA, 122 bp, Homo sapiens
cggctactttcgggagctgccgggtcaaaaggggtgtaaatccgataagcctcctggaggcgctctaaaaacgttcttggtgacttatctggcctttggacaacttcggtcgtcttagacaa

SEQ ID NO: 471708 - DNA, 122 bp, Homo sapiens
agtgacagagtgagtgagtgagcactgttcccaccaggcttccttcccagagcagcacaccgggtcaggccgggccgcgggcagcacaccgggtcgggtcaggctgggccgtgggcagcaca

SEQ ID NO: 471709 - DNA, 122 bp, Homo sapiens
gcgcgggtgggagccggggctacgcatggtgctcgtgggccagtgtgtgttctaggtgggcgtgggctcggcctgcacttagcgcggctggcggtgcttgctgggcctgatcagagactggg

SEQ ID NO: 471710 - DNA, 122 bp, Homo sapiens
gtggctctcctccacaggccagggttaatggtcagtgaagcagtcacataatttggctcacgaatagcaatggcgatgaaaagacctgaacaacagaggccaggtggtagcacttcaccacc

SEQ ID NO: 471711 - DNA, 122 bp, Homo sapiens
tccctctgcaggaaccaattccggcccctctccaacctaacccttcccaacatagagctccggataagtttcaattttaccgtcagtggggaacaccaaaggggatattgaacaccatggtc

SEQ ID NO: 471712 - DNA, 122 bp, Homo sapiens
aatcttccccatatggtgggtttccaaaggtgatgtcattcaacacagagttgggaaggacgagatgggcacaatgagctcctgccagctaataacaccagaagagcactgtgtggagggca

SEQ ID NO: 471713 - DNA, 122 bp, Homo sapiens
attttccgtagaccagggcggggtgacgggtgatcccagtcctcgcagtgaactctggggcgcagaattcaaaacgcttgcggtcgccgagcgcagccccgccctgggttatgtaagtgaca

SEQ ID NO: 471714 - DNA, 122 bp, Homo sapiens
ccgatagccccacaaggcgacatgggaagtccgccggagcagaggggagaaaattcaaaacgagtctactcaacctcgtcttggctccgaggccccgccatgcagacccctctagtttttta

SEQ ID NO: 471715 - DNA, 122 bp, Homo sapiens
ataccttttagaatatcataaaacctataatccccaacctagaaaatcactgaaggctgacgctgaccttcagcacctcagctccagcgccatggcgacctccaggaagttcgttgggggga

SEQ ID NO: 471716 - DNA, 122 bp, Homo sapiens
tgcttgagggtccctgggggacgacttggggtgaggggcgccagtaggctccctgaggggcgtggcctcggcgagggagggctccgccgccctcgagaaagcgtgtgcgcacgcgctcccag

SEQ ID NO: 471717 - DNA, 122 bp, Homo sapiens
cagctctgttctgtgggctgcactgagtttctcggtgtgagctggaggtgggtgcaatggcgcggaccccggacccggtgcccaaggtcgcctatccccgccgcggcatgcggtggttcgct

SEQ ID NO: 471718 - DNA, 122 bp, Homo sapiens
ggtggcagatggccacgtagcggtcataggccatggcggccagcaggaagcactcggccccgcccagagccacaaacatctgcatctgaaaggcgcagctcaggaaggagatagggctgccc

SEQ ID NO: 471719 - DNA, 122 bp, Homo sapiens
ggaagccacacacatgagttctcacacatcgaagcaaatgctgagactataccggcctcccgcaagagaaggaatctgcagagaagtccacattcccgactggcttttttgtcttttaataa

SEQ ID NO: 471720 - DNA, 122 bp, Homo sapiens
gagcttgcccaggtcacactgcgagtcaatggcgaagggctgacaatagcacccagggctcgcggtgtcctcggggccccatccgctgcaccacccagcctcctccctttggctcacagccc

SEQ ID NO: 471721 - DNA, 122 bp, Homo sapiens
tccgaaggggtgaggcctggagggtgggctgtgtggggatggcagccactccccatcctccgggcgccgcgggggcagagcacagagacagaagctcgaacatcgtctccatgctgggtaca

SEQ ID NO: 471722 - DNA, 122 bp, Homo sapiens
cgacttggtgtgggaccagctgcgcaagcgcactactgctgtaaacgcttcctgaagctgcgtagcctttaaggagcgtgagtgtagcgtattacctgctttatgcttcagccacaacctga

SEQ ID NO: 471723 - DNA, 122 bp, Homo sapiens
agcattgattcaattcttcccttgagcactcttcacccccatctctctccagaaatgtaccgagagtctaactgctctatactctgggaggaacacgaacatgattccacctcagttccaag

SEQ ID NO: 471724 - DNA, 122 bp, Homo sapiens
gagggcgggtcctggcaggacgaattcaccgccactgccagaacgaactattcagattcacgtggagcaaggggctcatgcagaagcagttcccggacccgacactctgggtaggagaccac

SEQ ID NO: 471725 - DNA, 122 bp, Homo sapiens
gccaaatctgctcttggacacagcccagtgccagcctctccacgccggcggaacccagcccggtgccagcctctccacgctggcggaacccagcccggtgccagcctctccacgctggcgga

SEQ ID NO: 471726 - DNA, 122 bp, Homo sapiens
gctattaacttttgtacctcacagaacatcagcttatcaattcaaatcatctgacagtaacgtgatcgatatatggatgagggtaacagcacacccttacaagaactgtagtaccgggttgc

SEQ ID NO: 471727 - DNA, 122 bp, Homo sapiens
cctattagaagcccagactggaagtgagaggcatgatggggagagaccagactgaatctacgggtgagccctgtaacctggctctagggcacaggcccctcccctggcacttagtgggtcta

SEQ ID NO: 471728 - DNA, 122 bp, Homo sapiens
tgttattcctgctgtaaggatagtaattaagcaaaatgctacagtaattgagattctgttcgatattacaccctgagggtgctatagtatatagtaatacttggcttaaaaggagaggtaga

SEQ ID NO: 471729 - DNA, 122 bp, Homo sapiens
acgggccgtcgtgggggctgaacgtttgaaaggtgcccggcccacccccatgcatgggtccgttgacacaaaatacccagaataggcaaagccacagaggcagaaggcatggggttatttat

SEQ ID NO: 471730 - DNA, 122 bp, Homo sapiens
ctcttctgttctttggtctttgaaaaagtctcttcttgcctacttaggttaatgtaataccgtatatatacttgcctacttaggtaatgtaataccgtatatataatataaaacattttcag

SEQ ID NO: 471731 - DNA, 122 bp, Homo sapiens
gggccctattctcctgcctcagttatcacacattagacttagttgttatttttcttttttcgattctcactaaggtgtaaatgtctgatatcagagtttgttttcgaaattggagaggaaaa

SEQ ID NO: 471732 - DNA, 122 bp, Homo sapiens
cccacacggtgcggccggaaccaacagctaaaatggcggcggcgacgagggctgggcctgcgcgcgcgcgcgcttccgcagcgtgcgtgcgtgcgagtgtgcgtgtgagcgaggtgcgcgcg

SEQ ID NO: 471733 - DNA, 122 bp, Homo sapiens
gagggtctcgggcactgcggggctctgcctggctgggagggacacccaccactggctgaccgtctggcggccctcaaagtcgggtgggaggtggctcatgcggtgcatggtctccatcagct

SEQ ID NO: 471734 - DNA, 122 bp, Homo sapiens
ccctgccctgcccttctacccaggccttgcagtcaccagagatgggatccaggctcagctcggccacgtctgagcttcttgccatctgggaaacggggtgcagagagacatccccggttgaa

SEQ ID NO: 471735 - DNA, 122 bp, Homo sapiens
cccggcaggtgctggacaggagatctgagctggtcctgcgtctctgaggagctaggagcccggctgggagaacaaggagacgaactgtggggagaaggggcgacaggaacgccaggctcatg

SEQ ID NO: 471736 - DNA, 122 bp, Homo sapiens
ctgggtcttgccgagggagctcagcgtgcagcgatccccggacagctgtgctgctctggccgcccaaagttcagctccatccagtgaaagaggaaactccgggtctggcagcagccaccgcc

SEQ ID NO: 471737 - DNA, 122 bp, Homo sapiens
acccacttatgcccgcttgcaaaacctttactccccgcctctggccaccgttgccggggccgcacaccttaaactcaggtctctctgaggagaggagactgaggttgacttttcccatgtgc

SEQ ID NO: 471738 - DNA, 122 bp, Homo sapiens
ggaaacaaagacggcgagggaggggggaagggggagggggggcctctgcctttgaaacgccgagcgatcagatgcaaaatccttcagcgtctgaaaccatcgcggacgccgccgccgccgcc

SEQ ID NO: 471739 - DNA, 122 bp, Homo sapiens
cggtccctggagccactgtatcaactcacctggaacttgttagaatgaaaatcctgctcacgcctgtaatcccagcactttgggaggccgaggcgggcggatcgcctgaggtcaggagttcc

SEQ ID NO: 471740 - DNA, 122 bp, Homo sapiens
gacgctgaggctggttccatgtctggccgtagtggacagcgctgcggcgaacatggggtgcgggtgtctcttctgcgtactgatgtggcctccgcgtgtcacgcccgggagtgggacagctg

SEQ ID NO: 471741 - DNA, 122 bp, Homo sapiens
tactgaggcccccagagctccacgcataagtggtgtgaccagaaaccttttaacaagacccgcctgagcctgcgttagagctcccgctcggaaagtaaaagaccatcctaatccgcggcgct

SEQ ID NO: 471742 - DNA, 122 bp, Homo sapiens
cattcataacatgtccgccagaacccgggaagcacaggcagggctggcttagagaagacgcggtccccagcgcttgggccacggacgtcccagcccggtcctctgtcgcaggagaaccgctg

SEQ ID NO: 471743 - DNA, 122 bp, Homo sapiens
tcacccagtggattttccaccggtgccgcaggtggagctgcctgccagtcccgtgctttgcgcccgcacttctcagccgttgggtggccgatgggattgggcgccgtggagcagggggcggc

SEQ ID NO: 471744 - DNA, 122 bp, Homo sapiens
aatcgtctctcgctttctccatctttctccttgcaaccaagtggaagtaaactccttccacgtcaactgttccgggagagctcattagctagtataatgttacaggtcatacagcatctgtg

SEQ ID NO: 471745 - DNA, 122 bp, Homo sapiens
acctcgtgatccgcccgcctcgatctcccaaagtgctgggattacaggcgtgagccaccgcgcccggccaagaccatgtgtttctactccactggaaacatccagttaggtaccaagcttca

SEQ ID NO: 471746 - DNA, 122 bp, Homo sapiens
gggaccctggactttcgaagggcgggcagagccgggaggcagcgagaggaaagtcccactcggctccttcctgtgtgggccccttggtttcctgagccactgtcatttaccgaaagtcaggg

SEQ ID NO: 471747 - DNA, 122 bp, Homo sapiens
ttaaatacaatatgtattggttaaactgttgcttcacaaaatcctgatgaatgtcagaatcgatgtttatgactcaagagcagaccaagaatatcagaaatgaccagagaaactatggttta

SEQ ID NO: 471748 - DNA, 122 bp, Homo sapiens
ggcaccctgcacccagagcatttgcacctcaaggaaacttcaccagccgatatcaaatagcgaacactgcctgtcatacttccatagctagggaaaggaattttcccttttgcagcttcctg

SEQ ID NO: 471749 - DNA, 122 bp, Homo sapiens
gtgtctgtgtctgtttccatgtcttcctactgtcttagtaggaagctcacgactcatttgcgtaatttttctggcccctgaaggcacctgattttgctgcccctagaatactttggaggcaa

SEQ ID NO: 471750 - DNA, 122 bp, Homo sapiens
cttccgggtttgggcctggctctgtgactgaggcggcggcggtggcggccaagcgggatacgggcggcgggagctggggaacaggcatggacgtttccgggcaagagaccgactggcggagc

SEQ ID NO: 471751 - DNA, 122 bp, Homo sapiens
tcaggacccaaccaacggttactacaaggtccgaggagtcagtgtgagcctgagccttggcgaagcccctggaggaggtctcttcctgccaccaccctccccccttgggcccccagggaccc

SEQ ID NO: 471752 - DNA, 122 bp, Homo sapiens
aaagtcatctgatcatggcaagcatgagggattgctgagaactctctttgccaactcattcgaccccagatcccctgccagggtgtcaggactttaaaatatattagggagagggaagctgg

SEQ ID NO: 471753 - DNA, 122 bp, Homo sapiens
gccagcagtttttcagactttcagtaggacaaccttccttcagatgaggcctcccatagtcgggtcagaggcagagggttctgccctccactccgcataacctcctcaccctgctcccacct

SEQ ID NO: 471754 - DNA, 122 bp, Homo sapiens
aaggagtagcggaggggaggtcgtgatggcggcgccggaggcggaggttctgtcctcagccgcagtccctggtaaggcgtggggccaagagtttggggagccttggggacttgtttcttccc

SEQ ID NO: 471755 - DNA, 122 bp, Homo sapiens
caatcctgcaaattagcaaagcgagaagcaggcttgagaacctaaaagcttgagcgagaccgggttccaggctgggtctcatgcttaccaccttgtatttgctgttccctctgcctggaacg

SEQ ID NO: 471756 - DNA, 122 bp, Homo sapiens
tgtaacaatcggatcttggaagccaatgaaagtcagcgtcatcaaaccacaacagaaacacgttggtcttgcctctgtgttagtgccaatccttgaccatgccaggagaaacccaaaatgta

SEQ ID NO: 471757 - DNA, 122 bp, Homo sapiens
gtttgttgtctgctgcgggcatttgacttgacttgtcactgcactatattatgtcttaatcgatggcccaaagggtactttgcatcacatacaagttttcacttcgtcagcctgtctaagtg

SEQ ID NO: 471758 - DNA, 122 bp, Homo sapiens
gtctggtaggaggtgattgggtcatggaggcggacttcccttttgctcttcttgtgatagcgagttctcatgaaatctggtttaaaagtgtgtagcacttcccccttaattctctttttcct

SEQ ID NO: 471759 - DNA, 122 bp, Homo sapiens
acaccttgataaatgcaggacccatgcctgcttcagtcatcgcagagctgtggggctatgcgcagaccctcaacctctttcggagtaatattttcggaatccctgaagataaggggggacag

SEQ ID NO: 471760 - DNA, 122 bp, Homo sapiens
aactcctgggctcaggagatcctcctgcctcagcctccggagtagctgataccacaggtgcgtgccaccacgtctggctgcccgcattatttctctaggatttttactggaggtcattttac

SEQ ID NO: 471761 - DNA, 122 bp, Homo sapiens
gtgggattccattccagacggcagtgcgtggccgtggaacggtgatgcatagcgtgctgacgtcccatgcctctacggggatgggatgcgatggtgtcaggcctctggcttgggcgccgccc

SEQ ID NO: 471762 - DNA, 122 bp, Homo sapiens
gcgcacaagacgagggcggccgggcggggtggattagaggtcactctcgccgtacagcgccgtggagaaggacatgtagtccagagcacctggcacggagtcggggccggtgtagggggcca

SEQ ID NO: 471763 - DNA, 122 bp, Homo sapiens
aggtgctgagcagctgggcggcggtggcggctactgggcggtagtggtgctgtttgtcatcgggctcttcgcagcgggagccttcatcctctacaagttcaaaaggcaaggcccttggctgc

SEQ ID NO: 471764 - DNA, 122 bp, Homo sapiens
tcagaatgctacacttttgttaacagtgacattctgttgttaacagtgacattctgcaaacgttcatctaaacggtgttgtcagttttcaggagctgcaaaacgaggcacccgataatccag

SEQ ID NO: 471765 - DNA, 122 bp, Homo sapiens
tgcctcggccagattaaagccctgctctccaaaccctctcttggcctttgaaaaagggcgcgtcccaaggctgcccctccggcccgaatcttcctcctgctcaaacgggattggctggcggc

SEQ ID NO: 471766 - DNA, 122 bp, Homo sapiens
ccccaaagtttttgatgatgaccatgactacgatggctgacggcttggaaggccaggactcgtccaaatccgccttcatggagttcgggcagcagcagcagcagcagcagcaacagcagcag

SEQ ID NO: 471767 - DNA, 122 bp, Homo sapiens
ggggggcaggatatgcaggcggcaggatatccacttatagccttggcagcacaatgggggcgaggggggggtggagaggaggagccaccccatatccatctctggctcagtccaggggaggg

SEQ ID NO: 471768 - DNA, 122 bp, Homo sapiens
gtattgccagatctcgaggagattccaccagaccgaggattcagatagtcactataaggacgaacaaattcaaatgcagtgggctgagtgggctgaacaccctgggcactgagcagggagtg

SEQ ID NO: 471769 - DNA, 122 bp, Homo sapiens
tcataagagctgaattctggactgcagataagtgttttgaaaaggcttggaaagatttttcggggcgacttaggttctgttttgtttgttacagtccaaatacataaagttattatgaaata

SEQ ID NO: 471770 - DNA, 122 bp, Homo sapiens
atgcccagcgatgtcaatgcctgagtgtggcctgcagagcacatttgctcccctccccctcgcctcctctcgaccccttccccccactacatgagaacattaatttgcatctcagggacagg

SEQ ID NO: 471771 - DNA, 122 bp, Homo sapiens
gagcgttccgcgaagcctcccctcccgctccgcagcgctgggcggtctcagcctcggcctcgggctcttatccagtagacagggtccgccccgccccgccctcccgccgacggggtcgccct

SEQ ID NO: 471772 - DNA, 122 bp, Homo sapiens
acctacgctcggcggccgcgtcccggcccctagcgccctccgcgaagtgcctggcaggctcggcagtctgagtgtcgcgttacagagtcccctgggcagtcaccgctgaagggcgggggacg

SEQ ID NO: 471773 - DNA, 122 bp, Homo sapiens
cccagactagctggccgagccgggtgcaccgttgccagcagcccgcggggcaaacacggccgctcgcttcggagacccatgcccgcagggcactgcacacttcgtaaatgttttgcactttg

SEQ ID NO: 471774 - DNA, 122 bp, Homo sapiens
aggtcgtctcttagctacagagccgagcaccgagcgcccagcgcaggtgggtggagaagacgccgcgggctttttcaaccacacactcctctgggaagcgcgcctgattgacagttcccacg

SEQ ID NO: 471775 - DNA, 122 bp, Homo sapiens
ccctcagcgtgctgaaggactaccgactgccacacaatacaaacgaacaaaccattgatgcgtgactcaacacacaccctcagcgtgctgaaggactaccgactgccacgccacaacacaaa

SEQ ID NO: 471776 - DNA, 122 bp, Homo sapiens
aacgcgtacgcggggcagactccggccacagggacgagccacgcgagggtcacgacgaagcgaaccagctccaggagaaaggaagcggggttcacgagctgtgccagccagtgtggcacccg

SEQ ID NO: 471777 - DNA, 122 bp, Homo sapiens
cttacgtcagtttctcggtggcagcgaatttactgccagagtcttgtggcatgagatccgcgcaggcctggggccctggccgggaacccctcactccccaaacgtcccaagcccaacccagg

SEQ ID NO: 471778 - DNA, 122 bp, Homo sapiens
ggggatgctctcgtgcgggtggtgcatgcctattacaacctggtgggggatgctctcgtgcgggcggtgcatgtctattacaacctggtgggggatgctctcgtgcgggcggtgcatgtcta

SEQ ID NO: 471779 - DNA, 122 bp, Homo sapiens
gcggaggtcgctgtcgcgtacccagcggagccgggcgggcggggagcaggggcgctgattcgctggagaagggatcttctcgaggtttgactttactggcttcttagctcttgaatcggttt

SEQ ID NO: 471780 - DNA, 122 bp, Homo sapiens
cggggcctggaagggggcggggattcgaggcggggcctgcggggcggggcctgggccaagcggcccgcaggaggcggcggcggccgttcagtcccttgttccccgccgccgccgtcgctgac

SEQ ID NO: 471781 - DNA, 122 bp, Homo sapiens
agggcccccgcgccgggggcggggcctgcgggcttgacgaggggcgtgggaggggcgcggcgcgcgttcccgcgggcctggaaaatggctggtcgcgagaggggcggtggcgagctggctgc

SEQ ID NO: 471782 - DNA, 122 bp, Homo sapiens
tctgcctctcatttgcacactgctccctcgctatgctcaccgctcccgccgatccagggacgtgatccagggactctgggaaatgcaaagctacacacagtggagcgggggctgggggtgtg

SEQ ID NO: 471783 - DNA, 122 bp, Homo sapiens
ttttacaccttttacagtctgtgagttgcaaaggggagagggcattagtgggagtttgcacgtacaaagacaaaaaggcataaaggagtataaaattttcccagaactataggtagttcagt

SEQ ID NO: 471784 - DNA, 122 bp, Homo sapiens
gagcagcaacatcgtggcagatgtgaggttgggagctgggtctggctttatgggtcttctcgtccttgagctaaagctccaggcctgaggccaggccagctgtgtagactcagccccctccc

SEQ ID NO: 471785 - DNA, 122 bp, Homo sapiens
gctccattggcaccaacgcccagctccaccggtactggctccctgctccatcggcactaacgccctgcttcattggcactttgctgctgcctcctgagcactgccttccatgaacagggaca

SEQ ID NO: 471786 - DNA, 122 bp, Homo sapiens
ggtggcagcggcggtaacctgggctccagggtaacggaggcggaggcctagactgcactacgaagagaccgcagccaatcatgatgactctacccgagctcccattggcttctgtctccaga

SEQ ID NO: 471787 - DNA, 122 bp, Homo sapiens
atgataaacgagcaggagtgaacacagagtagttactttaactgtgtctttattcacaggcgtttagcccacaatcccataactgtattcagaggaaagggctgagctcaagaggataccct

SEQ ID NO: 471788 - DNA, 122 bp, Homo sapiens
tcctcggagaccaccgtggagaagtccatgctggccaagtgctgcagcagggtgggcacacggtccaccagcgtgtagtagtccttcaggacctcctggaggcagtggactacccctggaag

SEQ ID NO: 471789 - DNA, 122 bp, Homo sapiens
tttcatctgtcacattagtttacgattggctcaatgcatgcccactaacgctacaggggccgctctgccagccccccgcatgccgatggtcttttcccgtctgcgccggatttacgcctctc

SEQ ID NO: 471790 - DNA, 122 bp, Homo sapiens
tcactcggtgtgcagcttggcacagaaatgatccctttacacagcagcatatgttctcatcgtagctcaaggcataaatcatacttcctaacgaaaaaaccccaatcttggtagcagcgcat

SEQ ID NO: 471791 - DNA, 122 bp, Homo sapiens
gtaaaacataaaacccttagcacagtgcctagtatccattaagcagtagataaatgatggcggtcattattagggagtagggtaaagaacagaaggttaaaaacatgagtagcagtaaggac

SEQ ID NO: 471792 - DNA, 122 bp, Homo sapiens
gggaattggagaaaatatatttcaagtgccttgcgcgatgcccggcaccgaggcacttggcggcactcaatatctggtattgtttggctattattactacttcttgggctgatcatgctcca

SEQ ID NO: 471793 - DNA, 122 bp, Homo sapiens
gttaagagggaggggctgggggcacggagggccagtggcatctcctctatcccggctggccggcagctggcagcacgcaccatgctctgctggctcccgacaccttcactgccccagcgctg

SEQ ID NO: 471794 - DNA, 122 bp, Homo sapiens
actctcattttacattaccagtaaatttatttttcattaaacacattttcaacaaaaacacgcataattatggattttaattatggtttatgtagctacattctacctccccgaggacagat

SEQ ID NO: 471795 - DNA, 122 bp, Homo sapiens
gccgctccggggctgcgcctgggagcttgctgctttgcaggtctctgctgatcagaaagccgccagctgtcctgtttcccgcgctattcccggaacaccatagaaacgcatcccttttcttt

SEQ ID NO: 471796 - DNA, 122 bp, Homo sapiens
cattgtgtctaacacttgcatagagcacgtgattccccttggaataatgaacaagtgagtcgtgagtgggccgccttcttcacccacccagcccctggggagctccatgatgactccagcct

SEQ ID NO: 471797 - DNA, 122 bp, Homo sapiens
tggtccattttcacagctccactgcctatctgcataaccaggagccctcattcagatgaacgccaaatgggccagagggaggagaatcaaatgagcaacttttaaaagatattaagacatag

SEQ ID NO: 471798 - DNA, 122 bp, Homo sapiens
aagagcagaggtgtccccgaaaggtttgcagacgcctgtgaaggatgctggtggtgggaccggtagagaggcagaagcaagagagctacggttcaggttgggcaccagtgatgccactggtt

SEQ ID NO: 471799 - DNA, 122 bp, Homo sapiens
gagctcagggccagggggtggggcggggcctgaggacaggctgtcagtgaggccaagatccgggggctgggagtggagaggaggaggggcggggcttgaggaaagaacgccgcgttccgggc

SEQ ID NO: 471800 - DNA, 122 bp, Homo sapiens
ctgtgtgtgtgaagcccaaaaaccctgtgtgaggggaaaatagacacaaggcccatgagccgtaagattccattcaccggacacgtcagaaaaggcagatccttagagacagaaaggggagc

SEQ ID NO: 471801 - DNA, 122 bp, Homo sapiens
caatctgctccaccgtaaccacgccctccccacagtcccgccccatcttcgctctcagcgcgcccggccccgcctctgccctttaaggccacaccgctatccaggcccggctccccgcctgt

SEQ ID NO: 471802 - DNA, 122 bp, Homo sapiens
acttcaaagtgaccacacaagtttactttaacaatgtaaatcttccatgggagccaaccacgtgatctttaacttgtattcacaggccctcctaaagtctttactgtactcactttaagttc

SEQ ID NO: 471803 - DNA, 122 bp, Homo sapiens
acagaaaatcttcctgagggctgagaactttcaggaaaggtacaaagaaaaggaaaggcacggcttttttcatgagataccttcagctatgggaggtgcctgcgcagtctttgaaagccaca

SEQ ID NO: 471804 - DNA, 122 bp, Homo sapiens
gggctcccgggaggggcggggcgatggggcggggacggagccatggggcctcgttggagccgaggcctacacgttgcaggggcggggcgctgggcggggaggggcggggcctaggccagata

SEQ ID NO: 471805 - DNA, 122 bp, Homo sapiens
atcccgctggtgggccaggacatcatcgacctccagaccgaggtctgagcgggtgggcggcggccacgcactgggccacggaggagggatgctgctccgcccgctcctgccgcagacgggca

SEQ ID NO: 471806 - DNA, 122 bp, Homo sapiens
ccccagagaagagtcatctctgcctttataccctctaatagctgacctggatggaattaacgttctaattccctagcttgggataatggggctttttatatccctcaagacaattggcttaa

SEQ ID NO: 471807 - DNA, 122 bp, Homo sapiens
cacgtggattggggcctcagggagcggacgtgtaactggggaatccccaagacccctgggcgcgcgtggagttaactgcgagcctgtcctcattctggcgatcagacgccccagggcctcgt

SEQ ID NO: 471808 - DNA, 122 bp, Homo sapiens
tatcactggaagcttctgcttggggtccaccagacgctgcacatttgccactcatctgaacggggtcgagtcgcagggcgggcgccttgtaagcgtcacatttagttttgctgtgaagcgag

SEQ ID NO: 471809 - DNA, 122 bp, Homo sapiens
gccagccccgcggcggcggaggaggtggtaccagagtgggcctcctgcctcaagtcaccccgcatccaggccaagccgaagcccaaacccaaccagaacctctccgaggcctctgggaaggg

SEQ ID NO: 471810 - DNA, 122 bp, Homo sapiens
gggtgacatggcgaatccccatctgtacaaaaagtacagacaaaccaaaaactagctggccgtggtgtgtgcacctgtagtcctggctacttgggaggctgaggtgggaggatcgcctgagc

SEQ ID NO: 471811 - DNA, 122 bp, Homo sapiens
gccgggattcctaatctgcccggaagtaacgcaaatgctctgtgaatgttgactccgctgcggttagccagagattgcttggcgtgatgtgcacgagactgagcaatggcacacggtagggg

SEQ ID NO: 471812 - DNA, 122 bp, Homo sapiens
caagcccgacagtgggatgggggtcacttcagaggccctgcagtaactgtgttgtgcaaccggagaggagagacacgggttctgggggactttgaaggcagcgcttttcagtgggggctctg

SEQ ID NO: 471813 - DNA, 122 bp, Homo sapiens
cttttcaataaatataaaagcaaggaaagtgaaactgcagtaaaatgttgggaatacatgcgtgggtggtcaaactatgaggacaagaaaagtaaggacatgattatcacagaagtcagaga

SEQ ID NO: 471814 - DNA, 122 bp, Homo sapiens
ttcccgtcctgatagctgccggattttaccccaatcgtgtttctgcttccaggagctgtccgcgcgtcgcctctgttttatcactaaggttttaattgtgaataaacaaggaactggattcg

SEQ ID NO: 471815 - DNA, 122 bp, Homo sapiens
ggcgaggattgtcccgggcgcacgggaggcgggggaggggcggcggctcgggccggcgggcgggagacagggactctgggctgagccagccgcttgacacatgtggaagctgaaacctggac

SEQ ID NO: 471816 - DNA, 122 bp, Homo sapiens
ccgaaccgcggccggacttcagaacccgtcccgacccgcgaacccccagggtaccttaagcggttccttgcagtcctccgtgtcgtcccgcacatcctcatagacaacgccctggggctcct

SEQ ID NO: 471817 - DNA, 122 bp, Homo sapiens
tttcttcatccccttcaaccacgcgcagcccccggaccctcctctgcacccttggctgcacggggacgcgtcctcaagtccgctgctgtcctgccagcctcttcccggcatgctccttgggc

SEQ ID NO: 471818 - DNA, 122 bp, Homo sapiens
ggcaaaccgggctggctggtgctggcgacgtgttgacacaggtcctcgcggcatgctggccggatactccacagcctggagcagaggcaggaggagccggagcggccgagtttgtgagggcc

SEQ ID NO: 471819 - DNA, 122 bp, Homo sapiens
aagcaatatctaagtcctaggaattctgagcctgctcattattgttacctcccaaactagcggagtgtgattcagaacacaataacattatattttctttcctccttctcttcctcctttta

SEQ ID NO: 471820 - DNA, 122 bp, Homo sapiens
ggcgagggcgggacgagccgggcctcctctcccctatgtgctccccacccttgcacagcgcgctcagcagggctctgagaactgccagactccaggaaaacccaggcctaggccaccagccc

SEQ ID NO: 471821 - DNA, 122 bp, Homo sapiens
gcaatataatgtctatgagatgtcaaatctctccacttgatcttggccaagagagcgagacgcgatgagatgtcaaatctctcatccatgttattgcatgtatttcattcctttttattatt

SEQ ID NO: 471822 - DNA, 122 bp, Homo sapiens
aatgagaccccggggagcagcgtttgcagcgggcccgccaggtgacctgcacctgggcaccgccatcggcttcgcaggggccatctggaggagtcggtgagaccagggagagattcctgcgg

SEQ ID NO: 471823 - DNA, 122 bp, Homo sapiens
ttctaagagaaccatttgtcataatatgttctagacctaaataacgtttattaaacaatacgtgagttttcactcacctgtggaggctgtgtgtgtgtatgtatgtgtaggtgtgtgtgtaa

SEQ ID NO: 471824 - DNA, 122 bp, Homo sapiens
gcggggccgaggtggggaaggcactgcagcgcgcggccgggggcggggccagaagacgggcggggcggtaccagagggagggtgaggggcggggaaacgccgaggatcaggcggaggggcgt

SEQ ID NO: 471825 - DNA, 122 bp, Homo sapiens
tgttggggcagaagggacggggaacttccggattggaagccccaaggattctgagagccccgctaatctggggatgactcctaggagtagaagacggtccatcttagttgtcacgaggtagt

SEQ ID NO: 471826 - DNA, 122 bp, Homo sapiens
gggaggctgtggggggagccccggggctagtgcggcttcccctgggggtcgtgcgggggccgagcgccgggggttgtggaggaccagcccggggtgcagccctgccggccgccccgactccg

SEQ ID NO: 471827 - DNA, 122 bp, Homo sapiens
ctggctggaattcactctagggcttcccccacccccctgctgagacgacatcattttcttcgtggagattttgtggctttgcataacttggcattctctaatttaactgacagcatgatatt

SEQ ID NO: 471828 - DNA, 122 bp, Homo sapiens
ggtggggtcgttctcccctaggtcaggggttcagtctcaggaggcctgagcagagggacacggggctgtggaggtgaggattctgcatgttgatacacacgaaggacggggggcggggggaa

SEQ ID NO: 471829 - DNA, 122 bp, Homo sapiens
tacctgaccctggctgacctccagcgcttctgggatagcatccctggccggtgggtgccccgtccctatctcttgcagacagactttgggaccagggccccaggacctgtgagggggacggt

SEQ ID NO: 471830 - DNA, 122 bp, Homo sapiens
cgtatcaccttctagaattctcgtcacaagcgcgatctcatcgaggcttgctcacacccacgaggttatgctccctggcagggcaacagaatccagcactaagacagcagaatttgtagcag

SEQ ID NO: 471831 - DNA, 122 bp, Homo sapiens
ctcacgatacatcttgtttcctttgaagaccaagttcagttctcagcacccaggaggaagcgtgaacataccggccagcagacacctcgggggcgagagggtggcacccacctcccggagcg

SEQ ID NO: 471832 - DNA, 122 bp, Homo sapiens
ccaaagtatcacttttattgtggtttgtgagaggaagctgggcctatcagctggatctcccgaagtaggcggacttacataactctggaggagggcagaacattgtcctctgaaggcagctg

SEQ ID NO: 471833 - DNA, 122 bp, Homo sapiens
cagctgcaggcacctcgcccaacacctccacctcgagcacacccaagtccacagcggtcccgggatctgtcacccagacactgactgcatcacacacggccagcctcaccctgatgactcgc

SEQ ID NO: 471834 - DNA, 122 bp, Homo sapiens
agtccccggggattcctggacagctactgagacctcttcccttcctataggatggccagccggagcagtgacaaggatggtgactctgtccacacggccagcgaagtcccgctgaccccacg

SEQ ID NO: 471835 - DNA, 122 bp, Homo sapiens
gagtgcagtggcacaatcttagcttactgcaacttccgcctcccacgttcaatcgattgtcgtgcctcagcctcccgagtagctgggattacaggcatgcaccacaaagcctggctaatttt

SEQ ID NO: 471836 - DNA, 122 bp, Homo sapiens
caaagtgcagggctccgagcccccagccagcccagaggaggcctcccctgtttcccaggacgctctgcggtgatgccaaggtcccgggccacctcctcaggcgctccattgctcttctcagc

SEQ ID NO: 471837 - DNA, 122 bp, Homo sapiens
cgatctccttgccgatggtgtaatggcctctggcgtaattattggccgcatcttccttcccggtgatcagctgctctgggtggaagagctgcctataggttcctgtgcgcacttcatctaca

SEQ ID NO: 471838 - DNA, 122 bp, Homo sapiens
cacctggactcacccttgagagattctgggcctactctgagcccttcctgaggcagctcgcgtctcccaggctggctcgtttcacctttgttcccacgcccgttcccagacctcacctgagt

SEQ ID NO: 471839 - DNA, 122 bp, Homo sapiens
caaagagtgaagaatgggcctcacgtcacaggaggcagtggaaactaagggatgcggccccggaaggtgcactggcccagaccccctcccactggccctggctgcaactcgtgctcagactc

SEQ ID NO: 471840 - DNA, 122 bp, Homo sapiens
tggttaatactcagagtcaacttgattggattgaaggaatcccagcacttcccagcacttcgggaggcagaggtgggtcatttgaggtcaggagtttgagaccagcctggccaacatggtga

SEQ ID NO: 471841 - DNA, 122 bp, Homo sapiens
cgtttgttttccttgaaagtaggaatgagggttaagtatccctcatggctgtatttctcccgctctacttaacaaaagtcagtgttcgcaactaaaggcggtcggtcttggcaccggattcc

SEQ ID NO: 471842 - DNA, 122 bp, Homo sapiens
gtttgcataacatgttgctaactgaagacctctctggttcacaacctttctgaaactcagcgtttaaatgcaatatagcctattaaattgtcagctcaagtactcagcagaaggcatctcta

SEQ ID NO: 471843 - DNA, 122 bp, Homo sapiens
ccctatattagctcgtcccatgctcaggaatgaccaagggcagtttggaggttaaaggcacgatggagttggtgagttcagatctgtttcaccttcgtaattttctcactgttaaaattttt

SEQ ID NO: 471844 - DNA, 122 bp, Homo sapiens
gcatccccgctggctgctttgcagatgacgctgttcgtgtgcttgcagcggcaaccagggcggcgcagacggtcgtagccacgctgggccagcttcacgcagccggtggcaggcaggtagca

SEQ ID NO: 471845 - DNA, 122 bp, Homo sapiens
tacccttcttaggaagctgcatccccgacgccgggctggtctgttctgctctgggggcggcgtgtgctctcatttcactcccataatcagctttggcatatgggattcagagacgcagtgct

SEQ ID NO: 471846 - DNA, 122 bp, Homo sapiens
cccaggagatgcccagcaaatgtttgctgagttcatctgaaaaaatggacaggagtccagcggccctggatgcaggcagacttccccactgtgtgacccccaagagagggacaattcatcct

SEQ ID NO: 471847 - DNA, 122 bp, Homo sapiens
gtaggaggaacagggagaaactgattttctattcataaaatgtgcgcctctctgcgcctgcgctggcgctgtgcgcctttgcgagggcggagctgcgttctcctcaacacagacccggattg

SEQ ID NO: 471848 - DNA, 122 bp, Homo sapiens
ccagtccccagccggcctgaagggaggaagaggaaggaacccataatcatcccaaactggcgcaaatggtgggttttactgtccagaggtcatttcgtctctgcgtttccaacctcctcgcc

SEQ ID NO: 471849 - DNA, 122 bp, Homo sapiens
tcctcctcctccctcctcctccctccccgcagccctaatccaggcaggaattcgggcctgcgcggccctgcccaccgtggcagccagggatgtccagccctggtctctgttctccagggcgt

SEQ ID NO: 471850 - DNA, 122 bp, Homo sapiens
tctggaagcggggaggctgaactcacttggaaaaactggagctgtggggcagactctcagcgaccggaacgacagccgccagcgcccttaagtctccctccccacccagtcccctcccgcag

SEQ ID NO: 471851 - DNA, 122 bp, Homo sapiens
aacaggcactcctggtataccatgaccaactaaggtccatatactggcatgtgttggatacgctgcctttatagaaaggtaccaggaagatgttgaggaggggaaggtcaaccagctagttc

SEQ ID NO: 471852 - DNA, 122 bp, Homo sapiens
cagagccaggcggggagcgggtttgccttcgggggcccaggggaccctgagaagtctggccgtgcccgggcggtgagcgcggaggcggcccgccctgtgtccccgcggggcggagccgggtt

SEQ ID NO: 471853 - DNA, 122 bp, Homo sapiens
tgaggtggcagcccgagaggttcaccttcaccaggctgcggcagcgggccacgtgttccacggtggagccaggcagccagtagcagccagccatgctcagctgctggatctcccggccgatc

SEQ ID NO: 471854 - DNA, 122 bp, Homo sapiens
gggagcaggacggcgcgctctgggtgcgcttgtgtgcccctgtgaggctcctgggttccacggggcgcccaggttatacggatctcagagtcctgtatttattcggtgcttctaacttcatc

SEQ ID NO: 471855 - DNA, 122 bp, Homo sapiens
gggcccgctgagcgaggctgagcgattgactcgcggacgaactttgccaagagaagttcacgtacaacgatctggcaggggaggaatcccgcgcccagccccagctcctgagatgcgatccg

SEQ ID NO: 471856 - DNA, 122 bp, Homo sapiens
agcttcatcagcattccctgggcccaacgcttacctccactgctggtcttcataggtgtccgtgcaataccaagagtaggagagcggggatctgagtcctgggcatgtttaagaccctccag

SEQ ID NO: 471857 - DNA, 122 bp, Homo sapiens
tgtagtcccgcgctcactgggtcccggccagcggtcctcatactgcgcactcatctggggcggggcttggcgtggttctccgacgactgaactacaactcccagcaggctgtgcgggaaggg

SEQ ID NO: 471858 - DNA, 122 bp, Homo sapiens
gatcctcccgcttcggcttcccaagtgctgggattacaggtttgagtcacagcgcccggccggttgggggtattttaaagaaaccatcatatggtttcagcattaaatacttcagcctatag

SEQ ID NO: 471859 - DNA, 122 bp, Homo sapiens
cgggagagcagtgtcccagaaggcaaaggcagagtgcttctagaaggccagggaggcccacgggatgggctgtcacagaaggacattcttagggacagcaattaagggttggaggttggggt

SEQ ID NO: 471860 - DNA, 122 bp, Homo sapiens
ttccgcggtgtagattgacactcgttatgtgggggtctggttgcggttggaagacttatccgagtcagggctgcattgccagcgcctttcccaagagtggaggttggcggtgcaggcggtgc

SEQ ID NO: 471861 - DNA, 122 bp, Homo sapiens
acaaccgcagggtgagaagcccagagaacagtccaggagtagcccttctgtcctttaccacgtccgtgtgcccagcacgggcaaatcagtagccacgcaataaatgaagtgcggtgttgcag

SEQ ID NO: 471862 - DNA, 122 bp, Homo sapiens
aagtggcagatgggagttctggctgttttattaccagtaactgggacatgggcttgggttcgaggaggccacgtggctcctgacacagccttaaggatctgaggtggcccctgccctgggca

SEQ ID NO: 471863 - DNA, 122 bp, Homo sapiens
cgtctgcagggggtgagcttcaggtgctcaggctcgccctagtggggctaggacagacctcgtttcgggcctggcacacccccttgatgtgcgggaagaacacccgcaaggtctcccgttct

SEQ ID NO: 471864 - DNA, 122 bp, Homo sapiens
ccccaggggagacaggtgctatgcttggttgtgtggctgagtgcaggcacctgctgcgggcgcatgcatgtgggtgtgcagcagaagtgtgggagtgtgtgaccttcctggtccagagacct

SEQ ID NO: 471865 - DNA, 122 bp, Homo sapiens
ctgaactgagcagcagtgatgaccagggaggcacgtgttcaccaggcacccaccgtgcaccggcccagcattactgagcacctactgtgcacccgcccagcatttactgagcacctactgca

SEQ ID NO: 471866 - DNA, 122 bp, Homo sapiens
gagggccggcgaggcgccgggcatgtgcggcagggtggcgctgtcgaagcctgcccctctcggtgggcggcagccccccggatcacttccctcagatgtccccaggccctgtccctgggcgt

SEQ ID NO: 471867 - DNA, 122 bp, Homo sapiens
tgatggtaaaaacctcaccaagaatgatctttatccaaatccaaaggtaaaaggtggttacgtttgcatgtggataatggtatttagggaaaaagtaagctactaggtctattgtgtggcaa

SEQ ID NO: 471868 - DNA, 122 bp, Homo sapiens
ggcctgccgccctctcagtttcgggaatctgcctagctcccactaaggggaggctacccgcggaagagcgagggcagattagaccggagaaatcccaccacatctccaagcccgggaactga

SEQ ID NO: 471869 - DNA, 122 bp, Homo sapiens
cgctgccggctcttggtagcttccacgcgggcaggtccggaaactgagcatgtctgcaagcgctcagcggcgccggcagcagcggggctagagctgggctgcgtcaggctgagcccattcac

SEQ ID NO: 471870 - DNA, 122 bp, Homo sapiens
tctttcctttgcagaacaaaactattgtgagtcgaggtatcattttctgcactcagcggacggggagggctgtgccaacatgctggtggagtattccacgtcccgcggcttccgcagcgagg

SEQ ID NO: 471871 - DNA, 122 bp, Homo sapiens
ggaggggcagctaaaataaatggccagaggctgtagagagaggtggggcaggacagggcccgtcaagccccagaggtaaccaagactgagaaggagtttcactcttgttgcccaggctggag

SEQ ID NO: 471872 - DNA, 122 bp, Homo sapiens
gggctgcagagtgctccgaggaagcctgcattccaccaccttcaggagccggtcccgaggcggctccgattcactgcatgccccccgccccccaaagcaaaagttgcacggatgcacgaggg

SEQ ID NO: 471873 - DNA, 122 bp, Homo sapiens
gatcaccccactttataccctagagattaccttgtctgtggtggcactattttggtggcacggctttgatattaaggaagatgatggtcagaaaaagaaagcagaaaatatcttctaatttt

SEQ ID NO: 471874 - DNA, 122 bp, Homo sapiens
ctcgccatgcgtttcggcacctttgttattttcgtaaagtgtggagatatggtctccttgcgtttggctctccctattcctggcatctggtgatctctttgctctccaaggcaggcggacgg

SEQ ID NO: 471875 - DNA, 122 bp, Homo sapiens
tcagctcatgccgaggtaagacggcgaggaggcggtgggcaccgcccgtgtgggtggagtcgggacccacatccccggaggcctgcggtggacctgtcgcctgcacacgtgcacagggaggc

SEQ ID NO: 471876 - DNA, 122 bp, Homo sapiens
cgcgggggacacctctgaccttaagtaccccttggcgaccaggctcagggaagctctcaccgaggctcggttccatcagctcttcaggggcgaagagcaggaaccggagctacctgaagagc

SEQ ID NO: 471877 - DNA, 122 bp, Homo sapiens
tccccggcgctggttgccactcaggcactgccgcggacagcctgggggtggggcttgaggcgcgcggggcgggactcgccactccagcctgcagcgtcaggttttgtctctgggaacatcag

SEQ ID NO: 471878 - DNA, 122 bp, Homo sapiens
gcccttcctggagcttcctgcgttagtttctaggctgccctcttttggaagctgtagctccgctggggaggagggaggagtgagaaggaaagaaaggaacaaaaatagccggagccgagggg

SEQ ID NO: 471879 - DNA, 122 bp, Homo sapiens
ccaccgcccaggctcaagtgattttactccctcagcctctggagtatctgggattacagacgtgtgccatcacgcctggctaatttttgtatttttagtagagacggcgtttcaccgtgttg

SEQ ID NO: 471880 - DNA, 122 bp, Homo sapiens
ccgcactgccgccggtgtaaacactcactctggccctctcgccggaaaccggaaattccgcgctgcattctgggagttgcagttcccgctgtggccccccgcccccttataaacagccagtc

SEQ ID NO: 471881 - DNA, 122 bp, Homo sapiens
ggtcctggaggcggctgagccctaggggtgggaagcattcactgggcccttgacagacagcgggcacgtcaaagctggaaatgagcctgtctctaggggttgcgcatttcatgtgagttgct

SEQ ID NO: 471882 - DNA, 122 bp, Homo sapiens
tgaattcttaaacggttttagattcctcatactttgaagtaaatacatgttcacctctcacgtcagctgccgcgccttcctgaagccgggtcttcaggacgcggcaggggaaccgacgcccg

SEQ ID NO: 471883 - DNA, 122 bp, Homo sapiens
gcttaccaagctgggccgcgacgacgtgctgctggagctgggacccagcattggtgaggacgtccccttcctggcctcgtacctggggggtgaggaggctgactttccgcggcctcagcatc

SEQ ID NO: 471884 - DNA, 122 bp, Homo sapiens
ctgctgggacaccgggatacagaaatgcatcttcatggctgagcggtgtcttgggagtagcgctgggaacccgacctgcggcggcgggcggtgcgcggctctgaactcggcagcggtggacg

SEQ ID NO: 471885 - DNA, 122 bp, Homo sapiens
ggcccgcgccttggtggctggaggcccaggatgagcctcgatggcgagaggcccaggatgcgccaccaggccgggctcacttctttgacgccgaataaactgacaaaacaattagctggccg

SEQ ID NO: 471886 - DNA, 122 bp, Homo sapiens
gcacattctggaatagtattttgggtagctgggtagtatccatcctgtgcttttcgccctcgtgagcatcttttcatcgctaaatacacattctggaatagtatttttggtagctgggtagt

SEQ ID NO: 471887 - DNA, 122 bp, Homo sapiens
ccatactcttgtaggaaaaatccaaagttcttaaacagatctacaggatctacacatgatcgggtttctattatttcttaacattatcacctcctgtatgctatttgttagtccattttctg

SEQ ID NO: 471888 - DNA, 122 bp, Homo sapiens
cacgtaagactaaacataatatgccatccagtcctaggctgaaaactttctacatggtcccgagcttgggcaattcttcagttgggctgagatggctgaaaatgtctgatacagggcttctc

SEQ ID NO: 471889 - DNA, 122 bp, Homo sapiens
ccacatgctcaggtgtacatgtgggcgcatgtgtgctcctgtaacacgcgtccacgctcccgccccaccgggctgctcaccaagcggccgatggcgctctcgtagctcccgggggtctgggt

SEQ ID NO: 471890 - DNA, 122 bp, Homo sapiens
gttgtgggggggatgctgacgtttagggtgcaccagctgttcaaaagtcgaccccatttccggaaacaccccatttccggaaacaccccatttcgcggagaacactgctcccttcgctttgc

SEQ ID NO: 471891 - DNA, 122 bp, Homo sapiens
agatgtggttgaggggtggaactggttaggagtttttacacaatggtggaaacatgaaaccggctaaagtcagatgagtgtttattgtttgccaggctttttgcatacattagtccatttaa

SEQ ID NO: 471892 - DNA, 122 bp, Homo sapiens
gttaagtgcaatccttagtattaactcagaaaatatagaattgatttttagcctagcagccgtgatctaagggctcctaatttgaaatctgaaaacctcagttgctgaggaagtctttctgc

SEQ ID NO: 471893 - DNA, 122 bp, Homo sapiens
gcattcagaccagcactggttcaaggcccagcaatcaggaaccaatggcctggacagctgcggttgtccagcaggtcttcctgtatccagtcctgtctcctccaatcattcttctcactggg

SEQ ID NO: 471894 - DNA, 122 bp, Homo sapiens
tgggactccctagcccaggccctccctggctttgtcctgaggcagggttatgtaaccagccgggtctggccaggcagggcacgattctcaacctccttttgtccctccattgtctctttctc

SEQ ID NO: 471895 - DNA, 122 bp, Homo sapiens
tgctaaggagtgcgcatttgcttgcctctaacgtgacagtcgcgggagcgccccgcaccccgggcttcagggaatgaaggagtctgccccgaactggccccagaacccccagcccccagggc

SEQ ID NO: 471896 - DNA, 122 bp, Homo sapiens
agtggttttttcggataaaatctgtgtcgtctggatgtccaccggccaggatgcgtggtgcggcgccttgccggactcctcttttgcggcgcgaaacagcagccgactgggacagcccgggg

SEQ ID NO: 471897 - DNA, 122 bp, Homo sapiens
cagacatggaatcaaatcctggctctgccacttacacttagcaaccacatgactgtgaaacgagaaccatggtacctgcctcagagagttcagctaaagatcaaatgccatattgagtatca

SEQ ID NO: 471898 - DNA, 122 bp, Homo sapiens
gaggtgtaacggattcaagtctgaacccagagcctggaaaaggctgaccgcccagattgacgttgctaggcaactccggaggcgggcccagcgccaaaagaacagggcgaggcgtcgtcccc

SEQ ID NO: 471899 - DNA, 122 bp, Homo sapiens
cctgggggcgctgcggcgggggcaggcgaagactcgggccttgggggttccgggggtacgcggccacgatcgcagggcgggagtgctcctccggcttttctccccccgcgttaataactcgt

SEQ ID NO: 471900 - DNA, 122 bp, Homo sapiens
gctggcagtgcgcgtctctggtgctgtgggcgctcaggtatttggcaccgtgggctgccccgacatcttttcttcaccttgctccacttgtgccctgcccttacagatggtagcatcgacaa

SEQ ID NO: 471901 - DNA, 122 bp, Homo sapiens
atcttaactaatgtgatctgcaaaaaccctttccaaacaaggccgcactcccaggttccacgcagacgtaccttaagggagaacactacctacttcaggaggtgctccagaaatacttgttt

SEQ ID NO: 471902 - DNA, 122 bp, Homo sapiens
acgctgcagcatgggacaggacacaccccgcgagggagccccagccgccggcccctgccgcgcccctcggcgacacgcgacgcctgcgccctgcagagcagtcctctctctgggcgcccttg

SEQ ID NO: 471903 - DNA, 122 bp, Homo sapiens
cataatgaaacattttctctcagcaagggaagtgcatttctttctccagagcctcctctccgtgctccctcttattactgggccgggcatccgccgcgcctcccgcaggtgtttgcctggag

SEQ ID NO: 471904 - DNA, 122 bp, Homo sapiens
gtgcccgccgtgagatggcggtgagatgggcggcgcaggcattgcaatgcagccttaggccgctgctgaccttgaccagcctggccataccgctgcagtcccatgctggcgacccagccggc

SEQ ID NO: 471905 - DNA, 122 bp, Homo sapiens
ctcccaatcagctggtgccttctcctcttggtctagcagactctggagtctgctggtattcgtaagactgtagctttctgggtgcatgggactgagtaacactatgccagagcctcatttcc

SEQ ID NO: 471906 - DNA, 122 bp, Homo sapiens
cgcgcacacgtggtccggcctcgcctgctggagcgggcggcgcgcagcctcgggggcgcgcgctagagggaagaggaacccgggtctacattcgtcctccacccctgtaactctgcagcccg

SEQ ID NO: 471907 - DNA, 122 bp, Homo sapiens
ctgggatgtcaagaacgccctgaggagggccacttctgtcctgggctgctgtcaccatcacgaggtgcacttgcccaggtacccagagacctccgctcaggtggtctgtgcttttctgggct

SEQ ID NO: 471908 - DNA, 122 bp, Homo sapiens
gcacacagaaaagaccaatcaaggacgggtcattcccgccccccgcgcgccttttgcgaccgcccactcgacaggttgacaacctagacagctcccccggacttgccttacttttccatctc

SEQ ID NO: 471909 - DNA, 122 bp, Homo sapiens
ggggcaccagatggggcgcgagcccgcacctaactgtgtccgggcctgccgttggggcgacgtcactgtcactacactgggagtcagcggaatgagggcactctcgcctctcttcctccttc

SEQ ID NO: 471910 - DNA, 122 bp, Homo sapiens
gtccggggaggaaagagttaacggtttttttcacaagggtctctgctgactcccccggctcggtccacaagctctccacttgccccttttaggaagtccggtcccgcggttcgggtaccccc

SEQ ID NO: 471911 - DNA, 122 bp, Homo sapiens
caggagtggcccaagatcactcctctaggaagtggcagagccaagcatgccagcccttcccgctgcccttccaggcccctcctagtgactccaggtcccccgtccatagcccctcgccagct

SEQ ID NO: 471912 - DNA, 122 bp, Homo sapiens
tagactcgccacggaaagtcgctaagtgtctactgcacttcggctccggggtgaacactccgttctccgctagcggcgcccaagttagccggccctgggattttcttggagggtaaagcaga

SEQ ID NO: 471913 - DNA, 122 bp, Homo sapiens
catttgattacaagagccttgaatcaccaaaacataaagatgtactcgaatagaagagtccgttgtctgactggtaaatttaaggatgtgtttgaccctcgtgcattaaaacagacaattgg

SEQ ID NO: 471914 - DNA, 122 bp, Homo sapiens
taagcgcacgcgggccgggcgctgctgaccacatcaccgtagtgaatgacttctttctcacggcggctggcgtcctattggctattaaatataatcattacaataattattaaatataagaa

SEQ ID NO: 471915 - DNA, 122 bp, Homo sapiens
gcagtacggggctggggctggggctggggctggagcccgccgtcccaacaatcccggggacgagagttgggcgggaatccgctccacgcaactcggcgcggtcccggggacgtggcgctttc

SEQ ID NO: 471916 - DNA, 122 bp, Homo sapiens
ctgtttggcttaatgtgtcaaacactgccctggatttggggttcattagcaacactaaaccgctgtgatctcacatcttgtttccctgcatatttggtgaagggaaaagaggaatgtgacca

SEQ ID NO: 471917 - DNA, 122 bp, Homo sapiens
caatttagggattgtgttgttcttgtgttggttcccatgtaaagaagcagcagagaaatgcgatggttcaacagctcgccctgccccaagtatgcagacttgaccttggcggggtcctgggc

SEQ ID NO: 471918 - DNA, 122 bp, Homo sapiens
tgaaaacaggaccaggaacaaggatggaatccttaactgaatgttcctgacagcacaacccgctttcctgaaagggttcatggcagacgttaaatggggcggggggatcaccattattttaa

SEQ ID NO: 471919 - DNA, 122 bp, Homo sapiens
gagggccacagacagccgctgacccagacgccccatctcccgccccagggcgagggtgcgcgctgtcgcttattggccagcagggtcccagaccttgaccaatcgcctggggccgggtcgtc

SEQ ID NO: 471920 - DNA, 122 bp, Homo sapiens
ttgcacacagtacccccagaaatgtgcgtatggcctcttctaagatgggagaccctcctccgcatctggacctggagtcgccatttcctagcgcccctcgcagtggagcttgcccctttctt

SEQ ID NO: 471921 - DNA, 122 bp, Homo sapiens
gactgccggaacacagcgaagcagaggcagaaggcagacaaaaggggctgggttggtccccgcctgtgtgaacgaaaaaatatgtcagattggaaaattgcggtaaaaaccaggcagagcac

SEQ ID NO: 471922 - DNA, 122 bp, Homo sapiens
ttgggcgaaggaaggaacgggacagcagtgagacgggcgtgtgctgtctagtcccagcgtcggaagcacttggtgggaaaccgctgccaactctgctcctgtaatcacagggttcacctgca

SEQ ID NO: 471923 - DNA, 122 bp, Homo sapiens
ttttagtagagaaggggtttcatcatattggtcaggctggtctcttggccaggctggtctcgaactcctgacctcatgatccgcccgccttggcctcccaaagtgttgggattacaggtgtg

SEQ ID NO: 471924 - DNA, 122 bp, Homo sapiens
actaaacgaagtagcaagtgagtgaataagaagatgaggagcgacccttggtgggcggcgcgggaagagaaccgcaccatagctccgcagacagcctcctttaggcgcgcagcggcggccgc

SEQ ID NO: 471925 - DNA, 122 bp, Homo sapiens
tcacaggaacctaaccctgtaacttccctaagagcaaatgctctgtgtttgctaattcagcgtttgtggtgacttcgagatgtagactctgtgaatagtgagaattgacttatgtaccctgc

SEQ ID NO: 471926 - DNA, 122 bp, Homo sapiens
gccgcacgccatataatctcaaccgttaagtgttctctggctttaccttttccctcccctcgccagtcacattttccccaccactggtcctcgtctacctctctgatgcctcctgcaggcct

SEQ ID NO: 471927 - DNA, 122 bp, Homo sapiens
acagtattttgaagttttaatgcaccttcacttatatgatgaggaacagagactaaatatcgggttcaacttaagtcaacatgtttggaatgttagatacactgatgtgctgtggcccagat

SEQ ID NO: 471928 - DNA, 122 bp, Homo sapiens
gcgaggaagagctccccacccgcctctagcccccagcccgaggcccccaccagcagttggcggtagcagctactccgagcgccgtttacagttttgcacagtgatcttccccattgtccact

SEQ ID NO: 471929 - DNA, 122 bp, Homo sapiens
ccatttgctaacactgctgacacagttcatcatccttttgttgacacctcagtgccgctccgactgcaatgctgctggcaggaagattgagaaggcttgccccaggaagtctcccttttcct

SEQ ID NO: 471930 - DNA, 122 bp, Homo sapiens
agcgccacactgaatagcgagaccttaaggcacttctggtctctgtgcttccagttcttccgagaaacttggcatcttgcagccgtttcggagagtccatgtgtgccagctctacccgcttt

SEQ ID NO: 471931 - DNA, 122 bp, Homo sapiens
gagttgagccaatgacagcccaggatagcaacacttccgcgcacgcgcagcgcgacgggccggaacttccggcgtcctcctcgtggcggtcattttggcctctgtcctgtttgtccagcccg

SEQ ID NO: 471932 - DNA, 122 bp, Homo sapiens
tttttgctttgtcacccattgctggattgcagtggcgcaatcacagttcactgaaacctccgcctcccaggctcaagcaatcctcctgcctcagcctcccaagtggctgggactacaggcat

SEQ ID NO: 471933 - DNA, 122 bp, Homo sapiens
gcagacatcccggatccctgttatcacaggtgcagccacgcaacttttgggttaccttcccgccacgaaatggaaatgatttcctgagggccggaaagatcatttgcatcgggcctcaggtc

SEQ ID NO: 471934 - DNA, 122 bp, Homo sapiens
gtgattcatagggctttgtaattaggcaggctgattagaatatctctagtcgcatgcagacgattgccttctgagagatgagtgaaggtggtatctgctttgtctcaggagataccctgttg

SEQ ID NO: 471935 - DNA, 122 bp, Homo sapiens
ggagcaagaggaggagacggggctgagcccggcagcaccgcgagactttaccggggagagcgagggagggagggacacccccgcgccgcccgccccgccccgcccccaggccccgccagtcc

SEQ ID NO: 471936 - DNA, 122 bp, Homo sapiens
atgcacagaggacagcggctggggatgctcagctctgtcccatcacctgtgcctgcctgacgatgccgcctcagccgcccagggctccctcagggaaaacgtcgccaagcaccgacggctca

SEQ ID NO: 471937 - DNA, 122 bp, Homo sapiens
agccggcgcccgatcaggatctccgcgctgggatcggtggaacttgaggcagcggcggcgcggggcgccatggcacaccgagcggctccgtcttctgctcctcagagagcccggctggcggc

SEQ ID NO: 471938 - DNA, 122 bp, Homo sapiens
agcctgagactgccatgagcacaagtggcatgtcagttttcctgtcatttaagtgccctacgtctcccctgccatctctcccactccccaggggcctgtgtgtgtgtgtgtgtgtgtgtgtg

SEQ ID NO: 471939 - DNA, 122 bp, Homo sapiens
tcaaagtgaaattctctgctttagagtctaaattgcatgccctttcagaggtacaaaaggcgcatatatattatcattgtttaatcattctacttcctttatttaatgtcatcaatatttct

SEQ ID NO: 471940 - DNA, 122 bp, Homo sapiens
tcgccgcggtcgcctcgcgggtcacagacaagagagcggcttgttttctctctgtcacatcgtcgtcttgaaccgtgtggtctgttgcaggggaaggggccgagctggaggagcgagcgggc

SEQ ID NO: 471941 - DNA, 122 bp, Homo sapiens
cgttgaatgtgttgcagtacagctccaccaggtccaagatggcagcggtcagggcttccacgaccttctctgggaagggaaggggtcagaagggaaagtcatgaggcctccacaagccctac

SEQ ID NO: 471942 - DNA, 122 bp, Homo sapiens
tccgccatcatcggagtcgggaccggaggcggtggtggctctccgcatacattgcgcaggcgtcggcgcggcctccgcttgggtcgtggccgggctgccggtgggcggggcggggcggggcg

SEQ ID NO: 471943 - DNA, 122 bp, Homo sapiens
actaatgatgataaaagaatcaatcaactagacataaaaattctaaatatgtaccgaccacgagagcgtattcgcaaaataacatgaaacaaaaactgataaagagttgaaagcagagattc

SEQ ID NO: 471944 - DNA, 122 bp, Homo sapiens
ctccagccttttctctagttgctaagtctcacattcagttcttggttgattgagcagcctcgtctggggcatttccacagcatgaggtcatcctctgtagtgatctcttaattgatgccact

SEQ ID NO: 471945 - DNA, 122 bp, Homo sapiens
ggtgatggtggaggcatcaaggagatgctcccagcattgtgcagggtgtaccccggctggcgagcatgtcacgtccagggagttggagcctggactttgggttccggcaccgcttccccact

SEQ ID NO: 471946 - DNA, 122 bp, Homo sapiens
agccgcgggagcggcaaactaggggaaagctcagtcccggaactgctagaacgaaccattcgcatatggagggggtgacccaccatctcagaacattaaaaaagggaaagaatcccctggtg

SEQ ID NO: 471947 - DNA, 122 bp, Homo sapiens
agccgcacattcccatttcgttgataaagaaactgaccagatagtttaagtggcctgctgcggaagacagagctggtgctgcaccggtcgctgcttccccagtccttttttggcctcctttc

SEQ ID NO: 471948 - DNA, 122 bp, Homo sapiens
aatccttttgccttggcctctcaaagtgctgggattacaggtttgagccactgtgccctgcgaagaatttgagtttaaaaacgttgagaacgttatgcgagtttttcatttttaaagttcac

SEQ ID NO: 471949 - DNA, 122 bp, Homo sapiens
ttgaaagctgcatcgagaacccgcccaagcgccacctgctagacggccagccccacacttcgcttcagcctccggaccattccggagcagcctcacatacctcactgtctcgtctgtctatg

SEQ ID NO: 471950 - DNA, 122 bp, Homo sapiens
gtttgttttgttttgtttgaatgcattgttatctttccaaactgtgatgctactgcctcccgcaaatcagtggaagcatttctaaaatgccctaggcagccaggcttccctggggttctgct

SEQ ID NO: 471951 - DNA, 122 bp, Homo sapiens
atgggccccgggagcgccacacccccgccctgtgcacggtgtgtcacgcgagtgcatgttcgcttggctttgcaaaacgcagccaccctctccacggggcgccacgtcacgtgcatggacgg

SEQ ID NO: 471952 - DNA, 122 bp, Homo sapiens
aaaagttgaacctaattacgaagctaggagtaagtaaggatcatgaacctcctcctgccccgggggcatcaagcgcgtggcagggctgccccgtgtcccgctgggaggtgctggcgctgggc

SEQ ID NO: 471953 - DNA, 122 bp, Homo sapiens
agaaaagcccccagccacagcctccttgcctccaagtcgccagcactccgccccctcctccgcctgcctctcagtctggaaaacagctttgcacgttaacctccaggggcattcactgggtt

SEQ ID NO: 471954 - DNA, 122 bp, Homo sapiens
cctgcccatctgagccccagtgtttgccggtcctggcaggggaggcttgtttggggcctccgtggctcctttcagcgtgaggcctggcttgtgttccggttccagcctctctttgtactctg

SEQ ID NO: 471955 - DNA, 122 bp, Homo sapiens
ctcttttttttccttcctcgcctccttgcccctccctatcccggtaggcgcgttctctggcgccatcatatggcagaatgcgggactacaccaaatgcggaaaggcaccttccccttccctg

SEQ ID NO: 471956 - DNA, 122 bp, Homo sapiens
aacaggcctgtttattcaggggaaagttggagaagggagggcgagtttagcagaaaagctcgagatgcctggataacaaaaagtttgcgctcatacttccttcgagggacaatttgctgaat

SEQ ID NO: 471957 - DNA, 122 bp, Homo sapiens
gtctgagtcctaggaagtgaccacagggggagcaggaccgtctgagtcctaggaagtgaccgcagtgggagcaggaccgtctgagtcctaggaagtgaccgcactgggagcaggaccgtctg

SEQ ID NO: 471958 - DNA, 122 bp, Homo sapiens
tccggagaggccggcactgccccgacgggggcgggacctcagagcagcccactcagttctcggagtcagtttctcaccaaaacaaggctgggctaaaacacgctgagaggtcattgggaagg

SEQ ID NO: 471959 - DNA, 122 bp, Homo sapiens
atgcagcagtgagtgcgctggaggggcggctggcctcggggcggctggccttggggtctccgccggccccgggggtctccgcggcggcgccgcctgggctgtgcggggacgggagttccgca

SEQ ID NO: 471960 - DNA, 122 bp, Homo sapiens
ggccttccagaggctcaacttcctgtaccaggtgagtctgcgacaagggccccacggggacggtgctcggcgtcccagagtgactgctcccctcccgcaggccgcccattgtgtccttgccc

SEQ ID NO: 471961 - DNA, 122 bp, Homo sapiens
aacacattccgagaagtcaagtgacgaaaaaccactccaaatgactgaacggccccagatcgtattccaatgggagtctgagaacaaggaatcagaagggctcctggctgaggctgtactgt

SEQ ID NO: 471962 - DNA, 122 bp, Homo sapiens
cctagggctggggtctccttaccagaaattctgggcaccatgggttaggcttcagagcagcggacgagggagcagcagtggaaatgggtcagtgactttacataggggcttatataggatat

SEQ ID NO: 471963 - DNA, 122 bp, Homo sapiens
cctcccctagaccctggaaattctttccttcctgatttgccctaggagcaggacaaataccgttgtattgtctttccctgcatttgaagtcttttacaccatttagtgcccttgcttttgga

SEQ ID NO: 471964 - DNA, 122 bp, Homo sapiens
caagtcctggacagcaggagcagtctccaggggtgcctcagagcggactctaaaggccatcgtgtacatctcctcagctgcggtacagactaccccaagccaggcagcttaaaacaacagaa

SEQ ID NO: 471965 - DNA, 122 bp, Homo sapiens
ttccatgcggggactcctcgtaacgaaaccgggacggtagcagcactggactgaattgtgcgactctagcaggttgtttatcctccacaagtcttcgtttttcatgtgtaaaatagcaatga

SEQ ID NO: 471966 - DNA, 122 bp, Homo sapiens
cccgcgtaagacccgccacgtccatgtaagatttgggtctcgtgtagacccgcctcattccgtataaagtcttacagaccctccaggttcctgccagccccccatggagaactggcttctta

SEQ ID NO: 471967 - DNA, 122 bp, Homo sapiens
gcgcactccaccaccgacagcgcccgctttgtgcagcgcccgttgctcttcgcgtcccggcgccagtcctctgcaaggagaactgagaagattttcttaagcacttttcagagcgaggccga

SEQ ID NO: 471968 - DNA, 122 bp, Homo sapiens
agctgcagctgagcccacggtggtggctgcagggctggacccagaaggccagagggtcgccgtgtggaacacaccctccctctctaagccctgctcttccttggctcgcgcccagggcactg

SEQ ID NO: 471969 - DNA, 122 bp, Homo sapiens
tttacaagttatccaaatgtctaactgtataataaagaatttagctatgtggactcggttcgaagatgggagaataggaagagctccagtctacagctcccagtgtgagcgatgcagaagac

SEQ ID NO: 471970 - DNA, 122 bp, Homo sapiens
gcccacctcatatgggccagctgggaggacctgggactgcagacgtcctggggccgtggccgtggccgtggccgtgggctgggagctgccgtgggagagtgcaaggggctgccagggaggct

SEQ ID NO: 471971 - DNA, 122 bp, Homo sapiens
ccagtccaaccttcctccaccagcacgcatctatcaaggcctgggcaaggcgctttttggcgtgggacaggcagccgagaaagagaaaaggaaacctttaaaatatgtattttatatatata

SEQ ID NO: 471972 - DNA, 122 bp, Homo sapiens
ggtgcttttaaatacaggtactattcttaccttcattttatgggtgatgaaactgaagcacggagaggttaggcaacttctccatggccacacagcttgtgagtggtagcattcaaacccat

SEQ ID NO: 471973 - DNA, 122 bp, Homo sapiens
tagtgggtaatttctcgttgcaaatattaatccgttgtttttctggcgcccagcccggcccgccgcagtactgtactcgaggtacgttcctatgcaaccgagagccccggcaaatacttcat

SEQ ID NO: 471974 - DNA, 122 bp, Homo sapiens
cgaaggtgtacacccccctgtgactattcccaatatccaagtcgggagacgatgacattacgcccaatatcgcaggggatatacacccaccctgggatattgttccttttatcaagaagggg

SEQ ID NO: 471975 - DNA, 122 bp, Homo sapiens
gctgaagctcaggcccttcctgttgccctagtctcctgcactgagcttggtgagtccattcggggactgctggatgcatgggcgggtagggaggtgccctgggttgggtcgatgatgagaac

SEQ ID NO: 471976 - DNA, 122 bp, Homo sapiens
gcgcgtgtgctgagcgtcatgcccaggggtcttcggtgcccgcgcacgggcagactctgacgatggtggttcttaattcagcatcaggagtgttaacgtgtgaagacgtgattccgcttgga

SEQ ID NO: 471977 - DNA, 122 bp, Homo sapiens
ctgagactggcaccaacaggagcagcggcatgggaagcaagtaatgtcagagttgcctggcgcagtgcctggaactcagtaggcactcttaaaaaaaatgtgagcagcagagaacacacgag

SEQ ID NO: 471978 - DNA, 122 bp, Homo sapiens
gcaaagagaacgtgaggattctgggctccggctggggtagatggggaggaagaaccgagacgctggaacccagggacacccggttctcagcagtgagaaaagggtgaatgctcagttttgga

SEQ ID NO: 471979 - DNA, 122 bp, Homo sapiens
ccaccacctcggctccaaaggtaaaagagacgccacggtcgttctcgccccagccctgcacgtccttgtcagggtcagaccacagcaggtcacacagcaggccctggtcaggcacatctgtg

SEQ ID NO: 471980 - DNA, 122 bp, Homo sapiens
tttgttttccaacactgtacgtagtctgtctttgccttttcaaagctgtgggggttatgccgggcgcggtggctcacgcctgtaatcccagcactttgagaggccaaggcgggcggatcacg

SEQ ID NO: 471981 - DNA, 122 bp, Homo sapiens
aaggccatcacaacaactccctgccacgttgcaccttctcccaagagaaccaagcagaaacgcatgcctggttcacctcccgattcctctaccatgtggcgggattcctgctgcccatgctg

SEQ ID NO: 471982 - DNA, 122 bp, Homo sapiens
tctggcatgtgcgtgtcgcatgctgcatgcgtgagtgttgaacgcgtgagtgttgttcctcgttgctaccacagtgcaagcccccctcactatccaagccattctgtcggagagcctgggga

SEQ ID NO: 471983 - DNA, 122 bp, Homo sapiens
cgatcgtgaaaggggccacgccaaactgcttgagctccaccgccgggtcgtccacctcatcgtcagactttccagacgagatgaggaccaggaactgcgggacgccctcttcaatgcggctc

SEQ ID NO: 471984 - DNA, 122 bp, Homo sapiens
cttgccctcagaagcctatcttgggaggccacacaccagtgtacctaaggttcgtttacccggaccggaagcgacagcaccgatacctttggcacacttccgcctggtacactacaaacggc

SEQ ID NO: 471985 - DNA, 122 bp, Homo sapiens
aatcgccgtctaggattggctgtggtgcccccgatcagccaatcggaaggaaggcggtagcggggcgtggaaggaagcgaaccctggatctgacccactgtcccttcaaggtctcgggaatg

SEQ ID NO: 471986 - DNA, 122 bp, Homo sapiens
gacaaattcaaatcctgcatggtagccaccaaaagcatatatttgaaaaacaggattcggcgtgccatattatgcattatttaatggtatgcaaattataagtcagacagttaggaaaacca

SEQ ID NO: 471987 - DNA, 122 bp, Homo sapiens
ttagggaggccgaggtgggcagatcaactgagttcaggagttcgagaccaccatggctaacgtggtaaaaccccatttctactaaaaatacaaaaaagtagccggcgtggtggcgctcgcct

SEQ ID NO: 471988 - DNA, 122 bp, Homo sapiens
tccaatggggcccgggggcggggacttcctcccatctctgtccagcatgcgtgtactcctcgcagttccatctacctcgcgggtgcctctggtgtctccagaggtctccgaccccagcccgc

SEQ ID NO: 471989 - DNA, 122 bp, Homo sapiens
tcacacaaattccaagagagcttttcctttagacttcattacagaagcagtcaaaatacacgaaataactcaatcatgcactcacaaaatacagtttgcaaaaatgcctgaacttattagtc

SEQ ID NO: 471990 - DNA, 122 bp, Homo sapiens
gatcaattaaatcagaacatctacgggtagaacccaggtatcaatcctttgtaaatgccccgtgtgattataatgtatagccaatgctgagaaccactgccttaggacctcaggtcaagtaa

SEQ ID NO: 471991 - DNA, 122 bp, Homo sapiens
tgcgcaagttacgcctgcgtattgcagggaaggaccgtaaaaggctgtggtgctgatcaacgaaggatttctcggagaaaattcctcctttgcggaaatgtccgtagaaacgcacctttttt

SEQ ID NO: 471992 - DNA, 122 bp, Homo sapiens
cctgcagccctcttcaatctaatcaagggactgttggataagcctttcataaccatgacacgtttaataaagtctctagctttgagagaacatatgccagttctcagcttcttccttcacca

SEQ ID NO: 471993 - DNA, 122 bp, Homo sapiens
gctagctccctggcctccccgacatgccgaggagcccctggcttccggagccgacgaggccgcaggggccaatgggaccatcttcagccagcccagagtagccgaagcgggtggggcctggc

SEQ ID NO: 471994 - DNA, 122 bp, Homo sapiens
ccggcccgggggtccccgcagagtgggtctctgctgccgtcagcccttcggagactgtcgcgttgaaagaatgaaccagagttcgccccctgcccgcgccagggcgttttgggtcaccgagt

SEQ ID NO: 471995 - DNA, 122 bp, Homo sapiens
tagacgctttcgtgcaggagggacgacgactcccctcacgccttcgtggccccaactcggcgctctgctatctctgatccggtgaacacacctcagagaagctaaaatggccgccacgaaga

SEQ ID NO: 471996 - DNA, 122 bp, Homo sapiens
tcggctttcagctaggcatgcctgccaatgttcaacgtcctcctgggatacggaaggcaccgtgatagacatctgggcaagtcaacaggaaggtggatatccaaatctctctcttcgcaatg

SEQ ID NO: 471997 - DNA, 122 bp, Homo sapiens
actctgggagcctactcctttaagagattaggcagtacgcctattctcgcctggtcccagcgtaccttgcgcggctcgccgtcccccactcacgtaccagggctcattgcgtgacggttaca

SEQ ID NO: 471998 - DNA, 122 bp, Homo sapiens
atcatgactgtccataatgatgatagcaacagcttcaaggctcttcgtaagtagatattgcgacttcattggttgagaagaaacaaagatacaattcttgccagacacttgctgaggacagg

SEQ ID NO: 471999 - DNA, 122 bp, Homo sapiens
gaggcaggggccgacagggagcacggtggcgccaggagctggaggaggcaggaaggaccccgagcctccacagggagcacagctgcccacaccttgatctcggatatgtggcctcggtgaag

SEQ ID NO: 472000 - DNA, 122 bp, Homo sapiens
catgttccggaacttctcgagcatctctggctggtactcgtcaaagtcaaaggcctccaccgggcccgagggcgtgttggccaccactgacacacgcacggtgggcgagcggccaccgctgc

SEQ ID NO: 472001 - DNA, 122 bp, Homo sapiens
agctttctgagcctgtttccacatctgtaaagtgctatccacttccacctcctgggctgtcgtgcagatgtaggaaggaattgcactcacacactcagcatgagacaggcgctcagtaaaag

SEQ ID NO: 472002 - DNA, 122 bp, Homo sapiens
catctggccccgctgcctgtttttgtaaataaagttttaatagcacatagccacgcccaccggtggacacatcgtccctggctaaccttacaccaccttggcagagttgagtcgttgtaaca

SEQ ID NO: 472003 - DNA, 122 bp, Homo sapiens
tggaaagcggcgggagaggcaagggggccctctcttgctcccgcgcgcgcacacacagaccgaacagatgcagctgcccctgcagccgccgatccaacttaactgagtatccggcggtgtgt

SEQ ID NO: 472004 - DNA, 122 bp, Homo sapiens
cagggggacccggagcagcgacagaggcaccaaggcccaggcaggcggggctcggtgggccggaggaggggcggtggagtccacaccgccaggtccctgcctcgctcaggatgattccagcg

SEQ ID NO: 472005 - DNA, 122 bp, Homo sapiens
cagtgccaatttgcattttctgagtgagttacttctactcaccttcacagcagccggtaccgcagtgccttgcatatattatatcctcaatgagtacttgtcaattgattttgtacatgcgt

SEQ ID NO: 472006 - DNA, 122 bp, Homo sapiens
agctttctctacccagcctcatccttcctgaatgtggtgatgatactaaataaactcatgcgatgtttttcttccagctcgataatgatcctcattccatgccagttacaacatctgatgaa

SEQ ID NO: 472007 - DNA, 122 bp, Homo sapiens
catggcgctgctcagtagcgcagcacgcacgcgctgcaggaaaaacgccaccgacgcgagcgggagcaaagcaacaaccaatcggcttcggagacgaagtcacttcccggaagtgctggcgg

SEQ ID NO: 472008 - DNA, 122 bp, Homo sapiens
tactcttgctgccagctggggaatggggaatggctataggaagggctggagacagcatggcgttgtcattggttgcatcaggtggttggaaatgcagggattttcctctctagcccacccca

SEQ ID NO: 472009 - DNA, 122 bp, Homo sapiens
cgtggtctgaggctccctgaagtctgagaagctccacccagggccagctgtgtccggagacggcaggaaaacgctcaaggcgctggtgggccgggactggggggcacggagcccccttgtgc

SEQ ID NO: 472010 - DNA, 122 bp, Homo sapiens
ctaggaggtctccatggcagacagacacacctttcctaccagtctccttcccaccctctccgtcctctgcccaccaggcagctgtctgcgcctgtggctctcagtcccctgcagaggacatc

SEQ ID NO: 472011 - DNA, 122 bp, Homo sapiens
cagtgacattatgtttacctgcagcaaactttccacgaagcacagattctaatgttatttcgtcttctccaagggcttgaagagtcacttctggaaatggcaggagaccactagtcacttga

SEQ ID NO: 472012 - DNA, 122 bp, Homo sapiens
ccggggggcggggcccgcgttgaccacgcccccggccctgcctgcccctccgttgtcgagcgttttccgctgacggagccctcacctcagacaccggcggtagggctggatgcgggcccggc

SEQ ID NO: 472013 - DNA, 122 bp, Homo sapiens
gtccaataccatggttgatctcatgggcaaccttgtccatgccgtggttgagcccctggacgcctttgtccaactccttgccggtgtggctccccatgttgctaagtccgttgaaaaccttc

SEQ ID NO: 472014 - DNA, 122 bp, Homo sapiens
ctcagagctcccatgttcccctcgccacagctgggaacactaaggttcccttaggagcagcggctggggcacatgccacacagtcacctgacggctgctggttatattgggcaccaagtgtc

SEQ ID NO: 472015 - DNA, 122 bp, Homo sapiens
tattgttcttttctcctttctaacaatccaccatactttatatcctcacatacctacaaacgaagtaatagagttggatgtaggtttatttaaacatgttctttcatatgtataagactgaa

SEQ ID NO: 472016 - DNA, 122 bp, Homo sapiens
ggatttctccgcgcattcctcacagcccattttgtcccaactttgttttagccaccagagcgcgtctgtgcggccagcaccaccagcagaggggacccaagtgtaggggcgccttctcccca

SEQ ID NO: 472017 - DNA, 122 bp, Homo sapiens
agactggctggggaggggacatcacaggtactcttaggaggcctgagaatccgaacaaaacggtatcactaggcagaatgtggccgaagctactagttgggtgctgagcatagttcggcaat

SEQ ID NO: 472018 - DNA, 122 bp, Homo sapiens
cggactcatctagcctcgggtctgtacctcagggtgtttgcttgaagatgctgggctctgcgtgtagatttgttttgttctcgaatttcttgcatgctttcctgttgtgaaattagcaaagg

SEQ ID NO: 472019 - DNA, 122 bp, Homo sapiens
gtcccctcccctcgtgccctcctctctgttttaatgacttctgcctgcgccctggcttggcgggggtctgcgcgtgcctcacttctgattaaagagactgagcagggatcatgctcttccag

SEQ ID NO: 472020 - DNA, 122 bp, Homo sapiens
tttcagccgagactgcagacatctcaaggctcaactggggaaaggtaacgcttccaagctcgctcacgtggctgttgacaagcctcaggtcccagctggctgctggctggagacgttctttt

SEQ ID NO: 472021 - DNA, 122 bp, Homo sapiens
ggtgagaaacgtttgtaggcaccagcgctgacgctgtgctgtgagcagggacgcatcgatcggtaagaggtaaaggagtgaacgccgacaggcattggtttttgcagagattaaaagattcc

SEQ ID NO: 472022 - DNA, 122 bp, Homo sapiens
cggccccgcccccggctctgaatcggtgacccgtgctggcctctgccttcgcctgaagtccgaatcaggcgtgttctgacccaaagctgcctgaagcgctgctcggtgtgcacttgaaaatc

SEQ ID NO: 472023 - DNA, 122 bp, Homo sapiens
ggaaacgaaacctggcgggagccaggcgccggcgggaaacgaaacccggagggagccaggcgccagcgggaaacgaaagcgaagcgttgcggggaaacgaaagccggaggcccaggcggggc

SEQ ID NO: 472024 - DNA, 122 bp, Homo sapiens
ctgtctctgttgtgcacgtgctcccgcagagccgggctctgcctgggacttcggtcctgccggaccctctgcagcccccagcgtggtctgtttacccctgttcattcactggcttgctcgtc

SEQ ID NO: 472025 - DNA, 122 bp, Homo sapiens
cagaaacaaaaggaggtgtgacaactgtgtcagaagtctgagtgacgcaaggccatgagccgaggaatgcagacaccctctagaaactggaaaaggcaaggaaataaattctctcctggagc

SEQ ID NO: 472026 - DNA, 122 bp, Homo sapiens
gggggctcagactccctttctctaggctgctgttctctcccctgacggctgtagaggtgacgacactgcctggcactcagtagatgctgactgagtggatgacttttgaagagctctacttt

SEQ ID NO: 472027 - DNA, 122 bp, Homo sapiens
agcggaggtggctctggagtaggtgggaaactgaggaaaggagctttccccgtgccaaaacgcagttcccattttagaactggttagactaaggaacaacattctacaccacctccctcact

SEQ ID NO: 472028 - DNA, 122 bp, Homo sapiens
cgcccctgcgcccacaagccgcagcgcccaggaatcccctgggcgcctccgcgtcccccgcgggctgtcccggcaggcaggcagcccaccccagggctcccctcgtggaaggacacccctgc

SEQ ID NO: 472029 - DNA, 122 bp, Homo sapiens
acatccccgggacttcacacggttattaccaggatcagagactgaggcagacatgaagggcgaataaaaaagattcgatctgatgtcagatgagtcatcacatttcctgacagcctagatgt

SEQ ID NO: 472030 - DNA, 122 bp, Homo sapiens
ccggcggcggggggccacggaaagactcgggcccagggaccacggagggggcacctggcgcggagcccccaccctacccccggctagcttgcgtgcgccggcgacatccctctagggggcag

SEQ ID NO: 472031 - DNA, 122 bp, Homo sapiens
cctacagacaaagtcgtccgcacctgactctgctgggcgccgccatcttaaccggaaatacgcacggtttcacccggaagtgccaggcgtacccacccaacttcgtgccgtggttgcggctg

SEQ ID NO: 472032 - DNA, 122 bp, Homo sapiens
cccggctgcaacttccggcgcatgcgcagcgtcctcgctaggagagcgcccatagacagacgcatgcgcctagctatccaaaagttccaccttacagtacttcggcgctcagagttgtcctc

SEQ ID NO: 472033 - DNA, 122 bp, Homo sapiens
aggagatgaggggcgcctctgcccggccgcccctactgggaagtgaggaccccctctgcccggccaccaccccgtctgggaggtgtgcccagcagctcatgaagaacgggctatgatgacgg

SEQ ID NO: 472034 - DNA, 122 bp, Homo sapiens
atggagtgggtgggggccagggttgctgctgagcacccctcagggcccagggttcagcaccggtcagtagagctgaggccgaggatccctggcctcagattgcatcccctccatgccaccgc

SEQ ID NO: 472035 - DNA, 122 bp, Homo sapiens
cgtcaggctcatcagcttaaaataaccgaagcgaggctagaaaccgcctgacagctggcgcggctgcctggctccgagagacactcggcccggctctgaagggaaaacattaaagcaccgaa

SEQ ID NO: 472036 - DNA, 122 bp, Homo sapiens
ggaggaacccccaccctgatttcccttcaatttggccaaaaaattaattcaactctttagcggataaagatgacacactactggaattcagcagtctgggcctgggatacccatcttataaa

SEQ ID NO: 472037 - DNA, 122 bp, Homo sapiens
aggtgatttgctgcagtcaggtgagctccacgatgtcctaacatcacaattttttttcaacgccacctgctaacccacgagtcactgaagggcacacagagtttactgaaacgcagcccacg

SEQ ID NO: 472038 - DNA, 122 bp, Homo sapiens
ttccctgcccgccgaggtcccatcgcttccctgctgggaagacaaatgaggcgctttagccgtctccacggccagcccctccctcataacccgagattctttgtgggctcttagtccatagc

SEQ ID NO: 472039 - DNA, 122 bp, Homo sapiens
ggtgagtctgggacccaggaaagggcagcccctctcaagccagaagtccgcagtgtgctgcgctgatggtcttgtacacttaggtcccaaccaaggccctgacgtgggggaatgtccctccc

SEQ ID NO: 472040 - DNA, 122 bp, Homo sapiens
tggtctccaactccgccggtctcggcctcccaaagtgctgagatgacaggtgtgagccaccgcgcccggcccaggatgccttatttacctgcctgcctaactgcccctgcagccgcggcttc

SEQ ID NO: 472041 - DNA, 122 bp, Homo sapiens
gttccaggagccggaggggcgggctgcctccatggagagggctcggggcaggtcgcgggccgagcgtcgggccggggtaggagggctccgcggggcgagggccgcggccggagcgcagtctg

SEQ ID NO: 472042 - DNA, 122 bp, Homo sapiens
tttttggtgtcttgcaggagaggcagcttccccccttgggtccaacaaacccgcgtgtgacgctggccccaccgtggaatggcctggcccccccagccccaccacccccaccccggctgcag

SEQ ID NO: 472043 - DNA, 122 bp, Homo sapiens
acgtcaagccccggactgggacccgagcctcagctgtcatttaaagagataggctgcagccgcggctcccgggctccgacgctagggggcggggccgagagccgagcctgcaagaggtgcag

SEQ ID NO: 472044 - DNA, 122 bp, Homo sapiens
gccggtaatgaattgatttgtaacatgagcgacacggcgccctcccgcccgtgcccgctgcgggcccttaatctaccgtgtttaaggggaaatgagcttctacatctctctgcctgaaaccc

SEQ ID NO: 472045 - DNA, 122 bp, Homo sapiens
gaagccacaccctcagcctcatcccagggtatgttcagtgttggcccttgtggcccctgccggcacacacttggaactgggccaggcaccccagggcctgagcgtgtggctgaacatttgac

SEQ ID NO: 472046 - DNA, 122 bp, Homo sapiens
ctggaaggagaagatgcctgcgtggtcgtcgtccaggatggtgacggtggccagcagcggcgccaccagccgccccttgggccgcccgccgccgtccggctcgaacatgccctgcgcgtcgc

SEQ ID NO: 472047 - DNA, 122 bp, Homo sapiens
ggggacccacacgttcaggctcaggtgttttgtttcttagagcctttgttaagtttcctacgtgtgcgacattcctaaggtcttcaagtttcctattctgttttgtgctgtgtgaaagttct

SEQ ID NO: 472048 - DNA, 122 bp, Homo sapiens
aagtgctgcaagccagtctgcccctcgggtgtgaggacgcaggggggtgtccgcagggggcgctcagggcgtgtgggccgggcaggggggaccattggtaggtttattgtcgacgctgcggc

SEQ ID NO: 472049 - DNA, 122 bp, Homo sapiens
tccgactttcccgccccgtacgtgaggggccgccttgaagcctcttccgccacggacactcgaaactgatcttgaagcccctgccgtcacggatactagaaactgatctcgaagccccttcc

SEQ ID NO: 472050 - DNA, 122 bp, Homo sapiens
atcccaacctcgactttggccttcaacttggcgcgctccggagctagagctctgcggtagcgaatctgatcgcgtgtccatgcccgccccctgtcccgcctcctggcttttgaccccgtcct

SEQ ID NO: 472051 - DNA, 122 bp, Homo sapiens
ctggcatagaattcctttgatttcttctacttcctcttgggacatgggtcacacggaaggcggccctatccttggctgtcagaaccccataagcccaaccatatcctaggcctctccttgtc

SEQ ID NO: 472052 - DNA, 122 bp, Homo sapiens
gccagtctgcactccggctctcctcttagtcggaaccaaagtcgaagaggctagggctgccgcgtcgcgaggaatgtctggaccagagcactcttccggcgtcgcccaggagatcaggggtg

SEQ ID NO: 472053 - DNA, 122 bp, Homo sapiens
ttattctactctccgctgaagtccacacagtttaaattaaagttcccggatttttgtgggcgcctgccccgcccctcgtccccctgctgtgtccatatatcgaggcgatagggttaagggaa

SEQ ID NO: 472054 - DNA, 122 bp, Homo sapiens
acagcagctgttcttcccagagtggggatcccgtggcactgagaaacaggtgtcctgccccggccaagctatgtccccactgaaacccctttcccggctatttctacaatcagataatgtat

SEQ ID NO: 472055 - DNA, 122 bp, Homo sapiens
cctttgctctcagagcacatcagggctttggctctgtgtttctattctgtctttggtccacggaaatgtttatactgttttcgaaccctagaatatattttgggcattttctttttatgtta

SEQ ID NO: 472056 - DNA, 122 bp, Homo sapiens
cctgctgtctcgggttcccccatcagttttgggtaggattatcagaacccttcccaggagcgcgcttggagcgctgtggacactatcctctcctagcacaggtggcgcggtggcttgggcca

SEQ ID NO: 472057 - DNA, 122 bp, Homo sapiens
aatgcaagattgaaacagaaaatacctttaccgaggcaatcatttgccacgtgtggaaagcggatacagctgtaaactatgaaaaagggatctttgtagtacaataaaggatggaaaaagag

SEQ ID NO: 472058 - DNA, 122 bp, Homo sapiens
ggcaccacaccacccttcggtgcttggaacgttgcagagaggcaaggagggtctatctggcgtgtgaggtcacaggaaagctgacgagccagtcacccgacgtgaccccgaggccgcaggca

SEQ ID NO: 472059 - DNA, 122 bp, Homo sapiens
caccctaattttccccattctctcggtgacccgtaactgatcaaaagtccccccgcaccgcgctacgctctcgcgattcctcttagatcccaaccgtgggtccggccggtccgctagatgcg

SEQ ID NO: 472060 - DNA, 122 bp, Homo sapiens
gcgcctctgggacgtgcagagcaagcagtgcatccggacggtggccctcaaaggtgggcgcgcctctgctcggcccgcggccagcgcgcaggggaaaaagccagcaggagctccgggcttgg

SEQ ID NO: 472061 - DNA, 122 bp, Homo sapiens
tcacctcccagatggggtggcggccgggtagaggcgctcctcacatcccagacgaggcagcggggcagaggtgctccccacatctcagacgatgggcggccgggcagagacacgcctcactt

SEQ ID NO: 472062 - DNA, 122 bp, Homo sapiens
ccattgtaaatagccagagctccagaaagtacaacctgaggcagcccccttcttgttttgcgtaaatccaaataaatcaatacctactctccacccaagaatctcattttgctcggagacac

SEQ ID NO: 472063 - DNA, 122 bp, Homo sapiens
tgtgatgagtgtgcagagcagggggtgggaagactgtgactgcagcctaaggcttggaagcgggtgactagactcaagactctgcatgtatgagatgttttggaattccaaccgttcttttt

SEQ ID NO: 472064 - DNA, 122 bp, Homo sapiens
gtctgtggccagaagcttcactaatttcataattttccctccctgctgccagttgacctccggatttttgcctctgttcaagttggtactcaaaatattgcctctaaaaatggagtaccagc

SEQ ID NO: 472065 - DNA, 122 bp, Homo sapiens
ggtccctgcagccccgaatccgcacccgagccacgcggaacgactagccccgaggggccccgcaggctcccggtgcagctccctggtcgtggtctccttgaccgaagccccggcctcacacc

SEQ ID NO: 472066 - DNA, 122 bp, Homo sapiens
gcggggctggcgcttggctcggcatcaactgctcacctctctgggggtgtgggtggttcccggcgggaggtgagatttaaacaaagcctcattgctgttcccaggattatccgagccttgtg

SEQ ID NO: 472067 - DNA, 122 bp, Homo sapiens
tcctggcagtagttgacagtggccttggtctcgttcatcggcttcctgcggggtgggggtcgggggttgatgggagacataggtgctgtgtggggccggacagtgctcagaggtgggtggag

SEQ ID NO: 472068 - DNA, 122 bp, Homo sapiens
ttgaacagtccgattttcagtggggtcccacacagacgggacgcggcttaggaggaatcccgggctgcgggcattccttggcccagtggccagatttccagcaagtgtagcaagctcctgtg

SEQ ID NO: 472069 - DNA, 122 bp, Homo sapiens
aatgcattcccaggcggggcctctcaaatggccaccctgggagtgtctgccttatgcagacgtaggtagggatgaaacactccctagtctcctgcagtgcccctaggcttgctaggattagg

SEQ ID NO: 472070 - DNA, 122 bp, Homo sapiens
agcaaagacatccagggcagtcttgaggtccttcttagagggcaagagcattgtgcccagcgtcccagtggctccaggtaagcactgttcagctgcccagccctgattgctcaggagtctgt

SEQ ID NO: 472071 - DNA, 122 bp, Homo sapiens
atgaaaagttctgcttactcctcttcaacctggaaacttcttttgatccttcaggtttcacgtcttctgctcagccttcttttcacatgcgtgctgttttccctcccctccccatcaccttc

SEQ ID NO: 472072 - DNA, 122 bp, Homo sapiens
ggccccggagtagatacaggcaccgagcgtcgagggcacagcagcaggccggccctgttccgaagaagggtggttgagctcctggcctccggatctgcagccactgatggccggactcggac

SEQ ID NO: 472073 - DNA, 122 bp, Homo sapiens
cgggtacaacctagtttcttatgaaatacctcgcccctaaggtacgcgcagggccagtggcgcaatggataacgcgtctgactacggatcagaagattccaggttcgactcctggctggctc

SEQ ID NO: 472074 - DNA, 122 bp, Homo sapiens
ctgaaactggattttaatttgcattagccaaatttgttcaatgccagctgcctgaaatcccgtattaggtcctgaagtaggtgaggaattaaaaaaagtcataatctcttttcttttccccc

SEQ ID NO: 472075 - DNA, 122 bp, Homo sapiens
acctggggcgccagaagacggtggtgctgacggggttcgaggcggtcaaagaggcgctggcgggccccgggcaggagctggccgaccggcctcccatcgccatcttccagctcatccagcga

SEQ ID NO: 472076 - DNA, 122 bp, Homo sapiens
gcccggctcccgcacggtctctgcggcgaggttggactgctctggctgggccagcacctccgccccgcgggtcgcgggcgcctgctctgactatatataataatatagccaattcttttgat

SEQ ID NO: 472077 - DNA, 122 bp, Homo sapiens
tttcacagtgcttggcataaagctggctggccctttgtacctgtaaaacgcggaaacacccgcagctcctctttttctctacctactttgtcgcacattacgcaataatgtacagaaattgc

SEQ ID NO: 472078 - DNA, 122 bp, Homo sapiens
cttcccctgcatatttgcacagttcacaccctgacctctctcaggccttttctcaaatgtcgccttcccagcctgacccaaccaccctattcaaaattgaaaaaacaactggcccttccttc

SEQ ID NO: 472079 - DNA, 122 bp, Homo sapiens
atgtcgtgaaggaggtatggtgatctttgaccaaatgccccaagatggtcggctccgggccgcgctgcatttcttatgccgcgttgctctctctccgttcattttgctttcacgatagcctg

SEQ ID NO: 472080 - DNA, 122 bp, Homo sapiens
cacctggaaaatcgggtcactcccaccccaatactgagcttttccaacgggcttaaaaaacggcgcaccaggagattatacgccacacatggctcggagggtcctacgcccacagagtctca

SEQ ID NO: 472081 - DNA, 122 bp, Homo sapiens
caccaatgatctgttttttcttatcttccatcttcatcctttttttggtcttttctcaagcggttggcaattcgtggtattaattgatagtatgtgtctgagtgttggttctttatgatgta

SEQ ID NO: 472082 - DNA, 122 bp, Homo sapiens
tttagtcacaaaatcccttcccagtagaagtgttctctgaaacaggcaggttcttttaggcgtgtctatttggactgtataccccttacattgaagtgagggggtggatcagttatctgttt

SEQ ID NO: 472083 - DNA, 122 bp, Homo sapiens
gcaaatagcagagacctcaaggtgctggaggagttaggaatctcccctccctcactctaacgctgccgccgccgcaccccgccacctccccccctccccacccccgccgcccacccgccctc

SEQ ID NO: 472084 - DNA, 122 bp, Homo sapiens
tagtgtcttctgtattctgatccttgaagtgacataccatcactgccacatgctgttggtcgcacagcctaatcatggtgcagtgtgggaagggactatacggaggtgtgcagaccaggagg

SEQ ID NO: 472085 - DNA, 122 bp, Homo sapiens
ttattggcgctgccttcaaaacccagcaccgccggcatggcggaggctgggagaaaacgccgacaggactcctggcaatgtcaggagctgtggaggtcctcactagtccgcgctgggccgca

SEQ ID NO: 472086 - DNA, 122 bp, Homo sapiens
gagcgccactgagcagctcaggagctccctctctagccgaactgagcccccacggcagggcgggccggggaagtggctgtccagctccctgctggtcacagccctgcgccacccccactctc

SEQ ID NO: 472087 - DNA, 122 bp, Homo sapiens
gcatccttatttttttaagtgcaaattgaccacaaaatgcattccagtgcaaataccagtcgatgttaattcatacagcctggagcaactggtgaagttttaagtactgatgtagtattgca

SEQ ID NO: 472088 - DNA, 122 bp, Homo sapiens
cccgcaggtgtttgaaggccgggggcagcctgcgccccaggaacggcggggtggtcacgtcgcggatcatgagcacgtactcccctgcaaggggcgggtgggctggtcctcagcaggctcct

SEQ ID NO: 472089 - DNA, 122 bp, Homo sapiens
catcccggagcgcaaagcactttcccacctcatgtgttcagagcttgaaaaggcgcttctcgcccccaggacgtgcgtcctcccacttctgcctctgaaacggcaaccctgaggggctgagc

SEQ ID NO: 472090 - DNA, 122 bp, Homo sapiens
gcgaccggcgcctcctctggctccgcgggactgacaatgaggggcggggccaaattgtgacgtcagcgttctggaaggcggggtctttgtgatgggcggggttgtctgtaggccccgccccc

SEQ ID NO: 472091 - DNA, 122 bp, Homo sapiens
ctggggacctgcgggaggactacaaggctttctggtggccattcctgtgtatacagagggcggggctcaccagggcaggctgatcagcctggaggacctcaaggtacaaataggaacaaatt

SEQ ID NO: 472092 - DNA, 122 bp, Homo sapiens
ggaggggggactgactactgggtccaaggtctgagccaggccgaatgcccaaatagaggccgcaaaggccagaagatgctgttaggagggtacacccagggcgcgaccccaaagatcaactt

SEQ ID NO: 472093 - DNA, 122 bp, Homo sapiens
tgtgtgccaagcccaaaccaggttggagtggctctgggttgaggacctgcccttcctttacgtggtccacaggcagcaagacctgaaaatgccctctcctactatttctaaggcattctcaa

SEQ ID NO: 472094 - DNA, 122 bp, Homo sapiens
tatatatctagacatctattacatatatctattatatattttataaatatacatttttcccgcttgtttctttagactgtcttacccaatatttttaataacagtgtaatcaggtaagactg

SEQ ID NO: 472095 - DNA, 122 bp, Homo sapiens
attaatccactcatgtgacattcacctacaacaacataaagaaacaacagtttgagattccgcctcatttaaacggtatcacgtagtttggcaagagatggggaagaaaagagtgtttatca

SEQ ID NO: 472096 - DNA, 122 bp, Homo sapiens
ctacctgggcagaaggttcaagacgcccgattcctcctgtatctcctctgccttggtggccgtgttcctcacagtttcaagttctaagagcatgggcaaaagaatttctgaagacgacccca

SEQ ID NO: 472097 - DNA, 122 bp, Homo sapiens
tctggaatgtgtctgacgtcctgatccctgtgcctatttcagggagcattgggaggagcccgaatcactgatggaattgaacagtgcgtggagacggttcagcaggacaagggtaagtgcgg

SEQ ID NO: 472098 - DNA, 122 bp, Homo sapiens
gttctccagatgtccatgacttgaggaatgtggctaggcaatcagcatctcatcacaacccggcaggcaggaactcaccctggagccctatgcagcagacacagagaaagccctcagtgttc

SEQ ID NO: 472099 - DNA, 122 bp, Homo sapiens
cagggaatgcaggactttggcagaggctgggatcccagaccacagagccccacaagctgacgcctgttcgcggatgccacagccatctccgcggcaggcgctggggaggggaggggatcaca

SEQ ID NO: 472100 - DNA, 122 bp, Homo sapiens
gtaggcagcagtagtggtaggtagtaatggtgggtaggtatgcttctgtgactttgacttcgatatagttatgcccagagagtcactttaggctctggagcaaaggaaggctatgatgaaat

SEQ ID NO: 472101 - DNA, 122 bp, Homo sapiens
ctggacttaaagggcacgtgggcaccagagtgtctgcaggggtacctgccaaggagccgccgggccgccatagggtggggcagtgggacagtgtccggcagcaggaggaggcacgcctccca

SEQ ID NO: 472102 - DNA, 122 bp, Homo sapiens
agcggtgttggtggtgtctggtgcccaggaggagggcttgtttacagctgccgtatttcccgggaccctggcttctgtcctcagggaccccttcagaccttccccaccctccgaagcctcaa

SEQ ID NO: 472103 - DNA, 122 bp, Homo sapiens
ggcaggtcccttgggactagaggcacaaagagggatctgaagagtctattaacagatatccggtgcagaaaaacagccccagtgggctaggtgactcagcagaagacaagaggagacaaagg

SEQ ID NO: 472104 - DNA, 122 bp, Homo sapiens
cgagaacagcatgctgatccccatcgctgtgggtggtgccctggcggggctggtcctcatcgtcctcatcgcctacctcgtcggcaggaagaggagtcacgcaggctaccagactatctagc

SEQ ID NO: 472105 - DNA, 122 bp, Homo sapiens
ccacagtagggaagaggctggactatatcacagctgaaatgtgagtttttattccaccaccgtgtgctgcaccctgtgatgcaagtgaaccattggagtagaggtgttgaaccattgcagaa

SEQ ID NO: 472106 - DNA, 122 bp, Homo sapiens
aacttagctatttgattgtattcactgggacttaagaatgcgcctgaataattgtgagttcgatttgttctggcaggctaatgaccatttccagtaaagtgaatagaggtcagaagtcgtat

SEQ ID NO: 472107 - DNA, 122 bp, Homo sapiens
atttccagtacccagtagtcatctgtgccagggggttatccaggtacagaacattcccatcgttgcagaaggttctatcagctagcactgggttggacgacacttgccaagacgagctggct

SEQ ID NO: 472108 - DNA, 122 bp, Homo sapiens
actgagcctatgtgacccgaaagctgcagaaaggagaggctgtgcccggcacacggaggccgcctcgccagcctgtgctcccgaccctgcgcctgccgccccggactcacctggcccggggc

SEQ ID NO: 472109 - DNA, 122 bp, Homo sapiens
cataaaatgtctggcgttagccagaagtttttcccattaaaatgcctgggttcttggaggcggaggttgcagtgagccaagatcgcgccattgcactccagcctgggagacaagagcgagac

SEQ ID NO: 472110 - DNA, 122 bp, Homo sapiens
acggcccaggagagagagggcagcttgctcaggcacctccagctgtccgcatatttcacacggtgcacgctaccccaccgtgggaggctgtgtttgtctttcatccccatgctgggcttccc

SEQ ID NO: 472111 - DNA, 122 bp, Homo sapiens
ccctcctcaggtccttcaggattactacgcgggaggctggcatcatcacgacaaaggtaccggatggagttgaaactgtgtttccatcgttgtcttgatgtgtggttgaagatatcttccaa

SEQ ID NO: 472112 - DNA, 122 bp, Homo sapiens
tcccggtgactgcgtaggagtccgagctcccgaggtcgcctaagtgcaagcagaagtgagcgtggcttccgggcagcgccctcctcaggggcgcggcttctttctcagttcaaagcctttcc

SEQ ID NO: 472113 - DNA, 122 bp, Homo sapiens
aggtttgtctggtgtctccacgcggtgaccataaggctgtgcttttctcagagtggcagccgaggtgacgtgcatcccgtcagtcccattgctggccgttcggctgagacggggtctgccag

SEQ ID NO: 472114 - DNA, 122 bp, Homo sapiens
gctctttctgtcgccttctctctctctgtctttctctcttccctcactatgtttctctatcgctgtctctctctccctccgtttctatctctccatccctcttgctcttgctctccttcaag

SEQ ID NO: 472115 - DNA, 122 bp, Homo sapiens
tctcaaactggggtatgttaccccggagagtatggagggattatagaaagttacagtatacgtatgcatgattgccaggaaggtcaaatttattagatgattcgaagggggaaatgaaataa

SEQ ID NO: 472116 - DNA, 122 bp, Homo sapiens
ccgcaccccacgctcacagccgttccactcggaatccaggttcttcccatgttattatcccgctccctgatgaattcaacggactgtttctgggtgcgtgtaactcggtagctctcaaaacc

SEQ ID NO: 472117 - DNA, 122 bp, Homo sapiens
gaccggctgccaactcatctgtatgcaacagttctcaaagaacatagtttactttataaccggatccaacaagagtaggcgtggcagttaagtgagtgagataccaaaggtgttgagctacc

SEQ ID NO: 472118 - DNA, 122 bp, Homo sapiens
ctaaatatgtttctttatgttaccaatctttcttccaccatttgctttagttttggtgtccgtaccatagaaaggtccatgtggtagaagtcacaagtagtcttgaataatcagaactcctc

SEQ ID NO: 472119 - DNA, 122 bp, Homo sapiens
aatggcggccgccttgggtcagctgttcccctggccaccccggtgtggctggatcaggggcgcggcatatcatcctcccctccagggctgcctttcagggcgctgccgccgccgccgccgcc

SEQ ID NO: 472120 - DNA, 122 bp, Homo sapiens
caacccgggcatccccattggcacaaggaaggtgggcagccagtaccgccttgaagacagcgtcacctaccactgcagccgggggcttaccctgcgtggctcccagcggcgaacgtgtcagg

SEQ ID NO: 472121 - DNA, 122 bp, Homo sapiens
tcagattagacatgtaaatcacctagtttagtagctgatatacagatgttcaataagtggcgactattattgtaatcacataaaaagaagcatgaaaaattgcccagttcgagataagtgag

SEQ ID NO: 472122 - DNA, 122 bp, Homo sapiens
ccttttgccatgtctgggcgtggcaagcagggaggcaaagctcgcgccaaggccaagacccgctcttctcgggccgggcttcagtttcccgtaggccgagtgcatcgcctgctccgcaaagg

SEQ ID NO: 472123 - DNA, 122 bp, Homo sapiens
gggacaaaggaagccgggccggccgcgttattaccataaaaggcaaacactggtcggaggcgtccccgcggcgcgcggcaggaagccaggccccaaccccctcccaaccgggcgccagcccc

SEQ ID NO: 472124 - DNA, 122 bp, Homo sapiens
gccgagggccctgggtgccagcctccttgagtcaagggtagcgggtgcatggcgcagtgacggcccctatctctctctccgctccccagcctcgggcgaggccgtccggccgcacccctcct

SEQ ID NO: 472125 - DNA, 122 bp, Homo sapiens
ggatcccctggcagaactaccacctgaacgactggatggaggaggaataccgccacatcccgggggagtacgtccgcttcaccggctacccctgctcctggaccttctaccaccacctccgc

SEQ ID NO: 472126 - DNA, 122 bp, Homo sapiens
tctcttttctgttgctgggcacctgcctccagttgcatacaccttctctgatccttggtgcgaatgagtaaggggaaagtcatctaatgctactgggtgacatattttaccaaacactcttc

SEQ ID NO: 472127 - DNA, 122 bp, Homo sapiens
aggcagaattcatgagcggagctcatcctttataaatagcttagtgaggatagaggtctgcggaaaatcgcttgggggagattagacctgaaaggtgaatcaatgtcactgtcctcagcctg

SEQ ID NO: 472128 - DNA, 122 bp, Homo sapiens
cattagttggtgccatctgtgagtgcacagtgcagcaactttagggggttcacaatgttccgcagccatcaccgccgcccagcactggcatgtttcacagtgttccgcagccatcaccgcca

SEQ ID NO: 472129 - DNA, 122 bp, Homo sapiens
cggggcgggcgtgctctccgcggagagttagaggagttgccgagctgagctccggtggagcgaggcgcggagctgggtgcgcgccgagcctctgcctcccgccgcctcctcgccctccattc

SEQ ID NO: 472130 - DNA, 122 bp, Homo sapiens
ggcgccctgcccttcacaaagaaaactctccccagggatcctgccggcttctccgggatccgttgcgggctcagtgggccccgaactcagagcagccagccggtgccactggccccaggcag

SEQ ID NO: 472131 - DNA, 122 bp, Homo sapiens
agaggaaatggccttcctgtcactgccatcatttgctacttgaagagaggtaatccttcacgcatttgctttacttgcaatgattatacaagggcagactctctctggggagcaaatcctgc

SEQ ID NO: 472132 - DNA, 122 bp, Homo sapiens
actttgcggtacaccacacaccagcacggagaggggtttggtgcaggggggacagggtggcgtggagagtgcttctcctcattagcagatgccgctatgtctttctatgcagcccccactgg

SEQ ID NO: 472133 - DNA, 122 bp, Homo sapiens
ctgcaggtgggaaccatgagccaggatggtcagggagctgacactgcagtatctctgggacgtttatgggcccagaaatagccctactggctaagcacccgagatgttccagccacccggtc

SEQ ID NO: 472134 - DNA, 122 bp, Homo sapiens
cggcctcccaaccccagcgagactcaattaagataacggacgtggaagccaggaggccagcgcccagagctcaaggggcgcccagtgaacggtggttgactcggaatctcagagcctcggct

SEQ ID NO: 472135 - DNA, 122 bp, Homo sapiens
caaaaggcccctgcccacgtccctcgagctctgtggcctgccctgtgcattgtggtgtcacgtccatttgtcccctagtgccatgtctccccgtggtgtgtacgtgacactgcgcctgtgtc

SEQ ID NO: 472136 - DNA, 122 bp, Homo sapiens
atacagttgaactcatcattgtacgagaagtttcctcataagcactgtggacaaaaaaagcggggaagacagcaagatttattggaagatacttacaggggaaattaatattttgactattt

SEQ ID NO: 472137 - DNA, 122 bp, Homo sapiens
agtatggaagaatcgaaagagagagaaaatcagagcatgcgtactctgaacttaaagtagcgaatcccaggggatgctttaggcgggaaaattagagtctccacccccactttgagaaggtt

SEQ ID NO: 472138 - DNA, 122 bp, Homo sapiens
cggcctgatggtgtcaccagagcgcacttcttcctggaaggggcctgggccctagagaagcggccacggaagacctgcgtggaccgggcgcccatggcacctggaaaggaatcggaggcaag

SEQ ID NO: 472139 - DNA, 122 bp, Homo sapiens
ttccccggaggagccctgagagggcagtgcaggcaggaccggagggtagtttctgcagcacggcctttatttcaggaatcaccagagcctttctcagtgttccaaaatgccttggctgacaa

SEQ ID NO: 472140 - DNA, 122 bp, Homo sapiens
tccacactgctcaccctcttgccttactcacccccttgaaattccccaggctccatgagccggtgacccactgcctctcgcttgcccaaattcctcttgggtgcctggtccaccctggagac

SEQ ID NO: 472141 - DNA, 122 bp, Homo sapiens
cagtccttagtttttgctttctatctcattttcattgagaatttaaagtggaatttataacgaatttgtcagacctggtaagcatttgatatatgctagtttagtgactaaccaaacccaac

SEQ ID NO: 472142 - DNA, 122 bp, Homo sapiens
cctgtcaccgctgctcgggcgattaagctccgtggcagcagccatgatatcttctcaggccgccccaccaccaccaccaccaagatttgctcacaaccccgccccctcccttccagctttag

SEQ ID NO: 472143 - DNA, 122 bp, Homo sapiens
gttttacaaaaaccctgggcaaattcaaaaggcacagtgttcacttgcagcagggcattccgtggtagggaaaaatgcaatcccagtttactttcattcatatggtaatgttttgccttctg

SEQ ID NO: 472144 - DNA, 122 bp, Homo sapiens
cactcgtggggcccggctgcgcgggggccgcatggctgccggcaggtgccccgaagccctcgtcgttctctatgcctgcaatctcgctctcctgctgggccaggaaggcggccgccgggtcc

SEQ ID NO: 472145 - DNA, 122 bp, Homo sapiens
aaatccacctgtgtaggtggcttcttttgggaggagtgagagcattggtaaaccctgcttcgaggattccttagggaggaaaggtaggttgcaaaacacccacatctgagttacttctgtaa

SEQ ID NO: 472146 - DNA, 122 bp, Homo sapiens
aatcaagctattctcttgaaataagatttttgacctctatttcattatgaatacatgatacgctcccatctttccccaccctcaacccacagagtggcctaagaaaagtgagatggggacaa

SEQ ID NO: 472147 - DNA, 122 bp, Homo sapiens
gctcccggtggaatcagccccatttctgattttacacccaacacctgcaagcagagctcgcgcagaggctcaggcagccatgctcgtggcacgtgggctgtcgcggctgctcccggtggaat

SEQ ID NO: 472148 - DNA, 122 bp, Homo sapiens
ggtggcaggttggaactggaacctgggacctgagatgccagaactctctcggctgccccacgtcacccctctgtgctgctgacaactgccatgcctgaatgtccacactctgggagcatagg

SEQ ID NO: 472149 - DNA, 122 bp, Homo sapiens
tgagtgaggataaacatttaagctcaggggctcacaggagggcatttttgttgcaggcaccggatgcgtggggatcaagtgctgtgggtccctggttcagatcatgcaggaattgctacaca

SEQ ID NO: 472150 - DNA, 122 bp, Homo sapiens
gacaaacataactcttagttctgagtgtgagctcatggaggacctagaaggagatgccagcgtttcaaaaccacagtggaaaagctggataccataagcctgggctcggaaccacatagctt

SEQ ID NO: 472151 - DNA, 122 bp, Homo sapiens
tgtatgccacagccacgtgcggcacgtgtatgtgggcctgggagctgcctggcgctgccccgtcactggcactgctgcatgccagggccaagtgcgtgtcaagtggctgggtgtcaacttca

SEQ ID NO: 472152 - DNA, 122 bp, Homo sapiens
cgtggggcgaaaataaatgggaaaactacagctcccatgaggcgaaggggccacgatgcccgcggaagttatttttcccccggccggcagggagttgtagttatctttgaaagccttctctc

SEQ ID NO: 472153 - DNA, 122 bp, Homo sapiens
agttaccaagtccccatccctcgtcccacctccgccttactagggactcctccctgagttcgtcctccaggagagcgcctgagtgcccccagcacacccacccgtccacctccccctgctct

SEQ ID NO: 472154 - DNA, 122 bp, Homo sapiens
tgaggctgagggagcgcggggacaccaagtcattgtaccggaattctgaaaggcaagcggcgaaagccgtgaggagggcgggcctgggagggcgcgggcaacttggaactccagatgctgcg

SEQ ID NO: 472155 - DNA, 122 bp, Homo sapiens
tgggcactgtggagcagggggtggcgcttgtcgaggaggcttgggccgcacaggatcccacggagggggtgggaggctcaggcatggcgggctgcaggtcccgagccctgccccacaggaag

SEQ ID NO: 472156 - DNA, 122 bp, Homo sapiens
ggcttcaccggcctcgccccaaacttaaaaacacctgagcaggaggttgaacgattccctcggaatctctcctcttcactaacccagcgaaccaccccaaatgcccctatcctcccccaaat

SEQ ID NO: 472157 - DNA, 122 bp, Homo sapiens
attgcattttatggtggtgattgaacataatgtactttggtccttctccattgtatgcctcgtgtattatgtgtctcataacgtctgtcccgtcctatgctatgtgtgcatttgaatgttgg

SEQ ID NO: 472158 - DNA, 122 bp, Homo sapiens
aagctggcacagaagaccctgactcagacagtctagcttcagacagcccgtgctcttccccgctgcacaaactgcctctcactgtctgtgataaatgctcctattaatagaaaatgagttca

SEQ ID NO: 472159 - DNA, 122 bp, Homo sapiens
acctctggcgcgcttgaacttccggcccttggagcggacgtaggctttggtgtggctgtgcggcgttcctggggccttgccgaaatgccggtacacctcttggcccttgagagaaccaaaga

SEQ ID NO: 472160 - DNA, 122 bp, Homo sapiens
aaaggtgccagggacccacagcagtgcaaggcagcgtgtcacacctacgcatgagcaagccgggcgctgatggccaccgagcagccacgttttccattcaaatccgcacttgctaaggatgc

SEQ ID NO: 472161 - DNA, 122 bp, Homo sapiens
aaagaaatagagaattcccatacacaggcatacgtgacgttatgaggccggtggaggcctcgctcggtgttgccctgtatggttgagctgtggtttaaggtgaactctggagtgtgggctgc

SEQ ID NO: 472162 - DNA, 122 bp, Homo sapiens
tcacttggcttcggttcccttctgcaaataactgaatgctgttgttcattactgagaggacgctttatttccttgtgcaaaagagcatttcaagtcaaggtagtcagtcacacttgggcgag

SEQ ID NO: 472163 - DNA, 122 bp, Homo sapiens
tggccactgctgcctgagcacggacagtgtctgggttggaattgcagagcgccagccagccgcgcctctcctatgccgagatggccgaggactacccgcggtaccccgacatccacgacctg

SEQ ID NO: 472164 - DNA, 122 bp, Homo sapiens
ggccgcgcaagtagggcagcgatcgcagccttgcatcggtggctgctcggcgtgtccgggcgccatctgtcgccggttgcagggtcgggttctcttttgtgtaaatcaagggtccaaggctt

SEQ ID NO: 472165 - DNA, 122 bp, Homo sapiens
tcttcatcatctagtgtactgaacgagatgtactgaacgagggctgcagagctgcagcaccggcaggagtaggcgctcggtaggacggggcctgcacaacctccccggtagtcagcagagcg

SEQ ID NO: 472166 - DNA, 122 bp, Homo sapiens
ccgcgcccagcagcgactctttctgagagcgctgccagaggggccgcgggagccgcagagcgcgcgtgggcgcggcgcccgcgagcccccgggagggccgagtgcatcgctggagcgatccc

SEQ ID NO: 472167 - DNA, 122 bp, Homo sapiens
cggggaatgaatgaatgaggcttacccttgacagagcccaggctctggtgggtacgagggcggccgggggtggggagcaccaggagccaaccagctcccgcgcagggccctggaggcggcaa

SEQ ID NO: 472168 - DNA, 122 bp, Homo sapiens
ttacatgtaaaatttaagtatatgtatatttttccaggggaaggttctatagctttccttcgatattcacaggattctgtggctcagtggttgaaaactgttgccatggtccgggtccagtg

SEQ ID NO: 472169 - DNA, 122 bp, Homo sapiens
tacacatagcataacgataagtatgtcttttcctgggtcttggcgttctaaacgcagctgcgacaatatcttgccttcatagagcgtgcactttgtgcaaaaccttcatgaatccttgcatg

SEQ ID NO: 472170 - DNA, 122 bp, Homo sapiens
gtttgatgggcgctcaggtcctccttgccagcgtccatggtccatttgctccacagagcccgtctgcttcagaagccgtcctcctggcttctaacgaagatgtaaagtgaagcagcagcaaa

SEQ ID NO: 472171 - DNA, 122 bp, Homo sapiens
aggttgtgaacagcatggagttccaaagaaatctctttgggagttggagggctttgtccccgtaggaaagcatgcaggaggtgctgagggatgttgtcagcaatgacctcacaatgttccca

SEQ ID NO: 472172 - DNA, 122 bp, Homo sapiens
agggaatgataggggatgggcagagtcaatgcgaggcactgctgagagagtgggggtgggcgaccggatgttgatattttcacaccctcgggagaggtaactgagaaaagtgtaaggcgagg

SEQ ID NO: 472173 - DNA, 122 bp, Homo sapiens
gtcatgcggcctcaaaggtctttggggcccccagaagcgctgactgatgaatgtagtggccgtacccggggaggctgaggcaggagttcaggctgcgggacacccctgcagcctggcttcgc

SEQ ID NO: 472174 - DNA, 122 bp, Homo sapiens
ctagcagggagatttctcttcctgccctcacttctttcaccttgaacttggataagaactcgtgtctcctgagtgaggtagcgcctcccatctgctccccaattcttgatctctcccacccc

SEQ ID NO: 472175 - DNA, 122 bp, Homo sapiens
cttctctccctgtgtaagcctgtctcggtgtttaggctgaactacagccaccccctctcccgggggtgtgcaggccagggactggccaggcagccatggctgacgagaagaccttccggatc

SEQ ID NO: 472176 - DNA, 122 bp, Homo sapiens
accacaagactgagtttatctatctgtttcatctctttgatttgtatttgtgtggttttacgtaggaggcagtgatatggcgagtataaggtagaagaaggcataactgtgagagtggatat

SEQ ID NO: 472177 - DNA, 122 bp, Homo sapiens
cgagagtggtttctgcttcctcttcttttcagagcccaccccagtcctgggcacacagcacgtttctcaaagtaattgttgaatgaagtggtcagcaaagtttgcagccttcccttcactgc

SEQ ID NO: 472178 - DNA, 122 bp, Homo sapiens
gtgaatctgagcccgccccccggcggctgcagggaggacccggaggtggctcagcctccgcggactccgggaaggcggtgcccaccgccccgcccccactacccgccgctccctccccgccc

SEQ ID NO: 472179 - DNA, 122 bp, Homo sapiens
tccggcctccaatcaataaactttcacttctccaaccttacgcaatgcccttctcacccccgtcaagtcctgtaatactgccccagcttctgtgagtacatgttggctaggtcctgcaactt

SEQ ID NO: 472180 - DNA, 122 bp, Homo sapiens
cggccgggctcgggtttctcctggtgggggctgggaccggctcttggggcccccatagtacggagggagaaactgaggcccggaggggtgaagggccgggtcctagggcaccttggctggcc

SEQ ID NO: 472181 - DNA, 122 bp, Homo sapiens
acagtgtggccagctcatcccactgacctcttgctttgtttattagagaaaaaaagcaaacgcctgactaccaccaaaaaaccctaccaccaaggtcccagacaggctgaacccataacctc

SEQ ID NO: 472182 - DNA, 122 bp, Homo sapiens
ggagcggctgccgggcacgggcagggagcccggaccgaaagctcagctccaggatggctgcgcttgggccccggcgttccctgcccggaaccggaggagtggtttgacccggggcgagacca

SEQ ID NO: 472183 - DNA, 122 bp, Homo sapiens
actcagtttgaaagcacctaagcaatcctcatattttaacttttacaataactgattattcgaatgtgtatcaatagcattcctgaatttttcctcctaaaaattagtaaataaaatgtgta

SEQ ID NO: 472184 - DNA, 122 bp, Homo sapiens
taggctacagcagaagcactgaatcccagattttaccccagtgaagtaaaacccagcggccgccatctcctgtggtatccatgagctgtacggctcataagtcacaaaagtctttaaccttt

SEQ ID NO: 472185 - DNA, 122 bp, Homo sapiens
ctaaacatgtccatttaaaaataaattctttgtcttgttagaacccaggcgtggttgaggcgagcatagcacagagctggctgagtttcatgcatcatgcactgaaggggtttcagagacag

SEQ ID NO: 472186 - DNA, 122 bp, Homo sapiens
gaagcagctgctagagcaacccctcacccacccaccggaacttccctccaggccatgggacgttggtctcagccggaacttccgtccaggcagtgggaccttggcctcagccataagcatcc

SEQ ID NO: 472187 - DNA, 122 bp, Homo sapiens
gagactccacgttcacaagcagcgctgcctggaactgtggactagaatgtcaggcacaaccggggtcagagggggaaggcaagaaagcaacttgaccttaaaatagcatgctgagagacacc

SEQ ID NO: 472188 - DNA, 122 bp, Homo sapiens
gaccatccgagggcttttattgcaagtgtcgagacacattgctggtgtttctccttagaacgtcctccaatctgctctgacttccgcccgcacccgcctgagtcctgccccattccaagggt

SEQ ID NO: 472189 - DNA, 122 bp, Homo sapiens
ccatagttaataataataatgtatatctcaaaatagctaaatgaattgattttaaatattcgcatcacaaagaaatgattggtatttgaggtgatagatgtgctaattagcctgatttgatc

SEQ ID NO: 472190 - DNA, 122 bp, Homo sapiens
gtggagacagcgaagctcgggcctctggccttttacaaggtgcagtggtggcggcagtggcggcttgggcaatggggagcgggccccttcgggctctgtgtctctcattttccctgtctccc

SEQ ID NO: 472191 - DNA, 122 bp, Homo sapiens
aagaggcctgagctggggcctggagctgtccccggagcctgctctgccccgcagaccctgcggtctccaggcccggtaggctttttcaggttccgcaggcctggccgaaccggccagatccc

SEQ ID NO: 472192 - DNA, 122 bp, Homo sapiens
gagaaagtggtgggacgagccagggctgacacatctgtgtgatccctggtgcagtaactccggtagatggatggacacgtggatggatagaaaggtgggtggatgcagcgacggatggatgg

SEQ ID NO: 472193 - DNA, 122 bp, Homo sapiens
ggctgcacgtcccgagccctgccctgcagggaggtggctgaggcccggccagaaatcgagcgcggcacgggcgggccggcactgttgggggacctggcgcaccctctgcagctgctggccaa

SEQ ID NO: 472194 - DNA, 122 bp, Homo sapiens
gtaccctgagaagtctttccttaccccaggcctctgtccaccctcacagtcatttccacgcgtcgtcctcgtcccatcagtcccatctgccacagctgcccactctgcttcccagggaacgg

SEQ ID NO: 472195 - DNA, 122 bp, Homo sapiens
atgaactgggcgccttcatcccagcgccgtgtccgggtgcgcgccgaaaaggccgaattccggtttcttgcagccagcaggggggccttggctttccatcaagattttttcccaggaggata

SEQ ID NO: 472196 - DNA, 122 bp, Homo sapiens
gatgcgctgtttcagttctacagacgatggaagagccaaaaggctgcacagggaacgagacgggccccagagcttagtaacacccgaaatccccatggccccttgggagggctgggagggag

SEQ ID NO: 472197 - DNA, 122 bp, Homo sapiens
cagacattcagaggggcctggtgctgcggtgaggctgccgtgggtccctggccacagctgcgcgtccaactctcggggctggggtggggctgctgaggagcggctgggcaggagaaggcagg

SEQ ID NO: 472198 - DNA, 122 bp, Homo sapiens
gctggacgtggtggcgggcacctgtaatcccagctactcaggaggctgagggatgagaatcgcttcaacccggaaggcagaggttgcagtgagctgatactgctccactgcactccagcctg

SEQ ID NO: 472199 - DNA, 122 bp, Homo sapiens
taatcctgtggattttcattcttgtgggcctcatgccccttaagtctgagggctgggtcccgctgggtcccacccagactcagtccacacagctatctctcagctgtcctactagtaacgac

SEQ ID NO: 472200 - DNA, 122 bp, Homo sapiens
tgagactgagactgagactgacagaagggctactcacctcagtgcagtcaaatttactaacgcacagtactacaaacaaataaaatggtggttgtttcaagcactaaactttggtatgatat

SEQ ID NO: 472201 - DNA, 122 bp, Homo sapiens
agtggaggagaaggaatgagggccccgggctccttccagtcggggctgcctgctcatgtgcggcgcctccggggctgcttgtataagaaggtgcagcagcccggctggaacttccctcccag

SEQ ID NO: 472202 - DNA, 122 bp, Homo sapiens
agtacccaaataaccacccaaggagcccaggaggcgccattgaggaggtgatgctcgagtcggggttggaagaattaaggaattatctgagtggaaaagggaggtggccggcctgatgaggg

SEQ ID NO: 472203 - DNA, 122 bp, Homo sapiens
tcagagcaaaagacttcctttaaatttgcccctttgtggcaggtaataatgacatcgcctcgcttggatgattaataaccagttgttatgaggactgtgcctactgacgcaaatacagcatt

SEQ ID NO: 472204 - DNA, 122 bp, Homo sapiens
tttcgccattgagtagataaaattgctcctaggaaatatgtgagcatcaatataaaataccgatggtgtttttcaataacagtgtctgaagctctctaatttgtaaaaaatactaacatttt

SEQ ID NO: 472205 - DNA, 122 bp, Homo sapiens
tttgccccattcatttatgaggaactctgaggaggcccaagtgagttcagggacgcagagcggcttaaaggcccagcctgagccagaagtctggcagtcccattgcactcactgcttctggg

SEQ ID NO: 472206 - DNA, 122 bp, Homo sapiens
aggccagtggccgaggctggtctcgcgggcgctcgctccaggagtggcgcgtcccctcagcgccctgtgcttcctcgcagggatcgactacaagaccaccaccatcctgctggacggccggc

SEQ ID NO: 472207 - DNA, 122 bp, Homo sapiens
gaatggtgcagccttgggcttggagcatctggggagcagcgagggggccagcacagcctgcgaggggaaggaagggtctggttgaaatgggagggtggacaccgagaggagattgcagttgt

SEQ ID NO: 472208 - DNA, 122 bp, Homo sapiens
ccctccagcccagtccctgctctcttttccccgcaggtcctgcgtgggagcaggctgagacgtgcgtggcagggatgcccgggcctcgggcccctccgtcctcacccctcactcacttccgt

SEQ ID NO: 472209 - DNA, 122 bp, Homo sapiens
tgcagcaaggatgagccctttctgccaatggaatgtagctctgatttctctatcattagccgctctgtctctgagatactaatgttttgatgagacagaagaaaggactctcttctgcttga

SEQ ID NO: 472210 - DNA, 122 bp, Homo sapiens
agcctgctgggatgacgtcatgtggcccgtgtcgccacgtgcttccaggtgacccgctggcgaactcagcagcagcaaagtggggctcacagaaaaatgaggggccactgttaatataactg

SEQ ID NO: 472211 - DNA, 122 bp, Homo sapiens
ggttttaaaataaaactgtgcaacgtgacctgcaaatgtcattcattccagaaaactgaacgcattcaatctgaccatgaatttactcatttttaaattgaatattccctataaatttcaag

SEQ ID NO: 472212 - DNA, 122 bp, Homo sapiens
tctgggttggagggggcgggcgaggtttcagcgaagggtagtgctgttctgggggacttccgggtaaggtcccgcccggccgcggagtctctgtttatttcggctccgacaattacgctgag

SEQ ID NO: 472213 - DNA, 122 bp, Homo sapiens
tgatccaggatgcataatgctctatttcacaatgctattttattgaagtttcttcaatctcgattttgtgatcctaaatattaactatcactcccagttcttaagatgcaaatacttcctgg

SEQ ID NO: 472214 - DNA, 122 bp, Homo sapiens
gcccttggagggctatgtgcccgagggcctggagctggctgccctgcggccagagagccccgcgccagaggaacaggagtgccacaaccacagccccgatggggactccagctctgactacg

SEQ ID NO: 472215 - DNA, 122 bp, Homo sapiens
tgtgactatagcaaaacaccttaggctctcaggacccagaaggtgccctcctggaggtgccgaaagaaccttccaatccatacccatctctccttctttcttctcctggcttcatccaaaaa

SEQ ID NO: 472216 - DNA, 122 bp, Homo sapiens
tttccttccccggttctgccgtgaatgctcccaagtcctagagcaccggaactccccgcgcgccttggctcctgggccccagctccgtgcagtcctggactggggctccaggtccaccaggg

SEQ ID NO: 472217 - DNA, 122 bp, Homo sapiens
gccagcgttcctggaagactcctgggtcctgacgaaagacaagttgatgagtgagttggtcgccattaaagtgaggctcccggcccggagcagcgcagagaccaggacgcgcagcctcgcct

SEQ ID NO: 472218 - DNA, 122 bp, Homo sapiens
ccttttaagtcaaagaggagtagtctgaaagcctgaactccctaccaccctgagggggtgcgggtgcggcggggccggctgggggcttcccccaccccctgctcctgcgccctccccccgct

SEQ ID NO: 472219 - DNA, 122 bp, Homo sapiens
gggactgtaggtgcaagggcaaggcggtccggcatcacgggcccggctcacctcgcccagcgcctgaaggctcttcacggcgcccaccaccgcctggtgctccatgcccagctcagccgcca

SEQ ID NO: 472220 - DNA, 122 bp, Homo sapiens
catgaaggaaggtttagaggtgaacgtccactgcggaggtcggagaagcactcaggtcagcgggcagagcggctagtcggtgggccgagctctctgctacccccgcaggagtgtcccgacgc

SEQ ID NO: 472221 - DNA, 122 bp, Homo sapiens
tcaaaatacaaaaatgagccaggcgcgtgcctgtattcccagctactcaggaggtcgaggcgggagactcgtatgaacctgggaggcggacgttgcagtgagccaagattgcgccactgcac

SEQ ID NO: 472222 - DNA, 122 bp, Homo sapiens
ccgtacagatggggcagcaaaggcccagagaggaaggaactgctcaaggtgcacagcggacggacagagctgggacccgaccagctctacacggctctttacaggcccccagcgccctcacc

SEQ ID NO: 472223 - DNA, 122 bp, Homo sapiens
ttggtggcccggaatctctctgggatttctggagttccctggagcctccaactccagaatcgcgcctcttgcggcccgggaggtccgcgggcgaggacccggtctcctctcggtgacctgtt

SEQ ID NO: 472224 - DNA, 122 bp, Homo sapiens
ttcaggtcccgctgttttgttattttgctaaagcatgtcccgtctgtaagtttgccccctcgggtcactttcttcaccttatcagcagggcccatgattccttctgctttccaacaagacgc

SEQ ID NO: 472225 - DNA, 122 bp, Homo sapiens
ctgcagcttcactcctgagccagcgagaccacgaacccaccagaaggaagaaactccgaacgcatctgaacctcagaaggaaccagttcccgacacgccacctttcagaactgtaacactca

SEQ ID NO: 472226 - DNA, 122 bp, Homo sapiens
ccctcctccatgctgcggcaaagtcaaacgcaagcgcctcccaccccagagacctttggtcgcagcctggagatcagctcagacaagaaaacaaccagggaaggcacacaggtaagtgaagg

SEQ ID NO: 472227 - DNA, 122 bp, Homo sapiens
gttgtatttggggttgaggactttgttctgtttaccttcccttatttctctcctcaaaatcgacagtttccttctctcacctgggtacttctaggctttgggggctccttcctccagtggtt

SEQ ID NO: 472228 - DNA, 122 bp, Homo sapiens
gatgttcagtaggctggtccctggagctaaggctggggaaaaagcaaacgatttatgagacgaatgtaataagcttagatgaagtcaatgtgagaccaggctatcaaagaaaactagtgtct

SEQ ID NO: 472229 - DNA, 122 bp, Homo sapiens
gcctacccttccagccgtcagccgccgccgccgtcgccgtgacccctgcgttgcgcccggcgctgccacccgaacttagccccctcgatgccaatttcaaatagggaaggaaaagggaaaag

SEQ ID NO: 472230 - DNA, 122 bp, Homo sapiens
atgtgaccacttgttttgtttgcttagttaagctacatgtttgtatgcaacctttagctccgcagtcgcgaaattccccgagcgcggaaactcaagcgattcacgtcttgcgcgaccccctt

SEQ ID NO: 472231 - DNA, 122 bp, Homo sapiens
cgcagcggcagggcggggcttacctggtctccaccagcatcttgcctgccttcccgtaggcgtggaatgctagtgcaaaagaaaaaggaacactcaatccaacagcgtgagaagctcgtcca

SEQ ID NO: 472232 - DNA, 122 bp, Homo sapiens
tcagaccctccgtggcaccctggtctcctgcactgagctgtggtgagcacattcaggttccgctggatgcatgcatggagaggggcttgcccttggttgggtcagtgatgagaaccttctat

SEQ ID NO: 472233 - DNA, 122 bp, Homo sapiens
cctcagcgccgaggccaatttcatggcatgccgggaacggtagttctcggcgcctgaaagcgcggcgcagtgatgatgggggcccggggttggtctgacagcagcagctccgtggggcgccg

SEQ ID NO: 472234 - DNA, 122 bp, Homo sapiens
aatttgtccctccaggaagtgcagccaggaaagccggtgcttggagcctggctcacccgccgcggagctggggacctcgtgcacgtcaccgaggctctccggggctgtttcctaatctatga

SEQ ID NO: 472235 - DNA, 122 bp, Homo sapiens
caccccaggaatgatgatacgttatagcatttctctgctctgtaagagaggcaccagggtcgtgtgctgggtctggggtttgtccattccacatccggtgctgctgttgactctggtgtcgg

SEQ ID NO: 472236 - DNA, 122 bp, Homo sapiens
gataatgcaaagtgctatgttcttggctgttcaacacgactgcagacccatggacaagagcgcaggcagtggccacaagagcgaggagaagcgagaaaagatgaaacggaccctgtgagtat

SEQ ID NO: 472237 - DNA, 122 bp, Homo sapiens
tgttaggtgagccaactgagtaggaaaacggtgtgggcgaggagggggacccagtcgagccgctcacgctggaaagcagctctctgtccttcgacattggtgcgacccttccccaaggagca

SEQ ID NO: 472238 - DNA, 122 bp, Homo sapiens
aacgataaataaaaagggggaacttttcattgcgccaggggtggcacctggcgtgtgttgcgggggtgattgcgctggctgccggggggtgggcttctcatatgcattctggccggccagct

SEQ ID NO: 472239 - DNA, 122 bp, Homo sapiens
actaactcaacagttcgcaaaacttggaagcgacctgccccgcggagcgccccccggccccgctgcccccaccaaggccgcagcttcgctcacctgccaggagttcgcgggggcctgcgcgc

SEQ ID NO: 472240 - DNA, 122 bp, Homo sapiens
agcaaacttcaagctgtgaagcatttcaactgcaccttacatatatactgaactgtgtttcgatttcaattgagaacaacgatataccttgtcctgaaaagacatgatgctgttttccattc

SEQ ID NO: 472241 - DNA, 122 bp, Homo sapiens
ttgtatattactaagccccaagagacatttcctgtgctagagtccaatatttgagtctctcgtgcaaatgagactattctttgtggtacaattccacctatcatatgtgaaaactgcagtaa

SEQ ID NO: 472242 - DNA, 122 bp, Homo sapiens
tctattctaataaaatggagggtctcctttaagaaatcaggcttaaaattgttaagtcatcgtgtgtcactctcccagagagggcaagtcttagaattaaaaacagctggaagaagggggca

SEQ ID NO: 472243 - DNA, 122 bp, Homo sapiens
tcacctcccgcagcggaggagactgggcccgaggcgcagcccctcgagttgcaggagagccgggacccaaaaggcttcccaccgtgtccggacgtcgcagggccgaggtctccctaatccgg

SEQ ID NO: 472244 - DNA, 122 bp, Homo sapiens
tttggccttgacctccggtgactcccctgggacaagttgtcctattgacagccctgcccccgcctcccctgacctgtcatggttttccctggacctgggatggggaggaggaagatgcagag

SEQ ID NO: 472245 - DNA, 122 bp, Homo sapiens
ccggctctccgtccccgcggtcttccccgcccgccatggctctgcggccggctcacgcagcgcgcctccgagtcccggccccagtgcagcttctactcaaagcacactgtagctccgcggtt

SEQ ID NO: 472246 - DNA, 122 bp, Homo sapiens
ctccctgctccttccgggtttccatgcctgtttccacttagggtttcaaaataacaggctcggccgccacgcacaaggctgactgcaggctcgcccccagccttggcattgccccaagccca

SEQ ID NO: 472247 - DNA, 122 bp, Homo sapiens
agcttggcgcccacagacgtgcggcttgggtgcaaatcctgtttctctgggcagaggccacgcggggacggaggaggcagagaggacgggctgtgatggagaaacgggagaggagccggcca

SEQ ID NO: 472248 - DNA, 122 bp, Homo sapiens
acggggcgtcaatacgcacgcgtactttgtgtcccaggtagctcgtctcttagccatgtacgcctctgcattccggtcactgggagcggggccgtgggggctgcacatgcgcactgcgagtc

SEQ ID NO: 472249 - DNA, 122 bp, Homo sapiens
tatggtgctatgcactgtgtattcattggtaaacaaaacgtattccctgtcttatggagtcgactgtttagtgtggaggcagtgaagaaacaaaacatagatcatttaaaaacatattgagt

SEQ ID NO: 472250 - DNA, 122 bp, Homo sapiens
agacccccctggccatcgccgcctactgggccctccgctttaaggagcaggagtacagcacggagcaccacctggtctgccgcatgctgcttgactacaaagccgaagtcaatgcccgagat

SEQ ID NO: 472251 - DNA, 122 bp, Homo sapiens
ctgcccctccagatgtggccaggcaccctttgtccccaggtggggcaatatgtgcacacacggggatgaacacacataggtacatatgtgaatccccatgtgacagtgacacgctgccatgg

SEQ ID NO: 472252 - DNA, 122 bp, Homo sapiens
atcattagcacagaacgagaagcattgcagatgatagagccttttttggtcaccaagtgacgcagccagtacactgttgactagcagtgatggtagcaggccttcttgccttggtcctgatc

SEQ ID NO: 472253 - DNA, 122 bp, Homo sapiens
gcggggcgccccgagctcggaccggagaaaagtccttgggttccgcggcttttcaagcagcggcgcgctcgcggccggggaaggcgaggtcgccgcaatgcgctacgaggggtctcggtccc

SEQ ID NO: 472254 - DNA, 122 bp, Homo sapiens
ccggctgcagcaggagcagggttgggccatcggtgttgtcgcgtatgatgacgtcatgcccgacgcgtttctcgccggggcaagagcgcgaccggcggtcagcacggaggggcggggcctgg

SEQ ID NO: 472255 - DNA, 122 bp, Homo sapiens
catgagccgcccgcctcggcctcccaaagtgctgggattacaggcgtgagccaccgcacccggcccggattttctttgagtacctgtttttaattcattgggagtatatatacgttggagtg

SEQ ID NO: 472256 - DNA, 122 bp, Homo sapiens
ccccaaccggcccttcctgccctttgctatgcagagccatcaagagcctgcagtggatggcgggcggcaccttcacgggggaggccctgcagtacacgcgggaccagctgctgccgcccagc

SEQ ID NO: 472257 - DNA, 122 bp, Homo sapiens
gatgagccaaaggcttccctaagctagggtcccatagtcttccccaagctagggtcccagcgctgggtgggggacaggagaaaaggcctgaggcacgggggagaaaaggcagttgcagatag

SEQ ID NO: 472258 - DNA, 122 bp, Homo sapiens
tggccgtgtaggggacgtgggaatagtgtccgggcagagggcgcagcctgcaacaaggcgcggaggcaggaacaccacagcatggggagtcctcaggggacctggtttttctttcatagaag

SEQ ID NO: 472259 - DNA, 122 bp, Homo sapiens
ctgggaagggtggctgcagggggatgacggttaggcagcggaggttaggccagtcctgggcgtagagcctgctgtccacgggatgctggggagagggctgcccgccctgtccttctcagccc

SEQ ID NO: 472260 - DNA, 122 bp, Homo sapiens
attgcatggcaaaggctttgaaaagaaagctgagtcttttattttcctgtgaatcagctccgagcccctggaacaatgttgttcattctgcggatgctcagcaagcccttgctgactgtctt

SEQ ID NO: 472261 - DNA, 122 bp, Homo sapiens
gactgcccaggtgtggtcaccatgttcctctccgcggtcttctgtaagtggggctggagacgccggtaggggttacggcgagggttagggggccgtgacaggcagggccccggaatgatgcg

SEQ ID NO: 472262 - DNA, 122 bp, Homo sapiens
cgtcgcccggcagccgcggtgagtgacggcccgcgtatccgctgccggggctgtggcgggcgtgaggggttggccctaccctcggcccccgaccgcccacatccgccggttaccctcgaggc

SEQ ID NO: 472263 - DNA, 122 bp, Homo sapiens
ttcaaaactgaaaagtcccttagcagttgtcccatgctttgaattgctttttaagcattacggtgaggtgagtgtaagcctgaggatcttactttctggtataccatttattacaacagatt

SEQ ID NO: 472264 - DNA, 122 bp, Homo sapiens
cacggagtgcctgtatgtggccagctttggtgattcagcctgctgaaggtcaaggacccacgggagaatctgattgaatctcatgagaggcatgactcgctcaccatcaacatgccgagagg

SEQ ID NO: 472265 - DNA, 122 bp, Homo sapiens
agtgggatgttacacatgaatacattccaacagaagctaattcagcgatgggctgcattccgctcacaccgcggtgattgattagatgctccttgaagatttgcataatctttcattgtaca

SEQ ID NO: 472266 - DNA, 122 bp, Homo sapiens
gcccctggcgcccccggagcccgagtacgccacgcccatcgtggagcggcacgtgctgcgcgcccacacgttctctgcgcagagcggctaccgcgtcccagggccccagcccggccacaaac

SEQ ID NO: 472267 - DNA, 122 bp, Homo sapiens
gccgctggactcctaggtaacgtcgcaggcggaaatgacgtaactcaatccgttctgtcccgccccattgccctcctagccccgccttctaggccccgcctttcctctattcgcgctctgac

SEQ ID NO: 472268 - DNA, 122 bp, Homo sapiens
tgtctgtatgaagtggcttctggggccccacgaagcaatgttcccccaaacagccccggacgagggtgtctataattcatcctgttataattaaccccggggttacggtattgcttctaaag

SEQ ID NO: 472269 - DNA, 122 bp, Homo sapiens
agccggcccgcgggcgacacgggcaggaggcccacagtgagtgcgtcgcctcaggaccagcgaccctgttcagcctaactcagaattgtgcgtgtgctggaaaatgccagataactccctaa

SEQ ID NO: 472270 - DNA, 122 bp, Homo sapiens
tccccttttccacagaatattgtctctctcttattttcccaccagggatgctcctttttgcgactcagacctaatgtacttgctctattttcccggggggtctaaactcaggaaccagaaga

SEQ ID NO: 472271 - DNA, 122 bp, Homo sapiens
cgcccgcgacaacaagaagacccgcattatcccgcgccacttgcagctggccatccgcaacgacgaggagctcaacaagctgctgggcaaagtaaccatcgctcagggtggtgtcctgccca

SEQ ID NO: 472272 - DNA, 122 bp, Homo sapiens
gcatccgagccccttattctgaagcaccagcaggtattaacttagaaagccgagtagcagcgactctgtgggccccagcgtcaggatgcttcccctccggctgctcgttgccagcgctgttg

SEQ ID NO: 472273 - DNA, 122 bp, Homo sapiens
ggcttcaaccgccacaatgctgccagcagcgccaggcaaggggcttgggagcccggaccccgccccctgcggcccagcgcccccaggtgggtagtcgcgcattcggaggggcttgacgccga

SEQ ID NO: 472274 - DNA, 122 bp, Homo sapiens
agccacagcaggggtcaatgaagcaggcaggagctgttctccagagacccacagcagttgcgtctgcatgactcatttcctcccactggagccaactgggtgactactgggcttatcaaacc

SEQ ID NO: 472275 - DNA, 122 bp, Homo sapiens
cctcagggagcgagagagctgacaagggcatgcacgattaattgcacactcgcacacccacggtctcagcggggcttgagaacgtgacccagtgtgagtaaagccagaagaaatgcccattc

SEQ ID NO: 472276 - DNA, 122 bp, Homo sapiens
cctcccagatggggacagagtgctactggtactggtgggaggggtaggtgctgtgtccgtcgtactcatcggtggtgaggcagcgcagcatgaaatggcccaggtcatgtttggagatgacc

SEQ ID NO: 472277 - DNA, 122 bp, Homo sapiens
acctcctcttgaagttggtttccgatccctggcaagcctgtgctctgcagccttgagtaacggccacaggccgattctcggcaattaaaaataatattggccctgatagagaactcttgggt

SEQ ID NO: 472278 - DNA, 122 bp, Homo sapiens
atgtaagacgagttaacatggtttggtattcaatttttggtagttcaccgttggagtggccgcctgtgttggttaattgcctttatccaaaggaaaaataaaacgttatctctgtgacaaac

SEQ ID NO: 472279 - DNA, 122 bp, Homo sapiens
gaagcctctttggggggcaggaaagaggcagtttatgggttccactttagtaaggaaacacggacaaagatcatagtggttgtgagcagtcaaccaggtcagcccctgtgctttgtgggcct

SEQ ID NO: 472280 - DNA, 122 bp, Homo sapiens
caaagacaattcctcatcttaaggatgcttattatcataatgctttttataattcctaatcggacgttccttccacctctccttactccctaaaacacaccatgctgtctgaaattcatatc

SEQ ID NO: 472281 - DNA, 122 bp, Homo sapiens
cctgggttggaagcaacttggggagcccattgtccctctttgagttctctatgtcagtgtcgtgatttgcttgggccacgctatccggtatggagtgggtttttaataaatatttgccgaat

SEQ ID NO: 472282 - DNA, 122 bp, Homo sapiens
aggtttataaatttataagtttataaatcaacttgggtaaagtgtaaataaacttgcactcgtggtttctctgaagtctcctgagctaactttgcataaaggtgttattctgtacttcgagg

SEQ ID NO: 472283 - DNA, 122 bp, Homo sapiens
accttctggttaggcttcttgccacaacagaacagcaccataaccatggctttcttctcccgactgaatctccaggagggcctccaaaccttctttgttttgcaatggatcccagtctatat

SEQ ID NO: 472284 - DNA, 122 bp, Homo sapiens
gaacccagactcgccccgccccagagactgcgcctgcgcgggcacgagacaacctctccgcgatgactgtgagtggtccagggacccccgagccccggccggccacccccggggtgcgtacc

SEQ ID NO: 472285 - DNA, 122 bp, Homo sapiens
agccattgatttagtcaggctccatcggagtggcctcttcccgggttctgggagctggtgcgttgcctgctcttgaaaagtagagagagacagtcacagggcgcgcctggcgtttctgagta

SEQ ID NO: 472286 - DNA, 122 bp, Homo sapiens
gctccacatacgcccgctcttttaacgtgtagatgatctctttagccaccgggcaggtgacgtcatggccacactctctgaccacatttagatattttcctgaaaacacagaaattcaaaat

SEQ ID NO: 472287 - DNA, 122 bp, Homo sapiens
gtgccaagcaactttacatcaattaacatttttttgttgtgtgggcaaagtaaatgagcccggctcctgtgctctctgtattggcatatacaacttgaaagtctctggatttgccaagccaa

SEQ ID NO: 472288 - DNA, 122 bp, Homo sapiens
ccagtgacgcagcgtccggtgctcccacacggctcccgcctggagcgatggaggaccagacgaagccaggcgccccatgacaagcccagctcctgtcggcagcagcacatcccgtcctctgg

SEQ ID NO: 472289 - DNA, 122 bp, Homo sapiens
ccaccgcacccagcccaggtaaggagtttggaggtcattataggtgtacaaggaaaccggcggctgtttgtaagcaggcgagtgattcaatctgtgtatctggaagctcccggaggtcctgg

SEQ ID NO: 472290 - DNA, 122 bp, Homo sapiens
agctccgcctcccgggttcacgccattctcctgccttagcctccccagtagctgggactacgggcgcccaccaccacgcccggctaatttgtgttgtatttttaagtagagacagggtttca

SEQ ID NO: 472291 - DNA, 122 bp, Homo sapiens
caagtgggggcagcagcggggaccctgatggcttcttcaactccaaggtggcattgttcgcggctgtcggtgccggttgcgtcatcttcctgctcatcatcatcttcctgacggtcctacta

SEQ ID NO: 472292 - DNA, 122 bp, Homo sapiens
cccacgtgttcccccctttgtgacagggagcgtttccgggcctgcgggtcctggcgggggcggccgtgccccgcctgcgagtgcgcgcccgccgtgtccgacactgccccgggggccgcgcg

SEQ ID NO: 472293 - DNA, 122 bp, Homo sapiens
ctcattttttccccttctattctttgatcctacattgaaatcataatgctggacttgtgacgtcactctcaattgtttccagatggcttatcagactgatcaaaaagaaggtgaagccaata

SEQ ID NO: 472294 - DNA, 122 bp, Homo sapiens
ggtgggacctggtgttccccacagtggcagctccactcagggccaggcaggtaaacgggtcgaatcctgggtcttagggatgtggcctgggtttggacccaggtcctgccacttacagctct

SEQ ID NO: 472295 - DNA, 122 bp, Homo sapiens
tgtggcgagcagctttcaaacgaggcactccaggatttgtgtttacccggggagttctggcggaatctaggagatctgctatccggcataaacatcctggttccggagattatttcattgga

SEQ ID NO: 472296 - DNA, 122 bp, Homo sapiens
ctcctaacaactggcccaggatcccatgcctggaaccaggtctgagtggtccatacaccccgatggctgcgcctgctcacctccagagcagcaggcatgtgctctctcacagcaggcgttag

SEQ ID NO: 472297 - DNA, 122 bp, Homo sapiens
catggaagagatagttcagtataaagcatgaaatccaaaatcccatcacaattaataacacgataatcttgtaaaatgagagcacaagtctgtcagatatcagatcttggggatataatcaa

SEQ ID NO: 472298 - DNA, 122 bp, Homo sapiens
atcctggaagaagcaggagggagggtggctttgctgttgttgggacatggcaatctagaccggtagcagcgctcgctgacagcttgggaggaaacctgagatctgtgttttttaaattgatc

SEQ ID NO: 472299 - DNA, 122 bp, Homo sapiens
cgagcccccagccccctccctggtttcacgttcgcagtcacccactgtgcctgttagattcgattgcctttgcctttaattgatgacagctgggggggccgccatgccttccaccccatcag

SEQ ID NO: 472300 - DNA, 122 bp, Homo sapiens
acaaagttaataaacttcaatccacaaatattgactctgcatctactgcgctccaggctccgtgttctaaaacactattctttttttaaaaaaagataaggtggcagttattcgcccaggag

SEQ ID NO: 472301 - DNA, 122 bp, Homo sapiens
ttgttctcttgcttggcagagggggttaagattgcagatggaattaaggttgcttatcagcggactttaaaataaggtgacgatcttggagtgtgtgcttgggtaattacaaagtaattaca

SEQ ID NO: 472302 - DNA, 122 bp, Homo sapiens
aaagcacaacagccaaatacaaatattactgtgtttcgacaaacagagcacctcgggcagcgggtgggcgccgcctcacacactctttgaaacgttgagcttggtgagttcgttggcttctt

SEQ ID NO: 472303 - DNA, 122 bp, Homo sapiens
atgcgagaggtatcttgtcggcctgtgaggtcggacgaggagatgttgacgggggccccgcggtgcagccgcatactcactttccgctctctctccatgccggagacgggccggggggaggt

SEQ ID NO: 472304 - DNA, 122 bp, Homo sapiens
aactgcatctaaccctgacacacacaggcagccactcggtacgggggaccctgttacacacggcccactgtgggaagcctgaggccatgtgaaggggaccccctgggctctgtctctttgtc

SEQ ID NO: 472305 - DNA, 122 bp, Homo sapiens
ggccgctggccaattggcgcgctcgtctgaatggcgtttggcgcggagcagtgacggctgcgataatagcgaggcagcagtgcagctttcagagggtccgggctcagaggggttatgattcg

SEQ ID NO: 472306 - DNA, 122 bp, Homo sapiens
ctgatactgtcgtggggctgcgcgtgtgcgtcggtcgggtgcccacggtttgagtcctggcgcgccgcactctgtgcttctcgcagtgtctccttgggggtctccccacatgtggggctgcc

SEQ ID NO: 472307 - DNA, 122 bp, Homo sapiens
aactccgctgcctttgccgccaccatgcccaaaacggtgagtgccggaggtgggcgctgtcgaccccaatggctctggctgagcctcatagccctttgctgatggctgagggcttggccagc

SEQ ID NO: 472308 - DNA, 122 bp, Homo sapiens
gaggtggagggggcggggcctggctcccggcgcgcggcggtagggtcgcctccggcaaagcgagctgaaccctgaggggagccgctgaccagcagcatggaggaccccgccgcgcctgggac

SEQ ID NO: 472309 - DNA, 122 bp, Homo sapiens
ctccggtgttgctgatgccgctggtcccagaaccacacactgcgaacaactggcctagaacgttgtcattcctttctcctacagattttgaggcagccggtgggctccgaaacaaaacagag

SEQ ID NO: 472310 - DNA, 122 bp, Homo sapiens
tcacactacccgctctgtggggggcatcgtgtggtctggacttgctgagcagaaagtagccgctgccctcaacacctccctagagcatctgcgagccgaacacctggggcccacacctccgg

SEQ ID NO: 472311 - DNA, 122 bp, Homo sapiens
cgcccagagccccagtctgaggcttggcgccgggggtctgcgggcgaggggagctctctacgtgcgaggggctagcgggagccggcacaagagggtcgaggagccaggaaccccaaacgtcc

SEQ ID NO: 472312 - DNA, 122 bp, Homo sapiens
gccctggggccggccatagggtgccctctgctccgccttctgctcttgcagcacccgccccggggccacctcttggtgcctctgcccagcccatactacccagcactgctctcgcagcaccc

SEQ ID NO: 472313 - DNA, 122 bp, Homo sapiens
ggccctggcccatccagacctatatttctgccgtcctgcaggtgatcaatgttgatgggacgaagaggcggaccctcctggaggacaagctcccgcacatttttgggttcacgctgctgggg

SEQ ID NO: 472314 - DNA, 122 bp, Homo sapiens
acagcagtctccccttatccaaagtttccttttcctgagtttcagttagctatggtcaaccgcttggaaaatagttgaacacagtacaataagatattttgaggctgggagtggtggctcat

SEQ ID NO: 472315 - DNA, 122 bp, Homo sapiens
cgagagagagctgttaagggtagcggctctgcagccgctcacgtgggttgaatctcagctcgtctagttttcccatctaaaatgaaaagttactgttttaccacaaaataaattaatgtatg

SEQ ID NO: 472316 - DNA, 122 bp, Homo sapiens
tggagaagggaggcgggaagcaaagctggatccaggctgggggaaacactgaaggccaggcgggaaggaggctgagggtggcagtccaggggtactttttttgttcccttgtggtacaggtt

SEQ ID NO: 472317 - DNA, 122 bp, Homo sapiens
tactgagcttcccatgaggatgctggatccccaatcctaaccatgcagacgtctgagggtcgccgccattaacgggaatgatatggcccttcctcccccactccctcctctcttctcccctt

SEQ ID NO: 472318 - DNA, 122 bp, Homo sapiens
ggcggggccgagccccgatttcctgccgccgcagccgccgccgccgcctcggttccgcgtcgccctgcccagcggaggccacgcccccgcatcagaccacgcccccgtagcccggaagcctt

SEQ ID NO: 472319 - DNA, 122 bp, Homo sapiens
tgcggcacctggaagtctccccactggggtgagcaccgcccggagaacagttattcacctcggcgtgcctgaccttcaccttcccgaagaacttttacattccagttgagctcccagcaata

SEQ ID NO: 472320 - DNA, 122 bp, Homo sapiens
ttggggtgtcctccctgcttgcagagagcaggaccactgggccttcctccctgtgtgagccggacggggagggcagccgaacgcgcgagcttggcgctcctctctctcctcattaaggtgag

SEQ ID NO: 472321 - DNA, 122 bp, Homo sapiens
taaagcataaggccgccccctctggtgagcaagtgggacctgctgcctggcaccccaagtcgtgcacaccccagatgctaagctctcaggagttcagcctgaaacctgaagcttctccccga

SEQ ID NO: 472322 - DNA, 122 bp, Homo sapiens
tcttcctccgagcctcacaggatcttctggtaggaggagctggttttctttcatgtcatacgtttctcatgccccacccaggaagctggagcctccttctctgctcatccagataaatgatc

SEQ ID NO: 472323 - DNA, 122 bp, Homo sapiens
ttgccatattccgggaaacactgtgttttaaaacaagcctgtgtggcgagggatggaggccgggcagcaaacccgtgagcaagcttggaggcagatcacacacaagcccctcccgagagacc

SEQ ID NO: 472324 - DNA, 122 bp, Homo sapiens
cggaagctggagcgtgagcggccactgtccctgctccagctcctgggcagccgtacccaccggcagcccctgatcattgcggtcgtgctgcagctgagccagcagctctctggcatcaatgc

SEQ ID NO: 472325 - DNA, 122 bp, Homo sapiens
tattctggtagtcacagggtgacagccgagggagcggtaacctgtaatcagccggcggtgcgcagcccacacagcacgtggtccgcatcacaggctgcgttattgagtgagccagtctccag

SEQ ID NO: 472326 - DNA, 122 bp, Homo sapiens
aaccccctagatccctgccctgtcctgggagccctcggcgggacaagcagacaccgctcgcgatccaacgccagagaatcgaacgcttgccgactgccgccgcgaccctggcccggaatctc

SEQ ID NO: 472327 - DNA, 122 bp, Homo sapiens
ggagcggcttgggggcgggatctggccgccctcagggctccggcgccaagttcagagccacgcgcagtgctcttggccgggaggaggctgtgctgcaccagcacctcttgctccacatctcc

SEQ ID NO: 472328 - DNA, 122 bp, Homo sapiens
ggatttggggagggcctggaaattgtccggtttccttcaggagccagtggtggagtcgggcggagagtgaggggaggatggagtggaaggaggagagtgggaggctccacgtacatttcaag

SEQ ID NO: 472329 - DNA, 122 bp, Homo sapiens
tggagccactcggaaatccagcggtagagtttcgaaaacttccgaacggttcccggaatacgctctcggccctctaaccgaagagttccgaatattcccgagcgttgagcgaattttcggcg

SEQ ID NO: 472330 - DNA, 122 bp, Homo sapiens
cctcggacccggcggcgcgtacgtacccagcaacacgcagagcacatcgagggccacgtacggcagccgcgtcttgtcaaacatggtctctgcccgggctgcccggcaagggcgatggactg

SEQ ID NO: 472331 - DNA, 122 bp, Homo sapiens
aggcacagagtccctctctctgcccctcaatcggatctgggtggggttgggagtcccagacgaggttcccggcgcgatggggccgggatgggggtcctgggcacagtcagagtccccacccc

SEQ ID NO: 472332 - DNA, 122 bp, Homo sapiens
ggcatcactcccaagaggtagtgatgtgtgtgaaaatactttagctgtccagaagaggaccggtgtctaccaaaggtagaattttcaccttgaactaaacactgccaattatgcacatgtga

SEQ ID NO: 472333 - DNA, 122 bp, Homo sapiens
ctcagcatccttccccctgactagtggcccaaacacagcacgaagctgaggtgggtggaacgctgtccaaaacagcgctctgtgatgagccaccgacagacttgctcgcctctgggaacgaa

SEQ ID NO: 472334 - DNA, 122 bp, Homo sapiens
gctcctggttgctggcttggaggatgagtggttttctaactgaaaccaagcccctggcaacgtcctaatgattcaggctgggcctttctggactttaatcagtttctctgtctttctcaatc

SEQ ID NO: 472335 - DNA, 122 bp, Homo sapiens
aaaaaagattattagtctgggtctgtaaacagattacttcaggagaagtagggagggaagcgtgtgtggtaaggaagctgtttcaaagtgcacttttcaaactgttgccacatctgccggct

SEQ ID NO: 472336 - DNA, 122 bp, Homo sapiens
ccctcccgctgagccgcggccgagctggctccctgcaccctacccagcgtcgccgggacgcgatcacaccgagatggcaccgagcctccttcaaaggcttcggcttgttgaaagtggggcgg

SEQ ID NO: 472337 - DNA, 122 bp, Homo sapiens
gcagtctagataagtctagaaccttggactccaatccctgaatgctgcaccacctcctgacgataaacctcctgggtgatcatttccattgtcctggatctcagactgctaagtgtctacaa

SEQ ID NO: 472338 - DNA, 122 bp, Homo sapiens
attctgttttcacctctgcctgtgacagggaatgcaaaaatagcaagtggcccagttccacgaatccccgcctcctgccctccccgctcctgccgggttggatctctaagaatggaggttag

SEQ ID NO: 472339 - DNA, 122 bp, Homo sapiens
ggtgtgggttttggaggggttcctgaggaactggattccgagcttgctcgcaaggcgagacgttccgtggaggcggagtttacgatgtatccaagtctgacggccccagaaacgggtgtgca

SEQ ID NO: 472340 - DNA, 122 bp, Homo sapiens
gagttctgaatgcattgccttgcaaaccttgaccagccagaagtgaactgtagttcaattcgtataagcagtgccctcagtgattcacatttaccctgaagtctgaacaactttcgctgttt

SEQ ID NO: 472341 - DNA, 122 bp, Homo sapiens
cgaagagttgctgacgagcaggctgtttgtccaatgcaaggcgaaagtcgctgaagggggcggggcgaggcgagaggaggcgggcgtgtgttgtggaggaaagtgtgccatggcggagcctg

SEQ ID NO: 472342 - DNA, 122 bp, Homo sapiens
ctctcacctgcagacctaatcccctctcctttgctatagctgcctttgggctggcctatccgagctagtcctgtgtgtgcgtatgcgtagacatgcaaccctgtgttaatatgtgctcaatt

SEQ ID NO: 472343 - DNA, 122 bp, Homo sapiens
ttcatcagacctccctctatgtgtatgtcataagctgcaaggtagcaacagccaggagggcggaccaaacaggctttttcttctccctctttttgctacatattaatattgggaagttttcc

SEQ ID NO: 472344 - DNA, 122 bp, Homo sapiens
ccctcctggctcccttggctgtcttctgcttgcttagactacttgcagagttttaaggtacgaaatacactgctcgctcaatcctgggaatctaagctcagcttagggtgtaggagaaaact

SEQ ID NO: 472345 - DNA, 122 bp, Homo sapiens
ccacttgttcccagctccctggaagatcgtggttcctcccatgtgcgcacatgtgtatggcgtgtgtcatccgccctgctcctctttgctcgatgctgggaagaacagcctcgtgtcacacg

SEQ ID NO: 472346 - DNA, 122 bp, Homo sapiens
ttcctggacaggcacagaggcttctgcacctgcctcaggttctgggagggcactgccccacgtgtgtgtgtgtgtgtgtgtgtgtgtgtgtgtgtgtgtgtgtgtgtgtgtctgtgtgtgtg

SEQ ID NO: 472347 - DNA, 122 bp, Homo sapiens
ggccttagaatgagcactgctcggtgctgacctccgccaggcctggaatccccgctgctgcgcttcccgccgcagacagctcccggccggccccgcctcccggcatggccccgcctcccagc

SEQ ID NO: 472348 - DNA, 122 bp, Homo sapiens
cgagcctagttattagagcgcctcgagaggcagagtctggagttagcgcgtctcgaggggcggggctgggttgttagagcgtctcgaggggcagaacccggaggtagagtgtctcgaggggc

SEQ ID NO: 472349 - DNA, 122 bp, Homo sapiens
actttggccttcaacttggcgcgctccggagctagagctctgcggtagcgaatctgatcgcgtgtccatgcccgccccctgtcccgcctcctggcttttgaccccgtccttggtcccgcccc

SEQ ID NO: 472350 - DNA, 122 bp, Homo sapiens
cccgctgccactggggcggccactcgggcggcggtggagcgggagcgcgcagcaggtgagcgcggggcgcgggggagcgcggcgggcgggccggggatgcgcccggggtcgggggtgcccgt

SEQ ID NO: 472351 - DNA, 122 bp, Homo sapiens
gacctgcctggctttgacaaatgctaatggaagccttcctctgggtggagaaacaagctacgcagctcgagggaggcggcgacaaagtcttggttcgggcggttgtctgggacacagaagca

SEQ ID NO: 472352 - DNA, 122 bp, Homo sapiens
actggtccccgtagggggctgaagggaaaacagaagtcgtgaagcccaccttcctactcccgaacattaccttaagggcttcctcagagatcccacgctgccttgtatatgaagccaccttg

SEQ ID NO: 472353 - DNA, 122 bp, Homo sapiens
tccccagaagcgcagcacctgagcgtgtgacgtgcacatgtttgtgtggaaggcccgagacgccatccaaccccgtggctctcaaaccgggtctccagaaccacggcctcagcagcatctgc

SEQ ID NO: 472354 - DNA, 122 bp, Homo sapiens
acttctctgatttcctgggctgatttgcattcccctcctaggtactttggtagttgtccccggagtggatcatagccaataccaccctgtgttgttcccactaatttacctatccgcatgcc

SEQ ID NO: 472355 - DNA, 122 bp, Homo sapiens
tgtccctcagctggtaacagatatcgaaccgcagtccatctgtaatgtgggacgctgcttcgcactgaaaaggtgtgaactgtcgatgcacacggcaacttggatgcatctccaagaaatgg

SEQ ID NO: 472356 - DNA, 122 bp, Homo sapiens
ccttttgagtaaggggctgtctgcacttccattttgcagcggtccccgcaaattctgtaacgggcccggctcgtgtgtttgagaagctgaagggaggtctggaggtggtctcttactctctt

SEQ ID NO: 472357 - DNA, 122 bp, Homo sapiens
tctggagggctgggcccaggtctgactcatctctgtgtcccagcatcaccccgttccaggcggaacagggcttgcagaagtcctcaggagatgttcattgaatgagtgaatgtctttctcca

SEQ ID NO: 472358 - DNA, 122 bp, Homo sapiens
acccgcccctcaaaagtcgccctcaccctcgccgcgagcaccctcccacttcggtgcccgcgcccctctcaaggccgagccgacgccccctcaccacggctcggggagcagcagccccaggt

SEQ ID NO: 472359 - DNA, 122 bp, Homo sapiens
gggatggcggggcggggcggggcggctcggctcggcggggatccccacgcatgcgcaccgcgacagctcacgatgcccgcctactggcgccctagcaaccgggttgcgaaccatgttctatc

SEQ ID NO: 472360 - DNA, 122 bp, Homo sapiens
ctctccgagtgtctgctgggaaccagggatggttgtaggagctaaggatatagtactccacgaaagaacttcctgtcctcaaggagcttctattctactggagggtacagatagtaaattag

SEQ ID NO: 472361 - DNA, 122 bp, Homo sapiens
actgagagtggaaactttcctcccgggaaaggaagaaacccgactggagaaaggtattagcgggactgggaagtgggccctaaggatttttaaagatttttgaaataaaagattatttgttc

SEQ ID NO: 472362 - DNA, 122 bp, Homo sapiens
atttctaatagcaaagaacctgatgcacaactagggtaaccccctcctctgctgcccttgcggagactgaccaaaaatagctgcactcctttcagtgggccccatttgttatgaagaaataa

SEQ ID NO: 472363 - DNA, 122 bp, Homo sapiens
gagttccgcgtgggcgccacagaccgcggctccccggcgttgagcagcgaggcgctggtgcgcttgctggtgctggacgccaacgacaactcgcccttcgtgttgtacccgctgcagaacgg

SEQ ID NO: 472364 - DNA, 122 bp, Homo sapiens
cagtccccacgcccacacacccaaggctgccccatctggcgctgattatcctgctgctgccgccaccgctgctgctgctctgcaaaattcagctgctgcctctgtcttgaggaccccagcgc

SEQ ID NO: 472365 - DNA, 122 bp, Homo sapiens
aagtgactggcacctttctgagtaaggcactgcccacagcatggctgattgtgaaggtgccgccccatcccccaccattgtcccctgcatcttttatcactcccttcaacacagcaggatgc

SEQ ID NO: 472366 - DNA, 122 bp, Homo sapiens
ttgataaaactccagaatagaaagggtggctgtaaagtgtgtttatgcaggtggacctgacgtggcctcccaattttctgcagtccaagaacagtaagatgatgttttctatcccattatga

SEQ ID NO: 472367 - DNA, 122 bp, Homo sapiens
atggtgagctcctgctgtggggtggtgtcactgttctttccaggtgggtgcaggtgaacccggagtgggggtggggagaatccagcagggacttcagcgattgagtttagtgctggggtgca

SEQ ID NO: 472368 - DNA, 122 bp, Homo sapiens
accccttccccggtaccataaaatcccgggatatgagctggaagaggcatcacctgatcccggagacctttggagttaagaggcggcggaagcgagggcctgtggagtcggatcctcttcgg

SEQ ID NO: 472369 - DNA, 122 bp, Homo sapiens
ttttcctatcatcgcaaaactcatgatgctccggctgctcagttccctcctccttgtggccgttggtaagaccccaacctgtgtgtgtgctccctgggctgccctagattaggaatccttga

SEQ ID NO: 472370 - DNA, 122 bp, Homo sapiens
tttggcctgacgccaagagcccgccccgctccccaagccccgcactcttctcggcagtggcgcgtgagcacagcctttaaaagaccgtccgttaagaaaaagtgacactacgaaccctcctc

SEQ ID NO: 472371 - DNA, 122 bp, Homo sapiens
tttattgctctttattttaacaaaaacttttttcactgatttgtagactccatccattaacgtatgaaagtgaaatccatctctcaggaagatacagttatggttgaatgtatctgatgctg

SEQ ID NO: 472372 - DNA, 122 bp, Homo sapiens
cgtctcattcaactccccacgccccagccgaggggtactgtccttccagcccccgcgctacgcagctgctgcctggtcctcgcctgtccccgcggagcccccgccctggccaggctcactgc

SEQ ID NO: 472373 - DNA, 122 bp, Homo sapiens
tccgctcgccgcccaccccgcgcgcccggccgccgcacttccagactccgcggactccggcgctcggccgccaccctccgcctcaggccctcaaattgacacataagggagagcggcggccc

SEQ ID NO: 472374 - DNA, 122 bp, Homo sapiens
gcgctgcggggctaagtattaggccttcccagggagggggcgtgccaagcatcccagagccgggctgggaccgccaaaacgtcgtggcctggatcctctgggtctgagtgcctgatcccctg

SEQ ID NO: 472375 - DNA, 122 bp, Homo sapiens
ctgacgacgaaggcacaggggagaaggaacgctattagccaatccaagaaaacaatttatcggctgccgagaatgatgcaaccaatgcaatttcctccggctgaggcgtgggcgaagactac

SEQ ID NO: 472376 - DNA, 122 bp, Homo sapiens
taaagaatggggccaacagtaactacctagccaggaagttgtaaggattaaaagtgcaaccgtgagttaagagcttggtgatcaataaatggcagtctcattacgggaaagcaggcaccaag

SEQ ID NO: 472377 - DNA, 122 bp, Homo sapiens
atgtgctgagaaagaagaagtcaggaaaccctctgcaagtcaggatccaggagaagaattcgtaaaaactgctttggtaaacaccaaagcacacaggaggcagtattttactaaacaaatat

SEQ ID NO: 472378 - DNA, 122 bp, Homo sapiens
ggagcataataattcccttccataatctttagcattgttctttcagtcagacatgatatgcgcaacattcagacatgatatgcgcatcattcagacatgatatgcggggtcaagttcttaag

SEQ ID NO: 472379 - DNA, 122 bp, Homo sapiens
ctcaaaacgtgggcccagccatatatggcatccgttggaagcttgctagaaatgcaggatcggctgggcacaatggctcaaagtgctgtaatcccagcactttgggaggctgagatgggagg

SEQ ID NO: 472380 - DNA, 122 bp, Homo sapiens
ccctactgctgaaacccaatcctctgcagcagcgccggctcagcaccgccggctcagcaccgctccgcagcccctgcctgccacggtcagctacgtcccacctggtctgctgcggagtcccc

SEQ ID NO: 472381 - DNA, 122 bp, Homo sapiens
tacaatagacctgtggacgcgggccagggggtggcgtgtgggagcttcttagcctatccccggtggctgcattgcccccttcccacagacacaccccgggactgtggtgacagtgctcgatc

SEQ ID NO: 472382 - DNA, 122 bp, Homo sapiens
gatgggggtcttggggtatcctctctctgggcacaagtaaactgggaggcacagggcgggcggtgggggatggggccttaaagacttcagcagtccaggcagaagtgttaaatttctcagca

SEQ ID NO: 472383 - DNA, 122 bp, Homo sapiens
agttgcagagtcatggtacaaataagaccataatgagaagtcctgagctttccattacctcgttgctctgcatcacaggcaagtccacatttggctctacttagattaatcatttcgtggaa

SEQ ID NO: 472384 - DNA, 122 bp, Homo sapiens
aagggaagaggccagggctttttgtgcacaggcagcaattataccctgaaacccagagcccgacagtcgctgctcctgggcaatcgacactgcttcctgctgctggctgctgaatgccgcag

SEQ ID NO: 472385 - DNA, 122 bp, Homo sapiens
ttgtaagttatgttttcctaaaatgcccttgttactctgtgcattatggtatcatcatctcgcatgggacctgggccttccagagcctctgctgttagctctgctcctgtgtccttgcttga

SEQ ID NO: 472386 - DNA, 122 bp, Homo sapiens
aaagcggccgcgccactccccgcttccccgcccggctccgggccccaggccctgggacgccgagccaccgccggcgtttcagacgcaaaccccaccgcgaccctgcagcagcctgccccgcc

SEQ ID NO: 472387 - DNA, 122 bp, Homo sapiens
gatctcaaatgcaaacactgaatctctaccacgcagcaataccttagtacctggtattcacgcattaactacttgttgaagtgaattggtttaaactgacaaagaactaatgaataaatcat

SEQ ID NO: 472388 - DNA, 122 bp, Homo sapiens
agcccgcccgccactctcggatagggagtccctgactctccctgcctgtatagggaaggtcgtgtcccgccaccccacgttgtcacagtgggaagccagcccacgtcttaccgatggcgccg

SEQ ID NO: 472389 - DNA, 122 bp, Homo sapiens
gcggggcgagccagggcggggcggggcgagccagggcggggcggggccctgactggactgcgtcgcgctcgggggccgcgccgggtagcgtttctttttagtgcctgaggcagctctggctc

SEQ ID NO: 472390 - DNA, 122 bp, Homo sapiens
agtgactcctcgggaggcgtttcccaccgtgggattcttccccatctttcttggcaggcccgtctctccttagcgataccacaaatcaccccttccacgaccaaacccacccaaatgaatcg

SEQ ID NO: 472391 - DNA, 122 bp, Homo sapiens
agccttgccgcgcctcagcgactttcggcgccgccggagcttccgccgcatcgcgggcgccgagatccagatggtcatcttactcattgccacctccctggtggtgctcatctgctccatcc

SEQ ID NO: 472392 - DNA, 122 bp, Homo sapiens
ctctgcagtccctgccagacaacttactctgggtctctaggctttggatccagcagctgccgctccctgggctatggatcgaggagctgctactcagtgggctgtgggtccagtggcttcag

SEQ ID NO: 472393 - DNA, 122 bp, Homo sapiens
atcaccacccccacgcccaccaccccgctagtcactcaccccaccccgggagccagacctcggggccttcttggagtgtggctccagaggagactgcagcttcacctcctggtggtgacaaa

SEQ ID NO: 472394 - DNA, 122 bp, Homo sapiens
aagcgcacagaccaaactgacaggaccaggggctgcgtgctcccgggtctggtttcttcccgcaagccctgacggggggctttgggggaggaaacgccctgaggttgcagcccagccgctcc

SEQ ID NO: 472395 - DNA, 122 bp, Homo sapiens
ggcctccgcggtccagaacctctcccaggtgtgatggatcctccaagccgctctttgagccgctgtccaggtctgcaggtcctcgttcagggacatgaaatctccttgtcgtaggcggactt

SEQ ID NO: 472396 - DNA, 122 bp, Homo sapiens
ctggtgggcttcggcggtggcccccagctccacacacggccgcagggtataaacacggggcgcatgggttccctgagattcgcctgagtctgggcccagcgaggcacgctgttcgcgggggg

SEQ ID NO: 472397 - DNA, 122 bp, Homo sapiens
gggaggccgtggtcggctcagcgccggtcccgccccttgccccgccccgcacacgggccccgcccctcacctgccaggcctccagctcctgcgtgagcgccaccttctggcggatggcgcgc

SEQ ID NO: 472398 - DNA, 122 bp, Homo sapiens
gcacagcgccccgtacactagggggtcctacagctacgtggccgtgggcagtactgggggcgacctggacctgctggctcagcccctccctgcagacggcgccggcgcccaggtatgtggcg

SEQ ID NO: 472399 - DNA, 122 bp, Homo sapiens
aacttgcgaatcgccgcgtttaacagcctgaaaatctggcctgctttttcccgggaactgcggaggttgtctctgtgactttgattatttgcattgatgaccctggggcaagattcttggac

SEQ ID NO: 472400 - DNA, 122 bp, Homo sapiens
atgctgtttcctgtcatcttgggattctcgcaagtcctaccctgaccagccagggaactgcgggacctgcctgtgagcagacctgagctgtgcaaagaagcactgttatgtgagcatgttca

SEQ ID NO: 472401 - DNA, 122 bp, Homo sapiens
cgcggttggccgttgtagaagcctggataagcatagcccgtgtgaatctgtgaacctgcccgcactcgcggttggccgtcgtagaagcctggataagcatagcccgtgtgaatctgtgaacc

SEQ ID NO: 472402 - DNA, 122 bp, Homo sapiens
ctgaaccggagatccagaaggaccctccagggatgacctcccaactctttgcctagagatcggcaagcacgttgccggaggctctgtccagaacatccgctctgcggctcacttttcatggt

SEQ ID NO: 472403 - DNA, 122 bp, Homo sapiens
ctgccattctgccaatatacttgagtttagaatgctacaaacaatttggtttctatttatcgctcactatgcaggaatgagaatgttcttagaaactcagatgctcatgtttttaaaatagt

SEQ ID NO: 472404 - DNA, 122 bp, Homo sapiens
aagtgcccactgggagtaatgctgcggtggtcaaggaagcgcccactgggagtaacgctgcggtggtcatggaagtacctactgggagtaacgctgcaagggtcacggaagtacctactggg

SEQ ID NO: 472405 - DNA, 122 bp, Homo sapiens
ctcccattgcactgataggtaaattgatccctagagaagaggctagtctgagatatatagcgagtgaggaaaagaatcggaatcatgatcctggtgccttagataaccagccccagttcttc

SEQ ID NO: 472406 - DNA, 122 bp, Homo sapiens
cctttctggggcccgatttggtatctgaattcaaccccgcagcaagtatcacagcaaacacggataagaaaatgccggggcttccaaacaatatcaaacgcatggggcttctgaaaggacag

SEQ ID NO: 472407 - DNA, 122 bp, Homo sapiens
gcaagcttgtttctccacagtagttcccatcctggaaatggcaccagtattgtccattgtcggagggctggatgttgtgtatcttcagtgccacatttccctttgcaatgccattctctatc

SEQ ID NO: 472408 - DNA, 122 bp, Homo sapiens
gtcaggagttccagaccagcctggtcaacatggtgaaaccctgtctctactaggtgggcacggtggggcatgtctataatcccagctacatggaaggctgaggaaggagaatcacttgaacc

SEQ ID NO: 472409 - DNA, 122 bp, Homo sapiens
caggtagggagcggtgggaaccttcctgaattccaagttcccagacaccagccaaggagccgaccttggaagcaggcctttccaagggttgtagtttcagtctcctaggcttacacttctct

SEQ ID NO: 472410 - DNA, 122 bp, Homo sapiens
ctgaatctggccacactcgttctggaactcccttacctctgtatctttgcccctgctaggcgttgcccacccgtgagtctacacttcctctgagaatctcagtgtgtctgaggcctggtggc

SEQ ID NO: 472411 - DNA, 122 bp, Homo sapiens
cactgcctgaaaatgatggctctggagcaaggccccgatggcacccaggacctgggactccgctttgatgcccatggcagcctggccgccctggtcctacaattccagaccaacttccggaa

SEQ ID NO: 472412 - DNA, 122 bp, Homo sapiens
aaattttcaccctctcaaaagtgatgggaagttagggtccaaccctcaccaagccccttacgatgggcaagtgaatcctctgctaggtgaggttagcctagtgctcggctatgccaaagtcc

SEQ ID NO: 472413 - DNA, 122 bp, Homo sapiens
gaatgttgtgtcctttttctccctgagctgacttagacccatccagggatgatgggaactcggaacctgagcaactcaggtagacagcttaaccacctcccccaggagctgtactagtgaaa

SEQ ID NO: 472414 - DNA, 122 bp, Homo sapiens
aagggactggggtcccgttacaggtgcgcccacagcgcggccccgcccccttcttgactccgccctctcagcgaggctcaggtgcacaagccggaagtgcgctctcccaggtgagtgactaa

SEQ ID NO: 472415 - DNA, 122 bp, Homo sapiens
gagcgtcacctcagggcctcaggcctcagggtggctctcaggcaacccgtctgtacaggacggcagaaccctcccgaggatgctcaaggggtttccacacctcgtcacccacagaaaccact

SEQ ID NO: 472416 - DNA, 122 bp, Homo sapiens
gtctgcctggatttatctcaatcccagcataagtgcttttagggtcttatttaagaaattcggctgtgtggtggctggtgcctgtaatcccagcactttgagaggccgaggtgggcagattg

SEQ ID NO: 472417 - DNA, 122 bp, Homo sapiens
tctgcaatccgagatggccttgtcctcaacctgcagtgcactgttgatccggtgtaatgccgcctctttttccaggtgcaggtcttcatcagtgacccggtacccccgctctaagggaggtg

SEQ ID NO: 472418 - DNA, 122 bp, Homo sapiens
atccagggagccctagggttcattagcgacactgagggcagccatggggttctgcctcctcgcctccatttctaccacccactttatctgttccatactgtagcttgtcagtaagctttggc

SEQ ID NO: 472419 - DNA, 122 bp, Homo sapiens
ccgcagccgctcggtgcgcacggcgggattgcggggcgcggggctgggggctgggggctgcgggatgcgggcagggccctcgggacccgcactcgggcagtgcctgctgtctgcgtgcattt

SEQ ID NO: 472420 - DNA, 122 bp, Homo sapiens
tctcattaatgagtgagtacatgttccgcctgacagcctggcctggagcccggctgtgggcggcggtgagtgggcagccagcagtgagtagcagccggggcggggtgagctgtccccaccgt

SEQ ID NO: 472421 - DNA, 122 bp, Homo sapiens
ttaagcttgtagtcatggggagccactatgcttctgaggacaggtgtgacttacgactgacgtttaggaaggtatcaaaggcagactgagaagctctttcaggtgtgaaagggggtggaatt

SEQ ID NO: 472422 - DNA, 122 bp, Homo sapiens
ccccacagctggatacgcagcgaccgccggacgcaccccccacaacctgtccccaggcagcggcgacaaccaccccccccacagcacagaactcgccctgcccggagaacccccacccagtc

SEQ ID NO: 472423 - DNA, 122 bp, Homo sapiens
gtcagattgcagtcgatgagaggtcagtggtgcaggacaagatggggttgaacggggactcgagtccagcagaaacgcctgaactaaatgtagacagaattgactgcgctctgttttaagga

SEQ ID NO: 472424 - DNA, 122 bp, Homo sapiens
acaggaaacctgggaggcagagtttcctgctccagtattttgtctctccatgagggatggcgtggaggcaaagatggcagctcttgaggaaggcactggctcacaagatggtggctcttggg

SEQ ID NO: 472425 - DNA, 122 bp, Homo sapiens
aattaggttgatttaatgagaagtttaaaaatatatactgaatcccccaaaggggtgcctcgcctttttttattcaaagagagctgagctctctgaggaaataggtgtgccactttaggatg

SEQ ID NO: 472426 - DNA, 122 bp, Homo sapiens
caaggcagccgtgtgtgcttgcatgtgaggcggcaaaaacagcgcgctgcagggccggcgcggtggctcacgcctgtaatcccagcactttgggaggcggaggcgggtggatcacgaggtca

SEQ ID NO: 472427 - DNA, 122 bp, Homo sapiens
gctccagaatatggaaacagagcaaaagaacaaccctagtacctttttttagaaacagtacgataaattatttttgaggactgtatatagtgatgtgctagaactttctaggctgagtctag

SEQ ID NO: 472428 - DNA, 122 bp, Homo sapiens
aaattaaaaaaactaaactgaaaatacaggctttctgttcttagaccttattctccagtacgagaggacaggaatggatttcaaatgggcctgctgggaaattttgggaaattgacctttac

SEQ ID NO: 472429 - DNA, 122 bp, Homo sapiens
ctgaaactgagctgatatattgttattatcacttgagaacacaacagcctgaggtccagtcgtctccttaatgtagctggggatgccattccatgtggttttagaaatcctttgttatttct

SEQ ID NO: 472430 - DNA, 122 bp, Homo sapiens
aaaatccccagatatttggaaaacagctaacacatttccacagaactcttgagtcaaagacgaaatcaaagggaaaattagaatgtgtttctaactgaacaatatatcaacatttatgggat

SEQ ID NO: 472431 - DNA, 122 bp, Homo sapiens
agtctggggtggggtctgtcacccacagctccccaaggcggggtggggcccctgggctggcgtcacctcgggcaactggagaggaaaggttcttgtgtttattttttccaaaacgactcctt

SEQ ID NO: 472432 - DNA, 122 bp, Homo sapiens
cttgggtgagtcatttaatttttagcctcacttgtaaaatacaggcaataagacctatctcgaaagaatattgaggaaattagaattatgcaaagattagaattaacaaagtgttaaagtac

SEQ ID NO: 472433 - DNA, 122 bp, Homo sapiens
aaggccaagaaggcctctgaaatgcctcacctggagggcacctggtaggtcatcatgacgcgctggtcagcattggccatgagcagccaaatgggatcctggagcacgtacttaatcacctg

SEQ ID NO: 472434 - DNA, 122 bp, Homo sapiens
gttgcagagtggaggcggcggatctgtcaccgggacccggccgggaatgagaggtcacgccgggtgccacagctcaaacctctgcaccgttctggccactcttctgcttgccacactgttcc

SEQ ID NO: 472435 - DNA, 122 bp, Homo sapiens
tccagcctgggcaggcgacagagcgagactccgtctcaaaataaaaaagaaaatgcgggacgctaatttattctgcgaagctgttaaaaaattttaaataaaaatatgggacgcggccgggg

SEQ ID NO: 472436 - DNA, 122 bp, Homo sapiens
gcttttccgagcccaggcccagctgctgcctcggtccctccccggggaaggccgcagccgcggggcaccaggctgagcggctgagggccccagtgcttgtaaagccttcactgactagaagc

SEQ ID NO: 472437 - DNA, 122 bp, Homo sapiens
acggggcggccaggcagagacgctcctcacctcccagacggggtcgcggccgggcagaggcggtcctcacatcccagacggggcggtggagcagaggcgctccccacatctcagacgatggg

SEQ ID NO: 472438 - DNA, 122 bp, Homo sapiens
attaagatttggtaagattccccatctctcttggttgcctggtatccgctcccaggcagccggatgtaaacaggcggttcgctctgcctggcggtgggctccgtggattctgatctgctcac

SEQ ID NO: 472439 - DNA, 122 bp, Homo sapiens
gccctcacgccctgaccctcagtgtcccttcacgcccaggtgtgcctctggcagggaggacgtgctcatctctggtacctgaaaagaagttgcccatgttattttcgctttatatgtgacga

SEQ ID NO: 472440 - DNA, 122 bp, Homo sapiens
gagccctgacagagtgaccacttggggcaactgagatctagaagggtccctcactgtctccggagcagctcctagaggtcttaggggtgcagagggtggggagcagcagacaaatctggggg

SEQ ID NO: 472441 - DNA, 122 bp, Homo sapiens
gcggggaaggggaaggaccggaggtcgttgttggggaatctggctgccctgaggtgccgccgcggccgccgccgccaccgccgccgccggtgtagcgctggagcttcctactagcgaactga

SEQ ID NO: 472442 - DNA, 122 bp, Homo sapiens
atcaagattaatgagtggcggggctgtgggaggggcatcccaggcacagcacggcatgggcgcctggtggaatcctcgccgcctgggcgagtgctgggacgcacaccggaggtgaccgtcta

SEQ ID NO: 472443 - DNA, 122 bp, Homo sapiens
gggatgggttaagacgtagcccttgacacgtggcaccctctggggctcagccttgggtagcgattctttggagaagtgtgcattgtcagagcattgtggaactggaaaagacactgccaggg

SEQ ID NO: 472444 - DNA, 122 bp, Homo sapiens
cctctgcctcctcacgcgctaccacaggattggcccgtgcgagcccggctgctcgcgcgccgaccaatcagcggcgagtcgggcgcacgcattacctctcagccaatggacgggatcggacg

SEQ ID NO: 472445 - DNA, 122 bp, Homo sapiens
ctcgtgaatgactgtcaggttgcggttccctcttccgcgttcatggctgtgattggcacgcggttctcctgggaccagtgccctgcagtgacttcctagagtgcctcaggtgagcgggcccg

SEQ ID NO: 472446 - DNA, 122 bp, Homo sapiens
cttgctattctctctgtagaggagaaggcagagcccccccaggctatgaatgccctgatgcggttgaaccagctgaagccagggctgcagtacaagctggtgtcccagactgggcccgtcca

SEQ ID NO: 472447 - DNA, 122 bp, Homo sapiens
tcaccctgattcgaggtgtcctggaggttaccagttccgcgtgcgaagttctgccattcccgcggggctggagccccgaggctgaacttcccacgggcggtgggcgtggccggctcacctgc

SEQ ID NO: 472448 - DNA, 122 bp, Homo sapiens
atccatgtcttccagaaaatccatgtcttccagtaacctcccagtcttccagaaaatccacgtcttcccaacaatccaagtcttccggataatttgggtcttcctgaaaatctacgtcttcc

SEQ ID NO: 472449 - DNA, 122 bp, Homo sapiens
catagtcaccggagacagctggaaagataaccagatgttcaagcatctcttccttgctctcgctcacttgctcgctcactctatttttttttgtaaattgaatttaaaggacctgtttctta

SEQ ID NO: 472450 - DNA, 122 bp, Homo sapiens
ttcaagtgattctcctgtctaagcctcctgagtagctgggattacaggcttgcaccaccacgcccagctaatgttcgtggttttaggagagagatggagtttcaccatgttggccagcctgg

SEQ ID NO: 472451 - DNA, 122 bp, Homo sapiens
gcccaggccacaggcgcgccggcgtttctggtttccagttgaagagggcaggcgggagggcgcggggcacgcgcgctcgcgcacgcggcgggcggaatcccccggctcccgggagaccctgc

SEQ ID NO: 472452 - DNA, 122 bp, Homo sapiens
cttgtagctgcaggggttggaggggagggagccggccctcagcgtcgggaggggtccccgcggggacacacacaaacccaggctttagcccaggggctggggtgcggccctagttggggcac

SEQ ID NO: 472453 - DNA, 122 bp, Homo sapiens
cgctgaaattacaggtgtgagccaccacgcccggctcatcgcttgctttattgtctgaatcgcgtttatctctctacaaaagcagtgtcatccgtctttccctccagagcaagtccccttcc

SEQ ID NO: 472454 - DNA, 122 bp, Homo sapiens
ttcccttcggtcctgtgcccaccttggtactggggtccgcgtcggagcagcaactgagggcggcctcgtccgtgaggccgccggacgggggctgcggttctgccatggctgcgctgcagtat

SEQ ID NO: 472455 - DNA, 122 bp, Homo sapiens
tatccaatggtgcctgcgggccggagcgactaggaactaacgtcatgccgagttgctgagcgccggcaggcggggccggggcggccaaaccaatgcgatggccggggcggagtcgggcgctc

SEQ ID NO: 472456 - DNA, 122 bp, Homo sapiens
cgccgcgccgcctgagccgagccgagcctctgctgccgccgccgcggccccgccgcccgccgcgggcgcccaccaagcactttgcagactcgcttccaccctgcgggccattccgcgcggcg

SEQ ID NO: 472457 - DNA, 122 bp, Homo sapiens
taacgccaaggtcgcgggttcgatccccgtacgggccaggattgaaacttttcgaaagtacgattactgcactccgttttagagccaagtaacgtctctggggaaaaacagcgccacatttc

SEQ ID NO: 472458 - DNA, 122 bp, Homo sapiens
agccgccgcacccgcctcacttgagcacttggcgagggatccccagctgctccagcttcacgtgctcgctcagctcgctcaggtaattcacatagaagatcttctgcccgaacttgaagctg

SEQ ID NO: 472459 - DNA, 122 bp, Homo sapiens
tactaaaaatacaaaaaaattagctgggtgtggtggcgggcgcctgtagtcccagctactcgggagactgaagcaggagaatggcgtaaaccctggagacagagcttgcagtgagccgagat

SEQ ID NO: 472460 - DNA, 122 bp, Homo sapiens
cgccacatcccggcagccctcctacctgcgcacgtggtgccgccgctgctgcctcccgctcgccctgaacccagtgcctgcagccatggctcccggccagctcggtgaggccctagcggagc

SEQ ID NO: 472461 - DNA, 122 bp, Homo sapiens
cctcggcagcaacttctccagatgtgtgggaagtggcgctacccgtgccccggctgtacccgacagtattgaaatcagcacagaccaagaaggaagaagccggggggccccggtgtcccagg

SEQ ID NO: 472462 - DNA, 122 bp, Homo sapiens
ggcggtgccgggggcggggcttcgccgcgaggccacccccgagccccgggcctagccgcacgggaggcgacacaccctcgccctaccctgagcctggcgcagaccctcgaccgcgacggcgc

SEQ ID NO: 472463 - DNA, 122 bp, Homo sapiens
gggcaccagcaactcaggcaagagcaccatcgtcaaacagatgaagatcatccacagcggcggcttcaacctggaggcctgcaaggagtacaagcccctcatcatctacaatgccatcgact

SEQ ID NO: 472464 - DNA, 122 bp, Homo sapiens
acagactagtgagctaggtgagggctggttcttctctatctaggtgaggaaagtgacaatcgggaagagaaaggacaaaaaccactgcatgttaatggaaataaatgacaaggagaaacaaa

SEQ ID NO: 472465 - DNA, 122 bp, Homo sapiens
ccacacagtggtgagggccaggcacgtgcacctggacacgagaatatggctgtgctgttccggccggtgccgccaggcagccctgaggaggctcgggaagcagcgtgagggtggccatgcgg

SEQ ID NO: 472466 - DNA, 122 bp, Homo sapiens
catatgaacatctcccagggcacctgcacacttctcagatttattttatttacatactatcgtccctcattaggcagtgagctccttgagggcagggggtgatcttggtcatctctgcatcc

SEQ ID NO: 472467 - DNA, 122 bp, Homo sapiens
ccagtgcgactgggcaagtacagaccctgcacgtccttggacgagagggactggatattgcgacgcctgggccgcagaaaaggactccaccagccaggcctccttcgcccgcccccggttcg

SEQ ID NO: 472468 - DNA, 122 bp, Homo sapiens
gggggaccctgaggcactgcgacaatgaagtgtcacatgggatcccgggacagagaggggcggtagggagtgggaaatctgaataaaatgtggctccttggctctaagttggtgtgtctgca

SEQ ID NO: 472469 - DNA, 122 bp, Homo sapiens
ccccaatacacggaccagtctcagtgagttttaccagcctggtggctgaggttggagtcccgagatcagggcaggcatctggatgcctaaaggaagaatccagtcatgtgacatagaaattg

SEQ ID NO: 472470 - DNA, 122 bp, Homo sapiens
cccaggaggcccagagtcagaggagacggggatgacagggggctgagggctccacctcagcgcccccgacccccgccgctgggatttcccgccgcagctcctgctccagtctgtgctgcggg

SEQ ID NO: 472471 - DNA, 122 bp, Homo sapiens
tttccacttaccaagttgaaaacggtttatgttaaaactattttgcctgcaggttggacccgatcctgctagggagtctcctgcagcttagcagtccgggaactgggatttcggtggggaat

SEQ ID NO: 472472 - DNA, 122 bp, Homo sapiens
tatgcagagcttcagggttgtgatgggtagagccaaacccatctgcccaacccaagggcccgtgcgctccaaccctgcatcgaactgccaacatagtacaccttttagaaaaagattcttgt

SEQ ID NO: 472473 - DNA, 122 bp, Homo sapiens
agatgcttgtcctcaaacctctcacagcatcaggatcattcggggtttccctgtcacccacggtttcggcagctcagtcccccgcctgtgttctccaggtcctggtgccgtgcgtggacccc

SEQ ID NO: 472474 - DNA, 122 bp, Homo sapiens
gtttatacaagagttaaggagcctcccgcatttcagtggagcgctaagcctgtttgtaggcgcggaatgggccaacaggaatcgaattctgtgactaaacaaactagaagaggaagcaggca

SEQ ID NO: 472475 - DNA, 122 bp, Homo sapiens
gcttgaggaggaggccgaggaggcggagggcgccgaggaaccggagggtccccggccgcgcgcttgggatttccgcaccttccgcacccgcagcaccgggcagctggaactggggcggctcc

SEQ ID NO: 472476 - DNA, 122 bp, Homo sapiens
tggccaggggcggggggcggggggcggtgtgcgccggggtccgggaggctacgcaagctccgcccacgaggccattcggacggacggtgcgccggcgcgacgggggaggggcgtggctaggc

SEQ ID NO: 472477 - DNA, 122 bp, Homo sapiens
aattgaaatgcagatctgtactgtccactaccatagcactagctacatgtggctactgaacgcttgaaatatagttaatctgaggccgggtgcagtggctcacgcctgtaatcccaacactt

SEQ ID NO: 472478 - DNA, 122 bp, Homo sapiens
tttgggcctttgggaagcaggcactgccggtggccacaccagccacctctaggatccaggcgactcagggctgggacggtgttgggcgagaccagggtgtgtctctcctgttaccctgcccc

SEQ ID NO: 472479 - DNA, 122 bp, Homo sapiens
caagcgcctctgtttccaaacatgcctgttttaattagtgccgctctctgacaggtgaaccgggtttatgtgattttcgatctgcctaccaccgtgtcaatgatcaaactgtggaattatgc

SEQ ID NO: 472480 - DNA, 122 bp, Homo sapiens
gcatgcagatggggagagcaaagacttcaggaccctgaatttcctccaactttgggtaggcgctccagctttcctgctggggctaagttgacttccgtcattagttccgtctagacacttca

SEQ ID NO: 472481 - DNA, 122 bp, Homo sapiens
ctgagtgccctgagccccgcgcgggctcctgcgggacgggcggcgtcggccccggcagggcgagccaagctcccagcagtgccaagctgcccagcgaggctaagcaatcacggggcttcgag

SEQ ID NO: 472482 - DNA, 122 bp, Homo sapiens
ttagtggtggtcccatgacccaaggtccgggtaccactcaaacaggaatcctgatatccacgtttcctcattctccacagtgctgattcctaggcaattcctcagctcccagttcccacggg

SEQ ID NO: 472483 - DNA, 122 bp, Homo sapiens
gatttgcccctcatgcaccaaatggtacagccccacatcagtcaggctgcctacccctgacgcctgcgacggagaggcgccttccgtgctgtcgtcatcacgtcggccggagctagcgctgc

SEQ ID NO: 472484 - DNA, 122 bp, Homo sapiens
tagttatttttgttaatctcttactgtgcctaatttataaattaaactttatcataggtacgtaggtataggaaaaaaccagccaggaggccccgcacttcggtgttttctactagctctgc

SEQ ID NO: 472485 - DNA, 122 bp, Homo sapiens
aggccctggagatggctgtcttcagggagactctttatgtcacgctcattcactccctagcgcctctttctggcaacggatgtgtccagcgttcaggtctcttaacttacggtctccgtttt

SEQ ID NO: 472486 - DNA, 122 bp, Homo sapiens
cggtgccccgggctgggcgaggggccgggtgcggggccgctggccgagaggctgaggcggcgtcatgtcctccgaggtgtccgcgcgccgcgacgccaagaagctggtgcgctccccgagcg

SEQ ID NO: 472487 - DNA, 122 bp, Homo sapiens
cccgcctgcccttcccctggcagaaaggtgcctgggtctggtatctgcagagtgaagggacggggaagtgaaggggtgggaagtgaggggtgatggagtcctccttccctgggtggagttgg

SEQ ID NO: 472488 - DNA, 122 bp, Homo sapiens
gaaaatgagaggatgtgggaacgagggtgggccgggaggggacagttgagggagctctggcgctcagctggcccccaccactctcacctgccgcctgggctcgctcccggcttctctccagc

SEQ ID NO: 472489 - DNA, 122 bp, Homo sapiens
gcggctggcctgggacagtgagaggcttagcacccgggccagcagctgcggagggggtgccgggtcctccagcactgccagcccacccacgccgcgcttgaattctcgcagggcctcagccg

SEQ ID NO: 472490 - DNA, 122 bp, Homo sapiens
acctcagatgatccgcccgcctcgtcctcccacggtgctgggattacaggcatgagccaccgcgtccggcccctggtctgcatcttttatttcgagctacaaactatatttactcaaatagg

SEQ ID NO: 472491 - DNA, 122 bp, Homo sapiens
gtcgccgctgccccgcccccgcatgccccgcccctccgaccctggctccgccccacgcgccggtcccgcccccgtccgccctaagcaggccagagttgccgagccctgagcgggctgatggg

SEQ ID NO: 472492 - DNA, 122 bp, Homo sapiens
ggcgcaagatgggtcttgggcagcccagagcttccgattggctcttctgtggtggcggggcggggtcagaacgagatggctgtgtgcgcaggcgcaagactagcgctcttgggaccggaagt

SEQ ID NO: 472493 - DNA, 122 bp, Homo sapiens
gctgcagaggcctgctcctggctggtgtcggccatgagggggctctggggcggcacctgccggtgggtcttcttgtggcggttgagcttgctgctctgggcgcaggcgtagggacactggtc

SEQ ID NO: 472494 - DNA, 122 bp, Homo sapiens
caaaaaagacacctctccttaagcagggaaaaaaaagcccaacaaaaataaagtcatgcccgtggcacagccctaatgttagttttagggaggaaaacaccaacactgagacatacaaaagt

SEQ ID NO: 472495 - DNA, 122 bp, Homo sapiens
cccaccactgtctacactgactccccaaggcactgtaggcattgcttccatcatctgcaccggctcccctgactcctgtctacacgacccacccccattgtctgcaccagctcccctgggcc

SEQ ID NO: 472496 - DNA, 122 bp, Homo sapiens
caccgcgcccggctaatttttttaaaaattttttgtagagaacggggtctcactatgttgcgcaggctggtctggaactcccagactcgatatccttgcgtctcggcccctcacagtgctgg

SEQ ID NO: 472497 - DNA, 122 bp, Homo sapiens
ggaggagggtggcacatgtccgtcactgccacaggcggttccgaagcccgggccctgccccgtacagtgactgtgctgttagcccggccacctggggcctggctctgcactggcgtgtcctc

SEQ ID NO: 472498 - DNA, 122 bp, Homo sapiens
tggggacactcggccggtcctgccttacagatctcctttcagcagaacagcaagggacggcgttcatctgcaatgtccagctcctcccccggccctgcagctccacgaccgctctcctcacc

SEQ ID NO: 472499 - DNA, 122 bp, Homo sapiens
ccaacatcatatgggggtttggccttcaggcacaaccaacaatctcgggctagttgaggccgggtgagattaaggaggtgctgtaccctgtccagaatggacatcaggctgggttggaggtg

SEQ ID NO: 472500 - DNA, 122 bp, Homo sapiens
agggcagtgcgatttcgagtcccccggtttccctggcatttcctgtcccatagcttccagcgcaacagaggaacgaaaagcaagttttcctcggccctgcgcccacccagccacgatccgca

SEQ ID NO: 472501 - DNA, 122 bp, Homo sapiens
gatgccatgaagaccaagacacactatcacgctatgcatgcagactgcctgcaggaactacggcgatatctagaatccggcgtagtcctgaggagaacaggtaccgacgctggccaggggct

SEQ ID NO: 472502 - DNA, 122 bp, Homo sapiens
ttgcgggcttacgcccgcgtcggcctcccaaactgttgggattacaggcgtgagccaccgcgcctggccatttttggcatttactatgaagcaagacgtaatgctaggtgctttatgtactt

SEQ ID NO: 472503 - DNA, 122 bp, Homo sapiens
ttacttgtacacgcgtgtgagtgctcgcgcacgcgggtgcagtcatcccttggtatctgtcgggggttgatttcaggatcccgcgagattccaaaatttgcaggtgtttgagtcccttatgt

SEQ ID NO: 472504 - DNA, 122 bp, Homo sapiens
caaatactggtctcagaccatggtgaggatgcgggtgcagggtgaggactacatagggtgcggtaggtcagtggatcagatccagttagccggggctcagccttgtgcccaggaggctaaag

SEQ ID NO: 472505 - DNA, 122 bp, Homo sapiens
ctcccaggcgccgacccggacccccggccgcggcacctacgccccgccccagtcgctccacgccaaagcccattggtcggcaacctgtccctcctgctcatgtgatgcggcacgtgacgcag

SEQ ID NO: 472506 - DNA, 122 bp, Homo sapiens
gtaatgaacaacaaggaaaaactgacaaactgtcacaaactggaggaaactaaggggatacgatgacttagtaatgtggtaacctggactggatcctggaaatgaaaaaaaaattaggggaa

SEQ ID NO: 472507 - DNA, 122 bp, Homo sapiens
tgtccccgcggggcagggctgaggccagggagcagcaggcaggtacctccggcttcctcccgttctccccgcccaaggtggccggccggcggcgggcgaaggtcgggacgggggtaggggtt

SEQ ID NO: 472508 - DNA, 122 bp, Homo sapiens
ccccacggccagccgcagttgctcccggctgggcagcagcacgaggacatccctgtgttccgaggccatcgcgtccattcccagggtcggctcctgctgactgcatgcaggcctctcaggac

SEQ ID NO: 472509 - DNA, 122 bp, Homo sapiens
gcccagcccccgcccgctgcccgtcagcgcttaccatgatggacaccacctggcagactccgctcctctcaggcaatgcaacgaagaaaccccgccgaccgctctcccagccgccgctgccg

SEQ ID NO: 472510 - DNA, 122 bp, Homo sapiens
acagtttctctctccccgccttcatgtttcttctccatcagtttctggagtgcagtggcacgatctcagctcactgcaacctccgccttctaggttcaagtgattctcctgcctcagcctcc

SEQ ID NO: 472511 - DNA, 122 bp, Homo sapiens
gagctggaggcagagtccgggtctgcggggccggccctccctgtatccctgtgagagggtcggggacccggggcgtctgtctggcttcccccagccctgctctcagctccctgggagcgcag

SEQ ID NO: 472512 - DNA, 122 bp, Homo sapiens
aatgatccacctgcctcagcctcccaaagtgctgggattacaggattgagcccctgtgcccggcctcagtatgtatttttaaatgtgacacacactgtgctatacattggcatatcggaata

SEQ ID NO: 472513 - DNA, 122 bp, Homo sapiens
tagatgcagactcaccgaccgggacctcagacgcgagggaaaggagcactaagtggggctcgccgcctgcagccaggggccgcctgtgggaacagctattctctgcacattttccactttgt

SEQ ID NO: 472514 - DNA, 122 bp, Homo sapiens
ggcagctgacactaccagagagactcaagcaataattagaggtgggcagagctgccctctcggcattacctcttctgcaggctctgccatgcacgcacctcactgccaggccattaaaatca

SEQ ID NO: 472515 - DNA, 122 bp, Homo sapiens
cggggcagattcagacaagcatttattttagttcctaagccgcgcggtgctcccagcttccgcgcctctgggcggcccacacccctccccatcctctcctccgcgccgccgtcttcgttgct

SEQ ID NO: 472516 - DNA, 122 bp, Homo sapiens
cggtgcgtggcagatgggaatttgctcggtggcggctcctctttctggagagcttcccagcgtcccctcccccgccagcccgcggtgacgcgcccggcacccaccacagccggctctcggcg

SEQ ID NO: 472517 - DNA, 122 bp, Homo sapiens
cgcctgttgcagcctctcttccgcccggcggcccacaccggtcaggcccggcgcgggctgcgctctccagctgtggctatggccccagccccgagatgaggagggagagaactaggggcccg

SEQ ID NO: 472518 - DNA, 122 bp, Homo sapiens
ccggagagcagatcctgagtgagcttccctcaaagtctgtggtctctttccaactacctgcgggaatcctctgctccgtagcttaagaggatgcaaagaccataatgtttctaatagagctg

SEQ ID NO: 472519 - DNA, 122 bp, Homo sapiens
gagacggggtttcactgtggtcgtcaggatggtttcaatttcctgacctcgtgatccgcccgcctcagcctcccaaagtcctgagattacaggcgtgagccaccgcgcccgtcctctttttc

SEQ ID NO: 472520 - DNA, 122 bp, Homo sapiens
ttttgttattttacttacagagacagaccatagaccattttaagcagccatgaaaacggccgtggggcagcgtcgcaggcccgtcctctcgatctgtaagcaaaataagaagaacacgctgt

SEQ ID NO: 472521 - DNA, 122 bp, Homo sapiens
ctcatctatatgtttaaatatttcacactgcaagacgccggattgaggagcacacgcaaccgggaaatgcccctcccgaaggggctctgctgccccctggcggtgtgactcgagaaacgcag

SEQ ID NO: 472522 - DNA, 122 bp, Homo sapiens
ctggttcacggaattgatccaagctacatactgataattgggattagtgagttacaatggcgttgcaagccatgaaactggttcagaccggctgaatgagcgggacaggaaggggctgaaac

SEQ ID NO: 472523 - DNA, 122 bp, Homo sapiens
ctcattctctcttcgcctgctgccatccacggaagacaggacttgctcctccttgccttccgcgatgaagattgtgaggcttccccagccgcatggaactgtaagtccaattaaacctcttt

SEQ ID NO: 472524 - DNA, 122 bp, Homo sapiens
gaggggtcaaactgcagatttaatggaaaagggaagtacttccatcagcagctggcccctcgaacggactgtgcacaccactgtgtgtctcacaactcaggcaactcggcacgccgcaggac

SEQ ID NO: 472525 - DNA, 122 bp, Homo sapiens
ataaaatctgcaacattctttgcgatgtcaccaggagcttatggcatattccataatcttcgtcttctttgaacatgtaaataacaaacatgcaaatatgaaaggtggtggtctatactcta

SEQ ID NO: 472526 - DNA, 122 bp, Homo sapiens
atggaactagacagctcacccgactcgagaagaacggggtggggaggcgaggacgcagggcgacctggagaagaaagtttcccagatggctctagggtgaatcttgaatgttgtgatgcagc

SEQ ID NO: 472527 - DNA, 122 bp, Homo sapiens
cccggaggagatggggggctgtgctagctgcttgcccagcgagtgttcccggagtctcctcgccgcaccccgctatcgggcgctcagaccaggggctcggcctggcgggaaatagcctcgac

SEQ ID NO: 472528 - DNA, 122 bp, Homo sapiens
ccaggttatgcagagcactcatgccatgcgaaggagttagacatttgctgcagatgatatcgaagaattttaccaggcagccctccctgtctgctgacatcctggcttgcaatcttttctct

SEQ ID NO: 472529 - DNA, 122 bp, Homo sapiens
cgcgcgcccccacgggtcagggctgctctagggtgcgggcaggcgagggcggcccaggggcgcggggcgaggggcgaaggagccaggaggctgagaactgcatggtagccctgcctgcctgc

SEQ ID NO: 472530 - DNA, 122 bp, Homo sapiens
gcctttgatgcaatagactagtcaaaattaaagcaaggaacattatatataaataatgatcgatgattaaagattattggaatgtgaacaattaccaaagaaagggctaatcggcataactg

SEQ ID NO: 472531 - DNA, 122 bp, Homo sapiens
atctgtgtcctggggacaaagctgcagattctcaccagctgaggccttcctggcaggtggcgtccaacctttggacatgtaaacagccttggcctgaccaggggtggcccagcttggccttg

SEQ ID NO: 472532 - DNA, 122 bp, Homo sapiens
cttcccgggggtggaggagggaaggagggaggtgtccttttttccatctgttgcagtttccgaaccaaacgcaccctcgccagccccgggaagaaaggcccaagggagaaacctggggcgct

SEQ ID NO: 472533 - DNA, 122 bp, Homo sapiens
atcacatgcattccaccgatatttattgaacacctaacttgccacaaggggatgccataacggataagaccaaaaccatccctgccttcatgcagctcacagctgtgcaagcaagcgtgccg

SEQ ID NO: 472534 - DNA, 122 bp, Homo sapiens
tcgccaggcgctgagccggaatgtggactgtaccacagtgactgcgaagggaggggaagacgacggcaaggaggcctactacacgagcagtaaggtccacacttttgcagacagatttcaca

SEQ ID NO: 472535 - DNA, 122 bp, Homo sapiens
cgcgcccaaccgccaccggggtcgcggggatagtgagggtcttggggacagtgggggtctcgggcgtcgaagggcgctggcagaggggtcccagggacagagtcccagagagcagctgggac

SEQ ID NO: 472536 - DNA, 122 bp, Homo sapiens
acaggctgagctgtgaacagatggaggggtgtcctcctaacatgaagccgaccaccaacccgtaattccccccttcattccagagtgggaaagcccagattcccgtcggttctttatgctgc

SEQ ID NO: 472537 - DNA, 122 bp, Homo sapiens
atcttatttcacctctcaatcatccgcagtttgtgcggtctttgaggattgtgaaaaacacgtttaatctactctctcaaagtctgagggtttttaaattctgtatagctaatgcccttttg

SEQ ID NO: 472538 - DNA, 122 bp, Homo sapiens
gcagtcccaccaaagtgcagaagagctggagcttcaacgaccgaacccgcttccggccctcgctgcgcctcaaaagttctcagccaaaaccagtgatagatggtaagccctgtttttccata

SEQ ID NO: 472539 - DNA, 122 bp, Homo sapiens
aataagtcattataaatagttgctccgtgggctttccgcatttcaccctgctccaggcagcgtggtctgtatggctccgccctgggcaggaggagaaagaagagggccaggcaccacgtgcc

SEQ ID NO: 472540 - DNA, 122 bp, Homo sapiens
atcttcccctttccctcccaaatcctgccaggttcctttagaacgtgcagctggcctgttcgaaaacaagggttcccaaagtcttgtctactgccagcctcatgcccaataatcactttgag

SEQ ID NO: 472541 - DNA, 122 bp, Homo sapiens
gccaacatgcttttcttccttaatttaaattttaacactccctgagctattagtaccacccgttttcctcctttttttttaacttctataaatatcggtttgtcttcaaaaaaggtaaacat

SEQ ID NO: 472542 - DNA, 122 bp, Homo sapiens
aagctacagtgtagggcccaccgcttgtcttttcatcttcatggccaggagctctcagcccggctgcacgctggcctcacctgggaggcttctccaccacccacgcccacccccggactctg

SEQ ID NO: 472543 - DNA, 122 bp, Homo sapiens
caggcctgattatccctggcagctctgttatctggggtaagacacaggaaaacgtgcttccggttctcggcggaagtagccccgaacggtagaaccgatgggaaatgtagtccagggcagaa

SEQ ID NO: 472544 - DNA, 122 bp, Homo sapiens
ctcgtgatccgcccacctcagcctcccaaagtgctgggattacagagtgagccacctccccggctcaacttgttgactttcatgatgacctgatgacgaggaactgctgtcatccccatctt

SEQ ID NO: 472545 - DNA, 122 bp, Homo sapiens
tttccccgcgggctggcggccagacggcgcgacaaaatgagatctgtcgagaggtctggccgtgatggctttttggcgtctaggccgctgtcatcccaattccatttctccgaaaagcatcg

SEQ ID NO: 472546 - DNA, 122 bp, Homo sapiens
cgggggctcgccttcactgtgggccacggccagcgtgtccgtggaggtggccgacgtgaacgacaatgcgccggcattctcgcagtccgagtacacggtgttcgtgaaggagaacaacccgc

SEQ ID NO: 472547 - DNA, 122 bp, Homo sapiens
gcgggctcgcaggtgcagatgctttgaaatgaagaactcggaccaggccgacaacgtgggcgatccggcaagggaggctggccgccggatggggctgacaagcgcaccgctgtcgagacctg

SEQ ID NO: 472548 - DNA, 122 bp, Homo sapiens
gggtgggggcgcccaggccgaggctggccagctccaacctggaatccaaagatctgcccccggcgccccctgaggcccctcgaattccctccaggagtccgccgaagctgtggggctccagg

SEQ ID NO: 472549 - DNA, 122 bp, Homo sapiens
ccctcgtcattgtctccctcctcaccttcttcttcttggactgagactgatgtggaggagcgtgtctacaccccgtccaatgccgacatcgggctaaggctcaagcttcactgcaccccagg

SEQ ID NO: 472550 - DNA, 122 bp, Homo sapiens
ctcgcaaatcaaaggactgattttgctttgaaatgaaggttgaatctatgctgctccaaccgtgtgagatttaaacgatgctgctgaggaagcagacaccacctcacctgtctggcgctgcg

SEQ ID NO: 472551 - DNA, 122 bp, Homo sapiens
atcttcccgaagtctgcaaaactccggtggcagaaaatcaccagtgcaggcttcccaggccgccacgctgcaggagcagacggcagcagccggagttgctggtgagcagggtagggggctcc

SEQ ID NO: 472552 - DNA, 122 bp, Homo sapiens
cagctccaaagatgggttaatttgcccgatacacagcagaactctcctgttcctgtaattcgagtggcctccaaaaagaggttgtcgttgactcttttaggtgcgtgcagtgtgggtatgtt

SEQ ID NO: 472553 - DNA, 122 bp, Homo sapiens
acccatgtgggaggcagcccagtggagtcttcaacacacatacgtgcccaggtacacacgcgcccaggtacacacgcgcacacactcacatacacacacacacacttaacactctcacacgc

SEQ ID NO: 472554 - DNA, 122 bp, Homo sapiens
tagctcccagagccctttaacattcattattctactctatgagctaggcatgatgggggccgtcatgccccttgaacagatgggaaaaccgaggcttggatcacagagctggtgggacacag

SEQ ID NO: 472555 - DNA, 122 bp, Homo sapiens
ggaaatggcacgcccgtttccgtgtgaacccgaaactgccacttgctggctgaggagagccgctgcggcgttccactgtcacgtgagggggccggtcctcttcggcggcggcactcagtgag

SEQ ID NO: 472556 - DNA, 122 bp, Homo sapiens
gtgtagccggggtcacacacgcagcgcccgtccttgcagcgtccccgctggctgcagccccgagggcagctcctcaccccacagtcctcgccagtgtagccggggttacacacgcagcgccc

SEQ ID NO: 472557 - DNA, 122 bp, Homo sapiens
catagaactgaaccaccatctgtatcagcgcatggggagtgtgcattctgaggtctaacccggggtgccaggaacacacacatcctccatcccagcatagagaatggggactccctgagtaa

SEQ ID NO: 472558 - DNA, 122 bp, Homo sapiens
ccgttgcaaaggttcctgaatttggggaggaagagcagcaagactgaaatattgggcatacgtttgttgcttcataaacgtttgctgaatgaataaactgatacgccgatgtttgctttaat

SEQ ID NO: 472559 - DNA, 122 bp, Homo sapiens
atctcgcgcgagacttggcccagcggagcacagggcatgctgggagttgttgtccacgatcgcgagacccgccccctccccatgcccttcgccgcccagcgagttgtggagccgcagctccg

SEQ ID NO: 472560 - DNA, 122 bp, Homo sapiens
gtggccgtctgcgcgtgtggcccgccccctctttaaccctgggcctcccggagctggtggcgcaagtgtggccccaggggccgctcccaggacccttcccacccagtggcctggctcccctc

SEQ ID NO: 472561 - DNA, 122 bp, Homo sapiens
agtagagtcagggagctgtcatgctgttgcctttgaagatggaggaaggggagcataggacgaggaatgagaacaatctctagaagttggaaaagacaaaataaaaaggattttttcctagc

SEQ ID NO: 472562 - DNA, 122 bp, Homo sapiens
acagaacaattaaatcagttgcctgtgggaagcaccctcagattgggctctgcccatctgcggaacccttgtcagcaggtccctgccacagcttctgactgccctttacctgtccagtcctc

SEQ ID NO: 472563 - DNA, 122 bp, Homo sapiens
gtggggaggtccgactgaccaaggctgggtatgtggagggaaagggcgggagagacacgtcgaggagggctccgcacccaggcccgcacgcacacccgccacccttacctggcacagcggca

SEQ ID NO: 472564 - DNA, 122 bp, Homo sapiens
atcctccagggagcagtgccctttatctgggggaccagcgagtaccaggtgagctcaaaccggacctgatattccccttaccggtggcgccgcgggacaccccctcctgctgggcgatttcc

SEQ ID NO: 472565 - DNA, 122 bp, Homo sapiens
aatagatacctggtaaatcgttctttctgatctgtgctgcttcagtcacgagattttagccgcagaagctgacgtcccgctcctaccgtggagatctctgtgaattacagcgggcatccaaa

SEQ ID NO: 472566 - DNA, 122 bp, Homo sapiens
caactctaatctgcagccagcatccgagtgaccccacagcctgaggacttgcctgtagtgcgtcatcagacggctgggaaatcaggcccctgacctcatgaaggacacagctccctctgagg

SEQ ID NO: 472567 - DNA, 122 bp, Homo sapiens
aggggagactatgggaattaaagacggccagggtagattactcaagaaccctctctccgccgggcgcggtggctcacgcctgtaatcccagcactttgggaggccgagacgggtggatcacg

SEQ ID NO: 472568 - DNA, 122 bp, Homo sapiens
gcccagcccctaaaccctcacatgggctttccctggcatggcccaggctcagggaaagcccgccatcatcctggcaacggtcccggacttggggcctggtgcaggcggctgggcctcacctt

SEQ ID NO: 472569 - DNA, 122 bp, Homo sapiens
tcatttgcctttgactttaaacacagggcacaggagttgtaggtgaaatcctaataaagtcgctggttaagagtagcatatcaatattaatcacttagttctgacaaatgtaccacggttat

SEQ ID NO: 472570 - DNA, 122 bp, Homo sapiens
gctaaaactcctgctttggggctcagggttcagggggtacgctagactcctctccccattcgattcttgcatttggcagacgagtcacccgggcagtgggatgaggatggcaccaacagagt

SEQ ID NO: 472571 - DNA, 122 bp, Homo sapiens
gcgcagggcaccctcgctgggcccgttggaagggaagtgcctgccggctctggggagctgcggctctcgggccctgccaaacagacgcagccttcctaaggagcagcgctgcgctggctctg

SEQ ID NO: 472572 - DNA, 122 bp, Homo sapiens
cccaatggtcaaacccagctagaagccagagggcaggggaccagataatgtggccatagtcgtcagcatcctggggcctggcacagagtggtcaaggggaagagtggatcagagaggcaaac

SEQ ID NO: 472573 - DNA, 122 bp, Homo sapiens
gcttgtagtacatctgcacgtcccagtcgatgaagacgctgttccccaggtagatgaactcggacctgcagaggcactcagggtcacggtcagccccgcctgctgtgtgccatccccatgcc

SEQ ID NO: 472574 - DNA, 122 bp, Homo sapiens
tgagttctaccccttccccacaggatctatctctgccccctggaatctgtccccacccaccgagttctggcctccgtccctgggatctgtccccgccctctgtgttctacccctgccccatg

SEQ ID NO: 472575 - DNA, 122 bp, Homo sapiens
gcagtcctgggggtgggggcgccagagggtttccggtacttttcagggcaattgaagttccggtcactactcccccccagagcaataagccacatccggcgacgtgtggcaccccaccctgg

SEQ ID NO: 472576 - DNA, 122 bp, Homo sapiens
gcgtcatgtgctcccggggacggcagaaaaccgcacgcatcctgcccgggagatggaagtcgcctccgctcctggtcaggactgtgcccgagagagcccacggcatccccgcgaacacccaa

SEQ ID NO: 472577 - DNA, 122 bp, Homo sapiens
cagctgtctcaggctacagaaaacaacagtcatgaacaaattctggttagtcatggtaagcgatgacactctaaacagcccaccacacacgcgaaacatcccaatcaaagaatccccattac

SEQ ID NO: 472578 - DNA, 122 bp, Homo sapiens
tcaatacgcttcagaggaagcaaccttagtgtttttttcttctcaagaatcgctctctcccgcccccctaccctgcgctttattttagagtagcaatcattcattatcctactcgtagtttc

SEQ ID NO: 472579 - DNA, 122 bp, Homo sapiens
gattcttgaagtagatgaatagcccggccccaaggaagagcaggcccagcacaaagcccccgactccactcagcatcttgctctgtgcagattcagactgtgctcctgggagaggaaaccag

SEQ ID NO: 472580 - DNA, 122 bp, Homo sapiens
cgggccagcagctgcggagggtgcgccgggtcccccagcactgctggtccgcccacaccgcgctggaattgtcgccctgcctcagccgcctccccgcagggtcagggctcaggaccggcagc

SEQ ID NO: 472581 - DNA, 122 bp, Homo sapiens
gggggctgcagaggctactgctgggcctggtgtcgccatggcagctggagagcgggcgaccggtcgcttggcgtcctgcttggggttgttgcccacatcaccgagcgaacgttcctgtcccg

SEQ ID NO: 472582 - DNA, 122 bp, Homo sapiens
ccggccaggggatattcccattctgggactcattttaaaaacattcgctgtcaggccaggcgcagtggctcatgcctgtaatcccagcactgtgggggccgggcgcggtgactcacgctgta

SEQ ID NO: 472583 - DNA, 122 bp, Homo sapiens
ggggctgccttaacggggccgggggatcccctaggagcctgaagtgcagtgagggctgctcgcctggagggggaggcagagacctggcgagggagagaggggcggggaggaggagccgggag

SEQ ID NO: 472584 - DNA, 122 bp, Homo sapiens
tttcccctactggtcgatcgaggttgggaacagttgctctaacctgggaagcacccgccacgatccagcagggcgcggtgggaggggaaactgaggcccggctaggcacccccgccgcgccc

SEQ ID NO: 472585 - DNA, 122 bp, Homo sapiens
gtaaatactcagcagagacataagcttcttctgtgaaagccgtgccggagcacgagcacgcgcaacctccacatcctggtggtcgtttctgtgctgcgatggagaccacggaccgccccagc

SEQ ID NO: 472586 - DNA, 122 bp, Homo sapiens
aatgtgggcagtgctttaagactttcacccagcggatcctcttacagatgcacgtgtgcacgcagaaccccgacaggtaaccctgactctcactgctgacagtgtgtttgcttagtgagacc

SEQ ID NO: 472587 - DNA, 122 bp, Homo sapiens
tggacgctgcgaggctggggcaggcagaccctaggtgtgctgccgatgtcagggttccctcggtccttctctctgatggcgtgtgtgtactcctgtgtaactgaggccgcttgggaatgttg

SEQ ID NO: 472588 - DNA, 122 bp, Homo sapiens
ccgcccagagccccctacgtgggccagcccctgctgtgggcaccaggaggatgacttgcccgcctggaccctccttgggcctggtcagtgcccccacgccgcactctccactctctcggtcc

SEQ ID NO: 472589 - DNA, 122 bp, Homo sapiens
tattgtccgctgagccgccctgggccgggctgcagcctcggctgccacggctgagagcgccgccaccgcagctgctgccgccgtcgccgcggctccagtcacctccagcactgactcccctt

SEQ ID NO: 472590 - DNA, 122 bp, Homo sapiens
tgtacagggcctttgtaggaatttgaaaaaaggcattgcttcctgtgggcagatacagagcggtgttggagttgatggcttgtcaagtagaatacaggctggattttctgccccaattagtg

SEQ ID NO: 472591 - DNA, 122 bp, Homo sapiens
ccatgagtttgaagatcatccctgggtcattaacatataagcagggaagaaaatgtggcccgaaacagtctgggacatgagaaagcagtaggagaggaagccccaaggaaagggggaagctg

SEQ ID NO: 472592 - DNA, 122 bp, Homo sapiens
tggcactggaacatctggggtgcggctactgaagagcttggaaatcctggtcaggcagtccgggcaattggcaccccaaaggcggatcttttcagttgaacttgaaaagaagtgggggagtg

SEQ ID NO: 472593 - DNA, 122 bp, Homo sapiens
ccagagttttagtccagtgtgggcaacatagtgaagcccccatctctaaaaaataataaacgcaaaaaagcatggatctgggaggaaagcagcttgtgtgagttggataaagtattccctct

SEQ ID NO: 472594 - DNA, 122 bp, Homo sapiens
ggggccaggccagctcagggatgagagaactacgtggtcgttcgcaggtgcacatggaaacgtagggcctcatgaagaaaggctcggcgtgaagagcgcgggctccaagctccatgacgcca

SEQ ID NO: 472595 - DNA, 122 bp, Homo sapiens
gagagcactggctgtcaattcataggtcagagccctgtgcactcggtctcggcagcccaccgacagccctccactacccgccaccatctggcctgggagcgtcgccacggtagtcctggctg

SEQ ID NO: 472596 - DNA, 122 bp, Homo sapiens
ggaagccccaaggattctgagagccccgctaatctggggatgactcctaggagtagaagacggtccatcttagttgtcacgaggtagtgcacgtggggaccctttcgggtacagttgcacac

SEQ ID NO: 472597 - DNA, 122 bp, Homo sapiens
aagatgacgaactggaagcaaggtaacttacgaggtccctcctctccttccccagctgctcgctctcttcctgtcttccgtagctgccagaacgcatcaggaccaagtgctttccggacaag

SEQ ID NO: 472598 - DNA, 122 bp, Homo sapiens
caggggttggggttagaggacatatgaaaggagagcagcacagacccggaatcagactgccgccagcactttccagctctatggagtctgcctggttttgctcatcactgtatctctagcag

SEQ ID NO: 472599 - DNA, 122 bp, Homo sapiens
ctacaaatgcctttttatactggtatcaaagagccaggccaccagcgatgccacatccgccggtctacccccaccgacccgcgaagcaccctcacagctcacggccctccctccaggccgga

SEQ ID NO: 472600 - DNA, 122 bp, Homo sapiens
ccacgggtgagggaggaaacgtcatccacaccttcgccctcccctgaggagtccgtggcacgcagtgtggcccagacacggctccagacctccccgaaacatcatccaaacctttgccctcc

SEQ ID NO: 472601 - DNA, 122 bp, Homo sapiens
cctcccctagttacaacaggggagggaaccgaaaagtccagaggagaaaaaagagagaaccgggccacttcgaacctagaattatccccccaccagcgcggggatggggctccagaggtggg

SEQ ID NO: 472602 - DNA, 122 bp, Homo sapiens
caaatacaactaatttcaatttctggaatggaagcagtcagatattcttctgactgcacgcgtatgtgggagtgccatgttgaagagtggaaaatatggaagatcagtccctacaaacttaa

SEQ ID NO: 472603 - DNA, 122 bp, Homo sapiens
gtttaaaaaagatactttagtcttttaatatattataatattgaaaccttaaagagaagacgttagtaagtgttaaactggccaagagtcctagtcagaaggtgcaagcaggcagttgtagg

SEQ ID NO: 472604 - DNA, 122 bp, Homo sapiens
ttgactcagagttagggaggaggcgcggcggagtcctccggcgggattcggcgcccgtctcgtcttgctctgttaaaatcagtgggtattaatgagtcccgttgggaagttgagatagtttg

SEQ ID NO: 472605 - DNA, 122 bp, Homo sapiens
agagagaaatccagagagtgtatgggttcaccagtcagtgtgatgacgcacttccggggccgccttcgtttttgtcgcgcgaggttttggtttgtgaggatcggcgagtggcgcccaccatc

SEQ ID NO: 472606 - DNA, 122 bp, Homo sapiens
cagagttggagcctgtctgcccacatgggattttcagcacagtgtctgcatcatctttaccgagcacttgaataatttagattgcatgttccatgaggtctttgcctggtggtgacagacac

SEQ ID NO: 472607 - DNA, 122 bp, Homo sapiens
tggacatgtagtagggccggtccagggagccgttgttccgctccaggtcttccactgagccgcaacagagaccggttagagcggaccctggggccaggaaatcggggactgggaggcaagct

SEQ ID NO: 472608 - DNA, 122 bp, Homo sapiens
tgaatgtgttccccttttatgagaaatgtgcactctagtgctaagtgcttggaagtactgcggaggacactgcaggaaagggtggaggtagacatgaagaacaatttcaatctttcagttgt

SEQ ID NO: 472609 - DNA, 122 bp, Homo sapiens
agcgccagccccgacagcgctccttcgggaggctggtccgagcccctgtttccgccgcggcgcaggaagggttggggttccgctgcctgcaccaggcaagagcaccccgagcaaaggaagaa

SEQ ID NO: 472610 - DNA, 122 bp, Homo sapiens
acgggggcgcaggaccctgggacacagagcccaggacagcagtggtggcgtccgtctgaacgggggcgcaggaccctgggacacagagcccaggacagcagcggtcgtgttcgtctgaacag

SEQ ID NO: 472611 - DNA, 122 bp, Homo sapiens
ggcttccagagtggagggccaagtctgaccggaatgccgtctgaaatgggaatgaaggatcgaaattgtgggagaagtctctgcccgcgacccctgtcccctggccgtagtcctggtcaccc

SEQ ID NO: 472612 - DNA, 122 bp, Homo sapiens
caagactgcactggaatcttaggtctcctttcgtcgcctaatcttagcagatcctttcgtcgcctaaatggtaagagcgacttgtaccgacagtccctcggcaatttccggaagtgttcggg

SEQ ID NO: 472613 - DNA, 122 bp, Homo sapiens
aagtgaagaagcagagagaaatccagagaagcctgaaagcttagggtgttttagaggaagcgaagacattacaactaagaaagaaatgagttgtgaagagtggtgggcaatgatctcggttt

SEQ ID NO: 472614 - DNA, 122 bp, Homo sapiens
agtgctgagattacaggcatgagccactgttctcggcctcaaaatatctttgaattaggccgggcccatgtgcctgtaatcccagctactcaggaggctgaggcaggagaatcagttgaacc

SEQ ID NO: 472615 - DNA, 122 bp, Homo sapiens
ccgcccactgccccagagttgccccaatttttctaagccctacagcgttgtcatttcgtacgtctggcgagggaattacagccggtgaataagaaggccactccccctctgtaatgctagat

SEQ ID NO: 472616 - DNA, 122 bp, Homo sapiens
gcacaagccaccacacccagctaatttgttttttttttttttttttttgagactgagtctcgctctctcgccaagctggagtgcagtggcagatgtcagctcactgcagcctctgcctccca

SEQ ID NO: 472617 - DNA, 122 bp, Homo sapiens
gcagtaccagagaagaaagctgcatgggtatggggaagatttctgcgccaaccagggccacgaaacgtcacgccaggactgacaaactctttataagttcatcctccagctggaaaggaagt

SEQ ID NO: 472618 - DNA, 122 bp, Homo sapiens
tcctgagcgcaggctgcgcgcagcccaagagatggcgcggaagttgtcggagctgccttacgacgggaaggcgcggctggctggggaggggctccccggcgcgcctccaggccggcccgagt

SEQ ID NO: 472619 - DNA, 122 bp, Homo sapiens
accgcacaggtctataggggcggaaatctccgcttgagctcccccttcccggattacacgcgagcctgagctgtctccactccattgttttattatgtacaaacgctacagaacgaggggga

SEQ ID NO: 472620 - DNA, 122 bp, Homo sapiens
ccaggcagccgtggaaggtgcccatttctcccagattcctcgcgcgcacggccacgagcgcggaggctgccaaacccgccagccctgggttccgaagccgcccctggctctccattccctcg

SEQ ID NO: 472621 - DNA, 122 bp, Homo sapiens
cggcgcgcacaccctcacgcccgccacagccacaacacgcccgcacgcgccctccctctccggcccgcaacttctcggtcctcggctcctttgttgctccagccgcggccgctcgcccgtgt

SEQ ID NO: 472622 - DNA, 122 bp, Homo sapiens
aatcctggatgagccctcaaatttgtatttgtatttcagtgctgcaaaagaaacagcactcgagcataaattttctcagcaaggcaatttacttctgtagaagggtgcatctcacagatgga

SEQ ID NO: 472623 - DNA, 122 bp, Homo sapiens
ttagcccccactctcccacagagcaggggtggcagcagtagcagcagcagtagcatgtgtcgggttggaggtgccagggttgctgaggtaagtctgttcctcagggttcttctctcaggaac

SEQ ID NO: 472624 - DNA, 122 bp, Homo sapiens
aggagggcgaggggaggggagggaaaggggaggagtgcctcgccccttcgcggctgccggcgtgccattggccgaaagttcccgtacgtcacggcgagggcagttcccctaaagtcctgtgc

SEQ ID NO: 472625 - DNA, 122 bp, Homo sapiens
ggggctgcagccgccgctgcccgggaggaaaggagcccccggcggcggcggcggcggcggcggcggcggcactcacccatagtacggatgcgctgcaaactgcacatgctcgcgtctgacag

SEQ ID NO: 472626 - DNA, 122 bp, Homo sapiens
ggatcagatgtgcaggcatttcaacatggcagtctccatccagccacggtctgcggacagcgttcaggctccagccttgaccctgggcaccttgaccctcacggggtacgtggcctgtgtgt

SEQ ID NO: 472627 - DNA, 122 bp, Homo sapiens
ttaacctaatagaaaagtgaaaccacaaacctgccaatagcagaatctttagagaaatgacgcgaaactcctgccttaaagccctaaatggcggcttcaatatcagtcccactgagcatgaa

SEQ ID NO: 472628 - DNA, 122 bp, Homo sapiens
ctgccccgccccaccgcgggcgctgccgggaagtggagtccaggcggaggcggtgccggccgaagagactggagaaatccaggacatggccgcaaggcctcacgggaaatgtagtccaaagc

SEQ ID NO: 472629 - DNA, 122 bp, Homo sapiens
cctcagatcattgggccattggattcccataaggagcatgcagcctggatatgtaccatgcgcacttcacagtagggttcatgcttctatgagaatctaatgcttctgctgatgtgacaggc

SEQ ID NO: 472630 - DNA, 122 bp, Homo sapiens
gcagaacacccggaatttcctcattttttaagttactcaactattttgctttcccgcaggcgtagccgcttcgccggagcctgggtcttagcgttttgccgccgccgccgcctccctctccc

SEQ ID NO: 472631 - DNA, 122 bp, Homo sapiens
ccccattctgaccccatcacctcccaacgctgacccccataatgtcagtctgatttctgtcgccctggtatactgaccctaattattgtctgcgctgacccagtcaccccgtagggacccca

SEQ ID NO: 472632 - DNA, 122 bp, Homo sapiens
cattacagataggactcgactgaaaaggaaagaggaacacaagatagtttctgcaagaagcgccagaactccagatctcaagtatcaaaaggaatctcatgaagttcagcttcctgctttag

SEQ ID NO: 472633 - DNA, 122 bp, Homo sapiens
ctggtgtggccgggaggcagccccaaaatccggactgctcggaatttgcaggcgaggagccgtgcgttccgggccctccgcgtgtgtaacgacccccagtccgttggcttggaaagtgaaaa

SEQ ID NO: 472634 - DNA, 122 bp, Homo sapiens
ttaatctttacattgtctgcagaagataccaagttcatcctgggagaagctcttgtcatgcgctggtcattaggcaagggctatagagacaaagtcctgacttttagcaggcaaatggctgc

SEQ ID NO: 472635 - DNA, 122 bp, Homo sapiens
ggggccaaacccctggcgggcccccagtgtccgcacagccttcaccactgagtagttccgcgccttggagaccgtcttccggtaccaccagtacttgggctctcaagagcggaagaggctgg

SEQ ID NO: 472636 - DNA, 122 bp, Homo sapiens
gggctgccgcgcggccgtaaagagtttgtagaggcagttcgggtgcggtacgttgcattccggtaccggacgccgagagcggtttgtctccgtctctggagttgtaggcgagaggtgatcat

SEQ ID NO: 472637 - DNA, 122 bp, Homo sapiens
tccgcagaaagtggtggcccacacagagttcacgacctcgtcggacagcgagactgcaaacgggatagcaaagccagaccctgtgatgccaggtggagaggaaaaagcctcaccgtttggaa

SEQ ID NO: 472638 - DNA, 122 bp, Homo sapiens
ggagcatataatttaaatttatagacaaacacacaagaaaaattaatattttgtctgaaacgtattggaatttatctaaaacctgaatatctgcagagtcgcatggtggcgctgcaggataa

SEQ ID NO: 472639 - DNA, 122 bp, Homo sapiens
atctctctgtgggcagtattgccttgtaaggcaggcagtaggcatgagccaatgagtgtgcggtcagatcctggaggacagggacagggacagtcataaacggcaccggggattagctgtgg

SEQ ID NO: 472640 - DNA, 122 bp, Homo sapiens
tttccagtgttccacttttatcaataattgctatgtagaacataaatttttatgcatgtccggcctagatttctggaagcagtattactgggtcaaagtgcaaggctgtgaggaagggagtt

SEQ ID NO: 472641 - DNA, 122 bp, Homo sapiens
tggtgatgctggaggaggtaccggggaggagcgtgtgtggccccggcctctcactagcagcggcggctcccgacgctagcctgctcgagcgcacccagcaccctccccaagaccatggcccg

SEQ ID NO: 472642 - DNA, 122 bp, Homo sapiens
gcaaaggcatttcatagaaagttgaggtcagctcacaggacagactctctgtgaaattaacggtcaatgacctcatgcatcccttggaattcttaggggaatctgaaaaacaggtatgtctt

SEQ ID NO: 472643 - DNA, 122 bp, Homo sapiens
gggctcctttacactcagaggtgccgtaatggagccaagggacggcatcctcggggctcccgagccccgagtggagaagcttggggcagagggacggcgggggcggcccctggtgccgggct

SEQ ID NO: 472644 - DNA, 122 bp, Homo sapiens
ggtctcactctgtcacctaggccggtgtgcagaggtgtgatcttggctcattgcaaccttcgccttcagggttcaagtgatactcatgcttcagcctcccaagtagctgggactacaggcat

SEQ ID NO: 472645 - DNA, 122 bp, Homo sapiens
ccagagcatgaatccttgcacagagcatgctccagaaacaagcagaccccaagttctcctcgttttaggcggcaaaactctgttaactgctctttcagtccatagggtagcatctcaattta

SEQ ID NO: 472646 - DNA, 122 bp, Homo sapiens
cttcagtttactctgtgtttgtcctcctaccccaggggttctcttcccatccgtgatcctcgtgtccctgccctgggtcagatccagccacagcatgaccatgaccttcttggtgctgtctt

SEQ ID NO: 472647 - DNA, 122 bp, Homo sapiens
ggaaattcaaactaaaaatatgcctctatccagccgttagaccatctgccggagaagacacgagtagctagaaaaaaaaacgaggcgcccacaatgactgctcttatttgaaacactgaacc

SEQ ID NO: 472648 - DNA, 122 bp, Homo sapiens
cggattccctccagtttctcccgctggcgggctgcatctaaagtcgtccgagtcaacagccgtgactctgggtgatactagctctcattaaccgtccacagatttggggtgttatgtgactg

SEQ ID NO: 472649 - DNA, 122 bp, Homo sapiens
tagagaagtggctgctttcttttggtgaccctccaggggtggaatcggagtgtgtctgcccgcccttgtgacagacacacggaaggcttctgacgcttgtggccagactgcaattgcactta

SEQ ID NO: 472650 - DNA, 122 bp, Homo sapiens
acgggaatatacagagaggcctcgggtcacagacttaaagctgtaaaagggaggaggcgacggtctggtcccagtcaccgaccagccaccgactactagggcccgaacccgggactgcagac

SEQ ID NO: 472651 - DNA, 122 bp, Homo sapiens
gagttagcatctgctcgcccttctgccccatgttctttgagggtgaggaggtggtaaacacgggcatgacacagtgtaagcatgactgctgccgccggctcttactgtaaggtttttagtta

SEQ ID NO: 472652 - DNA, 122 bp, Homo sapiens
ctgggggagagcagggtcagcggggccagcggggccccagggcggtgggtgcgggggggccggaggctcaccgacagcatgttcttggagatgatgacggtgacgttgtacagaatgaggca

SEQ ID NO: 472653 - DNA, 122 bp, Homo sapiens
ggcatatagttcattttgaactgaaataatgctgcaatgcacagcggcgggaggccagcgcgtccaaaacctcttccctcctaccgcagtcgccgcctcggtgggaccaagcccggaatccc

SEQ ID NO: 472654 - DNA, 122 bp, Homo sapiens
ccttggaatggaggccctggtgctgggtgggcctgtggatctgagacatgtgcactccttcgtctgcctgtatgtgtacccgtgcagacctgtgtgtaccagtgggcacgcacagggtgccg

SEQ ID NO: 472655 - DNA, 122 bp, Homo sapiens
cttcgaggggaaggtgggcttcctgcaacacaagcggagaggctgtcaggggtgtgggcacgggggtgcggggaggcggtgcaggaatccgtcccgccgagtgccgtcggcccctgtgggcc

SEQ ID NO: 472656 - DNA, 122 bp, Homo sapiens
ttacagatgtgagccaccgagcccagcttacagctttactttgccattttctattctagtcgacttcattgtttcatggtcacagcccactacattaatttgaagatcccctaaattgattt

SEQ ID NO: 472657 - DNA, 122 bp, Homo sapiens
ggaaaggacacagaaacaggaactgcgttagggttaaaaaccacttccctcctttgttggcgggtgctcttgggattgcaaccagcgcaagcagcacccttctgcagaagtaaagatgcctt

SEQ ID NO: 472658 - DNA, 122 bp, Homo sapiens
agacccaaggagggagcccaccccgggggaaggaaggagacatttccaacactgagaccacgccacatggtctatagaagcagttgcactgaagacatgatagaggcaaccgaggaatgtga

SEQ ID NO: 472659 - DNA, 122 bp, Homo sapiens
atcctcagacacttcacaattgttatcatcatctcatacgggagggaactgaggctccagcgttgaagtcattggcagcaatgggatgagtgggatgggtgtcactttaccagctaggttga

SEQ ID NO: 472660 - DNA, 122 bp, Homo sapiens
ctgcagagttgggcacattgctcacccctcgtggcctcagcgtccccctcaggatgctatcgtctcctctgggcaggctgagccttcaggcccaggcctgcccgacggtacccacccccagg

SEQ ID NO: 472661 - DNA, 122 bp, Homo sapiens
gggagctttggcttcagtgcgtgggcttttgtgtttctctctctctctctctctctctctcgcgtgtgtgcaagcccagcctcatcccataacacacatgatttagctattttacatctttc

SEQ ID NO: 472662 - DNA, 122 bp, Homo sapiens
tgtctacgtgctggttctctacgccatcttcttgtgcttctccataatgatagagtttaacgtctttaccttcgtcaacttgccgatgtgccgggaagacgattagcgctgagtcgcggccc

SEQ ID NO: 472663 - DNA, 122 bp, Homo sapiens
cccctctgcagagcaggcttggccgaggagtaagcgcggccgctgcggagggtttggcagcggggacagggctgcgcccggtgtgtgcgcggacacctgccgcccgtcctcagcgcccggta

SEQ ID NO: 472664 - DNA, 122 bp, Homo sapiens
aatggtgaaagactggttgatttccccctaagatcaggaatgccacttgtaactcaacatcgtactcaaagttctagtcagggcaattagtcaagaaaaagaaataaaaggcatccagatcg

SEQ ID NO: 472665 - DNA, 122 bp, Homo sapiens
gcggcgggcggggacagaaccgttggctgaccaggacacaacctccatcctgccccagagcgtctttctccgagccccaaccccgagattcttcctccactgaagcgcaggcctcctaaaac

SEQ ID NO: 472666 - DNA, 122 bp, Homo sapiens
ctaaaggggaagtttgtttataattcgtacccactccttgtagaaaggattcaagacagccgatgatgaaaacacccatgcttgcaagtgaaggttctgcctgtcacttctcgcagaggctg

SEQ ID NO: 472667 - DNA, 122 bp, Homo sapiens
ggcggcgggttttggcgtcgctagactgggctgtcttggcagctaaggcgacatcccgagcgtcctggggccaccctgctctccagggcccgccatcctggaaaagaaaggcgaactacatt

SEQ ID NO: 472668 - DNA, 122 bp, Homo sapiens
gtttcattgcttctgttttctagtagggaaatgtggtgtggccacaaactagtgaggatgcgaggacttgaacccaagtcagatggctccagggtctttcctgagaccatactctcccaggc

SEQ ID NO: 472669 - DNA, 122 bp, Homo sapiens
tggacatgccctgtcagagagcaagggaaaggttgagcgagcaactcactgcaacagctacggagccagggctgcgctgccatatctagctcacattctcactgtgactcatttcttggagc

SEQ ID NO: 472670 - DNA, 122 bp, Homo sapiens
taagaaaccccagtcactttttttttctgtcttaatgatagcgtttctaagccacggccccgttctgcagacttcctttcaattctctgcatcgaattaccctctccggcccaccccctatt

SEQ ID NO: 472671 - DNA, 122 bp, Homo sapiens
tgagagaaaacattcctcctatgagataataaccctaagaaaaatcctttggtttatattcgtttacagtcacttttgattcagttcaataagctaccttgagtctaaccaagtctcctttg

SEQ ID NO: 472672 - DNA, 122 bp, Homo sapiens
accgggtctgtcgaagagtgcttgtataggggggtggggcgcgcttgaacccatattccccgcattctgaaccaaattattttccagaaggccttcctaacagaaagctagtgtcaggatct

SEQ ID NO: 472673 - DNA, 122 bp, Homo sapiens
gaaggagaatcaaggggagaatgtattcatccatagatattaaaatgacagaccctagaacggtgactttttttttggaaaattctattaatgatggccatttggataagtactacaggatt

SEQ ID NO: 472674 - DNA, 122 bp, Homo sapiens
ttcgatggaatggtgggaatgaaagcctgattgcaatgggcttaggagagaaattggccacgatgaatacactagaggtaatactttagagttttgctgcgaaaggcggcaaggaaaaagga

SEQ ID NO: 472675 - DNA, 122 bp, Homo sapiens
catgatctgcccacctcggcctcccaaagtgctgggattacaggcgtaagccaccgtgcccggcaagaccctgtctttaaaacaaaaaagacaaggaggtggctcaacctggtacttttttt

SEQ ID NO: 472676 - DNA, 122 bp, Homo sapiens
ttccttgatttgcagctctaatcctcatccttagccccatccctatctgccatggtgggtcggggagagccctgaggagccttttggttcccaagtccatcttgatgttcactcttcccctc

SEQ ID NO: 472677 - DNA, 122 bp, Homo sapiens
accggggaggctgaggctgtgcccagataaataaggccgctttgcagggaaccaggcgggcgcctcctcctcccctcgccctccccgcgctcctccgtggccgccgccggcgccgcgcgcgc

SEQ ID NO: 472678 - DNA, 122 bp, Homo sapiens
gaccctgcccggggaacagctggcgcgaccgcggacagagcttcccaccacgcccttccccgcctttggccagcctttgccgtatgttctggactaagcgcaccccagctctcactgtattg

SEQ ID NO: 472679 - DNA, 122 bp, Homo sapiens
aagggcggatggcagaagagttggcaccgtgccatccattcaggggcaacgccacagtttcgtgtgatagcagcagcgggtatatgatacggggccctgtatgcgggccagacagtgcggta

SEQ ID NO: 472680 - DNA, 122 bp, Homo sapiens
agaccacatgttgacaagcaaaaaacggctttctttgtctggcaagaaaagccactgcctcgcttcagacaacgcttttttttgttggtgtctccgctgacaaccctgttcaaagagagcca

SEQ ID NO: 472681 - DNA, 122 bp, Homo sapiens
ctttattgggacaactggcagaactagaattcagtcagagggttgatggtaataacataccgatgttaatttcctgagtctgatggctgtgccggagaatgtcgttgttcataggaaatacc

SEQ ID NO: 472682 - DNA, 122 bp, Homo sapiens
aatccccaggatcaggaaatgaaatgtttcccataaccaccagaagaaagtatgctggggcgggaagaagatcacaggtgaccctgagcaaattactcagcctctctgagcccttcatataa

SEQ ID NO: 472683 - DNA, 122 bp, Homo sapiens
gactaagtttttctggactctcaagggttaaataataggtaaaagaactgtcaacttacccgccaaagtatgctgacgcgcatatctgctttccgcttcatttcgagttcataaatttaaaa

SEQ ID NO: 472684 - DNA, 122 bp, Homo sapiens
gcgccgtgccccgccccgcgcctcctgtcggcgcgtgcgcattgacttacccgtgccgcgcggacgcactactgtcatttgccgccaaaaccccgcactcaggagtcctggcgggtgcagcc

SEQ ID NO: 472685 - DNA, 122 bp, Homo sapiens
tcggcccgcccccggggtgcattgtgggaaatgtagtccttagcgtttggccgcctgcggcgccgagggactggttctgggctcctagtcccagcagagccgtgggcaggtcctgacccggg

SEQ ID NO: 472686 - DNA, 122 bp, Homo sapiens
gtcacgggagagcctcgtgttgtcgcagaccggacttgctcagccctgggacctggggcccgcggctgaccagaagtaattttgacccgacgtagtccttatggtgtagggtcgaagtttaa

SEQ ID NO: 472687 - DNA, 122 bp, Homo sapiens
acactttattgaggtataattgacatgtgaaaagcttgtagtcctagcactctgggaggccgaggtgggaagatcacttgaggccaggagtttaagaccagcctgggcaacatagcgaggcc

SEQ ID NO: 472688 - DNA, 122 bp, Homo sapiens
atgagagtctggcggtcgcttccctgagtgttaaaatcgctcggaggctggtcctgtccccggtctttcaccacagggccatgtagacagctcctgtcgcggagtttgcctgcttcaaatcc

SEQ ID NO: 472689 - DNA, 122 bp, Homo sapiens
ggtataattagagtacaatagactgcacatatttaaagcgtacactatggtcagctttgacgtatgtctgtacccgtgaaaccattgccacaatcaagataataaacattttcatctctctc

SEQ ID NO: 472690 - DNA, 122 bp, Homo sapiens
cgcgtgccctagacggccttgatgaggaagcccgccttctcctggatacctccttgatgccgcgcttgcccaccccgaagtcccgcagggtggcgatggagaagcgcctgagcggcttggtg

SEQ ID NO: 472691 - DNA, 122 bp, Homo sapiens
agttatctcccatcccctttgcttgataacgtatgcgtagtatcaaaaataattaagggccgggcgcggtggctcacacctgtaatcccagcaccttgggaggccgaggtgggtggatcact

SEQ ID NO: 472692 - DNA, 122 bp, Homo sapiens
gatattgttggttctccctgaagcacatcctggccaggagacagagcttaggccagcccccgggccaggtgcctgctacccagacctgtgatcctagccaaaagtctctgagttctggatgt

SEQ ID NO: 472693 - DNA, 122 bp, Homo sapiens
tgtagcattctgcagctgggctgcaggcgccgtgggcctccgccagttgtgttcgagacgcggttcggccacagaagttttagcttgtgacttttggcaagtcagtggccctctctgggcct

SEQ ID NO: 472694 - DNA, 122 bp, Homo sapiens
cgagtccaggctgggccctggatgtcgtggccgcagggtcggggtgtggttccccgggagcggcagagcttgtgtccccgctttgtcccctcaggttggtgggcacgtggcaccccaggata

SEQ ID NO: 472695 - DNA, 122 bp, Homo sapiens
gaaacggcgacagcagcctcttcccaatgttgagagcaaaaagtgtgaacccagaaattccgagacagatctcaattacttgccaaggttgaggacgcgcgcgtgacagcctcaggaagtcc

SEQ ID NO: 472696 - DNA, 122 bp, Homo sapiens
aagctgtccctggaaagaaggaacactgagtcctgagggcaaaggcgagaataaacaccgcgcaccctcagccggggccccgtgttcctccgtgatgttccacttttggaaaggaagctggc

SEQ ID NO: 472697 - DNA, 122 bp, Homo sapiens
aagaccgcacaagtttacaagatgccaaaatataatttatcatcttgttccagatggtaacgacttcagccagcctgaagggaagccacatcctttcctaagttggcagttcctgtcagagg

SEQ ID NO: 472698 - DNA, 122 bp, Homo sapiens
agagtttctggtaagtaggttagaggtagtcctaagcatctctgtttttaagaatctccccggatgattctgatgtgaagccaggatcattaaaagagtagagaatgactggtcttatagaa

SEQ ID NO: 472699 - DNA, 122 bp, Homo sapiens
aaacagggcagcgcgcagtcagcatcacccagccttgatgagcacgccgcgatgctgctacgagctctgtgaagacgcgattttaattccagccagtcggtaggttgtgtgtctgtgtggcg

SEQ ID NO: 472700 - DNA, 122 bp, Homo sapiens
ccggaaggccaccagcagcggcgggatgtacgtgagcgcagcggccagcagcaggaacagcgcggctttggagcagagccccgcgcggtaactgcgctcgaccgggtgagagaagagctcat

SEQ ID NO: 472701 - DNA, 122 bp, Homo sapiens
ttggggcgggaccccgggtcgggagaacgaccttggggcggggcgtaaggcaggatggggcggggtttgtgggggtcttggtggcaagtgagggtcccgcgcaggcgctacgtcccggcctg

SEQ ID NO: 472702 - DNA, 122 bp, Homo sapiens
caggaagacgcgtgtgggaaccagacgctccggcaagggcagactgcactcagcacagagcggccccggcccgggaacacccaccttacggatctgattggtggtcagcatgatgacgtcgg

SEQ ID NO: 472703 - DNA, 122 bp, Homo sapiens
tccgttccacaccgcggctccctcggctcggagccacagggaactatgaaaatcggcacgcgaggcctaagtgtccccagaaccagaggaaccacagttgcgtcatagcagaaggacctctt

SEQ ID NO: 472704 - DNA, 122 bp, Homo sapiens
aaaaagaaaaaaaaggacattgccagagtcttggcgatttggcccgacgcgctccgctttcgctacagcatggtggcctactggagacaggctggactcagctacatccgatactcccagat

SEQ ID NO: 472705 - DNA, 122 bp, Homo sapiens
tcggaggaccccggggttggctttgggagctgaaagtttccttggacccctcggaagccccgtgacatcagaggccgggcctggcaggggcaggcaggaaacgtgtctggaggctactgccc

SEQ ID NO: 472706 - DNA, 122 bp, Homo sapiens
ggggcggggctggcaccctaggggcagggctcaccgcactgcgtgatgtagtccacacagcggtacacgatcaccgggatatccgagtccccaagctgctgctccgacagcgtgtcccccat

SEQ ID NO: 472707 - DNA, 122 bp, Homo sapiens
gtgtttgggggctgcgtggtgagccgaggcaaagccagggtaccccgatcgtcttccgggcgcatccaccatgcggcaccgccccagccacggcggccgcgcgtggagacccgggggcttaa

SEQ ID NO: 472708 - DNA, 122 bp, Homo sapiens
caccagccctcctccatagtgagctgagagctggctagggagctgctggagcctgccatccgtccatctgtccatccatccacaggagccaggccatctccagcgggggaacaccggctagg

SEQ ID NO: 472709 - DNA, 122 bp, Homo sapiens
aaattgcttgaagatgggactctcatggccctgaggcagaatctccacctgcagggacagcgggggagaagtctggttcacaaagttgccacctctgcctctgcccaggaggacaggagggg

SEQ ID NO: 472710 - DNA, 122 bp, Homo sapiens
aagtaaatggtgaacccaaggttatagaaccaattaaacagtagctcagggaccagagtccgggttttctgattgccaggacaggtgctttccactagtccacccagcaactcttgctgaat

SEQ ID NO: 472711 - DNA, 122 bp, Homo sapiens
tagcggggtgcttccccagctggtcgcaggaatagtgcgttttctttgtcgcgcaaggggcgtggttcatttaagccggtagttgaagcgctgggggcagctgtagtgggagtgttccagga

SEQ ID NO: 472712 - DNA, 122 bp, Homo sapiens
gcgcttgtctccgcgctctctccacagcctccctccgcccgccctggcctcttttaaatccgctcctgccctcgcagcgagcgagctcattaatatgcagaaccactcggtgactcactgag

SEQ ID NO: 472713 - DNA, 122 bp, Homo sapiens
ggtataaattcagaggcgctgcgctccgattctggcagtgcagctgtgggaacctctccacgcgcacgaactcagccaacgatttctgatagatttttgggagtttgaccagagatgcaagg

SEQ ID NO: 472714 - DNA, 122 bp, Homo sapiens
acccaccgggaggaatgaacaactccagacgcgctgccttaagagctgtaacactgaccgcgaggctttgcagcttcactcttgagcctctgcagcttcactcttgagccagcaagaccaca

SEQ ID NO: 472715 - DNA, 122 bp, Homo sapiens
atggaggccaggatctgctcaaaggagatgcaccagtcggtgtcgacggtgccgccgatgcgcgctgtggggctgcaggcctccccgcccaccagcaccgtgtcgtctgcaaggtcttcaca

SEQ ID NO: 472716 - DNA, 122 bp, Homo sapiens
tctgcatttttggcttgaaaaccattcagtctgcatgtcttctctctctgtggccacatacgagacccacatttcctaacttgcaatgttcccacaggagaatgcatgctcaatttgctgat

SEQ ID NO: 472717 - DNA, 122 bp, Homo sapiens
ggcttcctgaggacgggctcgggtgtcggccagaggctccaggtgctgccggttcgcggacgcagagctctcagcccaaggagcagcggctgcgggattctggcctcttttgtctccgctcc

SEQ ID NO: 472718 - DNA, 122 bp, Homo sapiens
tcttgatacataaatacccagccccatccctgccctagaaaagatagacgtatattaattcggaaaatagctctgttcacctgcccctgccacccacctggagctcctgccccacaaagctg

SEQ ID NO: 472719 - DNA, 122 bp, Homo sapiens
tgctgcctttgctctgatttcagttttattttttaatctgcccttgctccctctctgggccgctcggcctccggcctcggtttcggcgtttttctccaaccggccctgacacctgctcttcc

SEQ ID NO: 472720 - DNA, 122 bp, Homo sapiens
acaagacagatagtagtcttctctagtatatgtgatatctggactcctcaatttgatattcgtataaaggacaagatgaattatttcctcttgtatagaagaacagcaaccccctctgctca

SEQ ID NO: 472721 - DNA, 122 bp, Homo sapiens
agcccagcgagcaccgggttcctgcactggcggacggaaagcctcaggtgaagagaataccgggtgcagtcgcgcacaagcagcagcttaggacctggccctctttcggaggcatggctgtc

SEQ ID NO: 472722 - DNA, 122 bp, Homo sapiens
taccatacccatagttggtggtgttatcctggccatagccatagccatagccatagccctcgtagcctgcagtgagggagacagagacagacagatggtgggggcaggcagaggggaggcag

SEQ ID NO: 472723 - DNA, 122 bp, Homo sapiens
gcccaacccggtctcccgcaagatggagccgggggcgggcccagggtgggcggggcgtctcgcgagcccgttaggatcgcggctgcagccgggaacacccccggagccggagagggcgctgc

SEQ ID NO: 472724 - DNA, 122 bp, Homo sapiens
ccaacctatagtgccctgtgacttctctcctcccctttgctcactgtcctggagtggcaccggcctctgcactgactcatttctggtcttggggccagtctcaggggaagctgggtggggga

SEQ ID NO: 472725 - DNA, 122 bp, Homo sapiens
gcctaagcctgacccgagcctgccttgaaccctctgtctccacagggaagtatgtgggctcgcgccccatcaagcttcgcaagagcatgtggaaggaccggaatctggacgtggtccgcaag

SEQ ID NO: 472726 - DNA, 122 bp, Homo sapiens
tgggcgttttaagggctgtgggcgtcacattcgtcggtgtgtggccaaggggacatgacacgttttaggaaaagtaaacgtgctactaagttgcacgacttgtcaagaaaagaggcgcttcc

SEQ ID NO: 472727 - DNA, 122 bp, Homo sapiens
tcagtagacacatgtggctggtggctcctgtattggacaaactagttcctgggctgcactcgtggcaggaagagcagagattggatgggaaggggaggtaataaagtgattagagtaaaaag

SEQ ID NO: 472728 - DNA, 122 bp, Homo sapiens
aacctatagggagggaggttggggcgccagccccgcccccccaacgtgacgcaaatctcccggacagaggcttaggagcccgggccccagtccctgcagtggctgtaacaaaacccagaccc

SEQ ID NO: 472729 - DNA, 122 bp, Homo sapiens
cacagtcagaaatacttggggaaagttctcaatgactgccctataagtatcagcatctgtcgttagaaaattcattgctgctgaaatagtcaaatttcttatatttctcattctagaaacat

SEQ ID NO: 472730 - DNA, 122 bp, Homo sapiens
agcaggcgtggctaccagctccaccgtgctaaccagtcgcgcaggactcagctcgccctccgaggaaaccaccatcacttgggatcctgaaggaaggagggaaactgagttagcagagacag

SEQ ID NO: 472731 - DNA, 122 bp, Homo sapiens
agagcacagacgtgtccaccacggtgctgtggatgacctgtgggcagcggcagagatcagcgcacgtggggcctgcgcaggtcctgctggagaaccgcgcgggacccgggccggcagggcac

SEQ ID NO: 472732 - DNA, 122 bp, Homo sapiens
aactaaaagaaaccaaggatcttggtggtggaatttgcttgacttcttgtcctccaatcacgtccacttcctgttttcttttaaagttcactgacaagatcttattttatgtgacaaatatg

SEQ ID NO: 472733 - DNA, 122 bp, Homo sapiens
ctagccgctgcactgccctgtcctgccctactctgattggacgaccctactgcatcactgcgcatgtatctttgcgtttggctttaaatgcttccaagtttgattcaagtttacggttcaat

SEQ ID NO: 472734 - DNA, 122 bp, Homo sapiens
aagggggtggagccaagattagtccccgagtgcgcgccaggaggtaaccactgccggaggcggggccgccgctagccactcacagggcccaatgggaatcccgttagttcactggctaggag

SEQ ID NO: 472735 - DNA, 122 bp, Homo sapiens
tggggggagggtcggggggacttccagtagctgagtccgtttttttccactgagagcttccgcatcctgtgtgacaggacaatgtgttagtgagtgtgactgtgtgggttggggaggagggg

SEQ ID NO: 472736 - DNA, 122 bp, Homo sapiens
ggtgaaaggatctgagatcacaagtcgcttccaaaacacaagccagcgcggaatcggaagcgagtgcatttcgcaggcagccgtggacacgatcgggtttcctgtgccagtcaattacatga

SEQ ID NO: 472737 - DNA, 122 bp, Homo sapiens
gtgtgaccacggaacggccctgctggtgccgggagcttggggggtcgagggcttggcagccgcagcgcacaggccccgcgcgggtgggcggtcagagcccgggaaccgaggaacgggtgggt

SEQ ID NO: 472738 - DNA, 122 bp, Homo sapiens
tgtgtgtgtgtccatcaacaattttcagtgaaaattgaaaaccagaattaaaattaaaaacggaaatctggaattaccacatgtgtgataatccaacaaagatggggtacatggaggaccag

SEQ ID NO: 472739 - DNA, 122 bp, Homo sapiens
gcactggttcagtctatgtatcatgcgagggcctaattgaaaacacgtgaatgaagtgtacggccttctgttcccagctgaggggccccctcccacggtggcgttagcagtggggtacagtg

SEQ ID NO: 472740 - DNA, 122 bp, Homo sapiens
cttatttcgggaatccctgacgcatttctttaccgtccctcatttcaaagcacaccatgccggcagcacttggaggtggtatgtgctgggaaactgaccaacagtttagtcagactgagtca

SEQ ID NO: 472741 - DNA, 122 bp, Homo sapiens
caggccctggggaggatgcagcaaaggacagggtccctccctaagtcctggctgcagccccggaacaggggctcccttgccctccccgagtctctagtaggctgacaccaaccttggcaccc

SEQ ID NO: 472742 - DNA, 122 bp, Homo sapiens
ctcctgtgaaattgttctttcacttccactaaacagctctgtaattcttcaaatctgtgacgccattgaggtcaaggaagttcaacagtaaattatgaatgcagtaggaaatgagagtagtt

SEQ ID NO: 472743 - DNA, 122 bp, Homo sapiens
atttcatgggtacttcaaaattaccatgccccaaacagaagttatgatcctcccatcacacgagcaaccccccacacccagccttcaacttgctccttctcccagaatagcatccacaacta

SEQ ID NO: 472744 - DNA, 122 bp, Homo sapiens
ggtacatgaccggcatcgactaatcagggccaggctcgatgaggctttgtctccctaccgcgcgcggggccgattctcccgcctcccagccccggcgcacgcgcgccccgcccagcctgctt

SEQ ID NO: 472745 - DNA, 122 bp, Homo sapiens
atcaaactccaataatttacctcaaaccacaacttatcattccagcttttactccatcaccgtaccatacttgttagcctcataaaaagttatattccagtgattgcttcattctcttccaa

SEQ ID NO: 472746 - DNA, 122 bp, Homo sapiens
ggatacttttttgcaacgagatgccaatttccccggcgaccactccctcaaacaggccttcgcctccgcccgcgctgaggcccaggcccaggtccagattcagagccgcccgccggctggcg

SEQ ID NO: 472747 - DNA, 122 bp, Homo sapiens
tcccccccaagacacagttgtttctgacacataggaagaccacaagtttacaaatgcaaacgccgagggcacggggcgatgctggctccacgtccaggcgatcttccctgccgggccacagc

SEQ ID NO: 472748 - DNA, 122 bp, Homo sapiens
ccccgccgccctcatttgcttatccccatggcaactcagagcccagctgtcaatctcctgcgggaaacagctgtgggaagaggtagggacgggccgccggctagaggagagggcagggccct

SEQ ID NO: 472749 - DNA, 122 bp, Homo sapiens
tgtacgcaggtctctcgagatcacacgtcagacgtggaaggtcctcacggatcactagtccgagcttccattttacagatgtgcacactcaggccaaagacgacggctgacgggccaacgtc

SEQ ID NO: 472750 - DNA, 122 bp, Homo sapiens
agtaatattagtcgattttcctgctctacagtgcggcttggagaagtcttgggaatcaaacggcatgaacttagattcctgttacacaacttttcaatgagggaggaggatatcgaatacct

SEQ ID NO: 472751 - DNA, 122 bp, Homo sapiens
gtcttaggtccaaacttgttttttcttacattgaaacctggtgatgctacacacaagctccgctcctggattttgatgagggctgcactgtccacatgcttggttcccaagagggtgtctaa

SEQ ID NO: 472752 - DNA, 122 bp, Homo sapiens
tggctgggcagatggccacggcgtccttccctgcttctgggggttggggaatgggtttctcgggggttgatatttttgctcaggggccaactcagaaaaccttccttcacacttggaaacag

SEQ ID NO: 472753 - DNA, 122 bp, Homo sapiens
agagaacaggaaaatctgaaacctggcttcacttccaagctccagccggaacactgtgcacggactcctagggtgggccggaacactgtgcacggaccccctaggatgggcactgcggggat

SEQ ID NO: 472754 - DNA, 122 bp, Homo sapiens
cccgcggcgtcccgcctaggtgagctccggaccctcccgccccaccccagcggggctgctcgactccgtcgtgcccccttgggcttccactgcaggaatgcaaggcgggtaaccttcaaagc

SEQ ID NO: 472755 - DNA, 122 bp, Homo sapiens
cggacgtgacacctggtccacgcctggcccaccctccacaagcagaggtcctgcctccagcgcccaccaccccacacgcccacctcggacctcgccggcggggcctccgtgccctcagtgac

SEQ ID NO: 472756 - DNA, 122 bp, Homo sapiens
cgcccccttcgcggcctaggttggtctggtgagccgggaagcgggcgtcgttcgcagcgccgctgtgaccaccgcgtcccgggcggagctgggctcagtgccggcctgggcctagagtccga

SEQ ID NO: 472757 - DNA, 122 bp, Homo sapiens
actgtcctttccacttccatccaggccccggggtcggcccaggtggctggactatgcgggcgcctaacccttcaccgggacctgcgcaccggccgctgggaaccagacccacagcgctctcg

SEQ ID NO: 472758 - DNA, 122 bp, Homo sapiens
ttctaatgcctcgaagttgtttctttttggttttccagctgagcatcgagcaggcccagacggtggcggaacaggtggagatgaaggcgaaggttgtgcagtcggaggtcaaagccgtgacg

SEQ ID NO: 472759 - DNA, 122 bp, Homo sapiens
cctgctgcaaagcagaggaagacagtcagagggtgtcagcttggctgcagtgacatctcacgctgcagctgccctactcccagatcccactccgtgtgtgccccccaccccagggcctttat

SEQ ID NO: 472760 - DNA, 122 bp, Homo sapiens
cgacagaaatgtctcccttggctggcgaaatgacctgcgtgggaggcggtgggacaaagacgcggcttgtacatttgttgtagtttattcgcagatgttcacggcagatgtcctggccactg

SEQ ID NO: 472761 - DNA, 122 bp, Homo sapiens
ctgaatggatagtatactggcctctgcaccagaagacctggggtccaggcccagtactgtcggaaacagttcttcatactttattacctcgtttaaacttttcttagccattatattgataa

SEQ ID NO: 472762 - DNA, 122 bp, Homo sapiens
agacaatgaatgagcaagtgctttgtaaaaggctctacacatagaaagtgatgctgttatcgttgaagtggacaataccctagtaagccaggctggatactatgttttatccagcctcaggc

SEQ ID NO: 472763 - DNA, 122 bp, Homo sapiens
ggggccctctcctatggcaaatgcccaaattctggctttctattgcatcatggtcacttacggattcttcacaacctcccctcccccttgtcctcacctcctgtggagaccactgccttgca

SEQ ID NO: 472764 - DNA, 122 bp, Homo sapiens
ctactcagcaacagaacatttcccagcagaaaggctgggagtgtggttaggtgcctgggtcggccgcggatagagcctggccatgccgccgaaagaccatctactagaaagcccggaaactt

SEQ ID NO: 472765 - DNA, 122 bp, Homo sapiens
gctgggaatttagccccaggcccaaacaaacacgacagaccctttcaacgctaatcttctcgggtcaggaggcttgtgatattttgctatctttcttgatattttgaacccatcacaaggtc

SEQ ID NO: 472766 - DNA, 122 bp, Homo sapiens
tagatcattctattaagtctaaatgacatgtgagtatccagggtatttggtgagtgtttccggtggacgttcccatgaagttatttacctagtcctgacctgcagatagacgcagaaactgt

SEQ ID NO: 472767 - DNA, 122 bp, Homo sapiens
accagcaaagaggcagagaggaactgaaataattgaaatacagaggaaaactggtgagggcgaggttatcaaagaaagttcaataaagtagtgagattggcagaattcataagggtggagta

SEQ ID NO: 472768 - DNA, 122 bp, Homo sapiens
tcacgtgggtacgtgggcgccaagagggccggctgtgcatccggcgtgggcggcacagaacgacctcgccccgcccgctgggtccccaagcccgccctgcacagccgggcctcggtcacctc

SEQ ID NO: 472769 - DNA, 122 bp, Homo sapiens
ggcgcgtcctgctaaaatgaaacgaagagcagatgtgaactcgggacaatgaaccaccagcgtgtccagctgtggggctgggaccccttcaggatgcgatcagatcaaggcaggcagaaggg

SEQ ID NO: 472770 - DNA, 122 bp, Homo sapiens
cacagaggttggggaaaagaagccccgatagggcagccttaaggcaagcaggagtggacccggaaatcaggggtctggtgtgggccacactggatgtacaaagaggcctcttcctctgggcc

SEQ ID NO: 472771 - DNA, 122 bp, Homo sapiens
acctcaagtgatccgcctgccttggcctcccaaagtgttgggattacaggtgtgagccagcgcgcccagacaaaaatgtgtatgtgtgtctttaaggctggtcaagcaaagcagtggaactg

SEQ ID NO: 472772 - DNA, 122 bp, Homo sapiens
gcaggcagtgccatgaatgacccactttaggtgctgagcacccaggagcccttcttagtgcgatttgcctgggctgccttgagaccacacatgtgatgcgggggtgggggggaaagggtaac

SEQ ID NO: 472773 - DNA, 122 bp, Homo sapiens
aatgagtcatcgccagcccctgcaatgagcctctcaggctggtaagttttgtttcagaaccgcttcctcaagcttcttttgcctttaaaagcttcctcttgccccagcctcccagggaatgc

SEQ ID NO: 472774 - DNA, 122 bp, Homo sapiens
gtgggaatggcaagtttaagtggttttggaatccatgtggtttgaaatttcattctcctacgaggaaggtttatagtatagaaatgaacctacagcaatcttacattttattcacttgtcag

SEQ ID NO: 472775 - DNA, 122 bp, Homo sapiens
cctttggtatgtacactctgatgctggagaaggaggcctcagtcctttgtggctgggtgacgtgagccactctaagaggcctaagtaccctcatcctggctccagctccaagctcacccagt

SEQ ID NO: 472776 - DNA, 122 bp, Homo sapiens
cgactcccctgcaaaaagtctggtggacatcgacctctcctccctgcgggtgagtgggcccgcgagcgggcgcgcggggagcgggcagccggcagccggcagccggggccgcgcccaggtcg

SEQ ID NO: 472777 - DNA, 122 bp, Homo sapiens
ctctatgcaaatgcagagtgactttgtacgacttccataaaaaataagcctttcttgtcacgtattagtgagcaaggtgtctctatataaaacggatgcacgtgacacaagaaaaggcaatt

SEQ ID NO: 472778 - DNA, 122 bp, Homo sapiens
ccctagtgaacggtctaaacttccgctagatgctttgggaattcgtaaagcgactgcgtgcgcggcagccaagccacagctttacagggttcgccttctgtgtgggaacgcagcttttcccg

SEQ ID NO: 472779 - DNA, 122 bp, Homo sapiens
ctttggttggaacttaagagcctaaagaatcacatgagacccgctgggtgcggtggctcacgcctgtaatcccagcattttgggaggccaaggagggcagatcatgaggtcaggagatcgag

SEQ ID NO: 472780 - DNA, 122 bp, Homo sapiens
ctccgaaggatcggcagcgagagggcggaaccggatccgtgagagtcgcggcccacgctccgagcgtcaccctgtcaccgcccagctgcgcatgagcgctgcaactcctgctgactgcgcag

SEQ ID NO: 472781 - DNA, 122 bp, Homo sapiens
gaggtggctccatggatcccagagaggcctgtgccaggcgtgggggtaggggaccaaatccgggccagggagttcctgggcacctgacatggttggattccccaggtgcgcgtctacagccc

SEQ ID NO: 472782 - DNA, 122 bp, Homo sapiens
gcggatagagctctgtagctgcacttaagttcaaactgtgacatcttccagggtaggccgcgtctctacttatctgtggtctcagcgtccagcacatggcgtggaagagggggtggcgtcag

SEQ ID NO: 472783 - DNA, 122 bp, Homo sapiens
aatctccttcttcattggctccccagtgacctatattcatttagcaagctttgcattcctcggtcccttgctcattttttagaccctaagtttaacatattgttttaattaacattttagga

SEQ ID NO: 472784 - DNA, 122 bp, Homo sapiens
cgcacagacggtccccagcggcggcctgggccagcggcgaagcagcggcagacggttctccggcccccgccgccccctcaccgctcccggggcaatctggcgctcagagcttgcggcgttgc

SEQ ID NO: 472785 - DNA, 122 bp, Homo sapiens
ctggaaaatcgggtcactcccacccgaatattgcgcttttcagaccggcttaaaaaacggcgcaccacgagactatatgccgcacctgtctcggagggtcctacgcccacggagtctcgctg

SEQ ID NO: 472786 - DNA, 122 bp, Homo sapiens
cacgcgcgccctccagcggtgtttgcgggaatgacggctggtcgggaccagaagacctaccgggcacgaggaagctttcctccctgagcatcaaccgcagcctagacgcccgtccagccgtc

SEQ ID NO: 472787 - DNA, 122 bp, Homo sapiens
ccttctgccgtcagaagttcctggagagacgggagtgaggcatgaggacggtgtctggggcggtggtgtctggggcctgatgacagaaaacttctgtgcgacttcgttcccttccctgtttc

SEQ ID NO: 472788 - DNA, 122 bp, Homo sapiens
cagactctagagcgacagcggaaacgaggggtgagattaggagtacttgataagagtaaccgaaaacataaggtgtctaggaatgtatctagtacaagaaatgcaaggttttatgaagaaaa

SEQ ID NO: 472789 - DNA, 122 bp, Homo sapiens
ctctgtcactaaccagctcatatttttggaacttcagtttcatttgctctctatatttggcgggtattaataggtaatccccgaggtcacatccagttaacatttggttttcttgtctaagt

SEQ ID NO: 472790 - DNA, 122 bp, Homo sapiens
ctgtttcctttggcaatttactgaagttttgtaacttccctttggggttaccgttttgtccgttaggaacttccaagtttttctctgaaacaccatttatttaaccacaaaccaagtctacc

SEQ ID NO: 472791 - DNA, 122 bp, Homo sapiens
aacttaattaaaatccatggataattttccaggaagtagattaaactttaatggtgaatgcgttctgttaagagactttaattctctctgacttgtttaacttgggaggggaaaagcctaaa

SEQ ID NO: 472792 - DNA, 122 bp, Homo sapiens
cctcctttctctctcctcaggggccacttctataacacactggagcaatatgactggcggcgcttccgggccctggctgaggagtcccagctctatgagcaaagcctcagcctctttctgca

SEQ ID NO: 472793 - DNA, 122 bp, Homo sapiens
agaggcgtacacgcacggagcaaacacgagagacacgtacacagatactcaacacatgcacgtacacaccatccacagatacacgcagggtcacaaacataccagctcagaaacacaaacac

SEQ ID NO: 472794 - DNA, 122 bp, Homo sapiens
ccaccagatcaggtcacttgttacgttataccctcacggacttgtcacgtgggtgtttatcggtatggctgtcgaattagcatctgccgctctcaacagactgtgagccatgtgagggcagg

SEQ ID NO: 472795 - DNA, 122 bp, Homo sapiens
ttctgtaataaaacatctttttaaaaaacaaactcttttcaggcagggcgcagtggctcacgcctgcaatcccagcactttgggagtccgaggtgggtggatcacaaggtcaggggtttgag

SEQ ID NO: 472796 - DNA, 122 bp, Homo sapiens
gccctccctgttataccaagaatgcttagtcattccttcttctgtacaacagctacacagcgtacctgctttcatcaccatattgactgcatgcttcatttaatttatttatttgtctgcct

SEQ ID NO: 472797 - DNA, 122 bp, Homo sapiens
tctctccacaggagggtagtatttcaaaaggcaacatacattttgggttggaggaaggggcgggtggagagtgaatgattccattggctgccacactgaggctcctggctttctatggaact

SEQ ID NO: 472798 - DNA, 122 bp, Homo sapiens
ggcaagccactctggccgagagggagccccacacctcggtctccccagaccggccctggccgggggcatccccctaaacttcggatccctcctcggaaatgggaccctctctgggccgcctc

SEQ ID NO: 472799 - DNA, 122 bp, Homo sapiens
tgcggcccgctctcaggtttggagcggacctcttctcccacctgtttgagggtgcaaaaacggaaagacactgaatttgtccgctgagcccacctcccctcccagccactgggaggtctgta

SEQ ID NO: 472800 - DNA, 122 bp, Homo sapiens
taaccctggggtctgggtccttccgatcaagaggaggcctctgggctgccgggcttcctccgagggctgacatgcatcactgggcagctccaggctgtggctggagagctgagcccaagctc

SEQ ID NO: 472801 - DNA, 122 bp, Homo sapiens
aacacccgcaggcaggtgtgggcgacgccagcagcacacggggaagctgggcacgtggggcggaggcagctgcctggtttccatgtgtgcgccctttaagacccggcggcgcgacggaagcg

SEQ ID NO: 472802 - DNA, 122 bp, Homo sapiens
gccccgctgaaacagaagagggcccttgtgggctggttttggctagtttggtttacttttcgtagctgggtctgcatggtagcctcgctggaaagctacagctctgaacctctctctgcgag

SEQ ID NO: 472803 - DNA, 122 bp, Homo sapiens
gggccgggctccgaggcgctgctcaggcattggggtttgtcctcatgagctccacgtcggcgtgcaccatctccctcaccagctcctgcaacacaggggtgggcgtgagggaggagcttctg

SEQ ID NO: 472804 - DNA, 122 bp, Homo sapiens
agtgggtgcgcgcaccgtgcgccagtcaaagcagggcgaggcattgcctgactcgggaagcgcaaggggtcagggagttccctttcctagtcaaagaaaggggtgacagacggcacctggaa

SEQ ID NO: 472805 - DNA, 122 bp, Homo sapiens
gcgtgcggtgctctctgcataggtttagtggtggggaccaacacgcgagctggcgctttccgtgcgagcccagcatcaggcggaggcccagggccaaccggactctgaacaaagggagccga

SEQ ID NO: 472806 - DNA, 122 bp, Homo sapiens
acaggcgtggtcaatacgtgcttcagtgcggacgaaccatggaaacaggcgtgttcaatacgtgcttcaatgcggacgaaccatggaaacaggcgtggtcaatacgtgcttcagtgcggacg

SEQ ID NO: 472807 - DNA, 122 bp, Homo sapiens
agtgcccacgatcttctgaccatcaaacaagaaacgttgctgtttgaagctatacacggacggcagaacaagaagtggctgtgtcactggatacctgtacatttgaataccggccattaggg

SEQ ID NO: 472808 - DNA, 122 bp, Homo sapiens
cgcatcactcaaagcagatgggatgtatctcagccacaggtgaggacccaggccacctgccggaagaagcagacatctggctgggtcatgctgagaaacggactgtttaaatccagggcctc

SEQ ID NO: 472809 - DNA, 122 bp, Homo sapiens
agtggtggccggaccaggcccggggcctgggggcgccgagggggccgcggaggagcgccgcgtcaaggtctccagcctgcccttcagcgtggaggcgctcatgtccgacaagaagccgccca

SEQ ID NO: 472810 - DNA, 122 bp, Homo sapiens
agatttctaaagctcctcctctagtgagcaacctgggatgtttgtgctcaaagaaaacagcgtttccagagcaccatggcgcctagaagtgggctggccaatgtggtcaggaaggaagggtg

SEQ ID NO: 472811 - DNA, 122 bp, Homo sapiens
gtgccgggctgcgctccagggaccgctggggccgtcaccaaaagaacggagcccagggaacgtggagaggagcccagatgcctgaggtgagcaaggcagtgcctccgtccagcctggcatgt

SEQ ID NO: 472812 - DNA, 122 bp, Homo sapiens
gacgagtccattcttatattcccttgaaggggtggctcgaatgcacctggctgggggggacgctcctattttctactgatgtgggggacagaaaaggaagatgacaaaatgtgaaaattcga

SEQ ID NO: 472813 - DNA, 122 bp, Homo sapiens
gcggcggctgctctccggtggggactccgcgttttctccctggtcgccgctgcctcttctcgctcccctcaggcgacggcggcagctacagctgcttctttatacgtttttctgcttagatc

SEQ ID NO: 472814 - DNA, 122 bp, Homo sapiens
caggtcttgtgttactgagcgcagcctgacaatcgcatctgcaccgaggccctgccacggcggttcacggcaagggtctgtggctctcctgtgcgcagcccaatggaaaggcagagtgaccg

SEQ ID NO: 472815 - DNA, 122 bp, Homo sapiens
cgcacccacacacctcaacccttaccttgtcacctaacaaggtttcaacgagcctgtcagcgatttcctctctctggaccctaaaatttcccacagcatcattagtacacaggaagacagaa

SEQ ID NO: 472816 - DNA, 122 bp, Homo sapiens
ctctcagtttcctgacccacagaactgtgagagaaatgttatttcaaactgctaagtcttcggtaattacacaacaatagataactaatagtgtgtgttataagtatcttctattccttgcc

SEQ ID NO: 472817 - DNA, 122 bp, Homo sapiens
acacccagcgtctggtgcgtgtccctgtttccggcgtcccgtgtccacatttccggtgcccggtgtccacatttccggcgtcccgtgtccacatttccggtgcccggtgtccacatttccgg

SEQ ID NO: 472818 - DNA, 122 bp, Homo sapiens
agacctcatctaggagggacagcttggtctatgacagttgagacaggtgccaaggagggacgaagttgctctctgccaactagacttaggggaaaaaacaaccataatcatgtttattttca

SEQ ID NO: 472819 - DNA, 122 bp, Homo sapiens
tccaaacacggtcacattctgaagtcctgggactcagggctttgacagatggattggaggcggacagaattgccccagacggctgagcacaaagttcctgggtcaccgtgaacgctggagat

SEQ ID NO: 472820 - DNA, 122 bp, Homo sapiens
ctcccgacaccaccctccaacctagaaaaaagtcaaaattccattcagagaagtccaagtcgattcctgtctgcgtgtgatgctgtcctctttgctaccccgaggcagtttcccttattatg

SEQ ID NO: 472821 - DNA, 122 bp, Homo sapiens
actcccgctcagcctgcgccacgcgctcccagttccacttcctatctcctgctggacggacgtagagcgtccacgcccgcccagcactgccggctgccaggactacaagcggcacgccaacg

SEQ ID NO: 472822 - DNA, 122 bp, Homo sapiens
atgataaatgtcatcaagcatgacacaaaagcccagaaaactgtaccaaggttgcatgcacggagtcctgctctgcgtggtgcgtgcaggtgctcactcctccatgctgcttggagctgcca

SEQ ID NO: 472823 - DNA, 122 bp, Homo sapiens
ttaagaggatgtttattacacgagtctgtagggcaacatttccaagttggtacacataaacgaaagaggaaacgatagttaaggaaatcctgttccaggttttcgggcagcccgagtgattg

SEQ ID NO: 472824 - DNA, 122 bp, Homo sapiens
aactcccccatccccatttggtggcattctaagcaagcaacggcttcgggagagctgcctcgagagcctgagagaagtcccgcttagaagctgggctgggcaggtgcggagttgggggcggg

SEQ ID NO: 472825 - DNA, 122 bp, Homo sapiens
agtaattgctggcattgaatccaggtctggaaagctggaaagcatgctctccagatgccacggccttacctgcactattacataagacctcccccaaggcaaaatgggaaaggcctagaaga

SEQ ID NO: 472826 - DNA, 122 bp, Homo sapiens
gtgtcacgaggtcaaaagttaagaatgtggcttttgttatttatgttgtgggatccaaagcgtttcttgaattgtgcttgggaaaaatgagaatttccaagctgtattttagggagctgtgt

SEQ ID NO: 472827 - DNA, 122 bp, Homo sapiens
ggcggagacccgcgagcgctcaccctcggcgcgggactaagggaacccacctgagcctcacgccgccaacgcctctgcttccgccctgcgccgggcacttccgcccgcacccaccaggcgcc

SEQ ID NO: 472828 - DNA, 122 bp, Homo sapiens
ggttagagcaaactgcactgcatgcggccagcgggcggccagggccggcccagctcaggacgctcacgtgcacagagaacctggatggaaagttaacaaggcccaggcaggagccctcgcag

SEQ ID NO: 472829 - DNA, 122 bp, Homo sapiens
tcctgcaggcaccgtgtgcggctctcgtggaagcagccggaggtggggatggagaaaggccggctgctgcctccactggaccctgaccccagccgctgctcaactcgttttttcttttctga

SEQ ID NO: 472830 - DNA, 122 bp, Homo sapiens
ccctgctctgccatatatttgttttattctattttgtagaattggctagacacttgtatgcggtttaataccccatagttaacaataggtcatgatggcaggaactttgtcattgtgtatgc

SEQ ID NO: 472831 - DNA, 122 bp, Homo sapiens
gagccagaggaaagccatggtgccgctggcaggggtgtaggacgcctgtctgccggtccccgttatagccctgtgtgcctgctgttatctggagaccttggggcgataatcccttccctggg

SEQ ID NO: 472832 - DNA, 122 bp, Homo sapiens
tgaccaatacaaaagaaattcctaagcagaagacacgatctaattaactaacacaggacacgattcaaatcacaaactcactttcgatatgtaatgtgccccacaccagatgacttcagcat

SEQ ID NO: 472833 - DNA, 122 bp, Homo sapiens
tcctgggcctgcctgctggtagtagttcccagctccactccctccccagcggaagtccctcgagagcttgagagttcaggctggagcctggctgggacacactgttccccacttgcccttta

SEQ ID NO: 472834 - DNA, 122 bp, Homo sapiens
ttgccagctgcaggaaggtggaggcagaagaagtaaaaagggaacaagaggtgaggtttacgttctgcctaagtggaacagagtagaactttgcacaaactccttaatcttgcctagaggca

SEQ ID NO: 472835 - DNA, 122 bp, Homo sapiens
ggcggggtggaggcgggaaagtgtcgaggccggggaatccgcgcgtggggaggtgggcatcgccagggcgacgatgagctttccttagggggcggcgcctgaagctggccgggacccggtgg

SEQ ID NO: 472836 - DNA, 122 bp, Homo sapiens
aaaaaatggagttatagaaggtcagcccagggtgggtttgagatgttttggtgggctaaacgggcaattttataacatggcttctcctatgccttgtttgtgatgtttaatgaatatccttg

SEQ ID NO: 472837 - DNA, 122 bp, Homo sapiens
gcgatgggaaaatgaaatttaaaattcaaagccaccatgggcggcgagcgtggcgggaggcgtgcgtcaccggcggccccaggagccgggtcaggaggtgtatttgcatctttattttgctg

SEQ ID NO: 472838 - DNA, 122 bp, Homo sapiens
gctggttctccatctgggggcctgcttgtctgcggcgactctttagttcacaggaggggacggccggcgctgacagcttcccctttgctttccccacgaagctcctccctggcagcccctga

SEQ ID NO: 472839 - DNA, 122 bp, Homo sapiens
gctgcccgggccgcgtgccctcggggctccgagcgcgccgcagccgccccggtgccgccgcgcagctgccgcctcggccacccagagccggtccagccgctctccgcctgccgccacggccc

SEQ ID NO: 472840 - DNA, 122 bp, Homo sapiens
ctcgtggtgcgccgtttcttaagtcggtctgaaaagcgcaatattcgggtgggagtgacccgattttccaggtgcgtccgtcacccctttctttgactcggaaagggaactccctgacccct

SEQ ID NO: 472841 - DNA, 122 bp, Homo sapiens
tcccaggccagatcctggcacagaaaaaggagctcagtgggagagccggcaagacctgaacgcagtcaggacccgcgcctgctgcacccaggccttacagcttctgataactgtacacgggc

SEQ ID NO: 472842 - DNA, 122 bp, Homo sapiens
catgggttcaaggagacaggaatttagctccacctcttgtgcaaagaacagtaaaaaatccgtagttcatctttaatctaccacaaagtggttttctaaagcattgttacaagaaggagagt

SEQ ID NO: 472843 - DNA, 122 bp, Homo sapiens
gctggagcatggcgagtggggatcagtgtgcgatgacacttgggacctggaggacgcccacgtggtgtgcaggcaactgggctgcggctgggcagtccaggccctgcccggcttgcacttca

SEQ ID NO: 472844 - DNA, 122 bp, Homo sapiens
tgggtcagggcaggcggcagcccgaagggatctggatttctttattaacagacatgagcacgacccgttacagaagtttgtgctttccaaaaaaaaaaaaaaaaaaaaaaaaaaaacagtta

SEQ ID NO: 472845 - DNA, 122 bp, Homo sapiens
ctggtcccggtcgcgcgctcagacctccgcatcccgggcgtggtcggttaagtccccggccgtgacccaggcccggggagctagtctccgcccttcgctcttacggatcccctcggagtacg

SEQ ID NO: 472846 - DNA, 122 bp, Homo sapiens
tcggggaccgtcttttgaagagtcagtccctccttagttgcccgcctcagctgaggccgccgccattttcttgctgtccgccgtctgcagagcgcgccaagctgcccggagctctccgagag

SEQ ID NO: 472847 - DNA, 122 bp, Homo sapiens
ggctcttgaagcttctgctccatccactcctgccaccttctcccctcaaggtgagagaggcggtgccccacctcagggtgcataaagaaagaagccactcctggaggctgttgagagctggg

SEQ ID NO: 472848 - DNA, 122 bp, Homo sapiens
tgccccattggtccgcgcggccctgggtctccgcggcgagaatctagtctgattccctcccgccctgggcgctgcctgactgctccccagccgagacacccaagccttagcacgtttataat

SEQ ID NO: 472849 - DNA, 122 bp, Homo sapiens
tgggttccgtggtgaactgagagatgccattacctttcaccgcccttggccggacactcacggtgggcctaactccggtggtaattccatccctcactgcgggaccttgacatccccgagct

SEQ ID NO: 472850 - DNA, 122 bp, Homo sapiens
accgcattcatttaaaacaaatcttattctgtagtggactcatgagagcattcagtcccacgtttctcttgcttgggcttggtgaactcctttaactttttccttactgttcattcccttaa

SEQ ID NO: 472851 - DNA, 122 bp, Homo sapiens
gacggcaaaaggcgccaactgatgggcagccagggaaaagcaggagtcgcccccaagtcacgcaaacaggaagcctgtttcttttgtgaggggactagaagccagcattatatttcatcagg

SEQ ID NO: 472852 - DNA, 122 bp, Homo sapiens
ctgtatcctagttcatgttaactttcatggtttagtaagttgtttccccaactgctaaagcgcatctatacacactccagtcccgcagcactccctcagaaaagattttagtttcactctcc

SEQ ID NO: 472853 - DNA, 122 bp, Homo sapiens
aagttcattccatggaactttgacggttagtggggagagcaggcagattgtctaacatgacggaatctaagaggaggaagcgttgctggctctctgctgtaatgagctcagccaggcctgtg

SEQ ID NO: 472854 - DNA, 122 bp, Homo sapiens
gaagaggatgaatcttgccgtatggggaggctttggccccgagagctgcctggcacatcccgggaagagggtgaatcttgccgtatggggagcctttggcaggagtggggctgcctggtgac

SEQ ID NO: 472855 - DNA, 122 bp, Homo sapiens
cgccccccacgcttattggcttaggggcgccgacccatgccccgtgccgcgtgcagccgccggcccccgcacagcctccattggcacctccggccgccatcgtcttctcattggtcagcagg

SEQ ID NO: 472856 - DNA, 122 bp, Homo sapiens
agaagccttcgatgtgtgtccctgattttggtgctggggtcgctcatggcctgaaaataacgaagccccctttgagctactggccaaggccaaatgaaacctcgtgctcctctgctgtgggg

SEQ ID NO: 472857 - DNA, 122 bp, Homo sapiens
gcagcggcaggctgaagcgctcctcaagtgccgccagagtgggcgtccaggcagaggaggcgccgagagcgagcgagcgagggatgccagcatgctgtcacctctcagtgctgccatgcggt

SEQ ID NO: 472858 - DNA, 122 bp, Homo sapiens
tgcggctcccactctggtgagtggtggtggcagtaccagtagcaccagcagtggcagcttcgaagccagcccaggtatggagatggggataggtactaccagatgtcagatcactgcttcaa

SEQ ID NO: 472859 - DNA, 122 bp, Homo sapiens
gccgctcgggagggagaggagagagaggggccccagcaggcaccctcaccctgtctgtgccgccaaggggcctgagagtgtgaccctgacaccgagtcaatctgcttctccgcctgaggctg

SEQ ID NO: 472860 - DNA, 122 bp, Homo sapiens
tgcctttctgacttggaaaagcggacacggccggctctggtaggattaggatccccagatcgatcccggctggtcactcacttgggaaagccctcagcccccttcgcagggcccggtgttcc

SEQ ID NO: 472861 - DNA, 122 bp, Homo sapiens
ttacctctcagccaatggacgggatcggacgatgggttgctgacgtaggtccgccccacccgcagggtgcgctcgccaggcctggggcgtggtgttgtctgcgcaggcgccgtgtgcccagg

SEQ ID NO: 472862 - DNA, 122 bp, Homo sapiens
ccgccacggaacggcgggcgaaaagcagggcgggaatacgccggtaggaatacgcgggcacgtaacgcgtcacttccggtgctggggcgcgctgcttgcggagggagtttgcccgtatacgg

SEQ ID NO: 472863 - DNA, 122 bp, Homo sapiens
tggtcgtgtgggaaaggatacatttttacgcacacgcgtctccgggccattaacgggccgcgcgtccatctgtgtccacagctgaccttaatcctgtcccagcgcctggggcctgaagctcg

SEQ ID NO: 472864 - DNA, 122 bp, Homo sapiens
aattatatctgactgaaaacagtaataaagcaataattggcgcagggacgggccacaaaacgagacggggcacctgctcccctcgggccaccctcccgcaccgcccaggtgcctggcttggt

SEQ ID NO: 472865 - DNA, 122 bp, Homo sapiens
cccggggcaggacggggaggcttgggccaatcagcgcgctggggcggggcctaagtggcgcgcgccgggcggggagagactggagaaggaggatttaaccgcttcctccccggcgacctggc

SEQ ID NO: 472866 - DNA, 122 bp, Homo sapiens
cacctgggacattggggacgtacagaagctgctttccggagtagaaagactcaggaaccccgacctgatccaagcaggctactactcctttggcctcgctaacgagaagagagccaaggagt

SEQ ID NO: 472867 - DNA, 122 bp, Homo sapiens
gagaaccgcgagggagggttcccagattcgtgatggatcctttagcttcacagcaaggagcgctccaacccaggttcctgcatgagctcactgggcatggttcacagagaggtggatgcggt

SEQ ID NO: 472868 - DNA, 122 bp, Homo sapiens
actgcggagggacacacccaggtttctgagagatgtccagtagtacacaggtaacatctacggctcgagacaggttagagattttgaagaaataagttaaaagttgaaacatgaacctatgg

SEQ ID NO: 472869 - DNA, 122 bp, Homo sapiens
gtaaggaggggatcggatgtcattcaggcaaatgacaagtacactaaatattcacccactcgatacatatttattgagtgccgggagccacgctaagtgctgaggctactgccttgctcaaa

SEQ ID NO: 472870 - DNA, 122 bp, Homo sapiens
cccctccagtgagcactgagcgtgccccctgccgtctctgtggggatgtcattgttcccacgccggggagagaccaccccaggccagcccctattcttctggccacattgccatgatcacac

SEQ ID NO: 472871 - DNA, 122 bp, Homo sapiens
catctagatgggaaggaggtatttaaaagaaatcagcacacactcttacagaagccaaggcgggtctttaaattaaaaaataataataaggtatttatttcttgccccttagggaagaaaaa

SEQ ID NO: 472872 - DNA, 122 bp, Homo sapiens
aagggggggcggggagggagaaagggaactcattaataaagctgaccctgggcaccacagcgaacccaatcgacctccggctgggttgcgggtgattccccgctccctggcggtagcacttg

SEQ ID NO: 472873 - DNA, 122 bp, Homo sapiens
ggcaggcccagaacccaggcagcctgactcctgactgcccgctcctaaccatgtccctggcggtgctgcctgtcagtgctgctggattcctccagcccgagctggcacctgtgcccacaagc

SEQ ID NO: 472874 - DNA, 122 bp, Homo sapiens
tgcgcctccagaaacaatactcgagcgtatctaccccctaccccagactcagccctcacccgattttgagaaaggctgaagttgcaggccaggtcaggggcgttcccttcatgtcgcggccg

SEQ ID NO: 472875 - DNA, 122 bp, Homo sapiens
gaactgagctgcaggtgttcattggggtctctgtagtgatgaacagagccaggccaggaacgcggggagccccaaggaaggcaggagggccaatatctgatctgcaggggtcctcagatcag

SEQ ID NO: 472876 - DNA, 122 bp, Homo sapiens
ggggtcagactatgctgagtggagccggagctcgttagggtacctgcagggcggggcgcgcgtggccagagcgagaaagggagtggagctgcgggcgtggcccgggtaggaggggcagggct

SEQ ID NO: 472877 - DNA, 122 bp, Homo sapiens
cagcgcctgcagacttcggtgcgcgcagttcctaagcccacatgcgcagttctcaccttgcgcgcagcctcacgtacagcccccgacaggctcccagccccactggcgcagaacccatcacc

SEQ ID NO: 472878 - DNA, 122 bp, Homo sapiens
acatgctcgtgtacacgcgctggccgttctgctggttctgcagcctggtcttggccaggtcgatgggaaacacgcaggtgacaccgatcagcccggcgatgccgccattgatgagcttggct

SEQ ID NO: 472879 - DNA, 122 bp, Homo sapiens
gaggagccccaaaggggccgggacacagcggggtggctagtatctgatgaaagcaccatccgggcagcagcgcacaggccagcgcagcagaggctggagacgcatctggaattcggaagaaa

SEQ ID NO: 472880 - DNA, 122 bp, Homo sapiens
gggggggccggcacctggctggtaggcttccctgtggacaccgtggtggggggctgagtccgggccacgctggggaagccagctggtgacatgctcacgggtgagggttggggctgggcagg

SEQ ID NO: 472881 - DNA, 122 bp, Homo sapiens
agtctggggcccacagcaggccaggcacaactctgccactccccagggaaggaggtaacccggcctctgtgaggcttcgtttctgtatctgcaacatggagagaaagagaatatggagcgga

SEQ ID NO: 472882 - DNA, 122 bp, Homo sapiens
cgccgcggtgcgaactgcgggcactgtggggcggagacctaggggcgggtcaacaaaggtcgggcgattgtgtctggaggcaaatccgacgtagacggcggcaggcggagcccaaagccggt

SEQ ID NO: 472883 - DNA, 122 bp, Homo sapiens
ccgccgcgccccgtccgcctgcaccgcctatggcagagcccgtaggcggtccccagcaaccgccgagcagcattgaccaacagacggccggtttatcaaacagactgtcgatttcaccaata

SEQ ID NO: 472884 - DNA, 122 bp, Homo sapiens
tgcgggccagcgtgagttccgggtgggcgtgggcttggcagaccccgccctcggagaggccggccggccccaccggccccgggcagtgagggtcttagcacctgggccagcagctgctgtgc

SEQ ID NO: 472885 - DNA, 122 bp, Homo sapiens
ttcaggtttggcttaaactctcacctcctggaaactgctttcctgaagtcacaaaccgggcgtgcagatccccatcccccacccccagcagtgcattattatgcagtcactgcttttgttcc

SEQ ID NO: 472886 - DNA, 122 bp, Homo sapiens
acgccgaggaaggggcggtggcgggcggacccactagcgtgcgtcggctgctccgcgccgcggccgccttgcctccgccgccatcaagggcgactttggaaacagacctcggcgagcccgcc

SEQ ID NO: 472887 - DNA, 122 bp, Homo sapiens
cggggcggcgttcccaacacgcagagccgcagtacctccagcagccgcacgtccagccttcgcaggatctcaggactgtcaaactgtgcgttggtggctctgacagcggtttctagaattcc

SEQ ID NO: 472888 - DNA, 122 bp, Homo sapiens
ttgctgcccaggctcagccggctcctcctgtgccctgtgaagtggcctcgtgtggaagcccgtccataatgctcagtggatttcctctgttctctccgcaggcaagcctgggacctggctgt

SEQ ID NO: 472889 - DNA, 122 bp, Homo sapiens
gacaatggagtgaacacaggcttttctccccttcatgtacaatgtctaccagctcctacacgtttaccaatgcaaactccgtaacttcctgtaaaacctggcttaaaaatttccatcatcaa

SEQ ID NO: 472890 - DNA, 122 bp, Homo sapiens
agtatgaaagaaaaggattcctatttcagaatccctttgggaagcctttcagtgaaggcacgggggtcttgcggtgtgcagccgaatttctacggcctcacgtgctctgcttctgttttctc

SEQ ID NO: 472891 - DNA, 122 bp, Homo sapiens
atggaacataagcgcagatgtttgcttagggcctgcggtgaccaggtgggaagagcagggcggaatccatctcaggtaaacccgcggggccatcccagacctcccactcaagcccactgttt

SEQ ID NO: 472892 - DNA, 122 bp, Homo sapiens
gcttcggacccagccagggcatgtgctcggaggcccgcctggctcgcaggttgcgggatgcgctgcgggaggaggagccgtggtgagggcggggccgggggcgggccaggagtgggggtctt

SEQ ID NO: 472893 - DNA, 122 bp, Homo sapiens
gtctctttagcattttcctccatctcaggcaatagttacagcccctcactgggtcttagccgcccaccaatgtccaccccaaccccttggtgctggaggcgtggcagattgatttgagcagt

SEQ ID NO: 472894 - DNA, 122 bp, Homo sapiens
gaaaaaccaccggggcgcatacaacctctgacagattcgagtaaaagtaactgcggttctcgactttcaagcatttcgcgtcgccggtgaggggggcggcaggaacccggggccccattcat

SEQ ID NO: 472895 - DNA, 122 bp, Homo sapiens
gaggacccctcgcaccttttccaaaccaaaaatgtgaagcagcagaacttccaaaacctccggcctcgtcttgtgattccaccaatgcagccatcgccaagcaagccttgaaatagcccatc

SEQ ID NO: 472896 - DNA, 122 bp, Homo sapiens
cacgcagagcggggctggggagagggacccacccccggcgcgcccggctgcccggttgcgcggcgcgggctcctggccccggcccgctcacaccctcccgctcggctccaacttgcaggcgt

SEQ ID NO: 472897 - DNA, 122 bp, Homo sapiens
gttttctcgcacctgctgggctgtcttagggccccgatgccggtggcgtttgccattctccgtctgcctgaggcgtcctccctccgtcatctgacaggcaaatgttacagcccttcaagact

SEQ ID NO: 472898 - DNA, 122 bp, Homo sapiens
aaaaaaaaagacagttaatcctcattatttgtggattctgtatttgtgaatttgcctgctcgttaaaatttagaacaccccagtggatcctcggtgcttctgtggtcatgggcgtgggcaga

SEQ ID NO: 472899 - DNA, 122 bp, Homo sapiens
tgctgatgacatggagaaaaggaaaatgtgctccttgttacctgtttgaggggagggaggcgctgggagcccactgcaggggatgtgtctacagaaatatgtatagtgttacttttcagtta

SEQ ID NO: 472900 - DNA, 122 bp, Homo sapiens
ttcaagttgctcctatgggggttacttttaagctgggaaatggctgtggcgtcgaggggccgggggcttgggctccagagtctgactgtgtgtttgagtccggctgtggaaacctagccatt

SEQ ID NO: 472901 - DNA, 122 bp, Homo sapiens
gggcagcctccagtgcttggcttgcccttgagggcaacgggaagccccgaccagtttaagcggcacaggacctggtcagctctaacctcagaaatcttatctgagacagctgagtggactgg

SEQ ID NO: 472902 - DNA, 122 bp, Homo sapiens
ttccttcctcagcccatctttaaatttcattttggccaatgattgcaactcaatcttttccggtaaattggctaccagatataattgcataagtagaaaacagctaagcataagtaggagag

SEQ ID NO: 472903 - DNA, 122 bp, Homo sapiens
cagacgaaaaacctgcccagggtcacacaagactgagaagcccagtaaagcactctctgacgtcagcgactcaggtcctttggtcctgtgcctggcttggacagagtcaggcttgttcaaca

SEQ ID NO: 472904 - DNA, 122 bp, Homo sapiens
tatatatgtatattttaaaaacttaactaaatcaggcagtcactctatcttccaggagatcgtaatctttttttgagatgttaggctacctcacaccacagccaacctccacctagtttcag

SEQ ID NO: 472905 - DNA, 122 bp, Homo sapiens
aggttggggtcgtaggactcgctcccatccagcaccaggtcctgtgtgtctgaccacacgcggtatgagccaccctcagtgatgggcaccaggcgctcaggggccaccgtcacattggcctg

SEQ ID NO: 472906 - DNA, 122 bp, Homo sapiens
agcaacgccccgccccgcagcactgcagctgcacccccaggacgccccccgcgagcgccacgccccaaaaccgcgaggcgcccctgggagctgcctccagaccttcgttccgggaacgtttc

SEQ ID NO: 472907 - DNA, 122 bp, Homo sapiens
agggagggggcggagccacgtgtaagcttcaatgggggtgaggtcacgtggttgtgggcgcgtgcggggcagcaatggagagctgagggagcgtcgtcagggtggacaccatgcgacaccca

SEQ ID NO: 472908 - DNA, 122 bp, Homo sapiens
gagccagggagggagccaggcctggcctatagccacccggtgctctgaggacagtcgtgacgtaaagggactgaggaagcagctctttctggcccgtcagggacccggggcaagcaggacgg

SEQ ID NO: 472909 - DNA, 122 bp, Homo sapiens
gtgagtcctctaggaagctctctcaacgtggcgccccatgcctgcctctggccagggctgcggtgggtccagagaagcagacacaaagacttggctgtttcttaagaaatccaagcgcctgg

SEQ ID NO: 472910 - DNA, 122 bp, Homo sapiens
ggggagctgcggaggagcgggcgccagctggattgggaggggagccgctggccgggggcccggctgatttcctgctgatctcctccaggaaaccggccccttgtgcgagcctgcgaacggct

SEQ ID NO: 472911 - DNA, 122 bp, Homo sapiens
acccccaccatggacccttgtgtgctgggtcctttctgaaacatttcagggcgggaagcccgggcagcagcatcagtgcagtgtccttacggaggtgcaggaagctcccagcagctacgatg

SEQ ID NO: 472912 - DNA, 122 bp, Homo sapiens
ggtggcagcaaggagttggatgtgccactgagacaaaaaccaacgctaatactcaccatccgtgcattgccttctgtaagcgtaacaaatgcctggggccacggtcaccggaaagcccctct

SEQ ID NO: 472913 - DNA, 122 bp, Homo sapiens
gcccctgcgcccggcccctgaaggaaaatctaaaggaagaggaaggtgtgcaaatgtgtgcgccttaggcgtaatggatggtggtgcagcagtgggttaaagttaacacgagacagtgatgc

SEQ ID NO: 472914 - DNA, 122 bp, Homo sapiens
gggtggagccaccccatacccatccacaccacaatcagaaataaaaagcatcatgacctccggcttgtcaccacactgtgtcttttggtcatctcacactgagctccatgccctccaaatgc

SEQ ID NO: 472915 - DNA, 122 bp, Homo sapiens
acagtttttccacggacgggataggtggatggcttcaggatgaaactatatcacgaggagcgtttaacctagatcccttgcatgcacaattcacaatagggttcctgctcctgtgagaatct

SEQ ID NO: 472916 - DNA, 122 bp, Homo sapiens
cgtcacccagagccaatgggagtgctcggccctgagggttgggggcctcagagtgcaccgcgctgtggcccttgtggggctgcccttgcgcagcgctccaagggacggggatgtttggcttc

SEQ ID NO: 472917 - DNA, 122 bp, Homo sapiens
ctcctgaaaccagcgagaccacaaacccacagggagggatgaacaactccggacacgccacgtttatgaactgtaacactgactgcgaaggtctgcagctttactcctgaggccagcaagac

SEQ ID NO: 472918 - DNA, 122 bp, Homo sapiens
aggctagaaggagcggaaacaacggcaagggacatagtgactcttcatttaaaaaggaagcgatttcatcctgtgagcatttaaagcataatgttgaccaggtaaccacttaaggtgaattt

SEQ ID NO: 472919 - DNA, 122 bp, Homo sapiens
tgagcggcaaccctgggctgtgacctctgggtcactcagaaggggcctgagccactgtcccgctattccgccccacacagcggggaagctgagcccagcgccctgtgttcccctcggctagg

SEQ ID NO: 472920 - DNA, 122 bp, Homo sapiens
cagtcccctaccgtgcagtgggctggggcagcgatggtggcagcccccttatatcgcctccgcagcccccgcaccgggcagtgacgcaggccggggggccggggacgcggggtcaccccctc

SEQ ID NO: 472921 - DNA, 122 bp, Homo sapiens
atgtttcctccttgaatggaagtatattcgtctataaacatacatacacatgtaaaaacacggaggctccgtttgccagctgtgtacaagtcagtatgtgccgtcaggatgcaaacaataga

SEQ ID NO: 472922 - DNA, 122 bp, Homo sapiens
catttcccccataaaatcaagtttcgttggaacgcagagccccgctcattcaaacctccacggtgaagttgagaagttgccacacattgctgggcactcctcactggacacctctgcggggc

SEQ ID NO: 472923 - DNA, 122 bp, Homo sapiens
aaatcagctgcttcccgacctcggtctgaaactggttggagttgttggtcagcttcagcacgtgcctgaaggcaaacgggggctggcactctttctccttgttggggcatgggtttcgcagc

SEQ ID NO: 472924 - DNA, 122 bp, Homo sapiens
gttgctctgaatttgtaaggctaagtgaaccccttagcctcaccagaaagcatattcttccggctgcagtttactatacaatttagacctaattagatgaggcattagcagcacctgatgta

SEQ ID NO: 472925 - DNA, 122 bp, Homo sapiens
ctcacgaaatctcccaggcttccacagcagaagtaacccttttcttctcagctcccatagcgtgttttctgtacctgctagtactgattgatttgtgttttttgtttgtttgagacagtgtc

SEQ ID NO: 472926 - DNA, 122 bp, Homo sapiens
gagtataattcgctttttaattagaacgacgtgtgtaaatgacagaataccaccaccctgcgcagatggcggccacagaatacgcatcgaattcattctgcccaaggaagggagggagggag

SEQ ID NO: 472927 - DNA, 122 bp, Homo sapiens
aatgagttcctcaatgcctatgcctcagggagataacgaatggtgactctaatcaatatccgtataagtaaaaggagagggtaatccattggacccatccatctcccaacacacttcatctg

SEQ ID NO: 472928 - DNA, 122 bp, Homo sapiens
caccccctttctcccatactttttcacaagcgcacgtggggcacacgcaggcctaggaaacgaacccagacagactcgtgggaatgcacagacggggtagaatgccacggagtcaagagctg

SEQ ID NO: 472929 - DNA, 122 bp, Homo sapiens
aaggctgattctcggagagctcacagggtactacggggtggcgggcgcaagccagctctgcggcgcagtgggcgtcatcctcgctgctgtgggagcgggggctcctgctctggagatcgact

SEQ ID NO: 472930 - DNA, 122 bp, Homo sapiens
agggagtcatagtgattgctggagacggtgaactaacactgtggggacccttgtgctaaacgtgtcaagtggcacaacaaggataggaacacgggtcctttggactccacagcttctgctcc

SEQ ID NO: 472931 - DNA, 122 bp, Homo sapiens
ccagagcgacgcgcgcggagcgggcgggaaagagagcgtttcgggtccagtgcgcaggtgcgaaagccatctttggttatataagggaggttcaggaagccattcgttctttcgcgtctgcg

SEQ ID NO: 472932 - DNA, 122 bp, Homo sapiens
actctgggtcgagagctctgctgccacttcaatcttgccactcaagataattataccattcggatggttaagtaccaccagctggcctctatcatgtcaggattctattatccccagtccta

SEQ ID NO: 472933 - DNA, 122 bp, Homo sapiens
gcctgcatgtgcctccactccaggctccctgtttcttctctgcctggttttcatggtcaccgggcagctcccaagtttgacagaggcatggtgtcccgggatgagggtccaggtcaccgcat

SEQ ID NO: 472934 - DNA, 122 bp, Homo sapiens
cgcgcgggcaggcaagcggcactgggcccggagctcctccccttcctcccccgccactgccggctgtccccggccggctctgtcccggctccccagcgacttccaatcccatatggggttct

SEQ ID NO: 472935 - DNA, 122 bp, Homo sapiens
tggacaggtgcactgcatcaacatctcaacaccgggtgaaaagggaaacgccttactaaacgatgttcccgtgatcagaatcacgggctaacgtccctccgcttccgcagtcttcaggcctc

SEQ ID NO: 472936 - DNA, 122 bp, Homo sapiens
gggtgcagcttcctcttcacagagaggctggacttgaacaaacccagccttctatacaaccgtggagccagggcaagggagagacagaaggagcaagtgacccagggagacaaacacttgga

SEQ ID NO: 472937 - DNA, 122 bp, Homo sapiens
caaggcttatacaaattactgctaaatagcatgaccagaatgatcaacactactaacctccgtctaatactacgaagtagaaagaagcccactgaaaccctctacaatccctgattatgcct

SEQ ID NO: 472938 - DNA, 122 bp, Homo sapiens
aatttgacaagcactggggctggcaccagggaggctttaactcccctcagcacccagtcacgtggaagtacagatcatgtaagttttattatctacaaaacattcccatattacatatgctg

SEQ ID NO: 472939 - DNA, 122 bp, Homo sapiens
acatcatgtttcttcttgtcctttgcatataatgacaaaggagctagctgtgcttctagtcggctctgattctgcattttcagcagcataaagaaaaacatctcattccttttatagaaatg

SEQ ID NO: 472940 - DNA, 122 bp, Homo sapiens
atacagttctgaggctattttgcttcatcttgaaagtagcagggtattaaaatacagtaccgtgaacattttaccctgaagcttagctgccttttattttagggaggaaaaggtaaaaactt

SEQ ID NO: 472941 - DNA, 122 bp, Homo sapiens
gtaaatggccttggggaatcacagcaccatcaccgagttcctcctccttgggctgtctgccgaccccaacatccgggctctgctctttgtgctgttcctggggatttacctcctgaccataa

SEQ ID NO: 472942 - DNA, 122 bp, Homo sapiens
aagggatctgcaaacacctactggacctagacagaaacatcaacaaaggactttacccaacgtacagacccctaaagtagcacctttacaagacagtgtctagagcagcaccgcccaaaaca

SEQ ID NO: 472943 - DNA, 122 bp, Homo sapiens
ggggctggcggggcggcggccgggtcgatgtcttcagctctgaggtcggggctagcggggcggcagccgagcactctttgtgctccacaaatcgctctacttctttgttttcccatcattct

SEQ ID NO: 472944 - DNA, 122 bp, Homo sapiens
gcaagctccacccctcttctaacgtgtgccccgcccccaggtctgaccccgcccaccctacgattcccgcccctgctctaggcctttcagactctcccagttgggccccggcccctttacag

SEQ ID NO: 472945 - DNA, 122 bp, Homo sapiens
ttaaaggggaggcggccaggtgagcagcgctgtcggccaacttgaagatggctgcggggccgggagaggtactgcgacttcagatgggtctgctgccccccttcactttccctagccaccca

SEQ ID NO: 472946 - DNA, 122 bp, Homo sapiens
tctcgccctgtaaactgcggggtgacgggacgctgttactaggactcaagatggccaccgcgcccgctagtcatctcgctagcccgcgcgccagtgagctggcacgagacacgcggtggccc

SEQ ID NO: 472947 - DNA, 122 bp, Homo sapiens
cctcctactcctcccggcgtagactccgtggggctgcaggggaggggggggaggaggggacgggaggacccccactgcactcacacgggtgtactgcccctgccgctcccatccactctcaa

SEQ ID NO: 472948 - DNA, 122 bp, Homo sapiens
gagaggtgcttcggtgatggatttccctggtgacttgccaagacagggctttactgcctccgccctggactggctgagtcagactgtgcaggggtggacactttgactggtatttgggaggc

SEQ ID NO: 472949 - DNA, 122 bp, Homo sapiens
gctctgtgtctgtcaccggaccagggcctctgattccccgtgtgcccccattgggtcttccggggctgtgccagaggcctcctgtctggccagtaccccagggcgccacatccccaggccgg

SEQ ID NO: 472950 - DNA, 122 bp, Homo sapiens
caggcggcgggcgagggacgaggcttaccacggcaccacgcgagtggaaagggtcgtctccgctagcggcggcccacaccagctcaccgaggggcggcagcgcgcggcccggctgccggacc

SEQ ID NO: 472951 - DNA, 122 bp, Homo sapiens
caattagcatttacccactgaaacgaagtcctgagaaggacacatcaggatcacctctggcgtgttcctgccaaaactgcatagccccaatctaatccaatcccgaggaaataccagacaca

SEQ ID NO: 472952 - DNA, 122 bp, Homo sapiens
aggcacgcatgcgcgctgttccggcaggggttgtcgtggcgcagggggcgggaccagaggcggtcacgtgaggggctctgggctaccgggtcacgtgaccgaggcacagatcagctgatgcc

SEQ ID NO: 472953 - DNA, 122 bp, Homo sapiens
gagagccatctggtccgtcttaaatatttcaagctggtggccaagtcctacactcttggccgacatctggtggacccggcggccggactgagaagccagcaggtagaggcccagcggatcca

SEQ ID NO: 472954 - DNA, 122 bp, Homo sapiens
gatccattctgaggccatttccctatattagttaaaccacagcaattagtggtaaaacaacgcaacaaaataaaagtgctatacctcttgttgtcagtcgccatacagcaacccttctttaa

SEQ ID NO: 472955 - DNA, 122 bp, Homo sapiens
tctaagattagcctgctgcaggggggccgtctccaggctgggcccaaggaatggccgctgcggcgttcagaggccagggttggatcactgtgcccctgatcacccccttgtctgtctatctg

SEQ ID NO: 472956 - DNA, 122 bp, Homo sapiens
aggccccacctcttgtgcccatacaaggagcggcgggccctagatggcatcgtggcgtcgcgacggcgtgtgcgtgtcgcgcttcctagtgccgtttatagggtcccggcacttccgctgtc

SEQ ID NO: 472957 - DNA, 122 bp, Homo sapiens
aggactctgcagggcctaagggagagagactttgcgtaaaaacatggaaccctacaataccgactttgctccttagtaaagattaataaaactccatgagactgttgtccagaggtcctgcg

SEQ ID NO: 472958 - DNA, 122 bp, Homo sapiens
tttactctgcttgtctgttctatataagatgcccccatttgttgcctgcattcctggatgcgttttcctcactgctgttacgcaagtgccaaagtcattctaccttgcaaaagttttaagtg

SEQ ID NO: 472959 - DNA, 122 bp, Homo sapiens
tctgggtcctgagcagtgaatgttgtcaacatggtaccggcatgaagcccttcttcttggcgaatgatcttaggattgggggcaaaataagggttttcatttacgtcaataactgtaacaga

SEQ ID NO: 472960 - DNA, 122 bp, Homo sapiens
cagctccgtcaccctagaggggaacaaagaagcgcagagcaggtcgcctggcttcctccccgcttccccactgcccgacccgccgccccgtgccgcccgcctgcctgggaagcggggccgcc

SEQ ID NO: 472961 - DNA, 122 bp, Homo sapiens
gaaagtaaaaagagaaaagtgaagcatctcctggactcaccctgaagttctcaggatccacgtgcagcttgtcacagtgcagctcactcagctgagaaaaagtgcccttgaggttgtccagg

SEQ ID NO: 472962 - DNA, 122 bp, Homo sapiens
ttgcaagggcagcattgtggggctgtggtttgaattgcttttttgtgtctcttgaatacacgaagttcctcctatagtcattggctctgctgcctctgatgaggcacttccgtgttccccac

SEQ ID NO: 472963 - DNA, 122 bp, Homo sapiens
gacgggcggatcacctgagctcaggagttcaagaccagcctggccaacatggtgaaaccccgtctttactaaaaatacgaaagaaattagccaggcgtggtggtgagtgcctggttgtcttg

SEQ ID NO: 472964 - DNA, 122 bp, Homo sapiens
cctgccacctgtggtggcctccagtttgttttgtttctttgagacagagtcttgctctgtcgcccaggctggagtgcagtggcgtgatcttggctcactgcaccctctgcagtgagggaggt

SEQ ID NO: 472965 - DNA, 122 bp, Homo sapiens
gtccaacaatgcgagttcatgggaagtatttagagaccacacaagccagaatgtaatcagcggctagggcttcccatcaacagacaaatccataaatatttattcttggcagaattgctttg

SEQ ID NO: 472966 - DNA, 122 bp, Homo sapiens
aatgcagagcagagtctagactcttcgttccaggcccagacactttgttctggccccagacgctggagccgaacagcttgggtcttgctgttgtggttacagaggaagttccattagggcag

SEQ ID NO: 472967 - DNA, 122 bp, Homo sapiens
gggcaggcccgactgcaccggggagtgagccatggcgctcaggacggccacttcctgggacgggacggccgggccgcgacgatccgcgcggggcggcgaggcccgcgggccgcgcgcagccc

SEQ ID NO: 472968 - DNA, 122 bp, Homo sapiens
gcagttctcgctgaccgcgctagctggtgagtgtcccttctgtgtgtgggtcctagagctcgcggtctggtctggtctggtccccagactgacgcctggtcggtccccctcttgtcttacag

SEQ ID NO: 472969 - DNA, 122 bp, Homo sapiens
tattagtctttcctccactaagtcgcttgagtcttttttgtgaatcaagacaattaattacgtttacctggaagctgtctcaatgtttaattgtctaaacgagaatcagatgcttattggtg

SEQ ID NO: 472970 - DNA, 122 bp, Homo sapiens
ttctgaggcttaattgccgtatgtgacaaaggggtgtctttccttctttcctggtattctcgtgagcctgagatgcctgtcaagctacaggaggcccttggaaacccgtctctctccttcag

SEQ ID NO: 472971 - DNA, 122 bp, Homo sapiens
cccagccaagtgtccagaatcattgctatttttacggtaaccgaggcaacggggaaaccacgagttcaccaggcagtggatcagcctaggaatgctaagagtctaagataaaatacttccca

SEQ ID NO: 472972 - DNA, 122 bp, Homo sapiens
atgcaaaccgagttcaactcacccaggagcaaacaaacgacagcaagacaaatcagccaccgcactcgcggcttcccagaaagggcctcatgaatgagaatgggttgctaggtttccttccc

SEQ ID NO: 472973 - DNA, 122 bp, Homo sapiens
acaaacacagatgcattcactcaaggaagagcggccccagggggaagaacaggatggcagcgtcttcacttggggccgctccagccccgaggcgcacagccgtggaaagccggtgacagcac

SEQ ID NO: 472974 - DNA, 122 bp, Homo sapiens
ccacaaagtgtaaagccaccccgagcctggctccttccatgcaaagcctggcgaggaaggcgaggaagcctggcagggatggttttttcaccacctcgaagaccagcacgcgattccgcctc

SEQ ID NO: 472975 - DNA, 122 bp, Homo sapiens
actgggagtgggagggcagcccccttagcccagctgggaatagtccttacctgtgggacccgggccttcctaggagggggccagggactgcggcaaggtaggggacagcgcgatgtttgagg

SEQ ID NO: 472976 - DNA, 122 bp, Homo sapiens
ggcttgcagggggcggggtccgggacggctggggcggagctggaccgttgagggccacggcggggcgtctccgggccgagcggggctgctgcgcccgagcggttgggggcgcggagggctgg

SEQ ID NO: 472977 - DNA, 122 bp, Homo sapiens
atgtcagagggaaatcaaggcagcaggcacaggaatcacaagcacaggcgggcatgtggccgacgcgtggctgccggcgcagcactgagcgcgggtgtggggcgacccgcagtcccccgcgg

SEQ ID NO: 472978 - DNA, 122 bp, Homo sapiens
tgtcacactgggctgctctctcctttccccagagccagcagcctctccggggaccagaggcgtctcggttttgactcagtgaggaggcctcaggttgcatccatggggaaactgaggctcgg

SEQ ID NO: 472979 - DNA, 122 bp, Homo sapiens
gcttaaaatgtatgcactctgtaagctcataaaactcaggaacccttggaagtcttccttcgggggcctgaaagtgtgaaatcttcttgaaaggcaatggctcctaagcattgtttgtttgt

SEQ ID NO: 472980 - DNA, 122 bp, Homo sapiens
caaagaaatttctgtcccattcccgaaaggtcttagaaatggattgtggtggaaacgaggcgatatcaaacacaagaccaagagaggtccacgccccctgctggtgaaaacaataaatagct

SEQ ID NO: 472981 - DNA, 122 bp, Homo sapiens
aacgcttgtggtcgtattcatcaaagacgggacgccaggcatagaggttgatggtggccacggcgcctgcgacgagcagcatgagcgtgagcttcaccatgtggctgacctgcaccagcatg

SEQ ID NO: 472982 - DNA, 122 bp, Homo sapiens
acgactggtttcggtatcagtttgtaaactttaaggaaaatgtgtctctgttttcctgtccgttattgtcggatgttggtttgttcacagtcgggtggtggtcaggtgtgtgtgtgcgtgcg

SEQ ID NO: 472983 - DNA, 122 bp, Homo sapiens
ctgccacttagcggacaggccacggggaacccaagagcaacagcacccccttggctggggcggggccggcaggcctcactgactgccagcttcgggagctgctcagggcatggcctctgagc

SEQ ID NO: 472984 - DNA, 122 bp, Homo sapiens
agttgctggggtaggtgcgaggagccctgtagggatggggcggcccgggtcaggcccaggcgtgggctggacccccctcaagggccggctaggagggagcggccgcgcagctgcggcgcccc

SEQ ID NO: 472985 - DNA, 122 bp, Homo sapiens
ccccgggcacacagcatgtcgggctgaaggatgctgcccccggggccgggatagtcccggcggcaggtctctgtgtccaccacggagactttcacctcccgcaggctgtacgggggtggcag

SEQ ID NO: 472986 - DNA, 122 bp, Homo sapiens
ggcatctgggagatatctcgaagggcaacgtcgaggggactgcaagcgtcaaccctggcgcggcagcacggcgcccctctccgcgggcggggagcgagcgcgtgtgcgcgagagcgccgggc

SEQ ID NO: 472987 - DNA, 122 bp, Homo sapiens
ttctgtctcatgccttatcacctctaccatcattctggtgtgtcctgagtttgttccttccggtgggtttgtggtctcgctgacttcctgcagaccttcacagtgagtgttacagctcttaa

SEQ ID NO: 472988 - DNA, 122 bp, Homo sapiens
tcatcttaaaaacaaatcacattctgtgaaaggatgagaaccaagtagtctgtcaccttacgtgcaaggagggaaaagagggaggcttaaggttttaaattgagtatttcctcagtatctca

SEQ ID NO: 472989 - DNA, 122 bp, Homo sapiens
cttcgccgcggacctttgtgaggtcgcccgggcctcccgcgcgccccgccccgcctcccgcggtcccctcagccccgtttacctgcggctccggcgtccgtagccaccgcccccgtacctgc

SEQ ID NO: 472990 - DNA, 122 bp, Homo sapiens
cctgcagctgaacccagctcaccctgactcacacaagcagagctgggtggatgtttaccccgccctgtctgcaggaaggagggcgacagccacctaatgtgtgcgaggaggaggcggctggg

SEQ ID NO: 472991 - DNA, 122 bp, Homo sapiens
gcctttgttgggggatgaggagtgtcttgggtcgagaacaggcccctgtaacccactgagcgccccttcattccgtctctctccgccctttgtagagggtcaccatgaagttcaatcccttc

SEQ ID NO: 472992 - DNA, 122 bp, Homo sapiens
tgaaagaaaccagtatgaggagacaaacacataattccagttacatgagttccctagaaccggctaatttataaagacagaaagtaggttggaggttagcaggggctggggaaatggggagt

SEQ ID NO: 472993 - DNA, 122 bp, Homo sapiens
ctgttgacatggtgccaattccctggcaggcatgcagagaagcctctgttctctctgccgcgctgtggcgtctcacctagacacctggcccctgaagcagagatctgtctgctgccaccaca

SEQ ID NO: 472994 - DNA, 122 bp, Homo sapiens
atctacataaattttagtagcttcattaagtgccaatcatcacttaattttagactctgccgaaaactgaatttacaagttcatcctacatcattcattctctccaataatccctcccttca

SEQ ID NO: 472995 - DNA, 122 bp, Homo sapiens
aagatgagttcctgggcagcccacaggctgtgtgccatgcacccgggcaaaattcctctgcggctgtgtgctcagccttccctgtactggttccatgaggtccccacttctccaaatccgcc

SEQ ID NO: 472996 - DNA, 122 bp, Homo sapiens
acaggaatccgcaggtcttctgactgctagttttaaccctctgaagccttgtgagtcactcgctcacacacaccaaccccatccagtcctcccaggccatctcttccatacggatggtaaca

SEQ ID NO: 472997 - DNA, 122 bp, Homo sapiens
cccaatccgaagcttctcccttagtcagggattggggcgctgggttcctggtgtcaccgccgggcggcgaccccaccacaatctccccaaagcgccgaagcatgtcagcccgaagatcttgg

SEQ ID NO: 472998 - DNA, 122 bp, Homo sapiens
tgccggacgtgagccgtaccagtcacgtgggccacatggggttgcatgccctgtcacccacgtcaaagcttcctcagcacaaggtggaggaacagggcagggcgcccaccgtggccactaag

SEQ ID NO: 472999 - DNA, 122 bp, Homo sapiens
atctcccgcgtgttgaggcgagttgcccagaaatcagctcgcagagtgctggtggcatcccgtaactcctcaaatgacgctacatttgaaattaagaaatgtgatctttatctgttggaaga

SEQ ID NO: 473000 - DNA, 122 bp, Homo sapiens
gaataaaagcgacattgaaaggcggggagaccaagtggggaaaagcgctgtctgggaaagcgaactacaagtcccagagttcctcgcgccgggggctgtcctcggactgctccaggcattgt

SEQ ID NO: 473001 - DNA, 122 bp, Homo sapiens
ctgctactgacaaaccatcatagcagggaaggggggtcgtgggtgagtgccagcccagcccgtctctgctgcaggactctggtgctgccagaacgcccggactccggactccgccttaagtg

SEQ ID NO: 473002 - DNA, 122 bp, Homo sapiens
gggccggggtggtgcgcccggggcctgggtgcagggggcagcgtgggacacagcccgtgacgcgcccctctccccgcagctccacctggttgcgctcaacagccccctgtcaggcggcatgc

SEQ ID NO: 473003 - DNA, 122 bp, Homo sapiens
ccagcgctactaacagacttgttttccggttcagctccccttagggctcctgttggaaaccgaccctatctggggagcctgtctgggccactcccattgccggagaactctcctggggcggg

SEQ ID NO: 473004 - DNA, 122 bp, Homo sapiens
ccacaggactggaagctttgtcgctttctataaggacttgcctgtcagggggagttagttcgaaaggaacggggagtgaagactcaatgtgaatttcaggtaaaaatctccgggtctgagga

SEQ ID NO: 473005 - DNA, 122 bp, Homo sapiens
ttggcgcgagaggcgctctgtgtggtcccgagtgtgaatgggaagaggggggcggcgccccgggggcctccccgcccaggaatgcaggcctttcacatgtagaaaatgctaatgctttgttc

SEQ ID NO: 473006 - DNA, 122 bp, Homo sapiens
gattgtaacaggtgtgtagccgtatcctactgtgtttttcacttgcattttcctgacgaccgaattatattattttgtcatgaacttacttgccatgtgtatgtctttcataaattgtctgt

SEQ ID NO: 473007 - DNA, 122 bp, Homo sapiens
ccgcttgatctggcgttgggcctgggacacgtcttgccccgacttttgcaggtacatggacggaaagtagcctgtgacgtcgtctttcctgcaacagaggcagcccttgaggctggggcagt

SEQ ID NO: 473008 - DNA, 122 bp, Homo sapiens
gccccgggggcccgcccgcgcgccacttccgggccgggcagggggccagggcgcggcggacgcgggcctcccccgccccgaccaaccttccagcaggcgcccgatgatcgagtccaggttga

SEQ ID NO: 473009 - DNA, 122 bp, Homo sapiens
ggccaggggccaagatatctgctctgccatgccggtttttttatcattccaggagtgcctcgacctcccctttcaagcctccctgccgctttgagcggcaccctgcggggcccagcggctcc

SEQ ID NO: 473010 - DNA, 122 bp, Homo sapiens
agtggcacagcagagtcctggcacattgtgggcactggagaagccatccctgcctgagctcgtcatctctctctctctctctcaccatgtcaaatggtagtgggtgggtacagggcccaaac

SEQ ID NO: 473011 - DNA, 122 bp, Homo sapiens
gcctgccaggtcacaagagccctgtgaggtcttcctatcgccgggacactgggaggcaggcgcggggcgggtccgccgggcgacgcgctgtgattgggcgccgtggggcccgccccctcatc

SEQ ID NO: 473012 - DNA, 122 bp, Homo sapiens
cgtccaccttctccctgcccagcgtctctgtgggtttccctgttctggacattccagagacggcatcgcaggaccggtgccctctgtgtctggcgggttcactgggcatcaggttctcaagg

SEQ ID NO: 473013 - DNA, 122 bp, Homo sapiens
tcagcctcctggcagcagtctggatccccaagagggtcaaaaggggataatccgaatcagcggtaggagctgaagaatccaagaagcaggggcagagagcagtatctgttcctattaccatc

SEQ ID NO: 473014 - DNA, 122 bp, Homo sapiens
ccaaagttctagtcctggtccaggtgggctttgagctacctgagcttcactcccagtccacgtgtcacggggacacctaaggctctccagatggcccactgggaactgggacacagttctac

SEQ ID NO: 473015 - DNA, 122 bp, Homo sapiens
acctttctgccatttggcaatctgactatcatccatcaaatatttacaaattcctgcatacgtccatgatcacagagttatctggcctggtgcgaaagagcaaaagcactgggctggggatg

SEQ ID NO: 473016 - DNA, 122 bp, Homo sapiens
gtaggctgcgcccaggagagtggggcggggctccgggcgcgggcggggccgggggcggggcgaagagcggctttccagggtgacttcgtgacgtcaggaaggcgcgagtagtttcgcgagtt

SEQ ID NO: 473017 - DNA, 122 bp, Homo sapiens
cgagtgctcagcaggccagtgtctcctctcagcacgcttctcacctcaccgaactgggagcgccaggtcacgtgctcgtatctccaagtgagctggaggcctcaggctgcccgtttcacctc

SEQ ID NO: 473018 - DNA, 122 bp, Homo sapiens
gttgaggagagtccctggccagccccactatgagctgtgctgcagctcctgggctggtgtcgagggttgcagaagccatcccagtggtgaaagccaactgagtccagctggtctgatgtccc

SEQ ID NO: 473019 - DNA, 122 bp, Homo sapiens
ggaggaacctgatcctccggtagcgaagggctagaggcaaacaccgagctcctccagagccgcccgggagcagggagggctccgctagcccggggggccctccccgcggggcagatggtaag

SEQ ID NO: 473020 - DNA, 122 bp, Homo sapiens
cgtgggtgcggcctgaccccgggcgattctggggccgtctccgcaggcagttgagcctgccgctggggcgctcctctggtcagggcaaacctgcacctgccttccccaatccgggggaaggg

SEQ ID NO: 473021 - DNA, 122 bp, Homo sapiens
ggaaaaatattcagcaggaaagaatggaaacggcctctcacagcagagaactggtcactgcgcactgctccacagctaagaaagttttccaggtggtctagcgctcctaacaaacaccttat

SEQ ID NO: 473022 - DNA, 122 bp, Homo sapiens
tccctggaacgcagcgaccccgcagaggctgggatgcacctctgtgcccgagtgcgagtgcgtcccgcgcgccatgcgctctcaccgctggcgatgggccctggctgcgtcagcagcagcag

SEQ ID NO: 473023 - DNA, 122 bp, Homo sapiens
cagtttcgagccacacgcaacgtgctcggcacttcccgtgccccaaccggacctagtttacgacttcctacgcacaggcccctctgaggtcagggttcgggcttcactgtgaccttggacca

SEQ ID NO: 473024 - DNA, 122 bp, Homo sapiens
atttacaggcggggacagccacattcctgcgccccaacttccacctccgcttcctgcgcgcgcgagactcaagctgccacagtggctctgccgccagcgtcccagctcctcccacacccgag

SEQ ID NO: 473025 - DNA, 122 bp, Homo sapiens
taactcatacaacctcacttaatctttacaggagcccaataagacaggcacaactatcttcgacttatagggagaaaaagtgaagcttagagagggagattgtataaaaaaatgatttttac

SEQ ID NO: 473026 - DNA, 122 bp, Homo sapiens
tctgccatgctggaaagtttattaccaggcattcgtgacctttctctgccccctgtggatcgacttggattacagaatgacctcttctccttggtgagcatctgtgacttaagtaatatgat

SEQ ID NO: 473027 - DNA, 122 bp, Homo sapiens
agccccaatctcacctgcagattgtgttccaatagggaactcacagcctcacaggtctgccgaatcatggttcgagagtcaccaaaccacctggaaaccagatccacatatgagagtaataa

SEQ ID NO: 473028 - DNA, 122 bp, Homo sapiens
aactacaacctacacagctatgacagcgctctggaatgcactacctgtgtctgttccctccgtctcttttttatattttaattttttttttttgcagaggcagaatctcaactctgttgccc

SEQ ID NO: 473029 - DNA, 122 bp, Homo sapiens
aggacccccctatcccctcgctcgccctgaaatgtgtgtccctctcggcgtctgggctctcgagaaaggcctttgcttgtctgacttcgcgagggtcccggctctggcccaggagctgggga

SEQ ID NO: 473030 - DNA, 122 bp, Homo sapiens
aaacgaaggagctcggcggcctcccaagcccgggccagaccccgctccccagcccgggctcgccctccctgaccgcggactcaccagctgcaagcccttgagaacgcgccggagcaatggga

SEQ ID NO: 473031 - DNA, 122 bp, Homo sapiens
cagtccatttcctaatgtataccagcctactgtactatttaaaatgctcaatttcagcaccgatggccatgtaaataagatgatttaatgttgattttaatcctgtatataaaataaaaagt

SEQ ID NO: 473032 - DNA, 122 bp, Homo sapiens
cttctgcggattcggctttcaggctgctggagctctccccagcccgaggccttagcccagcgcaatcccttgtccagaccggccagtttccgcgtggcgaaaaagggggaggcaagtgtgtc

SEQ ID NO: 473033 - DNA, 122 bp, Homo sapiens
gtctcctgcctggcggagcgcggcttccgacaacgggcggggcggagcggcccagggaggcgtagcccgagactccaacgccgcccgctccgccccggcttcctggagccgcccccactgcc

SEQ ID NO: 473034 - DNA, 122 bp, Homo sapiens
cattaaggagcggaggcttttggagctgctaaaatgccggattacctcggtgccgatcagcggaagaccaaagaggatgagaaggacgacaagcccatccgaggtcagttgacatgggccgg

SEQ ID NO: 473035 - DNA, 122 bp, Homo sapiens
cctatggagaaagggccgtagccacaacggctggagctctttgtctaggaagtgcccgagcgctctgcgcaaggggtaggggcgtagggcgcctggggtccgccccttggttccctccccga

SEQ ID NO: 473036 - DNA, 122 bp, Homo sapiens
ggttaagaaggaatctcatggggatgcaagacggtgcagctgctgtgaataacagtctaacggttccttaaacacttcaacctagttaccctatgacccagcaattccactgcaaggaatat

SEQ ID NO: 473037 - DNA, 122 bp, Homo sapiens
ctccaggttcacagtggtgagatcacacccccctgcagcactgtgaagaaggggaggccgcgagctgggtgggcacccactccctgcatctaggatatgtatgcaaattaatatatgcaaat

SEQ ID NO: 473038 - DNA, 122 bp, Homo sapiens
gcgccgggccgcggagaaggccctgtcggcgcccgctcccggccgcgccatgccctctttcgccctcacccgccaccggtggccgcctctcacctggcacgctggcatcgcccactccgcgc

SEQ ID NO: 473039 - DNA, 122 bp, Homo sapiens
ctgagggctgccataggggcttcccgagcaaaagcacccatcaggtgctgggataaagcccggagcaggaggagactgcaggagaagccagatcatccgagtcaccgggtgctgagccagcg

SEQ ID NO: 473040 - DNA, 122 bp, Homo sapiens
caggcacaaccaagcgagcagctgcccggctgctcctgttcccttggcgcctcgaggtcccggctcagaagccacgcccaaagcggaaatcagaccccgcagggctgtgactcgcacagaca

SEQ ID NO: 473041 - DNA, 122 bp, Homo sapiens
cgcagctgccgccattgcctcagcgcaaacggcggattcccgcactccctggtgacggagcgcaccgcttccgggtcctctcggctgtttccggatccgctcggctgtttccggatcggccc

SEQ ID NO: 473042 - DNA, 122 bp, Homo sapiens
agcgagtgcgggtcaccgggtcactgggtcattgtctccgcgcccgaaccccgagcaccccgtggaatcccccacgtcatcatcagaaccatcaatgagatgcaaacatgaaagacaagagg

SEQ ID NO: 473043 - DNA, 122 bp, Homo sapiens
actgctcccagtctctttctgaatcttgactctgtgggcaccgcccgttagggaggctcgcgtccctgcccaggggccttcattaaccgaaggggacgtgccacgctgggggtgttcgaggt

SEQ ID NO: 473044 - DNA, 122 bp, Homo sapiens
gcattcaaaaaaatgctgctggctccttggcttgtccggtgcatcctccgtgccagcccccgctgtcctagaaccatctaagctaactctccgatgagctctggcctctggacctcagccta

SEQ ID NO: 473045 - DNA, 122 bp, Homo sapiens
aaagtcggcagagctccagagtctctgctctcccccacaccctcctgcaaccctgccagacgctcaggcttccaaagcaagtttaaccaatatccctgcattgccacgcctcttcaggcaag

SEQ ID NO: 473046 - DNA, 122 bp, Homo sapiens
caggtctttggactgaaaccactcccaccctcccccttcagcagctccccttccccttctcgagacacctgccccactaaacgagctgagaggatggacccaaccagcagtagtctgcaggt

SEQ ID NO: 473047 - DNA, 122 bp, Homo sapiens
cccagctaagcatgctagaggacgcggcggtatagtcattaatcatgatctagaacctcccgtgcccaccccactgcatctgaggaaagcgtgtggaagactcctctgcccggaacatcgtc

SEQ ID NO: 473048 - DNA, 122 bp, Homo sapiens
aacatggtgaaaccctgtctccactaaaaaaaatacaaaacttagccgggagtggtaccacgtgcctgtaatcctagctattccggaggctgaggcatgagaatcgcttgaacctgggagga

SEQ ID NO: 473049 - DNA, 122 bp, Homo sapiens
tcacccaatatttatcgagtacctgctggctgccagcacctgtttcctgtcttgctgtgtcgtccactcatggcctctcaaaaagccactgtaactaactccttgtgcttgtcaaccctggt

SEQ ID NO: 473050 - DNA, 122 bp, Homo sapiens
ctccgcggtgtctcctagggtttcttgtcagagggccccaggcgcctagggagtcgttaccgccctggcattcaaataactcccgcgagaggcggaaatcccgcgagactgccgacagagcg

SEQ ID NO: 473051 - DNA, 122 bp, Homo sapiens
cggcgccgggcgcgggcccgcggcggccagcgcttccggtcggcaggaggcggggcgaggcggaagcggcgcttgcttcaggtggagtctgttagtttttgagaaagagttagggcgagttt

SEQ ID NO: 473052 - DNA, 122 bp, Homo sapiens
gtgtgttcagtatgaattcacttattttccacttgaaatcctgatttttctcggatgccccgggtgttgatatgatgatcaggaggctcgtgatggtgatgaggatggattaatataatcat

SEQ ID NO: 473053 - DNA, 122 bp, Homo sapiens
agaagaccctctccctgagcatgagtggggcgggcagaggcctccgggtgaggagtcagacggggcctgccttggtgccctgggctgggactgcacagccgggatgcgtccaggcaggaggg

SEQ ID NO: 473054 - DNA, 122 bp, Homo sapiens
aacagtatgatccaggagtttccgagaaaccagactgtatatctttcagtggacagctcccgcagcttctctagctgcccttggaagcccaccaccagcccctctagaatctcagtgtgtca

SEQ ID NO: 473055 - DNA, 122 bp, Homo sapiens
cagccagcaacttcgaggaggtgcagtcgaggcccctctttggggttgtccttgggacagcggtgatgctgttcagctgcggccgtgcaaccgtctttgatgtgagctttgcagtgataaat

SEQ ID NO: 473056 - DNA, 122 bp, Homo sapiens
gcttatatgggacctggggaggatgtgctgtgatccaacaggcccctcccactcaagatgcgacaagccacctgaaagtctccgccaccagctgctgtgaaagcaagtggacaatgtccaag

SEQ ID NO: 473057 - DNA, 122 bp, Homo sapiens
agctctgcctattcatgaagcttcatccctacactgtccttcatttggcccctggtgaaccgggggccaaggtgtgatacctcttttaaaactcattcccttcacactggtgttgtgactca

SEQ ID NO: 473058 - DNA, 122 bp, Homo sapiens
tgactttctgctgtactttaatggcctgctacccatctggtctcaggtttagcaaagaaccgtggaaggaggaattgagtaagggtccagggcggtggaatgttaatcctggagctccagcc

SEQ ID NO: 473059 - DNA, 122 bp, Homo sapiens
atgcggggaggcgggggcggcggcccagccgcggatggatattgaccacttgttccgtgccggcagcctggaggtgcattttagtttactttcccgggatatagggtagggcagaagttatt

SEQ ID NO: 473060 - DNA, 122 bp, Homo sapiens
agtagggaagaaattggtacaacctttccggaggacaatttaactgatttatttaaagcccgaaaaatgtacatacctttaactcagcagtttcgttactgatttatcttaaggaagtaatt

SEQ ID NO: 473061 - DNA, 122 bp, Homo sapiens
ggaccctccctcctccactctccttggaagagcgttaaccgtgtgaggactggagttccccgggccgcgtcggctcctcctcggcccggcgggccccggcaacacgcctcgggtctgtcacg

SEQ ID NO: 473062 - DNA, 122 bp, Homo sapiens
cagctgagctcggagctgacagactcgctcaggaccctgaaggtgctcactgtgtcctgccgtggagccccgtgcccagtgatgacaccatccttgctccccgtgccccccaggggctatgg

SEQ ID NO: 473063 - DNA, 122 bp, Homo sapiens
gcttccttggatctcctttgcccatgtttagttctttttttcctcagtgagccacagagtcgcccagtgcctgtctggctctcacttgccccagggctgtctctatggtgctcagtacactg

SEQ ID NO: 473064 - DNA, 122 bp, Homo sapiens
cggcggaggggccggagcctacagttaaatctggctaaacggcagcatttaagggccctgcgaaggaatccaatttgcgcacaaggatcgtctacaaatttatatgtcggcatttaacacaa

SEQ ID NO: 473065 - DNA, 122 bp, Homo sapiens
atgctcacggggtcctgggtcggtgactcctcaggcatggattttccacgttgctgtggacgccatctcctaacgactgtcatcgcactgcctaggacagctgacacgggcacggttggcag

SEQ ID NO: 473066 - DNA, 122 bp, Homo sapiens
cgggggacaggacagaggcgaaaactcaagggttgcccgcagccagactggaagccaagtcggcggcgagcagtttctgatcaataacaaagctgccaatagatgcggctctccgggcgccc

SEQ ID NO: 473067 - DNA, 122 bp, Homo sapiens
aaaactttgctgatgacctatttcactttgctggccactcaggaaatggatctgaaaaggcgacttggctcctttatggagacctggattcagacccactccccacccctcagtccatcaca

SEQ ID NO: 473068 - DNA, 122 bp, Homo sapiens
aaaaatgtaaaagcccttcttagctcgagggctgtacaaaaaaaggcacaggccagattccgctcacagccacagtttgccaatccctaatctagccaagccttaaccccttcttttcccag

SEQ ID NO: 473069 - DNA, 122 bp, Homo sapiens
acgtcgtatatcttgttcggagtgatagctgtatgggtgcatcagtgtgtgaaaactcaccgagctacgtgcactttactgatggaagttgcaccccaacaaaaacttaaagggtttaaaaa

SEQ ID NO: 473070 - DNA, 122 bp, Homo sapiens
tcagcaactggctttccaaagcgcgttcgccctcgttcccttagagtcctcactgcgatccgggaggcagctcttgccagcttttgttcaaccggaggaaaaccaaggctgagctaggtcat

SEQ ID NO: 473071 - DNA, 122 bp, Homo sapiens
actaccaagactttattttgagaattgtactatgaaagcctttacatgcggttgtcaaagcggtaaatgaaataggatgtgcagaaaaagaaaacataataatagtaataataataataaca

SEQ ID NO: 473072 - DNA, 122 bp, Homo sapiens
acgatcccagtgggcagtttgctctccatagatagtggacaggcagagggcaatgacagacggagaattctggaccaacagatagacagcagaagggaaagaaaggggcaaccaggagggag

SEQ ID NO: 473073 - DNA, 122 bp, Homo sapiens
tgcgcttttcggaccggcttaaaaaacggcgcaccacgagattataacccccacctggctcggaggctcctacgcccacggagtctcgctgatttctagcacagcagtctgagatcaaactg

SEQ ID NO: 473074 - DNA, 122 bp, Homo sapiens
acccctgcgccggcccttgcgacccgcgtccgccctccccggctgggaagcacctgccagcggccctcacctgggtcgtcctcgtcgcggggcaccttcttgaagcagtcgttgagcgacag

SEQ ID NO: 473075 - DNA, 122 bp, Homo sapiens
taaatatagtggttaagatcacaggtgctgtggccgactgctcaggtctgaaccccagcccgcgcttcactctctgggacttgaccttcccagtgccccagtcctaatgcccaagtggggag

SEQ ID NO: 473076 - DNA, 122 bp, Homo sapiens
gctgggattacaggtgtgagccactgcacccagcctgaaaaatgaacaaagagttcgaatcgtcatttctacaaagaagatacacaaatggcaaatatatacatgaaaagatgctcggcccc

SEQ ID NO: 473077 - DNA, 122 bp, Homo sapiens
gaaagcaactcctacaccatgatggcacaccaagcacccatgtggcttaatgtagaaaggcggagagcaacgtggctgttcgggaatttaggggttagctgtataccatatatactttaaaa

SEQ ID NO: 473078 - DNA, 122 bp, Homo sapiens
acacactggctggccttcatggtggtgtcgtggaagttctgcttctctgagtacttgtcacggatgtccaccccgctccgcagccccttagtcttggccttccctgccagggcgagaagaga

SEQ ID NO: 473079 - DNA, 122 bp, Homo sapiens
attctttcattttagttttgcacttggttttctataaagtacgtttttactcagttcatgcgtgaacaatttaaaaaacgacagaataaggtacaaatgtagtgtatttaataaactgtcaa

SEQ ID NO: 473080 - DNA, 122 bp, Homo sapiens
ggcaggaggcagcctgagagtcggcagccccgccttggagtctgagcactcgcgcccatccgtcaaccttgcagagcattgcaactttatgcctacgcataaaaactggagggactcgtccc

SEQ ID NO: 473081 - DNA, 122 bp, Homo sapiens
gccgccgggccacgcttcaccaccaagaggcccaacatcttcttttaggtgcaggttcctcgccccgggtgtgccccaaataaactcaggaacgccccgggggagggagggagagagagaga

SEQ ID NO: 473082 - DNA, 122 bp, Homo sapiens
tggccttgaccccgctcccccaccccactcctcgaccttccccagcctctcctccccaggcgtcgcctcctcaccttgccggtgccccccagtccatccaggctgctctccctccaaggcaa

SEQ ID NO: 473083 - DNA, 122 bp, Homo sapiens
aggatccaggagggaactcattccctgacttctcctccgcttccttcccccatgctctcacgcattcttgctcccgaatactagccaagtccctacagaggctgatcccgtgcaggggctcg

SEQ ID NO: 473084 - DNA, 122 bp, Homo sapiens
ttgatcccgtggctgcccacctggacttgcaataggtctcatgctaatatttcccttcttcggcactattaacttcttgtcttgcagatagatgcctctaggtctcctacagcgggagtgtg

SEQ ID NO: 473085 - DNA, 122 bp, Homo sapiens
agcggcgggagagagaggggagggacaggctaggtgtctgctgctccacgccactgctgccggcgccccgacctcatccccagcagccccctctgcagctaagggttaccaccgcaccacct

SEQ ID NO: 473086 - DNA, 122 bp, Homo sapiens
attctcgagaccacggtcacccggattcttggcgtctgtaccacgtccagattctggccacggacgcatatctcacgtcctccactgaaacagaccgtgagcttacgtaacgtaagatggct

SEQ ID NO: 473087 - DNA, 122 bp, Homo sapiens
acccgcaccctttggccagatgattttaatcctgggattccgcgttggtcgtgggggtaccgggagctggagctggaggagaggagccggcagcgcggagttgccggggtgcagctgcgcgc

SEQ ID NO: 473088 - DNA, 122 bp, Homo sapiens
gataaagacctttatttgcaatgtcgaactccagcagagtaaccccttttgctttccacacgcgcaaacccgggtcccaaacgctgcagttcgcgtttcccggctaacggaagaaacacgag

SEQ ID NO: 473089 - DNA, 122 bp, Homo sapiens
gtaattcatcttatgagttagggccagagaactgcatggaactattttaatcttaaaacccgggcatttgtagatactctacacattttgtggctgtaggcaaaaagaattttctgttgtgt

SEQ ID NO: 473090 - DNA, 122 bp, Homo sapiens
tcacgtgcacacaggaaacgcctttattctgagccctcagaggtcttctacgctatcattcgaggctgagttttctgggtaatgtagttccctaggcaacaaggagggtaaagggcgcaatt

SEQ ID NO: 473091 - DNA, 122 bp, Homo sapiens
gctgaccctcctcgctgcagagctgctgtgtgttctcgacagcagcgccccgaccctgcccgcagcattgagcggctctggctcagcgtgggcagtcagagctcccctgcctgtacctgggg

SEQ ID NO: 473092 - DNA, 122 bp, Homo sapiens
aggaatgggctcttgggattgactgacctgtcctcagaagggtgcaaagccacgtgttcccgatacagcacgtgaggggatgatgggagagagggatgcttccacatccgcgtcttgctcag

SEQ ID NO: 473093 - DNA, 122 bp, Homo sapiens
accggttacactggggttttctgactcgcacttcctcattcatccactcacccactcattcgctcacccacgcactgcatcctgcattcattcattcacccactcactcactgcatcctaca

SEQ ID NO: 473094 - DNA, 122 bp, Homo sapiens
acgcaggtaagagctcccggcgcctttgcaccccgctggccgagggtcccggcgcgcacacgcccccacctccaggaagggctgggattggagggcgatccagtccccagcccgggtgaggg

SEQ ID NO: 473095 - DNA, 122 bp, Homo sapiens
gaaggtacgctcgcccccgcggactgcctggcccaccccacgcgccaggactgctggcggcgcctggccctgcatacccacagacggcccgcccccgctccctgtctggtggcttcctacct

SEQ ID NO: 473096 - DNA, 122 bp, Homo sapiens
ttgagctgtcctgcctttctagacctaaccaacgtgtaccacaaatgtatcgattaatgtcgtatgtctccctaaaacatgtagattcaaactgtggcccaaccaccttgagcgcatgttct

SEQ ID NO: 473097 - DNA, 122 bp, Homo sapiens
tcccaaaaaagggcaggctgggctgcagactcggagtgtgagtgcacagcctttgcccgccgggcagcggggctgagcggagggagggtcgcctgggaacactagttctgtgctcgtccagg

SEQ ID NO: 473098 - DNA, 122 bp, Homo sapiens
ccgtggtcgcagcccctccaggtctggatgctgcggagcgaggtgcttttacctttgcatcgtccccttgcagggggagcctgatcctgggggcggggaccttccgcaagcgcttctaactt

SEQ ID NO: 473099 - DNA, 122 bp, Homo sapiens
gaagccaatcgggtcgtagatctgcacctttctatcccgccctcctgggtattgactaatcgtagaaacccccctgggatcccgccccctccacgggcttttatccaattacgccgcggcta

SEQ ID NO: 473100 - DNA, 122 bp, Homo sapiens
accgtggtgtgtagtgacagttctgggatatatgcccctctctaggacagaggctgggtacggagctctgagcattttcctccaacctgggcttcttccctctggatcactgcacctgggca

SEQ ID NO: 473101 - DNA, 122 bp, Homo sapiens
atagaggagctcctaaatgtgcccaacagcaaggaaaatcgaattgagtgcgggctcattcggcagcggccggcagagaagcgctgaatgtggaggtgccccgagacattgcaattcagcaa

SEQ ID NO: 473102 - DNA, 122 bp, Homo sapiens
cccgggtcagcacttgcggaatcacgttcgatgctactgagagagagagttgggcaggggcgcacacatgcacaagagagaaggttctgttagaacacccgcgcttccctgtgcctactggg

SEQ ID NO: 473103 - DNA, 122 bp, Homo sapiens
ggtgatccgcccacctcggcctcccaaagtgctgggattacaggcttgagccaccacgcccggcctcaggtttcttgagagctgtaggcttttcagtggggtgaagattctttctgggtcct

SEQ ID NO: 473104 - DNA, 122 bp, Homo sapiens
cccgttcctggagcacttggggccagtggggccttggcacaggtggctttgtggcaactgcgtccccaggcagtgagtcagcccttcagaagaactccctgccccacagtgacagccttggc

SEQ ID NO: 473105 - DNA, 122 bp, Homo sapiens
gcgagcagggtgttccccttgccgcgggcaaacaagtttgtgcagacgcggttgggagcgcggcggggctgcacctgctccggctgcagggcgggcttgccgggggcaccttcccgggggcc

SEQ ID NO: 473106 - DNA, 122 bp, Homo sapiens
ccagcccggccaacacagcaaaaccctgtctccccccaaaaaatacgaaaaccagtcaggcgtggcggcgcgcgcctgcaatcacaggcactgggcaggctgaggcaggagaatcaggcagg

SEQ ID NO: 473107 - DNA, 122 bp, Homo sapiens
tgggaaacgggccaagctggcagcttgagagatccaagtgcccgccccccgacccgcaaccgtgggaaggggaaccatcttgctcttggccaatcctgcctctctgagcagggatgcagctg

SEQ ID NO: 473108 - DNA, 122 bp, Homo sapiens
ggggcacagacgtggtcagaggggcacacgggtaatgcacggatgtggtcggggggcacacgggtgaggcgtggacatggtcagtggacggggcttggcgtgagctcctggagttagagggc

SEQ ID NO: 473109 - DNA, 122 bp, Homo sapiens
aacagatcatccggccagtgagtggtgaaaatgggatttttgtttaacacgctgtcacctcggggagtcgaggggaagattaaatgagataatgaacatgtatagtttacccacgatgcgtg

SEQ ID NO: 473110 - DNA, 122 bp, Homo sapiens
tgctgcctccactgacagagaacagctgcggtctccgtgcaaccgaacttgctgcagtcccggccccgccttacggacttcctattggcccagacagcccaacccctcccgttattgggcag

SEQ ID NO: 473111 - DNA, 122 bp, Homo sapiens
attgtgctgtgagaataaatgacttacccaagtgaatgaacttagccctgaaaagacaaacgtgacttgcagcccacgtcatggagactttgtgtgggtttttagtcctgtgttgtttagat

SEQ ID NO: 473112 - DNA, 122 bp, Homo sapiens
gagctgctggagtcgcagctgcctgcggagcgggcccgggaggaagcggggccgagcgtgcggcgtccacgcggtgagtgtgcagcgctttcattcaaactttctccagtctcggttccggc

SEQ ID NO: 473113 - DNA, 122 bp, Homo sapiens
ttaagagctgtaatactcaccgggaaggttcgcagcttcagttctgagccagcgagaccacgaagccgcagggaggaaccaacaattccagatgcgctgccttaagagctgtaacaccgcga

SEQ ID NO: 473114 - DNA, 122 bp, Homo sapiens
ggtcggaacacgtggggcctttgcgcccggaaccggaagcgatcgctcgccccgccttctcgccgagtaggagcctttctaggctgtgggaggtttgatcctctctatgcgccctccgcggg

SEQ ID NO: 473115 - DNA, 122 bp, Homo sapiens
ggcgcagaatgctggagacccgtggcggcagctcttcgcctgtgcagagggagacgctgccgtgggagaagggtgtgcccacagcaaggcaacgcgcggccggggacgctgctcttgcccga

SEQ ID NO: 473116 - DNA, 122 bp, Homo sapiens
ggcctgggctgggggagaggagccggctgtattgaggtgggtgcttctgtgtgtaggtaccgagcccctgaactgctgttgggaaccaccacgcagaccaccagcatcgacatgtggtgagg

SEQ ID NO: 473117 - DNA, 122 bp, Homo sapiens
ggcgcgggtgttcggctacgtcactggggcgctacggtgcctggagctgggcagtcttctcgtcagagtggggactggtaagagcgacctcaccgccaggtcctgtgtgttgccggctgaag

SEQ ID NO: 473118 - DNA, 122 bp, Homo sapiens
cccagcagccaatatgggagctggggctcctggtaagcgagtggctgctcagaaaccctgcggggaggaggggctagctaggctgggccaggatccctgtataaatggcccaggagctgtgc

SEQ ID NO: 473119 - DNA, 122 bp, Homo sapiens
aaaaggacgtgcgaagcctgtacagaatggagcaggccggccaacagggccggggggcggcgggtcccgaggagggacgggaggctgcatgtccggaggaggtgcgggaggcggcagagcag

SEQ ID NO: 473120 - DNA, 122 bp, Homo sapiens
agtggaaagcgaggacgggggtagcccccacagaccctccgcccgggcccagactgccgccgccacctcggctcggctcacccaaaccccagcaggccttcgggccttcttacctggcggcg

SEQ ID NO: 473121 - DNA, 122 bp, Homo sapiens
ggtcttgatctttgtcagggtttccccaacagctgccaattttctgcatgattttcatgccgaagggtgactggttctagcaaagcaaggagcgcccagtgaaggcccaaatgcaggtgaga

SEQ ID NO: 473122 - DNA, 122 bp, Homo sapiens
gcggctggtctctgtccctatggtctgggctccggttcactgctcccctgccctccaggtcggtcactgactcggttactatccagcgacctccgtggctgttcagtggtggctgcaggtct

SEQ ID NO: 473123 - DNA, 122 bp, Homo sapiens
atggtgcaccttctccaggaggtccagcacacccccggggttgctgagcactccgtggtccgcccaggtccgaaagtggtattgtcagactgttctctccgaattcccttctccagcctttg

SEQ ID NO: 473124 - DNA, 122 bp, Homo sapiens
tatctctcactttctttttaaaaattttttataatttcaacttttattttagattcagagcgtacatcagcaggtttgttacaagagtatattttatgacactgaggtttgggggcataaat

SEQ ID NO: 473125 - DNA, 122 bp, Homo sapiens
aggtggtctgtctttaatttcagaataaaattgggtcactaagaactacccacacattaacgggggattttatcctcatgccaaaacatttaaacaaaagcgagtgaaaaaggcccctctaa

SEQ ID NO: 473126 - DNA, 122 bp, Homo sapiens
aagtctgggcttgaggcctgcagaggaggcgaaggggccttattcctggcttcttcactgcgttttctctgaacagacatggtccgagtaccatttgtgtacaaatccttcttgatgaagct

SEQ ID NO: 473127 - DNA, 122 bp, Homo sapiens
gtggccctgaccttttctatcttggcctccaggagagtaaaggacgctctgcaggcagagcgtcccacctgccctgggacagggtgctggcctggacttagggaaaatttgctgaccttcct

SEQ ID NO: 473128 - DNA, 122 bp, Homo sapiens
cgggccctgtcagtgctgtcgtgaggtctgtctgccctgggtcagagcagcaggcagagccggcgcttcttctgccgttgcgccttcttcagagcgctgagagccaccttggcggcctcccg

SEQ ID NO: 473129 - DNA, 122 bp, Homo sapiens
gaagggaccggcaaagcgagtctggcttgccgtttgactggaattgccagggtggccggccgagtcccatgacaacctacctccctgggttcgtcgccgcggcgctgcggctcgcctcctcc

SEQ ID NO: 473130 - DNA, 122 bp, Homo sapiens
tgcgtccggcctcagcagccccgccgctcggcggacacgcagaccccgccggcccgggcgcgaacactcagcgcacccccgttccacttggtcccgccgcgccttccggtgcgccttccggt

SEQ ID NO: 473131 - DNA, 122 bp, Homo sapiens
gaacaatgcatttggtccactcctgcgaggggaggagaacgccgagggacaggaactgcgcgccagcaaaagacaccctaacctggggtgcgcccgccagctgctttcccaaggtgaaaacc

SEQ ID NO: 473132 - DNA, 122 bp, Homo sapiens
tcccgggactcaagactcaactgggaccggcacgaaccacgacacacagggtcggggggacgcggagaggaaagaacaaagagtggcagtcggaatgagaaagcggtaaagagcgaaaaaga

SEQ ID NO: 473133 - DNA, 122 bp, Homo sapiens
gcctgcggtaggcgtagtcctcgtgcgcgcggctcccgtaagccccgtagtagtcgtactcgaggacctgggaagaaaagacgtggtcctcagcctgcctctttggcccctccccgcttccc

SEQ ID NO: 473134 - DNA, 122 bp, Homo sapiens
gcccccgtgaaccgtgcctgggcacttctgggaagtcctgcactggagcctgtgcagtggcgccgggctggggatggaggagtggtccttagccgctgttcagccctgggaaacgttccgct

SEQ ID NO: 473135 - DNA, 122 bp, Homo sapiens
gatcgaggcacgctgtccccgcgccgcccgcactgccaagggcaagggcacggccgtgaccgggtaggaggcggatcccacctgtgagccactgagccactcagcctccggggaagagcgaa

SEQ ID NO: 473136 - DNA, 122 bp, Homo sapiens
caggtcgcactgagccaggaagcagttggcaaaggggcggggtgacgcggtgacgcaatccgcctgcgcgctgggcggggcggggcgggctggggcgggctgtgagcggaccgcgagcgctg

SEQ ID NO: 473137 - DNA, 122 bp, Homo sapiens
ctgcccagcgcccctcacttgcccctcgacccccacatcatctcactgctgggctgcgcccgcacccccatcttggtggcgacaccgtcctgggccctggaggaagagccgatccgggcatc

SEQ ID NO: 473138 - DNA, 122 bp, Homo sapiens
tgcacaattttgcacaactccaggaagtaacactcacagaactaacacagcagctctgatcgtcagcacctgtcaccatctaacacagcatacatattctttgcttatttacctctctgagg

SEQ ID NO: 473139 - DNA, 122 bp, Homo sapiens
gacctcacctccactcacgagtcggtcgccgtccccatcccccgcccaggctggcgcccccgatggctttgctggcgggccacgctgctagttcctttcacaccaaggtcaggaggagacgg

SEQ ID NO: 473140 - DNA, 122 bp, Homo sapiens
ggcagaggacgtgctcatcaagctgactcgtgtgctggccaacattgccatccacccgggcgtgggcccggtgctggccgccaacccggggatagtgggcctgctcctgaccacgctgggtg

SEQ ID NO: 473141 - DNA, 122 bp, Homo sapiens
gcagccagggtgggaaagtcagtggcagaagacaccctggggagggattccgggccagcccgagtgcacgcgcgcgggggcgggacggggagggcgctggacccgcggtcccctcctgagcc

SEQ ID NO: 473142 - DNA, 122 bp, Homo sapiens
acacaggtgacgaataaacatatgattaccaattgtgacgcatgcacctggcagggacggcgtggtatgcaatgaaagaaagcgacagcaggactgtgttcccgtctgatcgtctgagaagg

SEQ ID NO: 473143 - DNA, 122 bp, Homo sapiens
tctgagcgggttcttcagggtttcgcggcccccgctgtatctttacttttaccctttacccggagtttggcattctcagaggccagaggaaacccaaaacagcgatgggataaagaggggtc

SEQ ID NO: 473144 - DNA, 122 bp, Homo sapiens
ccaaaaaaaaacacagagcattgtgggcgatgcaggcgaaggcgagtgcacacacacaagcggacattgtaaggctgtttgcacaaccccgccgtgctcctcgcggatttcctgccaaggag

SEQ ID NO: 473145 - DNA, 122 bp, Homo sapiens
tctttttagcaagttttacaagtctgatattcagttcagaaaaagaaccactactttatgcgcctataacttcagtctggcaggctttgaattctttagccaatggaccatgcagtggtggc

SEQ ID NO: 473146 - DNA, 122 bp, Homo sapiens
ctgggcccgcgatggctcaggggaaacgtggcggcagagtctgacccctcagcaggacaccggggaagctcagacatggcaaggtggccaagcaggctggaggcaggagggagccgagggcc

SEQ ID NO: 473147 - DNA, 122 bp, Homo sapiens
cagaggaaagggcgggccaggggagccacggctctgagtcactggggctccgcgggctggcgtgccttcctctgccgcccacccaaccacccactcaaccatggagtcccaaccacggaatc

SEQ ID NO: 473148 - DNA, 122 bp, Homo sapiens
cactgacttcaagaatgaagactcggaccctcgcagtgagtgttacagctcttaagttggcgcgtctgcagtttgttccttctgatgttcggatgcgttcggagtttcttccttctggtggg

SEQ ID NO: 473149 - DNA, 122 bp, Homo sapiens
agccagaaaaggtgtgtggtttcgcagtctttcagacaaactgaatttaatagtagctgacgtgaacccctgtttctcctctaggctccagagccgcaccccagtgcaggtgtggaagctca

SEQ ID NO: 473150 - DNA, 122 bp, Homo sapiens
tggagtggagttatggcctgtctttctctgcagagtggagtgtgggatttggggcagggccgtgtgggaccaagcaggatggaagtcctgctgcttcaggccaggaaagtagggacaaggtt

SEQ ID NO: 473151 - DNA, 122 bp, Homo sapiens
ctgagctttccatggattctctcatggcatgtatccttatttcataaggtcttccccagccgccctaactaaaacagtttcctcttactctgctttgtttttattcacggtcctaatcattc

SEQ ID NO: 473152 - DNA, 122 bp, Homo sapiens
cttaagcaagacatacctggcttgcttcatagagaagaggtaagagatggattttcaattcggcgtgcagcagcagggaatatggctacaacaacgctggctagtattagggcaacacacct

SEQ ID NO: 473153 - DNA, 122 bp, Homo sapiens
cccgcagccatctcgaagcaaaacaaagcaacttccgatccgccccggaagtgactgtaacgcgacaggggccgaagccattttgcggctaaagcctttccgcccttaaaaggagaacttcc

SEQ ID NO: 473154 - DNA, 122 bp, Homo sapiens
ccgaagccctgggcctggttccgtggcttcctagctgctgactctgggtgagctgtaatacgtgactgcctgagatttccgagcctccgctgcacaacggaggtcagcactgctgaaggctg

SEQ ID NO: 473155 - DNA, 122 bp, Homo sapiens
gccgcccccaggatgctaggacgcccacaaagataaccttaatgcgtaaatcgtgtggctcgttggtctaggggtatgattctcgcttagggtgcgagaggtcccgggttcaaatcccggac

SEQ ID NO: 473156 - DNA, 122 bp, Homo sapiens
ccacattcattctgcagacaaaagaacatttggtgagatgattcacccccttcccagccacgcctccctttatcacttcacaggatgctgtacagacagaaggtatttaaacctgctggctt

SEQ ID NO: 473157 - DNA, 122 bp, Homo sapiens
gaggtgggagccattgagggctgtgggcagaggagagacgagatctgacttaggtgctcacgggcgccctctggctgctgttcagagaacagttgtgggattcacagggaaaacaaaaccca

SEQ ID NO: 473158 - DNA, 122 bp, Homo sapiens
tatgttgcccaggccagtctcgaactcaaagcaatcttcccacctcgactgggctcaaagcgctcttcccacctcaacctcccaaagtactgggactacaggtgtgagctaccatgccaggc

SEQ ID NO: 473159 - DNA, 122 bp, Homo sapiens
gggcatcgggacgagagcccagggcctggccagggcaggtgctgggggcgttggcaccagcgttacaattagactccagacccggctgccaggcggctcctctgacctctactcctggggga

SEQ ID NO: 473160 - DNA, 122 bp, Homo sapiens
gacacaggctcaggagaaggtgagtacccgtcccagcatcacccggctggcaaggggagacgctggggctggaacctcgctgtctgaactggaaaggaaaactccacattcagggtgcccta

SEQ ID NO: 473161 - DNA, 122 bp, Homo sapiens
taattttattttcagaaaccacatcttcagcataaaggaaaataaatgtcaataacccttcgccacctcttgtaattcctgttgaaatccataaggttatgctgggtgcagtgactcacatc

SEQ ID NO: 473162 - DNA, 122 bp, Homo sapiens
ctagcaggagccagctgacctcctgcgtgtcacaatagcagccaggtgtctccacggtgacgtctctgagccaggaggtcagaactgtgggattgatgacctcccacaactggagcagccgg

SEQ ID NO: 473163 - DNA, 122 bp, Homo sapiens
acgggaagggccccgcacctctgtgggcgtcttcccaaaacccatcacccagtctaattgcgaggaaacaccagacggacccaacgtgagggacgctctacagacgccatgacaggcctgct

SEQ ID NO: 473164 - DNA, 122 bp, Homo sapiens
atccggcctcggcactcgcgcgcgatcccggccggcggcgcggcccggcgggccaggcggcgccacagcccatggagctcgagaacatcgtagcgaacacggtgctactcaaggcccgggaa

SEQ ID NO: 473165 - DNA, 122 bp, Homo sapiens
gttctccaaaccagtggtgatcctgccctgccaacacaacctgtgccgcaaatgtgccaacgacgtcttccaggtgggtgccagggacggggcagggccaggtaaagcaatgcagacctgtg

SEQ ID NO: 473166 - DNA, 122 bp, Homo sapiens
ctcagtgcggccgcgaagcagagcgggctgtagagccttgcgcgcgcagtggggatggaacgttgctaggcttagcgggtctggctgctgggggcccgagcagcacgctcggagccgccgcg

SEQ ID NO: 473167 - DNA, 122 bp, Homo sapiens
cagcaccgaacccaactgcatgatcagctgcaacatccaccgtctcgaacctatcttcgacgccatcttgggaaagggcagtccgctgcggcctcaccccagtcagagaagcaggcgcgggg

SEQ ID NO: 473168 - DNA, 122 bp, Homo sapiens
ctgccaaacagatgacaaagtacctccgactgaatcccacagacagcgctttgagcagaacgcacggctcaactcatgtaattactgtttatagctggccgagcctgactaggagagggcag

SEQ ID NO: 473169 - DNA, 122 bp, Homo sapiens
catggggtgatgcataccagatgccagtgccatactctgggacttttcagtctccaagaccgtgagctacataaacttccttatgaattacccagtctgcagtattctcttatagcaacaga

SEQ ID NO: 473170 - DNA, 122 bp, Homo sapiens
gacttaacaaatttgaggtgtgggccatggcgtcgacgcgcgggagtgtgtggtcagagccgcgttgagcatggcaagagtgccctccactgttcagcgctgtgcgtacacactctgaggtc

SEQ ID NO: 473171 - DNA, 122 bp, Homo sapiens
tgagcctggcgggaaagctcaaggagcagaactggaaggcacggtcccagacatgcgtcccgcccccgcccgtgctagctcggtgtagcttgcctgtggagggtctgagaggggaaaaggca

SEQ ID NO: 473172 - DNA, 122 bp, Homo sapiens
ggattgatggaggacctggagaggtggcggggctacagagtttgggggacatcatagggacgtctacagaggtgatgagaggtcttagagaccacagtgagaggtaaggtggggcggaaaac

SEQ ID NO: 473173 - DNA, 122 bp, Homo sapiens
atcccccatgatcctgttcgtcatatccagggaggcacaggatgacattccattgaatttcgcgacaggcgtacacacacagtgtgatattgttcctaatatccaagaagggagaggatgat

SEQ ID NO: 473174 - DNA, 122 bp, Homo sapiens
tgggcagcatggagagacctcgtctctacaaaattaaaaaattagccaggtgttgtggtgcgcgcctgtggtcccagctactctgggaggctcaggtcgaaggatcacttgaatccaggggt

SEQ ID NO: 473175 - DNA, 122 bp, Homo sapiens
ggcttcgcggaccacggatgcttcaggtgcagagggggctctgtgtgtcgggagcacctgcgcccaggcacaaaccagccgcctggcagagtgccacgtggcttcgcggaccagggatgctt

SEQ ID NO: 473176 - DNA, 122 bp, Homo sapiens
tcttggctgtagcatcttgaatagggtggcagtccctggctgctgagggggacagctggacggctgcctcccaggggcatttccatgacttgcaggcccagaaactagacttgggcatgacc

SEQ ID NO: 473177 - DNA, 122 bp, Homo sapiens
gggcggcctccagggcttcagaagacagctgctcatattcatcagacaccatgtggccaccgagtgggaactcatccacttttgccttctttctacccaggtcaaagatgcggatcttggca

SEQ ID NO: 473178 - DNA, 122 bp, Homo sapiens
agcaccgcaggtggtgaggagggtcagggcttccacgcggggtgatgacagtccctggcccgcaggccatttcccagaagctcagacaataccttcgggcctccgctcgacggactgccttg

SEQ ID NO: 473179 - DNA, 122 bp, Homo sapiens
cgcaatataacgcccggctcttggctggctgctccctcgcagtgtcgcggcagcggaggccgggccccctgcagaccccaggcccgaggtccccgtcccgctctcctagtcccggagcccac

SEQ ID NO: 473180 - DNA, 122 bp, Homo sapiens
cccctcgccagggccccagcctggcatgaaatgggattacatgcctcccattgtgtgtcccggcagccacaaacaccgtcaggcccagcgtcaccctccccacctcccggatgagaaggagc

SEQ ID NO: 473181 - DNA, 122 bp, Homo sapiens
tctctaggagtaagtaaagattaaaggtagttcgcggtatagcctaggcagggattaacccgtggtcccagcgctcctgctatttgcattccaaagcagacacctcatgcgctcaaccccgc

SEQ ID NO: 473182 - DNA, 122 bp, Homo sapiens
cttttcagcaggctgtctaagctacctggtgatcaggggagtgatggacaaagaccaacacgaaggtttagaaggctcccctagaagcaccttggccccctgttttcaccctgctgtgattg

SEQ ID NO: 473183 - DNA, 122 bp, Homo sapiens
ggatttgtattgttaacacatacctgggttacctgattcttatcagacaagtttaggaagcggcaccaaagctttaaaaactgtggcatcttcaaaacagtaatttaaaaagtaacttcaat

SEQ ID NO: 473184 - DNA, 122 bp, Homo sapiens
ctctttctctgctgctttaggatggtgcctctagaaggtcaagtcacccagatttaggaccgcttcccttcccggttggcctccgagacaaagtttctgtctggatttggcccgggcctccc

SEQ ID NO: 473185 - DNA, 122 bp, Homo sapiens
tgactgtggggtgttacacagagctctcattacaagataaggtctctgcgtgtcatttcccgtcaatgatgttattcagcaggatggctcacatgttgaaacttgaaactccttgggtgaaa

SEQ ID NO: 473186 - DNA, 122 bp, Homo sapiens
taaatgttgcatgtgacattatacttcctcactgcaccttctttgactcgcctccctaaccggtcagaggcatgtgataagatcaatttgctgcttgcttcacatgggggtaaccctgtgtc

SEQ ID NO: 473187 - DNA, 122 bp, Homo sapiens
gggccagcgccagttccaggtgggcgtgggcttggtgggccccgcactcagagcagacagcgggccccaggcagtgaggggcttaccacctgagccagcagctgctgccctcgatttctggc

SEQ ID NO: 473188 - DNA, 122 bp, Homo sapiens
tgagctgatccagtacaattgcctccaatttcattctggaccctgaacaggaggggacatcgtgacaaagcaaattgtctggtatcatgaatttggaacaccgtaagtgatctttactgagg

SEQ ID NO: 473189 - DNA, 122 bp, Homo sapiens
taccagcacctaggggacacttggttatatatcctgtgcaggcaggggacaggctgacaacgggctaatcttgcttccgtctcagagggagaagaatgagtcatcagggtttgtttcttttt

SEQ ID NO: 473190 - DNA, 122 bp, Homo sapiens
gctgtcagggcccctccgcctgcggcctcgggggccgggccgcgggagcccgtgggaaaccgagctccgattgggccgcctgacaatcgctccgcctccggccagccaatccgaggcggtgg

SEQ ID NO: 473191 - DNA, 122 bp, Homo sapiens
tcccgccggccgccagccccacacagttggcgaagccctctaggccccttggctcctcctcgccctccctgcgaggcctctgcccccgcccccagccgcccgcgcccccgccccgcccgcct

SEQ ID NO: 473192 - DNA, 122 bp, Homo sapiens
actgtaatgctgtgcaaatacatgactatccttaaagtctttcggatcatactgattaaacgtcatttactgttttcctaacaatatcaaagacgattaaaaaaattcgttttcccaatctg

SEQ ID NO: 473193 - DNA, 122 bp, Homo sapiens
gagtaaaagggaccccggccgctttctccccaagaggcaacaataaaagcatcctcctctcgccccaatacttcgcaggaaagtggccccattcccgggacccagtcgaccgcaggaaaaaa

SEQ ID NO: 473194 - DNA, 122 bp, Homo sapiens
gtcaccctctggcttcccagggaatccaatggcacctgtgtttcccaggcctgggtgccgcggtcccgcagtggcatcctcgcctctcccctcgttcatcagcatctttgcagccgtagccc

SEQ ID NO: 473195 - DNA, 122 bp, Homo sapiens
gggggacgggccagacacctcctcgagcctccgaccctctccgggccaggctggcaggcacgccagcctctgccccctcggccgtgccgggcctccccgggatctcacctgggttgaccggg

SEQ ID NO: 473196 - DNA, 122 bp, Homo sapiens
ttgagcttcagcttcggacctgcatatttatttaacagctattgagtccttggtatgtgccgggcaccctcctgtgtaccagggcatggcaggaaatgatatgggcagctccctgtagtcat

SEQ ID NO: 473197 - DNA, 122 bp, Homo sapiens
ggttatctccatgtggtcaggctggtctcaaactactgacctcaagtgatccgctcacttcggcctcccaaagtgctgggattataggagtgggcccagctctaatttttgtatttttagtg

SEQ ID NO: 473198 - DNA, 122 bp, Homo sapiens
ttttatactctgctatatgtgtgtccgctgcttttaggcaaccagccgctgcccctgggccgcaaggcaggctggaaacgattccgccgtcaggtcccaaatatgagccgcgagaaatgcag

SEQ ID NO: 473199 - DNA, 122 bp, Homo sapiens
catacttagtaggttaagatactggagcctgcctcatctcagctacttgggatcactgcacgaaccaaaatgctcagatacggagattaaaaacttacattacaaaatcccatcctcaccgc

SEQ ID NO: 473200 - DNA, 122 bp, Homo sapiens
ctcccggcccgctcgtcggcgcaccagactgagactccccttcaggacgctcttcgcgagcggtacccagaggcgaagtcgagacaagcccaggagcccccaccccccgcccgcgtttcctg

SEQ ID NO: 473201 - DNA, 122 bp, Homo sapiens
ccgcgcctcgcctcaccggcctcgctggcctcacctcgccgcgcccggacccgccacccccgcctccccgcccgacctccgcagcccccgtctcggccggcagcgcccaccgcctgcccgaa

SEQ ID NO: 473202 - DNA, 122 bp, Homo sapiens
tgcccagagctcgcggtggactccgacccggcgcaacatggccgcagcctcgcctctgcgcgactgccaggtacacggaggctgcccccaaccaggtccccctcgggccccgggtcctgggg

SEQ ID NO: 473203 - DNA, 122 bp, Homo sapiens
ttttcttttcagtaacttgcccaagttcacatcttttatttctttttaaggcaaagcacccgcaggtcaagccccgccccgtcccccagccccgagtccctgtcccaccccctttccccctc

SEQ ID NO: 473204 - DNA, 122 bp, Homo sapiens
tgccggccggggctgccagcgagcgggtagcgggcgggaccgttgatgccggtagcagctcgcgcgcgtccggctggggcagggggtgccgggggaggagaggcggcgggcaggtgggcgtg

SEQ ID NO: 473205 - DNA, 122 bp, Homo sapiens
cggagctgtgcgactgtgaccaagccacttgacctctctgtttcctggtgtgaagaaagccggcctgcttgccagacttggtcggccatagcttgaagggggtctttaagttaagacacagg

SEQ ID NO: 473206 - DNA, 122 bp, Homo sapiens
ggatggggaagacctccggtcccctccaccaaacaaagcacaagccaaagtgcccaccagcgtgagtgccgtgagcaccgtgaaccttctctatgccgaggggcacacagccttgagcgtcc

SEQ ID NO: 473207 - DNA, 122 bp, Homo sapiens
tcccgcggctcccggggctggcgtgccctgcgcttacgctccgcgctcgaatatcttccccggagggctcgggaccagcgcgagcaccttccctggaagcccacatccatcacccagcgatc

SEQ ID NO: 473208 - DNA, 122 bp, Homo sapiens
ggagggtgtctcccacgcacacaacaggcagtggtatagccccagctctgcccctgcctccgctccctccatgtccagcagaaactagaaccatgggaagaggctggctcaggcccagaagg

SEQ ID NO: 473209 - DNA, 122 bp, Homo sapiens
ccagcgtgacacagagcagcaaaagggctgcatctcacacacaaggtgtggcagatgacacgctgtgctcaccgtgggggccactgccagaccagatcagagaacagagagcgcacttgatt

SEQ ID NO: 473210 - DNA, 122 bp, Homo sapiens
caggctggagtgcagtgatgtgatcagagctcattacagcctttacctcctgggctaaagcgatcctccaactcagcttcccaaagtgatggaaattacagccgtgagccactactcccggc

SEQ ID NO: 473211 - DNA, 122 bp, Homo sapiens
tgaactcagactcgcgcactggtctcgggtacctgggcagggcctgcttggagcagctcccgtgagagtgcagccccgggatgcggccaggaggacgaccgcacgtcagcaggagcagctat

SEQ ID NO: 473212 - DNA, 122 bp, Homo sapiens
atcccaactaggatacctaactcagaaccacaacggggattcccacctccgatcctaattcgggccctgactcagaaccactaagtggatttccgactccggtcccaattcgggctttgact

SEQ ID NO: 473213 - DNA, 122 bp, Homo sapiens
tttgaaccccctactccctgcgcaaaggctgccagaagctgcgctgcagtgaacacgctgcgcatgagcccctagacccctccaccccccctactccccacactccccccccccacttttgc

SEQ ID NO: 473214 - DNA, 122 bp, Homo sapiens
ccctaaacatgcactgagtctgtgccagtgtcatgctgtgcccggccctgtgcttcgttgcgttccttcatttaatcctcctgaccctcctctcctaagctgttccagttttacagatgaga

SEQ ID NO: 473215 - DNA, 122 bp, Homo sapiens
tcctggatctgtctattgttgtcccagttacctggctccaggcccagcactggggtggggcgagctggaaggaggacttttcggggctcctgggaaagtgggggggggggccgggggacttg

SEQ ID NO: 473216 - DNA, 122 bp, Homo sapiens
tgcaccaagcttgtccaggcagctcagatgcttcagtcagacccttactcagtgcctgctcgagattatctaattgatgggtcaaggggcatcctctctggaacatcagacctgctccttac

SEQ ID NO: 473217 - DNA, 122 bp, Homo sapiens
tgtacagcagatttttgttgtcctagctgcctttagcacactcccccgaatgaaccatttcgacctagtatcttgtttcctacttctctaactgaagtgtcccaacagtccccttgctgtct

SEQ ID NO: 473218 - DNA, 122 bp, Homo sapiens
tggctcagacctgcgaaggaaccaaggcaagagggagaaaagccctgccgcctgatcccacgccgccactcacagacccttcgttgaccggcagcattgaacaggaaaaaaaaaaaaagatg

SEQ ID NO: 473219 - DNA, 122 bp, Homo sapiens
ctaaggttcaaggaaaaaggttaagttggaagaatcccaggcaaaataagtgcgaatccacgacagttggtaacccggacccacattagaactcagaggtcaagcagaagcgaacgactgga

SEQ ID NO: 473220 - DNA, 122 bp, Homo sapiens
ccagccgacatttgtggccgagctgggccaggagggactcgggtccacaaacctagaagacgactgcagggaggcccagtcacgctaccgccgcttcggcagcggagcctagcctgcccccc

SEQ ID NO: 473221 - DNA, 122 bp, Homo sapiens
acaggggcctccctgggtgtccctggaaaccgaggaagtaaccgccccctcgggaagccacgcctcctattttgttccggctcgggggcgggacccagccggggcccgcctggccctttaag

SEQ ID NO: 473222 - DNA, 122 bp, Homo sapiens
ggcttttatttggcagtacttaacccatgggcgcaggtgccgccagatgagtcagctcatcgaagtatagactgaatggaatatccggcttggcaagtagtaatctagaaggagcagcatgg

SEQ ID NO: 473223 - DNA, 122 bp, Homo sapiens
tataaaaatctctgcaatactaccacggcagttccaaaggatttagcatcttaaattatgcgtacattgtcgaagcaacatatgcaacccaggcaccgtgatccaaacacacagtgcagtca

SEQ ID NO: 473224 - DNA, 122 bp, Homo sapiens
ggaactccctgattgtttctttgtatacagagttggagagctgagagaccctcagtggttcgggtgctctcccaaggcaaggcaggtggaggtcttggataggaatctcattttatttattt

SEQ ID NO: 473225 - DNA, 122 bp, Homo sapiens
tcacagcccacaccccctcctctggccgcagccgaagctcccccttccgctgcacatcctcgctcaccacgcccacggtgcagctgcccccatgggccaggtctatactcaccacccacgtg

SEQ ID NO: 473226 - DNA, 122 bp, Homo sapiens
cgggacccgccgacactggacacttctcctgctcctgctgtggcgggagctgactgcagccggtggaggtgccggggtgggctggggagggctgagggcaggcctttatttccccaagtctc

SEQ ID NO: 473227 - DNA, 122 bp, Homo sapiens
aaggcaggctgctgtgggaggagcagcttatggcaccctgacctcctagggctgaggaaacgatatttgatccctcctggtggaggtccttggataaaggatccaacccaagatagcaaccc

SEQ ID NO: 473228 - DNA, 122 bp, Homo sapiens
tgagtgcgtgtgagtcaataaaggatgaacatttattgaatgaatgggtgaaggagtgagcgaacatgcagatgaataagtgaaaggttctggtgagcagggaagccacctgaaaatgaggg

SEQ ID NO: 473229 - DNA, 122 bp, Homo sapiens
gctacctctcacttgtgcccaagcaagttggtttaccattcatttacctcagtttctcctcgtgtgaaatggggatgataattgtaccgcagtaagaagtagatttcgttacatcttttact

SEQ ID NO: 473230 - DNA, 122 bp, Homo sapiens
cagatctcagtgggctggttgatttgtgtggcccatggatttgaaagaagctgctgcacccgaaactgccagtgtgcggtgacaacggcacacgcctagactgagtgtggtttcgtcgtgag

SEQ ID NO: 473231 - DNA, 122 bp, Homo sapiens
attcacaaaacataaaatttacgattttataatgaacaattcagtggcatttactacattcgcgatgttatgaaaccaccacctctctctagttccaaaacattttcaccaccccaaaagaa

SEQ ID NO: 473232 - DNA, 122 bp, Homo sapiens
gcctaggttccagaaacttcctgagcacggctgtaggctgtgctgtccttcctccttctgcgctgagcctcttcctggggcaggagcacttctcaggctcatgggtggggttaggcccagga

SEQ ID NO: 473233 - DNA, 122 bp, Homo sapiens
ccccaatttcataaccatggaagcaatgctgttccgtggaagtgacagaggtgagtccttcgagaggctttctggaaaaatggccagtgctcagggtttgcaccaggaagcccaggaggctg

SEQ ID NO: 473234 - DNA, 122 bp, Homo sapiens
ggaagaatttgatgatgtgccctttctgcttcggacagtaaccatgaaattgctggcagccgcaaaagcttccagacttctattgagcatctctgctgggaaaaacataatgcttcagggta

SEQ ID NO: 473235 - DNA, 122 bp, Homo sapiens
aacttgaaatcccagagcccgttaaatccctggaattagaatgtgctttgttgtcattcccgtggatgtacgttttggcttttaaaaagcatgcaaggcatggtaaccatgtggaacataaa

SEQ ID NO: 473236 - DNA, 122 bp, Homo sapiens
agataagcgcttcaaatgcgctacaaactggcgcttcagatgcgctacaagcacgcttcacgcgggcgacaaactgatgggagctacaactggcgcttcattgcgctataaactgatgggcg

SEQ ID NO: 473237 - DNA, 122 bp, Homo sapiens
cccacgcggcataggtgcgggggcggggcgccacggaggctcaggtgtgggcggcggggccggggcagcacgggttcccggaccgctgcctcccggcgttggcaactcctccacgtgctatc

SEQ ID NO: 473238 - DNA, 122 bp, Homo sapiens
ggttaaggttgctgatttctccacagcttgcatttctgaaccaaaggcccttttcagggccgcccaactaaacaaaagaagagctgtatccattaagtcaagaagctcaatgtgtaattaag

SEQ ID NO: 473239 - DNA, 122 bp, Homo sapiens
ctccggattccgttcatgcctctcggagctacagggcttggtgcggagacgcagggcgggcgcgctgggctctgggtgtccgcaacccaaagtgcagctggtgtcttgacgctaccgtctat

SEQ ID NO: 473240 - DNA, 122 bp, Homo sapiens
aaacatataccatatgaaaaagtagcaaaacaatctgcaaaactatctggacttcactgccgcctgagatgtggttacttgttcatttaaagaggaatttctccaggaaatacacatcatga

SEQ ID NO: 473241 - DNA, 122 bp, Homo sapiens
cttgccagcgtgccgaggcgcaggcagggtgatggaggcgccccggccgggaggatctgccggggagagcggctttcctcatcgattcgggagcacccaccatgcttaatttctttattaat

SEQ ID NO: 473242 - DNA, 122 bp, Homo sapiens
cagcgcggtcataacggtcccggcctatttcaacgactcgcagcgccaggccaccaaggacgcaggcaccatcacggggctcaatgtgctgcgcatcatcaacgagcccacggcggcggcca

SEQ ID NO: 473243 - DNA, 122 bp, Homo sapiens
tcgcgcagtcgcgcccataaaacgccccctccgggcggctagggcaggtgagcgcgtccccgggcctccccacgccggcccctgccacaggccgtctaggtcgagcagatatttacagaata

SEQ ID NO: 473244 - DNA, 122 bp, Homo sapiens
tccacaagtgtttgttgggcacagttctagacactgggcagctgcggctgtcagcgctgtcgtggtaccctctctcctgatcttaacatcctcattgggataatttataaacaaatagataa

SEQ ID NO: 473245 - DNA, 122 bp, Homo sapiens
caaggaaattcttaggaaggaagtgagactgaactaagctatgaagaattgttagcatttcgattagaaaggaaagaggataatttcaggctgaagcataactggagaaaacatgaaaacat

SEQ ID NO: 473246 - DNA, 122 bp, Homo sapiens
tgggtgtgagagtgctgggcagactggcattgtgaggttgtggcaccgctgcccaggcaccggccctgagggtctccagatcggggcaggatgcccaaaattgtgctccagagggtatcagg

SEQ ID NO: 473247 - DNA, 122 bp, Homo sapiens
gtagggcctgctgggtgtttagctcatggctttatcttatttgtccccctcctcctttcacgctccagtttataaagaaacagagatgatgtgtgtgtatgcctcaaatgcagaaacagttg

SEQ ID NO: 473248 - DNA, 122 bp, Homo sapiens
tctgtcgcccaggatggagtgcagtggtgtgatctcggctcacagcaacctccacctcttcggttcaagtgattcttctgcctcagcctcctgagtagctaggattacaggcatgcacccgc

SEQ ID NO: 473249 - DNA, 122 bp, Homo sapiens
agaattctcccacaccaagtgcatgtcagttgtggagaaaacatagcaaaaagagccgtacgctctttacagatactaatgtcaagagttaaacctcctcaggttcaacctgtgataaaaga

SEQ ID NO: 473250 - DNA, 122 bp, Homo sapiens
tcagagattcgtgagaatacttggcgcccatttgtcccattgtacttagttgtttcttttcgatagcaaatctcttgccccattgctacattttcacatcacaaatctcttacatttgtctg

SEQ ID NO: 473251 - DNA, 122 bp, Homo sapiens
cgcggtgaggtagtttttgcgtttggctttgccgccgcggtgtagtccgcgggggcgtctcgcgcgggcagactgccgcccctcaagcgtggttcctgccgggaatgactggggttggtcct

SEQ ID NO: 473252 - DNA, 122 bp, Homo sapiens
ggctcgcgagaccgaggctgcaaagagagccgccccccattggccaaccggcgagtcccgcgcgccacctcctgggagatgtagttccgggaacagctggcccctgcgactcgcgggtgtga

SEQ ID NO: 473253 - DNA, 122 bp, Homo sapiens
aagctgctgttgagtcagacacccgggacagcagtaggacctgaggtcataggggcaacacggcaggtatttgagatattgcctcttaggattcctatttgtcactatgatgtatgtgctga

SEQ ID NO: 473254 - DNA, 122 bp, Homo sapiens
gggggcgcgaggggcttttcgggagcggaggctgagtcccgggggtgggagcatcagctacgccctcccggccgcggggccgagttgcgggcgccgccgcccccagccagctcctcgtcgga

SEQ ID NO: 473255 - DNA, 122 bp, Homo sapiens
taattttcagaatataatgtaaatcatgatccatttttttagattagtctttttcccagccgtgaagggagactgaaaggacaactcttataaacaatgattatcagctgcttctgtagttg

SEQ ID NO: 473256 - DNA, 122 bp, Homo sapiens
tggagggcaccttgaacataacaggaaatttcaaataacaggaaaccaagaccagcaaggcgggtggctccaccctgcgtcgggcctcagtcagcccccgggggaggccatgaacgccacgg

SEQ ID NO: 473257 - DNA, 122 bp, Homo sapiens
aaccctcacctgaaccctaaccccgctgggctcccggctcccccgtcggtcaccatacatcgtgtgtcccgattcaccataaccaccagaaagtcgcttatgaagatgttacaattatcggg

SEQ ID NO: 473258 - DNA, 122 bp, Homo sapiens
aacccactgactttcttcagactatgcaattctgggccagctcagctgccgacagtgcttcgcccttcccttcctatgaaaaccactttccttcctaccaaaaccacactaaagactcccac

SEQ ID NO: 473259 - DNA, 122 bp, Homo sapiens
agcagtcctgcaacagtcttccagactccacagctgcataaggctgcggacaagcttgggcgcagcccctgtgcctgtgacctgagctctgccttggaatgaggtcaactccaaggaggaga

SEQ ID NO: 473260 - DNA, 122 bp, Homo sapiens
tgtaaggcagtgacttctgagacaaggcatctgcctttctattcttttcagaggaaatctcggcgttactaccccacacgcctggccatcaatctctcatcaggtgtctctggagctggggg

SEQ ID NO: 473261 - DNA, 122 bp, Homo sapiens
gcgctcgctggctgagggacggcggccgccgccatgatgcttgtttgctttcaatgaaaacgaggggggcgcggaggaggaggcggcggcgtcggtggcggcggcgacggcggcgcggaggc

SEQ ID NO: 473262 - DNA, 122 bp, Homo sapiens
aggggcgattatgtgtctatttataattggccccagagtaaatggcttaaaaggggccaacgcccaccacaggtgagaatcgcagctcactgctgtgcttggagactgtggggtaaaggcaa

SEQ ID NO: 473263 - DNA, 122 bp, Homo sapiens
gagctttgtcaccaagaccatggatcccgcccagggccggccgcgcacatggggcagccccgggcatcagcagagctggcagaagccggggatgaggtcacactccctacttctaccagccg

SEQ ID NO: 473264 - DNA, 122 bp, Homo sapiens
ccgcagccccgcagccccgcagccccgcaggcctggcgcccgaggtcccgctccactgcccgcgccccccgcgcagccttatatctaacggtcaattcgtgcaatctgtcgcttctccctcc

SEQ ID NO: 473265 - DNA, 122 bp, Homo sapiens
aggcagggcaggcgctgatgtggcaagctggtaataaattttcatattcccgtgcaaagtcgtcacagcctgctaaacattcaactgctggctcattcatcagtgatccatagtccagtggt

SEQ ID NO: 473266 - DNA, 122 bp, Homo sapiens
cacacaggaacggacccggggagaacaacacatcgtctctgcgccagggagagaggcgtccggggaacccagccgtgcccacgcatttatctccgccttccggctcagaattgtgaggaaac

SEQ ID NO: 473267 - DNA, 122 bp, Homo sapiens
gcgcggcttccgaaggaaatgccaggcgctcaagcccatgtacagcatgatgaacgggctcggcttcaaccacctcccggacacctacggcttccagggctcggccggcggcctctcgtgcc

SEQ ID NO: 473268 - DNA, 122 bp, Homo sapiens
ccaagccaaaccctcctggcaggcaagtgcgatgcttccagatgagcccttcctttttttcgtgtggctgcaggttccttcctcccggctcctgtgctccccagcagcctgggcttttctct

SEQ ID NO: 473269 - DNA, 122 bp, Homo sapiens
ggcccatggatgtgagtcatcacagtattctagaaacagagaagaggtcttaacctaatgcgcatagagaaattgttctcattgtaaacatacccctgtccttagctgatctaggtggaagc

SEQ ID NO: 473270 - DNA, 122 bp, Homo sapiens
gtgtggacttgccactacaaatcttgagggtaaactgcttatctccccacctctctgccccgtttatctgaggcgataacgatctctaaacacgaggtatcgaatggagcccaatgaatttc

SEQ ID NO: 473271 - DNA, 122 bp, Homo sapiens
gacttccttccctgggctcactcaacccggcctaggctctggggcaatcaagtcacctaacgtagggtgctgggctttcccggatcacacaccagttcaggaaggatcagaagaggctgtcc

SEQ ID NO: 473272 - DNA, 122 bp, Homo sapiens
tagaagtcctgctggatgaagcccctttcctgttcctgcctacattcttctttccctggacgccttacttacgtaaaaactacatttcccatgagcacccacaggcgtgcacgcagcgcagc

SEQ ID NO: 473273 - DNA, 122 bp, Homo sapiens
ttaatatattaatttattatataagtgataaatgtttaattcaaattagagttcaccttacggttgaaaatgtcttttagtcagaaaactgaggcatgggaaggttaagtgacatagatcta

SEQ ID NO: 473274 - DNA, 122 bp, Homo sapiens
atgacagcagaaatgtgtgtgtgctcacattctggggactgggcgtccaagatcaaggtgcggtacaatcaggctcccagtgagagttcttcctggctcgtagacggccaacttctagctgc

SEQ ID NO: 473275 - DNA, 122 bp, Homo sapiens
ctcttttgccagatgcagacacttagtgtgctgggcagaggcctcccaggatacctggagcgatggccagggggatggagctctccctgctcctgctttgcccagcctttggctaggcctac

SEQ ID NO: 473276 - DNA, 122 bp, Homo sapiens
gagtgggatggggctgaagagtggtgatttggtggccccgatgtagttctgccgcctttgcgggagaaggaaaggagaaaagaggtcagcgggagcacctcggcagcaatcctccattgcca

SEQ ID NO: 473277 - DNA, 122 bp, Homo sapiens
tccagtcttaatgaagcagaacaaaaacgaaaccctcgaggagcgaccacatgacccccgcgctgtgagctgctggcggccagcgccctcgcctcgattgtctgcagccctgtagtgggccg

SEQ ID NO: 473278 - DNA, 122 bp, Homo sapiens
ttgggcaggtgggaatggggggagtcaagggagcataggtgggactggctttctgcaccccgatatctgtactgagtgtactgagtgtactctttcccaggtgtacaagccctgcaggcagg

SEQ ID NO: 473279 - DNA, 122 bp, Homo sapiens
ggcccctgacttccaatttgaagccgcaagccaggtatggaaatcagagcaataaagagacgatgcctcccaaatgcacaggacgcgggctgtgtcgggaagctatccatcacagctggctg

SEQ ID NO: 473280 - DNA, 122 bp, Homo sapiens
ctcaagacagctttaatacacatcaatcacaggtaggcagtgtgctctggtctgtgcccccgactctcagcgtgaccttttgtgagtcaccagacggctttcaggctcggttactcagctga

SEQ ID NO: 473281 - DNA, 122 bp, Homo sapiens
gctgctcggtgtctgccctgttcttccagggccctgcccccagggaccacactgcacagccggcttgggaacaggttagacaagtcaaggctgtctgaggctttgctctgtgtttcctggaa

SEQ ID NO: 473282 - DNA, 122 bp, Homo sapiens
aggagtaattccagcatcagtccaccataattattacacaacatttggcctaaccaacaacgatcacccttaaaactgttccgtttctgagaaattaaggtttgtactaaaatcaaaaagaa

SEQ ID NO: 473283 - DNA, 122 bp, Homo sapiens
ctgtggtgggctggaggcctgggacgctgtggtcccaaaaccagaacatctcgggccaaccgggagaagttggccaccctagctggttgcctacagcaactcgcactgtgggctctggtccg

SEQ ID NO: 473284 - DNA, 122 bp, Homo sapiens
tggaaatcatctgtctgctttctgtcactctagattagttttgcccattttagaacttcacgtgaatgaaatcatacatgatgcattctttcatgtcttgtttcttttgctcagtgcattgt

SEQ ID NO: 473285 - DNA, 122 bp, Homo sapiens
tttctaaggatttgtattaatttgctgtccttcgcatacattgtgactatttcccctcctcgagccagtttcctcctaactctttttgagagatcctagatggccggcccattctttgattt

SEQ ID NO: 473286 - DNA, 122 bp, Homo sapiens
aggcacttccttcttacagtcggctggagctgcaggttcgcaaggtccgtgaaggaagcccggctcagtgtgtttagttccgtctttttgggtctctacctgaggctagaatacagcggggt

SEQ ID NO: 473287 - DNA, 122 bp, Homo sapiens
tgcccagcacaaagtattatagaacaaggttttgaaaatggctgaagacagcaggaaactcgtcttcaagcctgaacagtgggagtcagcacgatcgccacgccctcaactcaagtcccctc

SEQ ID NO: 473288 - DNA, 122 bp, Homo sapiens
gtcacaaaggttggaagggtcgcggggcctctgggtgccgagctgcagatgcctccactgcgagcacagccctgagacaagggcccaggcgcccagcggggctggtttcactcagtccagcc

SEQ ID NO: 473289 - DNA, 122 bp, Homo sapiens
ctggctcctcctgtcccttttccctcccggaggaacccctctagttccgccaggctgggtcggggtctcaggcccctcactcacccgcggatgcaagtctggccaacatagtcagggtcaaa

SEQ ID NO: 473290 - DNA, 122 bp, Homo sapiens
ggaccgcggggcccaaggccggtctcctcccagaaggattaaatgccaccgaggggatcccgtggggtgtctcccggcgcggactaggctgacagacccggctctccgctcccttcggcgcc

SEQ ID NO: 473291 - DNA, 122 bp, Homo sapiens
tctgggcatagtgactatctaagatctggaacaacctctaagaacagggtacaaccttgacgtctgagagaacattacagctggggaaagcttgctccagcaacttccccctctcactgtgt

SEQ ID NO: 473292 - DNA, 122 bp, Homo sapiens
cagatggagcagatgaagcagcgcatcgcggaggtgcgagccggggagcctcggagcatgcgcgctgcccaggtcccctggcggccccgcgccacgctccggccctggaagccctggggcgg

SEQ ID NO: 473293 - DNA, 122 bp, Homo sapiens
atgagtctaaaaaagtagtccctccggttcctctgtttccccccatgtggcgtcaggaagcgaggcaccgggcgcactgcgccccgaattcctgcgcccgccgcgcgcggcgctccgtggag

SEQ ID NO: 473294 - DNA, 122 bp, Homo sapiens
atccgcacagcccgggccacgcagctccgaggcccacatctccacttcccctaagaggaccgatgggggaagggacagctgaccgggtcttcctcgcagcagcctcacccctagtcttccgc

SEQ ID NO: 473295 - DNA, 122 bp, Homo sapiens
ttaagattgacgtcgtgttctgtcccccactcgcagcccgcgtcccttacatccgcccaccggcgcctggccccaggccttgacactcatccagttggtgttcagtgttcgatgagtggata

SEQ ID NO: 473296 - DNA, 122 bp, Homo sapiens
cctctatctccatgaaaggctgggcggagatggatttccacccagacaaacagtattgggcgctacgcaagaagattggtgggcctagccggaaacagagtggagaatgatggagagggact

SEQ ID NO: 473297 - DNA, 122 bp, Homo sapiens
agactgatgcgaaactccaaagagcgggaaaacgactttagagggaccggaaaggggaagcgagtctcccatggtttgaggtgttgctgcccgtacctgtgcacttggccacagtccaaagt

SEQ ID NO: 473298 - DNA, 122 bp, Homo sapiens
gcgggccggaatggaggaggcccagcggcggcggcgcttctcacgtcagcccaacccgcccggccgcggccaccgcctcagcaccgttgccccccacagctccgccgctggcctcagcgccg

SEQ ID NO: 473299 - DNA, 122 bp, Homo sapiens
acctgtgctgcgcggggtggcactagttttcacccagcgggcgaggaggcagcgaagtcgcgggcccagcgtagcgcgcgcctccgaagggcttggtgcgggcgcgggcgcgggcgcgcggc

SEQ ID NO: 473300 - DNA, 122 bp, Homo sapiens
atctaagtgggtaagctatctttcgataaatgtttttggccaccaaccatgtccaggcatcgccaggctgcccgtcccgccccccacaacagcctcgcgaagccacctttccgtgcttcccc

SEQ ID NO: 473301 - DNA, 122 bp, Homo sapiens
aattatttggacaattacctaactcaattgaaggacaatagctaagaaagtccaagtaatcgttatgaagcatgttgtaagtcagcagaagaaaggcctatgaggtggagtaggatcttgtt

SEQ ID NO: 473302 - DNA, 122 bp, Homo sapiens
cttagactttagcttcccagatgactactttaaaggagtgagccagaaggccaaggagttcgtgtgcttcctcctgcaggaggaccccgccaagcgtccctcggctgcgctggccctccagg

SEQ ID NO: 473303 - DNA, 122 bp, Homo sapiens
agacaggtggccctgtcatgtgatgtgtgcccagggactactcagccctcacttttagaacggtttccggaagtgatgggagggattgggcagggcagctaaatatagtcctggggccatgg

SEQ ID NO: 473304 - DNA, 122 bp, Homo sapiens
tcctccataaaaggcctgggcccagctctggtggcgagggagtagggggtgtgtctgtggcgtctcatggcaggaggctcagccacgacctggggttaccctgtggccctgctactgctggt

SEQ ID NO: 473305 - DNA, 122 bp, Homo sapiens
ccaagccctgtgattggtcaggccatcaaagcctcgccccctacacgacccggaattcgacgccaacactggtttctggggcaacttctgcgtagctatgtgactagcacccggaaataatt

SEQ ID NO: 473306 - DNA, 122 bp, Homo sapiens
tctgaatacacacacccaaatgggtacaactactgaaatctggtggaggccacacggtggcgctgcaggctaaagagacggtttgggaattgctctgaggatgctatgcaagtcactaataa

SEQ ID NO: 473307 - DNA, 122 bp, Homo sapiens
gggccgctgggcccgagacgggtgggggcggggaggcccgcgcggtggccggggtggagccgccggcgaagtttccccaaggacgccgcgggctcccgcgtgtccggggggcggcccggcgg

SEQ ID NO: 473308 - DNA, 122 bp, Homo sapiens
ggaggtgaaacatttcggttggtgggaggccggcgcgctgtatctgagtgtgaggcctaccgggagggactggtggcgtcggtggtggcagtgaccacgcgacagccgacacttactttcct

SEQ ID NO: 473309 - DNA, 122 bp, Homo sapiens
ttaggtcacccattcgttttccagcagccgctgggttacttcccaccagctttgcaaagacgcctgcgatttcctttggtctacagttctgtcctagacttcgttcggctgatcgatgaagg

SEQ ID NO: 473310 - DNA, 122 bp, Homo sapiens
tctccggctgggcatgcgagggcccggggactgcctggcccgggccgtcgaggctcactccggagcttccaccaccgacagctctctgaggccaagggacagctttcgcggctcccgctcgc

SEQ ID NO: 473311 - DNA, 122 bp, Homo sapiens
gactttattcctaacagtttagttgtaatgttcttgactgaggtccttgatacagaaatgcgactgtgacagattcacttaagtgaataacaagcagatataatgagtcaaaatgaatattt

SEQ ID NO: 473312 - DNA, 122 bp, Homo sapiens
cagagtgggctttactttcatgctcctccttcacacagagcgaagagtgggctcctttaacgagcacctgccagccctgctaatcttttaagcatgttccattaaaaataaatccgtttgca

SEQ ID NO: 473313 - DNA, 122 bp, Homo sapiens
aagcctcccctgtaataccctcaaacagcactgtggaaaggctttgggtgaaaagacctgcgcttgaatcctggctccaccaacagagagttgcacacatttggacaaatatcttaagctct

SEQ ID NO: 473314 - DNA, 122 bp, Homo sapiens
catagatcatgggcagtgcttggcagccaccactgtccacacagagagggtagtcagtagcgttaggtggttctgcttgctggggtctcaccccaggcacagaaagcaggagccctgggtgg

SEQ ID NO: 473315 - DNA, 122 bp, Homo sapiens
gtggtattctcccgagacgcgttctgtccgggagcaataataaataccaagctgtgaaaccggcctttgtgagatatttgaattgcttatgactttagagcctggctctgaaagaacagaac

SEQ ID NO: 473316 - DNA, 122 bp, Homo sapiens
gcctggggtgggtcccggccttgctaaagttgaagcgctctgctccttgtaaagtgggatcgagtgagtacatattatgcgctctgggcaccgctggggctcgtgttccctggtggctctgg

SEQ ID NO: 473317 - DNA, 122 bp, Homo sapiens
ggaggcacagttgtcatagacgatggccgagtcactctcgtcactgtagtctccgaagcacggccgcaggctcaccggctccagctgcgcgtgctcatctaccagcagcgtgggctgttggt

SEQ ID NO: 473318 - DNA, 122 bp, Homo sapiens
cagccctgatcctcctgggctttttcccaaggggcaaaaagccacattctatagactgcacgaccttgggttacttggtgggcatctgagtatgtctccttcctcagagcgctcaaagttca

SEQ ID NO: 473319 - DNA, 122 bp, Homo sapiens
gcgggtggtggcggagctgcgagcttgagcggcgcgaggagatgctagagggcgcagcgccgccagcaccatgcgccccccgcccgcgctggccctggccgggctctgcctgctggcgctgc

SEQ ID NO: 473320 - DNA, 122 bp, Homo sapiens
gcagtcagggccagcctgaactgtggggcagagacagactcggccacagcacacagctgccggcaacacccaggccagaacacaggcatgaggaccccacagccccttggaaccctactgtc

SEQ ID NO: 473321 - DNA, 122 bp, Homo sapiens
gtaggccatgaggaactcgtgctttctcggcttatttcctcctcgtctggcctctaatcccgcctctgccaccgccgaggtgctgtgaccttcgtctcgccaactctctagccccagcttca

SEQ ID NO: 473322 - DNA, 122 bp, Homo sapiens
tcgatttcacttaagcgagccgtccggaggagctagttcacggagagcggacggggctgccggggcttggggaggggatgtggagtgagggtttcacggggacagtttcagcttgggaaggc

SEQ ID NO: 473323 - DNA, 122 bp, Homo sapiens
ttgagcgtgcagcattgcgcccggtcccgaggcaccagctccctcagcttcccgagctaacgggtcctgcgagtggagacgtcacaaagccctgcatagggctgcgttcagaaaggccctgg

SEQ ID NO: 473324 - DNA, 122 bp, Homo sapiens
aagaccagggacggggccacacaggccgtggctgcggagacgcttccccgggccaccccgcgaccaggagggagtcgagccgcccgctctccccgcgtcccccgccccatcccagccagttg

SEQ ID NO: 473325 - DNA, 122 bp, Homo sapiens
gcgattgctccatgtcacagtgagtgtggagttccctgcacatactggtgaccttgtgtccggaaggaattagaaggaagagctcatggagtgccagaagaagacagtgcctactctggcaa

SEQ ID NO: 473326 - DNA, 122 bp, Homo sapiens
tggtgctgaaactcagagcaacagttcagaggtggcgtaaatctggccacctggagagctcgagtgccaccagtacctccgcaccccgggcctctggacttcttggatgagctcaccctgaa

SEQ ID NO: 473327 - DNA, 122 bp, Homo sapiens
gcaagggcgcctgaccgggcctgggcacctcctcccactgcgggcaaagggcaggcagttcgtgcgcggacacaagcactggcggaccgtggccatggcgggcgctgagtggaagtcgctgg

SEQ ID NO: 473328 - DNA, 122 bp, Homo sapiens
cactcttctggcgcggttggcgcggcagaatccaggatgcacacgaggacgcccacggggcgtgtggggaccgtgcccctccgcagacctctcccggatcacctgctccacacgcaggcctt

SEQ ID NO: 473329 - DNA, 122 bp, Homo sapiens
tacatacacttaggtgtgtttatgcatatgtacatttattatgttgtatgtgtgtttacacggtaaaatctggtgtagttggccaggaatcccttaaggaattctattcagataggttcaaa

SEQ ID NO: 473330 - DNA, 122 bp, Homo sapiens
aacgacagaagtttctccaggtcttgctggggaagccattgtgcatctccgagtcagtggcggaggaaatgtgtgagttcatgcagttattctgaggctctgcatttacccccatagtcgat

SEQ ID NO: 473331 - DNA, 122 bp, Homo sapiens
tgggaaggccagagcgggcgtccccgccagtgaccccacgccgcccgtccgcgcccaacccggcctccgccgagtgtccaaaccaaaagcgaaaggaacccgaccccgcgtcccctccggcg

SEQ ID NO: 473332 - DNA, 122 bp, Homo sapiens
tggagctctgggacttcgtagaggtggtggcagtcacagccaggtaaccctggagtgaagcggtttagttagaagggagcagataaactcgtcactctagtagctttaaccctcaccctgag

SEQ ID NO: 473333 - DNA, 122 bp, Homo sapiens
gaggggagtcggtttgaaaggcaaagtgagctctcggtagctgaagctgcataactacaccgtcacccctccatccacctgctcccagtgcagcaacccttcctgaggtcgcttcagatgtt

SEQ ID NO: 473334 - DNA, 122 bp, Homo sapiens
gaactgcaccaacacctcatacgactcctacatgttctcctcatcactgaagaactgatacggaagctactaaggccaaaggacaaaagctaggccattttggaccagggctcagggctctg

SEQ ID NO: 473335 - DNA, 122 bp, Homo sapiens
ctcgagaggcatagccagctgcctcctttccgtccatccccaaccgcgttctctaagccacgttctgtgcgccttactcccagcactcagccattccccagccccagaggccttggagtagt

SEQ ID NO: 473336 - DNA, 122 bp, Homo sapiens
ctgctccttccctgcccgcctctcccagtgatgagcggcccagtcgtgctcctttactcccgtgctcccacacttaggaaatgatagtgtgtgtttggtccacggggcgggcgtccccgggg

SEQ ID NO: 473337 - DNA, 122 bp, Homo sapiens
gcgagtcctcttggatcgaattaatgcattggctcttcccttcgcaacagctttgatgaccgtttcccgcctttgtgcaaagcgttagaacaaaccctaccttcctccaaacgaaggagaaa

SEQ ID NO: 473338 - DNA, 122 bp, Homo sapiens
caggaattctgtggttaggcttctagggttcaagtctcagctctgcagtctctagctatacggccttctgtggtgcagtagttaagcagggcttacagaatgtcaagatgtaaggtaatctc

SEQ ID NO: 473339 - DNA, 122 bp, Homo sapiens
ttctctacacagctcatactcaccccatatcctactagggccacatggggagttcgcggacgtgatcctggagacccagcacagattcctgaccagaaggagagggtggcaggtccccagac

SEQ ID NO: 473340 - DNA, 122 bp, Homo sapiens
gatagctagtcactcaggctgcagagagagacacctggtcacccaggctgcagaaacaaccgcagtcaactgcagctccagtcattgctggatgttggctgacgcggtcctggcgccagctg

SEQ ID NO: 473341 - DNA, 122 bp, Homo sapiens
gcctctacctctaactcatcatgtgacctttgcaaattgcaaaagctccgactatccgagcgaggcctcgcaaaacatccactgcaatgctctcgattttgcagatggggaaaccgaggccc

SEQ ID NO: 473342 - DNA, 122 bp, Homo sapiens
gacaggcaaaaagaagggaaggagcaagtctgaaagatgcgcacacacagaaagacaaggcgagagagacttgggagacccagaggccaatagacaaaggcacagaggcacgtgtgtacaca

SEQ ID NO: 473343 - DNA, 122 bp, Homo sapiens
tggccgagacgcaggcggcgctgaggctcagggagcgcgagcagctcgcggagctggaggcggcgcgagcgcggctgcagcagctgcgggacgcctggccggacgaggtgctcgcacagggc

SEQ ID NO: 473344 - DNA, 122 bp, Homo sapiens
ccatgggagcggaaaggaggctgctgtcgattaaggaggcctttcggctggcgcagcagccgcaccagaaccaggcgaagctggtggtggcgctgagccgcacctaccgcacggtaagcgct

SEQ ID NO: 473345 - DNA, 122 bp, Homo sapiens
gacccgtgctcccgccgtctgcccagagcaggacctcaacctcctggagggcacagggagcggctgagtgggcacaaatcctggcaggagaaaggcccaggctgaggccaggcctgggaaac

SEQ ID NO: 473346 - DNA, 122 bp, Homo sapiens
acatgaagatgtctagttattgggtgttttcccccgctctctggtcctggctgaggcaagcggatcacttgaagtcaggaatttgagggtaaaaccctgtcactactcaaaatataaaaatt

SEQ ID NO: 473347 - DNA, 122 bp, Homo sapiens
gagtggggccaccgggggattgtttgtggggctctggcagagcggagctcttcggattcgcgacctacctctagtgcggcccctttccccgggctcccaacgttcttctttatgtccggtct

SEQ ID NO: 473348 - DNA, 122 bp, Homo sapiens
tccctccaaggtacctaacccagacctgggcccagacctgcgtctaaccaaggcccagcacgtcagcacctgagcacctaacgtgtgcagacacgtggcctgcaccccgccgaccagcaccc

SEQ ID NO: 473349 - DNA, 122 bp, Homo sapiens
ggacatcatgggcaatccaagcactggagtccgagtccgcgcactcgttacctgaacaggcgttacaggccctttggcgcctgcgtattcgtgaagtgtgaaaaaagcgcgcctctgttggg

SEQ ID NO: 473350 - DNA, 122 bp, Homo sapiens
tcactgcccggggcccgtggggccggccggccgctccgagtgcggggtccgccgagcccacgcccacccggaactcgcaagcaccgcgcagccccggttcccgtccacgcctctccctccac

SEQ ID NO: 473351 - DNA, 122 bp, Homo sapiens
gtggtgagcacctgtaatcccagctacttgggaggctgaggcaggagaattgcttgaacccgggaggtggaggttgcagtaactgagttcacaagttcttgccactacactacactctagcc

SEQ ID NO: 473352 - DNA, 122 bp, Homo sapiens
gcttgtttctcctgtctgttggggtcagctgcgtccagcctcggctcctgcaggattgcccgggcaacccagaggagatgggcgggcgtggaggtcctccctggatgacccttcccaccatt

SEQ ID NO: 473353 - DNA, 122 bp, Homo sapiens
acggcaggacgccgaggtgcccacgaggaaggacgaggaaacacacctgccccacgccagcgtcacccacggacatgaccgatggcagaacgctgaggtacccacgatgaaggacgaggacg

SEQ ID NO: 473354 - DNA, 122 bp, Homo sapiens
cctgttgagaaacagtgcaaggtgttctgttctcatggtggatttggggtataggggcggcggggcgtgattttggcagctacttccttcaccagcagcacccatcacttcttgtaggtgct

SEQ ID NO: 473355 - DNA, 122 bp, Homo sapiens
ctcggctgctccagagggaggtccgagatgcgattagtcagggcgacggcccccagtgtccggctcggaagccgaagaatcgaaacatggctcaagaagctacttgtcactgatgacacatc

SEQ ID NO: 473356 - DNA, 122 bp, Homo sapiens
ctctctcgcgacgcctttcacaacatgtattataactctttccaccaatttcaaatagtgcggcttaaaagatgaaggagagctaaacaaaccagaaagaaaagaaagaaaaaatccggtaa

SEQ ID NO: 473357 - DNA, 122 bp, Homo sapiens
gggtgaccctgacatgccatcgactttccatctagcctttgataagtcagtgatgttttccgtgtcccagattttgcacctagaataatagtgactcccctgttcactggaatgggaaagtt

SEQ ID NO: 473358 - DNA, 122 bp, Homo sapiens
ctagaggcctctacagaggctagagacgcctcgccccaccagatgcattaggatgaaacgcgccgaaccgaaggtttagagcgccaggggagaagaggggcggggagagcaggctctttgac

SEQ ID NO: 473359 - DNA, 122 bp, Homo sapiens
cccgggagctgcggagaggtagctgctccgggttttgcctggagccggatggggccaggacgcaggcgaggacggtgaagaccgcggacagccgaggcctgagcaggcggactggagggaca

SEQ ID NO: 473360 - DNA, 122 bp, Homo sapiens
ttgggtttttcgcttggccagagattcggaactacttgcaatttctactcaaagtgcttccgcgtcagcatgctcattctcaaggctgaaataaaccaaggcgtgcttgaaagtgggaaaag

SEQ ID NO: 473361 - DNA, 122 bp, Homo sapiens
cagataaagctcagggtagccagaggcattggaggggagataggaatctgggtggctgcacgatctgtgtgcacaatgacatccacccccgtccccggtgcactggcagatcttccagctgc

SEQ ID NO: 473362 - DNA, 122 bp, Homo sapiens
cgccaccttcctgtcaggtgtctggtaaacaggttaactgatcgctgattaggggcctcccgcctacgtgcaatgagtggcggaaaggagcttttccttgtcaatacgaaaatctttgagta

SEQ ID NO: 473363 - DNA, 122 bp, Homo sapiens
cacactgtatcaagggttctactgatctctctccacattggagcagcgtggcaggatatacgctccaaaactttctgcctagatgatggacagacttcaaaaagaagaatgatatgtatttt

SEQ ID NO: 473364 - DNA, 122 bp, Homo sapiens
actaaagcctaaaaggccagtggtgttccaggagtggacaaaatcttattgtattacagtcgcaggagaatttagctaatgtttattaagcatcactttatgccacgggctgtagtttgcac

SEQ ID NO: 473365 - DNA, 122 bp, Homo sapiens
taagggggcctgcgtccctgcacactgcgaggactgccttggccacaggcccactccctacgacacgtgactcgttttagagctctgtcccagaggcgttcgtatgtgacccacagatggcg

SEQ ID NO: 473366 - DNA, 122 bp, Homo sapiens
gagcagagacgggttctgacggttctgctggtgagttctgttctggaaatgctgctgccacgtggagatgttttgcaggggatggaaagggagttgtgagtgtgaggccatgggtgtgggca

SEQ ID NO: 473367 - DNA, 122 bp, Homo sapiens
ttttggcacaaggctttgtgcttcccttataatttgagatctgcgtgaagcctgagggttcggggatcattatctgagaaaaaccgggcagttcggtgtagacaatttttatatttttggct

SEQ ID NO: 473368 - DNA, 122 bp, Homo sapiens
ccgttggggccggcagacctgcggtcctgcctctccaagcagggcagggagtgggaatgccggacaaaatccgagtgtgaatttctgcgtccggacacagcaatgagtgttcagatgtggag

SEQ ID NO: 473369 - DNA, 122 bp, Homo sapiens
gcctccggactgtcacatgatcgaatctccgccactcccggagaagaggcggtgagtcggcgcctctacgggccgcaacgtaggacaaaccactccaggacgcatttgcactggaggaaggc

SEQ ID NO: 473370 - DNA, 122 bp, Homo sapiens
ctttcgcgccgctcagaagaacattgaccgggagaccagccacgtcaccatggtggtggccgagctggagaagacgttgagcggctgccccgccgtggactccgtggtcagcctgctggacg

SEQ ID NO: 473371 - DNA, 122 bp, Homo sapiens
agcctccccatcagccattttggcgtgagcagttacagctgcacactttgcaacttgtcccgccttgagtctgatgtcagaagagcatgtcagtccacttccacttcagagagggttggtgg

SEQ ID NO: 473372 - DNA, 122 bp, Homo sapiens
ttctttttccaatctgtccgtgactgatacttactaaattaacattaaaattaaattattcgaggctgggcgcaatggctcacgcctgtaatcccagcactttgggaagccgaggagggcgg

SEQ ID NO: 473373 - DNA, 122 bp, Homo sapiens
tcccacctacctctcagcgctattgagaggatcaggggaggagagaggccgagagtgggccggatgatggtgctcacagcacatgcacacataccacatagatgcaaagaagaaagggactc

SEQ ID NO: 473374 - DNA, 122 bp, Homo sapiens
tctttggtgtttcttggcttataggagcatcatcctgatctctgcctcatctttgtatagcgttttccctgtttgcatgtttgttaccaaatttcccctttaataaggacctcagttgtatg

SEQ ID NO: 473375 - DNA, 122 bp, Homo sapiens
cggtagggcactgcgaagcaatgctgatgctccggatggtgtcagactcggacacggattcgtccaacttgatgagcatgaggtcgttagcgagcaagggtctgttgtactctgggtgccgt

SEQ ID NO: 473376 - DNA, 122 bp, Homo sapiens
tacaggtaaataaaggtaaattactttaaagctcagaccgtcaggtatcccaaggagagacggcatgcgtgtgagtgtcatgtgtgtgagtatcatgcatgtgagtggttccatccttagga

SEQ ID NO: 473377 - DNA, 122 bp, Homo sapiens
gggaagtccctgttccctttcagcatccagggctggcaggctcagaacccctggtgctagcggtaggaatgaaaacaagaagacatgatatttaggtacttacaggggctgccaaggccctc

SEQ ID NO: 473378 - DNA, 122 bp, Homo sapiens
gccacgatgtgacgtgtgttcacatgttgtcacgattcctcggtataagaagcatgggtacgactgggccttcccgggctcacactcttttccatgttgaacccacaagatgggcagctcct

SEQ ID NO: 473379 - DNA, 122 bp, Homo sapiens
gattattatgattttggtggtaacgatcccccacacacaaccactatgaagaaataatgccgcatttttcccccattgtaccaaaaagataaaaaaatggtaaacactgatcaaggtatttt

SEQ ID NO: 473380 - DNA, 122 bp, Homo sapiens
catagcggtgaagcacctgagccaggaggaagcccaggtcgtggaccaggagctattcaacgagtactagttcagcgtggcccgacttgtggagctggccgggctgagctgcgccgcagcca

SEQ ID NO: 473381 - DNA, 122 bp, Homo sapiens
ggatcccagaagctcccgacccgctgtggtaggcaccgccacctcgcaggcagacgatcccggcccgctctgcggcacaaaaaacttgaccttaaaaagcccagaaactggtctctgggaag

SEQ ID NO: 473382 - DNA, 122 bp, Homo sapiens
aggaccctcggggtatgtcattgagaactctgtgaatgagctcaggtttctgcatcctaccgtaatacaggccaccgttttataataataaccccgaggacagttgctctttccagaagtga

SEQ ID NO: 473383 - DNA, 122 bp, Homo sapiens
atttattagtttacttgttaattatctctctcttcctactaagatattagctccatagaacggggagatgatttattaatatgtgaccagtgcctagatagtttaaatattcaatatacatt

SEQ ID NO: 473384 - DNA, 122 bp, Homo sapiens
cactaattgtataatcaccactcaaaagtcaacagactaagtccaatttgtttttaaacacgggcaactcttgagcctttgcatttggaaatgtctttctgcccatttgttggatttagaat

SEQ ID NO: 473385 - DNA, 122 bp, Homo sapiens
cgtgcgcccctcctttgtcccatttgttacttcatttgttatctgtgctagttgagggtccgccacactgtcagtccctcaaatgggagatgccagtcctgggcccaggcgggatgccgagg

SEQ ID NO: 473386 - DNA, 122 bp, Homo sapiens
ctcgtggtgcgccgttttttaagcttgtcggaaaagcgcagtattcgggtgggagtgacccgattttccaggtgcggtcctcacccctttctttgactaggaaagggaactcgctgacccct

SEQ ID NO: 473387 - DNA, 122 bp, Homo sapiens
ctgcttcggtatcatttccccaggcattagcagttttattggcacccaccattgtgaaaacgctgcacatatcaacatctcagcacagccctccatctgcctgcagatgacttccccggtag

SEQ ID NO: 473388 - DNA, 122 bp, Homo sapiens
ggtcgggcgacgggtcgagcttccacccgagcccggggattcgcggcctaccctcaccggcgccctcttgccgggcccggcaccggcagctcctccgactctgccctttggctagcagcggg

SEQ ID NO: 473389 - DNA, 122 bp, Homo sapiens
cctggcccaatgggcgccagcgaggaagcgttaaagagtcaaggcagtttgtgggagtcgcgctggggacgttcaaggtgtctcctagccggtaaagtccctgggactgaccgggctggttg

SEQ ID NO: 473390 - DNA, 122 bp, Homo sapiens
gaaagggaaactgggtgggtcattgggttatgggactaactgtttgctccctcttcttcccgccccttcttgcctggctgcccatcccgctgccctccttccctctgcgcctggccccgcca

SEQ ID NO: 473391 - DNA, 122 bp, Homo sapiens
tctacaaagtaaacagtcgctggccttgaaggacagatttcttgtaagtagaagagttctcgactgagaatcaaacgttctagtggaaggtcaagcttggtcacagactatatatcttttcc

SEQ ID NO: 473392 - DNA, 122 bp, Homo sapiens
tcaatctctagcctaaccaacaggctagttttcaactgtctactcaccttctcacgtggtcgtctatcaagcttctcatacttaacgtagactacctcttctaaacctgctccccctactcc

SEQ ID NO: 473393 - DNA, 122 bp, Homo sapiens
tgtcagtgccaccgcaggttgagttggaagtgtggccatagctgacccctgatatggtgacgtggatgtttggggtgagagccctactgtagtaggctcaggggaaggaggaaatggagaaa

SEQ ID NO: 473394 - DNA, 122 bp, Homo sapiens
gtctttgctggcattcctgtagtccaggataaaatgggaatgtcaaagaaatttcaggtgcggttttataggagggtacattaaagaaaaagcagagctgaaagtcaaggaaataattccaa

SEQ ID NO: 473395 - DNA, 122 bp, Homo sapiens
gagtgtctgcccttccttctgtctttaaatagggaaagagcaggttgggaatggtcctaacggttaggaagtgttcagctgcagacagacacctcaccatgagtgccttcagccatggggtt

SEQ ID NO: 473396 - DNA, 122 bp, Homo sapiens
ctgacctctcaggtagaccctgcttttcagcattcactgcctttgccccgctgctgcggccgggctgccctcagcttcccacgtggcccacagtccactcagttcctgcgttccacaccgac

SEQ ID NO: 473397 - DNA, 122 bp, Homo sapiens
tttgtgttttctattatcttgctgcccagaattcccacaggccacctggcttgtctttgtcggaggcagaggtagattaaaggcagtttcttgtcctcctcagaccttggagtcagttccat

SEQ ID NO: 473398 - DNA, 122 bp, Homo sapiens
agacctgtgcttgatcaggatcaggattttgacctgtggaagcctcaggagcctccagaacgggccctccccgtgtgccccgtgcccaggccttaccggaggctgcgacggtcggggtcgta

SEQ ID NO: 473399 - DNA, 122 bp, Homo sapiens
gcgcgcgcgcgcgcgaacagggagagagggagagggggagagagaagaggacagggagagcgcagagaggaaaactgcagaaaaccacagggaaagtacggtaccgcctcagatcttttcat

SEQ ID NO: 473400 - DNA, 122 bp, Homo sapiens
ggaggtgcccactggagggaggaggcggtgaggagcgcgggatggagctgacgccgggagcggccatgccaccatgtgtgggaccgtgtgtgacagtgtgtgagaatgtgtgagacattaag

SEQ ID NO: 473401 - DNA, 122 bp, Homo sapiens
atgactgagacatgatctcagaatcaaacccctggaggcagtagctatagcaggagctgacgatctccagaaactcaggaccagacgatctccagacactcaggacaagtcagtgtccccac

SEQ ID NO: 473402 - DNA, 122 bp, Homo sapiens
ttgtggtctcgttgctccccctcggcagttctgggaggtgatcagtgatgaacatggcatcgaccccaccggcacctaccacggggacagcgacctgcagctggaccgcatctctgtgtact

SEQ ID NO: 473403 - DNA, 122 bp, Homo sapiens
ctgcgccatgtcaggggtataacttgcctgttcctccagcctacggagcctctcgaaaaacggtttcctgggccccactggggcggcttcctgcgatgaagccccatgtagatatataggca

SEQ ID NO: 473404 - DNA, 122 bp, Homo sapiens
atgtgttcaccatttggaaaatatcggtttactgagacgtgcagaaattccaaatgcagacgtctccgagagactgaatatacgaagggacgctgggtagaccacagaaaagccacaactct

SEQ ID NO: 473405 - DNA, 122 bp, Homo sapiens
ctctccaatcttcctgcatgtctccacatttcaaaatcaaaatgagccagtgatcccagtcgcttccaggtgcccctgaggccctggggcctcacctccaagcataaaggcttcagttagtt

SEQ ID NO: 473406 - DNA, 122 bp, Homo sapiens
tgggcccagcctcttctctcaggaatgcaggaccctaaggcttgggaactgaggtatcttcgcccccaggaatccagctccttcccctgccagaagcccagatcccagcccctgacctcccg

SEQ ID NO: 473407 - DNA, 122 bp, Homo sapiens
cacccacaggcagggaggggcccaggctgtgggcggcttcgggcggtccaggcaccgggtcggccaccacggctgtggggccctgcaggctctggccacacacgtggtgatgcttctcccag

SEQ ID NO: 473408 - DNA, 122 bp, Homo sapiens
ggaacagccaacgggttacggacagaggaaggggcggggttacagctcgacctctcggggcgcccagaattggacgaatcccttttgtcgctctcgacgacaggaccgacgctccgcctcct

SEQ ID NO: 473409 - DNA, 122 bp, Homo sapiens
ggagttacaggactcgctcgcagtttcggaggctgcagagtagcgtattccattccggggcgcgcgtggaagcccgacccaggcagcgagggcaccggtacccgccgggtctctcccgccca

SEQ ID NO: 473410 - DNA, 122 bp, Homo sapiens
acatgtcgaggacagaggcacaagtgaaagtccacccaaggaatgcagtcagcaaagccacggtgtggggagctctctccagagggtaggggagaaacccaaagagtaaaagagactttaaa

SEQ ID NO: 473411 - DNA, 122 bp, Homo sapiens
ccgggtcccctctctttccgcctgctctcggccccggaccccagactcaaaagcgcctcacgcgttccgccttaggctcaccgtccgatctcgccagacagcgtctggacgggaccgggaaa

SEQ ID NO: 473412 - DNA, 122 bp, Homo sapiens
aatctgtgaacctgcctgcgctcgcggttggccgtcttagaagcgtggataagcatagcccgtgtgatttttcgctgagccctggcttgggcagctcttgcaagttctgccttgtgcttttg

SEQ ID NO: 473413 - DNA, 122 bp, Homo sapiens
gggtgccacagagtgggagccagagagggacctgggtaagggctgaccgtgggtggggagcgcatggagtgctttcagaggccaagtgagtggaactgtctatgaagcagatggatggaacc

SEQ ID NO: 473414 - DNA, 122 bp, Homo sapiens
ttcaaagatttttggatttgcaattggttgaggaggctttgtctaaagatttgggatcagcggaaaggaatgttagctctggctagttggggggacctcttccagacccctcaggaaggaat

SEQ ID NO: 473415 - DNA, 122 bp, Homo sapiens
aacgcagggcctgcttgctgccctctttgctctgtggggcccagatggcagccccggaggcgctggtgggaggctgtgtcctggggtccaccactgctccccggtaagccaagcccgactgc

SEQ ID NO: 473416 - DNA, 122 bp, Homo sapiens
ctcgggagggaggctgcggtcgagcaggataatcttaccaggaggaagcaactgtaaaggcgagatagtagccttcagcctatgcagtgttgcagtaaattggcctgttcagtttgtacaag

SEQ ID NO: 473417 - DNA, 122 bp, Homo sapiens
gggcaaccaggggtgcgtggccagatgggctgcggggtcggcagaccagcgacctgagcccgccagcgccgggccccccgtcaccatgaggttggggttcaggccgttaggagcacagctgg

SEQ ID NO: 473418 - DNA, 122 bp, Homo sapiens
gcctcaagtgatccgtgcgccctggcctcccaatgtgctgggattacaggcgcgagccaccgtgcccgacctccattcatctgttgatgggcacataggttgcttcaaatcttggctattgt

SEQ ID NO: 473419 - DNA, 122 bp, Homo sapiens
acattttgcctctcggcttcttaggatctcctttgcccatgtttagttatttttcttcagcgaggcacagagtcgcccagtgcccgtacggctctcacttgccccggcgctgtctctatgga

SEQ ID NO: 473420 - DNA, 122 bp, Homo sapiens
caccccaccctccactgacccccacacacatacatttgtgaggcaggaagtggggttgtgcgtccccaggtttaagccctggaaggaaagggaaagacggggcagagactccaagaaccggg

SEQ ID NO: 473421 - DNA, 122 bp, Homo sapiens
tggcctgggtgagaaaatgatccataaatgtgttttagttggctcacatagtattcttttcgtttattttttaaatatttgagccaagatataaaaactgggagttttactttaaaatccat

SEQ ID NO: 473422 - DNA, 122 bp, Homo sapiens
cgagccgcggccacagggccagccgcacagtcggaggaagggccggagcgaggcggggcccggggctgtcaaggagaaaaacatcccaaggcctgcaaattgctgctctcagcttttttccc

SEQ ID NO: 473423 - DNA, 122 bp, Homo sapiens
ggtcaaggcaggaggattccccgagcctggggaagtcgaggctgcagtgagccgcagtcacgtgccacggcactccagcctgggcgatggaatgagacactgtctcaaaaaaataaaaaaag

SEQ ID NO: 473424 - DNA, 122 bp, Homo sapiens
acatcaattcattgtctcttctcattcgggcgtgacttttctggttattggtattacgggcgataatacccgtaataccattttcattgaatcatggacattttgactttatgctaggagac

SEQ ID NO: 473425 - DNA, 122 bp, Homo sapiens
ctccaggctggccaggccccagctacctgctccccagtgctgcagcccgaggtggccagacgccccacctggtcagtgcagtccagcgacctctgctcacaagcaagaagtggaggatgagg

SEQ ID NO: 473426 - DNA, 122 bp, Homo sapiens
aggcgaggtggggcttttgggaaaattacataatccccgcccctgggccggaactgccctcgcctatcccaatcctcctacctaggattccgtcaagttgacgtcacacggaaccggtgctc

SEQ ID NO: 473427 - DNA, 122 bp, Homo sapiens
agtaacgttcctgagactgacgtaacgctaaagctccgctacttatagtcaacagaggcacgaaaactaagctgtgctattggctaacattacagtttcgctttaaccaatgggattgcggt

SEQ ID NO: 473428 - DNA, 122 bp, Homo sapiens
cacgcatcctgcctactgacctgggtcatcttgaccttgtgccaggtctccataacccctcggacaaacgccgccctgggctttgctcagatgctccccagagaccagcacctcttcaccaa

SEQ ID NO: 473429 - DNA, 122 bp, Homo sapiens
ttctctgcaaagcagctgcttgctcccagcctccccagagcttgcaacagccatttgtttcgatttaagacagatgcggtcattattttgtgcagaacttcacagaaatatttcctactaaa

SEQ ID NO: 473430 - DNA, 122 bp, Homo sapiens
acttcatttatgaatcctttcttcagctacgcccataaaaggagagggagattcccctgccgttgaaggtagggtgagcaagcacttcttggcagtggtctcacccagcacttcataagctg

SEQ ID NO: 473431 - DNA, 122 bp, Homo sapiens
tcgcattgtctccccaacgcgagtgcaggcgccccgaaggcaggggttgtctgtctagtccgctgccccttctcctgctcccgagaccgaggcagacgctcagtaaagagtcctggtgcctg

SEQ ID NO: 473432 - DNA, 122 bp, Homo sapiens
atgagctctttcgttcgtgagcagaggccctgacgagactgaagaccaactatttccgagcgctccactcaaccattataagttcaccccagccgtcagcgatggcgtaggtaggtagtcgt

SEQ ID NO: 473433 - DNA, 122 bp, Homo sapiens
tagagaaaaaaaattaaacaaaaataaataaaaattaaaaaaaaagaggacaaaaactcccgtgacttcctaagttacaaatacaataagtctactttgtggccaactgtggtgcctcctgc

SEQ ID NO: 473434 - DNA, 122 bp, Homo sapiens
accccggcgggcaggggggatttgggggaccgactctcgtggacacgtggcagtggagaacgcagttgggagggaggtgaaggctgcccagggtctgggtgtcgtcgcctagcagctgccct

SEQ ID NO: 473435 - DNA, 122 bp, Homo sapiens
atccgccagggattgtggcgatggaggccgaggctctttgtatgttttagctgctggtgtcgttttgacaacctgacttgacgggttttgagtgtatcttggcaagtgaggtgacatgaaag

SEQ ID NO: 473436 - DNA, 122 bp, Homo sapiens
ggttgagtggctctgtactctagatcggctctgtcacttactaatgggccgtgttgccttcgcgactgcaggttttcttgcccttggtttatcttttgcccgtgttcctttaaggatttaat

SEQ ID NO: 473437 - DNA, 122 bp, Homo sapiens
aactgccccagctgcctgccgtccttgctgtggctgacggggtcgtcccggctgcagctccggccctggctccttgaggcctcgcacccttcctggcacccactggctgggctctcggggcc

SEQ ID NO: 473438 - DNA, 122 bp, Homo sapiens
cgctttttgtccagagaccggtgacgagcgaccctgggctcgggttttgattgggcagttcggaaactgtaaaagcgaattaaaagggtgacaagctagtgttttagcctatccagttccgg

SEQ ID NO: 473439 - DNA, 122 bp, Homo sapiens
aggcctgaatgagccctgcatatatatacacacacactggtgcctacgtattcacagccacgcacacactctcacatactcaggctcacacacacccatttatacaccggcaatcacacaca

SEQ ID NO: 473440 - DNA, 122 bp, Homo sapiens
gcggctgctgccaggtgcatggccaggtgcacctgtgggattgccgccaggtgtgcaggccgctccaagcccagcctgccccgctgccgccaccatgacggtgagcctctccacatgccgct

SEQ ID NO: 473441 - DNA, 122 bp, Homo sapiens
ccaggagccacagtcggcatggttgtggcatgggtccagggctgagcaggctgggcctctcggctccgggccttctgctctcaccctcggaggggcaggctcagtcccaccaagtggccacc

SEQ ID NO: 473442 - DNA, 122 bp, Homo sapiens
actcttcaggtgaataactgagcctttcacttggctttgctgcaacccttcagctctgtgcgtggtaaggaatgcctgggttgcaaatctcactagaccctggggactctgttccgttccaa

SEQ ID NO: 473443 - DNA, 122 bp, Homo sapiens
ctccagctgtgactcaggcaggcggagttggccttctggggcggcgggagggcgcgagggcgtggggatgttggcagcggggtctcttgaaagcgtttcgccttccgctgtcccgcgccggg

SEQ ID NO: 473444 - DNA, 122 bp, Homo sapiens
gccgcccctcctctgactccctccagagcagggccgagttttcctggggagcctgggtcccggcggccgggcggccgctgggaggtggaggagcctctccagccccggccgcagctcatcgt

SEQ ID NO: 473445 - DNA, 122 bp, Homo sapiens
attaggtcgagcacgatgaagactctattctgttgcgttggcatcaggctcgttcagaaccgactgcttcaagcaagtcattctcccaaagaggcggaggcagggtggaaagaaaacgtgag

SEQ ID NO: 473446 - DNA, 122 bp, Homo sapiens
cagcactgaacttcctggcattagcagtgggcggaggaggtactcggttggacagtggagcgtcatctcgtccttgaaaccccaaggttaggtagagagcggagctggaaggcagagagcga

SEQ ID NO: 473447 - DNA, 122 bp, Homo sapiens
cagataggagcaagacacttgagcctgtagagttacagagcttatgggatgcctctggctcgcctgcagccacctcaggtgactagctttaggaaaagaccagacaatgccttgggtctaaa

SEQ ID NO: 473448 - DNA, 122 bp, Homo sapiens
gggcgtgtgtgtgtggatctgcctcacaatggcctgtctgagcccttatctgaggtcacacgttatcatttgtttggccaataagactgtagcacacacaccagcttcagtccccacttggc

SEQ ID NO: 473449 - DNA, 122 bp, Homo sapiens
gaagataaacaaaaaagagggaaaagaggagttggagacactggagggatggcagaattccgggaaactcagagaggggcccagttcaagaggaggtcagtaatcagcgccagagagtgcag

SEQ ID NO: 473450 - DNA, 122 bp, Homo sapiens
cctactgtgtgccagatgctgttctagggcttgagaatgagcagtgagcaaaacaaaatccgtccctcctgggcttatattctacgagaatagacagtcaatacacaaataaaccagtgact

SEQ ID NO: 473451 - DNA, 122 bp, Homo sapiens
tattacttaagaacaaaagcaatattaaatgcatatatcaaatatgtattttaagtgacccgtaagacttttttatttgagttcttaaaatattatattctcttgtggatgttactttcaag

SEQ ID NO: 473452 - DNA, 122 bp, Homo sapiens
ctccccacagcacagggagccctgtgagccagaagcccttggcctgtgaggccagacctccgtgaaggctgacaggcccacactaccccattcacaaggggaatcttctggttatgtgaggt

SEQ ID NO: 473453 - DNA, 122 bp, Homo sapiens
cataggtggggcacggtggctcatgcctgtaatcccaacaatttgggaggccaaggtgggcggatcagttgatcccagaagttcaagactagctagggcaacatggcgaaatcttgtctgta

SEQ ID NO: 473454 - DNA, 122 bp, Homo sapiens
ggatttttccatggaccagggccgggtggcagacggtttcaggatgattcaagcacattacgtgtattgcgcactttacttctattattattacattgtaatatataataaaataattatac

SEQ ID NO: 473455 - DNA, 122 bp, Homo sapiens
tagcagaaaacacatgggatggaccaggttgttcttggaatttagctcttcggatttctgcgtttttttaaattgtatgagtctatgaaaggtttttcactaaatgggttttgcataaacat

SEQ ID NO: 473456 - DNA, 122 bp, Homo sapiens
tatttagcaactcattttcctattaagaagttatagatggaaaaacctctgctagatcaccgtgtccagagtcctttttctgtaaatgtcttatttttgaccattcatgttgtgttttgttg

SEQ ID NO: 473457 - DNA, 122 bp, Homo sapiens
ggcgtctgggaacatgcgcggcgaggggacgggcggggcgagtccgggaaggggcggggccgcagccgcgcccctgacttccaccgcctgcgggtgagaccgcctaccatcgcccggcgcgc

SEQ ID NO: 473458 - DNA, 122 bp, Homo sapiens
cctttgagtacagatgctgagtgtcagtaacgctggtctgaaatgaccgggctcattcagcgtttgtatcactaaaatgtagccctcaagaatggagcccggccaggcctatgccttccacc

SEQ ID NO: 473459 - DNA, 122 bp, Homo sapiens
actcaacagatgcatacgaggcccctgttgcaggctgggctctgccaggccgctgtagtacgccgaggtgagtcctctgtgaatcgggaatgcccgctcccagtgtctgcccagaaagctgc

SEQ ID NO: 473460 - DNA, 122 bp, Homo sapiens
gcattgttagggggctaggtggtgtctgcagaggccccacctgtggcagggtttacatgccgccacccctgccctcctcttgggtagctggggtcagaagggcctgaggcctcactctctct

SEQ ID NO: 473461 - DNA, 122 bp, Homo sapiens
aggctcctggaggaaaaactaggtatgtccagtagcagatctgtggaaactattagaaaccgagctaattgtggacttcttagcatgcctcaggaaatgggaaggaacttttcccttttggg

SEQ ID NO: 473462 - DNA, 122 bp, Homo sapiens
cacgctcccgtccgggctgcgcagccgcttctctcacacattttgcgataacatcgatggcgaaagaaaatgttgtaaatcctcctgcggccacgtggctgtccccccacccccttctccct

SEQ ID NO: 473463 - DNA, 122 bp, Homo sapiens
gttgagctttctagcccgaactttctaaatgtgatcctgatgacctttgccagtgaagtacggtggtgaatcagtgatgtgattgtggtacagaccatcggtctgggctgcacctgttgtga

SEQ ID NO: 473464 - DNA, 122 bp, Homo sapiens
aagcacacatttacttggagcttgtatacttggtgacagccttggtaccttcggacactgcgtgcttggccagctctccgggaagcagcagacgcacggcggtctggatctccctggaggta

SEQ ID NO: 473465 - DNA, 122 bp, Homo sapiens
ctggtgactggaaactgtttgtacaagggcctgcagtgagtgatgctaagctgagctgggcgtggagccctgacattttgtcagctccctcaggaggcagatgtgatgtccacgactcacct

SEQ ID NO: 473466 - DNA, 122 bp, Homo sapiens
tgctaatggtgcgatgagaatacagagtctggggcacattgggaagatttcacacataagcgagaatttggctgggattttgagaattagattttgtgaactggagaatagaataaaagaaa

SEQ ID NO: 473467 - DNA, 122 bp, Homo sapiens
agtggctccggcggggaaggggctggcgcgctggcagccagggtcttcctggggggcactcgggcagaggccagggccgggccagaccacacggactcttccctccccaccccagccagggc

SEQ ID NO: 473468 - DNA, 122 bp, Homo sapiens
gccgcgtggctcagaagcagcgcctcgtgggtcactttctgcaggctctgcctgggaaaccgagttcttggagcctggagatgtttctctaggctgacacacccctctcaggggcgccgtct

SEQ ID NO: 473469 - DNA, 122 bp, Homo sapiens
ctgaaataaattcagtgaaatcgagctttgtctttcaaactgctagtcatgacccattaacgtgacagatatcagtttaataggttgtcaactgactttttttttttttttttttgagggcc

SEQ ID NO: 473470 - DNA, 122 bp, Homo sapiens
cggggtcttctcacgggtttcattcagttggccactgctgagcagctgagaaggtggcgacgtaggggccatggggctgggccgggtcctgctgtttctggccgtcgccttcccttttgcac

SEQ ID NO: 473471 - DNA, 122 bp, Homo sapiens
ctctcctcagacatttgttgcaaagcgtgagcataatccgttctctccctaaaacctgttcgtgtgaaagcttctcagacttgcaaagaatgcgcttttgttcccggaaacagatttgcttc

SEQ ID NO: 473472 - DNA, 122 bp, Homo sapiens
ggtgctcgggtttgggaactcctgtgccacatcctgcccctggcggatttggtggtggcacgacaggcctgtggggtttccagcaccccgtcaccgccccaccaactctgctacacaaacca

SEQ ID NO: 473473 - DNA, 122 bp, Homo sapiens
cagccctgctacactgcaagaatcaagccgattcacaattcacatcaattccaggagtgacggccagatggcagcatctggctagtcagttggtgagtgagtccacctccagtcttgattaa

SEQ ID NO: 473474 - DNA, 122 bp, Homo sapiens
aaaaagcgcgaggtttgcgcacgaagggaaaggcgaggcccgaggagagacctggcgccgcgcagaatgatgatgtcgcacgctgggtgggaactgacgtcacctgtgctcaccgccgcttc

SEQ ID NO: 473475 - DNA, 122 bp, Homo sapiens
gggaaggcaagccccagtcaggcggaaggtagctggctgcggggcggggcgactggcgggcggcgggaggcgccaaccgccacagacgactcccagctggccgagggcgggaagggggcagg

SEQ ID NO: 473476 - DNA, 122 bp, Homo sapiens
ggggctcccgagaggccccaaggttcctgacagagctgctgttgggtgttggtgtaaagccgggaatgtagtgtggcggtgatgccctagatccctggggccgcgccctgccgcccgtcccc

SEQ ID NO: 473477 - DNA, 122 bp, Homo sapiens
tttttcttcccatagagatgggttcccactgtgctgcccaggctgctctccaatccctggcgtcaagcaatcctcctgcctctgcctcccaaagcgctgggattacagttgagagccactgt

SEQ ID NO: 473478 - DNA, 122 bp, Homo sapiens
agcccgcccgcgagcctcgccccgcctcctcgccgggcccgccccgccccctcgccgggccgtgctcttgctcccgccgcctggcagcctcacgctcggctccagcggccaagagccggaga

SEQ ID NO: 473479 - DNA, 122 bp, Homo sapiens
aaggtttatatgttctctgtttctgatcaaggttgatcctgagatcaggagtttgggctgcgactgctgggaactagcctgagtcatacactgggccaacattccagtgttatcttcagtta

SEQ ID NO: 473480 - DNA, 122 bp, Homo sapiens
tgggcaggaggcagagggtctgcagcaggaaccagctccagggactcatcctcctcaaggcggctccgaggcccggaacgcggagggaaggagtagggcagaggtggccgcccgccctggct

SEQ ID NO: 473481 - DNA, 122 bp, Homo sapiens
aggagcctttcctgcccccccacccagccccaccctctgactgtgccatgcctgctgccgcgggtggacatctttccacacctctgcatgcttgtctgccatccgagcctccccacaaggag

SEQ ID NO: 473482 - DNA, 122 bp, Homo sapiens
ttaagtggtcccttactaacacctactccagtaaacctggcctccaataatttctgccgtcgtgggtccaggctatgcaattcttccatcatttctactgccgccgccgccgctgccgctcc

SEQ ID NO: 473483 - DNA, 122 bp, Homo sapiens
tgcagggatggggtgctaagaggccgagccaaagcaggtggaattgaaggaacatcggggcgctttttcttagatgcaactcgctggttcccgagccttccgcggcttggttggggcttctc

SEQ ID NO: 473484 - DNA, 122 bp, Homo sapiens
ccactcacccagcacacggcaaaatgcagaggactacctttccctggtccgccccctggccgccccttggggaatgcaaacttcgtgttctgctgcggagccagacgcctgtattgggaagt

SEQ ID NO: 473485 - DNA, 122 bp, Homo sapiens
aagatctaagcgcttcgatcccacattcacaagccccctcagcggggattcccagacgcacgcttctcctgagagagtccagcccctcctggcggccgtggtccctggatgcgggtgctcga

SEQ ID NO: 473486 - DNA, 122 bp, Homo sapiens
gtagaggtaaacctcttaaggagagggaggcaccagattagaatctacttcctcactgcccggtctgtcttccttggaaaaggaaaagggaagtagatattgaataagcgtaccattttacc

SEQ ID NO: 473487 - DNA, 122 bp, Homo sapiens
taagcaaagccaggtagacggttgacagctctctgacttcccctacttcccaggaatcctcgaaagcaagatcagttagagaaaaatgacagacagcagtcaatggacacctctttcagccc

SEQ ID NO: 473488 - DNA, 122 bp, Homo sapiens
gattcagaccctccctgcgtccatctcccacacccacatcatgcccttgggcttcctttccgttcatgcttcctggccctgcctgtgtgcacattcagatgttcaccgtccccatcctttct

SEQ ID NO: 473489 - DNA, 122 bp, Homo sapiens
aggaggaggaggaggggaaaaaactactttttgtctcttccttcccaacccctttggcttcggccagcggactgtgaaaatatcacactacgtgaggcaggcgccgcctccccataaaaaac

SEQ ID NO: 473490 - DNA, 122 bp, Homo sapiens
tctgcggaggagctcccaccccagctcagacgcccagaagagacctgcgcagtgtgaagacggaccccagcggccccagccatttcactagcagctactttccacaacagacgctggcagcc

SEQ ID NO: 473491 - DNA, 122 bp, Homo sapiens
aggctaagctcagccactgccttttttgtgattctgcagccaccaagcttaggcctcaggcgctgatggagagataaagcatcgtgtgacagggccagcagcacagtgtaccctgcaaggtc

SEQ ID NO: 473492 - DNA, 122 bp, Homo sapiens
tgtttcttggaaagcccgttaaactcttatagtgcctacttgtctttacttctgtagttccgtcttcagtaatgactccaccccacctcaatcttactaattcctcaagacccaatacaaac

SEQ ID NO: 473493 - DNA, 122 bp, Homo sapiens
cacccacctgcagttgagcagctgaacagaggccatgccggggcactccgaggcctgagacgaccacgcctgtgccgctgaggaccttcatcagggctccgtccacttggcccgcttggctg

SEQ ID NO: 473494 - DNA, 122 bp, Homo sapiens
gaagccgcggagccactgcccgcctgggtcagggtggtgacggagcctgactgagaataacggctgaacttgactaatagactgaccgagggttggagcgggtcccaaccaactgcctgacg

SEQ ID NO: 473495 - DNA, 122 bp, Homo sapiens
tctcagtggtagtagaggggctgcttcctcccgcaacggtcgcagctgggaggcaatgggcggcgaccccacagaggacgtcgttgaagagacatgggatgacgctagaggagcaggttggt

SEQ ID NO: 473496 - DNA, 122 bp, Homo sapiens
gacagcgttggctgggctgcccaagggtgctaccctggagacgggtaaagcggttctggccgcgaaggcgctgacgcggacagtgggtgggaggtttgggaggaggggaaaaagggctgacg

SEQ ID NO: 473497 - DNA, 122 bp, Homo sapiens
cccggggcgccccttcgcggggggagagccgggcccgagcaagtcgaggcaggaaagggccgccacggactgcccggcccgccgatcgtttttattatcgagattattattaaaagggggcg

SEQ ID NO: 473498 - DNA, 122 bp, Homo sapiens
ggcagctgtgtgtgcgtcgccgcagttgataagagtgtctacctgctcaggtctgggttccggctgactcctgcccaggttttccaggaactggaagattatgatgtttctgattcctttgg

SEQ ID NO: 473499 - DNA, 122 bp, Homo sapiens
tctccagccagagtggtgccccttcttcttgtcctgaggtggacagtacactagatgaatcgggctcctccatggtcagcttttccctataaggtaaaattataccagatatcctctttgta

SEQ ID NO: 473500 - DNA, 122 bp, Homo sapiens
gcttcaccttctctgggaagattacccttcccactcccactgacactatagcccagttaccggtaaggaaataccatctcagtactgttgaatgggtggttaaaataagtgattggggctcc

SEQ ID NO: 473501 - DNA, 122 bp, Homo sapiens
tggaatgagtgtacttgtgttacaactatgatttccaacagcatgtaacaaacgtgacttcgggaaatagcttcaaatgctatggtgtcatttgttccaactgtttcacttctatccccttt

SEQ ID NO: 473502 - DNA, 122 bp, Homo sapiens
ttctgatcccaagcagcctgcaaatcggattttattctattttttgcctctaagtgagctcgccatcattccaggaggcatctcagtaagcaataatgcttacatgcttgcatttagggaca

SEQ ID NO: 473503 - DNA, 122 bp, Homo sapiens
caggactgtgaatcactagaaccccttatttacagaggaggacagtgagtgccagagcctcggactcatttgcccagcagcagagctggctggcagcaaggccagcactagcacgaggtggg

SEQ ID NO: 473504 - DNA, 122 bp, Homo sapiens
actcactgactccctcctgccccagttaaagccaaagcaaaggaaaccaaccgcttgcagcggccgctgcataaggagagcgctcacccagcaccctgagacagcctgatgtgtccaggtcc

SEQ ID NO: 473505 - DNA, 122 bp, Homo sapiens
tgtgttatatttattttgcgttctcttccctcaacagatggagcagcatattgtatgggacgtatgaattctgactgttggtatgtttaatgcaattttgtggatttttgttgtcctatgta

SEQ ID NO: 473506 - DNA, 122 bp, Homo sapiens
ctggttgtgcaaacacctacggtaccagtaattctggggaggcaagtactctggaaacgacggagaattaactccggaattacctagttatctggcatcacggtgaaaagagttccacagtg

SEQ ID NO: 473507 - DNA, 122 bp, Homo sapiens
acctctccccttccccacaggcgagctagacccggagaggatgggctctggcattcagtacggggatgcgtccctccgccagcttcggcagcctcggagtgcccaggccgtggcccctcagc

SEQ ID NO: 473508 - DNA, 122 bp, Homo sapiens
caaaccgctctgtagggtattcgcctacaagcagcgctcggctcctggccttaaaaatgccgggagaagactgacaatcaggccaccactggtgcccactacggaaacggcaaagcccatct

SEQ ID NO: 473509 - DNA, 122 bp, Homo sapiens
ggctgtcccgacctcagagggaccggaacgttcgttggaaggatcctcgtttctcagggacgattttggacgcgaagcgtgccccgcacaaggatggttgccatgaaccggaagtaactggt

SEQ ID NO: 473510 - DNA, 122 bp, Homo sapiens
acctgacggtcggaggaaggggggagagccggtaaaggaggctgacccaaaactgaggcccggtgcatcatccctcatgagaggcaagcccagaagcgccacaatactagggtcccccttca

SEQ ID NO: 473511 - DNA, 122 bp, Homo sapiens
gaaggttccatcccatggaagccacgttccagaagtttccatgctgtggaaggcatgttccggaagtttccgtcccgtggaaggcacgttctggaaggttctgtccggtggaaggcacgttc

SEQ ID NO: 473512 - DNA, 122 bp, Homo sapiens
gctcctttacgcaggagctgcgggaaaagccgccggaagcgacccgccctcagccctctccgccatcctgccctttgattggtcgaagttctcccgaaggggaagtccttcttttgtgttga

SEQ ID NO: 473513 - DNA, 122 bp, Homo sapiens
ggagggaggctgaggggtgggtgaacggcccgggaagggtgcctttgggtcccttgggttcgggtggcccgggatgacccgtcctggggagagtccgtctgggcaggcggctggcagggccg

SEQ ID NO: 473514 - DNA, 122 bp, Homo sapiens
tgggcagcgagcgccctggggagataagaggatcacgggcggcggccttcgaggctctgccggttcctgctccctggggaggtaattgccaaaaggccaggactgctggtgtacgtgcactg

SEQ ID NO: 473515 - DNA, 122 bp, Homo sapiens
ggcggctgcgctgctctggctgtgtggcgtggacaccaaggtcttcgtcctgtgagtctgcggccttcttctccaaccaggtgcctctcttgaccagctaccctcccaggggaccatgagga

SEQ ID NO: 473516 - DNA, 122 bp, Homo sapiens
cccgggggctgctggggacctgacgcaggcagctccgccactgacgtcaggggctgctggcggctggaacccgagtccaggccacaggcgcccggcgtgggcatcattaattatcaggcacg

SEQ ID NO: 473517 - DNA, 122 bp, Homo sapiens
ataaatataaccttattaacatttcttcaaattaaaagttagcatgtgccagttcttttccgtcagggatctggctcatatacttgccattcttcaaaccctagaaagtcctctacgtatat

SEQ ID NO: 473518 - DNA, 122 bp, Homo sapiens
gaccgtgagggacacccagctccgatgcttccttcccggggtctggaatccctggtgaaccggggcccttggtagtcaagaaacctgtcattgaaattcatgatgccggtttggttctcttt

SEQ ID NO: 473519 - DNA, 122 bp, Homo sapiens
gggcgggctggagggccacagacagccgctgacccagacgccccatctcccgccccagggcgagggtgcgcgctgtcgcttattggccagcagggtcccagaccttgaccaatcgcctgggg

SEQ ID NO: 473520 - DNA, 122 bp, Homo sapiens
ctgacctcatgatccacccacctcagcctcccaagtgctgggattacaggtgtgagccgccgcacctgacccacagtccatttaaagttggtctttattaatgtagtgacgccaatctgttc

SEQ ID NO: 473521 - DNA, 122 bp, Homo sapiens
ttggagggaacaattcagtctgtaatcatggggttggctctgtcatcctgaacctgcttccgtcactgcaccacctggggctgcccctcacttttgtgcacttgtgcggattcttagaagag

SEQ ID NO: 473522 - DNA, 122 bp, Homo sapiens
tgagggtggttcgctaaacttccggtgggctccaagagagtttccggcggacttcctgtgcgatcgggcggggttccggtcagtatgcgagtcctgtgagcatcatctcagcctggcctcag

SEQ ID NO: 473523 - DNA, 122 bp, Homo sapiens
caggtccggcacgaaggagggagaggtggcctgaggagcggaggggggatgtgtggattccggtgaaagggacctgacaatcgcccccaacccgtgagaaaaggaggagcccagttcttgct

SEQ ID NO: 473524 - DNA, 122 bp, Homo sapiens
tctccgccttgtaccatctgctccaactaatggaaagtaacacagtccccagtcttctcacgcctcttgcctttgcacatctaccctcccttcttggccagcatcaaccaggccttcaagtc

SEQ ID NO: 473525 - DNA, 122 bp, Homo sapiens
accaaatcagggggaacttgtcctcacagcggcgaggcagatggaacaataaatcacaggcgccgttgactgcctgcagtgcgctctccacagctgtcacttttttgtctctttggttttag

SEQ ID NO: 473526 - DNA, 122 bp, Homo sapiens
ggccagggagtggctcctgcttgcggtactagttgtacagagttaagtcctgagtttactcgcctgagcaccttggttcccggagagggaatgggcactctgtgagaggcaggctatttgcc

SEQ ID NO: 473527 - DNA, 122 bp, Homo sapiens
tcctcgtttggcagaattcaggagtggaatttctccagacacggtcggttcctgtggccccgctgcgccgcggcggcaccacctccacttgcgcctgtggctccacttgcttggttctggtc

SEQ ID NO: 473528 - DNA, 122 bp, Homo sapiens
gtcaccttgacctccagccaaaatcactcactgcggaaaggaccctctcggtctcggtctcgatcccgctcccgatccctgtcccgttcccggtctcgatctcgatcccgatcccgatccct

SEQ ID NO: 473529 - DNA, 122 bp, Homo sapiens
aagtctaaatttcttcccttggtgaatgtgagcgaatcccgggcgcctacgggctctggtcgcccccagccgacaccaggggtcttcccggaacgtgcgtctggaaacaacccccaagggag

SEQ ID NO: 473530 - DNA, 122 bp, Homo sapiens
tgccaggccctgctgtccctccctgaaggtcaggctctcctcagacagtggctgtgtgtccgccgggacctccctctgccagtctgccatggaggctcatggtccctctgcaccggccttga

SEQ ID NO: 473531 - DNA, 122 bp, Homo sapiens
ctagagtattgtctggcagcaagttattatctgccagtgaaaaaagctttaacgtgccttcggttaagccacacagaagtgccaggcaaggagaggcacggaccacagcatctgttttacaa

SEQ ID NO: 473532 - DNA, 122 bp, Homo sapiens
agccgggcagctgggtgctgggggcctgctcctgaggcaggagggagcacacaggcttggcgtagcctctggggcacgaacagcagagagctgaggtcagggtccctgccctgcccgacagc

SEQ ID NO: 473533 - DNA, 122 bp, Homo sapiens
agtcccgccggggccggctcttaaagggaacggcgggcagacgcgggctgggggggttgtcgcctctgccggcgcaaaccttacaaccttctccgtggggccggagttcagcgcgccgcaag

SEQ ID NO: 473534 - DNA, 122 bp, Homo sapiens
ccccgcgccgcccccagctgcccgcagagccgggcgcgtactgtactgtaagcagggctccggagcaaggcggcgtgtttccagaaatatgaagaaatacaccatgtgtattcattagctct

SEQ ID NO: 473535 - DNA, 122 bp, Homo sapiens
tacgtttgtgaacgacgacaaggtttctaaaacactagtggggccgggcatggtggttcacgcctgtaaccccagcactttgggaggggaggccggggtaggaggatccctggaacccagga

SEQ ID NO: 473536 - DNA, 122 bp, Homo sapiens
cttgaagcagctggaagtcctggatagttcccacctgaaagtctgtttgcaaaggcaatgcgcactcaggcaccagagggcagaggtgagtactctgttgtggggagaggggagatggggat

SEQ ID NO: 473537 - DNA, 122 bp, Homo sapiens
accttgagtccccacagaagcctgtggacagctccacgggagccccttcatcccatcccccgctcctgggttgctgacgcagcccccagggcccctgtgaactctctgagagcagggactac

SEQ ID NO: 473538 - DNA, 122 bp, Homo sapiens
gccgcacgcgaagaacccccccaggccccgccccgggcgcgtccactgttgcgggagaatcggctccgctcgttctccgctgttccggccgtccctccaccggccccgccaccgctggccgc

SEQ ID NO: 473539 - DNA, 122 bp, Homo sapiens
ttatactgcccgggaacgaggctgaaggacccggatggaaacggagcttagaatttgaaacgcaaagggaggggggaagtagttcccagtctccccattggctggctcctctgtcattcacc

SEQ ID NO: 473540 - DNA, 122 bp, Homo sapiens
caatcgagcgccgatggcacggatgcgaggcggggaaggccgaaccgaagggcagagccgcgccggcggcccgaggggaccgcgctgggaggggctgccgcgcagcgcggggggactgggcg

SEQ ID NO: 473541 - DNA, 122 bp, Homo sapiens
gcggctgtgccggtggctggagtgccgaggggtgcggggtgccgggggcggccgcgtctacgctgtccggagggtgaacggccgcgggcttgtcggggctgggggtggcgcccgagccgggc

SEQ ID NO: 473542 - DNA, 122 bp, Homo sapiens
ttccgcgagactgatttatgacgttttacagccctataaaagctgtagcgacgaggcaagcgctcctaccaccgctggcagatttagtctaataaataaaacataaacagttaactttatgt

SEQ ID NO: 473543 - DNA, 122 bp, Homo sapiens
gctgagccagagagctgaccgcagaggccaagcttctaatcccaggccaggagctatggtcgccgccacctgcaggtcccagaggaactgacgccggggaggtgctttgagccctttgacat

SEQ ID NO: 473544 - DNA, 122 bp, Homo sapiens
ggacgcgtcgggaggggcccgagcgaagccggtgtccccagcagggcagcctgcgagaagcgctgagtcatggcaggagatcatccgagccggcgtgtgaggaggaggaggaagagcgagtc

SEQ ID NO: 473545 - DNA, 122 bp, Homo sapiens
ccgccaggcaaggacgaagagttcaccctcaagctcatcaaccggcccatcctggtgctgcgcggcctggacggcttcgtctgccaccaccgcggctccaaccagctggacaccaaccgctc

SEQ ID NO: 473546 - DNA, 122 bp, Homo sapiens
aaacccgggaatcaagatcattgtcctctctggttctaggatgggggtccacaggccatacgtcatcaaacccatgaaatggtctctgggagcctcaatctggtgctggtttgggggattca

SEQ ID NO: 473547 - DNA, 122 bp, Homo sapiens
aggaaactgaggcctgggggttgtgggtggaaaacaggaaggaaccggtagcccttggcacgtattcttagaggagaaaacggaggctcacaaaggtcagatcacagagccggccagtgttg

SEQ ID NO: 473548 - DNA, 122 bp, Homo sapiens
gtatagacctgcaaattgcagtatgactcagaccttccctactgctaggagaagaatacacgggaccacaatcattttgaaaagtgggagggagtctgttgcgggtctgggctgactgtcct

SEQ ID NO: 473549 - DNA, 122 bp, Homo sapiens
cctgggctcccggcaagctgtgacttcccggatggggccatgcttttcttccaggacaatcggggctcctcccctcccggcgatctttctaggaggccacctccagagattgcgaggcgatt

SEQ ID NO: 473550 - DNA, 122 bp, Homo sapiens
agcctcagcctagggcaaactcccctccgcaggtcatcagcctcccatgcctgagcctcacggaaaaccactagaaggaaagtaagctagggtctaagctgtagcccctccaggcacctggc

SEQ ID NO: 473551 - DNA, 122 bp, Homo sapiens
ctcagaagtgtgcatattcaaatatgtatgtctttatgaatttatggacacatgccaggacgcactcaaacctacgatcctatgtccacatatgaatgagtctgcatggacttgcatgagac

SEQ ID NO: 473552 - DNA, 122 bp, Homo sapiens
ttaattctcaggggtggtgaatcaggatccaactggcagttgggatcaatgtctgtcaaccgtctaactttgagccaggtgggcagctggatcccaggatgtgggactttccatggcctttt

SEQ ID NO: 473553 - DNA, 122 bp, Homo sapiens
taaagagacaacttacagattgggagaatatatttccaaactattgttggggctcagaaacggataccctaacatatagtgatttgacaggtggaactaaagaagactcgaggtctctctga

SEQ ID NO: 473554 - DNA, 122 bp, Homo sapiens
gtgccgagggtgaaaattttgcattgcccaagttgcatgttcccagctgaggtccagtaacgtgaaaatcttccttcttttttcagctctcatacggtaaacaagtgtcctctttgaagtat

SEQ ID NO: 473555 - DNA, 122 bp, Homo sapiens
tcccgcggcgccccgcctgggacgccggaaggccctcggcacccaccaagacctgcctcacgagcccctggtcccgccaccggggccccgaagcgaccacagccacaaactcaacgccaggg

SEQ ID NO: 473556 - DNA, 122 bp, Homo sapiens
aatgtagaatcagtgggcgtgttaagcttgttttcctgcaactggatggtcccacctgagcgtgatgggagaaagtgacagatcaataggtttagattctcataaggacagcgcaacctaga

SEQ ID NO: 473557 - DNA, 122 bp, Homo sapiens
ccgacgctcacggctccgggggcccatggccagaagagactcaggaatggcagtctgtcacggttgtgagccgccccttggttagcacacacctcacggacctcggtagggggaaaaaaacc

SEQ ID NO: 473558 - DNA, 122 bp, Homo sapiens
aaccacagcaactaccgtccgcgccgcggtatttccccgccttcaatggaggcggagggccgcccgttgcttaaaatgaatccctccgcccatctgagcccgccccccgggagcgcggggcc

SEQ ID NO: 473559 - DNA, 122 bp, Homo sapiens
cctgttcatcctgtgagcagtttagagacagatgagacaggcttatggtttccactggctcggctccgtgcgtgtgcggattgggcttcctgagagcctggttagccccttttatctgctct

SEQ ID NO: 473560 - DNA, 122 bp, Homo sapiens
tcccctgcaggctagctccaatggtggcttagctcttcgttgcctctgctgccatgtgggcggagttttagttttttctcactgcttgcttggcaatgcagctctagcttctaatgcccttt

SEQ ID NO: 473561 - DNA, 122 bp, Homo sapiens
ctcagaggggcacacagggaggctggaggtccacacagccccaccacagtggcctcagcccgctgcaggtcacagccaaggcaaatcagggagggcatctctgagtctgagaccagcaagga

SEQ ID NO: 473562 - DNA, 122 bp, Homo sapiens
ctcaggctcccagtggatgcactcggcgtggggcactagcgggggcggggtcaggaaccccggggccagaggttggggggcaccgagttttgcccccttcaccctctgtcgggaaaagcctc

SEQ ID NO: 473563 - DNA, 122 bp, Homo sapiens
tgcccttccctgcatgcttcccccaggccgtcaagacttggtacgctccaacttctgagtcgctcccgcagccgagaaggggccggggtatgcgagcttccgcagagtggggaggggccgcc

SEQ ID NO: 473564 - DNA, 122 bp, Homo sapiens
gtggctcccctgggtccaggccaggcccagcaggagcaggagcagagcagaggcagtggccggcttcatgttcatgtgcttgtggaggccccagccctcggcctcggcttttatgctaggga

SEQ ID NO: 473565 - DNA, 122 bp, Homo sapiens
gcgggggctagcatgagggcggccgcagtgcccgcgcgcctcctcgctcgcctgtccgtgcggtacattgtgccgcgagctctacggagattcccattcgactcccctcatccactacacta

SEQ ID NO: 473566 - DNA, 122 bp, Homo sapiens
gggcgtcgatctccttggcaatgagggcccgggaagtggctctcgggcgggagttgagaacgcagggagttgcctagcaacagcgtcctaggctgaggatgggccccacggtggtcgcctca

SEQ ID NO: 473567 - DNA, 122 bp, Homo sapiens
cagaactgtgataaattaaacttctattgtttaagccaaccagtctgcggtatttcattgcggcagccttagtaaacgaataacccctctgcccaaattacagatgaagtctctaacgaggt

SEQ ID NO: 473568 - DNA, 122 bp, Homo sapiens
gcgctctgccctcggccgggtcgggtctccgcgggtgcgcgcagaggatctggctctcgccggcgcctgccgcccttatattcagccggccgcccgcatggctaatgagatgcaaatcagca

SEQ ID NO: 473569 - DNA, 122 bp, Homo sapiens
ccggggtgggaagagggtgggcttccctctccacgggtgtcagagggccgacggggagggcgactgctctgggccttcagttcccttccccagccccggccgcatacccagttgatgagcag

SEQ ID NO: 473570 - DNA, 122 bp, Homo sapiens
atggtgaagaaactgagaacttgcaggttaaaaacgcaatgtacagcaataagaaatcaacgttatagtccatgtccctcttttatatgggtgataatttcaaagtactatagccagagtcc

SEQ ID NO: 473571 - DNA, 122 bp, Homo sapiens
agccttctccccgcttccgaggggctagaggagggacgccatctctggaggctgaggcgccgacttcctgtatcatgaacctcgcctttgggataattttgcttgtattacaacaaaaagcc

SEQ ID NO: 473572 - DNA, 122 bp, Homo sapiens
gggctctgcggagaccacgggccatcgttagacaactgcactcgggcactgaggccagggcgtccctgagacagggcttctcctttttatcctgccgccaggcagcccagagggttcttctg

SEQ ID NO: 473573 - DNA, 122 bp, Homo sapiens
cacgagggcgcgggcagtggcaagcaggggccttacccacggcggggccgggggtccgggcggagtgcaggaggcctcgagggtcggcccgggtggttgcggccacagcgcagcggcggaga

SEQ ID NO: 473574 - DNA, 122 bp, Homo sapiens
ttctctgaggaatgatgaatcagaatctaaatggaaaatctgggcagagatagaacctcccgcgggagccaccctgcccttccatgtctagatcatctgggttccaacctccatcctcctcc

SEQ ID NO: 473575 - DNA, 122 bp, Homo sapiens
atccataatccagcgatgctgcagctgtaaaagcattaatagaaaatcaatccacaacctcgcggggcagcgatcgtcgagcgccgtttccaggctgccttccctggggtcgggagcggccc

SEQ ID NO: 473576 - DNA, 122 bp, Homo sapiens
agcggcagacaccgagccgcggccacagggccagccgcacagtcggaggaagggccggagcgaggcggggcccggggctgtcaaggagaaaaacatcccaaggcctgcaaattgctgctctc

SEQ ID NO: 473577 - DNA, 122 bp, Homo sapiens
agatatggagggggccagacgaacaggacctgggaatgcacaggaccccctgaagcaggccggggatctgagtgatcttgctgtatctaagctgacattggaacatgaacagtctgaaatcc

SEQ ID NO: 473578 - DNA, 122 bp, Homo sapiens
gggcccgcgctgggaatacccgggcggggtgacctgggtctagggcaaggccctcagacccgctgctggcggcagcgccgctcgggatccgccttaaagggaaacacttttttctttttttt

SEQ ID NO: 473579 - DNA, 122 bp, Homo sapiens
tgctttacagctactggaagagcagtcctgagaaacaaagccccgattttttatagccaccggggaaaccagagcccacttccttcctccaggaccagggctttattgatgcggatcatctt

SEQ ID NO: 473580 - DNA, 122 bp, Homo sapiens
cgccggccgaggccggtgctgcgggggcccgggaggacgcctgtcgggattatcagtcatcgctcgaagacctgaccttcaatagcaagccgcacatcaatatgctgaccattctagccgag

SEQ ID NO: 473581 - DNA, 122 bp, Homo sapiens
ggggactcctgcggacagccagggaaagccaggctcgaccccacccggctgctgcgccgtcgagccacatggggccacccagccagcggccacgttgcccgccacacctcgggccagggcta

SEQ ID NO: 473582 - DNA, 122 bp, Homo sapiens
agcgtccggggcccgcgccatgccctccccgggacccccggtccgagctcgccccttccgcgcactcctcggctgtcccacctccccgcccgactccccgagcccggcctcgcccccgactc

SEQ ID NO: 473583 - DNA, 122 bp, Homo sapiens
ccgcgtctccatccggccgggtagaatcgagcgccgagcgatcggcccatggttgctaggcgaccagggctgctgttcctgcagggattgagttttgaatcccctaaatcccgcagactcag

SEQ ID NO: 473584 - DNA, 122 bp, Homo sapiens
gctggttgccatggcaatgaccaatgataagcgaccaagctcagggggaggggagatgggcgaagcaagctgcagggtctggaggggagtgaatttgtgctgctgccctctaggatgctctt

SEQ ID NO: 473585 - DNA, 122 bp, Homo sapiens
gtgatatatgtgaaataatccggacatgcttctgctatggttgtttgtcgccatagtttgcgaatctgggtaaacctggatgagagagacgccttacaattgcaaacatttctcaggaggcc

SEQ ID NO: 473586 - DNA, 122 bp, Homo sapiens
aattaactgcagcaggtttggaaaaacagtgttccaataggctgaatgtgagccagtgcacgtagaatgaggcaggtgatagataattccacttttcactggtcaaagtacaaaattagagt

SEQ ID NO: 473587 - DNA, 122 bp, Homo sapiens
aaaattactcaccttcccgccctccactgggagtaaagcgagctgtgcccagcttctccccgcgctcacggaagcaggtggcggccccaccccacctgacccctcaaaagccccgccccctg

SEQ ID NO: 473588 - DNA, 122 bp, Homo sapiens
gaactactctttctctattgcaatttccctgtcttgataaattggctgagtccaggcaaccggcaaggtgaacccactgggcggctacattaccacggctcaaggcgttgtgcttggagcct

SEQ ID NO: 473589 - DNA, 122 bp, Homo sapiens
gagaaagcaaagcgctcccctgcggacagtacactggagcaatctactcccaccaagagacgcgaactgctaagctcagttaaaattgttaaatagaaacaaagcattttcccaggaaggtg

SEQ ID NO: 473590 - DNA, 122 bp, Homo sapiens
gaaaagttgatgcttgagcaactgcagatcacgaccacactgagagtgctctgacattcgcgataagacctggcttttgagaaggtccacgttcctctcacttggtcacttggggtgaaccc

SEQ ID NO: 473591 - DNA, 122 bp, Homo sapiens
tgaacgttaatcacaagtgtgattgatcacaagttaatcctaagtggtaagaatgagtcccgcgttaatcagggttctggtgtgaaaattgctgagttcttttatgctcttcccctcttgca

SEQ ID NO: 473592 - DNA, 122 bp, Homo sapiens
gctgtggcgcctcctgaccgtcgtctcctcactccgccttttcaaatttttgtataaccccgtgttgtgtaaatacagtttttgctccggtgcttccgcctgatttttggggctgcgggggc

SEQ ID NO: 473593 - DNA, 122 bp, Homo sapiens
ttctcttattaaccaggctaaactccccgaaaccagctattttctttcaaaaagtaggcacgtacatacagactttccttttttcgcttggttttgagaccccagctatgagtgtggatctg

SEQ ID NO: 473594 - DNA, 122 bp, Homo sapiens
ggaggaggctgttacataaccacaaaggcacaaagctgcagttttgagaacatcttcccacgccagttctaagcattgacttcaactatggttgctaacacaagaatcggcactggtgactt

SEQ ID NO: 473595 - DNA, 122 bp, Homo sapiens
ccaggacttgaatcgtatcttcccactttctgaggactactctggatcaggcttcggctccggctccggctctggatcaggatctgggagtggcttcctaacggaaatggaacaggattacc

SEQ ID NO: 473596 - DNA, 122 bp, Homo sapiens
gttcgtgggattgtgatgtgcacctggcatgggtgtgtaacatcacaactggatctttgacgaacctataactggggttgcagcttaaggtggccaccctgcgagactgtgccctatgtcag

SEQ ID NO: 473597 - DNA, 122 bp, Homo sapiens
cttaaaaaaaaaaagtcaaatgtgagtcttgattgtcctaggaaacccccattttcaggtcggtggtttctaatgatcttctcatcttccacgaagcttggtccaaaggagccacatcgctg

SEQ ID NO: 473598 - DNA, 122 bp, Homo sapiens
tccgatctccgactctcggatctccgacaccaaagcacccaggcctcgagcagatctttccgctactcgggagtaaaatcttcccgccagccagctgagagcatccacccttccgggtcggt

SEQ ID NO: 473599 - DNA, 122 bp, Homo sapiens
aagctggcctaggaaggggaagaggccacagccacactgtctgccgccccagccgagctccggcctcccccaggcctgcggcagacagaactaaacaggctggcttatcagctgtcgccact

SEQ ID NO: 473600 - DNA, 122 bp, Homo sapiens
tttctgtgcaggagggaagcggcagacaggtcagcccggccgggctcaggcgctgcaccccgtgccatcctgtttgctgagagtgagccccaaatttgccccgttattggttctcagggaga

SEQ ID NO: 473601 - DNA, 122 bp, Homo sapiens
aaaatgactctcttcaagcccccaccctactctgggggatgcaggaagtacagaaggttgcggagtgttagtacaaattgtggaactcaggatagaagcttcaacagtgttgaactgtctat

SEQ ID NO: 473602 - DNA, 122 bp, Homo sapiens
cttgggcaggatttgtggagcaggcgcgtggtgggaactgggatggaggctccagggtcccgtgggggtgggggtgggctgagcgaggacatccccttaccccctgaatttccatctggtcc

SEQ ID NO: 473603 - DNA, 122 bp, Homo sapiens
cagagctacagagagccagaatcagggttccccccagttctgatggccctgaagtccactcgtttcctatgttctcccctttagatgagggactgagagtaacactccagaaaagagtaaca

SEQ ID NO: 473604 - DNA, 122 bp, Homo sapiens
ccgcacccctccgggaggttccttgtgttcctttactgcctttccccctccttcggaggccgcgagagcaccgggaggaggtgcatttggggttgcgatcgcgagcagcagcgcccattgtt

SEQ ID NO: 473605 - DNA, 122 bp, Homo sapiens
ggagtctgtggagctggaaattcaccggtccaggaagacgtctttcccgcgtcccagcaccggtccagaaagacgtctttcccgcgtcccagcacctcgggccacgctccttcgtgagagcg

SEQ ID NO: 473606 - DNA, 122 bp, Homo sapiens
ccctggctccccctggctttttttgtgtgtctgcctcagcctgtcttacttagcaactttcgtgcaccagcattttcatggcaacacacctggacaacaggtgcaccctcctgagcccctag

SEQ ID NO: 473607 - DNA, 122 bp, Homo sapiens
tcattagattacacttactgagaatgcatagcataacaaagtcaggcactgggctaagtgcgctcacatccattatctaatcatcctaagagcactgatatggttagtatcattccacttta

SEQ ID NO: 473608 - DNA, 122 bp, Homo sapiens
ctccggaacccaccaatggaaagggcggtgcgggggcggggcctggcggttgcctagcagcggcagcgccgggcgggggcgggtggtcgggggcggtgatgcgggcgcaacgggggcgggac

SEQ ID NO: 473609 - DNA, 122 bp, Homo sapiens
ggtggtcagggaggggaagtcctctctgaggggatacgtgagctgagatctgactgagcccgtcacaggaaggtttgagagtagaacaggaagttgtgagtagagccttgaaggaaagagaa

SEQ ID NO: 473610 - DNA, 122 bp, Homo sapiens
cgagtctcctccccaaaccaccacattggctctgggtcccgcgtgtcgaacccgtcaggtcgccctgcctccatcacccggcctctgggatttcctgcaaccttccaggtgtcaagcgtgtg

SEQ ID NO: 473611 - DNA, 122 bp, Homo sapiens
gcaccgacctgccgctgagcgagatcccgcgcggcgtgagagtcgccctggactacgaggcggggcaggtgaccctccacaacgcccagacccaggagcccatcttcaccttcactgcctct

SEQ ID NO: 473612 - DNA, 122 bp, Homo sapiens
ttggcttttccggggcgcttgccttgccatgattctaactctctgcccttccccaaggcacgtgggccgtggcccggctgggtcggctgaagaactgcggatggaagctgcggaagaggccc

SEQ ID NO: 473613 - DNA, 122 bp, Homo sapiens
gggctgcattcccagccggttaaggcattctaagtcacaggatgagactggaggtcggcacgaggtacaggtcataaagatcttgctgataaaacacgttgcactaacgaagccggctaaaa

SEQ ID NO: 473614 - DNA, 122 bp, Homo sapiens
cctcggatgcccagcagttattcacactcagtgcctgaagtggagctgctgcgagctcctcggacgcccagcagttattcacactcagggcctgaagtggagctgctgcgagctcctcggac

SEQ ID NO: 473615 - DNA, 122 bp, Homo sapiens
aggggggttacaccgccaggcagaatctgggagccaggtgggagcggtttaggtattctccgaaggtctcaggtacagtgtaacatttagatgattttgtctcacaggatggacatggtaga

SEQ ID NO: 473616 - DNA, 122 bp, Homo sapiens
gctgcccgcttctagggggcgcagcgcactatacaaaattctccaattccacatggctcccggaatccttatttcgcgctactcaggttgcaactccggagggaagacgctgggacttccag

SEQ ID NO: 473617 - DNA, 122 bp, Homo sapiens
ataaccccattcaaagctattgtttttaagtgctagagtgattgacttgaaagtaacttgcgtaaatcagtggtgttgattactaaacacaatggtaattactagggaggataatgaaaaca

SEQ ID NO: 473618 - DNA, 122 bp, Homo sapiens
cagtgagggctcagtgcgtttgttctcattgccgccctgtgtttattactatcgccattacggcctcatcctccaaggagactgctgctggaaaggccgtggttgctgcgtgtgtcccgcag

SEQ ID NO: 473619 - DNA, 122 bp, Homo sapiens
cttgcaaacatccactgctaaactggggtctttcaggggtttcctgtaccaattactcatcgagaaatgcttttagcaagcaagatattcctggtctgtctggcacagatagtttattgtca

SEQ ID NO: 473620 - DNA, 122 bp, Homo sapiens
aattactatttttcatctttgacaaagtaattaaggccgtagtgactggctaattcagaccgaatggctgcgcggtgatggatgcggatttacggcctccttggctgcggcgcgctgggcct

SEQ ID NO: 473621 - DNA, 122 bp, Homo sapiens
aaatggagacagctggcctgtggtggtagaggttggggagtggctcaggaattaaattcccgaatagagaccagcgatacctattggatcagcttcatacttgcgggagcagagtaggtaga

SEQ ID NO: 473622 - DNA, 122 bp, Homo sapiens
accaattataaaataaacataattaaccccggcataatgaagtgattaaatgaataaaaacgtatgttacattctctagggaaagatcgggtttcaagcattacagtgcctggcatcataag

SEQ ID NO: 473623 - DNA, 122 bp, Homo sapiens
acagtcgaggagaccgggggccaggggacgaggatcatgcttccctgtctccccaccccgcgttgaacagtcgagaagaccgagggtggggctgataccccacatgcttacttgtggtcatt

SEQ ID NO: 473624 - DNA, 122 bp, Homo sapiens
ggggcgtgggcatcgggaggcgggcccgggttaggggcgggaccgccgcctggttaaaggcgcttatttcccaggcagccgctgcagtcgccacacctttgcccctgctgcgatgaccctgt

SEQ ID NO: 473625 - DNA, 122 bp, Homo sapiens
actatagcattggtaatgtgtgtgtgcatatatacatattatttttaaaaaaataaagttcgattatttcacctggcttgtcagtcacctatgcaggcgtctgagcccccgggtttccagga

SEQ ID NO: 473626 - DNA, 122 bp, Homo sapiens
gagccggcgctcacatgcagggagtcgcccaggacagcaagcctgggtgtggggctgaggcgggcgcagcctcggggcagtccccacacaagggcaggacggagcctggacggaagctccac

SEQ ID NO: 473627 - DNA, 122 bp, Homo sapiens
gcagccctgacgggttgcgaaccagggggcgccccgaacgcgggggttggggtctgggagcgcgagcggccgctacggtacgagcggggtgtgctgagtcccgtggccacccccggccccag

SEQ ID NO: 473628 - DNA, 122 bp, Homo sapiens
accaatatcaacttcctgcttttgatattgtactataattaagatgtaacccgccaggcacggtggctcatgcctgtaatcccagcactttgcgaggccgaggcaggcggatcacctgaggt

SEQ ID NO: 473629 - DNA, 122 bp, Homo sapiens
ggacctgggagacagaaggctctcaagggaggaggaagcagccgcgattccagggcaggccggctctgcgggtctccatgggaacctgctttacctcaaaagtcgtgtctgctccagcctgg

SEQ ID NO: 473630 - DNA, 122 bp, Homo sapiens
acctattgggcactaggctcactacctaggtgtaatattcccatgtaacaaatctgcacccgtacctactgtatctaaaatcaaagttaaaatttaaaaaaaatatataaaaatgcaaaatt

SEQ ID NO: 473631 - DNA, 122 bp, Homo sapiens
gcttctggccttctgccccgccggcagcccagtccttggtttttccctgcttcctgcgtccgctccttcagggtgataaactcagggaaattaaagctggaatggggacgcccaggccgacc

SEQ ID NO: 473632 - DNA, 122 bp, Homo sapiens
tccgtagtatcccccaaactggaaacaactcaaatgtccatcagcaggtgtctggctagacggcagtgtagccatatgatggaacagtgctggccaagaaaaagaagtgaactactggtaca

SEQ ID NO: 473633 - DNA, 122 bp, Homo sapiens
tgcatacatctgtagagaatttgaaaacaagcagtcaatttagaacttctgcttggtcttcggaagcaaaaagaggaaattcaaaagtaattttacacgtccttccaccagaagctgaaagg

SEQ ID NO: 473634 - DNA, 122 bp, Homo sapiens
tgcgcctctggaagcggcggcgactggccctgagcttctgcagcagctggtcgtcttccacgtcctcgccctccatggcgcgcagcgtacccagcatcggacccagccagtacccaagcgcc

SEQ ID NO: 473635 - DNA, 122 bp, Homo sapiens
ggctgtttggctgttggcattgggtgtttgccttgtgatatacccagaaaaggattcatacgttacatatgatgaagtctggggatgggactggattctgagagtataaagatggcaatgca

SEQ ID NO: 473636 - DNA, 122 bp, Homo sapiens
cctgggtgccagcctccgtgtggacagggcccagtgcagggtccagggtgacccgcaaggcgcaggcagatgtggagttacataagggaagatgaggcgccgggcggacccagccggagggg

SEQ ID NO: 473637 - DNA, 122 bp, Homo sapiens
catttggcccaggagtcaaacatacaagggcacgctcatctgtttttctcccaggatacgcgggtctgtgtatgagcagctgctctgagcttgcgactgggagggcagagggtgtagactcc

SEQ ID NO: 473638 - DNA, 122 bp, Homo sapiens
gcacacaggtgtgagctttttattatacccagcccaggggtggcccatggaaaagccccccgtgcatgttacttttggggtttttttgttttgtttttgagaccgagtcttgctctgtcacc

SEQ ID NO: 473639 - DNA, 122 bp, Homo sapiens
ggacagaaggaaacacaaaacaagcatcaaccttgcaacttttaccacttttgaatgtcacgtggccttgcctcgccccacccgtccccagatgccaggtagtgaccacagggtattttggg

SEQ ID NO: 473640 - DNA, 122 bp, Homo sapiens
tttctggattttttcaagtgctacatggcaccctttctctcatctggggaggcaattacgcgataattaagcgactcacacggctctttttatcttgtccgcggtgtggagtggggcgatca

SEQ ID NO: 473641 - DNA, 122 bp, Homo sapiens
gggtgcggccccagttatgctcaatgcaggggcacctgtgttgttagcagctgacgtggacgggaaaggcctgtgctgaacaacgttccgtgttcaattagacactctcctcctaaacaggg

SEQ ID NO: 473642 - DNA, 122 bp, Homo sapiens
acacatgagtgctgggtgggggcggggtgctgggagatgcagaggctcagaaaaaccctccgaggctctcggattttacgcctgcatgagatttcgagggaagaatcctaaatgtggggaaa

SEQ ID NO: 473643 - DNA, 122 bp, Homo sapiens
gtgccgcccgcctgtggtcctgggagcccgaggccagcccggctgccgcatcctgctcttcgcactccaggtctcagacaggagtcactcgcctcttcgtgccacgcccacgtctaagccgg

SEQ ID NO: 473644 - DNA, 122 bp, Homo sapiens
gggggcctgcgttttgcaatcccatcgacgggtgcaatcctggcacttctcttttagacccgaggaaagacgcacccgtttctagggcctcccaggtttaagacgggggaataagaggagga

SEQ ID NO: 473645 - DNA, 122 bp, Homo sapiens
ctcctcacgccaagcgctgaccaccagaccctcttctagtggacatattttattggggggcggggattttaaaaacagaaaaccgaaactgctgtccagagcgggggtgaggttgtgcactg

SEQ ID NO: 473646 - DNA, 122 bp, Homo sapiens
ctttttttgaggtgtaacaaacacaactcgggatccgagaggacactctgcggctgccagcgaggcgggctggacagcgcaccaatcacggcgcagctccgccctatataaacgggcgggcg

SEQ ID NO: 473647 - DNA, 122 bp, Homo sapiens
ttttcaatatttagggcagagaataaataattgttgaaatagtgaaaataatttcatctccggttctaaagggctggaaaagattcatctttggtaaattgtttgcaagtatgtataaataa

SEQ ID NO: 473648 - DNA, 122 bp, Homo sapiens
gtgtcagcaacatttggaagtttattagaatagcaaaatttggccgggcatggtgactcacgtgtgtaatcccagcacgttgggaggtccaggccagctgatcacctgaggtcgggagttcg

SEQ ID NO: 473649 - DNA, 122 bp, Homo sapiens
caaggcgccctccgtcgcagcctgggggagactacattacccagaaagccttgcgtcgagcggcagtactttgatccaatgaaaatccaagacaggggcatttccgtgtgggtctacccccg

SEQ ID NO: 473650 - DNA, 122 bp, Homo sapiens
cttgaaccatggcagacaatctcaggagtccataatatcttaactgtgatactataaatgcgtgtcaacagaaagcaaatctttctgtttcttttaaaaagttggatattttgacttttgga

SEQ ID NO: 473651 - DNA, 122 bp, Homo sapiens
tgtcacggcagccgcgggaccctcacgcgctgtctgggccgtcccttccagcgtgtcgggcgttgtgtccagcactggggaccgcccacaggcgtgacttgagccctgtttccagcctctgc

SEQ ID NO: 473652 - DNA, 122 bp, Homo sapiens
ggtgaccttcaggcttcagcaactctgcccttcatccagaaggatctagacctgctccctcgtcgaatatcactacaatgacctggcatcgcatcaccctggaaggaccagaggaaaatggc

SEQ ID NO: 473653 - DNA, 122 bp, Homo sapiens
tataaccagacacgtgcagtggcggggagggtcccctcacccagggtgcatctccagaaacgccgcctgcccttccccctctttagctcagtgttgggagtttgaagatggcctcttcccgt

SEQ ID NO: 473654 - DNA, 122 bp, Homo sapiens
gagtctgcgttgcactgacattgtccgcacagttgttgattgatttttccttccttcttgcgtttattctttcaacaaatatttattgaatgaatgcctagtttgttacaggtaccgcgctt

SEQ ID NO: 473655 - DNA, 122 bp, Homo sapiens
gcttataagatgtgctgctgtcacccaaggtcccatgtagaaacagggtcccaccacaggcgctgggcagaggcctgacccgctgctggctttagcgcatccccctccatttctaatttctc

SEQ ID NO: 473656 - DNA, 122 bp, Homo sapiens
gggttcccgggctgcctccggggctgctcctgtgaatggcattcgagtgcccttccagcgcggccactgaagcagccacaacccccggtgctcggggcggctctcaggtccctgaagtcctg

SEQ ID NO: 473657 - DNA, 122 bp, Homo sapiens
tattgtgaataattctgctgtgaatattgaagtgtaaatatttgtttgaatccctgctttcggttgttttgtgcatatactcagaagtggaattgctggatcctatggtcacacaatgttta

SEQ ID NO: 473658 - DNA, 122 bp, Homo sapiens
gtattttgttttattgatatatttttcgttttgtggttactgaaagtgaattgtatggcacgttgctctcacttgtaatcagtgacggtgtagcctaagaaacctggtcactcaactgcatt

SEQ ID NO: 473659 - DNA, 122 bp, Homo sapiens
ggtagggacccctcttcaaactttgccaacagtgacaacaactgcatgcccgagagcatgcgttgaggagcagtgggagggtgatttcggccaagggaattaagttgcaaaaggaggctggg

SEQ ID NO: 473660 - DNA, 122 bp, Homo sapiens
aatccgcgccccttgcagctctgctggaatccgcgccccttgcagctctgctcgaatccgcgccccttgcagctctgctctggctgctgtgacaaagcgctgcagactgggtggctcagaac

SEQ ID NO: 473661 - DNA, 122 bp, Homo sapiens
gctgtagagtaacagccaggatgggcaggtggggccttggggaaggggcagcatggtgcccggagcttcccagtctgtggaccccacccccatatcccgagcctttgcaaagcagggataga

SEQ ID NO: 473662 - DNA, 122 bp, Homo sapiens
cccgccccctgctggctgagtgtcttcaggcttctatcccgctgggcctcaggtgggggtcgtgctgggcatcctcgtggacctggtggccggaggggtgggctccaggcccggactgccca

SEQ ID NO: 473663 - DNA, 122 bp, Homo sapiens
tattggtcatattggctgattcattctctctggcagaatgcccttctgcctgcagggttccggcagaagaaccagacatcaaagtccaccacagggccatttgatagagagcatctcctttc

SEQ ID NO: 473664 - DNA, 122 bp, Homo sapiens
cagttgtccccaaagtgtggtaggtcccctggagagtgtccgcctccccttgccgtccctcgtccatggaagtccgaggcaggtgtgccatctccgaatctctccgtcccaggtggggccct

SEQ ID NO: 473665 - DNA, 122 bp, Homo sapiens
cgagtctttgctgtgctcccaccccattatttcacatacagtatggataatgcatataaccgcacaatagcaccttttcagcacaagcagcaaatccaccttctgttttgcgagcagccatt

SEQ ID NO: 473666 - DNA, 122 bp, Homo sapiens
tgaaatggcaatgcaggaaaaagataaccaattttgaaaatcagtgtgtatgcctatttgcgtgtatattggaatattaaagtcaggcccaaaactcttggaaaggtgtgctgtgaaaacgg

SEQ ID NO: 473667 - DNA, 122 bp, Homo sapiens
tgccccgctgtcagcctcgtttccgttaatcctggttcctagaggcattcgagcagccctcggccagggtttcccagaggcctggcgggcgaagtcagctgttccaggtcccggagagatgg

SEQ ID NO: 473668 - DNA, 122 bp, Homo sapiens
gaggaggcagtggtgacagtgaaaaaagcagaagacaaagaaatgagtgcatagcttgatcgttagtggtgtgggctctgggaacatttgactggtgcttaatcctggctccaaaacccaaa

SEQ ID NO: 473669 - DNA, 122 bp, Homo sapiens
tctgtggtgcggaaatggccaggccagacctccgtgggtggtccttcgtgtccacgtcagcgccctacatccacactgtgggcaccatgacctcacatgcggagcggagcagggccggcgcc

SEQ ID NO: 473670 - DNA, 122 bp, Homo sapiens
cttcctttccccctttgctttcttccccctccgctgttggcgagggcaaagtggccgtggcggcgccatgcccgggccggagtgagtgcgcgcgggcgaaaatggcgtacatccaggtaggg

SEQ ID NO: 473671 - DNA, 122 bp, Homo sapiens
caacgctgcccggtcaccctctcgtttatttcaacgtatgaaaagctgtttctagcagggcgcagtggttcaacgttgtaatctcagcactttgggaggccgagggggcagatcacttgagc

SEQ ID NO: 473672 - DNA, 122 bp, Homo sapiens
gaccgacttcccaaaattccctcactgaatttacatagtaaatagtgatgagaccggaaccgctaacgtacgatgggcctaccacaattctataatgtaacctattattgtctctattttgc

SEQ ID NO: 473673 - DNA, 122 bp, Homo sapiens
tcagagctgccacgtggtggatgagctgcccacagctgcaggcgtgtcccaggcctgggacgcttcccttcacagcccaccccacccactcatccggaagaggcccccacgtccaagtgtcc

SEQ ID NO: 473674 - DNA, 122 bp, Homo sapiens
atggcattcattgtactcggagatccagtcgatggcgttgggtgtacttggagatccagtcggtggcgttgggtgtacttggagatccggattgatgctgaatatagggggtcaggaagatg

SEQ ID NO: 473675 - DNA, 122 bp, Homo sapiens
tggcttagcgttggggcagtgaggatcattgcattggtgaatggacctctgacctttacacgttctcctctccatcacctggctttactcaagctgaattcatccagcgcttgcactccatc

SEQ ID NO: 473676 - DNA, 122 bp, Homo sapiens
taaaacaacgttctccctaaatggcgacgatctacggggcggaaatatgcttggaactgacggtactgcctgcaggcgtgtgctcgtcagaatctattcccaacacagtagaagcggaggtt

SEQ ID NO: 473677 - DNA, 122 bp, Homo sapiens
ttcccgcactgcccgatctgcgtgagcacgatctccctcatggccaaggcgggattaggacggcaggagaaacgtgagaaggaggagcagacgcgcagcgacccagcccgccctccgccaac

SEQ ID NO: 473678 - DNA, 122 bp, Homo sapiens
aagtgacatttatttggacttcaaatcagtggttttccattgttgccgctggatccccctcggcttccagctcaaggtagtttccaggcagagtgcctctgtgttaatctgtcttccccctt

SEQ ID NO: 473679 - DNA, 122 bp, Homo sapiens
caaccatgagagccgaggtgggaggcatgggaaacagtgcagtgactcaccccctgcccccgcaccaaccacccatattcaggagaagaggacagacacggcacctctgagtcacccctctc

SEQ ID NO: 473680 - DNA, 122 bp, Homo sapiens
atagagcacattttatattttgacacgttgcgccagcacacagattgcagtttttaaatccgtgtgtgttctgacactcttggaggtcacggctggtctgagtgtatgtgttggcctgggct

SEQ ID NO: 473681 - DNA, 122 bp, Homo sapiens
tcccagagcagctcccctagttctagtgcccccaattccccagcagggtccgggcacatccggcccagcactctccacggtcttgcacccaaactcggcgggcagcggtaccggtccggaag

SEQ ID NO: 473682 - DNA, 122 bp, Homo sapiens
ctttggctcaggatataatctgctgtccatttctaaccccaaatttccagctgccatttccgtaaattcactctctttatcagtgtttctctaaatgtgcatccaaaaacctgcagtggtga

SEQ ID NO: 473683 - DNA, 122 bp, Homo sapiens
aaatatctgcgccttccgaaggagaggagaggatccaccactgggggggtcagagcccagcgttgtctctgcacgtcttctgtatacgctggaaggcggcctgtgctgggtgaacaagtcct

SEQ ID NO: 473684 - DNA, 122 bp, Homo sapiens
agcgcatcccaggccgcgctagcggatacggtcgcaaggtggactcttcttcctttgaggcggggcgaacgcgaacgcggcgttcccattggtggcctgcggcttattcgcccgtccgttga

SEQ ID NO: 473685 - DNA, 122 bp, Homo sapiens
acccgacctccctgcgtgtgtgggcgcacgtcccagtggagcctccagaacccgactccacgtcttccaatacaggcctctctgtggtcaccccagcaactcctgggacagggcctgagtcc

SEQ ID NO: 473686 - DNA, 122 bp, Homo sapiens
ctctctgcatggcctgtgtgggtcggtgctgtccctgaccactgacacacaggttccctccgccgttttccctttcccgcagtacgtccgagtctcccaggacacgccctccagcgtgatct

SEQ ID NO: 473687 - DNA, 122 bp, Homo sapiens
aacccaacccggcgacagcagtcctggcccagaggcagagctcggatggatgagcagtttcggttctggcctctccgtctactcctgcctgaagcatctggacccggcctaaccagctcact

SEQ ID NO: 473688 - DNA, 122 bp, Homo sapiens
tccaggccctggctctgggcctaacaaggaactctatcccaccccttttgggccagctgtcgttccgcccctctcagcgccccctcctggctgggtgggggcccctcttggctgagctcggg

SEQ ID NO: 473689 - DNA, 122 bp, Homo sapiens
ctgaagctgtgggctgggccatcggaaaactttcagttttgtttccttgcctgcaagaaacgaaactcaaccgaaagcctgcagagagcagaacatggaaggagacttctcggtgtgcagga

SEQ ID NO: 473690 - DNA, 122 bp, Homo sapiens
ctgcaatgtggggacaataataggacctacgccatagagttgtggtgaggttgaatgtggcgagcactgtccctggaacatatcaagtcctcagtaagtatgggccaggtgtggtgtctgac

SEQ ID NO: 473691 - DNA, 122 bp, Homo sapiens
cagcagaatagacatttgtgtaaatgaaggataacgatgtaaaatgtgctctcacacaagcggaataagaaagtattttcaaagaatgtgacatctgaacaggattcagaggaatgagtagc

SEQ ID NO: 473692 - DNA, 122 bp, Homo sapiens
aaccctcctcctgctgctcttgggggccctggccctgaccgagacctgggcgggtgagtgcgggatccggagggaaatggcctctgcggggaggaggtaggggcccgcgcactggggcgcag

SEQ ID NO: 473693 - DNA, 122 bp, Homo sapiens
gccggtcctaccattgctgcagggccccagcggggcatccggtgtcctatccagggcctgcggggcctgggagccttgactgcccttcccagccagcagatccatgagggctttcacctgct

SEQ ID NO: 473694 - DNA, 122 bp, Homo sapiens
agttcactgaaaagtcccagactgggaaatctcattctactcctctgtggtgtacctccacgcagcctgcttactcctgtcctagaagatcatgagaaggaaatcatctaggatgtagccaa

SEQ ID NO: 473695 - DNA, 122 bp, Homo sapiens
gagcccgcaggaaacgcgcgcaaagccccagccacccgccacccagttcctcccgggactcgcgcccccgccaccaacttcgcccgcacctgcccaccgcgcggcgcccccgctccccggcg

SEQ ID NO: 473696 - DNA, 122 bp, Homo sapiens
tgcagcaggtgggcccctgcctcctccaagccctccaggtgcagaagccccgtccccaggcgccctctcatgcctttgcctgctcctaggcgctggaggcctgcagcacggagcgggagcgc

SEQ ID NO: 473697 - DNA, 122 bp, Homo sapiens
gccctgcggcatcctgcagatgcgttctgttctctctcacgcgatagacaactatggacgcgggagccggcggccacaacaggggcctctgtctgtgtgtcctttgtcccagcatctgcttt

SEQ ID NO: 473698 - DNA, 122 bp, Homo sapiens
gtgcttgtgaggtgatgcacagatgatttgggccagttcgctgcccaccctttgcccatccgccgcgccactctgtttatggtcaattctagctaatcagcgcacttctgcaacgcctcctt

SEQ ID NO: 473699 - DNA, 122 bp, Homo sapiens
gggatgtggaggtgaggctcgaggtgcggggaccgggttgcgggggcgaggtcccaggtgcgggggatgcaggagccgggtgcggggtcgaggtcccaggtgcgggagatgcaggagccggg

SEQ ID NO: 473700 - DNA, 122 bp, Homo sapiens
caccacgggccagccatggtgtgacactgagccagagagggtgcccgtccctccatccctcggtgtccaggtggcagggagcagcagcacaaggtgcagtgtgtaaactaattttagcttct

SEQ ID NO: 473701 - DNA, 122 bp, Homo sapiens
atgagtccttttgcttgcccagtgccctcctggcatattgatgaggtaggattgggagttcggaacgcctacaaaatgagcaggctaatttcgaacggatgctaatcctgcaaaaccaagag

SEQ ID NO: 473702 - DNA, 122 bp, Homo sapiens
aaaggataagaaagggagtgggactggcgcctacggtggccgaagtgggacgcgccgagccggaggctgcaggatggtaggctgtgcgaagagggaggggagggggaagcgaggggcgtggg

SEQ ID NO: 473703 - DNA, 122 bp, Homo sapiens
acctgccgagcagcgccgaagaaccccctcgcaggtgtcacgaggaagccggctaggacacgaggttcatttcagatgcagagtctcagcacatcaaacaatcgacacgcggcaaccaccgt

SEQ ID NO: 473704 - DNA, 122 bp, Homo sapiens
cggaatgagaaactggacagtaaatgaacgcaagaaccatggtgcccaggcagagaaccccgctgggtttgctacgaaggttgcggtggaggcgcccagtgcaccaggcgccaaggcccggt

SEQ ID NO: 473705 - DNA, 122 bp, Homo sapiens
gacaagccacttatcgacagcaaagctgaaagagcaccctgtaacacgcgcccactggggcgccaggagctgtaagcattcactcttagacactgcggtagggccggagccccacagcctgc

SEQ ID NO: 473706 - DNA, 122 bp, Homo sapiens
aatgttttacagactgtgtagctattaatatttaattcctcccgccccgggaggtcaggccgcagggagcccggcgctgcccacccgactttccacgcgccaggcctgccggccgcagggga

SEQ ID NO: 473707 - DNA, 122 bp, Homo sapiens
gctgagcaggaaggaggccaggttttgcacagcgaggaagtgcctcttctgtacttgggccgggtgcactggcgcgtgaacccctctcggacaccggggggcaggcaccgcgtatcagagga

SEQ ID NO: 473708 - DNA, 122 bp, Homo sapiens
atggaaactcactttgagtccaggccacaagagaataagaacgacagctatcataatagccgtctaacattttatctttacagctggaattagcaggactagagtacaaaaagggtggaaag

SEQ ID NO: 473709 - DNA, 122 bp, Homo sapiens
ctcgggggatcgcgtggcatcaccttccaagtgtgggacgtcggggggcaggagaagctgcgaccactgtggcgctcttatacccgccggacagacggtctagtgtttgtggtggacgctgc

SEQ ID NO: 473710 - DNA, 122 bp, Homo sapiens
tcacttctgcaggatttctttctctgatgcagcactggttggacacacttggcccagggccgagaggggagaggagggcgttacagagacactgagtcatcctgcctcctccacgccctccg

SEQ ID NO: 473711 - DNA, 122 bp, Homo sapiens
ggtgtgggatatagtctcgtggtgtgccgttttttaagctggtctgaaaagcgcaatattcgggtgggagtgacccgattttccaggtgcgtcagtcacccctttctttgactcggaaaggg

SEQ ID NO: 473712 - DNA, 122 bp, Homo sapiens
ctggagctgggggaaaggaaaaccagggcgtctccgcaaaccagcccagagagaggtctgcggaagggcccggaagcctgcaggcccctctgcacccccaaccccaccgccatcctggacct

SEQ ID NO: 473713 - DNA, 122 bp, Homo sapiens
tggggtgaacatccccagcgatattgggagtaatgtcatcctattccccgctggatattgcgaacagtatcacagggggctgtgcatgccccgcgatgttcagagtaatttcctcctgtctc

SEQ ID NO: 473714 - DNA, 122 bp, Homo sapiens
ttgagtcagttttggtttccctgctggggtgcaggagtcagtaaaccttgctgcaaggggcggggaagagcatttgagcttaagttagttttggtttccctgccccggatgcaggagttggt

SEQ ID NO: 473715 - DNA, 122 bp, Homo sapiens
gcagtcacgtcacagaaatcttagcagaacctcatcatcgcccaagggaactgggagtggcgggcggggaggacgcgggttgtgtgacgatcaccgataattagttggtggttaacgcacaa

SEQ ID NO: 473716 - DNA, 122 bp, Homo sapiens
cgtgtgctttgggctcaacgacatggctcggcgggcagccaggtaggggggcctggggcgcgcgccggcaggacgcggcggccgctcgtcgccgccacctcggccgcggcagctgagcctgt

SEQ ID NO: 473717 - DNA, 122 bp, Homo sapiens
gaagccagaggtcagggcggggtctgtgtgaggagatgggcatgggggactggggcagggcgggggcctggtcacctctcgcactgtgtcgtaggccttggccacaccctcccgcaggtcgg

SEQ ID NO: 473718 - DNA, 122 bp, Homo sapiens
tcgctattggctgtggggggtgcctgttgctggacggcacattcggttggtcagcgcagccgcagactccgcccacaatcccgggccgcgctctgggcgcggggtcaagctgtctccgactc

SEQ ID NO: 473719 - DNA, 122 bp, Homo sapiens
gtttgcagcctctgcccgaccgccaccccgtctaggaagtgaggagcgtctctgcctggccgcccattgtctgggaagtgagaagcgcctcttcccggcctcatcccgtctaggaagtgagg

SEQ ID NO: 473720 - DNA, 122 bp, Homo sapiens
ggagacagtggctcggaggggcgcaggcttgtaccttggcgcgctgggttctcaactccgcgattccatgctctgaggccgttcctagagtggtctggcgttcaggtctcgttgtagtgttt

SEQ ID NO: 473721 - DNA, 122 bp, Homo sapiens
aaacacactggggagaatgcaattgggattgaaaggcagaagactggcagagccagaggccgtggaccagctgctggtggtctgggccccacagagctgcagcccttttggaactcttcaga

SEQ ID NO: 473722 - DNA, 122 bp, Homo sapiens
gtaacaccttgactgacacaatctctgccaacttcatggaattatagctggaatacattccgtggaccccagaggagcatgaccacaagcagcacagccagaccttcctgaagtagtaatcc

SEQ ID NO: 473723 - DNA, 122 bp, Homo sapiens
cgggtaccactcctaatccttccgtcctatccattagcacatttgaacgtcatactcttacgcaaatctcaagttattatttccgttttggaaacagaagaactgaggttcagagcttaaac

SEQ ID NO: 473724 - DNA, 122 bp, Homo sapiens
acagagaatgctgattcactatgcagtgaaacatgcctaacgtgtcaacagctaaatgcccggtgacagtgtggttgtctgggcaacagaagaagtcacccacgcaaacacttaaaggtgag

SEQ ID NO: 473725 - DNA, 122 bp, Homo sapiens
gataaaaagaaaaaaacacttgctcttctaccccgctaaaaacactcatcctagggagcacgccagcatttgcagcgttcggggcagggccactcggcctgcggccgttgcactggctggaa

SEQ ID NO: 473726 - DNA, 122 bp, Homo sapiens
gaaggtttattaaagtcaggagcttcgaggggcaaactctgagttaagcttgtggggaatcgacgtgagccttgctgggaattcagaacatcaaggtctggccttgtctggaattgtctggt

SEQ ID NO: 473727 - DNA, 122 bp, Homo sapiens
gtcaagcttcttctgaatggctagacagccgccaggtgggagaggcggagggtgaagaggcgggttccgcacgcggttagcctggggctgatctagtcttcagctttcaccggctgggagtc

SEQ ID NO: 473728 - DNA, 122 bp, Homo sapiens
agcccgcggggtcgtgaccttcaccggactacctgctaaggaccgagctccccggacccccgagtccgccccacggctcccccttgcactggcgcagggctctcccagccccttccagatcc

SEQ ID NO: 473729 - DNA, 122 bp, Homo sapiens
caaaagaccctgtactccttagatctcaagcttcgggaaccacagcagatgaatcagaaccgcacaaacactggtttaaattaagttgttgacttcattgtgtagaaaatatttccactaat

SEQ ID NO: 473730 - DNA, 122 bp, Homo sapiens
gaagatgacgtggctgtagttgctgttggtgggtagccaggagagctgggcggagatctgcgtgatgttgtccacccgcaggtgggagggggccaccaccacgtccttgcccaccagcagcg

SEQ ID NO: 473731 - DNA, 122 bp, Homo sapiens
ttgagcttcagctcccagtgcccagtctgactcagagcttcagaattttgtcctgcagtgcgatgagtcatggtgatgaaatttcaagagaaaaggacatttttaaaattagctgtaagata

SEQ ID NO: 473732 - DNA, 122 bp, Homo sapiens
ctgctcgagagctcacacggaggagctccgtaatctgcagcagtgggcgtctaggttccacgctggacctgccctccctcaccaggcccccttgccaagacccgcagccgggcacctcctct

SEQ ID NO: 473733 - DNA, 122 bp, Homo sapiens
gcggagcctgggtcagcctgggcccgggtccgcttgcagcgggtggagtacttgcggagccggcaatccaggctcccctcccagcccccgcgcagaattagcctctctgtgccgccgggaaa

SEQ ID NO: 473734 - DNA, 122 bp, Homo sapiens
cgccactgcactccagcctgggcgacggaacgagactccgtctcaaaaaaaaatcccccacgctgttgtccttactagtttactttgtgctagacacttttgcatgtatatgcatacaactt

SEQ ID NO: 473735 - DNA, 122 bp, Homo sapiens
agcctgcgggagggagcaggctgggcgcgtggtggggggcgcgcgatgcggagggggcggcggcgcagccaatccgagaggcggccggcgccccctcataccgccccgcggcctcgccgcct

SEQ ID NO: 473736 - DNA, 122 bp, Homo sapiens
tttcttgcttgtacttttggaaccacagaatgctttctcttggctgcaatggcttatgatcgctatgtagccatctacaaccctctcctgtattcagtgagcatgtcacccagagtctatgt

SEQ ID NO: 473737 - DNA, 122 bp, Homo sapiens
cgacggcgccagtgggcgcggctgtcccttcaccgctgaggcctggacggacgccgcaggcggccacctccgtgcagctgacgtccatgtcccgctggccttcggccaggccctccagcctc

SEQ ID NO: 473738 - DNA, 122 bp, Homo sapiens
gcgaaatgccgcgtccaagctctccgcgcatggaatggctgggagaggtctgatggtgggcgccgggaccgccctcagcgaggcgcctagactgcgcggagaggagcggcaccgtcccggct

SEQ ID NO: 473739 - DNA, 122 bp, Homo sapiens
gcacatgtggctgtcctgctgcacagtgcagcgagagcattcttatgcaagggtgatcttcggagccctttgtgctacgtgaagtcctccttaaatgcaacgtgaaaatccttgtccttcaa

SEQ ID NO: 473740 - DNA, 122 bp, Homo sapiens
ctgccctgaagctcatgaggtacattccctcaaggggtcttaacctctctgcctctggagcggaagcacttctcttgctgggagcatctcaccacgtggagcctaattacagtattgaaaga

SEQ ID NO: 473741 - DNA, 122 bp, Homo sapiens
tgtccagggagggagagagcatgatattacgttgaatatcgcagtaggtgtacaaccagccggtgatattgatccgaatataatctccagggggtggagaatgacgttactcccaatatagc

SEQ ID NO: 473742 - DNA, 122 bp, Homo sapiens
cgcggagggcttagagggccctttgtgagcccggccgggcggctccccccgccggccggccgtgatgaaagcaccgtgaaatatacagtggcaggacgccccttgaccctgacaggcctctt

SEQ ID NO: 473743 - DNA, 122 bp, Homo sapiens
ctccagcgcgccttgtccttcccagagcgtccatctctttgcttatgttaccatctgctccggtgcgctgcctccgttttctagtagcgcctttagcatattgatcatcataattttccttt

SEQ ID NO: 473744 - DNA, 122 bp, Homo sapiens
gagcccgcctgcctcatgcctaagtgtgcgtcattctgccttgtggtttctcgtgtggctcgaggccagcatcttgtagttgagctctctttatcctatagtgggggggccctcctgggtct

SEQ ID NO: 473745 - DNA, 122 bp, Homo sapiens
gtgggccagacaaaccagacatggtgctggagactcgttcaccaccgaaggcctcaaccgcgccggaaccggggggacccacgtgactcacctctgaccttctgatgccgtccgcgccattt

SEQ ID NO: 473746 - DNA, 122 bp, Homo sapiens
cgctgtgccccaacaacccctagagaacccaggtactggactttctcggggcgctcctctcgtgagtccccacttctaaccagggtggctcttagctcagtgttctagccctgtccccaggt

SEQ ID NO: 473747 - DNA, 122 bp, Homo sapiens
acccccgaccctggtgctctccctgcaggccttgctggcggtgaagtcggtgccggtggacgaggaccccgagacagaggtccccacacaccctgaggatggcacccctcagccgggcaaca

SEQ ID NO: 473748 - DNA, 122 bp, Homo sapiens
tgagaaccgtcgcgcgcaagtccttctccgccctcctcccccggaaaccgaacgcgcactcggagttccgcaggacaggtctgttccggacccagcactcagactgctcgcctccaccgggg

SEQ ID NO: 473749 - DNA, 122 bp, Homo sapiens
gctcgggggtacggaaggcagaatcgtacctgattgggacaggtgaccttaccaggaaaacggacaatcttccgccaaacgaactttaccccggaggacccaggcagggcacctcgggagcc

SEQ ID NO: 473750 - DNA, 122 bp, Homo sapiens
cggaggcagagccaagtgaaggtctgctccctgcagggctctgtcactgcccaggcagcccgtgactcctgatggtcccaggggcagccccaccctccctggctggagcccatctctgggaa

SEQ ID NO: 473751 - DNA, 122 bp, Homo sapiens
aacaataatcattatgtaagtgatcatttcgtcagcctttgctctatgccaggcacgggacgagcgttcttacaagagctgcaaaattagttttagcagtattgttcctgttttacatatga

SEQ ID NO: 473752 - DNA, 122 bp, Homo sapiens
aatggattaattagccatggaccaaacccttcatccagataaggggtaacggacagggaccgcaaaaggagtacttaaaacccggaaaactttgtaactgagccccttcagcctcttgctca

SEQ ID NO: 473753 - DNA, 122 bp, Homo sapiens
aggcccgagctccggagcagactgttagagctcaaattccagctccattacttactgctgcgtgaccttagactgagtaatttaacctctctgtgctttgggagcattcctcgtgaatttgt

SEQ ID NO: 473754 - DNA, 122 bp, Homo sapiens
gtcccactggtcctgaggggccaaggggcaacattgggcctttgggcccaactggtttaccgggccccatgggccctattggaaagcctggtcccaaaggagaagctggacccacggggccc

SEQ ID NO: 473755 - DNA, 122 bp, Homo sapiens
ggcaagtatgaaccactttgaggttttcttcccactcccaattctcaattcctatgggtgcggtatcatctaagagaataagcattcttgaatattctggacatgtggcatggccttctgta

SEQ ID NO: 473756 - DNA, 122 bp, Homo sapiens
acgacaacatagcatcactgaggtttaatgacggcgatagtggagaaaaactggtgtccgcgatgatttcagcagaaggagaagtcatggagtttcggaagatcttgcgggctgaagggcgc

SEQ ID NO: 473757 - DNA, 122 bp, Homo sapiens
tccaccctgcgcaccgccttccgccattacctcctctgccgctgcctccgccgctgccgccgcctggctaggctccgcaggcccctggttttccgagtcggccatgttagaggagaagccgc

SEQ ID NO: 473758 - DNA, 122 bp, Homo sapiens
gccgggcggagggagagcgggagatcgggcggttgccaagagactggcggctctgacgcgcgcgggatgaggccgttgccctggcgaccgcgggccggtgacgtcaggggcgcccgccgccc

SEQ ID NO: 473759 - DNA, 122 bp, Homo sapiens
ccggacctgcagcccgccacgcctgagcctcccaccccctccatgggctcctgtgcagcccgagtctcctcgacgagggccaccccctgctccacggcacccagtcccatcgaccacccaag

SEQ ID NO: 473760 - DNA, 122 bp, Homo sapiens
cagccctgtttccactcacattttctgttatcacggcggggggtggcagcaccgagagcgcgttcagcattactggcctctgctttgcccctcagacacatgcttggtcactgggctgtgga

SEQ ID NO: 473761 - DNA, 122 bp, Homo sapiens
cttacaggttcagaggttgagctattcctgccccttaccctactcttctttcctgggttgcgggaaagaggagggcagtgacagggccaggctccagggatatcacaccccagtcccagcag

SEQ ID NO: 473762 - DNA, 122 bp, Homo sapiens
ctcagtccgtggtggggataaagggtactgaggtctaaggactgcagggtccagagaaaacgaagcatggagaagaagctgggaggatgctgaaggagccagtatcctctgtcaggacttgg

SEQ ID NO: 473763 - DNA, 122 bp, Homo sapiens
ccaagaagagtaagcatggaatgttatcaggtggattttcctgacttgatgaagaaggcacgagtaattgataatagcaactaccagacttgcatgccaggctctgtgccgaattgttggcc

SEQ ID NO: 473764 - DNA, 122 bp, Homo sapiens
ctgaacacacctccctttaggacccaggggaaataatttgtcccacgcccataccctgggcgagttcctggtttctgaggtgggagagccatcactggagaggtggcattggcgccagtact

SEQ ID NO: 473765 - DNA, 122 bp, Homo sapiens
cgggctccagctcttagaccccctctttccactggccagagatgatttgatgatgcccttcgggacttactggcgagggacttaggcagagacgcccagacacgaaacggggctcggcccag

SEQ ID NO: 473766 - DNA, 122 bp, Homo sapiens
tcgtgaggtgaagattttgattttgctgtagtaatctgttgcactcctcgttctgaaggccgatgcacttgaatattccacataccttttcctttgaattttcaagatcgataatggtatta

SEQ ID NO: 473767 - DNA, 122 bp, Homo sapiens
tttcctgcagttcctgggacacacctagacggctcaggcctagggatcttggctcacatgcgctcctctacctgggaaccgcgcttccttaggaagtcaccgtgggtcccctcttcctagga

SEQ ID NO: 473768 - DNA, 122 bp, Homo sapiens
aataaccgttccccatgcgcagtggtcaggctgggcgctggctggggccccagagagcagcgtggtttaacttgtcagtcaggcatgcagctgacgtccaccctacgaaagttaagtgtttt

SEQ ID NO: 473769 - DNA, 122 bp, Homo sapiens
tgggagcgcagacaatcgcagcagctaacaagcggggagactacgaaccccccctcccttcgccccctggaactgctcaatatcttgatggtggttccacggctctatgcatttgtcaaaac

SEQ ID NO: 473770 - DNA, 122 bp, Homo sapiens
tcccctagtccgccccggcgtccccttctcccctgcgtccccttctcccctgcgtcccctcgctccctcccagaatccccatggcccagggatccccccgatcctgggcctcctcctgggca

SEQ ID NO: 473771 - DNA, 122 bp, Homo sapiens
gggatgtggcagtgaaaagccagcggagactccttttaggattctttatcattgaggaggcgccgactcataccacgctgttaggctgtgtggtggttgccaagaggaaccagactcagatc

SEQ ID NO: 473772 - DNA, 122 bp, Homo sapiens
gtcacggctaaggccgcagttcccccaccgtgcctgggtttggatcctggctgctccggtcgcctgctgtgggtccttgcacacattaacctctgaacaccagtggccgtatctgaaatagc

SEQ ID NO: 473773 - DNA, 122 bp, Homo sapiens
tctgcactgatggtgggtggatgagtaatgcatccaggaagcctggaggcctgtggtttccgcacccgctgccacccccgcccctagcgtggacatttatcctctagcgctcaggccctgcc

SEQ ID NO: 473774 - DNA, 122 bp, Homo sapiens
agcattacctggtccccgccagtgtgccagctccgagcggcaggcgcagcccacgctgggcgaccagctgtctgcgaatgtggcgtgtggatcacagctcagagccaggggatctcttagga

SEQ ID NO: 473775 - DNA, 122 bp, Homo sapiens
caggcgatcagcacagggctggaatcatctgttcctgaccaccagcaagcctggcactgccggggttatttccactcctccctttcccaatccgagaattgcacagtcccacgctcgaatta

SEQ ID NO: 473776 - DNA, 122 bp, Homo sapiens
ggagacgtaggagtgggtcttcagactccaaaggggttggactaatggcggatgctgaggcgagggctgagttcccggaggaggccagacctgacaggggcaccttgcaggtgttgcaagat

SEQ ID NO: 473777 - DNA, 122 bp, Homo sapiens
gtcctcgggcatccctgtgccccgtgctgtacattcagttatcctccaacttcctggtgtcgatgttattacctgctgggttttagaagctattgctttaaatctgagaaaagaaaaatccc

SEQ ID NO: 473778 - DNA, 122 bp, Homo sapiens
agcccgggagacgtcccgaacgttagtaagcataatgacaggtggcgcctgcgggggagccggtttataaatattcacgagcagaccagactgtcccgccctcaccggaaacaagttggctc

SEQ ID NO: 473779 - DNA, 122 bp, Homo sapiens
ccgcagggctgccctgtgtggagacgctgagctgtgtcgctttcttccctccaggctggacggcagtctggaaacgaccaatgagatcttggactctgcctctcacgactgccccttagtca

SEQ ID NO: 473780 - DNA, 122 bp, Homo sapiens
gaccaccatctgcacaggaaaagtcagggagaagaagagtgggtacccaagcgaagccagcggccccctctgctgcagctcacggagcacctccagggctgctgtcccggccactcccacac

SEQ ID NO: 473781 - DNA, 122 bp, Homo sapiens
gttcacaaagaaattgaaaattacgactgtaattttgatatgtgctttgaagcaaagaaacgaggtacatgctgtctcaagggagacctgtctctcactacgaagtccctgtctctgcctat

SEQ ID NO: 473782 - DNA, 122 bp, Homo sapiens
attcaccacccccctgcctcctcacccaccattctcacactccctcatccgtagcccaggcggcaaaaacccatttcaggaagtggagtgagttgctagctaaacttcgggcaaactttgta

SEQ ID NO: 473783 - DNA, 122 bp, Homo sapiens
tcactaccagcagcaccaccagcacaagagaaggcaggcggcgagccggccggttggccccgaaacccaccatgaggccaaatcgggctgtaccctagaggcctcgccgcagacacctgcag

SEQ ID NO: 473784 - DNA, 122 bp, Homo sapiens
cgggaggaatcgtgccaccctttgctcccgggatttatcggcatgacagtgggggtggtgcgtgaggagaaggcgaagaagagataacgggctcctggcaccatcctatgaacgtggtaatg

SEQ ID NO: 473785 - DNA, 122 bp, Homo sapiens
actagcaaagaggaaaaaaaatagagctctggaaaaatagcgtaaacagtcacaaggaagcgaccctgtattgtgcctgacctctggacaggtatataaagagcccgggctcagggggctcc

SEQ ID NO: 473786 - DNA, 122 bp, Homo sapiens
tctgaaaatgacaactgttatttatttattgagaatatttatacaggttcttcctgggcacggagaatgcatttttcagcagcaccatgacaccggctgtcacgtgctgtcttccgttggag

SEQ ID NO: 473787 - DNA, 122 bp, Homo sapiens
cctcccccgagtaggcggagccacgtgccgacgggcgggcacttcggcctatcgcagctgcggactgacctggcctagttaggagcccaatgagaggcggcaattccgtagtggaggcgggc

SEQ ID NO: 473788 - DNA, 122 bp, Homo sapiens
ccagccgctgcagtctgggccctgcaggagctgggaaaaaccgcagggaggtcttcaggccgatatgcaagtctcccagccgaaggggcaggggacctgaacaggggaagcagagcacctgg

SEQ ID NO: 473789 - DNA, 122 bp, Homo sapiens
tcctcaacctgaaccgtttaatatattattggtctattcaaatgactaaccgtcattggtcgttcccagccctggcggaaaaagagggaggggcggggaagaagacccagccccgaggcctg

SEQ ID NO: 473790 - DNA, 122 bp, Homo sapiens
gcgggctgtaggggtgtagggttggggcactctctgatcgtccgaacggggtgtctgcgccgtcggtggccgccttccggggggaccctcggctgccgaagggctcagggatcgagctggag

SEQ ID NO: 473791 - DNA, 122 bp, Homo sapiens
ctgatgatttggatgtgtgtttgtacacagtgaaggttgtgagtccaattgcaatcgtatcggcgtggactgcatgtttaaaggcttaagggaatctgtctttgccttttgctcccgggtta

SEQ ID NO: 473792 - DNA, 122 bp, Homo sapiens
gtagccactgaacccggacctgacaggcagtttgggaccaagtcccgcgactgtattacccgagtgccggcccctttgactggataccataggggatccctctcaaagtggacagcggggga

SEQ ID NO: 473793 - DNA, 122 bp, Homo sapiens
tcgttctttggcctggtctgatgtggctcacaatgcagtgtcactatctaaaacacttgccgaactgtgacaaattcattcactcattcaaccattcaactaatatttatttacagcccaaa

SEQ ID NO: 473794 - DNA, 122 bp, Homo sapiens
tgattagctcgcaaaggcgccgtgggggcggggcagcaggtcgttctgccaatggagagccgtagagggcgtgagtggcggccgacggggcggagtcgcgcggtggtctccgaaggctcaga

SEQ ID NO: 473795 - DNA, 122 bp, Homo sapiens
gccacggctgggctagatgcagtactctctgctctgtccagttcagataccgggaggcgtcgcctggagccccttccagctgggtccccgctggaggccccggcaggcgatgcggaggcagc

SEQ ID NO: 473796 - DNA, 122 bp, Homo sapiens
ggcagtgctgtggcctaagggcctgggcaggtgcagtgaggctgtccaatgtggagcccacgggaggtcgcttgtgtgctgctcactgctggccggtgaacaagaaaaccaatggtactacc

SEQ ID NO: 473797 - DNA, 122 bp, Homo sapiens
gaggtggcctggaagggcgggttgcaccgtgtgtctgtgtgtgtgtgcgcgtgcccacgacgcatttggtctcgtgcaagggcctgttggatgcagctctcctcaatcacccaggacagagg

SEQ ID NO: 473798 - DNA, 122 bp, Homo sapiens
cacaaaaatctaagccattatctctggagtattgtctctgtcccactctccctcttctctcgtctggtacttcaatcaaatgaaagcatctagaggtttcaatcaaatgaaagcatcttgag

SEQ ID NO: 473799 - DNA, 122 bp, Homo sapiens
gggaaaatcataaaagggtgcttagggcactggcccaaaaagggtacttaaggatttctccgcccagatgccaaagccctaaggtcagccccaaatgacctgtgttctgctttatacgtcta

SEQ ID NO: 473800 - DNA, 122 bp, Homo sapiens
gcaagaatgtgggaatattttagcattagaatcagctaatcttctacttgaattagacaacggcattttccattaagtggtagatggattaaatggaatccttggcctgagggcttcttcaa

SEQ ID NO: 473801 - DNA, 122 bp, Homo sapiens
aacgggagcgcaggatcatcacagcctcgcaggtgctctgcttcagctgcatctggatggcgctgaactttcgatggatgatgctcaccatgcgttccatctctttgggggccacgggcctg

SEQ ID NO: 473802 - DNA, 122 bp, Homo sapiens
tgctcgaggggcgggcagtcgacctttattgtctggggagcacctggcaggtggcgggcccgtgccctaacgtgtgcgtggtgcccagcttcacaaagcgagcgggcagcacctccttggtc

SEQ ID NO: 473803 - DNA, 122 bp, Homo sapiens
cccagcgtgttgatgcacttgcccgcatgctcgcaggggttggcacctggcgagggcacacgggtgagaggctgctccaggcaccctggcccctgcaacacctcactgcacaccacccccat

SEQ ID NO: 473804 - DNA, 122 bp, Homo sapiens
ctgcagattttgtttctcccccaaatcagccactgctggagctgtcccttcagcaccactcgccatcaacctcccgccgccatccgaagcacagggctcaggaaagagtgggtgggtgggtc

SEQ ID NO: 473805 - DNA, 122 bp, Homo sapiens
tgccgagcctacactgcggcggccgcggcggcggcggcagcgcgacaagttgccatggcccggctgccgcagctgccctcccaagggtctcgttagctctgcttggccggccaccgccgact

SEQ ID NO: 473806 - DNA, 122 bp, Homo sapiens
ctggcctgcccgccttcctagcggccccgggcaccacgtcctgccccgagtgcggcaaaacgtccctgaaaccagctcacctgctgcgccaccggcagagccactcgggcgagaagccgcac

SEQ ID NO: 473807 - DNA, 122 bp, Homo sapiens
accaggaggaggcagcatggcctcgtttccacagctgtagcctctgccctcctgcttccacgctccacacacgccagtctttgagtcgcctcccatgccatgatccctcccttggatacgac

SEQ ID NO: 473808 - DNA, 122 bp, Homo sapiens
ttcccttctgacaaggcaaatggaataaacaaagagaaactgcctgcaggcattggaatgcggtgtctcccatatgtgaggattaaattataaattatgtcacacacaaggagatgagctac

SEQ ID NO: 473809 - DNA, 122 bp, Homo sapiens
cttacccctgcctgagtctgtggatcctcacctagatgtggggcccatagatctgcccagcgcatttgctgcctcatgttcccaggcacctgactgtaggccatagcctcaccctgcacagg

SEQ ID NO: 473810 - DNA, 122 bp, Homo sapiens
cccctacagaaggaaaatcttccctgctcactccaccagccctggttcatgtcatcagtgcgtgtgaaagggctttatatcctgcgaaacacaacaatgctaattttaattgctattgaaat

SEQ ID NO: 473811 - DNA, 122 bp, Homo sapiens
cctgtgatcaggcccagtgggactgaggagcaaatgtggacagtcttccccggcacacatcggctgacctgcatgcccagactgtctcctggggcgcctgtacaagttggtcctagaatcca

SEQ ID NO: 473812 - DNA, 122 bp, Homo sapiens
cagagaactcagggctggccaccctaggaggagacacggcgtcctgtgccgtgtgctaggcgtcgcgctcatggcagggatacacagacagcccccaaggttattcaacccaggcttccagt

SEQ ID NO: 473813 - DNA, 122 bp, Homo sapiens
tgaagcacccccttgaagaccggggtgcaggaggcaagactggtcaggaaccaggagacccgagttctggtccttgcccggtaactaaacgaccatgaggcctagggcaagttactcctgct

SEQ ID NO: 473814 - DNA, 122 bp, Homo sapiens
tcagaaacagctgcctctgacatgctgaaatttacctttttatcctaacatttcaactgccgtttttaattttcaaaataaactgtgaggtttgatattgttcagagttcacacaacaagtc

SEQ ID NO: 473815 - DNA, 122 bp, Homo sapiens
ttggaacatccctgccaagcagggcttgtcctcagtgatgagtggaggaactcaagactccgagaagattcctttgaagttgttgtcatgtaacagcggctgaccccactgacagtgctcac

SEQ ID NO: 473816 - DNA, 122 bp, Homo sapiens
agctgggccacctgggcgggtctcgggcgcctccactgcgcacctgtgaactgggacgggcgctccttgagcaggcgtggcgctgctgtgcagctgctgtgtgtcccactgcccctggggac

SEQ ID NO: 473817 - DNA, 122 bp, Homo sapiens
agagtgggactgttaccaggtgattaggccacgagggctctactctcatcaatgagttaacgtcattgttgcgggagtgggtttgttattgcaagagtaggttgttataagagtgagttcag

SEQ ID NO: 473818 - DNA, 122 bp, Homo sapiens
gatgagctccgtgagcctgatggggggccggggcggggtgcccctctacgaccggaaccacgtcacaggggcctcgtccagcagctcgtccagcacgaaggccacgctgtacccgccggtga

SEQ ID NO: 473819 - DNA, 122 bp, Homo sapiens
aacaggtgcaggtcagggaagaagctgagttcccaagaccctttcctgccatctgctggtcgtctgccacaagccccctgcaaattggccaacatgacgtgtcacgtaagtggagcccatgc

SEQ ID NO: 473820 - DNA, 122 bp, Homo sapiens
gcacccgtttgatccaggttttcagctcctcagtagtgacaaagccatacccatcattgtcgattcgatcaacaatcttccctagcctctccttgctctcgtccggggtgagctcgtcgaag

SEQ ID NO: 473821 - DNA, 122 bp, Homo sapiens
cgtagttccggggcatggcatctagatattttttgaatattcatgttgttcacatagttacgtgttttgttaatgaggttatgagaccacatatatattccatatcatcgtgtgttacttta

SEQ ID NO: 473822 - DNA, 122 bp, Homo sapiens
ttcgtccacgaacttgttctcgtcatattcatccacgtccaccttccggaagcgggccgacgacactgtgttcttcgacatcccaatcccgaccagcggcaaaggcctcttcttggcgctgc

SEQ ID NO: 473823 - DNA, 122 bp, Homo sapiens
agcccctcccttcgagggaacctgagaggctcagggcctgaggcgccaggagaggctcctcgccctctgtccagctgctggggatggcatgagagggccttgctgccctctgacctggacat

SEQ ID NO: 473824 - DNA, 122 bp, Homo sapiens
gctcactctcagtcctgccttgcgcacattcccacgcccgggcctctcctgcccgcccctcgttgttcacttgctcattacgcctcacacctggctctgccgcgggcttggagcgggtgtct

SEQ ID NO: 473825 - DNA, 122 bp, Homo sapiens
ggccagaagaccaattcttggctggtctctaagcaaacaaagggagcagcaccttgtcagcggatgtgatttttgtgacatctgttccgcagcccccatcaattcacacccagcgtctgcgt

SEQ ID NO: 473826 - DNA, 122 bp, Homo sapiens
accttcactttttttttttcatgagaacgcaacggtagaaacacacaatttcttttatgtcgagtccaaagcatacgagctttattttgaagtagcagaaggaggaaaaaaaatacattact

SEQ ID NO: 473827 - DNA, 122 bp, Homo sapiens
cccccaggcctagctaagcaaccaaacagggccaattgcactaagtgcccaccaaggccacgggaaatgcagccaacctaaagatgaagtggaagcttaaattcgaagagtgggccaggtgc

SEQ ID NO: 473828 - DNA, 122 bp, Homo sapiens
agcttccgggtcatcttagcacgccccctcccggtggcccttggccggagccctccggcgcgggagtaactcctcgcagaggcctctgggagttgtagtttttttgcctttgcctctccatg

SEQ ID NO: 473829 - DNA, 122 bp, Homo sapiens
ggtgagggtagggctttgggctcctcggtccagaagagctgcaaggcagagcgttcaaatcgtggctggccctgggctgccgccctcacgctgcttcggctgcttctaagatcccattggaa

SEQ ID NO: 473830 - DNA, 122 bp, Homo sapiens
tgtggcggctctaggctcttataataaactcaagctctccttggtcgctgctcactgtcccggtccccgcctgctccctgtgttccttgttgccatgcctcagaaaattgaggaaatcaagg

SEQ ID NO: 473831 - DNA, 122 bp, Homo sapiens
cccagcctcagcctcctagagtgctgggattacaggcgtgagtcaccgcacccaatcccacgtctgtcttttaatcaaggcatgctctgccttcaagtacaccctccatgatgtctgccaga

SEQ ID NO: 473832 - DNA, 122 bp, Homo sapiens
aaaaatgatcaaaagcacccccgaagcccagtaaatttctggagtagaatgataatcagccgttaaggctgctttaagttcaattcatgaggatgatagtttctaacacttattattactgc

SEQ ID NO: 473833 - DNA, 122 bp, Homo sapiens
attcccggcagagacccacccccgcccccccaagcctgaccccgtgaaaagcgtgtccagcgtgctcagcagcctgacgcccgccaaggtggcccccgtcatcaacaacggctcccccacca

SEQ ID NO: 473834 - DNA, 122 bp, Homo sapiens
ttattccagtattgtaattacttgtttccaggagtcccggatctaaaacatgcccatgaccgcaaaatgcaactttaaattacaataattcatagagcattcttaataaaatgattttggag

SEQ ID NO: 473835 - DNA, 122 bp, Homo sapiens
gcagccatagggtttctcgccggtgtggacgcgcaggtgcgaagtcagcgccgagcgctgcgtgaaggcccggccacactccagacagcggtggggccgctccccacgatggatggcccggt

SEQ ID NO: 473836 - DNA, 122 bp, Homo sapiens
ggccttctgtcctggaagggccagtctcctgggcagagcgctatgcataagaaggaaagccgtgttactcaatggttctactgaaccactaagcaacaggggctctgggggcactgtggaga

SEQ ID NO: 473837 - DNA, 122 bp, Homo sapiens
cttcaatgatgatctcacggagttgtaggcaaggagatgtacactcgtgtagactcaagacgtatttcgagtttggctttttctgtgccttgaggaaaagtggtggggccgaggggtgcctg

SEQ ID NO: 473838 - DNA, 122 bp, Homo sapiens
agcgcaggcagcaggcagcagggctgtgcgggaggtggtctggggacagtgctgccattccgtttattccgggggtctgctctgggaaggctttccaggagcgagccgatactgagccgata

SEQ ID NO: 473839 - DNA, 122 bp, Homo sapiens
aaacaatgatgcttccctaccttcctcacgaggttactctgaggagctaatgagattgtgcgtatgaaaacaaaagttaattgactgtcttcattatgatctccatattggacaaatgaact

SEQ ID NO: 473840 - DNA, 122 bp, Homo sapiens
gaatggcttccacccacctccccactttgctctgatcccttcactgccagccctactccccggaagaggaaagagaaaggcaccacactcaacgctctatcaagaaggcactcagcagcccc

SEQ ID NO: 473841 - DNA, 122 bp, Homo sapiens
cctccggaagatgaaggcactgtagttatgcgggtggaccctatcagatctcgggtccatcgggtcctgtgtacaccttgagggacgcccacccaacgcgcatgcgcagcctcaatgctggg

SEQ ID NO: 473842 - DNA, 122 bp, Homo sapiens
ttcttggctgtttccacgtcggacttcgcgaccaggaaccgcatcttcttcccgccatgacggatcaggtccacagctctgaaatccatgccagaggtgggggtgggcaggagggcaccagg

SEQ ID NO: 473843 - DNA, 122 bp, Homo sapiens
agcgcagagagagctggctaggtagagctccagctctggcttctgagattcaagcagctgcggtcgctgcgggcagtggctgctccgagctccgggcccagaaggccgctccaccgctagcg

SEQ ID NO: 473844 - DNA, 122 bp, Homo sapiens
ccctctcctgggagggctcaagggtgttggccgtgggggcttcacactgcaccccgatttcgagggaagcccctgcccatggcttccggggccttccggaggggccaaggggctggtgccat

SEQ ID NO: 473845 - DNA, 122 bp, Homo sapiens
catgcgctgcagcctggcagagtcctaatgagaagaatcgggaaggtgagctgaggcccacgtgtgatgggggagggaagatgcagcctgtccaaggacacactgacccactgcccaccact

SEQ ID NO: 473846 - DNA, 122 bp, Homo sapiens
cctcagcctcccaaagtgctgggattacaggcgtgagccaccgcgcccggccttacctcacgctttttaatggctgcgtggcattccagcctatggatgtaccataatgtaattagcccttc

SEQ ID NO: 473847 - DNA, 122 bp, Homo sapiens
tagccatgtgtattattgtacagatctctagaacttcttcatcttacgtgactgaaacgccgtatcctcaattctccatttccccattcccgcatcattcattctactttctgttcctttca

SEQ ID NO: 473848 - DNA, 122 bp, Homo sapiens
cgaaggcttgcgggtggttaggccgccatgtcttctgtttcacattcttattcctgtacccgaacgtggaaaccccttcaccacgcacctcaaaaccaccaggccgccacttcgccgcccgc

SEQ ID NO: 473849 - DNA, 122 bp, Homo sapiens
acctgcctagatcagactgttagtttagggttctaaccgccagagttcaaaccatacttccgcagttctcaaacttaattgtaggacagggatttctggaacagtgtttttatttattttta

SEQ ID NO: 473850 - DNA, 122 bp, Homo sapiens
tctttgtctgacaagagagtcgtgaagcctccgcggtcctagaggggccgctggctgggacgcttcgctcggcgcgcgcaggtggagccagcgagaggctctgaggctgccagagtggttgt

SEQ ID NO: 473851 - DNA, 122 bp, Homo sapiens
ccttgtgaagctccggcgtcttgtgtgtttcatctcctaggaaacggcgggggcagcaggcgggcctacggccggcccagagagggcgtggcctcgcgggaaatccccgccaattcccgcag

SEQ ID NO: 473852 - DNA, 122 bp, Homo sapiens
ccccggctccaggccctcgtgtgagtctcggcacccgctcccttcccccaacccccgcgccgttcttctgttctgctgcccggttgctctttgggacctcagggatctagctccggaaagcc

SEQ ID NO: 473853 - DNA, 122 bp, Homo sapiens
cttgtatgaaattcccccttctctaacatcatatgtccagacagggcagagtttcatctgcgagtcctatcaccttgtggccacctgttgctggcgtctccacttccctctgatgggctcct

SEQ ID NO: 473854 - DNA, 122 bp, Homo sapiens
tatccccgcctgcagcctccagcggcccgtgcaccacgtggtgccccccagtaccgtgaccgaggactacctgagaagcttccggccctaccacaccaccgacgacctccgcatgtcctcac

SEQ ID NO: 473855 - DNA, 122 bp, Homo sapiens
tgggtatggacatctggtcgaagcagctcctgttatcaactgaccctacacagctattttcgcaaaaaaaacaaaaaaacaaaaaaacaaaacaaaacaaaacaaaaaaccaaccagcgcca

SEQ ID NO: 473856 - DNA, 122 bp, Homo sapiens
caaaaggtacctgagccctctcccttctcctcccttggatgggtccctggggcagagggacgcaggtgtctagaggcagtaaagggctcaggccctgggacaggagggatcagcagaggaac

SEQ ID NO: 473857 - DNA, 122 bp, Homo sapiens
ctcccttcaggggtctggacatcatctctgggcctgggcacaccctgggacagtcagatgcggcggcttccatgcgcctccctccctcaggcctcacccccttcattctctcactctaaaac

SEQ ID NO: 473858 - DNA, 122 bp, Homo sapiens
acgggcggcgttcgggactgggaagctacttgactgccacgtgctcctgcctcgcaacagcggctctagattccgagttatggggacaactgctcgagaggccagggtagggtaaggactcc

SEQ ID NO: 473859 - DNA, 122 bp, Homo sapiens
tttacacggttttccaacatccagctacgactggtacaaggtaatgaagtcagacttctacgtcctactatgtcttaaaaaatctcggccgggcgcgggggctcaaatcctagcactttggg

SEQ ID NO: 473860 - DNA, 122 bp, Homo sapiens
actgctctgattttccttaggcattcccactgcctaggaggcaggggataagataacaaacgtccaactagtttataaacttgagtgataaaattaaacagtccctttaggtcatgattagt

SEQ ID NO: 473861 - DNA, 122 bp, Homo sapiens
ggcgtgcgggcgccgggctgcccagctgacttacggatcgggttggtcccgcccccggcgcggccgttttgaaaatcctggtccgcccttggcgattttggtggaagcctgtccctcagaac

SEQ ID NO: 473862 - DNA, 122 bp, Homo sapiens
gccctgtgcccaggcaccgttcctatcagcgcacttgctgtcccatttcacagaagagcacgggggcgccaggagctgggaaccccatgaaatggcgccggggtctgtgcccccaccaggtc

SEQ ID NO: 473863 - DNA, 122 bp, Homo sapiens
caaaaggaacaaccatgagaggtggttctgcctgcatggtaccatgttcttttgtagcttcgcagatgtatttctccacatgctcctgcatcacagcctgagtatggagagagctcaagcca

SEQ ID NO: 473864 - DNA, 122 bp, Homo sapiens
cctccaccgcgcacctggctcggtcagcggctagtgcggagagacacagcggagatagcgcgcctgctaaaggctgccgccgccaacaccttaggtgaataccgagctccaggaaggtcgct

SEQ ID NO: 473865 - DNA, 122 bp, Homo sapiens
aatgaggcagagcgtggtgagcccgagggaaatcacatgatgtgtgagggacgcatcggccggtttcaacggcactgttctcgaagctttgccaagaccagggtctcttgctcaggacccca

SEQ ID NO: 473866 - DNA, 122 bp, Homo sapiens
tgctttcccttttatcttgaatgttctgtcatgggaacctgaaactcaagagttaaggcacgtaaataaactaatgtgaaaaggggaaaagcatttccagaaatgattgtcataaaaagaaa

SEQ ID NO: 473867 - DNA, 122 bp, Homo sapiens
tacaactcccccgtgctcttcaaagacagccagaacaatgaataaacaattatgttttaacgaaaataactgagagggacctctggagtgcatcatgggagtgacagaaacctgttgagcac

SEQ ID NO: 473868 - DNA, 122 bp, Homo sapiens
gggccggacacctaggctgagccctcaggtgagagccgagcgcacccttggggtgggagccgcaagcctcgccctatgaccggtgccaggagggaacctgcgccgaggcgtgggcgcgggga

SEQ ID NO: 473869 - DNA, 122 bp, Homo sapiens
atccgtgtggaaaaggctccagtgagcgcgcctgctttagagacacaggatgattcagaccggaaacagacctcgtgggtgtaagaggaagcctctgtgagctcgcaccttactgggtgcaa

SEQ ID NO: 473870 - DNA, 122 bp, Homo sapiens
cactgcgcccctatctacatatgcccgcctcttatagtaacgtcaccacctgcttctgtacgatctgactgaactcccttacggatcggttcgctctagctgccgctcccaaggattcaaaa

SEQ ID NO: 473871 - DNA, 122 bp, Homo sapiens
tgtctatgtctcactgcagggctgcctaatagctgcaatgatactgttgtcctcactcaccgtgcaccccatcttgaggcttatcatcaccatggagatatccttcttcagcttcttcatct

SEQ ID NO: 473872 - DNA, 122 bp, Homo sapiens
gaactgtcctctgctaatttatatcctacatttctgtcaaggatcagtattcattttctccgtaaagccttccacacttgaccccaatcactgtcgtcttgccttaattcaaattccttcag

SEQ ID NO: 473873 - DNA, 122 bp, Homo sapiens
agtttacagaaaatggtcagcatcatgcgtgcctgaggtccagggtcggctcccagctgccgcgatgccgtgagcgcagccctggcttcccctctgatgcagagagctggtcactccgccgg

SEQ ID NO: 473874 - DNA, 122 bp, Homo sapiens
ggtggggcgagtcatcgtctgacgtctggccgtgagatgtttcgggagccggggtctctccgctgcagacatgacgaagggccttgttttaggaatctattccaaagaaaaagaagatgatg

SEQ ID NO: 473875 - DNA, 122 bp, Homo sapiens
aatcttaggtcttgaattttgtccagttcctacgtcatacctggctgtaagggctacagccgtaagcatgcttggtgactggaggctgtgtagtgagacctgagttttgaaaccaggattgg

SEQ ID NO: 473876 - DNA, 122 bp, Homo sapiens
tgcaggggcgcacaggcgcctgcctctgcgggtgggaaaggaaggaggtgcccgggtttccgctcccagggctcagcctgccttgggcacctacggtatgggagcctttaacgtggaaagga

SEQ ID NO: 473877 - DNA, 122 bp, Homo sapiens
ggttcaaagatgaatttgaacaccattagacactggcttaatgaaaattcacttctcattcgtttctcatctgaaacataaatagaaatataggtcttaggcaggaggatttcttgatgcca

SEQ ID NO: 473878 - DNA, 122 bp, Homo sapiens
gtgacaaccggagacaagccttatgggagggtgacagctggggacagcacggagaaggggcgggggcattagtgcagccctcaaccaatgagtgccgcgctgccccctctcgagtcctttcc

SEQ ID NO: 473879 - DNA, 122 bp, Homo sapiens
ccacccacttggttcagtgggctgcctttggcttgtgctccaggctggatcgagcactcacggtgggatcccacactcagcctgcagctcagccgggcatgcagcaaccttcttccaccttg

SEQ ID NO: 473880 - DNA, 122 bp, Homo sapiens
caggtgcagaagtctcttaataaagggaatcccaccctaccttcttctcacagatgcccacgcacattgctgtgcacaggtgcttgcagagaagttttgtcttcggcagcctcttgttctct

SEQ ID NO: 473881 - DNA, 122 bp, Homo sapiens
ttgccgcaccctgagccctcagccccgccgcttcgcacggagcggagctcagagggtgcgcgctccgccctttcgcgggcctggcatgagcgcagtggttgttacactaaagtgtctccgcc

SEQ ID NO: 473882 - DNA, 122 bp, Homo sapiens
tgacctcgtgatctacccacctcggcctcccaaagtgctgggattactggcgtgagccaccgcgcctggcttcaaatgacctcttaaataaaggtgtggaaggacacactcctggctgtgaa

SEQ ID NO: 473883 - DNA, 122 bp, Homo sapiens
aagcactccactgggaatcggaaaaataaagatggtatggtctctactgtccagtagctacgaatggaggcgatagctctagaaaacaaaaataaatacaaaatgaaaataaaatactataa

SEQ ID NO: 473884 - DNA, 122 bp, Homo sapiens
taccgctccactgctagacccaaaagctctctgctgtggggatttcatttgaactgctatcgaagaatattccaagaacctctctccgcacccttctccccctctctcccccagcctcagac

SEQ ID NO: 473885 - DNA, 122 bp, Homo sapiens
taactctgttctcatattttccagtaaaataaactgaaaattttccttttcactggagtacgtttgatgactttactcaccatataaggaaatgagtgactctgaacttctcagccccatcc

SEQ ID NO: 473886 - DNA, 122 bp, Homo sapiens
gcactcactcatgtttagccctgtgctaagtgctgtgcttttattaactcactcactcctcgcagcaaccctaatgaggtagatactttttttttttttctgagacagtctcgctctgttgc

SEQ ID NO: 473887 - DNA, 122 bp, Homo sapiens
ccgcttcttttcgggccggagatatttgtaaaggaaagacgtttcctccctggctgtagtcgatttggagcatcaggagtttgtgcaaagccaccaatacccgcactcgcttgcctcctccg

SEQ ID NO: 473888 - DNA, 122 bp, Homo sapiens
atgttttattttagagtggtttagactcactgaagaatctgacagaagcagcaagttccgcggtgccccacccagctctgacgtgggtggcatttgacctcagggtgggacgtgggtcaccc

SEQ ID NO: 473889 - DNA, 122 bp, Homo sapiens
tctatatagttggtaatcaatgatcatattttttaatgcatcaccatgctacttatcaaacgttctgtctctcaacatattgagaagtcaatcatgatctgaacaggtggatcccagcaaga

SEQ ID NO: 473890 - DNA, 122 bp, Homo sapiens
caagtggcatcttgggggtgggtgggcagaggacggggtaatgtgaggacgaagcgggcacggagccagatggccagtctccaggcctggtccacggactggcagggaccccaggcacaaga

SEQ ID NO: 473891 - DNA, 122 bp, Homo sapiens
tcaacgagggagtatgggggtgacacaaaaattggtctccgggagtgtttatggaggagacgaaagcatcgctgggcaatggtgagaaggagatggtttgcagggcaattaggaagtatgtg

SEQ ID NO: 473892 - DNA, 122 bp, Homo sapiens
agttgttccagtcctcgatgctccgccccagctcggtcaccgcctggaactccccaacgtcgctgtcgaagcgcccgtactcctcgcggttatagatgtatctggccacaccgcgcacgcgc

SEQ ID NO: 473893 - DNA, 122 bp, Homo sapiens
aactcattgcttcaaattgtcgccaagcccattaggctacctgaactgtctcagaaagtgcgggtggctgcgtcgaacggtggtggctcagaggaagagattggggccggcagcgacctagg

SEQ ID NO: 473894 - DNA, 122 bp, Homo sapiens
tccttggtgtcaggaaagcatggcccagggcctggtgccgccgtaaggaaaccagggatacgtcctgaggggtgggtggagggctggctgggtggaaggcggggcggagggcaaatgactcg

SEQ ID NO: 473895 - DNA, 122 bp, Homo sapiens
atcgatttgtccagaactgcgcatctgttaggatgttcccagccaaaacatccgtctttacggcaatagtctttgcatggtgcttaagtctcctcgctttgctgccaggaatctggtcaggg

SEQ ID NO: 473896 - DNA, 122 bp, Homo sapiens
ttctcctactcaaaggcctgcacatatttctcacaatatctgaaaacaaggagaggatgacgcctcagcctcggagaattgaaagtgtctattacttccaactggagtgatggtgggcatgg

SEQ ID NO: 473897 - DNA, 122 bp, Homo sapiens
ggaaactcttcccccatccgtgggtgcctctcatcccagctgctctaattagacaggagacgtcagcccagcacctcctgcccctccttctccagcctgagcatagaaggcaggatcgagcc

SEQ ID NO: 473898 - DNA, 122 bp, Homo sapiens
cgcacggcttcacccccccacacacgcgtggcttcacccccacacacacgcagcttcacccgcatgggttctgaaggcttggcctgatctctgctgcagcatctggttcccaaagcatgtca

SEQ ID NO: 473899 - DNA, 122 bp, Homo sapiens
accatgaagttcttagcagtcctggtactcttgggagtttccatctttctggtctctgcccgtaagtaaagattcttacctgaacataagttttgtgggaatatacataaaatatctcctct

SEQ ID NO: 473900 - DNA, 122 bp, Homo sapiens
tcatgaaatatcaaataatgagaaggttataagagcactagatcataagagcaggaaggccggtcttagagtgttttttaaaatgccccaagggttgcaagtgctgtttcaatcagatacag

SEQ ID NO: 473901 - DNA, 122 bp, Homo sapiens
agtcgcaaatcttacagccggtcaagaagcaggagcaggagccggagccggagcaagtcccgttctgttagtaggtctcccgtgcctgagaagagccagaaacgtggttcttcaagtagatc

SEQ ID NO: 473902 - DNA, 122 bp, Homo sapiens
ggcctccagctgcggtcgccgctgctccagctgcgcgtggcttccgggaacctcctcctccgcgcccgtcgttgcaaaattggagagaggaaaaagtggcttaaaaaaatagttgcggcccc

SEQ ID NO: 473903 - DNA, 122 bp, Homo sapiens
gacaacatgaaaatgtattgggcatggctgtgctccaataaaactatttacaaaaacaggcggaggggcggggatttggcccttggggctgtgagtttgcaacccctgttataaactattcc

SEQ ID NO: 473904 - DNA, 122 bp, Homo sapiens
taataacattttataactttcaatggaggtcttggacatcgttaatttgatttatgcttacgtatttgatatttactggcactaccataggtggtatttgctatggtttaggggtggtttgt

SEQ ID NO: 473905 - DNA, 122 bp, Homo sapiens
ctcccctcgttaatgcctccttcaccatcccctcctgaagtttcccccattgcatacacgcgctgaggcccacccggtatcaaggactcccattgcttgcgaaaaagattccacccctctta

SEQ ID NO: 473906 - DNA, 122 bp, Homo sapiens
gcctgccaggcctgccgcttcaccaagtgcctgcgggtgggcatgctcaaggagggtgagcgctgggcaggggctgggcgagggctgggggagtcggggacccgggccaggtgggggtgagg

SEQ ID NO: 473907 - DNA, 122 bp, Homo sapiens
tttgtagctgaaacataactattttccctaagcctttcagggccactgctccagctctgtcggctgcaagccctgtgtgtgtgtgcatcctgccatgcagacaccaccggagtccccatcag

SEQ ID NO: 473908 - DNA, 122 bp, Homo sapiens
gcatttaatatctccctgagacaggtagagatgcagcttttactctgagaaatagacaagcgccaacctgtcccggccctagccgggagattcacaagtgctcaagttcacaagtttcacaa

SEQ ID NO: 473909 - DNA, 122 bp, Homo sapiens
gagcagcgtctcgttgctgagcccgcggatggagatggcctcgtcaggcagcaccagctccgtgttgcgataccagcggatggtgaactctggggagcccgtcagggcacaggagaggatga

SEQ ID NO: 473910 - DNA, 122 bp, Homo sapiens
cccctccccaaagcctccactactatggcatggttaccaactttgcagctgatcataacacggcagaggctggcgtgcagagccacaggggctcaggccgcgcctcactacccacgctgagc

SEQ ID NO: 473911 - DNA, 122 bp, Homo sapiens
tcctagtacaacgtcgtgaattagagagcacagtgtttctcctccgaggtgctagatgtgcggtgagagggtgtaggtgaggggccggcggtgaggtgggggccagcctggggtgctgcaca

SEQ ID NO: 473912 - DNA, 122 bp, Homo sapiens
ctgggaggattaaatatgctaacccacatcaaatgcatggggccatgccaggcatgcagtcggcacttgataactgtttgctggaatgatatgactcaacatctgcctttctgcttcctaac

SEQ ID NO: 473913 - DNA, 122 bp, Homo sapiens
gcagctcttcagatgcttgcacaccttgtttacagctcccggtaacgacacaggtaacaccggaagtgacgtcagagcaggaggccgagagacaacttaaatggcgatccgaagttaccata

SEQ ID NO: 473914 - DNA, 122 bp, Homo sapiens
ggtctccctggcgggggccatggggtgcacaccggacgcaggagcacccccaaccccgcgcgcctcccactccgccatcccgcgtgcgtcccggtcccgcccccaccccgcgcgcccccggt

SEQ ID NO: 473915 - DNA, 122 bp, Homo sapiens
gtccccctgcatggaggagaggctcacgtcggcctccaccttcggcgcagacacatccaccgagtcctccatggacttgcctggggccgacaccccgaatgatggcatcttgaacttgggca

SEQ ID NO: 473916 - DNA, 122 bp, Homo sapiens
ggcagtgggctcagtggggcaggcagccacgattcccttgatccttgaagggctggcgcacgccagcatctcttatcccccctccctggggccaggagatgtgtaggttcaagaaccagacg

SEQ ID NO: 473917 - DNA, 122 bp, Homo sapiens
tgcgggacgtgggcagggccacgtccacacagcaatgccatttttcagtgcagtttggcccggcagcagtgtgggtcactccttgtgtgcttgggtggggaccagaactcatttattcaacc

SEQ ID NO: 473918 - DNA, 122 bp, Homo sapiens
ttgcaggtgtaggcgagtctcccactgagtgggcttcctgcgggagagggccctggggggcggcaggggagatgagtccctagccaggatgagaagcttggagttcagagcctgggcaccta

SEQ ID NO: 473919 - DNA, 122 bp, Homo sapiens
gagctccgcccgggcgccccctcccccaccacgcctggatccctgccgggctccccgagccgagactgtgccttctgcaacagggctgtgctccaggtgggagaaacatcctttgctccctg

SEQ ID NO: 473920 - DNA, 122 bp, Homo sapiens
ctcaaatactgccaccgttttgaggccggagacaatggaatttgcttacctaaaaagctccgccccttgatggcgtcacacgaaaccaaccacgccccatattgccgcatgcgcactcttaa

SEQ ID NO: 473921 - DNA, 122 bp, Homo sapiens
atgcacttttgtgacatgattttgcatttctgttgattttcatactatttattgagagcacggtagaaataacagggaagagaaataaatagtcatcatgttgtgatttatttatttatatt

SEQ ID NO: 473922 - DNA, 122 bp, Homo sapiens
cagcagatattttttcatttatcttttgattttactcgctggtagattttgccatgtatacgttttgacgttttaaatttctctcgggtggaatttactgttctttccgtttggggcaccca

SEQ ID NO: 473923 - DNA, 122 bp, Homo sapiens
agtggtgttttcttactagttgctcttaacttgttgccagtcttgggctggagtcctagacgccagcccttgccctgattcccctccgcggctgcggccccgaagtggaaagggagcgcaca

SEQ ID NO: 473924 - DNA, 122 bp, Homo sapiens
ttttaaagtccgcatgtagacagtgaaaatctacaaaggtaaaccggaatctcctaagagcgggtagggatgcgactggtgggattacgggggattggcagtcttctttttatgtatctgta

SEQ ID NO: 473925 - DNA, 122 bp, Homo sapiens
gagatgccacttcagcgcgaaccgctgcgggacccgctgggctcccagccgcgtcggcagcgggcccagctcatcagcatgcaggcaccgcctcctcatctgcatagagccgccctcctctc

SEQ ID NO: 473926 - DNA, 122 bp, Homo sapiens
ggacgggaacaaggcgccccgacatggtgtgccttttggcaccggcgatgagccttgctccgccatcggccgccggggttttccagtcagcctgtctcctgattctcttcccctgcccggcg

SEQ ID NO: 473927 - DNA, 122 bp, Homo sapiens
cggaggccgccccccagcggcgggagccgggagctgcgcgcgcacaaagactgcggcccccgccccccgccgacctcttcgcggtcacccacctccaacatcctggccggagcggggcgggc

SEQ ID NO: 473928 - DNA, 122 bp, Homo sapiens
aggggcgacgtggctgtttctggactctgctctgtccgtcatcccatttgcatgccggtacgattgcaactgccacgtcctatgccaaggcctgagaccggctcgtgtaaaccctccagctt

SEQ ID NO: 473929 - DNA, 122 bp, Homo sapiens
ctagaccggtcattttttttatggctagggaagagaaataattattccccccctgcccggcgcccagacatgcttgggaagctgggagagcggttcggctcaacccccttctccagggccag

SEQ ID NO: 473930 - DNA, 122 bp, Homo sapiens
ggtttcactgtgttggccaggctgctctcaatctcctcatctcagttgatccgcccacctcggcttcccgacctgctgggggaaacttgattttctatagcattatgttactggatatttct

SEQ ID NO: 473931 - DNA, 122 bp, Homo sapiens
gtgggggtaggaggcgtgcccctgcggtgggaggcggggtctgcgcagtgggtggggcttcggcggaacctagctaagaggttcctctcgcctccgctccccttttgccttcaaccttcgag

SEQ ID NO: 473932 - DNA, 122 bp, Homo sapiens
tattaatataagcctttctgataattgaaagtaagttatgggaaatgtaatatatatccccggtatttactgcctcgggaacaagggagacataatgaaggagggaagtttgtaattgcaga

SEQ ID NO: 473933 - DNA, 122 bp, Homo sapiens
aataaacctagaggtctcagaactgggcaagggacacctcacagacgcccacaacccaaccggaccctggcttctttcaccgacatcagtgaactccctgcgccgggccaggatcaggaacg

SEQ ID NO: 473934 - DNA, 122 bp, Homo sapiens
cctaagcctctccgacatggggcgtggcggggccgcggggctaccaggtgggacctctgacgcgccgccttcgccttcgccttcgccttcgcctccaggactcgcccttcttccagcagtac

SEQ ID NO: 473935 - DNA, 122 bp, Homo sapiens
agccgccccctcattagtgcccactctgcaccatacgcgcctctgccccgctcacccagccgcccctccattagtgcccactctgtgccacatgtgccactgcccatgtcccttgcttcagt

SEQ ID NO: 473936 - DNA, 122 bp, Homo sapiens
ctgtgtctctatcacgctttactccaccacacgggtccgtgtctctgtcacgttgtgtcccgccgcgtgggtccgtgtcactatcacactctgtccccaccctgtgtgtgagtctgtgtctc

SEQ ID NO: 473937 - DNA, 122 bp, Homo sapiens
aggcatataacaatcctgcttagaacacttcaatggatacataagaaacttcatagtgatcgtctctgagaactaggggatctaggataggagaaatatttgtctttccctttggtactatt

SEQ ID NO: 473938 - DNA, 122 bp, Homo sapiens
cgccagagaggactctcactggacgaggcccagtggtctgaggctctgtacaaagcatgacgccacatgtgatcattctcacacgcacacacagcctaatcatccaaaacctccctttgggc

SEQ ID NO: 473939 - DNA, 122 bp, Homo sapiens
ggctcctcctctttctaaaatataccttgtccttattcattgcacagtggagaaacctggcggacaccacgctgaccgagagatgaaggttaatatcactagcaccgaagggataccacaca

SEQ ID NO: 473940 - DNA, 122 bp, Homo sapiens
ggagacctaagatcactttgtgctctggctagtgatagcctctaattcttgttctctgtacgtaaaacagtggtaactatactgatttcgctggttgtgaaaactcccaagagagaacagga

SEQ ID NO: 473941 - DNA, 122 bp, Homo sapiens
ctttaaacaaatgctccagttttccccgcagagagccggagtcaaatccgtgaggaagcccgggggtcgcagtgaagcccaacccactggtgctgggataacctcgcccgcaacccggatcc

SEQ ID NO: 473942 - DNA, 122 bp, Homo sapiens
ctccctgcccagtccaaactccaaggctgggcaaggcactgatccactgctggacagacccggggcagcctctgggtgaacagcagcgtgtccgccggcagcgaaccgagaccagcgagccg

SEQ ID NO: 473943 - DNA, 122 bp, Homo sapiens
ttccctctcctgggcaacaatggcagttttggagactccttggagaccacagtaccattacgcacatggtggagccccttgtgaatgcctaagcttgtggatgttctgaagggggcaataat

SEQ ID NO: 473944 - DNA, 122 bp, Homo sapiens
ctgagacgccctttatcacagcgaatgctaggcgttcggctcgtggtatcccctagcaaccgcctcttgtcacagatctgaaccaatcataagttggcccgcccctgatgctaccagatgcg

SEQ ID NO: 473945 - DNA, 122 bp, Homo sapiens
aggtgaaacgcaatcttcccatgggccaggaatggcgacgtccgcactgcgcaggcccagcgtggcgccgctcacatcttttcagctgaggtcctgattggacagatccaatggccccgcct

SEQ ID NO: 473946 - DNA, 122 bp, Homo sapiens
gtcggaccccgggcgcggcccctctccaggctccaccgcccgccgctggggctggggtcgcgccctggccagcgcccactgcgccaggtacaggcctaccgtggccagggccgcgacgaaga

SEQ ID NO: 473947 - DNA, 122 bp, Homo sapiens
gggccacccagccacgctgggtaattataaagaaagcaagtctcgagtctcgtctgcgatcgcggacgggatgaacagcgtaacctagaacaaccctgacctccacgaggaggacctggtct

SEQ ID NO: 473948 - DNA, 122 bp, Homo sapiens
tcctcccggcccgagcggccgcggctcagcccagcaagtggctcccggggcccgagacgccgccgcccgcccttcaccgagtccggtgactccgcaagcgccctcaaaacgcctttcctgac

SEQ ID NO: 473949 - DNA, 122 bp, Homo sapiens
aggctttgcgggcatttggggaaatgtagtccttttgtagcactaccgtgctgagcactacgactcccaggatgcaacgagcatttgcgcctgcgtacaaggctcaatttattcgtttcccc

SEQ ID NO: 473950 - DNA, 122 bp, Homo sapiens
cagaataatttcatgcctagattcttcctctacctgtttcctcatttagggggcccttctcggtttaattgtctccagctgatgatcaattaagcaaactgattgcagttgcatttgatggc

SEQ ID NO: 473951 - DNA, 122 bp, Homo sapiens
gatggagggctgggattggttctccgggaccgattgacggctcagggcacgagcggggaccgcagcggcggaggtgagggcgccagcaggaagtgggagaagaggcgacccaaggcgggctg

SEQ ID NO: 473952 - DNA, 122 bp, Homo sapiens
taccgggtgcttcgtgcagcagagacgttgccgcttctgtttctcccctaacctcgcggacgggattcagcggttccgttcgtctctcggtatttattgggcacctccctacatagaagact

SEQ ID NO: 473953 - DNA, 122 bp, Homo sapiens
gctggagaggacagctgtcctgctctcggctccaccataacagtgaccttcgggtccggacgcccagaccagacacaaagaccctgtactggagacaggtcacaggaaggggtgtgtggcgt

SEQ ID NO: 473954 - DNA, 122 bp, Homo sapiens
ccaaggttacacagctcctgcaccatgggcctgcggttggacccagctgtctcatcccagcgacacagtttctgaacatgctccttagatagggcctctgacccaggccatcccagacacaa

SEQ ID NO: 473955 - DNA, 122 bp, Homo sapiens
gagtcgagcgggcagagacggtgggcggctctccaggtgaccctagttccctaagatcgccgccccggcagccggcgcccacgtgttcccccctttgtgacagggagcgtttccgggcctgc

SEQ ID NO: 473956 - DNA, 122 bp, Homo sapiens
catgatctgcctgccttggcttcccaaagtgctgggattacaggcatgagccaccgcgcccggcctagcttcggtttctttactgttacgtgaggctgaagagaacctccccagtctgttgg

SEQ ID NO: 473957 - DNA, 122 bp, Homo sapiens
ccatgcgctccatgaatggctcgcggcggaacagtggctcctcgctagtgtccagctcctcggcctcctccaacctgagccacctggaggaggacacgtggatcctgtggggccggatcgcc

SEQ ID NO: 473958 - DNA, 122 bp, Homo sapiens
cgcttcagtgcagactagttgcaaacgtcaatatcagtgaaatacacccagctggctgcccgccaggccacggctcggtgacagaggccgactgtaaatccacatattaacaagcaaacaca

SEQ ID NO: 473959 - DNA, 122 bp, Homo sapiens
tttctccctggtttctcagacagctcttgggccaagactcagggagacattgagacagagcgcttggcacaggaggagcggggtcagggcgaagtcctatggccccaggcgtggctctcagg

SEQ ID NO: 473960 - DNA, 122 bp, Homo sapiens
ccttacttcgaggagccgtatcatcaagtgcaaattaatttgtgcaaggtagcacacctgcgtctaagcccagtgtctgcgtataaagcccaggaattacgggagacattttgaagccaagt

SEQ ID NO: 473961 - DNA, 122 bp, Homo sapiens
atgtactcaaattttgttggagggagaaaactcagcaataaaacagcattacagtataatcgcttttgtggaaaatatataacaatgcatgaaatacgttgtgtgtgtgcaggaaaggttgt

SEQ ID NO: 473962 - DNA, 122 bp, Homo sapiens
tatccttgactccactgaggggctcttctgtacgaggtgggggatcagcaaagccaactgcgggggtgaggaagctggcttccagtgaagatgtgctggacacctgtggaacaggagaaggc

SEQ ID NO: 473963 - DNA, 122 bp, Homo sapiens
agagctctcaacgctcccaaacacctgctcaagcgccttcaggcattcggcagtggttatcgcggggttgttggacttaaggatgcgaataacatcagcggcggggcctctaagactctcca

SEQ ID NO: 473964 - DNA, 122 bp, Homo sapiens
ttttgagaagcctgtgaagaccatccactggaacgggtccttccaggaggcagcctttcccggggagacctttccagtgtcggtagagtgtgaggatggagaccggttcccggcgcaccatg

SEQ ID NO: 473965 - DNA, 122 bp, Homo sapiens
tgggcatccgggggtgggcggtggtgccggagcatcacagcagggccttccatctcccaccggcaggaacacactctccaaaaatgagctctgctccccatctccagagcatcctcccggcc

SEQ ID NO: 473966 - DNA, 122 bp, Homo sapiens
gcggcctccccacccacggcctgcagtcacggtatccacgcacaaggccgagctgcacaccgctgagggtcggcggcctccccacccatcgcccacagtcacggtgtccacagctgcaggca

SEQ ID NO: 473967 - DNA, 122 bp, Homo sapiens
gagactgcggatgtccaggtgacagtggatgccagttcaaaaccagcactgctctcctcccgcgcccaggaagagcccagaggcccggggtgggcgctatggcaggaaagagggaaaaggag

SEQ ID NO: 473968 - DNA, 122 bp, Homo sapiens
taccatttcgagggtgaagctcctcgacaccatggtggacacttttcttcagaagctggtcgccgccggcaggtaaagtggacgcagccgcggtgggagtgtttgttggcaccgaagctcaa

SEQ ID NO: 473969 - DNA, 122 bp, Homo sapiens
agggcacccacaaagatggcagacgaagcccatgaaagggcctgcgacagagtgaagagacggatgggcctgcgttggcctcagctagctctggaggctctgtgggggaggggcaggtgggc

SEQ ID NO: 473970 - DNA, 122 bp, Homo sapiens
gaactatgaaaatcggcacgcgaggcctaagtgtccccagaaccagaggaaccacagttgcgtcatagcagaaggacctcttttacagcatcagcagtgggatagtcagtgccgagttttcc

SEQ ID NO: 473971 - DNA, 122 bp, Homo sapiens
tctgggcgacaagagcgagactccgtctcaaaaacaaaaacaaaagcaagaaaacaagcccgaatggtattctctaccacttaattctgaaagtatgtagattcgtgttttcgtcactcaga

SEQ ID NO: 473972 - DNA, 122 bp, Homo sapiens
agcagcacgggcagcacgggcggcggcggcggcgccatggcccggagcccgagcccgagccgggcgcccgaacacaatccatgcacccggcgcgcctccgcatccacccggcgaggccgggg

SEQ ID NO: 473973 - DNA, 122 bp, Homo sapiens
tcggcaaatagtgccagcgcctgtgggcacggactcctcccacccgggactcctcccacccgggactcctcccacctgggattatggtcttggtcaccgtcatggttgagttatgttccctc

SEQ ID NO: 473974 - DNA, 122 bp, Homo sapiens
agctcttgcaagcggggcctgaaaggtttcgggtccgggctgctctgggcagcaggtatccgaggccccaggctggggaagggggcgagaaccagtcccttcccggaagccccgtcgcgctc

SEQ ID NO: 473975 - DNA, 122 bp, Homo sapiens
acaatggttcccaaatgattgatagcaggcattagaatcacttggcacattggttaaaaccggtttctaggcctcaccttcagagttctgtttcagtagctcatgggtggggttcgaaaatc

SEQ ID NO: 473976 - DNA, 122 bp, Homo sapiens
ccgcctccttgtcagttgcgcgtccagcgccacctgctggcgccccgcgtccgcagggttcgggaacgtccttggaggctaagactccccaagtcgcactccggcctctcccagtttcctct

SEQ ID NO: 473977 - DNA, 122 bp, Homo sapiens
gtcgggggaggggaggccttaacattcggatcagattaaccagtgctcaaccgcagtgcccgcgccggcccctccgctgatccgcagcatccgaaagccgcagggcgcgggggcctgtgggg

SEQ ID NO: 473978 - DNA, 122 bp, Homo sapiens
tcagcacattgtgagcttccagcgcgcctttctttcagtaggccagacgctagctggggtcgtcgggggatccccagcggtgacgccattgaaaagggtgcgctctggcttccaaatagcca

SEQ ID NO: 473979 - DNA, 122 bp, Homo sapiens
gcgaagacgcttggggccgggcactcacccgccgggcgctcgggctgaatgggccgccaccgcagtgctcgctcgctcagcaccacgtcacaactgtccctcccgatctcgaagatgccccg

SEQ ID NO: 473980 - DNA, 122 bp, Homo sapiens
cttcatttttcttccaaaattgctgctggtgggtgaaaaaaaaatgccgcagctgaacggcggtggaggggatgacctaggcgccaacgacgaactgatttccttcaaagacgagggcgaac

SEQ ID NO: 473981 - DNA, 122 bp, Homo sapiens
agccaggagcaggagaaagcagaacgtgaagagttttccaggcgccaaacctgcaagcggcgaggagagaaggcagctcgccactgataccgggtctcctggggagaaagtcgtgaggacgg

SEQ ID NO: 473982 - DNA, 122 bp, Homo sapiens
caccaacctgggtggaggagaaaccgccctgggcattctgctgcttcgtgatccacttcacgatgttggttgcagaggtcaggtcctccgaggttggggctggctgggccgtgagataagcg

SEQ ID NO: 473983 - DNA, 122 bp, Homo sapiens
cacttaaaacttcagacttcctgtcctgctggtatcatggagaaagtccaatacctcactcgctcagctataagaagagcctcaaccattgaaatgcctcaacaagcacgtcaaaagctaca

SEQ ID NO: 473984 - DNA, 122 bp, Homo sapiens
gggggtgtgtggggcctctctggcagctgcctctctccagtgcttggacaccaggtgtggcggccctgctggccctcttgggaccgaggccttttcttttttccttttttcttttttttgag

SEQ ID NO: 473985 - DNA, 122 bp, Homo sapiens
ccgagcagtcctgggcggtgggcgaaggcgcggcttggggacccgggaggggccggggcgcgggggctgcaggaagtggaggcggccgccgctcggggaccggcttggcggggtgagagaca

SEQ ID NO: 473986 - DNA, 122 bp, Homo sapiens
actcatcttctccaggatttggggcacgggaacctgtctcctgaccttcgtgccttacctcggagtgtgctgcccagacggacttgtgaatagctgcgtctgtccccatagttaacgggaga

SEQ ID NO: 473987 - DNA, 122 bp, Homo sapiens
gtatttgtttagcgattagcctagagctttgattttagggcaaaagcgagccagacagtgcggcagacgtaaggatcaaaaaggccacctatcattcgccggggacgcctgcctccttaccc

SEQ ID NO: 473988 - DNA, 122 bp, Homo sapiens
gcccaggaagcaagcgcgctctccgccccgcctggagggagggcccaaccacagcacagccgcgctcactcctcacccggacgtgacctagttctcacagaggcccggcctcttccgccaca

SEQ ID NO: 473989 - DNA, 122 bp, Homo sapiens
ccctttccgagtcaaagaaaggggtgacggacgcacctggaaaatcgggtcactcccacccgaatactgcccttttcagaccggcttaaaaaacggcgcaccaccagactatatcccacacc

SEQ ID NO: 473990 - DNA, 122 bp, Homo sapiens
ccaccccccaagtttcttcactggcctgggtgtgctgcagtgtgctctggggcatggacacgcagccccagctttctcacttgtggaaggtctgcccagctgtggagcctggcaggacggga

SEQ ID NO: 473991 - DNA, 122 bp, Homo sapiens
gaggcaattttcccatgggagaaaggccttagccagaagaactggcttcctgcctgaaggcgtgcaaccagccaggaggcctccagggcatcgtgccctcccggtctccggttctgctgcct

SEQ ID NO: 473992 - DNA, 122 bp, Homo sapiens
gaaccggcgcaaactctcgaggcgcaaactctcgaggcgcaaacttggctttggcgctggcgctgcagccacgggcgccgtaggagggccgggcccaaggcgccccgcttcccgctcccttc

SEQ ID NO: 473993 - DNA, 122 bp, Homo sapiens
aataaggcactacacatagtatggctgatggtggtggcactgaccatcttaatagtaacacggggaaactacagatgaggctattcccagagaacctcatcctctaggttttaccccacaga

SEQ ID NO: 473994 - DNA, 122 bp, Homo sapiens
tgctggccccgccttccctttctgtccgacatcaaggaccctcggaagatgagatttctccgatccacacaccccacaccagagcatgttatagtgatttgctaaatgaggcataagtctgt

SEQ ID NO: 473995 - DNA, 122 bp, Homo sapiens
agagcttgaaaggaaaaacacaatttaggatcctttgctaagtatccaagtcccttctctcgctccgactgattgatgtgtttgtgtgggtggtttgacccccgggatttctgaagttttga

SEQ ID NO: 473996 - DNA, 122 bp, Homo sapiens
ggccacggtccccaacagccggttcagcaaaggacaggcagaccctacgggccaaggatgcgctggcctggccggtgcggggccaggcgggcagcttgccaggatttggggattttgagcca

SEQ ID NO: 473997 - DNA, 122 bp, Homo sapiens
aaattaaaatcggtgagatgattccgtgcctacttctgagactctctcgggaacagaactcgtccccatccgctgccagcttgggtagagacaaatccgattgtccacgtccacgttgggaa

SEQ ID NO: 473998 - DNA, 122 bp, Homo sapiens
cgcctggcgtgtggtaaacgctcaacttatgcgggttgtaactgcctgaggcgtttccttcggcgcgccacttggccttctctttctaaatattagcataataaatataaatggacccagaa

SEQ ID NO: 473999 - DNA, 122 bp, Homo sapiens
gcagctcagccggcatcttcctcccctcctcatggggacgcagctgccgcggcccccactcgccacctgcagggagaccccccagaccaaggggagattactatgtggtgggatggaacccc

SEQ ID NO: 474000 - DNA, 122 bp, Homo sapiens
gggtgtgtgcggattctcaataaaaagggaaaagcacgatccaagttaattttccagcgccgacaggaaatgctgtttcctgcatcgtacaacgctggtgccaacaagactgacacaggagc

SEQ ID NO: 474001 - DNA, 122 bp, Homo sapiens
tacaaatcctttgctccactgaccaaacaccattatgcttcacatttcccttttagttcccgtgctattgagtttttttcactgatctttaaataagaaagtgctctggacactcccattat

SEQ ID NO: 474002 - DNA, 122 bp, Homo sapiens
gggcggaggcccgggctgctcggaaaggggccggggccgggccttccgaaagctcctgggcggccctgccggaaccctgctctccactgcggcctgcagggctgttaccaggagccctgcct

SEQ ID NO: 474003 - DNA, 122 bp, Homo sapiens
tgatggcgcatacccgtaattccagctactcggtaggctgaggcaggagaattgcttgaacgcaagaggcagaggtttgcagtgagctaaggtagcattattgcactacagcctgggtgaca

SEQ ID NO: 474004 - DNA, 122 bp, Homo sapiens
cagtcacctccgaggagaagtcgacatgcccgggggagtcaatgaggttgatgaggaagccggcaccgtccttgctctgcttgatgaagttcaagtcattctccgagagctcgtagaagagg

SEQ ID NO: 474005 - DNA, 122 bp, Homo sapiens
ttttcctatcatcacaaaactcatgatgctccggctgctcagttccctcctccttgtggccgttggtaagaccccaacctgtctgtgtgctccctgggctgccctggactaggaatccttga

SEQ ID NO: 474006 - DNA, 122 bp, Homo sapiens
gtgggctcctcctccagtgggctcctcctccagtgctccgcagtggagtagccagcggggcgtcccgaaagagcatggtgcattcattccgtgagtgccagccacactgcatgttccaaata

SEQ ID NO: 474007 - DNA, 122 bp, Homo sapiens
ccgagccgtgcgccggccccacgccgctcagcagcagcaccaccgcggcggtgaccaccgcgggccccagcagccccgcgccctggcccaccagcatggcccgacctcccccagctagaccc

SEQ ID NO: 474008 - DNA, 122 bp, Homo sapiens
ctccgcgtcgcggggagccctcaaggatcccggacgtgcttccatctgcagtcgtgggcacgtgctcaggaggaaagctgcacacgtggccagggcccattccactggggaagtcagcgcct

SEQ ID NO: 474009 - DNA, 122 bp, Homo sapiens
atttcatggctcggaggtggcagggacccagccttgctcttgcttcctgctctgggacctcggggaggtgcaaggtcctcaatcaggtccctcatgggggcacagaggctgccgtggctccg

SEQ ID NO: 474010 - DNA, 122 bp, Homo sapiens
agctacgcagaaaaatgacaagagtgatgagcacagcagtcatgacaaatgagccctgtgcggaggcccgggatccgcgcagatgccggcgcgggggaaatgggccctgaaatcccaccgtc

SEQ ID NO: 474011 - DNA, 122 bp, Homo sapiens
aaggatggccccgtgggagtcccaggcccaggtacggccccgaccccgcccaggcggtgccggcgctcacagtgtcctcggtggcgcatgaagctgtctcgccacatgaacttcttggcgca

SEQ ID NO: 474012 - DNA, 122 bp, Homo sapiens
gatatagcctcctgctggcaccaggattccacagccaaacccacaaacccacacggaggccgatcccaccacatggcccatgaggtccatgcagcctgcccgaatcccgacccagatcccac

SEQ ID NO: 474013 - DNA, 122 bp, Homo sapiens
gccccctttcctggtcattccccctgcgaagtcagttccactctagttacaggattggggcggggccagaaaggcgcaggcgcaacgggcggcggaagtaggagcctgggaaggaagaggga

SEQ ID NO: 474014 - DNA, 122 bp, Homo sapiens
atttctcacatcaaaatccgtgttatactttattatcattgcttaacattcggggtcccacgctgagtgtgagctgggggcaggcaagattgattcctgttttacttcactgcagtatctgc

SEQ ID NO: 474015 - DNA, 122 bp, Homo sapiens
atctaccttaaactgatgccttaaagctgctaaacttgccctaaattgtggaaattaaaccgcaggcagacatcttatctgatgtaagaaatcttcttagcttgtccacatcctcaggaaac

SEQ ID NO: 474016 - DNA, 122 bp, Homo sapiens
gagtcgtgaccggttgggccacactcaacgtgggacgaagcttcgcctactgtttgactacgtgcgtgcagcctcccctcgatgtcggccctcgaaaagagcatgcacctcggccgccttcc

SEQ ID NO: 474017 - DNA, 122 bp, Homo sapiens
accggacacaccataaactctcccctgtgttagggaccaggaggcacacggctgagagcacgctcaggagaaaaataaaaacaagaggtctgggctttgtgtccaccctaaggaaaacagct

SEQ ID NO: 474018 - DNA, 122 bp, Homo sapiens
aatgtgcggttggattcagtttgctagtgttttgttggggattttcacatccgtgttcatcggggatattggtctgtagttttgttgttgtgtccttgtctgtttttggtattaggatgtta

SEQ ID NO: 474019 - DNA, 122 bp, Homo sapiens
aggacaaaaggaaagagccgttcagaaggcagcgcctgcctccacctgctggtgcgtgcccgggacagggaggacggcaggttttaccaagcactttcaaacagaaatccaagttcccaaca

SEQ ID NO: 474020 - DNA, 122 bp, Homo sapiens
ttgaagggaactgtcactaccccctctaggaagttattttatgtagcatgtttgcatatacgcattgtgtggcatgtgcatagaggcttgttttacacctatctgctcattttgttgtgtta

SEQ ID NO: 474021 - DNA, 122 bp, Homo sapiens
gatgccctaaatagggtgtccggattaaccatgagcaggccttgggagcagcagcttccacggcgagcagaagccattggaattgaactttgaagatgaatatgggtttgctgctgaagtgc

SEQ ID NO: 474022 - DNA, 122 bp, Homo sapiens
aaagcaacgaaaagaaacaaaagaaaaaaccggagtaaggaatagacagatttattgaagcgaaagtacaactcacagagcaggagcaagacagagcaaacagctcaagagcccccattagg

SEQ ID NO: 474023 - DNA, 122 bp, Homo sapiens
gaagaccttagaggtacccttgatatgaaggtgaaagaaaaacttgaggtacagggaaagcgtcacccaatatagagcaaagcctggaggcaaggaagtgcttgaggccctttgagaattcc

SEQ ID NO: 474024 - DNA, 122 bp, Homo sapiens
tttttccccctgtgaagctgagggctgctccgctgaacattagaacttaaccctcaccggcgaccttgtagataacgtctataagtcaccatggtaacggtcgcttcagttgtttttcagga

SEQ ID NO: 474025 - DNA, 122 bp, Homo sapiens
gtgagtcctgcactaacgtgcgatgctcttgctgatttggaccagatagtatttctggaccgtgggcatgaaacgctgggttctgactatggagatccaggaatactgtatatgtaggatag

SEQ ID NO: 474026 - DNA, 122 bp, Homo sapiens
caaagcacttccagacactgcgttctcccaccaggccccaggtcttatgcctcatgggaacgtctctccgcatccatcttcatgctcttgcctgaagcacccagcgcggagcaagcagaata

SEQ ID NO: 474027 - DNA, 122 bp, Homo sapiens
aggagggttgccaaactgtgagtcagcgaccacaggaagccaagcagatctggacatccacgtgggtctctggccaaacaggaagtcagagttcaccctctgatacacttggttcctgttct

SEQ ID NO: 474028 - DNA, 122 bp, Homo sapiens
ttcctgcgagggtctctgaggagacctggcaagcctgttctgcggtgcgtgggctcgtgccgtgcagacatgcactttcccgctggagaagctctgtaccttatttttccttgcaaccgcaa

SEQ ID NO: 474029 - DNA, 122 bp, Homo sapiens
cctgtaaaaataaaaacatggttacagtaaaaatgagatgaaatgggaaaaggcaggcctcgccgcaagaagcctgttgttgccgctaaccaaattagtcatcgtaatagccctggcgtgaa

SEQ ID NO: 474030 - DNA, 122 bp, Homo sapiens
gacggaatgaaatgaagtgccctggagaagccaactggaggtggtggccccgagagtagacgcggaggggctgaggccgcaggatcctggagcccaggagctgacggagatcgcccacagct

SEQ ID NO: 474031 - DNA, 122 bp, Homo sapiens
tcaaagattacattaaaaatgccctaattcagagaacacatcagtaggagcagaagaccacgttgctcaggcatacctacacttgaagggcacacctgagctttgggcttacatcccagagg

SEQ ID NO: 474032 - DNA, 122 bp, Homo sapiens
cacatataccctcactttttcttcctttccctatgcctcgcagtccctcaacagggtctgcggtcagacgtcactcccaggtgactggcaatcagggatgccgcctcgctcacctggccacc

SEQ ID NO: 474033 - DNA, 122 bp, Homo sapiens
ccaaatccttatttgccgcctactcacgcctttgtgaggactacgattcccagacggcaacgctcccttcactcaacttccttagctggcggggagacgcagtttacagaactacctcccca

SEQ ID NO: 474034 - DNA, 122 bp, Homo sapiens
cccctggtccaccgagagctgggcgtcctcggggctgggcacccctgcttccccgcacagcggaccacaggtacagcacaggacgggacgggctttgctaaggtggcccctgggaaagtggg

SEQ ID NO: 474035 - DNA, 122 bp, Homo sapiens
gggtgggattacacggagcagccccgccgccgccgctggcagaggccggcttggagagggcgggggttcccctccgtcagtcgcccctggcgcccctcgcctcgtcgcactctccgcctcgc

SEQ ID NO: 474036 - DNA, 122 bp, Homo sapiens
ctctggaggtggtgaagtacacgtcgctgccgtgctggtaggccgtcaggttctggtgctcggcctccgccgctggccgcaccagcatcatccagttgcagtcatcctcgttggaggtgtcg

SEQ ID NO: 474037 - DNA, 122 bp, Homo sapiens
tgtggggcgcggcagccgcccctgcccagctcccctgctcagctcccctgctcagctccccggttgcgctctaagtacccgcaccggggcgacacactcccaccccgcaggggaccaagcaa

SEQ ID NO: 474038 - DNA, 122 bp, Homo sapiens
aactgcaggaggagacatgacttccccacacctgaaagagaaagcacactcccggaatcacgcagccctggaacaccttccagagtatggacttcccggaccagagaaggggggctcccgag

SEQ ID NO: 474039 - DNA, 122 bp, Homo sapiens
attaagaattgtaaaagttttgagattttacttttactgcaagataaagaaatttgtaatcgtctcagacacagtttaggagtgttttatgttaaaattatggtggcagagtgaatgatctg

SEQ ID NO: 474040 - DNA, 122 bp, Homo sapiens
tggctgtctgagtgccagcaacagaaagcaggcctcaagctgcacgcacgttgtggaagacgagtatgtttactcagcagcacacagccagctctgcccaggcctcggcctggcagtcttct

SEQ ID NO: 474041 - DNA, 122 bp, Homo sapiens
tatcccggggtagaacgaggctggcctgagccctgtgaccgaggcatggtcggggcccctcggacggtggggtgggcccgacaggggcagagtccatgagcccggtgggcacaggagcctgt

SEQ ID NO: 474042 - DNA, 122 bp, Homo sapiens
agctggcctcctggcctcctgcgggtgagagtgcctgggatacaggccctcgctgggatacgggccctcggcccggcctttgctcagggaccaggtacggagctcagtggcccaggctgcac

SEQ ID NO: 474043 - DNA, 122 bp, Homo sapiens
aagcagagcctgggtccccaaggaagaaagtgtcttcccatcagcccttgcgctgggccccggggaacctagtgtcccagtttcgaacccagggtgtgcgtctggccactaggggtacccca

SEQ ID NO: 474044 - DNA, 122 bp, Homo sapiens
tgcccactcccctgatcgctgccacgctgcgctgagaagtcctgtgtgttccctggatcccggtgtggtctccgtctcccaccccggcctgtcgcatccccacccgactggccattacccgc

SEQ ID NO: 474045 - DNA, 122 bp, Homo sapiens
acgaagacccaggcctcaggaaggacacgccgaggtgggcttcttacctgcagcgggcggcgggctcgggcccgtctgtcttttgccgtaccctgcctcctgcaccaccaaggacaagactg

SEQ ID NO: 474046 - DNA, 122 bp, Homo sapiens
cggggcgggtcggagggcggggcaggccgggggcggggccgggcaggaggcaggacctcgcggctgggggggcaggaggcggggcctggcgggggggggggggggtgtctgtcgggggcggg

SEQ ID NO: 474047 - DNA, 122 bp, Homo sapiens
cacatctgctgaggacactgactatggcagggaaagtgactctccaagttttatttgggtcgtaaaaattcatgctgcgcaccgcctctttaggaatctgtgccattaaatgtggctaggtc

SEQ ID NO: 474048 - DNA, 122 bp, Homo sapiens
gggctcgggggcggggcctgcttgcgacccgcagccaggagcgcctcgagtgccccctcgcgcccaggggtgggagtacagagccaggctcgccattccatcgtattaggtcagtaagattg

SEQ ID NO: 474049 - DNA, 122 bp, Homo sapiens
agaggacgtcagccctgccatcactgggctggggaaacaatgccagccatggctggtctccgggttcacagtgataagggaaataaacccttatttgtctaagccattgtgatttgttttcc

SEQ ID NO: 474050 - DNA, 122 bp, Homo sapiens
ggttcctcactgctttgtgcctcaatgtcctcatctgcgagctggggccatgacagaacccgcccggaagccctgcctgtgctcagcgtccaccccaattcccgggggcgaggcctggtgct

SEQ ID NO: 474051 - DNA, 122 bp, Homo sapiens
ttcaaagttaaacgtggaggctgggtgtggtggctcatgcctgtaatcacctggcactttcggaggccaaggtgggcaaatggcttgaggccaggagtttaagtccagcctgggcaacatgg

SEQ ID NO: 474052 - DNA, 122 bp, Homo sapiens
gtactgtgcttctccaacttcaggatgtgtaggaatcacctgagcagtcttgttgagaggcggacactgactcgggaggtctggggtagggcctgaacgtttgcctttgcggttctaacaag

SEQ ID NO: 474053 - DNA, 122 bp, Homo sapiens
gggcctcgcctcacctgggctccttcacagtcaggtctagactgcggtcctgggaggcttcgtgggggcctggggcgccggtgctctcaccgggttccggcttcacttgggccggggggaac

SEQ ID NO: 474054 - DNA, 122 bp, Homo sapiens
ccggcctgtgtttgttccaacaggtgggcagaacctggtgcaagaccgcagaggcaggggcgtcactcccagacccggtctccagacccaccagcccctcaggagaacactgctacagagtg

SEQ ID NO: 474055 - DNA, 122 bp, Homo sapiens
ccaactcctggcctcaagccatcctcccgcctcggcctcccaaagtgctaggattacaggcgtgagctcccgcgcccggctgatgccagcgttttaactctacaacaaactgaaactcaaac

SEQ ID NO: 474056 - DNA, 122 bp, Homo sapiens
ggtgttgtttccagcgcattgcatagggcttgctccgagctgccttcttgtctgcttcaccgtgctccattttggcaatcttgtggatagcatagcccaggtacatcacagagggagttgcc

SEQ ID NO: 474057 - DNA, 122 bp, Homo sapiens
ccacgttgtccttgaattcctttttcactttgcatctcttcacgtgcaggctgggaccagcggagacaccgcggcgaatgcagatgactgcaccggccactcagggagctgcctgggctccg

SEQ ID NO: 474058 - DNA, 122 bp, Homo sapiens
ggcaaaaactagtaaatcacgggctcctgacgtggcagctctggctaaaatgcaggtggacgtcctaggtgcccagggagttcgggctcactggggagtagggtgaaggaaaccctgaaacc

SEQ ID NO: 474059 - DNA, 122 bp, Homo sapiens
tgggctggaaggctcggaagcaggtggaaccggtcaagcagcgtgtttttgttggggtgacgttatgtaggggctgcacagtcatggggacatcgtgaagctggcaggagggtggctgtgga

SEQ ID NO: 474060 - DNA, 122 bp, Homo sapiens
tgtactagaaacaactttgctcttgtccctcaggatcttattgtctacgatgtgacgatccgtggagaaagtagcagatgggcagattttcatttggggagaatgagggagaaaagaacggg

SEQ ID NO: 474061 - DNA, 122 bp, Homo sapiens
tgggttggtggggagggcggggaaacaagcctggaccacaactcccaggagtacccgcgacggcggcggcctcgctgtcgcactcaggctatagggggcgcattgggcggaagaccctgggc

SEQ ID NO: 474062 - DNA, 122 bp, Homo sapiens
agcgcagccggaccccaggctgaccattcacctggagaggaagcctcagggtttcagaatcgggtctcaagtggaccacgggcatgttagcctcagcctccttatccgtcacatggagaaaa

SEQ ID NO: 474063 - DNA, 122 bp, Homo sapiens
tcagccgactcctacgcaggctcagtcagcagccccctggccagccccacccctgactgccggcctcagaactgggagctgcttcctggcagggcccgcctctgctgggagaccggacggtg

SEQ ID NO: 474064 - DNA, 122 bp, Homo sapiens
cctggtcgtactcgttgttgccggggtagagaggccagcccaggtgcagctcagccatgacgcagcccagggaccacacgtccaccttctcgcagaagggcagccccagcaggatctcaggg

SEQ ID NO: 474065 - DNA, 122 bp, Homo sapiens
catagctgcaagtaggggcgaaagctggagtgtctcctcccagcagcctcctcgcctccccgcaaacctccgaatctccctggacctcctggttgctgtggcccttcctcccctgattggct

SEQ ID NO: 474066 - DNA, 122 bp, Homo sapiens
tcattgtcgtgacaacaattcctgctttctttttttacagcagtcagaaataagctctcccgcccccgggaagggtttttccccattttgtcaaggaaagggaaacaaaggaaaacaaaaat

SEQ ID NO: 474067 - DNA, 122 bp, Homo sapiens
cctggccccgtactgtcccccgtcccagcccccgcccctggccctgcgggaggggccaggcgtcttccctgagcatggtgccacttccccagtgttggccttgtttcctgctcagcatttgg

SEQ ID NO: 474068 - DNA, 122 bp, Homo sapiens
aacgcaactgtagcccggactccgcggaggaaggccaactgactccactacgtgcacttccgagccacttgggcccagctagctgtgttaattatgggttctaattttattgcaactcggca

SEQ ID NO: 474069 - DNA, 122 bp, Homo sapiens
gggcgagtacagctatcaacttgtgacttccaggaggcctgggtttgcctacgaaggggccgtgttcccagttggcgttcacacgtggtgtacacacacaggcacaggcaccgtgtcccaag

SEQ ID NO: 474070 - DNA, 122 bp, Homo sapiens
tacgctgcaggaattctgctccctcctagtttacctgtcagaccctgggcaagtggcttccgttctctgggcctcagtttcctctcctgtaatgcctgaggataatgggtgctggtatcttc

SEQ ID NO: 474071 - DNA, 122 bp, Homo sapiens
gcactcggcgagacggctggccggccgcccgggccctcgatcgcagccagtcacagatgccgatgggaacgagcctccccgcggctgctatttgacttcgcaggcttccagctgcgcggcgg

SEQ ID NO: 474072 - DNA, 122 bp, Homo sapiens
agcgcctgagtcattacactatgcattggcctgctagatgataaaggtgtttcatcatgtcgtactgtagaagcagtgcttttgcttgggatgctcagtattccccaacccctctcatctcc

SEQ ID NO: 474073 - DNA, 122 bp, Homo sapiens
acaggacaggctaaatgagagggacctggctttgccctgagggttggtgggtggggaaggcgatcagcagccaggcgtctggggaagaggagcatggccaccaggtgcctccagggtgagac

SEQ ID NO: 474074 - DNA, 122 bp, Homo sapiens
aaagaaaacaaaaaaaaaataagagttgaaaaacagcttccagagcagtatttcaaaaaccgcaggaagctatagtgaaaatctaggaagatgcacagtgaaggaacacaaagtatgaaagt

SEQ ID NO: 474075 - DNA, 122 bp, Homo sapiens
cagcccccatccctggaggtcccagcgacttagcttctctcaggaggctcaagagtgcggcgggttgggagggcggcccctgggaggctggggagctgcaggagaccctgggctccaggtgt

SEQ ID NO: 474076 - DNA, 122 bp, Homo sapiens
tgccaatgaaatatctctgaaatctattctttctttccttttctaccactattgccctagcgatcattattagtatactcttatatgagtactcccatttctctgcttcctatacctttcct

SEQ ID NO: 474077 - DNA, 122 bp, Homo sapiens
atgtatgtacaacgttttcaccataatattatgcataataaggggccgtttggtggatgccgtagctgccgtgagtgtgggctgcacttgaccacagctgcctcctcctccagagaatgccc

SEQ ID NO: 474078 - DNA, 122 bp, Homo sapiens
tggtcatggggaccaccctttatttcctttcctgtggcctggagttggtgggcatgggtccgggcaagcccctggcgctccagttctgaggtcttctctctgcacctttgtccccccacccc

SEQ ID NO: 474079 - DNA, 122 bp, Homo sapiens
cgcctcagcccccgcgagccgcggcctctgggggcggggcgggctgggcggggctgcgcacggcactctgggaagtgtggttctcgggacctcctccccgaggccacccccacggcctcgcc

SEQ ID NO: 474080 - DNA, 122 bp, Homo sapiens
agtctaatattctacattacccttacattgcttctgtaataataaaaagaaagaatgacacggagagttttaataaaccactgatgtccaggccttaccccagataaattttaaaaggttga

SEQ ID NO: 474081 - DNA, 122 bp, Homo sapiens
gtacatcatatgtgtcaaaccattcatctggtggcaacttgcatgtatgtggcagccggacgtgatcattgttccctggggctaactcacccatctatcccagccccagtgttcctgactga

SEQ ID NO: 474082 - DNA, 122 bp, Homo sapiens
tcctgggtgggccttgggaccccttcgcgccctgtgtggccgcctcgtggtgagcacccccgcccctccctgcaaggccggtgttcccagctggaagggcaggcaacctgggaaccagaggg

SEQ ID NO: 474083 - DNA, 122 bp, Homo sapiens
gctggctcgccctttccattccgcttgcactctgattcttgtggtgtcccaagaaggccgcggatctcagttaagcagagacgagccgaacacctggcacggtccttctctactgttctctc

SEQ ID NO: 474084 - DNA, 122 bp, Homo sapiens
tgagctgacaggcccctctctgtgtggttcgtcagcgctggtgacgtcatgcaaacgtgacgtcagccctggccagaacatctggcctgggctctccaggcacctcgctgggccggctggga

SEQ ID NO: 474085 - DNA, 122 bp, Homo sapiens
aaattctttttactttactataaaataaagcacagatgcagaaaaccacacaagcaaattcgtagcttaatgaattgttctaaggcaaacaccttctagcacctaggaggaggaggggtttt

SEQ ID NO: 474086 - DNA, 122 bp, Homo sapiens
gatggccctctgactgaggagatttggcttaaagaggatgaccgagctcgccacgtggcacgggatagaaaagaagatttgctggcctcttatggagttagggttggggttggcatgggcta

SEQ ID NO: 474087 - DNA, 122 bp, Homo sapiens
cgagctgcagcggcacggtgggggacgcctctctccctggactcagcaaaggctcccaaacgtcgtctcttccaaattccaccgcacagccagctctttctcttcactgggagggtccgcag

SEQ ID NO: 474088 - DNA, 122 bp, Homo sapiens
cggtggccacacccttggcacagacacaggcagctcagtctgcagaacgtcagctggcagcgagcagcccttcccttcctccctggctctgtcttcgcgctcagcacaaatcgtttttcctt

SEQ ID NO: 474089 - DNA, 122 bp, Homo sapiens
ggctgatgcgtggagtgcggctgtcccagccatgcagcctgggggcaggcggggcctgtccggtgatgtctgtcttgcactctggagagcacgggaaagtctccaagttgtggtgtgtttcc

SEQ ID NO: 474090 - DNA, 122 bp, Homo sapiens
cctccacaagatgtctaggaggacagcccccagtgcacaattgaaggtgacagtagggagcgggggcagggttggctccagggcccaggaagcccaccggaggcatcagccttttgcttatg

SEQ ID NO: 474091 - DNA, 122 bp, Homo sapiens
ccggcccacacccagcagcatgccgggagttgtaggcggtaactgctgcaaagccgaagccggcgcgcaaaccggctcccgaggcggcagctctgctgcaaccttttaatgggggaagagag

SEQ ID NO: 474092 - DNA, 122 bp, Homo sapiens
ctccaggcgtgagccaccacccccggcctctttcatgaatttcattcagacaatctcttacggcattttctgtcttaatctaggataaggtttcttaacattggctctgttgacatttgggt

SEQ ID NO: 474093 - DNA, 122 bp, Homo sapiens
tggcagtggggaccagccttcgtccctcagggtccatcaagggcggagcttcctggatgtcgtgggaaggatggtggcatggcctggaccccgtaggggcagcacaggtcccaggagtctgg

SEQ ID NO: 474094 - DNA, 122 bp, Homo sapiens
ttcctgagcaatctgttcagtggaattaattcctaaagctggagctgcttagggagacatcgcagacttgccaggggctgccagctcaggcttggcacaggaatgaaaaataggcctctccc

SEQ ID NO: 474095 - DNA, 122 bp, Homo sapiens
gccctctcctggactgagctgctctgcaggacctgagcggctgtcctcttctcacggaggcgcccggagcccgccgccccctcattctctgtgccgcacattcggtgctgacaggctgtgca

SEQ ID NO: 474096 - DNA, 122 bp, Homo sapiens
ccacgccgctgacgggcccccgtgtgtctccctccaggtgctgcagggtgcacagctgatcgccgtggcctcctcggaccccgcggcggcgggcgtggatgggtcgccactccagggcagcg

SEQ ID NO: 474097 - DNA, 122 bp, Homo sapiens
gccctgcccggggggccgcgggtcaccaggcgcctgcatactggggacgtgtcccgctcccgccccgtggtccctcgtgcacatcagcccacatgtccacgccattgcctgagctcatgagc

SEQ ID NO: 474098 - DNA, 122 bp, Homo sapiens
ccgagctgcgatgtgcaggggggtgtccccatggtagttgacagcatggaggtcacagcgcgcattcagaaggacttcggcgatggcggcgctgcccgtgaaggaggcccagtgcaggcaga

SEQ ID NO: 474099 - DNA, 122 bp, Homo sapiens
cgggattagcttagattgcgcagtccagccccagccaatgggaacaggacacagaagcagcgactaaccgcattagggataaaaaccccttctctcttttgttcggtgtgctttcctgaaga

SEQ ID NO: 474100 - DNA, 122 bp, Homo sapiens
ggagaaacactctagctctactctgacccccattcatgtgttcacaccttttcatgagggcggccaagggaatggatgcctagtaactgtgatcttgggatgggctcgcaacctctttgagc

SEQ ID NO: 474101 - DNA, 122 bp, Homo sapiens
gcagaggttgcggccacgggcgagaatccccatctgagaggagcgttgctgttttcggtgcgtcagggtaaattaccttttctctctatgcaaaagaatgcaaatgagcagaacttttaaag

SEQ ID NO: 474102 - DNA, 122 bp, Homo sapiens
gggaaggcttggccgcgccgggctgtgggcactgcaggaggcccctgtgcaggtggagatcgccgcggccctggcgggactccttgctggctcttgggcgcgctgatgcccatcatctccct

SEQ ID NO: 474103 - DNA, 122 bp, Homo sapiens
tctatgtgctttgcctttattaattcgcttatttcttcaacaaccttatgtggtaggtaccgttaatatccccattttacagataggaaatggagacacaagaagtgaattaacttgactaa

SEQ ID NO: 474104 - DNA, 122 bp, Homo sapiens
tacaacactaacagcccgccgcccgcgagcacagcccgtctggtcatccggcggcctcaccgttcaccacggttggcggccctggtcactcccacggtctttaccagccgggtgccagtggc

SEQ ID NO: 474105 - DNA, 122 bp, Homo sapiens
gtgttgattgatctgactgcacccctcggctagacagctcttccctacctgtgttctgctcgagaagggaatgaggccttccccagtgggcagggcccccaagacagaattaatgcccgtgt

SEQ ID NO: 474106 - DNA, 122 bp, Homo sapiens
tgcggaagatctcgtcggggggcagcgtgatgctcttgtccagactgtccccgctgctcccgctgccgctcgctccacactccgccattttgaaagtgcccggccagctcatcagccatgga

SEQ ID NO: 474107 - DNA, 122 bp, Homo sapiens
gacagtgtcttatcactttcataacagcgtctggcacttgctgaaggaacacatgaatggcggtcttgtcgctgtcaaagtctttggagtttttcagtgtactgtttttgatatggggtttg

SEQ ID NO: 474108 - DNA, 122 bp, Homo sapiens
ctgatgacccgggagccccctggatgccggcgggtgaactcgctgatgttgtacaccttacggtcgatcactagccaccgctcctcgcaccctgagcgctgggccacctcgtcccaggtgaa

SEQ ID NO: 474109 - DNA, 122 bp, Homo sapiens
aagaacataggaggtaattcagcaaattccaatgaatatatagatgtacattctacattgcggtcagtttaaaagagaaagaaaaaggaagagactgatcacaaagaataaaaaaccattgg

SEQ ID NO: 474110 - DNA, 122 bp, Homo sapiens
ggggtgacttttcctcccagggtatattggtccatgtctagaaacatttttggttgtcaccgtggaacgatgctactggcatttagtggatagaggccagggatgttgctaaacatcctaca

SEQ ID NO: 474111 - DNA, 122 bp, Homo sapiens
ccctttgttaagaatggattttaaatcctgagtaaaatcaatgaagaaatcagggaacagcggatgaaccagacagcgcatatgctttacttctaaggaagacgttgaaagataagaatggt

SEQ ID NO: 474112 - DNA, 122 bp, Homo sapiens
tgggtccccggaggcttggctggcagtggggctgggtcacagctttgaaatctgattcttcgtcttccccgtctccgtgtccaggtgtccgtgttcttcaggaccagcccaaagcacaagct

SEQ ID NO: 474113 - DNA, 122 bp, Homo sapiens
cggctctatctccacccccatcccgtctagcgctcacctcccctgcgattcactaatccacgttaccatcacccgctgagcacccgtgaggggcacaggcctggcgtgacaggacacggatg

SEQ ID NO: 474114 - DNA, 122 bp, Homo sapiens
ctacctttcctaggcctggggctcagaagtcatgggtggtaggcccgactcggggagagtcggaccttggggacctcggggacctcgggcagatcggggaccccgggcagatcactttcagc

SEQ ID NO: 474115 - DNA, 122 bp, Homo sapiens
ccctgctcttctgtcaaatcgcacccagaccactgggcaagaagcatccaggagcagtaacgagagatcccgagctttgcggtcccacaggcttgggtttgaatcctcgctccgcccctccc

SEQ ID NO: 474116 - DNA, 122 bp, Homo sapiens
cctgctgaggagcgggggcagctgcaggcagcccgagaacagacggagactaagcttgaacgaggccgccttgggagggcggggcggggcgggatttctcctgaacttcctgcatttcctat

SEQ ID NO: 474117 - DNA, 122 bp, Homo sapiens
aataccaggctgtggtataatgtttcactcttgaagaggtgggccttccaagtgactactcgtatttcccctatgaaatgtgatgttctccatggaaacagcccatgaacagcccagtgttc

SEQ ID NO: 474118 - DNA, 122 bp, Homo sapiens
cggccgggcagcctgtgccccgcaggccgggagggcgtggtggcggccatggtgctggcccgtttcgagtggcggatgcccatagagaacgctggagccctggctttgttcacggtgacctg

SEQ ID NO: 474119 - DNA, 122 bp, Homo sapiens
cgggacgcccctggcagcagcgccctgcgtgttaaagcgccgcggaggaagctgtattgtcgcggtacgcaggaaggcaggggcagcacctccctcttcaagaacgagcatctgagcttttg

SEQ ID NO: 474120 - DNA, 122 bp, Homo sapiens
gcatccatttactatcattgactgcatgtaaataaacaagcagtcaccaaaagtgggaggcgacttcggggacttagggagaccgggcggacgatttcccacaccggggctgtctgatcgcc

SEQ ID NO: 474121 - DNA, 122 bp, Homo sapiens
gaggggagagggggcgggacccagagggaggttttttgccgcgaaaagaccacgtggggacgcggtggggcgggtctggcgggggcggggcacctctgtgcagggttcccagtcaccgcgac

SEQ ID NO: 474122 - DNA, 122 bp, Homo sapiens
cagctccccggccaggtctgcgttctctttctccagcgtctgcttattcttgtctaggttcgccttggcctggcgaaggaagcagaggggagggataacagggaggctgtggccgggagaac

SEQ ID NO: 474123 - DNA, 122 bp, Homo sapiens
gggcaataaaacaaataatttaaaaataaatctccatgaaaactctggagagcagcccgccgcctttccaccgtgggtcaaagttccccgagaggttagaaagaagagaaagtagtttcttc

SEQ ID NO: 474124 - DNA, 122 bp, Homo sapiens
ttgaatttctactggtcgcttctaattgtaacttggctataactacatttttatcctttgcgttagagtatgaagaaaaacacatccttaagctttagaacagagcaatgtctaaaaacatc

SEQ ID NO: 474125 - DNA, 122 bp, Homo sapiens
cataagagcagaacgcacctgcactgggcggaattgcggcccccccgcaaaattcacatccgcccagaaccttcacgtgtcaccttatttggaaatagggtctttgcagatactaaggatct

SEQ ID NO: 474126 - DNA, 122 bp, Homo sapiens
tgaatgaggaaagtgcttctcctgtgctgaaggatacgggggcactgcttgcacgtcagccgcgtggccgggggcggggtggggggggggtcatgccggtgacatagccttagtctccccct

SEQ ID NO: 474127 - DNA, 122 bp, Homo sapiens
ccctgggcccactgcagtaaagggaaagacagatagttcaaagaccccatccagtccctccgaaaccttccttgcagggggccctgcgccgagcacgggacctacagcttcagtcttccttt

SEQ ID NO: 474128 - DNA, 122 bp, Homo sapiens
taaggcgagggctgccgggagcacggtgagctggccaagtcctcctgagcaagcgagtggcggctggcccggccggcctgggcttgggcctcctccaagactcgcctggcaggagggcggag

SEQ ID NO: 474129 - DNA, 122 bp, Homo sapiens
agatatgtgggcagggttacaaatacctataaaaatcattaacatttatatacacaaaagcgctggggcccggggcggggccggaagtcgtgggggcggggacatgaggccgttgggcgggg

SEQ ID NO: 474130 - DNA, 122 bp, Homo sapiens
ttctccgcgtgggtcgctcggcgatggggttggggattttcacggtgctgtcccccaactcgaacttcacaccttgaccgaggacccccgggaggcggccgcgaggtcccccagcgcggcgg

SEQ ID NO: 474131 - DNA, 122 bp, Homo sapiens
ggcggcggcggcaggcagaacgtctgaagccatatgtggctgctcaactggatgtgctcccggagacctttaccttgggggacaagaagaactaccggggcttctacaaccggcccctgtct

SEQ ID NO: 474132 - DNA, 122 bp, Homo sapiens
gttcatggagctgctctttcctccccgctagggctggcagctctgcagggaggcaaggctcgctgtgctccctccactgccgtgttgccagcagcttagtggagggcctggcgcatggaggc

SEQ ID NO: 474133 - DNA, 122 bp, Homo sapiens
aagtacactccggcaagctcgaaagggacagcaggggagccatgtgtgcgtgcgcgtgtgcggagaaggaatggggagggacagttgcatttgcagaagcaatcctgtctggaactaagctg

SEQ ID NO: 474134 - DNA, 122 bp, Homo sapiens
cacagtgaccttatttttgtctggactcagacaaaattatgacgtggtggtgcttcgtgtcgctttctagtacagagcagtcttgcggaggctggtatgtggtgagtgtgtctgtgtcccac

SEQ ID NO: 474135 - DNA, 122 bp, Homo sapiens
gaggtttgtaaaatgaaccaatcagcactctgtaaaatggaccaaacagcaggacatgggcggtgaccccaggaaataaaagctggccaccccagccagcagcagcaacgtgctcgggtccc

SEQ ID NO: 474136 - DNA, 122 bp, Homo sapiens
tcccagcaggctcctgggactgtcgggcaggggcggctccaactgggcacgcagaaggcacggtgagggtgtctcctccacctagaagtggctcagggcatcgtcatcagccagcctgtcca

SEQ ID NO: 474137 - DNA, 122 bp, Homo sapiens
cagagggacttaggccgggaaggggcagcacggcgccctccaggcagagaagcagccccgcggccaccctgatgcggcgcggactcctcctgtccagttctctgtcacacctgctgcctgcc

SEQ ID NO: 474138 - DNA, 122 bp, Homo sapiens
gatcatcagctttctcaatttctaagagagagaacaataaatccttccatgatcatcacacggaataaaactgcttcaaagatgccttggggttggctggctttttactggaacccctataa

SEQ ID NO: 474139 - DNA, 122 bp, Homo sapiens
aggctggttttgaactcctggactcaagcaatctggctcccaaagtgttgtgagccactccgcctggccttaagaatctcaccattttaaaagcttttgatatatactgccaaagaatagaa

SEQ ID NO: 474140 - DNA, 122 bp, Homo sapiens
gctcacttcttgttaattgccgatacgcagctgaagtagctccctgacctctttggaggacggcgtcatttcagtaccaagtatcaccattattgggcttattaacttcattaaaaccggtc

SEQ ID NO: 474141 - DNA, 122 bp, Homo sapiens
agacaacctgtgaatggcctggcgtctctccaacggtgtggtgtggacttggcaccacttcgcacggcactggagctgggtgctgccttccagctgggcgtgtgaagggcccgtgcaaagcc

SEQ ID NO: 474142 - DNA, 122 bp, Homo sapiens
ttctcccttccgacctcccgtggccccagcgcggccagctcacagtaggtgctcgggcagcgtttcttcagggacctagacggcctggagaggaagggccccagcccagccgcccgggcctc

SEQ ID NO: 474143 - DNA, 122 bp, Homo sapiens
tctcatttcttctccctccacttgtgagcgcccccagctttgcggcgccccccaccccagcgctgtctgtgggtcccttgccccggagctgactcgcctccagtgagtccataccccaggtt

SEQ ID NO: 474144 - DNA, 122 bp, Homo sapiens
tccgagaggcgcggagcccggggcgggggcaaagatcagggacccctgggggcggggtttcgccctcggcccacaccccctgccccggtttgggagtcggcttcctgcgaagcgctgactga

SEQ ID NO: 474145 - DNA, 122 bp, Homo sapiens
gcaggtgtgcgggtcttggccctagcggaggccgcgccggggccgcgggccgcccgactgcgctaccttcccgccgcgctctcagtacagcccgcgctctggctccggctccggctccggct

SEQ ID NO: 474146 - DNA, 122 bp, Homo sapiens
tgtgtgtgtgtgtgtgtgtgtgtgtgtattaagaaaatataattgtcttcagtatcttatcgaatgggaggattttaaaaatataacatggtttaatctgcttagaaacatatttcatgctt

SEQ ID NO: 474147 - DNA, 122 bp, Homo sapiens
attcagtgaatacccagggttaaggctatttacatgcatacttgctaatcctcaccacaacgctgcaaggtagatattcctatctctgtttcacttaggagagaaattatgttcccaaagtt

SEQ ID NO: 474148 - DNA, 122 bp, Homo sapiens
gagatggagggaagagttagcccagaatcacaggtgctgtagaaaggatacctgagttgccgggagagggggtccatgagttggggatggaaggagagcttggcccttcaaacaattgaaga

SEQ ID NO: 474149 - DNA, 122 bp, Homo sapiens
agcccacagccctgccaacctaagataaagatggtggtgacataatagcaggtgccctaacgtgttgtccacttttcccctgagaactgtcacacatatgcacccttcctacccccaaggac

SEQ ID NO: 474150 - DNA, 122 bp, Homo sapiens
ggaggcttataccatccaagtcccggcggtgctataataaataaattcaccccagtattccgggaggccaaggcaggagaagcactcgtgtccagaagtttcagaccagcctgggcaacgtg

SEQ ID NO: 474151 - DNA, 122 bp, Homo sapiens
gctacccccaccaacccagcgctggtgacgccaggagaaagcgatcctctccggatgggacgaacactgtccggcctccagctgctcacccagcagccgctgccgccattaaaaagcaacgg

SEQ ID NO: 474152 - DNA, 122 bp, Homo sapiens
cagacccagacaagggaggctgtgcgtgaggccacacggtgccaccaacaccaccggtgacgccacagacaccacgtgctgcagggtccagcagcctgccccaggtacagccgggaaagtca

SEQ ID NO: 474153 - DNA, 122 bp, Homo sapiens
ttgccagctccgactgctgcagggagcgccaggggtgagtgtgcggatcagcgctgagcccgggagtgcgggtcacgcccgcagctggcgcgcaggtggggaaggggtgtggggacgtgggg

SEQ ID NO: 474154 - DNA, 122 bp, Homo sapiens
cgcatgcgctcttcaaatttttgagacagtttacccagaatgcagtgctcaaaggaaacgcgtgcgcagtgtggtcaggttgtttcgctgggtgagtaaaatgaaatcttagaggcgttgtg

SEQ ID NO: 474155 - DNA, 122 bp, Homo sapiens
aggccattttcacatcccacttggtctagccatgttctcactcattaactagaatgtatacgtttaactaactttttaatgctccccaaaccttttcagggtttagaacttttcaggggcct

SEQ ID NO: 474156 - DNA, 122 bp, Homo sapiens
ggtgaagacttaacttacaggtaagggaggcccttgactgacgtggggtgggaactgtttcgagctgtccttatctctgggcctgtttcctgacctgtgagatgggcctgtttcctgacccg

SEQ ID NO: 474157 - DNA, 122 bp, Homo sapiens
ttgcctaggaagggttgggccgcaggtttcgccagtgctcgacaacccacctggagatagcgggtcggggagggagctgcgaggggggcggactcctgttgctcagtcttcagaccgcagca

SEQ ID NO: 474158 - DNA, 122 bp, Homo sapiens
aaaaaggtgtccatattttacctttctgaggtctgaccatgactggaggttgtgggaacccgatagggcctgccctaggcactcaatccttcacagggatactcaatcctgtgggttgtgcg

SEQ ID NO: 474159 - DNA, 122 bp, Homo sapiens
cttttttgaatatcgtttcccaaagcctgcagattttcactttgaaatgaaacaatcctccgctggttcccccggggacaggcgtctcctgcgttcccccgcgcggcctgggggacccttct

SEQ ID NO: 474160 - DNA, 122 bp, Homo sapiens
aaagagtggaaacattttacctcttttcctgctttcaaaaacctgttactgcaaagacctcggatttgtgggtcaatggatttgggtactatattcttcttaccgtatctttttttcttgct

SEQ ID NO: 474161 - DNA, 122 bp, Homo sapiens
tgtgaatggactcacacacactgcggcctttggtgtctggctgctttcactcagcagcgtcgtcagggtctactgcgttgcagggggtgtcagtgcctcattcctctctcgccgaggaatag

SEQ ID NO: 474162 - DNA, 122 bp, Homo sapiens
ctgacccctgcgctgtacacggcactgttcatcacacacgcggctccagagcccgacccccgcatgcacacagcgctgttcaccaccgcatgtggctcctgagcctgaggaggagcgtggtg

SEQ ID NO: 474163 - DNA, 122 bp, Homo sapiens
gcagacagggctagctgcgggccaggctggaattcagctacagcgggagactggggagaccggggcagccacactccacagccggaattcattggaagcttagaaggcacttccctgaggag

SEQ ID NO: 474164 - DNA, 122 bp, Homo sapiens
ccccggagtccgcgaaacttccgagcgggcgcccgtccgccctgccgccgccgccgccgccgcttcgcctgccggcctgagagcgggaccatggatgaaaggttcaacaagtggctgctgac

SEQ ID NO: 474165 - DNA, 122 bp, Homo sapiens
gttatttgttgattcacaaatccttatttcagctcaggcctttttcttgggaaacagatccgtatgtttaggaagcatatccataactgcttcctaacatcctttcttggatatcccactga

SEQ ID NO: 474166 - DNA, 122 bp, Homo sapiens
ccatcaccttatcatcttcgcagctctgcagcccataagcaatgttgttcctcacagaaccggagaacagcacaggctcctgcccaactgaaaccacctgtgcagcagggacaggggcagag

SEQ ID NO: 474167 - DNA, 122 bp, Homo sapiens
agaggttgctatgggaaggtcgcttgctccagggggccctggaacagttgctaagtttaacgccctggcccaggatccacctgtcctgctgcagaccagccctgctcattcctccctctggc

SEQ ID NO: 474168 - DNA, 122 bp, Homo sapiens
tccggggaggagggatgtgaaagggggtcagtcgccaggcgagctgaggacccagttctgcgcctttgcctgtgccctgacctgaaggaaagtccctgtctcccgagctccgattttcccga

SEQ ID NO: 474169 - DNA, 122 bp, Homo sapiens
tgccataaaattcccccttgtagaacctggagaatacgatgccaagtgaaataggccagacgctgagagagaaaaacactgcgtaatcccacgtattgtggagtccaaaaacaaaacaagca

SEQ ID NO: 474170 - DNA, 122 bp, Homo sapiens
ctgacctggaggttctgcggacaccaactaacaggccccgtcctcccacccctcctcactcggcaaattcatactcatgccaggcatggcccggcgcccactccaggcatctctctgacccc

SEQ ID NO: 474171 - DNA, 122 bp, Homo sapiens
tccagtttgggggtcaccgagctggggtggtgtgcagccagcagaggggattcaggatcccggggtgactcctggcccaggcctgtcaccccacagctggctcctggccccaaggcagccac

SEQ ID NO: 474172 - DNA, 122 bp, Homo sapiens
ctccccctggctctgggctggcacaggcgtggcctgggtcagacactgcagggggcctcccgtcaccaggtcactgaactgtgactgagactcgagggaggggacaggatgtgtacaactgg

SEQ ID NO: 474173 - DNA, 122 bp, Homo sapiens
ccggtgtccacatttccggtgcccggtgtccacatttccggtgtcccgtgtccgcatttccggcgtctcgcatgtgacactacttcacgcctgttcagccccggcatggatgggattggcgg

SEQ ID NO: 474174 - DNA, 122 bp, Homo sapiens
cattcattcagctcatttactgagtgccccttacgtgccaggcactgtgctgggggactccgggaccacaacaggaaaggaaatagacaaagccctcaccaggcccgttagtttctagaatg

SEQ ID NO: 474175 - DNA, 122 bp, Homo sapiens
tgcttagttttctcattcagattgtggctgagaagttgtcatttatcgtctgtacaataacgcagatgtgtatgtgacttcccccttttcagcagtggagacactgaagcggcctgaggtta

SEQ ID NO: 474176 - DNA, 122 bp, Homo sapiens
cacttgttttgtgtttttcgatctcttcaacgccttgacctgccgctctcaggtgagacccgggctgaccctcctcgctgcagagctgctgtgtgttctcgacagcagcgccccgaccctgc

SEQ ID NO: 474177 - DNA, 122 bp, Homo sapiens
agtgggaccttcgcgtgcacactggccttcccacgcgccccgctgcgatggcacccgcgccgggccccctagctcacacagtcggagcgtgctcagcgcgtggccacctcctgccaggtccc

SEQ ID NO: 474178 - DNA, 122 bp, Homo sapiens
aggcttccaagaaacgcgtgtctgccgccccctcctcccaccctgaggccagtcctagagcgaaggccctcctccgacgtcgtcaccaagcccaagggaagggtggcaggtgctcagcgggc

SEQ ID NO: 474179 - DNA, 122 bp, Homo sapiens
ggtgatcaaacaggaatgcttttcttctcagtttaggacgaagacccgccatgacaatggcgggaacgctggagtaaaacctcacggcggccagcatgaagtttttcgccagatttgtggcc

SEQ ID NO: 474180 - DNA, 122 bp, Homo sapiens
gaaggcggacaccaggcccccctccatccctcccaacatgtcagaagccaatgggccagccgggtgagaggccctgcccagctacccagtgttcatggctcctagacaagcctcttggcagg

SEQ ID NO: 474181 - DNA, 122 bp, Homo sapiens
aaaaaaaggaaaaaaactggacttccctggggaaaaatccatttgatgatgtggcttcatcgagtattcctttgtgaattcctggatgaaattttcaaggcaaacaggaaaagcactgaaat

SEQ ID NO: 474182 - DNA, 122 bp, Homo sapiens
ggcctctttgtactccagcgctagtgagaatttgcagacttactaggacggtgacatttgcgggcaaacacgaatttgaccctactttggaagaagataaccggcacttaacatatctgatt

SEQ ID NO: 474183 - DNA, 122 bp, Homo sapiens
aggttctctgttccaggcatagggagaactgttgtatatccctcattgcaggcacagccccggaatcttccagccctttcgccaaacagattcttcaccatgtggtctcagtttccctgccc

SEQ ID NO: 474184 - DNA, 122 bp, Homo sapiens
taaataaaatagctctgtctttcaatgaaacactcacgatgactactgcgccttctctttcgaaaaactcttaatttagtgacttatggcaaaattttatcttaaatcaatgtgattctttc

SEQ ID NO: 474185 - DNA, 122 bp, Homo sapiens
ctggcggcagggagggcgcgtgccaggtgcctgcgggccgcggcgcaccgagagccttcacgaagctgggcagcctggccgctgccactctttctgcgtccccagctgctgagaaccacagt

SEQ ID NO: 474186 - DNA, 122 bp, Homo sapiens
tcctgctctgctgttctcatgatagagttctcgcgagatcttatttaaaagtgtgtagcacgtccccattcactctctcctgctctgctgttctcctgacagagttctcgcgagatcttgtt

SEQ ID NO: 474187 - DNA, 122 bp, Homo sapiens
ccacctctactccagttggcctttcttttcattgatctacaggcacatcctgtttattctcgaattagatctgcccagctggaatgctatccttatttttctccaataatcccaatccttcc

SEQ ID NO: 474188 - DNA, 122 bp, Homo sapiens
ccgggcctggctcccgggtgcgcagcgccgaggaaaagaatggggagggtcagcagtccacggccgacatcatcacatccgaaccaggtgagagtagccgcctggcccggcccactgtgctc

SEQ ID NO: 474189 - DNA, 122 bp, Homo sapiens
tcggtcaccctgccacgcccattccggactcccccaggcctctccactccccagaaagcccgtaagctaccctctgttgcggaggatcccacggccaggggtcgcttcccgcgccgggactc

SEQ ID NO: 474190 - DNA, 122 bp, Homo sapiens
gcgccaggagcggatccgaatgcgaatggctgctgtccagggggcctccaggcaggcacacgcctcccacaccacccgcgggcgcattgggcatgccgaaatccgggagagcgtggatgagc

SEQ ID NO: 474191 - DNA, 122 bp, Homo sapiens
gtaacgacaatttggaatggagactacaaaacagcctgggtggcagagaacagggcctctcgaggtgactctggcagtaccgcccttgatcatttgtaattgagtaaggatgataccgagag

SEQ ID NO: 474192 - DNA, 122 bp, Homo sapiens
gagagacttccggttctgacagcggaatcccttcggagtgacgagggcggggtcacagctcgcgcaccctcatctggagagaggcaagaacagggcagcttggaccttttgtgggtgggtgg

SEQ ID NO: 474193 - DNA, 122 bp, Homo sapiens
gctgactgtcaaaagtcagtccaacccgacccacagggaaacagctgcaggaagtgactgcggaaccgggaggcggtggaggaggagactgagggcgccggctcggcgtcgccactgcgcat

SEQ ID NO: 474194 - DNA, 122 bp, Homo sapiens
attttcctatcattattcccgtactaaggaggcacagttgccaccataaacagcacttaccggtggcatttacagcttctcaggtgatgtggcattctgaccagatgccagaaggcttgtga

SEQ ID NO: 474195 - DNA, 122 bp, Homo sapiens
gctggtcaagcagccagtcaacaaatgctccagggtgcagactgctcagctcggcgctggcgtcgaggtagccaggccatgccctcaggaaatgctcaggccacattccccgtttcccgcct

SEQ ID NO: 474196 - DNA, 122 bp, Homo sapiens
tttttgccttggagagaagccagtgagccatttgggtttggtggctaaggatatctttaccgagggagggagatgtaccctggtgggagtagatacgttatatgaaacatcaaaatgcaaac

SEQ ID NO: 474197 - DNA, 122 bp, Homo sapiens
ttggcgtaattggaacactcggcgtgaggcgcaccaggtttccagcgcccctggtttccacgtcgctatggtaacgactcaccctgcacacatgcgaactacaattcccataaccgcccgcg

SEQ ID NO: 474198 - DNA, 122 bp, Homo sapiens
gcaccaggggttactgaagccagccagtcctcccatgggaggaacgtggggaagcaaagccgctgcagcctgcacgcccggcgctctgggccctgcctgctgcctgctaaagagctggaaag

SEQ ID NO: 474199 - DNA, 122 bp, Homo sapiens
actctacggtttgttgttttgtgggtctgaaagatgcatgggatacttagttttctcctccgcacctctttttctcgggatttcttgtaccctcccgcccccctatcgccacccctttctct

SEQ ID NO: 474200 - DNA, 122 bp, Homo sapiens
atggctgcatgtaaaaaaaaattgtagaagggtgatgttatagaaaacttggggcaaattcgtgtgtctgcttatgcacatatatttggcaaatttgtttctgcttatgcatattctctaaa

SEQ ID NO: 474201 - DNA, 122 bp, Homo sapiens
acaccaggtggctggactgatggagacgtcttcagacaggagccgctcagtcttctttcccgggcgtcgcctcctgtgtggtgccggaagagcgccaggttcagtgttaccctgagggctga

SEQ ID NO: 474202 - DNA, 122 bp, Homo sapiens
gcgcctgcgcggctttcaggccgggcggcggcggcggcggtggctatttatagtaggtgacgtcaccttgaaatagaccgttagggccggcccgcccttcccccctcccactcccgccgctc

SEQ ID NO: 474203 - DNA, 122 bp, Homo sapiens
cctagcgctgggagccatgtatccaaacaatagggtattcttttctcagtccagtttttccgcctcctctaattaagcaaaacactaaggctcataaaatattgggttatcattctagctcc

SEQ ID NO: 474204 - DNA, 122 bp, Homo sapiens
ggcggcgacctcttgttctcctcgcgtctttctgttggaaggggccggcgtctggcctcgcgttgtcctgccagaacgtgggcagaaagggtagcagggaccttgctctggtggggcacgtc

SEQ ID NO: 474205 - DNA, 122 bp, Homo sapiens
ctgtcatttttgatggtaggaatccctgcagcttaggtatctaaatttctaatttgtaaacgtgggtcgggtcgtgagacaagatttgcaaactagggtgtatatgcagcccacaattccct

SEQ ID NO: 474206 - DNA, 122 bp, Homo sapiens
gagtcagagagcccagctggcttcccgcggagagagaacgtgctgttaagatgaccgctccgtccgcccaactccattcccgccctcgggagttcttcctactatttaaaccacagccgatt

SEQ ID NO: 474207 - DNA, 122 bp, Homo sapiens
ccgccgtctgggcaccgaggcgccctaggctcgcgtccaggcgcccgccccgcccgcgtccggccgctcccccgcccatctgggccccgggccctgaaccccgtccacgccctgcgccccgc

SEQ ID NO: 474208 - DNA, 122 bp, Homo sapiens
cactgagctctgccaaaaatacctggtttggtagggtctcggctcctgctggctccctggcggatacagtccttctctccagtgtcgtttctcaacctcttaaatccaggtttcctctccgt

SEQ ID NO: 474209 - DNA, 122 bp, Homo sapiens
ctgatatatcttaaacttacttgaatatgtagcacctattaacatgccatggaaataggacgtttggagtattgtaattaagaacaattcctattaatatacatggggcaactgagaattaa

SEQ ID NO: 474210 - DNA, 122 bp, Homo sapiens
taaactttcctgggtagggaagatctgaaaaatgtcacccatgagccactttctaacactcgttccatctttctttttccagtgtgcaaaactcaattgcacagtcctcagttgctgaaact

SEQ ID NO: 474211 - DNA, 122 bp, Homo sapiens
tggtattcagattaaagaactaaggtggcactaagtccatacagttgatgtcactattcacgtaacaaactgtggtaatatcaggtttgtttactgcctgaaaacaagagagtatagggtat

SEQ ID NO: 474212 - DNA, 122 bp, Homo sapiens
cttaccaggagcagcattgaggtttttgagcatagtacttgactactctagaggctgagacgggagcatctcttgagcctgagaagtggagattgcaattgagctaggatcaggccactgca

SEQ ID NO: 474213 - DNA, 122 bp, Homo sapiens
tcttcagcaagccaggctgcagaccgaagaaagggatctccaagtcagtttcaggatgagcggggagaggagaggataaagatgtccttgctttgtgcctgggatctgtaacttacttggaa

SEQ ID NO: 474214 - DNA, 122 bp, Homo sapiens
gctgatctctccagctgggctgggctttggggacataggccttgaaaatctcctaattaccggtgggggcggagccgcgtctccagggtctcggggagggcgtcgggggtcggggattgcag

SEQ ID NO: 474215 - DNA, 122 bp, Homo sapiens
ttgtgtgttcctttgagagaggtgatccctaaagaataaaatatgaaggtgttcccatgtcgtatgtacacatctgtgtatatacggcagtgactttgtgttaattttctcatttcatagca

SEQ ID NO: 474216 - DNA, 122 bp, Homo sapiens
aatatgcacaaaagcatatgggcagagtttagggaaatcaacaagagatggtacagtacccggggccagcaagagagagcagtggttaccacccagaggcctgaagtagcagagactggaca

SEQ ID NO: 474217 - DNA, 122 bp, Homo sapiens
atgagctttgggtatttctttccacagccgggactgatccagcctgtgcctcctctctggcgtaacctcatcctgtccttcctcatttttaacacccaagtgcagctgcaggggctttcatc

SEQ ID NO: 474218 - DNA, 122 bp, Homo sapiens
cagcaggacgaaccctccctgcactccaggttcctgtggctccacccgagaagccctgcacggggagcggccctccccacttgcgtacttcacaaacattacgcctggttctgccgcctctt

SEQ ID NO: 474219 - DNA, 122 bp, Homo sapiens
ggctccacctcattcttccttcctgtctgatttcaacagccaacagcctcgcagacacatcgaggagccggggcaccctggcttggtcaccgcccccgtgcaagttaagtgcgggggcgatg

SEQ ID NO: 474220 - DNA, 122 bp, Homo sapiens
gctgacattgagacctggtgtcagccttacaggtgagggcaggttccaacttccgagtggcggtttcagggcctagaaaagagtgagtctcctcgctgtgactacggctgcaggggtagtgg

SEQ ID NO: 474221 - DNA, 122 bp, Homo sapiens
cggcgctgcgcagtgtccggtgtcctctcggtccggagcttctccagaggaggagcggctcgtgcgcccccagacctccggtactgggagactcgggccctcctgtaagagacctgagcgcg

SEQ ID NO: 474222 - DNA, 122 bp, Homo sapiens
agagcagttcaagtgacagcgaagaaaatgagcccctagaaaccccagctccggaggtaccgtgttccccctcgagatggccaccttagatggcagcattctgtcctttgaagttagagtca

SEQ ID NO: 474223 - DNA, 122 bp, Homo sapiens
tgcagaccctgacgaaaaggagcccagccagaggagaccaggatcgtgaactgcggtagacgaggctcgcccagcacagaaagatctaactccttgtgatataccccatggatattcaaaca

SEQ ID NO: 474224 - DNA, 122 bp, Homo sapiens
actgggaagggcagaagaggcaggtgaaggctgctgacctaagccatcagagtgggaagccggaggagctcccatgcccccaataggctggtccatgcaccagggccacaggggtcaccagg

SEQ ID NO: 474225 - DNA, 122 bp, Homo sapiens
acatcacggcgcccgtgacagagccagcttaacggattaataagcgcagccaggtacccgcgcgaggcacttgctggcaatggcgggaggcggacgtggggggtcatgcaataggtactgga

SEQ ID NO: 474226 - DNA, 122 bp, Homo sapiens
gccacctgtgaagacaccaaggcaggccgtgggccggtcgcagagtttctgtaaagccttcgccaccgccatcgccatcggggatgatctccactccgtccgccctgtcacagtggtgccag

SEQ ID NO: 474227 - DNA, 122 bp, Homo sapiens
accaggttctttgggccacaggcctctcctccactgcatgtggcggcagggcagggaggtcgcagggctccatgattgtgggacagctttgagggcacatggggcagaggccctcgaaggtc

SEQ ID NO: 474228 - DNA, 122 bp, Homo sapiens
caggaggaggccaagggccaggccgcgagcggtcatgctgtggccgcgcaaggctgctgacgccggcggcgttcggctggttgggctccccggaggcggctctacttccccgggctgtttca

SEQ ID NO: 474229 - DNA, 122 bp, Homo sapiens
taggctccagggacctcctgcggagctcgcaccctagctctgccgccactgccgcctcctcggccccggaccgccgagggttaacaaaaaagccccacgccccctttgacggcttagagccc

SEQ ID NO: 474230 - DNA, 122 bp, Homo sapiens
ctgcattctcacgggtgggaatctcagccgcccggagacctgaatgcctgccagcgctcccggtgtcccgtcaggactgcactgacccaggcccaccttgcatgtgccacaggaatttctcc

SEQ ID NO: 474231 - DNA, 122 bp, Homo sapiens
gctgctgccagaagttcacggcctcggtcacgtcgaaggccttccagccgctctcgtggacggacaccagcctgagacatgatacacacgacacggagacccagcgccgcttgagggcgggg

SEQ ID NO: 474232 - DNA, 122 bp, Homo sapiens
ctgggcctgctgcttttgaagcaccccaaattcactgtccctagggcttctccccgaggccgcactggtaagggagagctcctggctgcctctccctgaaatcacactttgagttccaagat

SEQ ID NO: 474233 - DNA, 122 bp, Homo sapiens
ttcatttctaatgacacgccatgaatcatccaaccacagttacagcaacctgccccatgtcggtcacagagctgaagttagaacctgagccttctttgagcccggcatgtaaggaggaaaga

SEQ ID NO: 474234 - DNA, 122 bp, Homo sapiens
aatccatatgatatagatttaaaatatatcattgtgtaagatcttattttttcaccttaacgttggcacctatgtaatttagctgaaacacttttagaattcaagtgagctatgcacacctc

SEQ ID NO: 474235 - DNA, 122 bp, Homo sapiens
agctgctgctcgatgcttctgccctcaccctggtgctaggcggccgccggctccgcagggcgtggttctcctggcccagagccagccctgcctcaggggcgtccagcatcaagccagaggcc

SEQ ID NO: 474236 - DNA, 122 bp, Homo sapiens
acaatcctgtcccacgtattgacagttgtgaatctcccgcggtgcattttcagacgagatcgggcgcgttcagagtggtatgaccatagacccgcagtgcattttcagcctccctcctggcc

SEQ ID NO: 474237 - DNA, 122 bp, Homo sapiens
cctttccgcagaagcaactgcaaaagcgccggctccgtgcagagaaaaggcccacgccgccggcctcacctacggtgccgcaaaatgctggtgcctttactgcactttacgactagcgggag

SEQ ID NO: 474238 - DNA, 122 bp, Homo sapiens
cctactctgtattccagccacacttgcttcttttcagtcctcaaaagtaccaccttgggccgggcgtggggctcatgcttgtaatcccagcacttagggaggccaaggcaggtgaatcgcgt

SEQ ID NO: 474239 - DNA, 122 bp, Homo sapiens
cacccaaaccgaggctgcaaacccagacctcctgctccatggaacaggcaggagccctgccgtgacgggcacagctgcagccacccaaatgtggctgcagacccaggtacccctgcactctt

SEQ ID NO: 474240 - DNA, 122 bp, Homo sapiens
cttgtggagatggatgctcctccgggtcaatctctgccttctcggggtcgccctcagtgtcgctgctgaaaaggcctccgtcctcctggtccttgctgtgcgctccccacgtcaccgcgttc

SEQ ID NO: 474241 - DNA, 122 bp, Homo sapiens
caacaggatagttaaagagcttattcaaaaggcttgaaccgagcagccgtgcaggcaagccgaacacaaaaggaagcaaaataccccaagggtggcgagagccaggccacgggtgtccatgt

SEQ ID NO: 474242 - DNA, 122 bp, Homo sapiens
acaacctctgggcaacagggagaggcggctgcggggccaagtccctcctaagcggccacgcgagaggccctgagtcgagaagggttacggcgcttcccagagcccaccccgcccaacgtgtc

SEQ ID NO: 474243 - DNA, 122 bp, Homo sapiens
ttaaaacaacagaaacgcatcccccacagccctgaaagcagagggctggcatcaaggagccggcccaggggtgccagccgtcctcggcgttccccggcacgcaggtgtaccccgccaggctc

SEQ ID NO: 474244 - DNA, 122 bp, Homo sapiens
ctgcggagggcgctgcgggcgcggggctgggccgctctggctggcgggcgagcagagaggcgcctcggtggcggtgcgctgtccagcatttcagcaagcggcggcagcacccgcggggaggc

SEQ ID NO: 474245 - DNA, 122 bp, Homo sapiens
cttatgaaacagctctagtacatgaattaagctcctagatacagatgcagcgccaaacgacggggagggagatggggcactcaaggcgacacgcggctcttgttgccgagcgtttcctgggc

SEQ ID NO: 474246 - DNA, 122 bp, Homo sapiens
atgttgtgcaaccatcaccactttctaattccagaatcactgcatcaccccaaaagagaacgccatccccatcaggaattacctcctgccccaaccccctcccccagcccctggccatcact

SEQ ID NO: 474247 - DNA, 122 bp, Homo sapiens
agaaggcccatgagggaaaggtgagacacctggggcagagaataaaataaaaaactgcgccgcccagaagtggggactgggtcccccatggacgaacgtccctacccatcagccctgcactg

SEQ ID NO: 474248 - DNA, 122 bp, Homo sapiens
ctcctccctctcctcctctatcgggaccatcatcatggttggtcactgtgagtaggacttcgccagcccacccaggaaccccagagcccttacaacggtccacatgccccgccaccaccttc

SEQ ID NO: 474249 - DNA, 122 bp, Homo sapiens
agtgtagcccatggccagtctgtcactgtgtccttggcagaaaaaaagaatccaacaaatcggtaggtttttatatttaagacatggcacttgcattttattatgctggcgtgcatccccag

SEQ ID NO: 474250 - DNA, 122 bp, Homo sapiens
gccccgcttccaggcccctgtcctttgcttccttcccttggcgctgtgctgaggggtcgtcgggtcctggaagggcgttcaggggtctcgggtggctagcccggctggcggggagatgtcag

SEQ ID NO: 474251 - DNA, 122 bp, Homo sapiens
ctttgctcaatgtcacaaagccagtaaacatcaaagctcagatgtaaacccaggtctgtccgattttacaacttcagcttccttattttgactgtaagaaaactccttcattcctttttttt

SEQ ID NO: 474252 - DNA, 122 bp, Homo sapiens
tgagagtggggacaccagagtcactttgcagccccgtgacgtcaccgataacgggcatggcgtcactcaggagaccacgtgtgcgggccgagcaagaagccccgcccacagcgcggagttta

SEQ ID NO: 474253 - DNA, 122 bp, Homo sapiens
agttttgtcacgttggccaggttggcctcggactcaagtgatccaccagcctccacctcccgacgtggtggggttacaggcatgagccgctttaccaagaaattgcttctcttttaattcgg

SEQ ID NO: 474254 - DNA, 122 bp, Homo sapiens
gaccgttctggagaggggcgtggcacagataggagacacagtccttcgagaagacccagacggcagcttgcttccattgtcatggttactgggctcggtccccagggctggctgcagaccag

SEQ ID NO: 474255 - DNA, 122 bp, Homo sapiens
gccaaagtgcagtggcgagctgaagcagggacgctggccgggcgccgggcccggccgggacgctctaggccgcagtgtattaggtattaaaagtaatctagacatgatttaaagtatttggg

SEQ ID NO: 474256 - DNA, 122 bp, Homo sapiens
cattacgtgtcctgaaatcaacagtcaagactggactctggggtgactgcagcttctagtcgtgctaattgttcagatgagcggatgatccacaggccctccttttacatttcacatgttgt

SEQ ID NO: 474257 - DNA, 122 bp, Homo sapiens
gcaaccgcgagtctccggagtgcggccctggcccgccctctcggcgcctgcaacatctcccgttccctcccagagctgagaccggatccggaagcaagggcaccgcctcccgcgccgccccc

SEQ ID NO: 474258 - DNA, 122 bp, Homo sapiens
ggcggcggtgactgacggcggcggctccgagggacgggcgcgcacccagctccccggccccgcctccccgggcttcctgcgagccaggtaaacacaggccgatcccgccgggcccgccccac

SEQ ID NO: 474259 - DNA, 122 bp, Homo sapiens
gcctctcgccccctggatattacggtccacatcgcaggggggcgggcgacccaagcgatgcggggagtcataacaccccccacctcccccctggatattacgatccacatctcaggggggcg

SEQ ID NO: 474260 - DNA, 122 bp, Homo sapiens
acggatagttcgtagggactatcgcctcaaagaaaatgctgaagctgtttctgagactcacgtataaaggctgcatgggctccatggcctagaaatgttgcttcggtggaaggaagccacca

SEQ ID NO: 474261 - DNA, 122 bp, Homo sapiens
agtttcctgtctgtgtatcaggcggagtcggaccaagacggcagagaacagcacttccaacggccctactcaggggcaagggagctctctgcagtgcagtttttgaaaattactaatatcac

SEQ ID NO: 474262 - DNA, 122 bp, Homo sapiens
aaagaacgactataatctactgactgactgttactagttcagcacatctatgatctacatcgcatgttcgtaattaatacagaattggaaatgactccttgttagtatgcccaaaataattt

SEQ ID NO: 474263 - DNA, 122 bp, Homo sapiens
gctggcccagagtacctggatgggagtgcgcaggatgccagcactaggtgaacgggggtccgccactcgagccagatgcttgttgtgcggcggaggccgcgctggtgtgactgggacgctct

SEQ ID NO: 474264 - DNA, 122 bp, Homo sapiens
ggccgaaattcgaactccagaaactcgtgcccaaacttgcccttgtgccctacgtagtagcgcaggtagaaatcgctagccacagccatttttgtacccgggaagcccgccgaaaacgcagc

SEQ ID NO: 474265 - DNA, 122 bp, Homo sapiens
aggaagccgggcaaggcgcgggagggccggtccctgccaggaatatggagccctgggcagcggcctcggcggacactggggccgcccctctctccaggtcctcaggacttcggctggactcg

SEQ ID NO: 474266 - DNA, 122 bp, Homo sapiens
aaataagaccttgaaagtaaccggagggaaaaaactgatgactaacagagaaaactaaggcgagaatgggagtaagcttttcaacagtaacaacggaagccagaagagagtagtctatctcc

SEQ ID NO: 474267 - DNA, 122 bp, Homo sapiens
agtcccgccccacttccggcgacgtaacccaatccgcggagctcttcctccccgggagcccgatggaaatccggtaccctgaaaacgagccggagagacttgattgggccattcacgcctca

SEQ ID NO: 474268 - DNA, 122 bp, Homo sapiens
gtaggggtaagcatcattgccctttcttagatgaggaatttcttaggtcacatgggtggccgagatagaattcgaacctaggactgtctgcttcaaagccctacaccgtttcccttagttca

SEQ ID NO: 474269 - DNA, 122 bp, Homo sapiens
ctgcgccctcctctcttttatctgcatcccttccattcttcaaagcccatttcggtgtttcgttttttgttgttgttttgttttttgagacggagtctcgctttgttgcccaggctggagtg

SEQ ID NO: 474270 - DNA, 122 bp, Homo sapiens
tggccccccaggggggtgaggtaggagcagcctgagtacccccagaaggtgccccgtccacgcccctccgggctgcgcggcgggagtcttcggggagctatgctgagaccgggtggtgcgga

SEQ ID NO: 474271 - DNA, 122 bp, Homo sapiens
ggtctttacgaaggttagatgggcagcggttccgtggacagaggaggaggcgcggctggccggcatatggcttctgtgcagagggcctggcctcaggccgtggactttttaataagtgaccc

SEQ ID NO: 474272 - DNA, 122 bp, Homo sapiens
gcgggtccctgaaggaggcggaggctctgggagctggtagctgggcgactggctgatgggcgagggagggcgagggagggcgccgcaacggaacgaggaacccggacagtgaaggaggaaga

SEQ ID NO: 474273 - DNA, 122 bp, Homo sapiens
acgcttcctgttgtggagacattgctgtgggatccggctgccctgcttgctcacccgccccgcgctgctctctccttgctccccagccttgctctctgcgctcttgctgggtctctactcct

SEQ ID NO: 474274 - DNA, 122 bp, Homo sapiens
ggcaagagagaccacacccccttgaatgtccaggcactgagtccctgccggctactcatacggatgggccctccccagccattcctcaccacggctgcgtccggatccacaccacaaccaca

SEQ ID NO: 474275 - DNA, 122 bp, Homo sapiens
agtgaaacatgtgaactttctggcgaggagactccctcttgaatcatccatatgtagccccggggtcacttgcgaagagtctctaacagcttctgcctcactcctaagctctgaccgctagg

SEQ ID NO: 474276 - DNA, 122 bp, Homo sapiens
cgtcgcgagcagggcccttgccggagctccaattagcggcttttgtaagcgatcacgtaccgagtattgacttggctcagcccaggaaaagcgagagcgatttgcaaaaggccccttcaatc

SEQ ID NO: 474277 - DNA, 122 bp, Homo sapiens
cccataagtaaacacctcaccgtggaaggtctgtgttgtgtggcgtgtgttttactgccacgcggtttcccaccccagctgctgtctgcattcccgcctgactgggcattttacctttcact

SEQ ID NO: 474278 - DNA, 122 bp, Homo sapiens
tgacccgcgaaggggcgccccggccacaggagctggccctggacaagaacctggcctctccgaagccccgaccctaacccgaattcccccagcgccatcactttggagtgtagggggtaggg

SEQ ID NO: 474279 - DNA, 122 bp, Homo sapiens
atctctacacacattgtttagtacagctgactttttttttttttcatagcaagatgctctcgatgaaggaagccgtacattgacttgcattctaatgcaagctccttctctccctgcaggcc

SEQ ID NO: 474280 - DNA, 122 bp, Homo sapiens
gagcgtgagcgcgcatgcgtgagcgtgagcgcgctgggaggccggaaacaaaggtggatgcgcgtgaacagacgccctcgcaggccgccggaagcaaaggcgtgagcgcgcgtgcgtgcgtg

SEQ ID NO: 474281 - DNA, 122 bp, Homo sapiens
tctctcccccagggctgtgtctggctgtccctgataaaactgtgagatggtgtgcagtgtcggagcatgaggccactaagtgccagagtttccgcgaccatatgaaaagcgtcattccatcc

SEQ ID NO: 474282 - DNA, 122 bp, Homo sapiens
ggcgccgtcggggctcccggcactgctccctcctcggtggctgccgcttctgtgtgtccccggccaccctggcgcccagagcccccacctcgcccccgcccccggcccggcccccgcctcca

SEQ ID NO: 474283 - DNA, 122 bp, Homo sapiens
ctgtgtgccaggactcctgtaaaatcctacctgcctatgggacagcccctcactgccctccgaggagcctccctgaaagccttcttgacatccagacctgtccctcttggaggtcatatatt

SEQ ID NO: 474284 - DNA, 122 bp, Homo sapiens
acaaaaggaggggtggtaggagtggcttggggtggcagcagaagacgccctgtcacatggcgggaagtcagcctgggcagaggtctaggtgtccaggaggggctgggtgtggtggctcacgc

SEQ ID NO: 474285 - DNA, 122 bp, Homo sapiens
gtcactccctcgaattgccccctcgctgccggatgctaggccagccttgagcaggagaaccggacactgtgtactcagcagggggagccaagacttagcgctaaccattgcacctggggctg

SEQ ID NO: 474286 - DNA, 122 bp, Homo sapiens
caaccagcatcatgtccatgacactggggtactgggacatccgcggggtgagtgagggtccgctgcactgtgggaccgggcgcgtgggcgggaagtgccgagcggctggggaccggctctag

SEQ ID NO: 474287 - DNA, 122 bp, Homo sapiens
gaaagtaatgccacacaaccaaagtgggaaatgaaaacaggcagaggccagcaggtttctcggctagggctctgcctataacgccctggtcctgctcatctttcagcagtaaacattttaag

SEQ ID NO: 474288 - DNA, 122 bp, Homo sapiens
gggacccagcgtcgcttggggagggctggccgcaggctgcggggtggaggctgctccagccgcctaagggtgcctgcagaagcttctcccggcgccctcccctctccagccccgggcagctc

SEQ ID NO: 474289 - DNA, 122 bp, Homo sapiens
gtacttcatctacccccaggggcaaatataccatgctgtgggcctctaatggagagctgccgaccagatgtggaaaagctctcggctgtagtttaaaagctctgtgttgcggctcgcttgga

SEQ ID NO: 474290 - DNA, 122 bp, Homo sapiens
cctcgaaagccatttatatcaggctcagggctctctccatgtcctacagcatcattctttcgaccatgagccttgcatactcctgcctggccatataagtggcattcttaaaggttcatttg

SEQ ID NO: 474291 - DNA, 122 bp, Homo sapiens
tttcccttaagtcagaatgtgtagttagttgtggaaatagcctaccagtatgtgtccatgcgtgcagggctaggcctgtcttcttggcttctgttgcatggtaggtacttaggcgacgttag

SEQ ID NO: 474292 - DNA, 122 bp, Homo sapiens
caggcagctctccgtggtacaggaagatttaaccattggcttccctgccaccgacgcgaacggaaaaccttgcactgccaggcgtttctttttattcgctggccaaatctttcaaccacgta

SEQ ID NO: 474293 - DNA, 122 bp, Homo sapiens
tggcggtggggtcagggcccccgcgggggggctggggtggggcccggggcggggatggggcgcggcgtccccccccgcgggggtgtgtggtgctgcggtccgtggctcaggcagctggagca

SEQ ID NO: 474294 - DNA, 122 bp, Homo sapiens
ggcgggatctgcgcgtctctcagcctcgctcccagcgtctctgttttcaggttttggaggcgagagcgccagaaagtctgaggcatgatacaaaagccctgttgagagaagagagagaccct

SEQ ID NO: 474295 - DNA, 122 bp, Homo sapiens
aacccgaatgccaagcttcccagatggcagcttgcagcatcggggtgcgtgcgcaggaaacgggaggccaagctgtccagccctccctcaaaagccggggtcgaggccatctgggggtcttc

SEQ ID NO: 474296 - DNA, 122 bp, Homo sapiens
tcactcaccctaagaacctccagggacccagaggccacgcaggcacggagccagcacccccgcctcccccggggccagtgaccaggccgggaggtgaagcagtcctccctccctccggccag

SEQ ID NO: 474297 - DNA, 122 bp, Homo sapiens
ccatcgctctgtcttcagcgacttcccggtagccgccggaaaacttccgccgagaccggacgtgacgctacgacggcagcaggagctcctggtccacaggctcacaggcccggcagcggccc

SEQ ID NO: 474298 - DNA, 122 bp, Homo sapiens
tatatcttctgttataatttctttaagttacttggaaataaaaggtctattacagctacacgaggatggaaacctccaccactaacctcgtgcttagccctcagcttagacttcccagctgg

SEQ ID NO: 474299 - DNA, 122 bp, Homo sapiens
ctgtacctaccagtcacttactatatcttttgatagtcaaagaaaaaggaaggataatttcgaagaaagacttcgtgggacggcttctgtgacttacatgctgggtcctgggacctcacccc

SEQ ID NO: 474300 - DNA, 122 bp, Homo sapiens
tatcagattgaaacaacatggtatagtatatttaagggtgggttccatacgagtttcagacgtctaccgggcaccttggaatgtatcccccagagatatgggagggctagtgaactacctgg

SEQ ID NO: 474301 - DNA, 122 bp, Homo sapiens
ctctttttcagagcagaagccactctcttgggaccattcataagcaggagacatcaacaccgtgacacatgccagtgccaccgccacccccacctcctctgcctccacctcccccgcctctg

SEQ ID NO: 474302 - DNA, 122 bp, Homo sapiens
ctgaccttgtgatccacccgcctcggccttccaaagtgctgggattacaggcattaaccacggcgcccagccactttgtctgcttcttacgatactagaactagagtgcaaagggcatcttt

SEQ ID NO: 474303 - DNA, 122 bp, Homo sapiens
tgcacctcttcttgagctttcgcttggaccttaagtccttgatggccgtgtccaggtcctcgtcactgtccagggagctgctcttgtcttcggagctctccttctcgtccaggtgcctcacc

SEQ ID NO: 474304 - DNA, 122 bp, Homo sapiens
cccggagacccattggcaggttcctggattcgcctcaattttggtcctgcctctctgcttcgcattttcaggcttggcctcacaagaaggacgatggcgccagattgtgccagaatgggtga

SEQ ID NO: 474305 - DNA, 122 bp, Homo sapiens
cccctctgactttctcctttttccttttttccggaacgccggaacgtaagacgtgggtcacgcaacaagagcaactagtcccggaagcaaaaagcaaagaggcggagaagaagacgggaagc

SEQ ID NO: 474306 - DNA, 122 bp, Homo sapiens
caccagttggaatgatcgtggactaagaatggccccatagctctaagagatgggttcctgcgaccaatggcaaaggccttgtgttccctgggaggcagtggttatgccaagagatccacaaa

SEQ ID NO: 474307 - DNA, 122 bp, Homo sapiens
cgccttccgaggccttgacttcgtcctgggagtggctcgagccggttaatgggggtgggccgggaatggaccagtcgagacaccaattccagggttcggttgcgcttccgtcgctgtttcct

SEQ ID NO: 474308 - DNA, 122 bp, Homo sapiens
cccttggccacatcctgcactctgtctgcctttggaatgaccaggtgaaaaccaacataacgtccaccttagaaagctgcagtaagaatgaaatctaacaggacacataaaggacataaaat

SEQ ID NO: 474309 - DNA, 122 bp, Homo sapiens
ggggactgaggaagagggaagaatagggccttgtctgtggatgtgggagaaaagaatggccgttgcctctgcggctgctgccctgggccagctgcaggtcatttcctggcactcagccagcc

SEQ ID NO: 474310 - DNA, 122 bp, Homo sapiens
tccgccggggtggtagactaggggtcagcctgtgtctccacatagctggtggggcctacacgcgccaactgtgctgtgcagcccccgggccttcaggacaacacagccacgcagggcatcct

SEQ ID NO: 474311 - DNA, 122 bp, Homo sapiens
gccagcggctaggtgtgtagttgcttggggctcctagcacgaggcctctgtccccaggcacgcagcgccagtctccggctgttgcgccctgggcgccgcctctctccggcccccctttgttt

SEQ ID NO: 474312 - DNA, 122 bp, Homo sapiens
gtctatagtagaattttctcttctgttttgctcttttggcaggactctgtgtttatttggcgccaaataggcttttgattcaggaaggacgtatgaattaggaatgcacttggctgtgatta

SEQ ID NO: 474313 - DNA, 122 bp, Homo sapiens
agagatccctttccccattgcctctcctccccatacccccaggcatatcctcccagggcacggaagctgagaagcagtccagaaccacagtgggctagtgaggggtacctgctgatgtaccc

SEQ ID NO: 474314 - DNA, 122 bp, Homo sapiens
gacgtggcgtcgagctcctgggtccctggagctggccagcgggggacgtgacgtcgagctcgtgggtccctggagctgggtgttgccggcattggcctccctgggggcttcctggcgccagc

SEQ ID NO: 474315 - DNA, 122 bp, Homo sapiens
caggcatccgtggctgttagggactgccctcccacctcggggagcctggccatgaccttgcgttcatttctgccacaatccctttaccacgtgccgggcacttgctggatgctggggattaa

SEQ ID NO: 474316 - DNA, 122 bp, Homo sapiens
tagccaaacttacttggtttaaatgtcaggcatggtaaattaggggactataaattactgcgggaagaacaaatacagcttgctacctactttcatgtagattaacagttttactagaacac

SEQ ID NO: 474317 - DNA, 122 bp, Homo sapiens
gttgactagacactaagggctgaagccagaataaaataggaaagaagggaccagatggtgcggaagtaagaattagtcctaggtctagggggaagccagatctgaaaaagcaacagagttgg

SEQ ID NO: 474318 - DNA, 122 bp, Homo sapiens
aacccttttttatctggcttatttcggcataatgattttggagactcatccatgttgtctcgtggatcagtagttcctttttattactgagtggtttccactgtatgtatgtaccacagttt

SEQ ID NO: 474319 - DNA, 122 bp, Homo sapiens
caggcctaagaaaatgtacaaattgttaaaggattacagagttattaatggttacacttacgctacatcgagttggaaaatgtccatggatagtgaatcccaaaattgcacataaaccagaa

SEQ ID NO: 474320 - DNA, 122 bp, Homo sapiens
ggtctccacaagttgcagccagccacgccaattgccccgcaggtggttattcgccaagcccgaatctccgtgaactcaggtatgctccctcctgctggccgcccccgcgtcctcagtgtctt

SEQ ID NO: 474321 - DNA, 122 bp, Homo sapiens
accgcaagttgagtggaggaggcggcggtggggccccggaccaggtcagcggggtgttgacgaggggtggggtgaggagggaagaggagggggccgggatccagtggtgggcaccccagtcc

SEQ ID NO: 474322 - DNA, 122 bp, Homo sapiens
aggccccaggaccaatcgtattggccagtggggggcggggcctcgttgccagctccagaccggcgctatgggcactccttttgtcaaatgagagacgcagcagggcggcccctgagccgcgg

SEQ ID NO: 474323 - DNA, 122 bp, Homo sapiens
acggctacggtggctcaggccctttgctcggaccgggaccttacagttctaacccaggagcgttaaactctggaagactccgggccagccctggaggtgcgtggccccgcaagtcgccaggc

SEQ ID NO: 474324 - DNA, 122 bp, Homo sapiens
agaatctagagccccagggatttgaggatggatgcggacacccgggcctgaggcagctcgcggccttgaccgaattccacgcgagctgaagcccagggatatcccagaatcttcctcaggat

SEQ ID NO: 474325 - DNA, 122 bp, Homo sapiens
atttaatgaatgttaataaatctgcgaattacttaaacccacaaaacccaggaacctccccgtccccccgggtctcctcgcagtcccgccccgacgctcgacccaccattcgtccctccctc

SEQ ID NO: 474326 - DNA, 122 bp, Homo sapiens
gccgcacatcagcaccctgaccacccacctcctcaggagctcagcaggacacgcccatcacgaccaccaaaccctgactctccgtaggcttcacacacacgtgtgtccccgcctgtgagctc

SEQ ID NO: 474327 - DNA, 122 bp, Homo sapiens
accctggatgcttccgaaccggcatcatctggcatctccgacagtcttgatgcgacttaacgcatggtaagaacccatcagagaaggccaaagggatttccagagacaggtagaggcactgc

SEQ ID NO: 474328 - DNA, 122 bp, Homo sapiens
ggtctcttgcgccctctggtggcctctcgcgagaacgacgctgaacttgttcaggtgggacgccaataaagatttcttattcaaaaaacaggaagtgcctacggaggccgggccggcagcgg

SEQ ID NO: 474329 - DNA, 122 bp, Homo sapiens
acagttgaaaaggaaatgctaggctccagccacaataccctgtgggccgtcagactagagcgggtgatgagtgggtgctggatgctaggtaaacggaagaagtgactgcagtggtgggaggt

SEQ ID NO: 474330 - DNA, 122 bp, Homo sapiens
aggccctgtgcacctcagcactcactcctctattctccattctcaccctcccacggccgccggcacctcccagtccgccttgtgtctcagtggacttgcctgctctgaacgtttcatagaaa

SEQ ID NO: 474331 - DNA, 122 bp, Homo sapiens
tctttgcggaaagtccctggagtttcctggttcaacagtgcttggacggaaccaggcactcgtaccccactccggctggccgcccatagctagccctctgttacctcttcactgggccctct

SEQ ID NO: 474332 - DNA, 122 bp, Homo sapiens
tcacttaagatggccacatcctgcctttgtcctcattggtaaattggctctctcagcttccgtgacccgcctcccttcttcctcctgcccgtagtagccatggcggccatgagtttgttgcg

SEQ ID NO: 474333 - DNA, 122 bp, Homo sapiens
aacgtgaccaattccactggggaccccaaagagctccgtgcagggagcagggtgggtgagcgagaggtctcgccttcctgcagcccctcccttgttttattttagaaactgcaaagacccga

SEQ ID NO: 474334 - DNA, 122 bp, Homo sapiens
agaccaaaatattacccgtgcttcactgaattttcccaattttctccactgagtctgtagcgctttggcaaatgacacaaaaaaggtaacagcaacaaatgttcacttaaaagagggaaggt

SEQ ID NO: 474335 - DNA, 122 bp, Homo sapiens
agctccaggcgctcctagaccttccagcagtactttggtggacgagttggagtcatctttcgaggtaatataagacatgggcgtctttgtccctagccttcccttttttctgaaacgtgaac

SEQ ID NO: 474336 - DNA, 122 bp, Homo sapiens
aaaacttcatgtagattctgatatttctgtgctaaaaaccagggatcgaacttctgcttccgggcaattggagtagacacatttttccctattcctcacacaaagcacaactaaaactcagg

SEQ ID NO: 474337 - DNA, 122 bp, Homo sapiens
tcgacaatccgtgctcaagctattctctcacctcagccttctgagtaactgggagctttccgcgggcagagtggcaggtgccgcgccggaggtggtcatggtggagtgggcgtccctgctcg

SEQ ID NO: 474338 - DNA, 122 bp, Homo sapiens
tcctagcctctagatgtttatggttaagggaacagactaataacatttactaaacagacccgtacttaggagtgtcctgagatcccgatattttgagaatagaagcattcctaattttgctt

SEQ ID NO: 474339 - DNA, 122 bp, Homo sapiens
tgaaaagaatgcaaatgagggtggtggacaggggcccagaggcctgattcctccaccctccgcaaaggctgggtgtgtgatgcctataaatagacactcaaaacccgttctaaatggagtga

SEQ ID NO: 474340 - DNA, 122 bp, Homo sapiens
gagtccggctgttggcgggcgtgttctcaggctcctcccccaggcaggtagggggcaggacggcggagttcttcaggatgtccacgatgtcctgcagctgctccgtgatgtggtgctgcagc

SEQ ID NO: 474341 - DNA, 122 bp, Homo sapiens
gatcccctgttccagcaaacgcacaagtgagggccggtcggggagcgggcaggggctagacgaggcgaggccaggtgagcctggcttctggggctgaggcctcggacgtcagccagggtaga

SEQ ID NO: 474342 - DNA, 122 bp, Homo sapiens
aggctctgccccctacccgaccctgcctgccgcttgccgcctgcctttggctagggccgccgagcgccctgcccatttaagtaggcgggccgtaccaccgcaactttcttgacagggggtat

SEQ ID NO: 474343 - DNA, 122 bp, Homo sapiens
tacagggagaggagcagcatgtgagaaggctctgaggcccagaagaactggcccgatccacgaaaaagcagaagctagggtagcaggatcacactgagtgtgaggagggaggcaaaatttgg

SEQ ID NO: 474344 - DNA, 122 bp, Homo sapiens
tagtctctttaagcctcagcttcctcagtctgtaaattagagatgatggaatgcttgcatcgtgggggtgttgtaaaaattaaatgagaattcacataggtgcttggcaagatacctggcca

SEQ ID NO: 474345 - DNA, 122 bp, Homo sapiens
agcttttggggcggagccctggctgcttaggtcctttccattggttctacttggtgaccacgcccacggccccgcctcctgggcggaagagccaattgggccgcgagttgtggtttaaacca

SEQ ID NO: 474346 - DNA, 122 bp, Homo sapiens
acctcccatcccaccctcccccgtcctacctgttattgtataactccagcctgagggcatcgctgtctctggttaactggttgttgtactgaaaatacagaaaggtgaagtcaggatacagc

SEQ ID NO: 474347 - DNA, 122 bp, Homo sapiens
ctgactccagcttccaagcatcttacctttaggcaggaaggcaagggttccaaacacccacgcattccccaggcaagctcaccaaggcccactgaccccagcagccagaggacagccctgaa

SEQ ID NO: 474348 - DNA, 122 bp, Homo sapiens
gggaggaacttctgctaaagccggtcctcgagtcccccccgcctcaggaggggcagcgcccggattgtcttaagtacaacacttgccaaaaggggctctttgggatttgggactttttttcc

SEQ ID NO: 474349 - DNA, 122 bp, Homo sapiens
tactactcctctgagaagttaaaagcagtcactctcatcttacagataaaagaactgaaacggcaagagtggaagcctctttgcatagcccacattagctcagcactcagtactcaggcaca

SEQ ID NO: 474350 - DNA, 122 bp, Homo sapiens
ctggaaaatcgggtcactcccacccgaatactgcgcttctccaacgggcttaaaaaacggcgcaccacgagattatctccggcacctggcttggagggtcctacacccacggagtctcgctg

SEQ ID NO: 474351 - DNA, 122 bp, Homo sapiens
ccgagttgtgggtgcctccagagagtggtccctgggcatggcccacagggttctgcatggcggatcctggacccgagggctgtgtgagcctcggcgtgcccgttgacctgctgtgctctctg

SEQ ID NO: 474352 - DNA, 122 bp, Homo sapiens
tttaaactgctgagctgttggggctgtttgttactgcagcataacttagcctgtgctgaccgatgcagggactagagaggcattttaggcagagagacaagtagtgcatgtgcagttaatgc

SEQ ID NO: 474353 - DNA, 122 bp, Homo sapiens
tgcacctgtgtgtggaggtgacgggtgtcctcctcgctcaggttgtttaagttgaaggagcgctaccgcaacgtgctggacaccatgttcgagctgctgccccggatggccaggtactgcca

SEQ ID NO: 474354 - DNA, 122 bp, Homo sapiens
gcaggaagagctcccagggtaggttccactcagggcgttggcactcaggactcagtgccccggtgcagcttcctcacgcctgggcctgcctggggcttggaggcccgtctgggaggggaggg

SEQ ID NO: 474355 - DNA, 122 bp, Homo sapiens
cctgggagagggggaagggacgaggggctttccaactatctctgcccaaagcagctttttcgaggcttttcgagcaccattggtccctaaggttagcgcggagaatgcttgggttccccgga

SEQ ID NO: 474356 - DNA, 122 bp, Homo sapiens
atctgtggggaaaacaaacatctgaggtccagaattcgtttggagactccgccgcaagtccggattcggcatcagatcagctgtgctgtgtgtgcttccaaagacgtttctgatctgcaggg

SEQ ID NO: 474357 - DNA, 122 bp, Homo sapiens
gcaactcccggttcttgtttaatttcctcagtcaaaacaagagattgtggtggtgcctgccggttcaaaaatggcacatgtttcttttgcctcttctcattaccccgtgaatcagaaggcgt

SEQ ID NO: 474358 - DNA, 122 bp, Homo sapiens
gttacgcccattgggtagccccgcccttggggggggcaaagggcgtgaaagcggaagtgacgacacccggcgctccattaaatagccgtagacggaacttcgcctttctctcggccttagcg

SEQ ID NO: 474359 - DNA, 122 bp, Homo sapiens
ggggcgcggctgccagatgtcggggcggcggcggcgggagctacggagagcgaggagtcgcgcaggcaggcggaggctgagggcgccgctggccggccctcccagccctctccgcgcggctc

SEQ ID NO: 474360 - DNA, 122 bp, Homo sapiens
tacctaacgctcttccttcttttcttagataaaacatgcatgccaggcagttcaagcctgcgaagactgctggttatacaggatatctgggtataaataaaccaacacatttgtatacaagg

SEQ ID NO: 474361 - DNA, 122 bp, Homo sapiens
taaaggtaggggagaggaatggagggagtgtccagctgtctatccggatcctcaccctcccgggtcaaatcccagaagtggagttcttggatcacttaccggcttctggtttcctttcagac

SEQ ID NO: 474362 - DNA, 122 bp, Homo sapiens
cgcgaagaacccccccaggccccgccccgggcgcgtccactgttgcgggagaatcggctccgctcgttctccgctgttccggccgtccctccaccggccccgccaccgctggccgcagtttc

SEQ ID NO: 474363 - DNA, 122 bp, Homo sapiens
cctcactgccccaggctcacggcgccagccagccgctccgagtgcaggccgctgagcccacgcccacccagaactcgcgctggcccgcaagttccgtgcgcagccccagttcccgccagtgc

SEQ ID NO: 474364 - DNA, 122 bp, Homo sapiens
aatctgtccctaaatttgcataattaaaggtgggtgtaaatgtgagtgttgaactacccccgggctgctgctgtgcatggctgctttaacaccacccgctcaccgttgaattccttcctggg

SEQ ID NO: 474365 - DNA, 122 bp, Homo sapiens
tgtctgtacggaatgccctttgctagccatgggctggtcaccagattgttttgtaatgcccgccccttgcctcgatattgccagtttcttgtgcaataaacaatcagcagctgtgggtggtg

SEQ ID NO: 474366 - DNA, 122 bp, Homo sapiens
agtgatccacctgcctcagcctcccaaagtgctgggattacaggcgtgagccaccgtgcccggccaaaagccaggattctaatgtgggtggttttctggcttcccagcacttgaccacgatg

SEQ ID NO: 474367 - DNA, 122 bp, Homo sapiens
gtcccggcggactcgcagtggagagcggccccaggaggcggcgggcggcggggcggtgggcgccagtgcgcaggcgcggcgcggcagggcggggcggcgggcgcggggcggggcggggcgga

SEQ ID NO: 474368 - DNA, 122 bp, Homo sapiens
gggtggggccgccagtgttgtgggactgcaaatgggagctcagcacctgcctgccacccacgcagaccagcccctgctctgttcccacaggttccgctccatccactgccacctgtacccgg

SEQ ID NO: 474369 - DNA, 122 bp, Homo sapiens
ccgattccacactccgagctaccacgccgttttcttctcacgtatccgtcaacactgctgcggccaatcacagcacgggccctggcctattggctgtctgtccaccaatccaaagagacgca

SEQ ID NO: 474370 - DNA, 122 bp, Homo sapiens
ggctgggtgcaacaggtggccctaaagcaggtaggcaggcggtgggtcgcaagcaacccccgggagagccgcccttctaccctgctcaccaacctggacagagggacacccgggtgaagggc

SEQ ID NO: 474371 - DNA, 122 bp, Homo sapiens
aattagccgacatatggaaattatccccatgtggtcatatgggatagtagtatgaggaatcgttaaaggaacaggaatatttagctttgcaaagagaagatctggaaagagggacagatccc

SEQ ID NO: 474372 - DNA, 122 bp, Homo sapiens
tgttcccgaatacttgcgctggaatcgcctaatgcacggtattaatcatcactgtcaggccgttcaggccctaaatacacccacccagtataaaattatcctaaacagaaaagaagcaggct

SEQ ID NO: 474373 - DNA, 122 bp, Homo sapiens
taatacaaagagcaataaaaacaataaacatatctgaggtaccaacagtgtgcttgatgccgccagcagaattaagtcctctttattaagctgtgatctgcattctgcctaaactataagaa

SEQ ID NO: 474374 - DNA, 122 bp, Homo sapiens
ggagcacgggcccccgcagggacgccaaaggaagtcgcgccacctgcggggtcccaagtccggcatatttttgtttgcaagaccaaaagccatgcggagggtggcataaggacaataaagaa

SEQ ID NO: 474375 - DNA, 122 bp, Homo sapiens
gtctggctgagtgtacttggcgtcgggcgtgcggtgggagtggaaaatgaacttgttgggcgagaagtacatgttgcagtagctgcatttgatgcacttggcgcgcgagctgttgtagcgcg

SEQ ID NO: 474376 - DNA, 122 bp, Homo sapiens
ctcctcctctggcccaggggggagcagtgcggtggctgccggagagccaacaccacggatcggccccacgccttccaggtcattctctccgaccggccctgcctggagctaagtgccgagag

SEQ ID NO: 474377 - DNA, 122 bp, Homo sapiens
ctacctccgcgcgggcacttgattgtaacagaaagtagttccggcccatgttgtttcggccgaggagccgtcgccgccatttcaagaccgtactaggtagatggtcaattagagttcccagg

SEQ ID NO: 474378 - DNA, 122 bp, Homo sapiens
tcagagcagggggcggaggaccgccgggcagggctggagccacaggacaattgtgctggtcgaaagtgggagaagacccttgcgggaggtaacccccctgaagtgtgggctgggcctggtga

SEQ ID NO: 474379 - DNA, 122 bp, Homo sapiens
cctgtcttcagcagcatcgctctggactcagcttccgaggacctgaccagatctggtctgcgtgtatcagctgtatgtgttgggctctggaagctaagaaacgtctgaaaagcactggggtc

SEQ ID NO: 474380 - DNA, 122 bp, Homo sapiens
ctcttgttttcctcatttcactagtgtgtgtggtagagtgtattatcaaaactgcgactgcgcctcttccagggagaatttttttttttttgagacagagtcttactctgtggccctggctc

SEQ ID NO: 474381 - DNA, 122 bp, Homo sapiens
cggcctcgggctggctgagcgcgcggtaggcgctgatgatggtgcccagcagggccaggccgctgaggcccgtgtaggtgcggaggctgggccaggggaagcgctcgaggaagagcagcggc

SEQ ID NO: 474382 - DNA, 122 bp, Homo sapiens
ttggggagtgggcaagaccatgcctcacctggcaggtgaggtcagaggatacctgacctacgaagatccacaaaggctggcagtggggggcatcccagtggacagtgttgtgatgagcaagg

SEQ ID NO: 474383 - DNA, 122 bp, Homo sapiens
tattacataatataagttgtgatttctgcttctgtgacccaatttatcacctaagaagatcgagagagaagatgtcctgggaagaagatttcgtcacatgtaggggttatagttatatctca

SEQ ID NO: 474384 - DNA, 122 bp, Homo sapiens
agggctggagggaccacctgggtgggcctcagctggactcacagcagctccctgcctgggcggggtccggcctcaggaggaggagtgcgggtatccatagtggttgtggtcagcctcgccca

SEQ ID NO: 474385 - DNA, 122 bp, Homo sapiens
atctgcgcatcaaagctagcgaggcgagcgaagtttggccgggggttggactttccttcccggaggcggcacccaaacagctaccccgtgcggaaacccaaacttctgctgccacttggagt

SEQ ID NO: 474386 - DNA, 122 bp, Homo sapiens
ggaggatggaggatggtgcaggctggggagatgccggtacctttccctgggtcatggtgccgtctctcggggaaggggtccctgaggcccgggtggccgcttgggtaaccgcagcctgcctg

SEQ ID NO: 474387 - DNA, 122 bp, Homo sapiens
tcacatattttctggatctgttcatcaaaagccctctgagccaatggcaagggagcaattcgttggccaatcaaatggcaccacggatcttttcttcccgcttccagccgccaatcattaag

SEQ ID NO: 474388 - DNA, 122 bp, Homo sapiens
gtgcttaatgtttagcattttcagaaaacccagttgtctcgcaatccctgtatttaaatacgctttcaagtgatccaaaaccacagataaaagatacaaatggaaaaaaaattagcatattt

SEQ ID NO: 474389 - DNA, 122 bp, Homo sapiens
tcccctcgctggctcccttttcgggacccactcctttcttggctgggttgtacgaagtcccggacctcgcgtttagtttgtccgtctatatctgttgtaactcctcccagtcccctcggact

SEQ ID NO: 474390 - DNA, 122 bp, Homo sapiens
tcaaggtgaggattataaataaaataacgtgtgtgaaagtgcctggcatagcagccggcacgtggtgtgtgctcaataaaaatgttagttcatccactcgggaggaagctgctttgccggcg

SEQ ID NO: 474391 - DNA, 122 bp, Homo sapiens
aaacataagtttaatgaaaatgtaggtcagttcccgagtgataagtgcgtaccaggtggtcgaggggctggggcagtgtgcgtgtgtctcacctgaggttctcctcgagggctgggtatctt

SEQ ID NO: 474392 - DNA, 122 bp, Homo sapiens
cttggtgctgctggccaacttggagcagctgaagttgcctgcttgttccccagggcaccacgtcctgtctcatctggagggcctgcctgtctacactggccttcagttactgcttcttcatc

SEQ ID NO: 474393 - DNA, 122 bp, Homo sapiens
caccattttattcctctactttcttaatacacttgctttcacttttctctgctggcttggcgtgcaaagccaaaaagccaagaacccaagtggcctcctgggctgaaccccagttctggaat

SEQ ID NO: 474394 - DNA, 122 bp, Homo sapiens
cccgtcactttcctaggggcattgggcaagaggcagggactgtgcacagcccagagctgccgtctccgtctctcagaaaagcagccctgagtctcagccctgccatcctttcccacaggatt

SEQ ID NO: 474395 - DNA, 122 bp, Homo sapiens
ctcggtgctcctggaggcaggtgatgctgtgggcacgctctcccaactccgggagagcctcgcctggatgctggggcggggaaggcccagtccccggggctctgctgtcagccgccctggct

SEQ ID NO: 474396 - DNA, 122 bp, Homo sapiens
aacaagcccgttaccagagcctgttagcatggagctcactctccacctcagagggagcagcgaggcagggtggggatgctcatcgaaggtgtgggttaagaggggacgaccctcagaggacc

SEQ ID NO: 474397 - DNA, 122 bp, Homo sapiens
tactattataattattttgagtcactaggaaccacactaatgcaaggtggtgaacttagtcgataaatgctgtgggtgttcttactgctccacctactggctgttctctagactctctccct

SEQ ID NO: 474398 - DNA, 122 bp, Homo sapiens
gtgccattggactctaggaaccaaggaccccagggcccttgctcccactctcctttctagcgggcaatggaattaatgaaccccgggcagccctggatgcagggcacactcggtcctttaca

SEQ ID NO: 474399 - DNA, 122 bp, Homo sapiens
ttcttatacagtaatggcaggtaacgtctatagcatggatacactagaaaaaattattcacgtcttgggccaagggcatccttgtcataaatgttagtttacatatttgattatttccttaa

SEQ ID NO: 474400 - DNA, 122 bp, Homo sapiens
ttgttcaacattgtttactgggtataccatatgtattagtcccccagtgctccagaacagcgggagcactgtgctgtgctcctttcagtttcttttgggtttgtttttccctctttcctttg

SEQ ID NO: 474401 - DNA, 122 bp, Homo sapiens
aagggaggaccagggaggaacccacactatttttttccaaagtgtgggaccgcctcagtccggcagaggggggtgcagcggtgagcggggctgggccctgggcacggacgttcgttgggctc

SEQ ID NO: 474402 - DNA, 122 bp, Homo sapiens
gcccttctttcccaaatgcatgctagagcctgctgctaaattggtcttccagaaacaaatcggatcacaatgctttcctgcttaaaggctaaaaccccagtggctttgcatgacagacagtg

SEQ ID NO: 474403 - DNA, 122 bp, Homo sapiens
agcgaactgatgactatcagtcccctgattgcttcctgtcttatgtttttatcttatccacgcatttagtgggcatttataaaggaattctggtattctaaatattctacactctggggata

SEQ ID NO: 474404 - DNA, 122 bp, Homo sapiens
gtttaccaagaagaagttgactctacaatgttttcatgtttagggtcaccctggaaaacccggacgacctggtgagagaggagttgttggaccacaggtgagactttttacattggtagata

SEQ ID NO: 474405 - DNA, 122 bp, Homo sapiens
tctctccgcaccacctaggactgcctgagcgccccctgtgggtccacggagcccaggagacgcgtttggccctgtagaccatccacatcgcccgccctccgcttctctcaactcgcctctcg

SEQ ID NO: 474406 - DNA, 122 bp, Homo sapiens
cacagttttggagtggatttggaacgtttctcggagggttagaggaaaatcacacctctccggaaaagagtccccataggttttcccttgatgcccacgtgggaatgaaagcagcttcccat

SEQ ID NO: 474407 - DNA, 122 bp, Homo sapiens
cccaccccagactccggctctaaatttgctttctcccggtccctctgttccttgaaagtccgcgattctccttccaaactgcccttggatccagagacccagatccgaacacatcgctcaaa

SEQ ID NO: 474408 - DNA, 122 bp, Homo sapiens
aaaattaactcatccataacaaaaggatcgtaaagtcaatcatgtaaacaccacaacaaccgtgctatggaacatttccatcatctttctttttttccttgtgtaatcactatcttttctga

SEQ ID NO: 474409 - DNA, 122 bp, Homo sapiens
gcatctgtgcacatcctagcgggcggatgatgtgggagagaggcggagggaggtgaaatgcgggagctagaatttagctttgcagtgaggtcacttggggtctgcattcagctccgatatat

SEQ ID NO: 474410 - DNA, 122 bp, Homo sapiens
aacccccagggagctggaagagtgccagcgaaaccacgagggtgatgaggacgacagccacgtccgggcccagcaggcctgcattgaggccaagcacgtgagggtgccccccacccacatgt

SEQ ID NO: 474411 - DNA, 122 bp, Homo sapiens
tggcgcagcctgcgcatgtgcataggggtcgactgccgctgcggtgcatgagggcgcatgcgcagcggggccgtgggtgtacgcggcgcagcgcggcagtcctgatggcccggcatgggtta

SEQ ID NO: 474412 - DNA, 122 bp, Homo sapiens
ccagattctcaggactccactgcatgcactgaagcatggtggtggttgtgaattccctctcggctccttctctgtcaagtcctccctcccactagtactgaccttaccctgccagtccttgc

SEQ ID NO: 474413 - DNA, 122 bp, Homo sapiens
tcgaactcttgacctcgtgatccatccgcctcgggcctcccagagtgctgtgattacagtcgtgagccaccacacccggcctgtctttaagttttatactagttaggaggctagtctatcag

SEQ ID NO: 474414 - DNA, 122 bp, Homo sapiens
taagagaggtaaagcgacttgcccgcagtcacagttagtgatgaatttagactggaactccgatgtttcttgacactgaaatacctctgctgctgagcataaagctgacatcaaggcctgga

SEQ ID NO: 474415 - DNA, 122 bp, Homo sapiens
gggagtgatttctggactttcagaccagggcaatttcctgggtgtcaggatgtgggtgggcgtgggagtgggagtggaaggccctgctctcaggatctgtggagcctctccctatagaatct

SEQ ID NO: 474416 - DNA, 122 bp, Homo sapiens
cgggcggacgcggggtcaccaaacggtgacactccgacttttggggcttggcgctcaccgcgggataaactaaagagtaggactgagcccgcggtgggaactgtaatccggaaatccatggg

SEQ ID NO: 474417 - DNA, 122 bp, Homo sapiens
gcaagtacgctggggagacccaggagtagggagggcattgggagcaccaccacctggccacgggcaaggagcggagacaccgaaaccaacactcccagcggcgctggccacggtggctctgt

SEQ ID NO: 474418 - DNA, 122 bp, Homo sapiens
tgcttaatcttgctacagtatacatgaatgcgggaatgtatcttcctctgggctgcctttcgttaccacttggctgggtggaacacctgttcactccactttccacttgggctacaaacctg

SEQ ID NO: 474419 - DNA, 122 bp, Homo sapiens
cactttataaatatatcctaatttatccattccactgttgatggatgtttgagtactttgcgatttggggttattatgaaataatgctgccataaacattctagagcatgtcttttggtgaa

SEQ ID NO: 474420 - DNA, 122 bp, Homo sapiens
aagtgtgggggcagtgggcggaacaaacgcgccgactacagaggctggacgtaagcttagcggtggcgcgcgtgcgcagcgccggcccgaggtaacggcgggaaggctcaggggcgtgcttg

SEQ ID NO: 474421 - DNA, 122 bp, Homo sapiens
cctgtagctggtccctggctccccactgtgggatctgcctgcagcacttacacttgggaccgccctgtctccctgctggatgtggcgccgagggcagggtccgtttctgtttcttggtaggc

SEQ ID NO: 474422 - DNA, 122 bp, Homo sapiens
gaacttgttttcattcataactttttccttttccttcttccgtcaactatttattcagtgcggattgcagagggcgcagctccaccgtggtaacttgcaatgtggccgcccctgcgctggct

SEQ ID NO: 474423 - DNA, 122 bp, Homo sapiens
tccccacgggcggaggggacctcatgcgacattcagcccgcgagattctcagagactgctcgcccgcaacacgcagtaacgatctcaggagagcccatgatggggcggcgcgtgtcgtagcc

SEQ ID NO: 474424 - DNA, 122 bp, Homo sapiens
agtgttttacatgtagtgagggaggagcatggtgtcggtttttcacaaaacacaggaatgcgtgtacataccagggagtggagtaaaatgtatttctcactactaggagcagaaagttcgaa

SEQ ID NO: 474425 - DNA, 122 bp, Homo sapiens
tggggcggcagctctctgttcgcagcatctcggcggctgcgggaggctcggtgctagggacgctgcgctgcgccacgcgtagctggtgctccacctggtgccctggctgtgcctcggggccc

SEQ ID NO: 474426 - DNA, 122 bp, Homo sapiens
ggccccgtgagcacctgggtggcagtgcatggggctgcttgcatgacctcatcgtctgcccgtgtcctccctggccagcccagggggagccggtgacgaggggtggaaaggttgcattctgt

SEQ ID NO: 474427 - DNA, 122 bp, Homo sapiens
cccggggttcggagccaggactaggccggtggtaagggaagaccatggcctggccgtgcgcgtccaggcggaagcgcagcgaggtgcgcaggatggcgctgagccgctgcagaaagtcggcg

SEQ ID NO: 474428 - DNA, 122 bp, Homo sapiens
gagggaaatgttcccacattgtttcaattgtgcaaggaaaatggtcttgctgatccaactcgggaagaattttgtaaacacccagagtgtacacctcagacttcactatttaaagttgtcca

SEQ ID NO: 474429 - DNA, 122 bp, Homo sapiens
gctctgcctcgctctcatcactgggccttatgtgattggctttatagactcctttgtcaacgtggtttccatgagcagattgcatttctacgactcaaacgtaattcatcactttttctgtg

SEQ ID NO: 474430 - DNA, 122 bp, Homo sapiens
tcagccccagccaaagcagcacgcaggccctcagcctcagctcggccggccttctccgcccgtgccagagcctctagctccatggcctgggcctctagcctcatcttctgctgcagcgaggt

SEQ ID NO: 474431 - DNA, 122 bp, Homo sapiens
ctctccctcgttgcctagggaacctccgccctggcgggggccctatcgttctttgatcagcgctttagttttctttgtgtgttggtttctttcatgcgcatagactcttctacttgggtttt

SEQ ID NO: 474432 - DNA, 122 bp, Homo sapiens
ggggtctcgccgctgtgcacgcgccggtgctggtagagggcagagctctggctgaagcggcggccacagtcggcgcagccatagggtttctcgccggtgtggacgcgcaggtgcgaagtcag

SEQ ID NO: 474433 - DNA, 122 bp, Homo sapiens
ctcaggtgttccacctgcctcggcctcccaaaatgctgagattacaggcatgagccaccacgcctggcctcttttgccaaatttatcagagagtataagaggaagagttggctgtggcagga

SEQ ID NO: 474434 - DNA, 122 bp, Homo sapiens
atggggctgccagggacagtaggaaagcccggcagactgtacctgtcagcctgtcagggtcgctgagcactcacagccgggctgggaggcaggggaaccacagttcaggatggcagaccaag

SEQ ID NO: 474435 - DNA, 122 bp, Homo sapiens
gaagagtcacagtcaaacagttcctgaacgcccactgtgagccaggcatcatgctccccacggaaggttacccagaggacaggatgcctgaactgggtcttagagaccagcaggagagcact

SEQ ID NO: 474436 - DNA, 122 bp, Homo sapiens
aggaaaatgggcaggccccgcgcgcgcacgcaccctgcgcacacaccacacacacacacacgatcacacacacacccgcgcgctcgctcccacccggcagtcatccatcaatcgaaaagcac

SEQ ID NO: 474437 - DNA, 122 bp, Homo sapiens
tttttcagactaatactaattcttggaataccatccccttaaagctttacagggtacagtcgattgcagtgttatataccaaattatgctgagacccaagattgaaaatgaatgctctttcc

SEQ ID NO: 474438 - DNA, 122 bp, Homo sapiens
gcggccatcatcactgcagctgcctgttacagcaaatgactgagctctcccggggaggggcggcatctaagagaactgccacctaagagaactgagctgctgtggggaggggcagcagccat

SEQ ID NO: 474439 - DNA, 122 bp, Homo sapiens
ggatgacgcgagagagcgtggtcgcccccagaaggccctgggccatcatgccggcctccacgtagaccccaggggtcgctcactcctgccagctcgccttcaccaaggccaggagcttagcg

SEQ ID NO: 474440 - DNA, 122 bp, Homo sapiens
gcctgtccaatattaattaattcaacccatgtttactgggcacctactatgttccaagtccgcagtaggggctgggaatacagaggtgaccaagatagataaggccctcttgtaaatgaaga

SEQ ID NO: 474441 - DNA, 122 bp, Homo sapiens
accgcctcgtacagggtgttgcgagagactgctgctcatggcttctcacgccgcgctaaccggaaaagagcgggtctggtaatatttttatctttttttgcttcgggctggaaatgaggtag

SEQ ID NO: 474442 - DNA, 122 bp, Homo sapiens
caccttcctctaggattctcccctagttcttcatcttgcctttctacatttaaccataatcgactcttctcctcccactttctaactacctttcttcacttctgttgtcttgccttcatgca

SEQ ID NO: 474443 - DNA, 122 bp, Homo sapiens
cttcacattcccactctccctttctcaatacttatcttccttacacctgtgtaagaactccgttcaggaaggtaagaactagactgaaatactacatgcattttctttgtatgatttataac

SEQ ID NO: 474444 - DNA, 122 bp, Homo sapiens
ggatcaagaatctccacagcccagcgagaagccacgcgaacacacccctgtgtgggtatccgtgacctggcggcctgcagaactcctgggccagagacgtcctcatcctgttggaatatcca

SEQ ID NO: 474445 - DNA, 122 bp, Homo sapiens
ccatgttggtcaggctggtcttgaactcctgacctcaggtggtccacccgccttggcctccgaaagtgctgggtttacaggtgtgagccaccgcatccggccacaggtgagtgctttctttg

SEQ ID NO: 474446 - DNA, 122 bp, Homo sapiens
accaccccaaaaaaagccgcagactccgggcactcggggaacaatgtcgtcaagggctcccggttcccgggtttatatggctcgaaccttacatcgccagccggatccacctcaactcagcc

SEQ ID NO: 474447 - DNA, 122 bp, Homo sapiens
ggccgaagctgtagatatcagccatgatgtagggctggaagtggtttttgttcaggctttcgtccagcacttctggagccaggtagcgtttggtgcccaccctggtattcaagggcacatca

SEQ ID NO: 474448 - DNA, 122 bp, Homo sapiens
ccaggcccaaccttcaaagccagcaacatgaacaagagtcctctggctttggaaagacggcggcttatgttttcctcctcatgtttcctccccagcaaaatcactctacatagagagccctc

SEQ ID NO: 474449 - DNA, 122 bp, Homo sapiens
ggaggtgcaccctgcccagagactgtgcagcgaaaaaagtgccgcatccgaaaatgccttcgaaatccatccatccaaaagctacgctggagggaggcccgagagagccggcggagtgagca

SEQ ID NO: 474450 - DNA, 122 bp, Homo sapiens
ccctggagggcgcttcagaagaggggcgcaggatgggtagagatgtgggttcggcctgcccgagagtgtcgcagaccctttcagttcccagcggtaggaattccgcctcccaagttttccaa

SEQ ID NO: 474451 - DNA, 122 bp, Homo sapiens
ttgtatgttttccctaggaatagtcttgtattctgtaccccatttttcttgaaacacagccgtatcagtgaatctttcatttgtacttttaatagagatttgagttttaaaaaatcatttta

SEQ ID NO: 474452 - DNA, 122 bp, Homo sapiens
ctcgtgggcacttacgatctttatcaaacttgggtaaggtcgctccactagcagccagctcgggatcaactgtttccaggaatattgtccaagggttttcattatcactgagctcaatcatc

SEQ ID NO: 474453 - DNA, 122 bp, Homo sapiens
caccccctgccccgtccttgacccggctctcgcctccgcttctgccccttgaaaccttggcgatcctatttcgtggactcctagatcggccctgctacttgcaaagggtatgccgggccagg

SEQ ID NO: 474454 - DNA, 122 bp, Homo sapiens
acaaatggtcaggctgggaatagaagctggtctgggccactccctcagtgacagtttggccgttgcgcagccaggtgatattgatcacaggggggaagatgttgtccacgatgcagatgagg

SEQ ID NO: 474455 - DNA, 122 bp, Homo sapiens
gttgccagaagtaaggagtctctctttagtcttctcccttcttgtttctaactgctctgccgcacgtccccattggccgcaagcaggaagcagctcgcagtggactctcaataccccttttc

SEQ ID NO: 474456 - DNA, 122 bp, Homo sapiens
ccttcaggctcaggatctgctgcaggagcccggccgacccgccgctgccgccgctcccctcgcgctccatcccgtcgccattcaccacagagaaatgagggacgagcgcccgaagtgcggta

SEQ ID NO: 474457 - DNA, 122 bp, Homo sapiens
tgatggctacgtgtggggtttccgtttggggtgatgaaaagttctggaaatggatggtggcggttgcatgacattatagatgtactttactcaacgctgttgaaacgtagttaaaatggcag

SEQ ID NO: 474458 - DNA, 122 bp, Homo sapiens
atctttgagggtcctgggccaccaggaggggcagggtcttatagctggggacttggcttccgcagggcagggggtggggcagggctcaaggctgctctggtgtatggggtggtgacccagtc

SEQ ID NO: 474459 - DNA, 122 bp, Homo sapiens
agcgcagtgtgcggtgggcaggggctgccctgcgcctggaggcactgccgggtgggcgggcggagggattgaccccacccccgtcccctccaacttgggcgtccgagccccgccgcgcctgc

SEQ ID NO: 474460 - DNA, 122 bp, Homo sapiens
cttctacgctgcaggtacgcgcgggccgggcggggcgggcgggcggcgggcgcgccaagacgtgggcacctcctcacccggaccccgggccccgccgagccgcctcctggctcccgtggccg

SEQ ID NO: 474461 - DNA, 122 bp, Homo sapiens
ttctgctccactgacatttccttgcagggcattggctacaccagtgtttctccagaccagcgatggagggggagaatcagcaccgcgtctggaattcccggtgcctgtggaaggtcctgtct

SEQ ID NO: 474462 - DNA, 122 bp, Homo sapiens
gcactttgcctgtagtatcttttcaaatcttcacatagtctccttttctatataacagttcgagaagttatgtaaacagagggctgtagattgttttcaaacagctcactgagaaaatagac

SEQ ID NO: 474463 - DNA, 122 bp, Homo sapiens
ctaaggactgtgagcaagacacttgcagaaagagtgctgggggcaggggctccagataatcgggcagggatggcggccgaggcttcagagctggcggcagcccgggtccccaagcgcgatga

SEQ ID NO: 474464 - DNA, 122 bp, Homo sapiens
aggggcagccagatcggccgggagcccattgggttgtcgggggtacgttgaaaggtgtttcgtcattgtgttttgttgttttgtcgttggaccattggaactgtcatttgtccattgggcta

SEQ ID NO: 474465 - DNA, 122 bp, Homo sapiens
acctcccccagaaactggtccctaggatccagcaagggggctggggtgaggcttctggaacgtcaggtatagaccttcctggaatcttctgggctcagagacccaggggtgcgggctcttag

SEQ ID NO: 474466 - DNA, 122 bp, Homo sapiens
atgcccaggccaggggtcgagggcaggaagacctccttctgcttatcccacatctgggtacgatagttgcctgcggggcagacacatagtcacgaccggccctagtgggccgcctctccgcc

SEQ ID NO: 474467 - DNA, 122 bp, Homo sapiens
ctccgccgcagaaaggagtccgccgccttcgcggcccagggctcggccccggctctggcccgcgcccccgccccccggcgctaaaaaaggagtgcctccgacccctcgtccccagcgctccg

SEQ ID NO: 474468 - DNA, 122 bp, Homo sapiens
ccagggacgccgctcatgtttaccgacgttcgctggggctccaaacccaggggcgggagccgggatgagaggttaggctaaccctaaccctaaccccgcaggtccccagccttcctccgatc

SEQ ID NO: 474469 - DNA, 122 bp, Homo sapiens
atgttactaaaaccatctctggactgcacgtgggttactttactgatcattcacttccagcgtctggggacgtgacgtcacggcgccgttacagaagcctgaaatctcccagcagcagtgga

SEQ ID NO: 474470 - DNA, 122 bp, Homo sapiens
aagtccgcctggtggcacagcccgggttttatacatggggaaattgggcggcgcatctggcggaggtctcagtggtaggaggcgcctggaggaagcgcgggttcctaaccctaacgctaccc

SEQ ID NO: 474471 - DNA, 122 bp, Homo sapiens
atctcggctcattgcaacctccacctcctgggttgaagccattctcctgcctcagcctcccgagtagctgggtttacagacgcctgcctcacgcccagctaatttttttctatttttggtag

SEQ ID NO: 474472 - DNA, 122 bp, Homo sapiens
aaacacacagcagtagtgctggacgtggtcgccagagcccctcgcgcagacaagccgggacgcggcccccctgccagagcccctcgtgcagacaacccggaacgcacagcccctcccaccat

SEQ ID NO: 474473 - DNA, 122 bp, Homo sapiens
ctttcgtagccacgttcctctctgactccggcatcgacgaggtcgccatcctctttcctccgctgcggaggaacccatcggcctattgtaggccggaactacttcccccgctggccccggga

SEQ ID NO: 474474 - DNA, 122 bp, Homo sapiens
gcggctgtcccctgagtcttctctcactgagcagaatggcaccgtcacggggtcgcacggcggctgtcccctgagccttctctcattgcgcagaatggcaccctcatggggtcgcacggcgg

SEQ ID NO: 474475 - DNA, 122 bp, Homo sapiens
ttggtggggtgatggggaggcagcggcggaggctggtccaggttttgccttctgccttcccggagcacacagcagggtaaaaacgtgggccccgcctcccggtggcctgggcctgctccagc

SEQ ID NO: 474476 - DNA, 122 bp, Homo sapiens
acctgaggccacctgggccggcgtggctggggctctctgcgcctgcgcgtctcgcctacccgtcagactccaaccgactcagacctgacagcaacatccggcgcctgtcctctttctatcct

SEQ ID NO: 474477 - DNA, 122 bp, Homo sapiens
ggcgggaggtgggccccggagaggccgggcaatctcgggtcttcggtggatgcctttgggcgggctcggggccacgccggagtcccgcttggaaactggggagtcgggggggggactggatt

SEQ ID NO: 474478 - DNA, 122 bp, Homo sapiens
aaaggaggcgcttcacgcatctcagtctgtgaaatgggacccaggacccaggtagaggtgcgttctcggcctggggaccgagtattttgtgcgctccggtaacgcaggaagacagcgccact

SEQ ID NO: 474479 - DNA, 122 bp, Homo sapiens
gctgcgcgcagggtcggggttaggaactgtaagcgcactgacagccggaggttccagctgcgcgcccacagcccctcggtagcgccgccgactcgtggcgtctataggctgtttctgcgtca

SEQ ID NO: 474480 - DNA, 122 bp, Homo sapiens
ctggggtgggagggagagtggctccgggagcgtggacacctcgaattttccggaacctggcggaggtgggaggggatgctgaatgaacactccctcccctgtgcctcctccccaggctcaca

SEQ ID NO: 474481 - DNA, 122 bp, Homo sapiens
aaacttcccagtaatagcaatttcggtgagtcacatatttacatggaatatgtttgcccacgcctctccatgtgccattactacgtctaggggttatttgctttgtttttacagagaaacat

SEQ ID NO: 474482 - DNA, 122 bp, Homo sapiens
ctttcttcgcagccatcttagcagtttctgcataaggtactggatcaccccacagtacggcgtttctcagtcaggagacagcccatgttatgagctgttcagtttgggtcacagaccccacc

SEQ ID NO: 474483 - DNA, 122 bp, Homo sapiens
ggatggggaactgttggggaggacagggtgacaggtgtcccaaccccaccgtgggctggtcgctggccgtgtgcacggtgtgtgtgcgctccatttttttctcacgctgatgagattggagt

SEQ ID NO: 474484 - DNA, 122 bp, Homo sapiens
cagatgggggcatcagggtgaggtccgggactcttgggtcatcgtcccacagtggctgatcggctgccaagcacagtgggggtgctttgttggatcagagcagatttttcaccctggtctcg

SEQ ID NO: 474485 - DNA, 122 bp, Homo sapiens
ctgcgacctttccttatttatttatttattttcatgccaaaccgggcatgggtattcgtacgtgtgcttgtgtgtgcacatctccaaggtggagctatatatagctcctgcatacccagccc

SEQ ID NO: 474486 - DNA, 122 bp, Homo sapiens
ccaggccaataagtagcatttgcaggtatgagtcagcttcagtggtaacagtggggtttacgcttgacctttgtttgccagggaaagctcagatattctgatgactggcagaggcaccagcc

SEQ ID NO: 474487 - DNA, 122 bp, Homo sapiens
aggggagctggaaggaggggacaggtgggcgcattgatcacaggcctgaaagtcactgcgcgctcttctcgcccgaagccgcaggtggctgcgatgggacggaagccatgaatggtgccggc

SEQ ID NO: 474488 - DNA, 122 bp, Homo sapiens
cagaggggctgcttcctgggtgcacctcttttcagctagaagcaagtcaagcctgacctgcgggatctggcagggctctctgtacttggattctctcctttataaagtgaggggtgtggatg

SEQ ID NO: 474489 - DNA, 122 bp, Homo sapiens
ggtccatagaccacattttgagcctctgtggatctcgtccagaatgtagtcctgcccacccgggtggctttagcagaaagttaacagctagtctgtttgcagagaagggcctcttgcatgtg

SEQ ID NO: 474490 - DNA, 122 bp, Homo sapiens
aaagcccacacaaatgcccttccatgtagttttactgaggctcagaggaagtgactggcccgcagggtcacacagcaagtaggtggcagagccgggcctcagtcctgagacccacagggtga

SEQ ID NO: 474491 - DNA, 122 bp, Homo sapiens
cgttgcggaaggcgctctccccgggcgcggttctggtgggcatgtcttccaagagcgatgcgagtgtcagtggttcccgaatcactttggaaattggcctttcactcgctgacttcttggaa

SEQ ID NO: 474492 - DNA, 122 bp, Homo sapiens
catctccttttaaaaggtttcttctaggtaagaagctagggggcagttatcttttttttccgtttttaaactttgaatggactcctagttttaatatactgtgggttcatgttctttcatca

SEQ ID NO: 474493 - DNA, 122 bp, Homo sapiens
cccacccaggccttccgcgcggccggacctcttcgccggtcctcgcgcgccctctgctggcggcttccaggaagcgcgcccgtggcccccaatacccgccccgcccccagccaggccccgca

SEQ ID NO: 474494 - DNA, 122 bp, Homo sapiens
atttgccgaggactaaactatatgcttactataaagccctgacatacattagcgcatttacgcggtggctcgcgcctgtaatcccagctctttaggaagctgacgcgggagaatcgcttgag

SEQ ID NO: 474495 - DNA, 122 bp, Homo sapiens
agacgaccgagctgacctgcacggaatcccacagctggtagggcaagtagtccgggctgacgctatcagggaagccctgaggcaggaacacggcctggagcccggagaggggcggtgagggg

SEQ ID NO: 474496 - DNA, 122 bp, Homo sapiens
tcactgtatcacgtgaacacataacggactgacgggatccctgaagcgaattgtttataacgaagaaagagaagagagtgattgggagcctggagccctggtgcttggaggaagcggatttt

SEQ ID NO: 474497 - DNA, 122 bp, Homo sapiens
tgggcctggggagtgagggcccaggccgggctgggtctcgctccataaaccctggctggccggagctgcagacatcactgttgacacaggggtgatgtcactgccggccaatggggagaccc

SEQ ID NO: 474498 - DNA, 122 bp, Homo sapiens
cttgtcgtcggcccgcgactcctcgtcgctgtcccccgccgcggcccccgcccggcccaccgatgacatcatctgctgcagcagcgtgctggccgccagcccgtccacgtcgggcccgtccc

SEQ ID NO: 474499 - DNA, 122 bp, Homo sapiens
gcccgcgcgacctccagttcccgcccgcccgtgcctggcgctccagacctgggatcctcccggcggctctgcccagctctgcccgccttctttgcgggcttctggaatctgccttcctacat

SEQ ID NO: 474500 - DNA, 122 bp, Homo sapiens
cttctaaacctgcttcaatcagcccaaactgttccaataatttaacaaaaagcacaatgacgatcagaactgctatcatttcaagcccttccaagttcatggtcagctaggtcatggtccga

SEQ ID NO: 474501 - DNA, 122 bp, Homo sapiens
cttctcccctccgctggccagtctggctccaggctcacccatgcagtagtggccgccaggcgccagcaggaagccgggtttgcagaggcaggagaagctgccatcctcgttgagacacacgc

SEQ ID NO: 474502 - DNA, 122 bp, Homo sapiens
cccatgccagcgacgtggcgtcctaagcaggacgtccagcgagtcagtcaccagcgcgggcgcctcgtcctgtccatggaacattctgggctgcgccgcctcccctgggggtggggctgcag

SEQ ID NO: 474503 - DNA, 122 bp, Homo sapiens
gagaccaacttttccctggaccaaaacctgcagggcacttggatcgcgtgggctttcatacgagagtcaacaacagcctacacggaacaactaaggaaacagacatacatcaatatgaccct

SEQ ID NO: 474504 - DNA, 122 bp, Homo sapiens
ggccgaccccacaggccagtgcgatgtcgtgggtccctggctgaccccacaacacagtgccgtggtgtgggtccccggctgaccccacaggccagtgcgatgtcgtgggtccttggctgacc

SEQ ID NO: 474505 - DNA, 122 bp, Homo sapiens
gctgctgtcattttatgggtcggcagccagagtgagagtgtccctgctgccagaggactacggcgggctgggcgcggggtccccgcctctcgctcaccacacagaccccgcgcctcctctgg

SEQ ID NO: 474506 - DNA, 122 bp, Homo sapiens
tttctagctgcagctaaagacgcccacccaggccgagcgcccttggattctgtgggagggcggccccgcgtccaccgcctgggggcaccgactcggggctgcggacctcggagcgcgcccgg

SEQ ID NO: 474507 - DNA, 122 bp, Homo sapiens
ccgcaactataagaggcggtgccgcccgccgtggccgcctcagcccaccagccgggaccgcgagccatgctgtccgccgcccgcccccagggttgttaaagccagactgcgaactctcgcca

SEQ ID NO: 474508 - DNA, 122 bp, Homo sapiens
ccaccccgcaagctggacagtgtctgtccagagctggttcccgaagcgggtgcttgggcccgggaggtcaggggtcccttcaccacctgcccactgctgcctggcactatgcccaggaccag

SEQ ID NO: 474509 - DNA, 122 bp, Homo sapiens
tgtctcagaacacacacacacacacacacacacacacacacacacacacacacacacacacgatccctgacatatttggcaagagtaggccctgaaggtttttattattttggttctttaac

SEQ ID NO: 474510 - DNA, 122 bp, Homo sapiens
acagtgaggaaatggcctaacactgcatttctctgaacatatcccagtcattaagcaatgcgtgactgtatttcctttttttttttttttttttgagaccaagtttcgctcttgttgcccag

SEQ ID NO: 474511 - DNA, 122 bp, Homo sapiens
tcctttaattagttgagaccataggacaaaagaagaggcatagttgagcgcgtaatggtgcgaaaatcaaaaggttgggaagaaacaagaaactcagataaacgcttccgtcggctgtgaca

SEQ ID NO: 474512 - DNA, 122 bp, Homo sapiens
caacccccagccccagccccggccccgtcctcatcaacacatcatccagtcaccatgcgccgtgcctgcgcatccccccgcccgctggcgaccccgcagcgcacctgccttccacccagggg

SEQ ID NO: 474513 - DNA, 122 bp, Homo sapiens
gcctaacaggccttcttagctagagtcgctctaaaggactcctgattcagttcgggtaatcggagtcttatttaggacaagtctgggtgaatcccttatgtttaccagatgtactttcttag

SEQ ID NO: 474514 - DNA, 122 bp, Homo sapiens
tctaggtgagccccacggcggtgagggacgctcgccagacggcccagaggagttagatgacgtcacctccaggaggactcgctttttcattaatgaaaccggccggcgcgggcgcatgcgcg

SEQ ID NO: 474515 - DNA, 122 bp, Homo sapiens
ttactttgaatgaatgaactaatgagcatttgctctcttctgtaataataatattatatccgacattgtgtatgtcatgccctatgctgaactcttcatattcaccatcttactttatactc

SEQ ID NO: 474516 - DNA, 122 bp, Homo sapiens
gaaatagaagttagcacctctcagcccccaggctgaattttatacatcatctccgaagttcgcttcctagtcgagacagggagcaacccgagtgcgctgggtgaatctgtccgactcaaccg

SEQ ID NO: 474517 - DNA, 122 bp, Homo sapiens
gtcggcctgctccgctccgccatcgctctcagctgcgtggtccacatgtctctcggtggccgaatccagcagggccagcagctgaggctgtgaggctgtgggcagtaccacactcaggagcc

SEQ ID NO: 474518 - DNA, 122 bp, Homo sapiens
gccctcaggcctgatttccgattgtctatcaaagggtcaaataaaaagctctctaagcttcgacccaagctttaaagtcgaagggctgatcgcgggctttttccttgggacgtggcaggggc

SEQ ID NO: 474519 - DNA, 122 bp, Homo sapiens
taaaccggcaagggatatcgctgcggaaaaccccagactcgagggcctccacgtggcccccgacgtaggtctcagagtccagcacgtgtccgtcgtccgtcagcttattgaactcctgctct

SEQ ID NO: 474520 - DNA, 122 bp, Homo sapiens
ccgctgtcacagaactgtaggaagacgggcgcgcggctcgagttgtgccgcacttccacacgcaggatgccctcacgcggccacttgtcacgcacatgctccaggcagttgatgggcgagcg

SEQ ID NO: 474521 - DNA, 122 bp, Homo sapiens
cgaggaaactgaggcgtggaaaagaaacccaccgcagctccgtctccacggtttcacctgcggggtattaatctctcaggatgaaaggcaaaatttggttttgaagctaagagggccggcag

SEQ ID NO: 474522 - DNA, 122 bp, Homo sapiens
acaccgccgacctcgggcttcctgaggccccgggcggcccggccgagctttgacatgatgcggggctgctggcttcagttcacctcaggggagcagcaagagcgaagctctgggcgccacca

SEQ ID NO: 474523 - DNA, 122 bp, Homo sapiens
ctgtgtgagttttaaaatgttcagttagtagataaaacctattgtaggctttcccacattcgttacattcatagggcttctctccagtgtgtattcgtacatgtttagtaaggcctgagcgc

SEQ ID NO: 474524 - DNA, 122 bp, Homo sapiens
ggggctcacggatccagggacgtttgtttccttctgccacggagctccttggcaagtgctcggctcgtgtgccagtaccccacaggctggctgcaaagccgccatgcgccctctacacttgt

SEQ ID NO: 474525 - DNA, 122 bp, Homo sapiens
gttacatagaatgtatatatgttgggaacatgctcgcttctcccgtgtgtcgccgccgtgcgtcgtgcgcccgcaacagagccccaaccgggcctttgccgggtaaggggctaccgcgacgc

SEQ ID NO: 474526 - DNA, 122 bp, Homo sapiens
gatttggcaactctgctgttcttagctgggcttgcatacatgactgagggtgtccactgacggctggcagattgaggctagctgcagctgaagtgattggcatgactcatctctgctctgca

SEQ ID NO: 474527 - DNA, 122 bp, Homo sapiens
agacgggctcctacatgttcgtggacgagaacacgttctccagcgacgccctgaaggtgacgttcctcatcacccgcctcacagggcccgccctgcagtgggtgatcccctacatcaagaag

SEQ ID NO: 474528 - DNA, 122 bp, Homo sapiens
cccgagcgtgagcgtggcctccacggtagccgccccacccgagcgtgagcgtgggggccacggtagccgcctcacccgagcgtgagcgtgggggccacacccacaagtctggcatcatggtg

SEQ ID NO: 474529 - DNA, 122 bp, Homo sapiens
gaggaaaggcagtggctggggagatggttaggaggaagttcagttccttgaccccacaatcgcatttgttccccatatgttctggatgacagcatcatcacggagcacaatgttcaccatgc

SEQ ID NO: 474530 - DNA, 122 bp, Homo sapiens
agctctgggcctgccaagggccaatccaggtcctgtccatccaaaagctaaagctcatggcgcagcttctcccaatgactcccacagtcatgccttgcccctgactttttattgctgacagg

SEQ ID NO: 474531 - DNA, 122 bp, Homo sapiens
gcccggcaggggcctgggtgtgccaaggcccggctctggggatttcaggacccaggccagcgctccccagcagcagggcaggaggcagcctgagagtcggcagccccgccttggagtctgag

SEQ ID NO: 474532 - DNA, 122 bp, Homo sapiens
gaagaggagccaccctcagggaaagacaggttttggataaggggaagagacgccaggaagcgagtgtctgcggcttcctcatgcaacgtggcctgccttcccaatcccctctgggctcacag

SEQ ID NO: 474533 - DNA, 122 bp, Homo sapiens
ctatcagtgtgaggtgtggaacccggtcagtgtcagccgcagcgagcccatcaacctgaccgtgtactgtgagtcctcctggccccactggagatacccagtgtccaaacctcatggatggg

SEQ ID NO: 474534 - DNA, 122 bp, Homo sapiens
ctgagaagagagggaggggcaagctggcagtgcctgggaaaagcccgagaaaagccctgtcggctccctcttcctggctgctaaagttgacacaagacggcttcttggaactccccctcctc

SEQ ID NO: 474535 - DNA, 122 bp, Homo sapiens
aggtgtttccagggccgcagtgatggcggggggtatcctgggttgggggctgcagatccacggaagctagtggaggaggtgtcctctcccagcgaagctggccacaaagaggggcagggagg

SEQ ID NO: 474536 - DNA, 122 bp, Homo sapiens
aggtgttgatttttgccttctcctttgatgagcgagtctcctggcgaagtctgaggttttcgcctttgttaagaggagctgaagctgtcgtggggggcgccccggactccctcccacttgct

SEQ ID NO: 474537 - DNA, 122 bp, Homo sapiens
tccgcgagggacagtgctcagagggagatttcccagagcctggtggagaaggactccctccgcaggcaggtgttcgagctgacggaccaggtctgcgagctgcgcacacagcttcgccagct

SEQ ID NO: 474538 - DNA, 122 bp, Homo sapiens
ccctgagtcagtgaattctgatactgatgtcagcttcatctttttcggcatctttacagacgggaaggttagaaagcgaatcttctagtatcccctttttaagccaatggaagaacctaaaa

SEQ ID NO: 474539 - DNA, 122 bp, Homo sapiens
cccaggacaagccctcaccgtttcatctgcagcccactgcggcggaacagttcaaaggcccgaaagtgtcacatgccctggtggtcacttctgatttgttgggcgaggagaggtgacagaac

SEQ ID NO: 474540 - DNA, 122 bp, Homo sapiens
ctggcccgacaccgcccacaaactaaccacttgttttgtccacgccccctcccatgggcacgccccaggccttggccccgcccacctactccggctggacttgtgcccggccctgccccttg

SEQ ID NO: 474541 - DNA, 122 bp, Homo sapiens
aatttgaatttaaataggcacatctgcctagtagctactgtgttggatagcacagccctccgggttctggtacgtctgtcaaggccagaaaaggtatgttgcgatggatagtgctacatctg

SEQ ID NO: 474542 - DNA, 122 bp, Homo sapiens
gtcaggcgcgctgccggccccaatcctcagcgcctgcccgtcgagcgcacgcggctttgccggaagccctcctgctcccggcgagccaggccccgactaggccctactgcccggctcagccc

SEQ ID NO: 474543 - DNA, 122 bp, Homo sapiens
ggcaccagctgcgtccaccccagccactgccgctggcccctcacctcagcgtgacaaccacgtccacctggtgatcctgagagcacacgattcccaacagttacacaacaccccgattaaac

SEQ ID NO: 474544 - DNA, 122 bp, Homo sapiens
gtccacaagacaggcggcagcttcaaggccggcaagttccgcgtctggggggctgcgggccgcccctgcgggaccggggggatctgggcgggacagggcggcccggcccacgccccggcttc

SEQ ID NO: 474545 - DNA, 122 bp, Homo sapiens
ggggccccttccactttccgggggatcaaaaagcaggcccaacaacccagaaaagccagacgaccgcgcgaagggaaccaactagtttccaggtccccgcaagtgttttagttggaggcaga

SEQ ID NO: 474546 - DNA, 122 bp, Homo sapiens
atgtgtctgtagcagtgtgtggcatgtctatgaatgggtgtgttttggagtgtgtgtttgcgtgtgtatgtgcatgtatctaggcatgtgttactgtgtgtatttttgttgttgttgttgtt

SEQ ID NO: 474547 - DNA, 122 bp, Homo sapiens
gggatgtgaggagaccctctgcctggctgcccagtctggaaagggaggagcgcctcttcccggccgccatcccatctaggaagtgaccagcgcctcttcccggccgccatcccttctaggaa

SEQ ID NO: 474548 - DNA, 122 bp, Homo sapiens
agtagcttccggaaagggtactgcatttcccgtttctacctccactgcacccgcttattgcgtcttgctcctgggtcacagagcctaaaacgacacacccaacacgcccgccggagttacag

SEQ ID NO: 474549 - DNA, 122 bp, Homo sapiens
gaaagaaacagttaattttggctggtactcagcattacaaataaaaccacataaaacagacggggacacaatctcaaatggcattcaaaatggtcaactaaatgaacactgtgggtttttaa

SEQ ID NO: 474550 - DNA, 122 bp, Homo sapiens
taagaaagcagaaatgagaaggctgggagggggtgggagatggctttgcttcttcccccccgggtgggactcttggagacctaccacgtctctcttggcccctgcacctcccacaaaaccca

SEQ ID NO: 474551 - DNA, 122 bp, Homo sapiens
tctgccatgtcttcctccacgcaggaaccaccgatggcttctgccctcccactcagagggcgggacagtgtcactactcccatgccaatgacaagaggcctgtgacccggcgcccacctccg

SEQ ID NO: 474552 - DNA, 122 bp, Homo sapiens
tgcctgcaggagcccctgggctttcccggaggagctcgccctgaagggcccggacctcggcgagcccaccaccgttccctccagcgccgccgccgccaccgcagcagccggagcagcatggt

SEQ ID NO: 474553 - DNA, 122 bp, Homo sapiens
tgataataatttgttggggtaatagttgtacagccctttgctgccatctaagcacttttacgtggtttggttcatttaaatctaacaacccagtgagggggccaattagtagcatttatatt

SEQ ID NO: 474554 - DNA, 122 bp, Homo sapiens
cattaggtaaggggagagagtcaattagtgagaggattaattactgtgaggcacgagccccgtttgtcttccttactgggtgttcagacagaggaacacgggcacgcacccaaatacacatt

SEQ ID NO: 474555 - DNA, 122 bp, Homo sapiens
tgatttacaggcggggacagccacattcctgcgccccaacttccacctccgcttcctgcgcgcgcgagactcaagctgccacagtggctctgccgccagcgtcccagctcctcccacacccg

SEQ ID NO: 474556 - DNA, 122 bp, Homo sapiens
acaccttgaggagagtccagtgacctctgctgcagaggcgacaaaggctccctgggaagccggcctcagtggtgtccaggaatggctttcaaacagcgtgtactcctgtggtccctttaata

SEQ ID NO: 474557 - DNA, 122 bp, Homo sapiens
gccccctgaggagtgctgcagggggccacaggcgtggctctgagccactctggagagtggcggggggcccagccagttctgtggctgggactttcccaggcagacaagtctgtctcttcctc

SEQ ID NO: 474558 - DNA, 122 bp, Homo sapiens
catttggggccaaacacgtaagggatgaatcctctcctaaagccccctccacgttgtcaccgggccacccaaacttccccgagcaagaagcttcatcataaaatgcaaggtcaccccttggc

SEQ ID NO: 474559 - DNA, 122 bp, Homo sapiens
ccaggcagtcccggctcggcccgcctcaccgcactccggaggggaccaaacagccccacgcgccaggaagcctcaggcaacgggccacgcgccacacgggcaaagtgattactggtcggatc

SEQ ID NO: 474560 - DNA, 122 bp, Homo sapiens
atgatatcccaaagatgcaatgacaagacaagaaggagctcccagttcttccaggcaaatcgtatccataactctgggatgtcacctagtcagctttttgagagtagcagctccaactaaga

SEQ ID NO: 474561 - DNA, 122 bp, Homo sapiens
gaagaaactcttcacccattcaagttctatcatgaacttgcagcaatagagtcacatcttcggagtagatttagcatacttcttatggaccctaggattttcagaatggcaaatgagatttg

SEQ ID NO: 474562 - DNA, 122 bp, Homo sapiens
cagagaggatgcgaggagaaatcacgcaagcacgtgacgcggcagctggcacgctacacacgacagctagcaggtgtcaccccgagagctacagccatgctgctgctcctaggaacaggggg

SEQ ID NO: 474563 - DNA, 122 bp, Homo sapiens
tgacgaggagaattcgcttgcagcctctccgctacgctctgcctttagagtccctctagccgtggtccctgtgttgccgcttgcccctgggtacctgactgatgaagacaggctctggggct

SEQ ID NO: 474564 - DNA, 122 bp, Homo sapiens
tggcgtattggacaaatagttgaacacaacaccacggagtgggcacagatttattgaagacggtcacagagtgggagtgggctcgagcaagcagttgctgaagagccccctcaagtagggtt

SEQ ID NO: 474565 - DNA, 122 bp, Homo sapiens
tcctggtgttcatgtccctggtgttcatgacgctggtgttcatgtccctggtgttcatgacgctggtgttcatgtcgctggtgttcatgacgctggtgttcatgtccctggtgttcatgtcg

SEQ ID NO: 474566 - DNA, 122 bp, Homo sapiens
ttggatagaaggaaaagtgttattgggaaacatgagtggaatggtgtactgtaggaaatacgcattatgtacattttaaaaaacgtaattgtaggccaaaattgctggtttgcaagatgcac

SEQ ID NO: 474567 - DNA, 122 bp, Homo sapiens
cggctcgcacgagtgagtggacgtgggaggcgcgcatctgcgggggaatcgccccttgcccgcctccggcgccgcccgctgagccctgttttccgcaggtccggggccgatgtaccaggtga

SEQ ID NO: 474568 - DNA, 122 bp, Homo sapiens
gccatcccagattgagggggcctgacccctgggcgaggccgccgcctctcagttttggggcggtggcgaccccagtccgggagtggccccggtaggtccccgcaggcgggcaggagctccga

SEQ ID NO: 474569 - DNA, 122 bp, Homo sapiens
agttttcatgttgttaatttgaaagccaaataatgaagtcaaataagagataaagttgtacgtttgctgttaatagcaagtgaaaatagattgcttacttcacacctggagaatctggttct

SEQ ID NO: 474570 - DNA, 122 bp, Homo sapiens
ttctgtttaagataccatatcacacacttgattgggagatgaggtaattacaaaacaaaacgaagcaatttgcaatccagcctgtaccagagcagttaggtctagtgagagactagcggagg

SEQ ID NO: 474571 - DNA, 122 bp, Homo sapiens
ccatcctgcgctatcaccagatcctgttcctgagacgtgactctcggctccttcagaggccgcacggcacggcgcacaggtttggggatggcagacctgggtgggctcccgggcaagtcacc

SEQ ID NO: 474572 - DNA, 122 bp, Homo sapiens
gtgtctcccggagcctgaacccctttcctggttatggccggtagctgtctccagggctaacgtgggcagcgcaggggggcggaaaccgggttttagccaaatgcctcgacatcgccgcgcct

SEQ ID NO: 474573 - DNA, 122 bp, Homo sapiens
ggatgtgcataactgaagctgcctgaggactggaggactgaccggggccagcacagcgggcgggggcctgaggactcgaggactgaccggggccagcacagcgggcggggctctgcccatta

SEQ ID NO: 474574 - DNA, 122 bp, Homo sapiens
tgggaagctggcgtcacggatgctggtgtgatgggcctccacggactaggccgggaggaacgtgcatcagaggggaaagaaaggctggctgatggctcaggaacccaaaaccgttcccagca

SEQ ID NO: 474575 - DNA, 122 bp, Homo sapiens
ccccggtccccttgctgcacagcacccgaaaatgcccactgcccaggcccctctcagtcacgacaccctcacgtgcaggaggttggtccttcaggacccgccgcccctcacgcgggctctgg

SEQ ID NO: 474576 - DNA, 122 bp, Homo sapiens
ctctgtggctccactgcctcctcctccttcctattagcttgactggccagctccagcgcccgagcctccctctgggtgatgttgtgtttccagctgggaagataaagattagagagtgggca

SEQ ID NO: 474577 - DNA, 122 bp, Homo sapiens
ctattgtcagcttgctgtgaacaatttttgctttaatatatgaattacattaatacctcacgttacatatatgaagccaaattacactaacttagtttgcttacaacctcaaatcttactcc

SEQ ID NO: 474578 - DNA, 122 bp, Homo sapiens
gtggacatgctgcagagccccctgacccggccccggcccggcccccgctggctccggagccgcaactcggagctgcgtcagttgcgtcgccgctggttccaccacttcatgagtgactccca

SEQ ID NO: 474579 - DNA, 122 bp, Homo sapiens
gcggggactgcgcggggactgcgcggggactggcggggctggcggggctggcggggctggcggggctggcgggcccggcgcactgcgggtgcgcctagaaggcggtgcccgccagggggcgc

SEQ ID NO: 474580 - DNA, 122 bp, Homo sapiens
cacggaggccctctttcaacccaagtgggcctcgcgaacgggggttaggtcgatgagaagcgccaacacctatggctgcacccactgactgtattatcctctgccccacctgttggattcac

SEQ ID NO: 474581 - DNA, 122 bp, Homo sapiens
ttaggtttaactttatacatctcagatttgccagtctgaagtagtttagaaagccaggttcgcgcaggcgcaggaggtctgtcgttgccgagaactgcgacgtccacgtgcacacagtgctg

SEQ ID NO: 474582 - DNA, 122 bp, Homo sapiens
tctcctgaccccaacgtttcagaatcacttcaggtagtggaaacagttaacccatcagtccgtttgtctctctttctgttcactcaggtaaactctcagtgagaccaaggaaaatcctatgg

SEQ ID NO: 474583 - DNA, 122 bp, Homo sapiens
ttggtcccacgcggactctcccggctccatccggctcccagggtccagcatctaagctcacgctgttcagcacataatccgcccccggcaaaacgcatctccagctagaaacccgcacctcc

SEQ ID NO: 474584 - DNA, 122 bp, Homo sapiens
tattcaccacagacgccaagatcattctttagtctgattttagcctcacgtggtctcacccgaacatttgtttttggaatttggacctaactggttaccaaacctgtctgcaggtgtgagat

SEQ ID NO: 474585 - DNA, 122 bp, Homo sapiens
ccggggcccgggcggaccgccctcactcacccggtgtagaaagctcaggcggtcccgtagcggcggcgcggcagccatgatccaggtcccctcccggtctgccccgcttccgccaggcccgg

SEQ ID NO: 474586 - DNA, 122 bp, Homo sapiens
cacttcagagctgtgcgggccgtgctttcgcctccgcccatcagccggctcccgggctcccggtgcttccctcggagatcagggaggccccagcccacttgtctgggtcggccacaggccgc

SEQ ID NO: 474587 - DNA, 122 bp, Homo sapiens
ggctgtgctgaggccggcggggtggtagcacaggaggggttcgcaggctctgcggccgtgcgtggcggggcgtgggggcccgcagggcggaagtagctcggagagacgggctggggcagggc

SEQ ID NO: 474588 - DNA, 122 bp, Homo sapiens
ctccccaccccgggaagcaccgagtgggctgccgagcccttcttatttatacttccttcccggcttgacataagaggtttatttttgatctctcactattcccgtttcccctcccctgggat

SEQ ID NO: 474589 - DNA, 122 bp, Homo sapiens
tgagcgtcccttccaacacgagctgggtggtgctctattgattttcacgcgatccccgggcgggagcgagaggataggctcggattcccgggctccaggaccgaacgcctggcagtgtcccc

SEQ ID NO: 474590 - DNA, 122 bp, Homo sapiens
tacaaccttttacgtctggtcttgcctggaaactggtggctccatttctagatctctacccgagaagaaacactagcacatatacacgcacaaggaaaaaggtctatgaaggctcgcagcac

SEQ ID NO: 474591 - DNA, 122 bp, Homo sapiens
ggagagccccgccgagccccgcccactcagggatgtactgggcccgctgctccgccccgacgccccctgggtggtctggaccccacctgccgcctggcttccctatctcttcgggcctcgca

SEQ ID NO: 474592 - DNA, 122 bp, Homo sapiens
cgagccccgagggctgcccagaagtgggcgcttgccccagctgctgtccagtagcatctgcgggcagcacctgcacccatctgtgcattttcagatcctcgccctcctcacccgccgcgctc

SEQ ID NO: 474593 - DNA, 122 bp, Homo sapiens
atccttcccatgtaggcatcgagaagaaggctgagggaccctcgcaccagatttccatcccggagaccgatacgagtgcgtccattcctgttgccagctcctgcgccctccggactaacctc

SEQ ID NO: 474594 - DNA, 122 bp, Homo sapiens
tcctgggagtcaggggtgccagggtgcctcctccggtgggaccagccctgccatggcagccgctgcagctggtatcccattgcagtgttacagtgaggctcagattacacagtgagctcatc

SEQ ID NO: 474595 - DNA, 122 bp, Homo sapiens
ggaactttgtataaaagaaagaagagaaatgggcacagctcctggaggagtctaagggatcgagagatggattttgttttttaacatgtgaacactggcagcatgttcgtgaatgggaatga

SEQ ID NO: 474596 - DNA, 122 bp, Homo sapiens
tgctccgccttcatttacgacccatggttgctatgcctggtagggaatgcgggtgccctgcgagactctctttgcatttacttcgtggctgttacacattcatatcttggagtctccactgt

SEQ ID NO: 474597 - DNA, 122 bp, Homo sapiens
ctgactttctgcaacataaccgatacagtttgcatgtatgtctccgtccaaatctcatgtcgaattataatccccaactttggaggtgaggcctggtgggaggtaattgggtcatgggggta

SEQ ID NO: 474598 - DNA, 122 bp, Homo sapiens
cgggcaaggtctgaagactgcgaggacccagctgccaggcgcattgtgaagtggcccgagcgtcacaggcgacccggacctcgggaccggggggcagggcgggtgtctgcagcgtcctcggg

SEQ ID NO: 474599 - DNA, 122 bp, Homo sapiens
agggtgcgtctgtcatcagggccaggagggcggtggggcagggaggcaagggcaggaacccggcgtcgtcagtcactgttcgcacctctgctctgctctcaccgctgggccccgggccacgc

SEQ ID NO: 474600 - DNA, 122 bp, Homo sapiens
tcagcctgggcgcactggtcatcgtgctggccagcgccctcctgctgctgggtgagtgagcgccccgcctccacctggaccctcggaccctcggaccctcctccccaggccgtcccctgcta

SEQ ID NO: 474601 - DNA, 122 bp, Homo sapiens
cagcctgtcccctagcaatgcctccccgtacccgggtcccgcagacttacgcgcaagccgcgcgtagggcccagaagcagcagaaccagcaacagagggaggatgcgaaccaggaaccccgg

SEQ ID NO: 474602 - DNA, 122 bp, Homo sapiens
ccggagcaggtatggaggccgcagcccagaaggtagcagtggggccagactggagccccccgggtgggattgaggggcggggactggaagaggaaaaccagggggcctcccaaatcctggag

SEQ ID NO: 474603 - DNA, 122 bp, Homo sapiens
tctcccgcccgcaccggggagcccacccacccacctgctgcactaacctggccgcctcggcggggcctgggttcccacgcccgccaggctccgctctactccgccgcttccgggtgtgcgcg

SEQ ID NO: 474604 - DNA, 122 bp, Homo sapiens
ggaggtctgtgcctttatctaaagatgattttgagggcttcaatatttaaaagggaggagcgggctggaggggaaagagggagaacatggtcattactgaatccacacattgcacaaataga

SEQ ID NO: 474605 - DNA, 122 bp, Homo sapiens
attttggcatcttcttcctcatattccagtcatccggtgtgtggggcaacttgatctcatcgctggtatttggccagactcccagccaaggtaaaaggaaaaggggcaagcaattgtctcca

SEQ ID NO: 474606 - DNA, 122 bp, Homo sapiens
aggtgtacaagcacaaggtgaggctccccggggcgacccgggctgctccctgtgagtcttcgtgctccaaggcaagccactcactctccaggaatgactgggcctggagggccagccaggcc

SEQ ID NO: 474607 - DNA, 122 bp, Homo sapiens
ccgggaggcggggcggggaggggcagttcgcggccggagggagccggctggatggaggcgcggaggcggtgccgcgggggcgggacagagcctgactgggcagagcgtggagggcggagact

SEQ ID NO: 474608 - DNA, 122 bp, Homo sapiens
aagcgcatagggatgcgccctttgtggactccattgcgcagggtgcattgccctgaagagcgctcctccttccggtgaaagtcgtcgggttcccagccgggagtctgcggagttctcatact

SEQ ID NO: 474609 - DNA, 122 bp, Homo sapiens
tggcattcaagactctttgctatcagcctgacttcctgctgatcacatttctatgcctcacggaactttttggcatttcataaaaatttcgtaaattcataatagtgaaagctaccattcgc

SEQ ID NO: 474610 - DNA, 122 bp, Homo sapiens
gtcaacatccggttttacacctcctcctggcttcggatggggaggagctccaaggagatccgttgctagggaggaagttaggttgctaagggttctatggggttcttactccagccaggacc

SEQ ID NO: 474611 - DNA, 122 bp, Homo sapiens
ccccgagactcgggagcctcggctctaaggcttccaacctgacccggtaaacaaacgacgcgatgtgcagcagccttggtgtccgttgtcttttctggggatggaagtcagaggtagaggga

SEQ ID NO: 474612 - DNA, 122 bp, Homo sapiens
gattatgacagctctcggagcctggaagacattatgaccactaagcgggtgtccataattcgataggaaaatgtcaggaaacatagattcgatggttctacacattcattttggagtgagtg

SEQ ID NO: 474613 - DNA, 122 bp, Homo sapiens
cagggccggggagagcggggagaggggagcgggagttatcatttcacggacgcgatgtttcgtcccctttgatgaagcgttctggagatgggcagtggcgacactcgcccatatacgcaacg

SEQ ID NO: 474614 - DNA, 122 bp, Homo sapiens
cctgccacggcagtaataacagttatacattctaggacttactctggtctgttgcactctcgaatggctgttttgatgccccctccacatgttctggagcaggttccaaagggactccaact

SEQ ID NO: 474615 - DNA, 122 bp, Homo sapiens
cttccaaagttctaggattacaggcatgagccaccatgcccagcctgtctgtgttttcaacgttaaatatgcaaaataagaatcagtgagtcgtctaggaaaagcatcgtaactgagtgttg

SEQ ID NO: 474616 - DNA, 122 bp, Homo sapiens
tgcccagaaagcttactgcttaactccagtacaacttactggtgcgcctggatccacccccgtctccactctgcttaagacacaggaggctgataggctggaagaatgaatagatgacataa

SEQ ID NO: 474617 - DNA, 122 bp, Homo sapiens
cacctctgctcagggtggagggcccagtgctggaggtgtgcaaggctggctcgttcacctcgctacccccgttcaggaattctacaggatctggagtgggaggagctacagagggttcctgg

SEQ ID NO: 474618 - DNA, 122 bp, Homo sapiens
tttgctgtgagctatttggtgcccatggccctgcccagtggtcctgatgcagcccagattcgagcaggggatttggcgtgggcagtggaggtgctccagggtcctgcactagggtgcagcct

SEQ ID NO: 474619 - DNA, 122 bp, Homo sapiens
aatgaagccgcggaccctcacggtgagggttacagctcctaaggtggcgcgtctggagttcgttccttctgatgttcagatgtgttcggagtttcttccttctggtgggttcgtggtctcgc

SEQ ID NO: 474620 - DNA, 122 bp, Homo sapiens
aacacactgcttcccgcttagactaggcctcttgagggctgagataacgctccgctaaatcgtggagttttctagagcctgggatactgtctcgctctcagatctgaggctccctgggacag

SEQ ID NO: 474621 - DNA, 122 bp, Homo sapiens
gagaaatgccaggcccagaagcactgggtcctggatggtacaggccaaacctagtgctggcggtgggtgggaagcagccttggactttttctctctgctgggaccaagagttttcctcagaa

SEQ ID NO: 474622 - DNA, 122 bp, Homo sapiens
gcgccgctctcgccccggaggcagtgctggggggaagcccgctccccggctccctcgggccgcctctgcccgcgccgctcccgccggcctctcacccggaaccccttctccttgtccgcctt

SEQ ID NO: 474623 - DNA, 122 bp, Homo sapiens
tccaccatttgcttctccatctgagccctgagctcactctcttacctcggtgacgatggacgagccaggcgtctcgtacacccagccgtcccggcaggggcccagtggcaggcggctcctgt

SEQ ID NO: 474624 - DNA, 122 bp, Homo sapiens
cactcctcagggcctgtttcagcaccccatttacgtggcacatgaaaaattcaggatgaacgccctggctgaaagctcttcctgggtttgggacatcagaagaccttcccgggatgggctct

SEQ ID NO: 474625 - DNA, 122 bp, Homo sapiens
cgcgctcgccttccggggacccggggcccatggacacatacacccagccctgctgtcccgcgcgccagctcaccagccctacccaagggacatcattcacgcctgggcgcctccgccgggct

SEQ ID NO: 474626 - DNA, 122 bp, Homo sapiens
aacctgctcttcgccctgctgttggacctgctgctggtggccttgatcaaagggctggtccgcaggcgccgcccggcccacaaccagatggacatgtttgtcactctctcggtggacaagta

SEQ ID NO: 474627 - DNA, 122 bp, Homo sapiens
cgtggctccggtgacgtcaagagtctttctggataagggggcgaccggggcggttactagcgaatgttcagcaccgttatctacaagaaaatcaatgtctctaccatcgactgtcattctga

SEQ ID NO: 474628 - DNA, 122 bp, Homo sapiens
aaacaggagaatgctacatggaactgtaaagtaaatgaaccaaagccacatatatctacacggatacctcagaaacatagtcttgtgtgcagaaatcaagttgcaggaagctatatctacct

SEQ ID NO: 474629 - DNA, 122 bp, Homo sapiens
tgccagcattttaaattacatgtttattaagtggcattgctcaaataactacagagtatgcgtggaaatatttgctgtctgaatagtttggagattcaaagagaaaaatcaagcttcagagg

SEQ ID NO: 474630 - DNA, 122 bp, Homo sapiens
catgaggagccccgggaggtgaaaacacttcccgggctaacgtggcgccgagagggactgcggacccactcttggcttcctctttagaggagagatggagcggggtccgaagcgcacaggct

SEQ ID NO: 474631 - DNA, 122 bp, Homo sapiens
aagaaaccacgtgcagttggcagctggggcgccccactacccgcgacaattgtaaacctacgaacagaacccgggccgcaacacgcgcaaccactcctaccacaccacgccaacgccgctta

SEQ ID NO: 474632 - DNA, 122 bp, Homo sapiens
tttgtggcggctatttgcaagttccgtcccacttgtccttgcagagagctatgacttctgcggttgccttcacatctagttagcacacgcactctacaacagctttcgttttgaaatgagag

SEQ ID NO: 474633 - DNA, 122 bp, Homo sapiens
ggtagtcggagcccagggagctgaaggactcggacgaaatcttccttcgagacatgctgccggcggagctgcagcggccgaggcggtggcggcgaggacgcgagcggcggcggaggcggcgg

SEQ ID NO: 474634 - DNA, 122 bp, Homo sapiens
cgcgccgcttggggctgaggttcgggaggtaacccgggcttcagacccccacggacacaccgctctaatccctagccagtgagcgagtgcgtgagagtgtgggagtgggtgtcagttgggag

SEQ ID NO: 474635 - DNA, 122 bp, Homo sapiens
agggttcagcccgagtgggagacggggaaagagagttccgggtaattcttggggactgagcgttctgctgacctttggaataagtgtgtggcctagtgtaggagctaaagccttggtttaga

SEQ ID NO: 474636 - DNA, 122 bp, Homo sapiens
ggcaatattaactgtgtacaaaatacccaaaattcatatctgtatttagttcccttagggcgaaaaagatgatgttttctcaaatgggacctttggaaggatatggacctgtacaacatgca

SEQ ID NO: 474637 - DNA, 122 bp, Homo sapiens
tgcccctccagcacagggacgctctgggctcgtttgccacgaagccttgggtggcttctgcggggccttcctagtgtcccccacttcccacttggccagcatcctcagggaccgagccagtg

SEQ ID NO: 474638 - DNA, 122 bp, Homo sapiens
gatctttaaacccctcctctccgaagcctcacagagctgctgcttgcagagtgtgggaggcgccagtggggactggagcgcggtgcgcaccccagccgagcttgtgtgtgcttctggcagag

SEQ ID NO: 474639 - DNA, 122 bp, Homo sapiens
cggggctgtcttcccgcggagcgtgctgggggcgggtcgcgccgggccgggccgctagtgcgcatgggcgggcgtcctcggctctaactgccgccactttccacacgctgggagggccgtta

SEQ ID NO: 474640 - DNA, 122 bp, Homo sapiens
ggctctgtcgtcgaggcgctcacaggcaggcacacgtgagctcctggaggacagggagagcggccgccccgcccctgcggagcacaggacgcttcctgccacccctgcagagcatgggacgc

SEQ ID NO: 474641 - DNA, 122 bp, Homo sapiens
ccatgggctgtatcggctctcggagcccggcgggtcagggtaagaggcggaggccgggtacgggttggggagtcgggctgcggccgccggtgcgcgggccgcgggtgggtgggggccttgag

SEQ ID NO: 474642 - DNA, 122 bp, Homo sapiens
cggccgccacagtctgacaggggcgcacgggaggccgtgcagggagggccgggggcgggccgagccggccaaggcgggcccgacgggccaagcagcggggctgcggcctgactggcgcagcg

SEQ ID NO: 474643 - DNA, 122 bp, Homo sapiens
tctagttaactgccttgattagaaaggatcctaaagcttctctcacctccctccgggagacggccaaatggccacagccgagcctaggtctcttggctagctccaaaatgccgggaagactc

SEQ ID NO: 474644 - DNA, 122 bp, Homo sapiens
agaagtgctgcctgggtataaacatgtcatctcagaaggtgggaggagagaccctcttaacgtccgtgaacaaccagctgaatctcctttaagcaaagccacgttaataatagcacagacac

SEQ ID NO: 474645 - DNA, 122 bp, Homo sapiens
aagagcctcccatggtgtcacgtcgagcccctgccctcggaccagcaacgcagcagacgtcgagcccctaccctcggaccagcaacgcagcagacgtccagcccctgccctcggaccagcaa

SEQ ID NO: 474646 - DNA, 122 bp, Homo sapiens
gccggtctctctctttccagaaaggcttccggaacctttctgcattgccttctgcccggacgtgcggaagcgaaggccggaagtccttagccggtagcttccgggtttcctgggctactacg

SEQ ID NO: 474647 - DNA, 122 bp, Homo sapiens
gcgtgtgtcagggccgcagtggaggaggctgcagggagccccctaagtgggattcaaggtcgtgattcccaggcacacgctccgttacacgccgggtggcacggacattgcccgtctgccct

SEQ ID NO: 474648 - DNA, 122 bp, Homo sapiens
gaccgcgctccgcgggcgggggcgtggcgggggcgtggcgggggcgtggcgtggcggggccgtacccgaggcgcaagctctgcagggcgcagcggcggctgcggccgcggcgatgcgggccc

SEQ ID NO: 474649 - DNA, 122 bp, Homo sapiens
ctgggagtctgggtttggagtctggtcttagccggtagcaactgacgtggcctgaccacccggcccgtccaggtccacgggtgaggggccgcggtgggggtgctcccagcccagcaggcagc

SEQ ID NO: 474650 - DNA, 122 bp, Homo sapiens
tggcaggacatctaggcaggaggtcagggagcctgggcaaaataaaagcaaagcaaaatacgtgtcaatgcaggtttcaggccagggcctcctcatgctttggtttaattgtggatcccttc

SEQ ID NO: 474651 - DNA, 122 bp, Homo sapiens
ggcgggcagattttttgggtgattcttgtcctcattcccctttgggggagggacattctccgggatacaaagaaacctggctgtgccgtggctgctagggcttctcagcctgggaaggaatt

SEQ ID NO: 474652 - DNA, 122 bp, Homo sapiens
ttcacaaagcaatgaaacaaataagccccacctcctgtggtatgcatgacaagtggcattcgctgcagcccttactaaataaagccacaaaaggtcccctttcacttgcccgatagccttgt

SEQ ID NO: 474653 - DNA, 122 bp, Homo sapiens
gtggggggtagctaaatgttgttgtaagcgggagatggatgcttttggcgtctttaagcacggttaactgcccttgaagtagttgctggcaacaacgtaggggttactctgctgggcctgaa

SEQ ID NO: 474654 - DNA, 122 bp, Homo sapiens
gcccaggcacagtggggcaggagcacgacccagaaagtagtcctgagccacaagtcagagcggagaaaacatctctgtggtcccagtcaagaggcctccgaatgaggcgcctggactgggag

SEQ ID NO: 474655 - DNA, 122 bp, Homo sapiens
cctgcagcccagagggagctcgtccccagatcaagcccagcaggcgcccaccggccgcaccgactgcggggcccacttagcccgtgcccacctggaacctgcgccggcccacaagggccgtg

SEQ ID NO: 474656 - DNA, 122 bp, Homo sapiens
gtacccggccagagccaaaggcgggcacccggcctgtgtggagcgccctggactattcctcgcaggccgacccaggtggcacagcccctcccccggcgccggcaccgccagactccccggag

SEQ ID NO: 474657 - DNA, 122 bp, Homo sapiens
ctgcctcagttccttgtgattcaggaattcgatttcgttgatggaatcaattcgtgggcacgggcctgggcatctccgttgtaactatgtccccatgtgactatgagacccaccatgttttg

SEQ ID NO: 474658 - DNA, 122 bp, Homo sapiens
gtttccattacttttctgtaatacaacaaagcaacggaatccttgggattctggccatcccggaggtacctcccgggtccgtggcggggcaagccctttttccacgacgcctcccacccgcc

SEQ ID NO: 474659 - DNA, 122 bp, Homo sapiens
agggcaagagttctacgcccaagatggccagccggaagcgggcttctcgcgaccatgtggcgaagccccattcgtcagctggccgcccgcggccctggtacccggtcacctctctgatctgc

SEQ ID NO: 474660 - DNA, 122 bp, Homo sapiens
cccaccggccctttataatgcgagggtctggacggctgaggacccccgagctgtgctgctcgcggccgccaccgccgggccccggccgtccctggctcccctcctgcctcgagaagggcagg

SEQ ID NO: 474661 - DNA, 122 bp, Homo sapiens
gcacccagtaagcggtgtcgggggggtcgtgaagcttggagggcctcgaggggagggaggcgcttgggttgaggtagggcgccagatttcgcaaatcaaaatacagcacacccagttaaact

SEQ ID NO: 474662 - DNA, 122 bp, Homo sapiens
ttgctgcacgggctccagcgcttcgcaactttggtttttttccacagatccagtggggtccggacactgggccccgcaggcgaaagcacgttccagccaccaggaggccacctattgtttca

SEQ ID NO: 474663 - DNA, 122 bp, Homo sapiens
gcttcagagcctggagcatcccagtcgctggggccgagacgccgccgccgccgccgttcccgctttctcccgcgagccgggccagtagctttgctaggctggccttcccgtggaggcgtttt

SEQ ID NO: 474664 - DNA, 122 bp, Homo sapiens
ctgtctacactcactcacacctcctgtcctgcagccatggccatgcagaaaatctttgcccgggaaatcttggactccaggggcaaccccacggtggaggtggacctgcacacggccaaggg

SEQ ID NO: 474665 - DNA, 122 bp, Homo sapiens
agctcaggagaagaaaggatgatcccgaggagaggcttccgaggggagccggcacacgcccggggagctcaggaaagcaaagctctgctgtgtcccccaacgctccaaggcccttcccggcg

SEQ ID NO: 474666 - DNA, 122 bp, Homo sapiens
ttccgggtgacaggctccttcttaatcctcttccgctcagggccctgcttctctgtgaggcgggcgagggagagagggaggagagatttcatgccatggtgtcctccaaagctaggtcctta

SEQ ID NO: 474667 - DNA, 122 bp, Homo sapiens
tcacctttctttacttgagcttccaaatggtttcccacagcatgtgggtcccagcgcccgcgatgaggctgcctttgctcctttgccttcgcgtcgcagacgcagcacccctgccagtggcc

SEQ ID NO: 474668 - DNA, 122 bp, Homo sapiens
gaagctgcagtcgggtgtcctgaggcaaggtggccccacttccagctgctgtgcctggcacggcctctgaggcagatgggctgcgcccagcttgggtgcagtcggtcctctgttccctgcac

SEQ ID NO: 474669 - DNA, 122 bp, Homo sapiens
gatgagcgtgagggaggggacgacgcgcaaccacttttgaaaagcgtgttctgccacagccgccctccagccacacttcccatccctcctctccctgcgggtccaggtgtggacgcggctcc

SEQ ID NO: 474670 - DNA, 122 bp, Homo sapiens
acctcatgatccgccagccttggcttcccaaagtgctgggattacaggcgtgagccaccacgcccggccaagaagtttttttttaatgctgtttttgtttattgtcaaattcacaagtaatg

SEQ ID NO: 474671 - DNA, 122 bp, Homo sapiens
gagcatccaaaatatcctggcatctcagacattttgtggtgtctgtagctaccctcccctcgggtagctaatggctcctggaggggctgaccccaaagggaggccaacgggaaaggctaaga

SEQ ID NO: 474672 - DNA, 122 bp, Homo sapiens
gcggctaggagctgccggccttggggggtttgcggtgggcgggcactgcgctcttggacacgtgggtggcgcgcggccctggacttggtggcgacggaccctgcccgaggtggggatcccag

SEQ ID NO: 474673 - DNA, 122 bp, Homo sapiens
tgctgtgggttttaatttcctgccattttcataattaaaaaaagaagtgctattttagcacgaaacaatgtttctttagccaaagccagagtgagtgggcagcaatggccgcgcgccctgct

SEQ ID NO: 474674 - DNA, 122 bp, Homo sapiens
agccattctagaaactctgataagtcgtcttctgaccagtcaaggcgctcctcatcttcccgttcttcctccaaccatagccgagttgaatcttctaagcgcaagtctgcaaaggagaaaag

SEQ ID NO: 474675 - DNA, 122 bp, Homo sapiens
ttgctgggagagaagactacgaagcacattttccaggaagtgtgggctgcaacgattgtgcgctcttaactaatcctgagtaaggtggccactttgacagtcttctcatgctgcctctgcca

SEQ ID NO: 474676 - DNA, 122 bp, Homo sapiens
ctatgtcctgaatggtaatgcctaggttttcttctagggtttttatggttttaggtctaacgtttaaatctttaatccatcttgaatggatttttgtataaggtgtaaggaagggatccagt

SEQ ID NO: 474677 - DNA, 122 bp, Homo sapiens
gggtgccccgagggcctgctctagagaaaaccgccctcaggtgaggacggcttccatttccgggtctgaagataaggaacagcttatcttcggtctccgccctcctgcctgcaaccctcacc

SEQ ID NO: 474678 - DNA, 122 bp, Homo sapiens
agttgtggagattaaatgtgtaaatatttagacaagtggtttatattataaacagctatacgaatgaaagattgcttatactatccaccctgattttgctgtatactgaaagcactcagaaa

SEQ ID NO: 474679 - DNA, 122 bp, Homo sapiens
cctccctcgtccttcaaagacctattcttggggcctgggccctgtgaaacctctggctctcggacgcagcctggaacccctgagacgaggtcaagctccgcggcccgcctcctgtcgcccgg

SEQ ID NO: 474680 - DNA, 122 bp, Homo sapiens
catctgaaatccgacaactcattcttgaaggttagagctcagctttgaagtttcacttcacgagcttggctcagtgaggtatgttactccccggtgaaaaagaaaatgaagagaatgtttta

SEQ ID NO: 474681 - DNA, 122 bp, Homo sapiens
actccatctcggactggctccaactgggaccctccggctttctgaaggtacagaaacttgcgagcacagacacactccctgggggcaccagtttccaagaagccctctggaatgtttagctc

SEQ ID NO: 474682 - DNA, 122 bp, Homo sapiens
atcttaggtaatgggtgcaaaaccagaaccaggaagttgatgtgggtacgagcacagaaccgccttccccaatttatcgtgtgtgtgtgtgcgcttcggcaccttctaacaagcacccggga

SEQ ID NO: 474683 - DNA, 122 bp, Homo sapiens
ttccgccacactcaagatggctacatcagaaatagacttttccatccacctgggtggccccgcccccttatgaagctgcttccgccactctctgcgggttgggacgaattttacacttcttc

SEQ ID NO: 474684 - DNA, 122 bp, Homo sapiens
tcggagcacgtgcgtcctccggcctagcctggcaggcgattcccaggcccgcgtggtcctcgaaggcccccgtcctcctgcgccatggagaccccggcctcgcgacctacccccccggcgcc

SEQ ID NO: 474685 - DNA, 122 bp, Homo sapiens
cttttctgctgcttccttttcctgatgagccaagtgggagaaaatacttcgagaccttcacgctaagacctttccccacgggcttccattagaggcgatgcatataccagggaaggtttcag

SEQ ID NO: 474686 - DNA, 122 bp, Homo sapiens
ctggtgtctggctgaggccatcttgagcgcagtgaggaaggatctccagcctgagtgtgccgtgggccccccgaatacataggggagccctgcaaagcagttttgaaatgagtagtacatct

SEQ ID NO: 474687 - DNA, 122 bp, Homo sapiens
acataaatccgttctgaataacctgcaactaaaaccctggcccactgcagattattgctacgcaatggtaaataactcagcatggatgtgtaattttgtataagccgtatatgggaagtgtt

SEQ ID NO: 474688 - DNA, 122 bp, Homo sapiens
ccgcttccggaactgcagaaaactgcgcgtgcgcggaaaagagcccgggcactctgggggcggggcctggggagaggcggggtctgcggacgaaacgctggggcggagctggggcggggtct

SEQ ID NO: 474689 - DNA, 122 bp, Homo sapiens
agggccgcacgctccgcccctccccaagctaaccgcgcgcaggagcgccggggagggggacgcatctccgcacgtaacgcatcgtcccatcttcccgccaatcgcagccgcgcgccccgccc

SEQ ID NO: 474690 - DNA, 122 bp, Homo sapiens
aatgccagagggaggcgggactagcaggagattgctgcctatgcaaagcaggtaagaagccgaactctgaggcctctcgccattgtctccgagtcggccagctggagcgttttcggggctgt

SEQ ID NO: 474691 - DNA, 122 bp, Homo sapiens
gagttaaaccgttcaggggaggggcgaggtgactcatgcctgtgatcctagcgctccgggcggccgagacaggcagatccattgaggttaagcatttgagaccagcctgggcaactctatct

SEQ ID NO: 474692 - DNA, 122 bp, Homo sapiens
gagcaatttccctccgcgcgacagggcaccgagcgcagcctcgaccccgcccgcccaggccggcccacctgagacggcccgatgaagtcatccaggtccgtcagctgcagcgccccgctgaa

SEQ ID NO: 474693 - DNA, 122 bp, Homo sapiens
tgactcctggtctccatgtcatctgccagaaaggccacctgcgccagcacctcctgagaccggccttcaaagacacgacgcatgccgctctgccgtccggagcacttaatgcctagagccag

SEQ ID NO: 474694 - DNA, 122 bp, Homo sapiens
gactcggcctctttcttctgcggccaccagatcgcgggatatcggagacttcgaacaatccgctggagtcctttacagtttaaaaacagaggaccggccgggcgcggtggctcacgcctgta

SEQ ID NO: 474695 - DNA, 122 bp, Homo sapiens
ggaggggagtcaggattaaccgaggacagggtcgcagcgggggcatggggaggacgggcccgagagcgccgctcctccccaaaactaggatttggagcctcacgttctcccgcaaaacgagc

SEQ ID NO: 474696 - DNA, 122 bp, Homo sapiens
tcccacaggctctacttgcatttatgtgctcttctaagcatataaaacatctgtagggtccggggaaagcaagggaagcaagaaaaaccttgcataaaatcgacttgtgatttttaaaaagg

SEQ ID NO: 474697 - DNA, 122 bp, Homo sapiens
gtaccctccctccccacccccagcgtcatctcgcgcctggagccgggtcgccgctccttccgaagtctcgctggaaacttcaagggctgatggttctgtgttcttgacgtaattaggaggcc

SEQ ID NO: 474698 - DNA, 122 bp, Homo sapiens
tccatcctgtgctcactattctaaatatcgcagcattaattcaggctttcattgttttttcgcttgaatattactgtaattgtctgcacaccatgtctcccaaatccgggcttggcttcctc

SEQ ID NO: 474699 - DNA, 122 bp, Homo sapiens
cccggtgggatttctataactggcacttatttcgcagtgcctgggtgaagtatcaggtcccggatcttccccaccgcagggcctctgcacatgctgttccacctacctgaaatgctttccct

SEQ ID NO: 474700 - DNA, 122 bp, Homo sapiens
tccatacccctcctccccacctcagcaagtcctcagaggataggcaggaagtgggcatgccgaaatcttgagctcggaaagggttggatcattcactgggtcattcctgccagccagttcct

SEQ ID NO: 474701 - DNA, 122 bp, Homo sapiens
ggacaaacacaaacgctgggctctgcccaggatgcgggatgagccaagccgacatgcgggcggcgccggggagcagcgagcatttgcaagtgctaactcgttcctgctgtgtgcagacagca

SEQ ID NO: 474702 - DNA, 122 bp, Homo sapiens
agcaggacactgctacttaacaaggtggtttgagccaagtatgtgtcttgcgggtctttgcgaaagtgaaccagttattaggggcgcctaacgacctggggggtcaactaagggggtaagaa

SEQ ID NO: 474703 - DNA, 122 bp, Homo sapiens
gggttagatataacacatgccgcttctgctgcaggcatccatgtctggacaaggggaacacggtggcctggcagcttggagacgccaggaaccacagagccccaaagaggctgtcagagccc

SEQ ID NO: 474704 - DNA, 122 bp, Homo sapiens
gactgtaccgccgccccagtcccctcagtcagctgtgttgaagccattttttaaagggtccgcagcctgactctccggagcaagggcggagtcggcctcgtcagtgcgcatgcgcgaggtcc

SEQ ID NO: 474705 - DNA, 122 bp, Homo sapiens
tctacttgaggcggttaccttagtactccgagtagactgagtctgtggcgagctgcgggccgattcctggccagtgccatctcagccggagcaggcctcggggcctcagaagcaggctttta

SEQ ID NO: 474706 - DNA, 122 bp, Homo sapiens
ctgttggtggtgttcttgtcttaaccctagatagaatctaatgaactcagaggcttagctcgcctctttagggtccatggtggcagcagagaggcagaagtgggagtccagagccaggaaca

SEQ ID NO: 474707 - DNA, 122 bp, Homo sapiens
atcctctgcccaggcccgctcttgacccctgaccccggcctgaccccgccaccccctccccgcccccagggaggtacctgaagtagtagacatcgctcttgccagcacttagcccagatttt

SEQ ID NO: 474708 - DNA, 122 bp, Homo sapiens
gtacatattatgcctgtgtgtacctgtgggcttgagtgtagggtgtcttctctcctccaccgtaaatgcagttccccataggatgtggatagtggtttctcccttactatccttgcaggtgt

SEQ ID NO: 474709 - DNA, 122 bp, Homo sapiens
agagatgaccgcagcagcatctcccgccgcacgtgccctctctgcagtgtaactgtgaaacgcctcccaagatgaccgcagcagcgtctcccgccgcacgtgccctctctgcagtgtaactg

SEQ ID NO: 474710 - DNA, 122 bp, Homo sapiens
tgacctcgtgatccgcccacctaggccttccaaagtgctgggattacaggtgtgagccaccggacatcttttaagtagaatgaagactacttagaggtaggaaccaaccctaccttggtgat

SEQ ID NO: 474711 - DNA, 122 bp, Homo sapiens
tggggagtggaaccaaacaggtgaaccgcgggagtcaggcatggagtgtttgggcctccacgaggagacaccagaaacttctcggtaggggaagttattcctaaaggcacattctccagggc

SEQ ID NO: 474712 - DNA, 122 bp, Homo sapiens
cgactggatggcctttccctcctgagtgacagccctggacgtgctgtcgcctcatgaggacgccgatgtggccctgctgccggagtatgccaagcacgaggggccaggtggcacacagcacc

SEQ ID NO: 474713 - DNA, 122 bp, Homo sapiens
agccctgggcagagactgctcccagtagtggaagcaccaagcgacccaggagggtgggagcggtgtccacagtctgctgctggacacagggggacacctaggaatcccaccctcatcccaca

SEQ ID NO: 474714 - DNA, 122 bp, Homo sapiens
tcgagtagggagcaggaattcgcagagtagagagaactgcgtctgggcaggcagtccctgcgtggcgcgggggaagagaggaagctgagtgttcaaggcaaggaattttaacaactttgggc

SEQ ID NO: 474715 - DNA, 122 bp, Homo sapiens
agtaaaggaagaatggtgaaacaaaatgcattcagcttttactacatgataggtgtatctcgaacctggaaatgctgaatcagtggtttgttttttttttttttttgctttgttttagcttt

SEQ ID NO: 474716 - DNA, 122 bp, Homo sapiens
tccatggcagcgccgggtctgtcctaagctttgggctgcagcaggactcccttcaccatgcgcagtgagccccggaggggaggggctctgctctgggccctgtggggtccctgcgccagcat

SEQ ID NO: 474717 - DNA, 122 bp, Homo sapiens
acggtgcctggagctgggcagtcttctcgtcagagtggggactggtaagagcgacctcaccgccaggtcctgtgtgttgccggctgaagaagggtagctgaaaaattcagacccagcacagt

SEQ ID NO: 474718 - DNA, 122 bp, Homo sapiens
ttttcctctctgggaggagccactcctggggtgtaacgcagtcagatcccctagcagtcccgctctgccccctcccttctgggggcctcagactccattccctcccttaggaagctgacttg

SEQ ID NO: 474719 - DNA, 122 bp, Homo sapiens
cgtagggaattggtttttttgttttagctatccaggttgtgactggtttacataattacacgattaagccatcattgtaggaaaggctttgcaggagaaaaatgtcttaactggaggtcttt

SEQ ID NO: 474720 - DNA, 122 bp, Homo sapiens
cctcattcagtccccatgtctctgtcggcttttcccttaaaatgtccccttccctcagcccgggttgcacctgcttctggcctgcatagctttctcagatgctccccctccgtgaagaatgc

SEQ ID NO: 474721 - DNA, 122 bp, Homo sapiens
ggcgtggggcctcttctgggcctgggaccctgcgagggacggtcctgtccgcccagctcccggctggcagtagacggtgactccacggcgacagaacctgcatccacccgcgcctgtcgggt

SEQ ID NO: 474722 - DNA, 122 bp, Homo sapiens
gcacagaggtggcacatggtgttaaatccttgttttgaacaagacacagcaggaccctgccggggaggttggggcagagctgtgacttggctgcaggtggctgctgccaaagctggggcctt

SEQ ID NO: 474723 - DNA, 122 bp, Homo sapiens
aagattgatgagcagactgggcggggccaggcccggggccggcaggatcggggtgacatccgccacatccaaggtgcgcctgtgggtctgtgtgagtggcagccccctccggccagcctcac

SEQ ID NO: 474724 - DNA, 122 bp, Homo sapiens
cgacagcggtgatctttgaggtatttgtggcggaaaaagcccttggcacagccagcatagcggaacttgtagtagcccgtgtgggcgcgcaggtgctcggcgaggtgggcacggcggctgaa

SEQ ID NO: 474725 - DNA, 122 bp, Homo sapiens
ccatgagtccagaactgcctaagcctcaccttcctgaccagttggtaatcgtcaacgaaacggaagcagactctaagcccagcaagaacgtggccaggagcgcagccgtggagacagccagc

SEQ ID NO: 474726 - DNA, 122 bp, Homo sapiens
cgcccagcagccccgactattcgtgggcatgatcctgattctcatcttcgccgaggtgctcggcctctacggtctcatcgtcgccctcatcctctccacaaagtagaccctctccgagccca

SEQ ID NO: 474727 - DNA, 122 bp, Homo sapiens
gaacagtcagccctcaatgagggccgcaaccaggcgataggaggccacacgacagccagacgccccattggcctggcggctgcagtccagcccttccgggtgagtgggatttgctgctcacg

SEQ ID NO: 474728 - DNA, 122 bp, Homo sapiens
gcatagaggaagtagcgctctcggccaatacacagatcgcttggcaaacgagcattttcccgcgcctatcgtgaaagcgcgagaacacaggggattatcgcgaggttccgtgctcctctccc

SEQ ID NO: 474729 - DNA, 122 bp, Homo sapiens
cttctgtgtctgctctgagttgttacagaaaattgcctacacttggggaacgcggcgccccggccgccgcagagccgagccgagccaggcgagcccccgcggcgcccaagcgcgggcccccc

SEQ ID NO: 474730 - DNA, 122 bp, Homo sapiens
gctgtgttgagcttttcatggattatcttacgtagataagacactgcaacagtgagtgagcgcttgtaacccacctgtctcttacggaaactgagccccagcgatgctaactttagcaagga

SEQ ID NO: 474731 - DNA, 122 bp, Homo sapiens
gaagaaagcttctccgctcactaatcactcggcggcttccggagagcccgcctcctcgctcggcattctgggattggtagttttagtccagattgtgacgtcaatttcggggtggcgcgcgg

SEQ ID NO: 474732 - DNA, 122 bp, Homo sapiens
tcagaggacggaacgccatgggcacacggcagctgtgagaccgagccgcagggggacgcccggccctgacatcatgggaacaagctagagcagaacaccatgaggaccccgcctctgtgaga

SEQ ID NO: 474733 - DNA, 122 bp, Homo sapiens
ccctgggggggttctgagggactccgaacttgggaacaagaccacctctctgcccccagacgtgatgctgggcgattaccgagggaacaaagtcgccgtcaagtgcattaagaacgacgcca

SEQ ID NO: 474734 - DNA, 122 bp, Homo sapiens
accacaagaaccttgtgaggcctcattacctgccgctcacgtgggaccgttatgtttactcgctcaaggtcacaacagtcaggggcagaagaattttcgctccgattctgaagctgaagctg

SEQ ID NO: 474735 - DNA, 122 bp, Homo sapiens
ggaggctcttacaaactggcagttcattgagaaaaggcagcttttagtcacagcccctctcgctaagacagagatgccgccaaactgaagtccggaggagaaaggataggggctacgggctg

SEQ ID NO: 474736 - DNA, 122 bp, Homo sapiens
acagtttccctccgggaatcttcctgtttgctttccagcgcgtcccctgggtgctggggccggcggacaccctcgaggtgcgtcgcctcggacacctccgcgagggccggggcgccagcaga

SEQ ID NO: 474737 - DNA, 122 bp, Homo sapiens
ggttcatctgcaagttttttcaaattgttgcaaatctccaaaaaaattttcaagtgaactcgtgcagttcaaacttgtgctgtgcaagagtcaactgtatttgcttattttctcaaaaagga

SEQ ID NO: 474738 - DNA, 122 bp, Homo sapiens
tacccccccagcactgcccccctgtgcccgggagtgccagtctcttccacagaaggagggcgcaaggccacccagctctccaccaatgcctgtcattgacaatgtcttcagcctggccccct

SEQ ID NO: 474739 - DNA, 122 bp, Homo sapiens
tgggttttgtttaagcagccgcgacctgtgcctgccgccggctacctccgctgtggcgggcgagcacctagggtcctcacctacctgggtcacagtcaggtccagggcaagccggctacgtg

SEQ ID NO: 474740 - DNA, 122 bp, Homo sapiens
tgggagcccgggtgccaggccctcccaacaccacaccaccctccaggcccccctgccctccggctggaaactgcagctctgtaaatgcctctctaggtagctgctggcggtggtgggggtgt

SEQ ID NO: 474741 - DNA, 122 bp, Homo sapiens
aggctttggggacagacagtgatgaggccaagtctcagccccctgggaaacacattccggcgggaaagaggctgaaacagggaaactgtggcaaatgataccagcgagggctaggtccctga

SEQ ID NO: 474742 - DNA, 122 bp, Homo sapiens
atcaccagcaagtgtcgcgggtcccgcgggtcctccagcgtatggatggacagctgtgggcgggggggagaggcgaggctgtggacgggggaacggggcggggctgtggacgagggaacggg

SEQ ID NO: 474743 - DNA, 122 bp, Homo sapiens
gcacggcttccttgatgaggtttcccgagagcacgagctgctggaggagccgatgcgggtcgtcgtcgccggcgcgtgccccggcttgggtccatcggcgctgctgcaagcggcgggaggtg

SEQ ID NO: 474744 - DNA, 122 bp, Homo sapiens
acttcacccagtataacgccctctacttcctgcacacctgggggaaaggggtgcggggggcgggcagcttaagtccacataggtactagtaaaggcacagcgaggtgcagcctgacatctgc

SEQ ID NO: 474745 - DNA, 122 bp, Homo sapiens
ctacaagttgttattggagcttgagagaggctgagttatttgttttttagggtggttccccgccccgcccccaggttttgaccttccagttcactggggcttgaaatgaatctgcagtaagc

SEQ ID NO: 474746 - DNA, 122 bp, Homo sapiens
cactcacacgggcaggtctccagggctgtcctcctggctgcggactcctgggcactggaccgtgcctctctcatctgcccccagcacagggccagacacgggtgatatggagaaacgcttgc

SEQ ID NO: 474747 - DNA, 122 bp, Homo sapiens
gcccaaaggcctgaagttgggcggggagcccctcccccacactactggttctgaaggctccgagtgaccgggaccgaccgccggggtgtgtcccgggacggacttccctggccgtgggggcg

SEQ ID NO: 474748 - DNA, 122 bp, Homo sapiens
ccagtagctcctggtctgccaggcttgcgagagggcgcgctggcttggcggggctccgggcgagaaatcaccagcagcgctggggctttcggccccccacagcccagcccgggcctcctggg

SEQ ID NO: 474749 - DNA, 122 bp, Homo sapiens
ataacaggaagacaactccagggctgagttttatcagcaattgggtataaatttaaagaccgctgttgcaggatggctctgaattctgttgtgtcgtcttttaaaattttaattattctcat

SEQ ID NO: 474750 - DNA, 122 bp, Homo sapiens
agagtccttactgatccacatgttcacctacaccaagtattgcccgaatttaaattttgccggtctactggtgggcaatatccaaattactattaagctttagcacatttttgtgttaatga

SEQ ID NO: 474751 - DNA, 122 bp, Homo sapiens
gtgcctggaggtctctgggtccaggtgagtgtggtgtgagtaataagcctgcatggcttacgcgctgcatgggaagtcctgtatcacaatcacaacgtatcataaagtcggaggttcacaca

SEQ ID NO: 474752 - DNA, 122 bp, Homo sapiens
aatgctggtgtctcttacccaaagctctaagacttgagcttgcatcctctgcaaaggagacggcaaagtcctggtcatttgccccacgctgctcctgggcatcagcctcataagcttttgcc

SEQ ID NO: 474753 - DNA, 122 bp, Homo sapiens
ctggcgaaccccgagacccacccgccctgggctggagaggcggcgcgctctggctttccgcgctggcacaggggtgggacaagccaagtttccaggagactcgcccagcgcgggcccggccc

SEQ ID NO: 474754 - DNA, 122 bp, Homo sapiens
gatcattatgaaggtgtattggttaaggctggaggatagaacatatggtaactaatagttcgttagcttgatttacagcttttaaatatttaggcatatgggatgggggcttccatttgtgt

SEQ ID NO: 474755 - DNA, 122 bp, Homo sapiens
agtccccagctccactgtcctccgcctctacactcggggattctggagaccacgtcgacccgcaatgaactggaataaagattccagtctccagcccctgggggaaggcaggagcagaattt

SEQ ID NO: 474756 - DNA, 122 bp, Homo sapiens
tgtggggagcgcctctgccctgccaccccgtctgggatgtgaggagcgtctctgcccggccgccccatctgagaagtgaggagaccgtctgcctggcaaccgtcccgtctgagaagtgagga

SEQ ID NO: 474757 - DNA, 122 bp, Homo sapiens
agctggacgcccgtcagcccggccctcaaatacgtcagcaacttctcggctgccggctgccggggccggctctacctggtgggctccagcgcctgcaagtacaacgccctggccctgcagtg

SEQ ID NO: 474758 - DNA, 122 bp, Homo sapiens
ctcccaggttcaagtgattctcccgcctcagcctctggagtatctgggattacaggcgctcgctaccacgctctgcgattttgtatttttagtagagacggggtttcaccatgttggccagg

SEQ ID NO: 474759 - DNA, 122 bp, Homo sapiens
cctccaagaccagctcgcacttgacttactctcctggtccaaggacacctacagccccgacgaacatttctgggtgacactcaacaggattcccggtatgtacgtctcttaacttttatttt

SEQ ID NO: 474760 - DNA, 122 bp, Homo sapiens
tgagtataacacttgggacggtcacttactaccagcttcccgggatgcagaggtgtgtggcgttgccattgttggccgcacgtagttgcatttagtagtgtgttgtgcccttaaaaagttga

SEQ ID NO: 474761 - DNA, 122 bp, Homo sapiens
ggaaactggggattgcgttggaagtcggcaccctcgagtgagttcggattcgagctgggccgtgaggccgggagattcagcactgggctctaggtagcccccgggacgcccgcggccaccgg

SEQ ID NO: 474762 - DNA, 122 bp, Homo sapiens
ctactcttttaggaactcttaggcacaccttgcttgaaagttcatgcatggctgatgtgacggctgtcttgtggcatgcttcagctgaacttctagttgtattcaaaccattgactcttccc

SEQ ID NO: 474763 - DNA, 122 bp, Homo sapiens
tctgcgtaccctggcaaacaaacgaccaacagcgcatgagtggctgtaggaccaacagcccggcgctggcgctgcgcgcggatcggggaagccccgtcaggaaggagagtcgctgccggaat

SEQ ID NO: 474764 - DNA, 122 bp, Homo sapiens
cccgggcgtgacgtggaccttcacgtgccgctccctgagcaccctgggtcgggggcggcccgggattctctcaggaggctacattcccagtgcagatgtgtaggcctaggtggcccctcacc

SEQ ID NO: 474765 - DNA, 122 bp, Homo sapiens
gatttttccatttcttgagaaaccacgtgtttcagcgaggtggggtttatgcctcttgcccggacaatgccctgccctgtgtgtggacaaagctacccgaaccaatcctggatgggtcccgc

SEQ ID NO: 474766 - DNA, 122 bp, Homo sapiens
gtagacccgcaccccagctcatgtctcccgaagaacaaagacaggtaaatagttaactaccggcatgggcataaatactgcaacagaactggacttgatcgggcacattcccggccaggggt

SEQ ID NO: 474767 - DNA, 122 bp, Homo sapiens
taaactgtgcctcgctaggtgctaggagacatgatcagcaaaacaacctggttctgtcttcggggacttacagtctggaaacacacaagtgaatcaggaaaccacacaaatataacgatatg

SEQ ID NO: 474768 - DNA, 122 bp, Homo sapiens
gtccttaccctgctgcctggacagccacagtgatgacagttattatttcagggctataaacgggctcagcagcattaaggcatttgcaatttgtttctaacttttagctcctaggctaacca

SEQ ID NO: 474769 - DNA, 122 bp, Homo sapiens
atgttaggcagttgcaaaaagcatggctggagaggccacgctggattgcccctcttacttcggttctccaaatgctccttctttttaacactctcctctcaacagtcctctctacaaaacac

SEQ ID NO: 474770 - DNA, 122 bp, Homo sapiens
ccacctccatgtcggtgtcccggttgcagaggctcctcagggcttccagcaagtcatccacgaagccttccaggaactcccgggtacgggctgcatcggccgtggccccccggatgcagcgc

SEQ ID NO: 474771 - DNA, 122 bp, Homo sapiens
tccgcctactttcttcccatggacctccctctcctcctcgaagtgagagtccagggccagcgggctgagcccctgcggccttctgcacagctgcctccaagagccccacatacacaccacat

SEQ ID NO: 474772 - DNA, 122 bp, Homo sapiens
cctgcggccatcatcagctgataggcaggggaggcattttaaatgatgcaagttgttaagcgcctgttaataaagatacatggatatcttggggctgtgaaagtggtaagtacaattttcac

SEQ ID NO: 474773 - DNA, 122 bp, Homo sapiens
cctgctctgctgtgctctgcagggagctacatttctcaggttcccttgctgactggcttccgggtaggttgggctaaagaaagtccctgacagaagattggagatgagcagacagcagccag

SEQ ID NO: 474774 - DNA, 122 bp, Homo sapiens
cttctgcaaactgtgagcatggaaggcttttcttctcttttctccccactccaaagccctcgtcttctttaagaaaaccaccactgcctggggtgcttcttttgggaggctggggttggggg

SEQ ID NO: 474775 - DNA, 122 bp, Homo sapiens
gcagcggcagcaagagaaggggacagaataaggaggaggagccgcaggagctggagccgccgctgccagagccacctttcgctacccgcggtgggtcccagtcaatgcccctttctctctcc

SEQ ID NO: 474776 - DNA, 122 bp, Homo sapiens
ggcacccagaggcctgaggggcaccgggagcgcacaggaggggaggctgtgaacacggcccggcttctttgcagctccgtgtcggggccatgtgaggacacacaccgcaggagggcccggcc

SEQ ID NO: 474777 - DNA, 122 bp, Homo sapiens
agatcctttgtgttttccatcagggcctcatgggtaggggttgtccgtgctccccgagcccgcggcgccccctccccgggctgggggcaggtgcctctccccgggactgcggcgactacagg

SEQ ID NO: 474778 - DNA, 122 bp, Homo sapiens
ctgtgccctgcaggggaatttggggaagtgtgccgtggtcgactgaaacagcctggccgccgagaggtgtttgtggccatcaagacgctgaaggtgggctacaccgagaggcagcggcggga

SEQ ID NO: 474779 - DNA, 122 bp, Homo sapiens
cctgtaccagagggggcccgagaaagtgtggagtccaacagtccaactcgctcattttaccgatgtcaagactaagcccaggatggtcacacaacttgcctggaccacccaaaggcgactgg

SEQ ID NO: 474780 - DNA, 122 bp, Homo sapiens
gtcacgttttatttttctttcaatgccagagcttctcagcttggcccctgtagccctgtacgttagcccactcagaagagagctctctttcagggtgtccaggagcctctgacactataggt

SEQ ID NO: 474781 - DNA, 122 bp, Homo sapiens
gcgcgggctggtggcgggcgggggtcgccggctccagctcaggttcccgcgccaggaccgcgtccagaaccttgtctccggaagcgggcaacggggtggttgtatcacaattagtggcattt

SEQ ID NO: 474782 - DNA, 122 bp, Homo sapiens
cccagagcctcaccccctctttttctaacctttgtctctgcagaggtgggctccagtcaccggctgcgggattgcggagtccgccgcggcctcggctcccgcccggcgcccggcctggcccc

SEQ ID NO: 474783 - DNA, 122 bp, Homo sapiens
ccccctctcccctgtgctggcctccaccaagaaaggaactgaaagtcccatcatggcttccggccgtactggctctcgcactggcatggaccaacgatctcagctctctctctgccctcctc

SEQ ID NO: 474784 - DNA, 122 bp, Homo sapiens
cgccggggcggagagctgaggccgggtgacaatgtggtctgtgaggtttccccatcctaccgtaggggatgagccagctctctcctctggctccaactctgtgcaagccccctccccatccg

SEQ ID NO: 474785 - DNA, 122 bp, Homo sapiens
tgcctgcaattgcaggcgcgcggccacgcctgactggttttcgtatttttttggtggagacggggtttcgctgtgatggccgggctggtctccagctcctgaccgcgagtgatccgccagcc

SEQ ID NO: 474786 - DNA, 122 bp, Homo sapiens
taggaccctccgagccaggtgcggcatataatctcgtggtgcgtcgtttttcaagcctgtcggaaaagcgcagtgttcgggtgggagtgacccgattttccaggtgccctctgtcacccctt

SEQ ID NO: 474787 - DNA, 122 bp, Homo sapiens
aagtaagttgctaaacctgaccacgtcaagggccaggtctataaaaatgatgacatttcccgtaaaagggcctgcctggccctgcaccatttgccttcacaagggagcactgcactagagaa

SEQ ID NO: 474788 - DNA, 122 bp, Homo sapiens
aaggggagcattgacggcccgatcacttggcctcctctcctgcgtggattcattctacggcgcactggtgtattggattaaatctcacgtccgcgtagtgttgacgaggaaacacactctga

SEQ ID NO: 474789 - DNA, 122 bp, Homo sapiens
gaggctggagctcccctacgggagccgggagcataaccctgctcctcccgccaatgggggcgacaaaagccgtggaaggttgctcaggggctggatctcctgctgtccgggccccaagccct

SEQ ID NO: 474790 - DNA, 122 bp, Homo sapiens
ccccctcacacatgcacagaccaggcaaggacccggaaggcaggaggctgccgggaaaagcgcccaccggtcacttggcaccgtgagctacgcacgtgagccacgtgcgccctgactgctgg

SEQ ID NO: 474791 - DNA, 122 bp, Homo sapiens
aaaagaacatcaacgacgcaggtaaacaggacgacaagcatccacgattgcccaaccttccgcagagatggcatccccagcgggaagtgaaagtcgtgtgaatccttcgatagctcagttgg

SEQ ID NO: 474792 - DNA, 122 bp, Homo sapiens
aggaccaagggcagtgggcagcagtcagagcggggctccgaccgcacccctgagcgcagccgcaaggagaaccactccagtgaagggaccaaggagtccagcagcaactccctcagcaacag

SEQ ID NO: 474793 - DNA, 122 bp, Homo sapiens
aatatggaggggtgctctgctcgcttccacgtggctactattgttatgaacaacaacagccggcgtttactgagcactgctcctacagcttatctcacaactgggtgaaggagcagaggatg

SEQ ID NO: 474794 - DNA, 122 bp, Homo sapiens
ttctcttatcagataaaaggaacgagcgaacattggtatatttcacctttggcccttgctcggtgacaaatttggttcttagcctctttcacactcctgtccaggtccttggtcttgcctat

SEQ ID NO: 474795 - DNA, 122 bp, Homo sapiens
aatggagtccaaaggaagtctatgagcagggttaaagttatgctggaagtcaggaaccaccggaacaggttgggaaaagagcagaaagttgaaactgttaagagctcatggttagtgtcctg

SEQ ID NO: 474796 - DNA, 122 bp, Homo sapiens
agaccacccttgggcttaggggtggaggaggcaaggtcaggcagcagccagggttagaaccgcagtggtgaggaacccgctgctccgaaatgctgccactgacctaaggcatgtcacttctc

SEQ ID NO: 474797 - DNA, 122 bp, Homo sapiens
cacttcccattgtgccctctcgcgcttcctgccgcgctgcacgctgggagtgcaggaccgcgaggcctcaaggtattttggaactcatattctttagtcaactaggtcctaaatgttataaa

SEQ ID NO: 474798 - DNA, 122 bp, Homo sapiens
gggaaaatgtcttcagtactttttttataccgggcttctctgcgcttccggggcccagagcggcacgttcgccacaccctcctcatctgcatagggcgccgccccctctgccctcccccgcc

SEQ ID NO: 474799 - DNA, 122 bp, Homo sapiens
ctgtgaggcgcttggtagcacccagtcctgatactctccagttacccggtaggcggggctcggacacaaagaaaaggtgaattcgcagctgagagcccttgtttccggtccttttttttttt

SEQ ID NO: 474800 - DNA, 122 bp, Homo sapiens
ctatgccctcaccctggactttggggccagtggacctgctctgagccttcaccctgaactcgggggcagtgggcttgctctgagccctcaccctggactgtgaggccagtggacctgctctg

SEQ ID NO: 474801 - DNA, 122 bp, Homo sapiens
cccgagccggcctggggtctgcagcggggcctgctagccgaagtctccgccaggatgggccgccagagcccaatcacacatgagaaacgcgacagatgctgggacgctgcaataggccaaac

SEQ ID NO: 474802 - DNA, 122 bp, Homo sapiens
accggaaggaagaaactcccaacacatccgaacatcagaaggaacaaaccccggacaggccgccttgaagaactgtaacactgaccgcgagggtctgcggcttcattcttgaagttagtgag

SEQ ID NO: 474803 - DNA, 122 bp, Homo sapiens
ggcgcccccgtgcggcccggctctgaggcagcggctcagggagggagggaggccacgtcccgggcacgccacgccacgccacgccccgcccccagattcgtctcgccccagtgggccgcctc

SEQ ID NO: 474804 - DNA, 122 bp, Homo sapiens
attatatattatatattatatatggcacatccatccactttactccacatccactgccatcgccttggtccaaaccactgcacactgtacttttttttttttttttttttgagacagtcttg

SEQ ID NO: 474805 - DNA, 122 bp, Homo sapiens
aacctaccaacggccaggaagctgcctggtggtgtcaactaagaaaagggggagcatctgcgccgtcactgttggggagggggctctattagtggtttgagagcttcacagaagccttcccc

SEQ ID NO: 474806 - DNA, 122 bp, Homo sapiens
tagccagtcactgttaatatcttatagctgcaggaggactgaggttggggagcatggaatcgaagggcactaatagctgtgggctgacaaagattgcaaatccctgctctaattcagcctca

SEQ ID NO: 474807 - DNA, 122 bp, Homo sapiens
agtgactcagaatttattccctggagtccagacctccttgagtttccttagctgaattcccgtagttagttttgtgtgtgtttgtgtgtgtgtgtgtgtgtgtgtgtgtgtgcttaagccag

SEQ ID NO: 474808 - DNA, 122 bp, Homo sapiens
tcttctctccctgtcagccccaccccacatgaggcccaacctcatgctgcccctcacctgcgctgctgtcctgcaggataatggccaggaaaaagtcctgggagaacatggcgctcattccc

SEQ ID NO: 474809 - DNA, 122 bp, Homo sapiens
tgggcctgccctccgtgagctacgccagctccggggccagcgtgagcctccagctggtggcggagatggcgactctgttctacggcctgatagaccagacccgggagttcctgcacgctgca

SEQ ID NO: 474810 - DNA, 122 bp, Homo sapiens
aaaaaaggagccaattaaaggcagcccagctcgcctggcccagcctctgtccaatttcctcgcctcccccaggaccaattagagaaaacaaaacagggctgggggaagctgactgcctgcct

SEQ ID NO: 474811 - DNA, 122 bp, Homo sapiens
cctggcctcccaccagtttttctgatgggaaaactgaggcctgggaaggcacagatccctcgctccacatcacgccgcaagtcagtggcagagccgggagtggaacctagacatcctgatgc

SEQ ID NO: 474812 - DNA, 122 bp, Homo sapiens
agcaacaatattctgtttgcatcacctaattcacagagcactgaactaggtagcatgtgacgttgcatcacaaataataatcatttccacttgagtaccaattatgcatttcctctgtggca

SEQ ID NO: 474813 - DNA, 122 bp, Homo sapiens
tcatcgctcccagaagccctcctcatacctcccggaaaccacgacccccacttccaacaccgtccgtgcatttggcccttttggcactttatagacgtggaatcaggcaggacatgctcctt

SEQ ID NO: 474814 - DNA, 122 bp, Homo sapiens
ttctgaggtggcgttgggggtctgcgccccgcccgcgcccggggggcggaggaagagtggcgccagtagcagcagcagcaacatctaagtgagaggcggccatgaggactggaccgagcccc

SEQ ID NO: 474815 - DNA, 122 bp, Homo sapiens
cctgcctgaggcccagaaggctcatggtcaatggcagccccgcctccaggtctgaccaaccgaggggcagagaaactccaaggacagagctccacacttggacatcaggggcagcatgagct

SEQ ID NO: 474816 - DNA, 122 bp, Homo sapiens
gcgcccgcgccaagctggctgctgctgtagatgggcctggttcacctgtacttcagtctccggtggccactcggtgttgaccaacaagtcatagagaatcgtctcctcctcaccctctgcag

SEQ ID NO: 474817 - DNA, 122 bp, Homo sapiens
ggcggcaggggtggagtcgcgaggaggcgcgaggttagaaaccaggcggcgggcccagcacgcggtggggccgggtggggaaggggggacgggcggggggtgcgcggggacaggcacaggag

SEQ ID NO: 474818 - DNA, 122 bp, Homo sapiens
tgctccacatgagggggctgcgggctagtgcgcatgggcctgcttttgcctgtgtgtggccgaggggctggtggtttcagagcctcggcacaggcaggagcaggtgctaggctgccttggcc

SEQ ID NO: 474819 - DNA, 122 bp, Homo sapiens
gttggaggagggtaggcctggccttttcacttgcagtctcccttcattcgggccatgcttcgttcccaactctaccccaactcgcagggtctccgcgggccgcagtgttgccggcttgggtt

SEQ ID NO: 474820 - DNA, 122 bp, Homo sapiens
tcagaaagcacgagtggcttctcctgcctctggggacgctgtagggcacaggccccaaagcggggtcccctcacataccggatgtgattggcctctgtcgaagttggggccctcagtctact

SEQ ID NO: 474821 - DNA, 122 bp, Homo sapiens
tgctgcttgttggcggtggggagaagtgcagcggcaagaggcgagacggacaggggtgtgcgggttctgcgtgtaggagaatctgcttgggaaaccacagccctgcctgccgtggagatgga

SEQ ID NO: 474822 - DNA, 122 bp, Homo sapiens
gcctcgcgagaccgctgtctacggcgctgacgccgcctctgcctcttgaccccttggccccgctgtcctgatccctgaggtcggggcctggtctgcactccaggaaagacgagtgcgcttag

SEQ ID NO: 474823 - DNA, 122 bp, Homo sapiens
agcaaacctggagcgaaagaggttggagtttggattcggaccacaactcccagcaccctccgcgatgtctgtccttttctttcataacgcggaggaaaagaaggacaagatgaatggaggcc

SEQ ID NO: 474824 - DNA, 122 bp, Homo sapiens
agtgcaggaacagcaccgcccacaaattttctgcagcgtgatttgtccccagtggcgactcgtagagagttcggggctcgctaccagcccctctcctgattggccttgtgccgcgcgctcga

SEQ ID NO: 474825 - DNA, 122 bp, Homo sapiens
cttccaattcaggagatggaactcttgctgcgggttctttaggtagttttccccgtgattcgcctccccgtgcatccggtcaccttccttcctgtactgccccctactgccccctctcctgc

SEQ ID NO: 474826 - DNA, 122 bp, Homo sapiens
tggtccccacccccatttgctctccatgggacggcctcaaactcttcagtggtttccaatcgatcttagaaaaacagcccaagtctgtaccctggccttcagcatctcccacccttccatcc

SEQ ID NO: 474827 - DNA, 122 bp, Homo sapiens
tctcctctcttggactttcccgccttctctcttcccctgggcgacgtagctgcttggggacggaggaggcctcttcgcaatccattgccctgcttgttgggacagaggagtgcagttggctt

SEQ ID NO: 474828 - DNA, 122 bp, Homo sapiens
ctcccgagtagctgagactacacgaatgtaccaccactcccggctaagttttgtgtttctcgtagaaacgtggtttcgccatgttgccgaggctgttctcaaactcctgacctcaggtaatc

SEQ ID NO: 474829 - DNA, 122 bp, Homo sapiens
tgtattctgttgctcacacagaccatccctggtaccatgtgggaggaggctacacaagggcgtggacacctgaaggcagggaccgctggggccatcacagacgggcctgtgaagcatgtcca

SEQ ID NO: 474830 - DNA, 122 bp, Homo sapiens
tcaaaagttgcgtttcggtcttcccataaagcgacagagtagcacctggcatttgataagcgctacaaggggtcgtcatggtggtggtggagattattgttgaaggaccctcgccacctcca

SEQ ID NO: 474831 - DNA, 122 bp, Homo sapiens
aacgaaacccggagggagccaggcgccagcgggaaacgaaagcgaagcgttgcggggaaacgaaagccggaggcccaggcggggcaggagccctggggctggggcgcccttccggcctctcc

SEQ ID NO: 474832 - DNA, 122 bp, Homo sapiens
ttggactccagtgaggcagcaggaggagccggcaggaggagagaagggctggggtctgagcgtgatcccagaagtggccacagagaagggacctcgggtggaggccaccagggcctggactc

SEQ ID NO: 474833 - DNA, 122 bp, Homo sapiens
tgttgatggtaacagtaggtagtaggtcaggaggacaactcaaaggagcccagagagagacgaggtaggacacccttgactaaccacttctgacctactgggacaaagcatggagaggaggg

SEQ ID NO: 474834 - DNA, 122 bp, Homo sapiens
cagctcccgcggccccgccgccaccagaaccagctcctggccgcagcgccatcttgctcccgacctgccgctgccttcgccgccgccaccttatcagcagctgtcagctgaacacagccact

SEQ ID NO: 474835 - DNA, 122 bp, Homo sapiens
atctctccaggcgggcagacacatgttgctgtaggtgcttaccctcacacccaagcaaatcgaaggaccctcccctcatcagcaacccaaacatacactgggaatggctgaagtggttaagg

SEQ ID NO: 474836 - DNA, 122 bp, Homo sapiens
tcacttctacgaatccatcctaaagacacactttcagctggatgtggtcgctcatgcctgcgatcctaacactctgggaggctaaagtggaagaatctcttgggctcaggagctcaagacca

SEQ ID NO: 474837 - DNA, 122 bp, Homo sapiens
tcgtcgctacagaggagcagaggatgacgtgaggacagagtcgcgaacatctcctcggagcgcagctgggccagcggttcccacagccctggagcccaacgtgcgcagaagcgcctcttgga

SEQ ID NO: 474838 - DNA, 122 bp, Homo sapiens
gggttgagtaggttggcggggggcaacgctggtgtctacacagccaagagggaacattcacgcacacagaatctatgagacgacgggatcccttaccacacgggagtgtcctcttcgtatta

SEQ ID NO: 474839 - DNA, 122 bp, Homo sapiens
ccttggagaaaatggtgaagaagtcgagcatggcggcagcggcagaggagctggggccggcgccgggaattcaggccgcgttcgccgccgcttcctgctgcgccaagcgcgggacacgtcac

SEQ ID NO: 474840 - DNA, 122 bp, Homo sapiens
cgagcgtggcgggggcccgcacggggtacagaggtcggagtcggtgtctgactctccctccgcaatgtagggcctgactttggcacaaggcgccacggccgcgtagcagctgttgagagcat

SEQ ID NO: 474841 - DNA, 122 bp, Homo sapiens
aggcacacaaaagggcctgatggtgatatgactccaccctccccgtttttgctgacattccgccaaatatccttctgtctcctccccaccttgcaaaacaaacttcctgttttgaatttggt

SEQ ID NO: 474842 - DNA, 122 bp, Homo sapiens
gcaagtaaaaaggcatctcgttacacaagggcagctgaaaggcagacaaataacaggatacggctggtaggataaatagaaggagacaagtcttgagtagtttccatgactcattgctgagc

SEQ ID NO: 474843 - DNA, 122 bp, Homo sapiens
ggcccctggggagccacagggctctttccccaggtctgttagcagtttacgatgattatccgtaggctccctggacagctcatgagtcaagagactgggttcccgtaacccactcccttgcc

SEQ ID NO: 474844 - DNA, 122 bp, Homo sapiens
gtgtcccagcacaaaagggacaggcttggctgatcccacatccgccgcagtgttgtgccccgaatttcagggccaccaggctaagggggagtggatctgttggtccaagggtagagtggccc

SEQ ID NO: 474845 - DNA, 122 bp, Homo sapiens
taaacagagaagggattcctggctgtgcctggtgtgtccaaaaaggcttcctggtcaaagcgatccctaatctgggctgggaaggggagaactgagcaagggccttccaaggttggtcacag

SEQ ID NO: 474846 - DNA, 122 bp, Homo sapiens
gcattattaattctatgtaagtgcctgcttgtcagatccattaaccgggggagtaattgccgagggagagagctcagaaggtgtgtcacgctgctcgctcggtctaggtggaacgaagcgga

SEQ ID NO: 474847 - DNA, 122 bp, Homo sapiens
gtgcactccgggccgcagttactcttcagggatgtgctggtgagtggtaatctcagtgtccggatgccagcaagggggactcagggacttgagtagtcagcaccttgaccactggtgacctg

SEQ ID NO: 474848 - DNA, 122 bp, Homo sapiens
aagatgatttcctccatggactgcagatgctgaaatctctccaaggcacacatgttgtcacgctgcttggctattgtgaggatgacaacactatgcttactgaatatcaccctctaggttcc

SEQ ID NO: 474849 - DNA, 122 bp, Homo sapiens
gtgcagcgctttgcgaggggggcctgaggccctcagtgactgcagccttcgacttagaaacggctaagcctgaaatgatggggtgtgccccggatgcctcagacaacagataaagctactcc

SEQ ID NO: 474850 - DNA, 122 bp, Homo sapiens
tcggatggggcgggcccagtttggcgctgacgacgaatcacctgcctcagacagcaggggcggaagcggaaaagagctgaaagtcttggtttggccttgggttccgctgtaggggaggtccc

SEQ ID NO: 474851 - DNA, 122 bp, Homo sapiens
tggacagatgggcgactgagggacaaacggagagtcaatcaatgttctccacgaccaggtcgctacctgtctccagtccctcctggcctcagactgtgatccagcaacaccgaacagcaagt

SEQ ID NO: 474852 - DNA, 122 bp, Homo sapiens
caggaaagggtagccgagggtcagagtcccagggccaggcgggcaaagcgcgcaagacaacgtggccgcgtccgagcggatgccggcggcagcgtaaaccccaccccagcgcgagcggaaga

SEQ ID NO: 474853 - DNA, 122 bp, Homo sapiens
ttgaaacttctcctaggcccatctgtgtacttccctgtaaaatacagctttagcaaaggacgctcctaggccattttagcaagaacccctttctgcagcacatctatctactcatcctttac

SEQ ID NO: 474854 - DNA, 122 bp, Homo sapiens
ggtatggaagggtgctttcacctgtttgggctacatggccattctggtacacatcagccacgtgtcagcatgggcagagagaagtagaaattgctgaggtcagggagggaacctggcctcat

SEQ ID NO: 474855 - DNA, 122 bp, Homo sapiens
gagaaaaccagaatggaatatctatgtaaatgttaatgcatccctacttcattaaagaaacgacaaacaaacatatgttcagaagattgtttggtatggaattcaagcaatgggagtggaat

SEQ ID NO: 474856 - DNA, 122 bp, Homo sapiens
tctaagatctcttccgggggtgaaggctgggggctggacgcctttcgggtctttggggaccgggtggtctgtgggccaaagaaatgggttagtggtgtggagtttattggggaaaggaggaa

SEQ ID NO: 474857 - DNA, 122 bp, Homo sapiens
ggcatgagcgtgcgtgtggctccccagggcctggagcgggttccaggaatcttcatctcccgcctggtacgtgggggtctggctgagagtacagggctgctggcggtcagtgatgagatcct

SEQ ID NO: 474858 - DNA, 122 bp, Homo sapiens
tatatgtagcataggtggtagaaagatgacacactcaatcaacaggaagaaagggtcactcggagtcctgggcccaccctgcccctgcccctggcattcctggatgggaacaccagtgccct

SEQ ID NO: 474859 - DNA, 122 bp, Homo sapiens
gacacgtacccaccattacagtgtcactgcctaaaattccttcgtgcagcatcccttttccgctggtaggggggaagcaacctctttgagcctcacggtgtgaataaacacagatgatcgtc

SEQ ID NO: 474860 - DNA, 122 bp, Homo sapiens
gtcgcacttttattggattgcagtttgggagcagccactttgggtttggcactgtgttaacgacagatttctgcttcccttgcaaggcctggcctctcggggagcgcgccagcagcagcagc

SEQ ID NO: 474861 - DNA, 122 bp, Homo sapiens
gggaatggggtatgaggacagggagggcatgcttagaagctggagcagcacatgcaaacacgaagacaatgtgagaaagttcaaagggtatgtgaaagcaaaagtgtaaataattaggcaga

SEQ ID NO: 474862 - DNA, 122 bp, Homo sapiens
tggtaattaatggttaataatgctaaagagatagccatcagtgagacttctgaatgcccacgatgctttaagcaatactcagactcttatctagaaatgctagcaaaatgcaaatcccacag

SEQ ID NO: 474863 - DNA, 122 bp, Homo sapiens
ggctcaagggatacaactgcctcagcctcccaaagtgctaggattacaggcaacagccaccgtgcctgcccttttaattgttatgttgtaaattatttactttggacacgagttccatgtca

SEQ ID NO: 474864 - DNA, 122 bp, Homo sapiens
tttcccagctgactctcctgcgcgcgcccttgcctgcgcgcggggggcgagtgcaccgggcgctcgctccctgccgagctcttgtcgcccgcccgagcctttgccaggggatgaggtgggag

SEQ ID NO: 474865 - DNA, 122 bp, Homo sapiens
gagggcccacggcactacgcagcatcccggagccccgtggccctgttctgccctggaccgcgcaccctgctcccggaaagtcctgcctccacagacaccccgtgcaggccgggacctgcacc

SEQ ID NO: 474866 - DNA, 122 bp, Homo sapiens
gcacacagctgcctgtgggactaaccacctcattcttccaagacctcagcatagcaaggccgtgagtcatggacctcactctgctaagcattaacttttccacttgagagggcaacacacag

SEQ ID NO: 474867 - DNA, 122 bp, Homo sapiens
gcgagaaccgcacatgtggctaatctttcagcggaaaaggtgtcgcgcacgcgcagagagcgcggctccggcgcagactcggcgcctctcctcaaggccccgctcgccccgcccaccgggct

SEQ ID NO: 474868 - DNA, 122 bp, Homo sapiens
aacaacacagggattttgtccgttggtcacagttcatggacccttagcttgaggtgtcctcgttgtagtttgtcttccacatttagttacaactttgtatttcatggttttttttttttttt

SEQ ID NO: 474869 - DNA, 122 bp, Homo sapiens
agtagggaaatgcgcctcagcccctcccacgggccgcccacggattccaggatccgaaaacgcttccagctgctccgccaccccaggaaggcagcgcctgcctctgggcggttctgacggaa

SEQ ID NO: 474870 - DNA, 122 bp, Homo sapiens
cgagctaccatctacgaactttactaagccctgtatgggtcccagccccggaccagagagcgcctagaaagtgctgtgaggcggtcctggcctgccccctggtggagaccctggtcaccaca

SEQ ID NO: 474871 - DNA, 122 bp, Homo sapiens
gattacaaccatttcaaaaactaaaataagcgtaaatgtatcaaaatgcagcttacatagcgaggataaatgctgttttgtcaatctgttgtttcaagttttttatgtgtggattgggtcac

SEQ ID NO: 474872 - DNA, 122 bp, Homo sapiens
tttgctggtctgtcctgtctgagtatccacaatgcacatggactgcctctgtaataattacgcagcatatatacgtacatagacacagcccatggtagcaaagtcaaagtgtgacctcgggc

SEQ ID NO: 474873 - DNA, 122 bp, Homo sapiens
aggtttctgtgggaatgtcttacttcacataaggaaacagatgtacagattccctgaaaacggcattgttaacaagtggaaatgaaattgtgcaagaatgtggactgagcaggtcaaagcat

SEQ ID NO: 474874 - DNA, 122 bp, Homo sapiens
tgaagggagtcgggaggccgggtgtaggcactggattcttgcacctaattctccgagcctcggtttccttatttgtaaaattagctggctggagtaaaacaactcaaacagcagttaaagca

SEQ ID NO: 474875 - DNA, 122 bp, Homo sapiens
aaggtttccgctgcgcagccacaaggtcttgtctccagctcctggggcaggtggagtacacgggccgggctttaccagcacgcaccctgcacgggtagcagagaaagctgccttcagtcaga

SEQ ID NO: 474876 - DNA, 122 bp, Homo sapiens
cgcatcccgcgctcccagcacctgggaagagtctgggcttcgctacgataaagcttatcccggggacaggaggctgaggtgatgtggttcttgagcctgtcgaatgttctcgtttcccttcc

SEQ ID NO: 474877 - DNA, 122 bp, Homo sapiens
aactcagacagtctgactgcagtaacgctggcccaactatcatgttgaaacgtacagcaccgtgcccatccacagttctctcatttatcagagaggaggtcctgaatccaagttattgaaat

SEQ ID NO: 474878 - DNA, 122 bp, Homo sapiens
cggggcccagacgcactccagtgccagacgccgaccgacgacagagcgcagtgacagacgcgacccaaagacctgcagcggcggagtagacacccacgtgacagacagacggacagaagccc

SEQ ID NO: 474879 - DNA, 122 bp, Homo sapiens
tggcagactcgcggggaggcgactactctccctcgacaaccaggaggttaaacaataactcggtcccacatggccaggacttgactcacaactgatagccgtcctaattcgtgcccccgctt

SEQ ID NO: 474880 - DNA, 122 bp, Homo sapiens
aaaacctcagaactggttagtggctcagggatgcatttcagagctcagcgctgaacacttcgcttcagagccgcgcctctagatggcggaggaacgctgcggggaggggcgcagacttccca

SEQ ID NO: 474881 - DNA, 122 bp, Homo sapiens
ggggccaggggctacctgccaaccccacggctgccccaccccaactgtcctccgggcctgcgcccctgccaagccccaactgccgctccagctgccacagccaactgtcgaccggtctccat

SEQ ID NO: 474882 - DNA, 122 bp, Homo sapiens
gccagacaagttcaccagaagcagggttactacagaaatcccggggaatgacacacgtgccgaagtccctacactaccagagccggaaacggccttcagtccctcccaatcctccgccgccg

SEQ ID NO: 474883 - DNA, 122 bp, Homo sapiens
atatttccatccacaagccaggggtgcccaactgcgccctcaggtgagaatccaattgctcggaatcggaaatccaggcgaatgagaaactgtcttgtttctctcgccacccctagctcccc

SEQ ID NO: 474884 - DNA, 122 bp, Homo sapiens
tgacaaacaggatctgctacataatttgcgggacggagtgcaaaacaaaaacgcacagttcgcagttcaaaaagcagggcgggggcgaggacctggtgcggtggctcatgcctgtagtccca

SEQ ID NO: 474885 - DNA, 122 bp, Homo sapiens
tgtgatctggattcttccagacccaccaagtcataaggttgaacagacataaaagcattccgacatacaatggaagtggtacatctgggatcaagtacaagtggggccagaggcagcagcct

SEQ ID NO: 474886 - DNA, 122 bp, Homo sapiens
ctaaagtgctcaaaggggaaaaaggagtttcaaaaatgttcttggaaataccatctctcacgaattcttcggcctctgctgtcccaatgtcacttgtctgagatgtaaacagaggagttctg

SEQ ID NO: 474887 - DNA, 122 bp, Homo sapiens
gccacgacctctctttccccaagctccatttgcataaactgtctctgatgagatttagggcgcttacggtggtatggctgtagacaactgtctcaggaaacagacccatgacccacccagtt

SEQ ID NO: 474888 - DNA, 122 bp, Homo sapiens
gagaaaaagaatgacatatattattaagtctttcttgatgctcccctctcacattgaactcgactttctgtaaattattttcctcttaatgaagcagtgatttattattttagaaaagtatt

SEQ ID NO: 474889 - DNA, 122 bp, Homo sapiens
tgatcaaaacaaatatagtgtaccttcccccttcccagagaatcttatttaataggctaacgtcaccacaatttattttccttagcaaaactaaatgcagttaaattgtaagcaaaacaagc

SEQ ID NO: 474890 - DNA, 122 bp, Homo sapiens
agaatgaagggaggatccacagtgaaagtgcctgagtttctctatgagaccagatgctgtcgaaaccaaacatcttttcctttgctctatgggaacattttagggtttgttttgcacagctg

SEQ ID NO: 474891 - DNA, 122 bp, Homo sapiens
tccctgctttgtgggacacgctgagccggggaaggcatctgcctccctcatcagactggacgcccctttccctgctcggccgccggcccagctgggtagcagcgggagcaaggaaggacagt

SEQ ID NO: 474892 - DNA, 122 bp, Homo sapiens
agtgtgaaaatttacaagactgcgcaaagctgcaaggcccggagccccgtgcggccaggccgcagagccggccccttccgctttacgtctgacgtcacgccgcacgccccagcgagggcgtg

SEQ ID NO: 474893 - DNA, 122 bp, Homo sapiens
agggcattgggagcaagcagcatgtgcaaaggcaaaaaagtagagtggctgcggtggggacgttatgtctgcagaggctctcactaataagctttgtgatcttcaacaagtcctgtgtgtgt

SEQ ID NO: 474894 - DNA, 122 bp, Homo sapiens
agcattgtcgaatggaaatatcctttgttcaccgggctgggcatgctcctgggacctgcacgctgggtccagccctccgaggctccctgggccacgagctgtgtcagctgtgctgggctaca

SEQ ID NO: 474895 - DNA, 122 bp, Homo sapiens
ttgttcactgctatattcttggtggtgtccacatggtaggtgctatttgttgactgaacacgtaggcaaatatttccctgagtttgtcacatgtctatgtttttgatgttgtctgccatgca

SEQ ID NO: 474896 - DNA, 122 bp, Homo sapiens
gcgatcagggtcagcgtgacgcggtggtatctgtccttcacgggggctcctctgtgggcccggcctggccgatgtctgcctggcctcctgggaggctggtgacccaggtcggagcaggcctg

SEQ ID NO: 474897 - DNA, 122 bp, Homo sapiens
gaggaccgaatcgcctctggtgtgcgttgtccgacaggaagtcccgaatgggctgtgagccgccggtggaggtgcccgggcaggtgcagagccacagcctgcgccccgtgagccgaggcggg

SEQ ID NO: 474898 - DNA, 122 bp, Homo sapiens
tgaatccgttgcctctgacgccccacatgcctggttccatgccccggctttggccacttgcggtgaagctggtgcctgactctgctgccggggagtgcaggagctccttctctggcctctgc

SEQ ID NO: 474899 - DNA, 122 bp, Homo sapiens
tttcagggggtggggctaagacttagatggggcggagccatcctatccgggtccctgccccgatttcaacctctttattcctggaatttttgtttgtttgtttgagatggagtctcgcactg

SEQ ID NO: 474900 - DNA, 122 bp, Homo sapiens
atagagctaatactcaagatgggagggaacaaaggcagcaactcccagcctcttaaacttcgggtttacataccttcaaaaacaagttgtactctttgtctgcgattgttgcttctaacata

SEQ ID NO: 474901 - DNA, 122 bp, Homo sapiens
gagtatcattcgggtcctggaaggtgaggccgggccctccacagaggaggcacccacagccggtgacccccatcatgtgcccatgatcagaaggcgcggcctccggaggccgacatcacaac

SEQ ID NO: 474902 - DNA, 122 bp, Homo sapiens
ataatagttaatcttcgaactttggattagtcagtgatttcttagatacaatgcaaagcacggatgtgataaaaatattgataaatttggacttcatcaaaattaaacctttttgtacattg

SEQ ID NO: 474903 - DNA, 122 bp, Homo sapiens
gtccagcctggctaacatggtgaaaccccgcctctactaaaaatacaaaaatcagccgagcgcagtggtgcatgcctgtagtcgcagctactcaaaagactgaagtagaagaatcacttgaa

SEQ ID NO: 474904 - DNA, 122 bp, Homo sapiens
ttctccaaagtctctcctcttgaaaacagagcaagttgcaccctggtctccgtatcacatcggcctgcagtttcacacgatctgcttggttcggagtgctgtctttcagacctggctgtggc

SEQ ID NO: 474905 - DNA, 122 bp, Homo sapiens
caaggtcagggagccacagagcctaagagggcagcagtttaagaggacataagaggcccccgctggacgatgctgcggcccccacccccgcctcacgggtacacacccgcggagcacacccc

SEQ ID NO: 474906 - DNA, 122 bp, Homo sapiens
accaagagactgtgtcagtcttccccccacccatctgaggggggagctcaggagagctcccgacagggaagtttaatttattctgacaacgtccacttaggcaggaagagaaacccactgag

SEQ ID NO: 474907 - DNA, 122 bp, Homo sapiens
tcgccccagagatcccagggaaggactctgtttcctgcgcgccactccagaaagttcctccggtgcccctggaggtcattctgccccacgtgcaatcctgtcctctccaccccatcacatgg

SEQ ID NO: 474908 - DNA, 122 bp, Homo sapiens
acctgcaaggctaattccgaattccaaatcggaagcaagagggcggggccccgtgagaggcgatggattgctccagtccgttcccgacgcactgtgcgcatgcgctggtcctccgcggaccg

SEQ ID NO: 474909 - DNA, 122 bp, Homo sapiens
gaaggagtgtgaaaactgcgactgcctgcagggcttccagctgacccactcgctggggggcggcacgggctccggcatgggcacgttgctcatcagcaaggtgcgtgaggagtatcccgacc

SEQ ID NO: 474910 - DNA, 122 bp, Homo sapiens
gaggagacctcccctttgccctcctacccccaccgccccaccgggagcggcgtcagtctgcgggaccaaattaggggctgggagtttccagattgaaatgcgccctccaccaccaagaggga

SEQ ID NO: 474911 - DNA, 122 bp, Homo sapiens
gcaccagagtgagtcttggaatcctttcttatttaaaacatacagaaggaagtctgttcacgaggaatgcttttggctgcacttaatgaaaaaaaaatgtaaaaattgggtggcaaggcact

SEQ ID NO: 474912 - DNA, 122 bp, Homo sapiens
accctgcactacttcaggcagctacggaggcgggcggggctaaaggagattcaatccttccggaaagaaccgcgcccgcccgcctcctgcacagcacctcttccgcctcctgcccagcacct

SEQ ID NO: 474913 - DNA, 122 bp, Homo sapiens
cagcggggcagctggctccggaggcggggccgcccactcagcacagccgcccagcctggccggctgtaaacagctattactgctgatcaaaggcgctacaaggacttaatcacagggcttaa

SEQ ID NO: 474914 - DNA, 122 bp, Homo sapiens
ctaacttccaggaagagtggaaatggaatgccagccttctgaaagaacctgtgatatggacgctgttgtcaaatatacattgattgaatccctaatatgtgcactggtaggtgctggaaata

SEQ ID NO: 474915 - DNA, 122 bp, Homo sapiens
gcggggcaggagcctgggccggcagatcaggaatcttgggatctggaatccgttcggaatcggagaatctcccacgggatctagggatccggaatacggcctgacgtcccgttccaggaatc

SEQ ID NO: 474916 - DNA, 122 bp, Homo sapiens
ctgcccggcccctccctccgccccacccccggcctcctccctccctccctcactgcctgccgctcctggcttgcctgggtctcttcgactctggggcccgttggcttcttcgcagtcacggc

SEQ ID NO: 474917 - DNA, 122 bp, Homo sapiens
cccgctgaagtactttagccacacgcggaagaacagcccactacattactatcagcgtctcgagatcgtcgaagccgcaattaggactttgttttccgtcactggtaagagcaggggtcatt

SEQ ID NO: 474918 - DNA, 122 bp, Homo sapiens
caccaggcctcggcccagaaagcgagcaaaggtcgaagaccaggagctgccaacccagcccgaggccccagacgagcaccaggacatggacgcagacccgggtgagctgccttcctttgggg

SEQ ID NO: 474919 - DNA, 122 bp, Homo sapiens
gcaagaggctgtcattctacggtaggaggagcttctattggtcgggctggaggcgggtaccgagctgagtataaaaggtggggccggaggcggcgagctgagcggctctgacaggacgggtc

SEQ ID NO: 474920 - DNA, 122 bp, Homo sapiens
agcctctcctccctgtgcaaacaagagaactatgttatgctctactgagagccggtaaaccgccctgtcagttttccctttcctttctcctacatgcttattatagagggtatgtttaaaga

SEQ ID NO: 474921 - DNA, 122 bp, Homo sapiens
gctgtggaccccgacttgggacgccgcgagagcagggctgatgcggggcctgggccgcagcgccctctgctggctacccccaggggcgggcccgggcttcgaggagcctagagaagggggac

SEQ ID NO: 474922 - DNA, 122 bp, Homo sapiens
ggacccatcctcctccagccaagcccccgaggagcttcaccacctcgggaactgtgcgtccggccctcaactcactagaggaagcccccctgaagagaatgggggtgggggagcacctgcga

SEQ ID NO: 474923 - DNA, 122 bp, Homo sapiens
ttattttcatagaagcaatgcggaagccacaggctgcagttaatctcgccagcagcgccccgcctgctgacagcggtacggtcagtcctgggggggcgcagggaataatccttttattcaga

SEQ ID NO: 474924 - DNA, 122 bp, Homo sapiens
ggttttagggttctgtcttctgtcctccagcccgatgagcagggacagctgctgtgcaggcggactgcctggttggatggccccaaccttctgtgcagctgccagccagctgcgctgccctt

SEQ ID NO: 474925 - DNA, 122 bp, Homo sapiens
ctgggccaggctatcttccatgatacaattaaaacccagaaacccaggaggactgactgtcgatttctctgttttgacatactgccacttttctctaccactgttatacactggggttgatt

SEQ ID NO: 474926 - DNA, 122 bp, Homo sapiens
gaagactgaataacactatgtaccaactaaccctaaacaagatctatagaagatttcattcgacaacagtagaacatcaacttatgtgcacataagatagaccttctccaagatagaccttc

SEQ ID NO: 474927 - DNA, 122 bp, Homo sapiens
cgccagcgaaggaaaccgagcccactcccgcctcgggcccagccgccgtctcgcagccagcggaggtctgaggtcacaggttgcagccctggccttctgtgaatcccttccacagctaaagg

SEQ ID NO: 474928 - DNA, 122 bp, Homo sapiens
caggcagatgggccagaggagcagagaggctgagaccaacccagaaaccaccacctctcacgccaaagctcacaccttcagcctccaacatgaaggtctccgcagcacttctgtggctgctg

SEQ ID NO: 474929 - DNA, 122 bp, Homo sapiens
ttccttgactaggaaagggaactccctgaccccttgtgcgtcgtgagtgaggcaacacctcgccctgcttcagctggtgcgcggtgcacgcatccactgacctgcgcccactgtctggcact

SEQ ID NO: 474930 - DNA, 122 bp, Homo sapiens
cctcctcctgcgcgggtccgcgctgcccggcctcagctcagggctcccgcctcgcctccccgagctccggtgaattctcggcgctgctcctttcggaaaggactttttttttccccctgcgt

SEQ ID NO: 474931 - DNA, 122 bp, Homo sapiens
ccctgtacaaagttctgggactctccttgcaatctggccctttcccactgctccaggaaacgtcccaatttgtccctctacataccctggggcatctccacgaaaaccctctctcccccatg

SEQ ID NO: 474932 - DNA, 122 bp, Homo sapiens
caggtcctcctctcacccgggccagttttcaaggcgggctgtaactggtggcatttgtcccgggaccaggtaaggggccttgggacaatggcgctcgccctgtctacctccaatccccacat

SEQ ID NO: 474933 - DNA, 122 bp, Homo sapiens
gaaagatgagaagactagcacacttgtttactgggtctatatttcctgcctgtctaacaccgaattttttttttttctggaagaaaacttttggcttcctaataggtgcatttttttctgtt

SEQ ID NO: 474934 - DNA, 122 bp, Homo sapiens
acttcgtcaattgtcgagggatatggagggaacagggtccggaaaaagaagtatcaaacccgtatggtcattctctgaaaagctatccctaggccaagggagcacatgagctgtgtgatccc

SEQ ID NO: 474935 - DNA, 122 bp, Homo sapiens
gcagtgggcagagcgtgaaagctccgggaggaaaacacgcggaacagctgcccaccatcccgcgtgggaggcaggcagagcgcagaactaaagcagtgattgacctccctcttcgaagaggg

SEQ ID NO: 474936 - DNA, 122 bp, Homo sapiens
ggccacttgtctccgtggaccagcatatggcggtcacggtccagctcgttcttgaacttgcgctcacagatgtggcagtcatagagcagctgccgcttgccctccctcgtcatcaggcagag

SEQ ID NO: 474937 - DNA, 122 bp, Homo sapiens
acttccaactgacttcctcaggagttctcaacttcagggttagaaactctagatttcagccgggcgcggtggctcacgcctgtaatcccagcactttgggaggccaaggccggcagatcact

SEQ ID NO: 474938 - DNA, 122 bp, Homo sapiens
tttcagattatccacaagttatgattctgctgcctgcttttcacctagatcagatttcagcggtcacagagtcctccaggccccacgaccctctcctggggatttctgtgccagaggcagtg

SEQ ID NO: 474939 - DNA, 122 bp, Homo sapiens
gggctccccatgcgcctcgtggagagcaaccacgtctgttcggaagccagcggcccttcccggccctgccacaggccagaacacagaactgtgatcatgcaaagagccgtgactgaggccgg

SEQ ID NO: 474940 - DNA, 122 bp, Homo sapiens
ccgtttttgttttgttttgttttctttcacagatttaataccgcgatctcagccaaactccggccgagaagttgagaaatgtcttcaccccctctcgacattcgttcgtgcttcttcgcctt

SEQ ID NO: 474941 - DNA, 122 bp, Homo sapiens
tgcacccccctgccccccatgggacgcctagctatgggctgattgtttctaaagaggtagcgccacaggggtgtggagccaagtgataatcaggctcagagagcttgacagtagaccccagc

SEQ ID NO: 474942 - DNA, 122 bp, Homo sapiens
cctcctccgggccttttgtgtatggggctagagtagggaggttgccagttcttgctgtgtcgcccatggggttttggctctagaaatgctacagagctgtagttaaattgtattttacgcat

SEQ ID NO: 474943 - DNA, 122 bp, Homo sapiens
tttgctgagttaatgttatcaaatgaagcaatatatctttatctgagaccatgtaactaccgcagcatgtaactcaatatgagagagggaggtgagcttgactcaaatgtcaattttctaaa

SEQ ID NO: 474944 - DNA, 122 bp, Homo sapiens
gctaatgtcggtgggactaaaagccttacaattttggtcattcaactagaaagaggcctacggtccacacgcaaaactggaggtcacccctagggccatctgtgcatggaaaccaccactct

SEQ ID NO: 474945 - DNA, 122 bp, Homo sapiens
tgtgactgggaggtgccagagggcaggaatgagccatcctcccaaccagggcatctcacacgtgccaggtggtctctgagtgtgtgtggagccaaattgaactaaacgactgtcttggcaac

SEQ ID NO: 474946 - DNA, 122 bp, Homo sapiens
aggcaatgaggacgatgatgacgatgatgaggaggaggctgccgccggccgcgatgctgacgatggctggcagggtcagcaagctgtctgagatgacactcaccgagccaggcgagaacacc

SEQ ID NO: 474947 - DNA, 122 bp, Homo sapiens
tgatgttctctgccccttgggccagtgcgtataccatgtgagtgtgtgtgcgtgtgtgtgcgccttcgttgggtggaacgaagaggagtgtgtgtttgtcttaaaaattaaaccgcgcttcg

SEQ ID NO: 474948 - DNA, 122 bp, Homo sapiens
agataacctactgatttcacaattgtccctcctctttcaaaaatattacactgggccaggcgctgtggctcacacctgtaatcccagcactttgggaggccgaggtgggtggatcacctgag

SEQ ID NO: 474949 - DNA, 122 bp, Homo sapiens
agaatagggaaaggaagagaatgggaaggaggtgttctcttctagatagtacgcagagtacgaggcactattttaaacactgataagggcacgcatagaagcagggactctgcttgctgcca

SEQ ID NO: 474950 - DNA, 122 bp, Homo sapiens
gccctgccccgcgggaaggcagctaaggccggtgagaaatcgagtgcagtgctggtgggccggcactgctgggggacccagtacaccctccgcagccgctggcccgggtgctaagtccctca

SEQ ID NO: 474951 - DNA, 122 bp, Homo sapiens
tagggccccctctcacaggaggccacgcccaagcaagcagagcgtggccccagcaagcgccgagctcccgcaaggagaccaaatagcttcggggttttgccactagcttagcacaggcccat

SEQ ID NO: 474952 - DNA, 122 bp, Homo sapiens
cttataggctggagtgtctttgggacaagaaagggaatctgaaaccataaaactaggagacgagaaagtaggaataatagagcaaagtccctgaggggcagaaggggatgaaacccaggccc

SEQ ID NO: 474953 - DNA, 122 bp, Homo sapiens
gccctgacggcccaggcccgacgcctgcagcctggcggggaacggggggcctggcgtccgcggccctgcccagccctgcccagccaccgccaccgcccgccgacccccggcccgggagggaa

SEQ ID NO: 474954 - DNA, 122 bp, Homo sapiens
gctccggggaaggggcggggtcggcatttttgtccaattagatagccgatgggaagggcgcgaaagcggagaacggaagtcggatgttggaccgctgggaagaggttgaaccttcgcctcaa

SEQ ID NO: 474955 - DNA, 122 bp, Homo sapiens
tggtcgctgtctggctgggtgcaggtgggctgacaggtttggatattccaggccgcattccggtggctgtggagatagccctgagggacagcctttgcagtttgtttcttccagtgccgtgt

SEQ ID NO: 474956 - DNA, 122 bp, Homo sapiens
catgtgtgcacgtgtgtctgcttgtgtgcttgactgtgcatgtgtgtatgtgcgtgtgcgcgtgtgtctgtgtgtatgttattcagtgcatagatctggagtgatagtatttccagcagagg

SEQ ID NO: 474957 - DNA, 122 bp, Homo sapiens
tcacagtttaaggggaacatgctcccaggttgaaggcgaggagccccagcccccagagggcgggcttgagccaagaggcggccgcgcaccctctcccggccacttcctcgcttcctcccttc

SEQ ID NO: 474958 - DNA, 122 bp, Homo sapiens
ttttgctctgggaatctaccttgctgcctagaaaacattgcctagttgcatttgcaaaaacgctcagcgagagaccatcctccaaatatctaaaatcacagtagtggagggtttttaatttt

SEQ ID NO: 474959 - DNA, 122 bp, Homo sapiens
tggcagctcctctctggctctaggagctgatgctccaagtcttggcccaaacactacttccggccgggtgcggcggttcacgcctgtaatcctagcactttgggaggccgagacgagtggat

SEQ ID NO: 474960 - DNA, 122 bp, Homo sapiens
aagggtaattaaatgacccaaacataggaaaaaatgtgcaatctcactcacaataagcaacgcactttacaactatgggagaccagctgccactatcagactgggaaaagacaagttgttgc

SEQ ID NO: 474961 - DNA, 122 bp, Homo sapiens
tggccctcggagcggtgcgcggcgtggaccggcgggctgggctgcgcagagacctgccgccgcccccccagctcggtcttttatacccggggacccgccctgcccggtgacgtcatgacggg

SEQ ID NO: 474962 - DNA, 122 bp, Homo sapiens
gatccgcctcccagcggcccaaccttgagggggtggggagcgcgcggggctcggcggcggcgccgctgcctcccccgccgcctgcgctccctccgcagcgccagaccggccgcgcggctgca

SEQ ID NO: 474963 - DNA, 122 bp, Homo sapiens
tctgggcctctggttctgttttgaaaggctggcagaggcctcggctcaacggctccctctcgtggagaagaagaacttgccagtgaatctgaggttgaactgaggacagcgtcataatcttg

SEQ ID NO: 474964 - DNA, 122 bp, Homo sapiens
acatcctgataatgtgccaaagacaaccacaggcagacatactgatggcagtgaggcagacgaggaacactgctcattgctctgcctgcctcacttttgttcacgggccaccaggaggcctg

SEQ ID NO: 474965 - DNA, 122 bp, Homo sapiens
gagctccattttcacgtcaattcctcgttagtatagtggtgagtatccccgcctgtcacgcgggagaccggggttcgattccccgacggggaggaggcttaaacttttttttagaaaagcac

SEQ ID NO: 474966 - DNA, 122 bp, Homo sapiens
agccaagagaggcaggtgaggtgcagcccttacgtgcacctcaggtgtatggctgggtgtcgggttaccccaagggcagaggaaaagccttggcaggagatgagggctgcagccagacccct

SEQ ID NO: 474967 - DNA, 122 bp, Homo sapiens
gccctcggtggcccatgcagaaccaggcagacttccacatcctaactctccctcttccttcgctcttggatttacagaccgagaagcaattcaggagcttgagtacagcctgaaggaaatac

SEQ ID NO: 474968 - DNA, 122 bp, Homo sapiens
acctcgtgatccgcccgcctcggcctcccaaagtgctgggattacaggcgtgagccaccgcgcccggcctagattttctaagtacacattgttttggttatgtgttttgtgactaccacccc

SEQ ID NO: 474969 - DNA, 122 bp, Homo sapiens
caggatctgagagaagagccacagtatttaagccggggtggagcaaggagtgagagacagcggttctacagagggcattgacagtaagaggttctggcatcaagaggagctcttcctggcat

SEQ ID NO: 474970 - DNA, 122 bp, Homo sapiens
tcctctttttcatcaacagcttagcctctattagaactctgtttacttgaaggtttttgacgttggcataacattccaacttcatggggttggaataagtcaggattccctggttgggacag

SEQ ID NO: 474971 - DNA, 122 bp, Homo sapiens
tataaatctttttaaattaccagaacataaattcacacagggacagttcctcctaggccacgcacaaggggtcgcatcctgccgtcctccctcagaaattaattgagctctcttgccgccgt

SEQ ID NO: 474972 - DNA, 122 bp, Homo sapiens
gagcgagaaacgccaccaggcgagagccaggctcgctccaggctcccctggaaggacggccggcttgtagggggggtgccacctgaaaaaaaattttcaggtccccaaaaggtgaccgtctt

SEQ ID NO: 474973 - DNA, 122 bp, Homo sapiens
cctgattggtggctgagggccgggccccgctgcttctcaaagttggcgggaaagcggaggcggggcggaagggtgcggcgaggcggaatggcggcggctgcggactcgttctcaggcggccc

SEQ ID NO: 474974 - DNA, 122 bp, Homo sapiens
gagccctctgaaccttctgagtcgccctcgctgccgcaggacctcctcccgcggggtgtccgacccgctcttgcttggctgagactttgtttaaaccctggctccgatgcctctgagccctt

SEQ ID NO: 474975 - DNA, 122 bp, Homo sapiens
actttatctcctgtaccttttcctgctcacaccctcgggacactgccttccagaacctttcgttgttcggtagcacttcacatgcttactgagccttcatcgctgggtgcccattatgcatt

SEQ ID NO: 474976 - DNA, 122 bp, Homo sapiens
cgccgccgccagcgactgcggcagcagagaggcacggagggcagagtaggacgcggcggccgcggccgcggcagaggtggccacagcgggaggccccgccagcctcccgggaggcacaggcc

SEQ ID NO: 474977 - DNA, 122 bp, Homo sapiens
ccgcccatcccggagaggttggggcgccggcgccgtgagagtcgaccctggctcagccctcggggtcaggcccaccgtccccgcctgggacctcccctgccgcagaacctcaaccccacccc

SEQ ID NO: 474978 - DNA, 122 bp, Homo sapiens
cacggcatggggcttgaggtgtgtggagggagctcagcaggcccagaagcccccttccaccggcaaagtggaacccgtggtcatgccacttcggtcactcagcagaaagaggatggcgttca

SEQ ID NO: 474979 - DNA, 122 bp, Homo sapiens
tgacccctcctcccgcccggacggcgcggcggaccccggggcggggacatagggggatcgcggacgccacttacttggagttcgaggaattccaatagataggctctaaaactatcgatttg

SEQ ID NO: 474980 - DNA, 122 bp, Homo sapiens
tcctccgcggccccgagagcgactgggcagggtgggcacaggctcttcaatgggtgaaggcggcgcaaagaacgggaagaaccatcccaggagcccacagggcgttcagcttcccttggggc

SEQ ID NO: 474981 - DNA, 122 bp, Homo sapiens
ggtttcacatagcctcataaaacaagctggatggtgattatgtcacttcctctgccctcccgacagagaggaggccttctttagtgcctggagtgtttcctgatgctccactcaggccagct

SEQ ID NO: 474982 - DNA, 122 bp, Homo sapiens
gaggagaccatggaggcctaagggcctctctgtgccccaggacagccatggctccaaagccgaagccctgggtacagactgagggccctgagaagaagaagggccggcaggcaggaagggag

SEQ ID NO: 474983 - DNA, 122 bp, Homo sapiens
gcactggggacttttgctggttggttattagagaaatattttatcttgatgctgtctcaccgtcaaaaccagcctatccttgtcagtaagagaggctctcactatcagtttttttttttgtt

SEQ ID NO: 474984 - DNA, 122 bp, Homo sapiens
tttttgagatggagactcaggtagtgcttggaattgctgataatccaaggcctgatgatacgggggttatttgctgaagcttctatttcaactctcctttatgaccccgggttacctaaata

SEQ ID NO: 474985 - DNA, 122 bp, Homo sapiens
gccctgctcactcctggccagccttcctgggctgttgttgagggtaattcttgtgcgctccgcgggggcgggtccccatccgccgcttcaggcctgcgggctctgagggtcctgcccactgc

SEQ ID NO: 474986 - DNA, 122 bp, Homo sapiens
atctcctcctcattctcgatcctgcccaaatgccatttctcagagagtggactctggtcccgggctgccttgattcaacagctgggcatgttacttacttttcctgtgtccctgtttcacct

SEQ ID NO: 474987 - DNA, 122 bp, Homo sapiens
ccaaacaggatttctacatagatttgtcatctctcccatacaatgaatgggttttaaaaacgtggagaaatttctcaaaactattccagctattttgttctttggcatttgcccacacaccc

SEQ ID NO: 474988 - DNA, 122 bp, Homo sapiens
accgctgcccttggtggcctcccgacaggtctttggcaaagggaacacggcgttctggatcgtcttctccatcattcacatcatcgccaccctgctcctcagcacgcagctctattacatgg

SEQ ID NO: 474989 - DNA, 122 bp, Homo sapiens
cctggtgctttaattttaataagcgcttctgttttaattttacttcggagttctcagtaacggtccatttagtaaactaaaggcctccccatttggggtctcaacgatgcacgcagatggga

SEQ ID NO: 474990 - DNA, 122 bp, Homo sapiens
tcctcacctagaagaggcagccactggaccccgggttctgctcctcctggctccaccccacgcccccacatccgcccgccgcactcacaggctcccatgctgttcccttggcccggaggccc

SEQ ID NO: 474991 - DNA, 122 bp, Homo sapiens
caggcacaggcccgcttgtggctgggcacgctcgtgtgcccttggcggccccgggcgcttcggagggcctggccaaagctcccagaagagccctttggagggactgaactttgaccaggggc

SEQ ID NO: 474992 - DNA, 122 bp, Homo sapiens
gaactggctcccatattccagcatcccctcacctctataggctgctgctggttgggaggccgggggcctcgcacaaaccgccgtcggtagaagaagggtggggggcaccatcgtcggggccg

SEQ ID NO: 474993 - DNA, 122 bp, Homo sapiens
gggcagtataagccagggactcccttcccacagatgaggcctagggctgcaaaagggccccgtgaagagaggagaaggtgacagggatccttctcctccccatatggagtgatgtggtcaag

SEQ ID NO: 474994 - DNA, 122 bp, Homo sapiens
gatggtacaggggccacactctgcatagaaaatgcaaaggcgactgggagcggtggctcacgcctgtaaccccaggactttaggagactgagacgggtggatcacctgaggtctggagttcg

SEQ ID NO: 474995 - DNA, 122 bp, Homo sapiens
ggctccaggtctgtgggcctcctgggaagcggtgtgactagtgggaagaatgagggactccggagtctgacctcttgccacgcccttgctgtggtcaccctggcctcatcagtgtctttctc

SEQ ID NO: 474996 - DNA, 122 bp, Homo sapiens
agaaaccgcagaactgagctgacgacccggaagtgctcgcggaacctggaagtgacaccccgcccgagggacgggaggccccgcccagccctgctctcgcccgccactcaagccttgtcagg

SEQ ID NO: 474997 - DNA, 122 bp, Homo sapiens
acgatgagagacagagaagtatttgaatttgcactaatggccaatataactggccacgaacgtgatctctttatataggatagatatggaattatcttcattccccatgcagagaagagtgg

SEQ ID NO: 474998 - DNA, 122 bp, Homo sapiens
gcggggctgagcgtggtggcgtggcagcgagtggaccaaaacccactgcgcacgagaacgcgcggcttggcgcctgtttcccgcctgctctcaggagcgaccgccagggggcgcccgagatg

SEQ ID NO: 474999 - DNA, 122 bp, Homo sapiens
ggctttccagaattttctacgattacgaagttttggcattcaaccctccatcctctcaaacgccccactgttactccgcccccttcccctaggccccgcccccagccgcagtgccctgcctc

SEQ ID NO: 475000 - DNA, 122 bp, Homo sapiens
tcggggggaagctcctcttctgggtcttctggtcccagctctgcattgtccaggtcctggcgttcggggtctgtgacccgccggctctcgtacacagagctctggaggccacgggggtcgcc

SEQ ID NO: 475001 - DNA, 122 bp, Homo sapiens
cttgctgggttgcttataacctggccccaggacagcttcctggtagcctccagatacgcacggggacaaatttgttagtttcatgggcaaagagaagaaaaaatacaataccttactgttaa

SEQ ID NO: 475002 - DNA, 122 bp, Homo sapiens
gcacctgtagtcccagctactcgggaggctgaggcaggagaatgccgcgaacccaggaggcggagcttgcatgagccgagaagtggagactgagaatgtgactgaattgctacaatctcatg

SEQ ID NO: 475003 - DNA, 122 bp, Homo sapiens
cacagtatcttttctttcaaaagtagagcaaaactataggttttggttccacaatctctacgactaatcacctactcaatgcctggagacagatacgtagttgtgcttttgtttgctctttt

SEQ ID NO: 475004 - DNA, 122 bp, Homo sapiens
tcacgcccccattccagccccctggctgggagggcgggcacccgcttgtgattggctggtcggcctgcctctcgcgggagcagccggcgctcctctccctccctctttccctcccgcgagcc

SEQ ID NO: 475005 - DNA, 122 bp, Homo sapiens
caggtcccccggggcagcagctgtgtcccaaggcaaggctgggtgtggggctggccagcccgggagtccacagtccagccctgcagtcgggcacaccggccgcagcacggaccactggggag

SEQ ID NO: 475006 - DNA, 122 bp, Homo sapiens
agcctctgcgccctgggctaagtaaggcagccaaaagttgtggacacttagggtgccgcgcggggggtgtgtgtcggtgtctgtctgtccatccccgcccttccaccccctccctcgccttt

SEQ ID NO: 475007 - DNA, 122 bp, Homo sapiens
acgcctgtagtcccagctactcaggaggctgagacaggagaattgcttgaacccgggaggcggaagttgcagtgagtctagatcgcagagtgagactccgtcccccccacaaaaaaacaaaa

SEQ ID NO: 475008 - DNA, 122 bp, Homo sapiens
tccttggcttcctcccgtgtgctgtactggttgattaaaaattgcctccctttggattctcgtatcacagtagggtcacaggacagtctatattggaagaaagagtctcaggacaaagcact

SEQ ID NO: 475009 - DNA, 122 bp, Homo sapiens
cagtgtttgggtctctctgcccctgtttatgtcattgtgtgcaatagagtaaactctccacgtacactccccagactgctgactggtctcatgctcgtgcttgcagaggtttgcctgcaagg

SEQ ID NO: 475010 - DNA, 122 bp, Homo sapiens
cgcctcccagccgggcccacctcctgcccgcctttgggtcgccgcgactaatcccgccctcggagggcggctagacaccgccttctcgtcacctctccgccaatagtgctgcccggggaggg

SEQ ID NO: 475011 - DNA, 122 bp, Homo sapiens
gaatcagcaaaccatctgagagttagcgttctccctacagatctctgcacatggaccccccggtagtcagaatgatgagaacagactcaattcgatgcttatgaaggaggggcaatggagga

SEQ ID NO: 475012 - DNA, 122 bp, Homo sapiens
aaaggtggaaggtgccatctcgtgggagagaaagaggaggagtaagatggggccctgacccgcacagggagatgaaaggaaagaaacagcatctccccaaggagacggaggctgtcttggag

SEQ ID NO: 475013 - DNA, 122 bp, Homo sapiens
cgaggcccagggtcagaagcgctggcccacggccgacgcataggcagacaggccctcgggcgctcacgcgcagtctccaactccagccggcgtcgccggcgccagcacctccgcgggcggcc

SEQ ID NO: 475014 - DNA, 122 bp, Homo sapiens
ggtctcgggaacgtgaaggggcggggcctcgaggtcaggggtcagcacctccctggttgccgtggcgactggaggcgcgcgacgcgggcgcaatggcggggacccggggcttgatgctgctt

SEQ ID NO: 475015 - DNA, 122 bp, Homo sapiens
tacagcgaggctaagggcttgccaggtggccgacatcaggggtgcatggcaggcactggccgggcgataagttaggaagcagcaagggctggtggtgggtgcgggctgggcaagcattaggc

SEQ ID NO: 475016 - DNA, 122 bp, Homo sapiens
cccggtacccagacctgccgagcatggcttttgacaggagacacgccccgcgcctccgcgcggcgccctccctggccagtgggccctacgcggccccgccctcctggctgctgcttccggct

SEQ ID NO: 475017 - DNA, 122 bp, Homo sapiens
tggtgcggcccgggcccaggggcctggcaatacgccccgggctggaggtgggacctgagtcgggcctggctggcgctaaggcgctttttttccttcgcaccgggcccgagcctccagggccc

SEQ ID NO: 475018 - DNA, 122 bp, Homo sapiens
attcctttgttagtacctttaagaaagtcatgctgaatctgagaatgccaggacatttcacgtggtatgaatgtaggatattcatttacacatcgctgcacagacagcctctatataaccaa

SEQ ID NO: 475019 - DNA, 122 bp, Homo sapiens
aggtgcgggcggaaaccggggctgcaggggtgcttgccggccagctggagttcgggtgggcgtgggctgggcgggccccacactcagagcagccagccggcctgctggccctgcctgccctg

SEQ ID NO: 475020 - DNA, 122 bp, Homo sapiens
ctgcccgctgaggcgtcagagcttggggctgcttgtcacgtttcctccacacccagcgtccggatgctctgtgatgtgttaatgttacttctctaagaatcactgttgcttctggggttttt

SEQ ID NO: 475021 - DNA, 122 bp, Homo sapiens
aaagcaagatgggggagtgaaggggccggctggaacttgatgctccaacctccagagtttcgaggcacagcaagacaggttcagtaatgtccttccctccagagagcgggccttaatttatg

SEQ ID NO: 475022 - DNA, 122 bp, Homo sapiens
ccggcgtaaaggccgtgcctctgagcacaaagatcagctctctcggctgaaggacagagacgccgagttctacaagttcctgcaggagaatgaccagagccagctaaacttcagcgactcgg

SEQ ID NO: 475023 - DNA, 122 bp, Homo sapiens
aactttttctgtccacatctggtacgtatatcagggtgtcagtttgtctttgaattcaaccgggaaataccagagcaaggacatatgaaaacactgctggtttggtggtatttggatttcta

SEQ ID NO: 475024 - DNA, 122 bp, Homo sapiens
tgatttgacaaggtattttagtctagttttatatgaacggttgtatcagggtaaccaactcgatttgggatgaatcttagggcaccaaagactaagacagtatctttaagattgctagggaa

SEQ ID NO: 475025 - DNA, 122 bp, Homo sapiens
tcttgtacgactcaaatgtggcctttgcagctgatgatacagcttctttccccatcagatcgaccctgttgatctctacactattggccagttttgtctgatgcattggccccagtaataac

SEQ ID NO: 475026 - DNA, 122 bp, Homo sapiens
caagcagggctgggttggggccacccacctgtgcaggcagccaggtcaggttgggggtctcgccttacaagtgcggagccagccgaggttcacacagagcaaaggctgcagcaccgggtttg

SEQ ID NO: 475027 - DNA, 122 bp, Homo sapiens
cccaagggtgcctcaagctctctccttttctttcagtgccatctgccattatcgtgccatcgttctcttccagtgctctggtggagcaggtggcgcccaggcccacagtgccctctccaagt

SEQ ID NO: 475028 - DNA, 122 bp, Homo sapiens
cttgctttctactctaagctgtctgggctccctgacctccaaaggctttcgcctgccagtcgattctaaggcacctaacggaccgctccagccagatgccttttcgggaaagggcgggggaa

SEQ ID NO: 475029 - DNA, 122 bp, Homo sapiens
gctggcctacgagtctgacgggatcgtggtttccaacgacacataccgtgacctccaaggcgagcggcaggagtggaagcgcttcatcgaggagcggctgctcatgtactccttcgtcaatg

SEQ ID NO: 475030 - DNA, 122 bp, Homo sapiens
ggtcaagtctagatttaaagggcccgggggaggcaagtgctggctgcttctgaaccagaacgaactaggacagaaggagggtgaagtgggcgccgccttctgtgcctctgggccacggtggg

SEQ ID NO: 475031 - DNA, 122 bp, Homo sapiens
ggcagatggcttccccttgggtggaatgacaggagggcgagggccaaggtgagggtggtacggagagagaaaaaactaccaagatgaaagctgcagtgccttttataacctaatcttggaag

SEQ ID NO: 475032 - DNA, 122 bp, Homo sapiens
ggacatctcctgccggagccactcaaattctgccagggcggcgaccaggggttctcttctcgacctttgccccggctaagggctgccctgaaccaggaaaaggggcacagggtcgcgagacc

SEQ ID NO: 475033 - DNA, 122 bp, Homo sapiens
agctgagatccctgagctgaggggtccggggacaggggtggtgcacgccacagctatcggcgtgcaggaccagccctcctgccacccatctgcttcctctcactctgtgcctctcctgtgat

SEQ ID NO: 475034 - DNA, 122 bp, Homo sapiens
ctccccacttggattccaaaaagctagtgctggctccagtgccaccagaatactccaggccgttgggttttcaaatgtgagaggttgggtgatttcaagaatctatagagatttaaaatgtg

SEQ ID NO: 475035 - DNA, 122 bp, Homo sapiens
cgtggtaaataaacttgtttagaaacacctgtaaagcttaaacgcgtgctttcttcaacgcgtttggaaactctaacccccttctcttttgtacttttgcttgctgtccactacagagggtc

SEQ ID NO: 475036 - DNA, 122 bp, Homo sapiens
aaccaggaatatctgtagtttttgaggtacttggctctctcagaagcccttaggggaaagcgacatgaaagaaataaaaaagagtgctgtcttgaaatgaaaatgacagtcatcttttctga

SEQ ID NO: 475037 - DNA, 122 bp, Homo sapiens
ctagtcctcccagcacctggcccagagcccagcacacattagggacccaggcatatttgtcgcctgctgttgatggatctaagagcatgcttggctgaagagatgtacagttgaccacgttg

SEQ ID NO: 475038 - DNA, 122 bp, Homo sapiens
agccgtccctgagagggcgctgttcccaaatcgaagccccagaggcggagactgagacaccggcactctcccactggactgggtcagcatccctctccccgcgcggccgcaggtctagagct

SEQ ID NO: 475039 - DNA, 122 bp, Homo sapiens
agggaccaggccttgcggcgggcaaggaccaggaggcgagccctggagctccggagcggacgcccccagggagctggggacacccccatgggacagcccttcctggacccggagagagcagc

SEQ ID NO: 475040 - DNA, 122 bp, Homo sapiens
ttcattccccgtgcttatcgggagctgcgggagatggagtagcaccccagaatgtctccacgcaaaacttgtcacgccttcactggctgtaccccaaaacaaatggggaaaccaagccttaa

SEQ ID NO: 475041 - DNA, 122 bp, Homo sapiens
gtttcagaagcagtgagcatgccctgcacttacatcatcccttcctcatcatccctcacccggtgctcatagcagtatcatcatgtaagcacaggaaaggaatggctgctctattaggagtc

SEQ ID NO: 475042 - DNA, 122 bp, Homo sapiens
gacatcaacagcggtgcctctgtgtgaggtgtcagccaatttgcagtacaaagctgaccacgttttataagtagtattctaagaagcaaagtcttatggacctttcagaacatgtgcttcta

SEQ ID NO: 475043 - DNA, 122 bp, Homo sapiens
catctgcgccaagccttgcctgaacggaggcgtctgcgttaggcctgaccagtgcgagtgcgcccccggctggggagggaagcactgtcatgtgggtgagtcagcttgtcctccccacctac

SEQ ID NO: 475044 - DNA, 122 bp, Homo sapiens
cagcagctccttcgccggtggccgccgcctcggggaacggcgacgcggggacctgcttagcggagcaaacggtggaacaaggggcacccagagaggggatgagacccccagggagccatcct

SEQ ID NO: 475045 - DNA, 122 bp, Homo sapiens
gggtggtctcgaggaggcccattaccggctggagtgacagagtgtgtcaagcctgcagctcgtcccgtgtctaatggaacagaaacaagcaccctgctgcccttgttttccagtggctcacc

SEQ ID NO: 475046 - DNA, 122 bp, Homo sapiens
ggcgctttagcttagcaggcgacgttgcgggccctgggcgccaggagagcttcccggagtcgaccttcctgctggctgctctgtgaccgcttcccggctctgccctcttggccgaagtgccc

SEQ ID NO: 475047 - DNA, 122 bp, Homo sapiens
gaagtggggtaagctagggtccagggtaggttcagggcacacacacctcattgttaacctcgcagtccatctcacagtggctgttggggccgcactgctgggcagagagtgaggaccgtaag

SEQ ID NO: 475048 - DNA, 122 bp, Homo sapiens
tgcccagtgcaccgttcacagccgaggtagcatgttcccagatggggtcaaacaaggcgacgctctgctttcttgtttcagctcttgtactgtaaacaagtgtccttttcgtggcctattta

SEQ ID NO: 475049 - DNA, 122 bp, Homo sapiens
tagactctgtctcaacgacgacaacaaaaaagaaatcaaaatgggccaaggaagaagtctcgctttgaccaggtcccatggcctctgctgtgcctcgtcccagcatctgcggtgacacagga

SEQ ID NO: 475050 - DNA, 122 bp, Homo sapiens
ccaacacctgcgaatcgggagcagcgggcactagcacgtgcactgtctggtcaggctcgccggttctttgagtggtttttctggttctgggtcggacccggagttaggtggatggccggcag

SEQ ID NO: 475051 - DNA, 122 bp, Homo sapiens
tccactatcatgaagctgaacctctgtctgtattcatattcaaaggtgattacctgcacacgtgactttggccattaggaagtgccctgagtgtggaacattccttaaatccttgacctcat

SEQ ID NO: 475052 - DNA, 122 bp, Homo sapiens
gcagtgtcattcgggagttgtagttcctttcccacaatcggctgggcgaggcggcgccagcgatcagagcagcgctgggtgttcaggggccaagatggcggcgcgccggggacggagagacg

SEQ ID NO: 475053 - DNA, 122 bp, Homo sapiens
gtcgccgccaggaaagccccaggtttcctaaggcctcttagtgggtgtggctttgggcaccgaccagccaaagtcgttttccccgaggcttaaaggaacatttggggcctatactgagcaag

SEQ ID NO: 475054 - DNA, 122 bp, Homo sapiens
ccaaggagggaggggtggcatgcctgggcacagagggctgttgataagtggtctgagatgcggctggaggtgtaggccaggggacagtggtacatagccttctggtccatgtaaaaggtttt

SEQ ID NO: 475055 - DNA, 122 bp, Homo sapiens
gaagagcagagaccactaggaggcaccactgcactgctcatgagcccaggaggtggatgccggggctgagctcagggtggagagatgtcattgctcatcctccaggttccaggtgaaaaccc

SEQ ID NO: 475056 - DNA, 122 bp, Homo sapiens
gggcaggatcgcgggtaggtgggtcagccgggtctgggtcagagcgcagtgggcggtgggcggggctacggctgtatttctagcgacccgggtgggggcggagccagaggggcagggggcct

SEQ ID NO: 475057 - DNA, 122 bp, Homo sapiens
ccatcagactcacacccctgagctaacctgcacccaggccttcctggcagtacagactcacgctcaggacagtgtttcatgcctgtctttctaaggagtttctgtaggatttcaacatgtga

SEQ ID NO: 475058 - DNA, 122 bp, Homo sapiens
ggacagtcactgtggccagctagtggtgtgctttgtctggccacgctgggtcctgctgctcgctccaaaggggcaacatacttgatttgcagccctggcagaatcatatgattaaagtgtgg

SEQ ID NO: 475059 - DNA, 122 bp, Homo sapiens
cgatcgggctaaaggcttgccgttgtgcctgcacggctaagtgcccgggttcatcctaatcgagctgaacactagttactgggttccacggttctcttctgtgacccacggcttctaataga

SEQ ID NO: 475060 - DNA, 122 bp, Homo sapiens
ttaaaaaaagcaaaaaaatcaagagagcctcatttgacattgaagtcccgggctctggttcggcggttctggcctggtagctgagcatgctccagccccgtgaaggcggccagccagggcca

SEQ ID NO: 475061 - DNA, 122 bp, Homo sapiens
acctcccggctcacgccactgatcattcccatccccggctcaccccgttcatctcaatcacgtccgtgtgccagttcttggtctccacggtttgtgggtccagctgcagagagagaatgtgg

SEQ ID NO: 475062 - DNA, 122 bp, Homo sapiens
tcaaactttctagtttccatctagcgttatcatcaagacccagttggcaggattcaagtgcgtattatctcatacatagtaggtttcaatacaatttgctgaattgaactaaaagaacttca

SEQ ID NO: 475063 - DNA, 122 bp, Homo sapiens
tggggcagctgagccactgggcgtcctgtacccgggcgtgatggtgcccacagtgactcccgtttttcagaagaattggtggcctgcccgaagtcacagagcaggtggtggcagagcctgaa

SEQ ID NO: 475064 - DNA, 122 bp, Homo sapiens
ccggcagacccaatggttcttcgatgctggaacagcgggaacaagcaacacccaaccacccgagagcgaccccagctgaccagtggagcgcgaatcccacggacccggatgcagataaaggc

SEQ ID NO: 475065 - DNA, 122 bp, Homo sapiens
tcccaggccactgtgtgctcttcaagtccactgaattgccctaaaaccatttactacccccgtaaaatcatctacacttctccatctccttttcccttaagaagaagggtacataagcatct

SEQ ID NO: 475066 - DNA, 122 bp, Homo sapiens
ccccgccgcgcgcgccgcatccctccgcacgtgctggtcaactgggccgtgcagatagcgcggggcatgctctacctgcatgaggaggccttcgtgcccatcctgcaccgggacctcaagtc

SEQ ID NO: 475067 - DNA, 122 bp, Homo sapiens
tgccatggtgcgcggagatgcggtccccgaggaggccactttcggccaggacgccgggatcgtatcagcagcagcatcccgcgctgacactcagtattgacttttcccggacattgctggat

SEQ ID NO: 475068 - DNA, 122 bp, Homo sapiens
caggccaaagaagaatagcttggtcttcaatcatggtcattccataaagcagtccaaactcggaagactgggaaaatacaattaatatacttttgatacctaaatgtagtaggtggctggag

SEQ ID NO: 475069 - DNA, 122 bp, Homo sapiens
ttcgcatcaactcctctttacaggcatctttatccggaattcagctcgtcccaaaccccacgtggtgtagctctgcttgtgtttttgaatcccggggcctctttgaatcagaagccctttgt

SEQ ID NO: 475070 - DNA, 122 bp, Homo sapiens
gagcctaaattgctgccaagttcccgatttcccttccagtcctcagtttccccttctctccggcaccctcctgaggaccactgagccccaaccaccaccatgcccatggctggtgcccagga

SEQ ID NO: 475071 - DNA, 122 bp, Homo sapiens
aactacagttttctttttgtttatgggtttttattgtagttttattattttaatagatcacgtgagcagacttcctgactagcaaaacactaaaaagacccaaactccagtgtgttgttatt

SEQ ID NO: 475072 - DNA, 122 bp, Homo sapiens
aagccattaccgagataaggtttgttgccccatctgggccctcgcgtgcagagacttccccgcctcagtctcagtactcttccctgttcactcacccgctgcccccatccttttctgcttcc

SEQ ID NO: 475073 - DNA, 122 bp, Homo sapiens
acgcaaccacccatgaccccgacgtgatttgaacacgcaaccttctgatctggagtcagacgcgctaccgttgcgccacgaggtcacggagaccctccattttccttttaagataagtatct

SEQ ID NO: 475074 - DNA, 122 bp, Homo sapiens
acaatcctcaactggccccgccccaccaatttggaaccccgcctcctcaacccggaaccccgcctcccccagtgtggccgcttttccgacagaggcctgcccgtgattggctgctcgtacta

SEQ ID NO: 475075 - DNA, 122 bp, Homo sapiens
tgggatgatttcttaagtgcagctgatcctgtgtcagagttctgtgtgcatgtggggacccgcaatagaagggtaggggtgttcgccaggataaccagctttaggttctcaagcattaaggg

SEQ ID NO: 475076 - DNA, 122 bp, Homo sapiens
acgtgtctcagcaatccgggtgattcttcggtgtggtcgcgtttgtgaggcgcttttccacggcgtggtgtgtatggttctgtttagacggttgcatgatggaacatagttgaccaaaccga

SEQ ID NO: 475077 - DNA, 122 bp, Homo sapiens
cgtgccagcctgcacggggagtgaaacgtacgtcccatcttacgcatttaggtaatcatacgccgatgcctggcgaaaagcactttcttcaaaagttagactacagacagactgggctgtgt

SEQ ID NO: 475078 - DNA, 122 bp, Homo sapiens
cattccccggggtaaagcgagctctggagatcgcatagagaaactgtagtgtcctgggtccgagcgacgcccgcttcccgcaaccgggagagccgattccggccgctgccctcggggggctc

SEQ ID NO: 475079 - DNA, 122 bp, Homo sapiens
cggagcccggcactgcggcccgcgccctctactccccgcgcgccggccaacaaccctcggcgctgccccgcaatcttcagcgctgcctggtgaggagctttcagacgtggctgcggtcccag

SEQ ID NO: 475080 - DNA, 122 bp, Homo sapiens
atttgacggttgtttgggggcatccactcctggggctcttgacattttccccgggctctgcgccatcagcgccctttcctgcccccacttcacgggctctgtctcctctccaggcacctgct

SEQ ID NO: 475081 - DNA, 122 bp, Homo sapiens
gccgggagctccgggggcttccctcgcttcccggtattgtttgcaaactttgctgctctccgccgcggcccccaactcggcggacgccgggcgcggagagccgagccgggggcgctgtgcgc

SEQ ID NO: 475082 - DNA, 122 bp, Homo sapiens
aatcaaaaccacaatgagataccatctcataccagttagagagctattattaaaaagttccggtggggtgcagtggctcacgcctgtaatcccagcactttgggagaccgaggcgggcagat

SEQ ID NO: 475083 - DNA, 122 bp, Homo sapiens
agatagttgctcagtttgcgctggctggtaaacataatgctgtatggtattggggttaagcgtgcaggctctgagttctgcataatttggggcaagttgctgagatgtttatgaagtctcct

SEQ ID NO: 475084 - DNA, 122 bp, Homo sapiens
cccatccccgagtcaggctccccctgcttctcccgccgcagggttgccatggtaaccattcgaggcatggagattctcgctgaggctgcagaatggccctaaacctgcctgagctggggagg

SEQ ID NO: 475085 - DNA, 122 bp, Homo sapiens
ataaacaatcgtatgctcatgaagaacccaagcctaccagatggatgcctttcagaaaagcgtatacttaaaagacccaagacgtcaggatgataaagctctgtatttatagtcttttatat

SEQ ID NO: 475086 - DNA, 122 bp, Homo sapiens
gcccataggtggctaggcaaacacccaatagctccctgaaatggcttcattatgcagcctcgacagccaccccaaccctcccactctcacactgaaacacccagacctagagatagctagac

SEQ ID NO: 475087 - DNA, 122 bp, Homo sapiens
ggcattcctcagtatcagagaacaatgcttccatttctgattcacaaagtgcttctgctacgtgggtttatgaagccagcaaggcaaaacaaaatcaagcagactttctgtctagatccttg

SEQ ID NO: 475088 - DNA, 122 bp, Homo sapiens
atgctgctgatggtgcagcccagcactggcagcagctgtcacctgctggtgtggtggaaccggttctaatgggaggcctctgtctgcatctgccagcatcattaccatgccagtcattagat

SEQ ID NO: 475089 - DNA, 122 bp, Homo sapiens
cctgtgccacgcgtgtcgccggctggagagctccgcctggatggtttcactccgcggaggcgccgccccgccactcagttagaaacctcagagccatattcaactctcgtctcctctgcagc

SEQ ID NO: 475090 - DNA, 122 bp, Homo sapiens
aaagatgacttatggattgctttttactttacagccatctaatcatcctgagtaaattaacgttttctgagaacatgagctcctgattttactattgtaacaattcagtccttctgaaagca

SEQ ID NO: 475091 - DNA, 122 bp, Homo sapiens
atcaactgttgtcccttagcctctagggctgagcgcagaggtgggccctttactcatggccggccctcgggcatcctggggagggaaaggacaggctccagggcttcctgcctctgagtgaa

SEQ ID NO: 475092 - DNA, 122 bp, Homo sapiens
tcccccatgctggaatttccccaatctgcctgagcatgggctcccctttctccacatccccgccagcatttgttattttttgactttttggtaatgcagagaaattgaaagggtgaaatgaa

SEQ ID NO: 475093 - DNA, 122 bp, Homo sapiens
aagtcagtgattctgaaccataaatgcacattaaaattgcctgagaagcatttaaaaaatcgtttactggaccccatcccagattaaatgaatcataacctctggcattagggcccagcatt

SEQ ID NO: 475094 - DNA, 122 bp, Homo sapiens
cacagtcaaatggggctgggtgaggcatcttcatgggctcacgaggaagccactctgagacgtggtcacgtggcccctctgtggtgggcactgagtgcaggttagcccctgccccatcctca

SEQ ID NO: 475095 - DNA, 122 bp, Homo sapiens
agaggtggcagaaacccctgcagacatccttcttgcgcaagcgcagttgtaccatgaatgcggtcgtcctgctgcagaccacgcccaccaagggcggggccacatccactgcagctgagctc

SEQ ID NO: 475096 - DNA, 122 bp, Homo sapiens
ggaactatgggcggggcttagcggccccgaggccgtagagaatcctgggcggagcgcggtcgctctcaggcgtcctctggggagactcgacctgccacttgagagcgcagcattatatcaag

SEQ ID NO: 475097 - DNA, 122 bp, Homo sapiens
gcagaaaaaaaattaaaaattttaaaacccaccacttcagaagcattatgctttagtactcggatagtctcaacatgggaagaaaacatcactttgtcagtgagtaacttctgataagtatg

SEQ ID NO: 475098 - DNA, 122 bp, Homo sapiens
cgaaagcgcctgggctcagccacaattttgctctgtccctgtgcgggcactgggagtgatcgcagacactttcgaccctgcagggacagggggtttcctgggcctccgagagtacagagatg

SEQ ID NO: 475099 - DNA, 122 bp, Homo sapiens
ccaaactccactggcatcttcctccatcctgagggcatcttcctcggcatcttcctccatcgacagcagcctgggctcacctcccagcccgaggctgagaactgagttccagtcccggggtg

SEQ ID NO: 475100 - DNA, 122 bp, Homo sapiens
atgcaaagcaggaagagaccattcctggcgggcgggggaggccgcggcgctgctgtcagacgctcaactttgcgcagcggagctggaaggcagcccggccctgatggagctcgaaatcctaa

SEQ ID NO: 475101 - DNA, 122 bp, Homo sapiens
tcactagggagtgccagacagtgggcgcaggatagtgggtgcagcgcaccatgcgcgagccgaagcagagcgaggcattgcctcccttgggaagcgcaaggggtcggagttccctttctgag

SEQ ID NO: 475102 - DNA, 122 bp, Homo sapiens
ggcggggacagccacactgcgcgcggggcccgcaggccgtaataaagagtggctcgacctcgctgctgcctgtcgcgggagaggaacaagctttcgactagcgcctctccccggggcccgcg

SEQ ID NO: 475103 - DNA, 122 bp, Homo sapiens
cgcccctaaccccctttagcaaactgaccggggagctttaagagcagcgagtgagctgcacgcacacgtggggagggggtttgtcagtgtcgctcaggccacataccaccgatatacacggg

SEQ ID NO: 475104 - DNA, 122 bp, Homo sapiens
cttctgagttcgaaactgtcaactgcggataagtcactgcaccactgtcgtctctgagttcgaaactgtcaactgcaggtaaaatcactggagcgtcatgatggttctgtgtttgtatgaaa

SEQ ID NO: 475105 - DNA, 122 bp, Homo sapiens
agccattgccattcacataaaattcgagattgaggttctaaaagcatttagtttcctcttcgttttatgctgagaaaaactagttaaggccccctgcacaacttgtctttccaacacattta

SEQ ID NO: 475106 - DNA, 122 bp, Homo sapiens
tccggagtttgttccttctgatgtccggatgtgtttggagtttcttccttccgctgggttcgtggtctcactggctcaggagtgaagctgcagaccttcccggtgagtgttacaactcttaa

SEQ ID NO: 475107 - DNA, 122 bp, Homo sapiens
tccagcactcttcgccacctcgtaattttcttctgtttctgtatgatcaggtctgtccttcgcttttgctttccattacttcgtcctagccctggcctgaatcccacaactggcgccccacc

SEQ ID NO: 475108 - DNA, 122 bp, Homo sapiens
gagcatagaggggcagcaggaggagtttctgtaaatgaccaacctcctcccacctgccatcggaagacgcatttgaggcagggacatgggctggtatgacccagccagaagctgagcaggcc

SEQ ID NO: 475109 - DNA, 122 bp, Homo sapiens
gattttagtaggagatgtgatagtggcatttactaagatggtggcagtcgggaggcagagcggtgagcagattgatacttaggaggtggaaagggccagattttgtgaatgggtgaggaagg

SEQ ID NO: 475110 - DNA, 122 bp, Homo sapiens
caaggaatcctgattttattttacttttttaagtagagatgctatttaggaactgagatccgagtgttcagtgtgttcatttctgctggcatgtcatcacttttagggggatagagctagga

SEQ ID NO: 475111 - DNA, 122 bp, Homo sapiens
tacacactgacgtgtgtacagtcatcccctctcatgaaatggggattagttccaggaccccgtagacaccagaatccgcagacggtcaagtcccttatgtaaaatggtatagtgtttgcata

SEQ ID NO: 475112 - DNA, 122 bp, Homo sapiens
cccacccccgcagaccccagcgcctggtgaacgtggtgctcggagcccacaacgtgcggacgcaggagcccacccagcagcacttctcggtggctcaggtgtttctgaacaactacgacgcg

SEQ ID NO: 475113 - DNA, 122 bp, Homo sapiens
agcgcccctgtctacatgcccaccgtcgtcctgcgccgcacccccgcctgcgccggcggccgttccgtctacaccgaggcctacgtcaccatccccgtgggctgcacctgcgtccccgagcc

SEQ ID NO: 475114 - DNA, 122 bp, Homo sapiens
acaagatggggtgggggtgggtataagtgtgtttgagagatggtttgcaaaacttatagtcgtggatcggagccttttttgtggctggaagcatgcatttcctacatggactgcagttgctg

SEQ ID NO: 475115 - DNA, 122 bp, Homo sapiens
agcagaagctcaagcccttcattttcctctgggccgagactgatcaggaggctagtgagccggtttctggtgctccgctgacctcgttatcaccttgtggttggctgagccctctcccagtg

SEQ ID NO: 475116 - DNA, 122 bp, Homo sapiens
gttcctctaggacctcatggccctgctaccttcctggcctctcacaggacgttttcttcccgcagatagaaaaggagggagctactctcaggctgcaagtaagtatgaaggaggctgatccc

SEQ ID NO: 475117 - DNA, 122 bp, Homo sapiens
tactaagctcagttctttcaaggttgcatctatccaagtgtaggtcgccagcacgctggacggtatgtttcatccggagaactcgaccattcggtggcggcggctgttactggcggcagcgg

SEQ ID NO: 475118 - DNA, 122 bp, Homo sapiens
ggcggagacggttagtctagcctctctgtggggcctctctgctggtacccagatgctgagcgctgaaattctcatccgccacacacaacatggcggcttcctggacccgcgcccaattttcg

SEQ ID NO: 475119 - DNA, 122 bp, Homo sapiens
ctcactgcctggggccggtggggcagccggccgctccgagtgtggggcccgctgagcccacgcccacctggaactcgcgctgtcccgcaagcgtgcaagcagtcccggttcccgcccgctct

SEQ ID NO: 475120 - DNA, 122 bp, Homo sapiens
cctcagcccacgaggtgggactccctgggacggcaaagcccagggccgtctgttctgaggcgtggtctttgactccaaccccagcggggcctgcagcagagcctccgtcttcggaacaggct

SEQ ID NO: 475121 - DNA, 122 bp, Homo sapiens
ttatacacagagttatgttctctggcatgtagaatactcttgtatgctggccactccactcggacttagtgtattcctataaatatgtctgttgctttcaaaggctatgatatggagggaac

SEQ ID NO: 475122 - DNA, 122 bp, Homo sapiens
gtgattcacaggccagatttggaataagcctgactggaggaggttccacctgtgagtgaacgctttggcctctgactgcctcggtttctatcccagctcccccggtaatttgctctgtcatg

SEQ ID NO: 475123 - DNA, 122 bp, Homo sapiens
aactggcgcttaaaccaaatcgcatggatttctttttcagtgacgttcaagtgtttctcacggatggaattctagtcagctgcaggcgggaagccaggcgggtggagcccatgggagcaagg

SEQ ID NO: 475124 - DNA, 122 bp, Homo sapiens
acatggcttgctcaagtccagccagctgaccaatcaggagcctcctgatagagcctccatcggtatcctagtcttctttctttgtcctgtgtaattttcactgtattgcaatgttttgaaag

SEQ ID NO: 475125 - DNA, 122 bp, Homo sapiens
acagcgcacagggtgatcactgagtccagcccaaggggtagcagagagagaccatggctgcgcacatcaaacgtgtgagagatgacattggccttgtggatttggggtaagaagagcatatc

SEQ ID NO: 475126 - DNA, 122 bp, Homo sapiens
acacacacacccccaagctctaccaaatgcctactcaaagagctgttggacccctttgtgcggctatttacatcctccctcctaaaaaatattttcatcgcaaattcagtctgtcttaattc

SEQ ID NO: 475127 - DNA, 122 bp, Homo sapiens
actgttggttacagcctgtttgtattattcttactgcaactcaagacacctgcagcagggcgtgagaaaaagtaaaagaccagtattttcacattgccaggtaccagaaacacagaagactg

SEQ ID NO: 475128 - DNA, 122 bp, Homo sapiens
gagcacgggcggagatcaccttctggacccggaagaatggtcggtaggtcagtccgtccccgctacggtccccgccgggcttccggtcccgctggaaaaggttctttccggaattcagagag

SEQ ID NO: 475129 - DNA, 122 bp, Homo sapiens
acttgggaagcacaaggggtcagggagttccctttccaagtcaaagaaaggggtgacagacgcacctggaaaatcaggtcactcccacccgaatacagcacttttccgacccacttaaaaaa

SEQ ID NO: 475130 - DNA, 122 bp, Homo sapiens
ggcatgaatctcgggagaccaaacaagggacggtgggccccaggtcggcctctctccccgcgcttctggaaggacctgcaggacggcagacagtctctggggcacccagccttcgaggacca

SEQ ID NO: 475131 - DNA, 122 bp, Homo sapiens
tggggtcagtttgacattatatgataagctgtaaggagaagaaatcttcttacctctctacgttcctaatttggctgtaaatgtggtgtgctgcaggcaagtcacattggcacatgagagca

SEQ ID NO: 475132 - DNA, 122 bp, Homo sapiens
tcagcaccaaaagaaatccctgaaaataagtagattcacagaaaattgatcatcagcatgcgttctcagattttgaattctgaactcatcttttctcctccctcttgtttttccaagacatg

SEQ ID NO: 475133 - DNA, 122 bp, Homo sapiens
gtaattgccctggaccggcacaggtgcatcgtctaccacctagagagcaagatctccaagcgaatcagcttcctgattattggcttggcctggggcatcagtgccctgctggcaagtcccct

SEQ ID NO: 475134 - DNA, 122 bp, Homo sapiens
ccctgtctactaaaatcccgtccctactagctgggcgtggtggccgtcatctgtaatccccgctactcgggaggctaaggcatgaaaatcacttgaacccaggaggcggaggttgtagtgag

SEQ ID NO: 475135 - DNA, 122 bp, Homo sapiens
ttcaggtctaaaagaaaagtaagaaaaccactcaggctagagtttgagagcataaggaggcgggaaaggaactggagagtagaagctacagggtatactgctgcagggcatggctagggaga

SEQ ID NO: 475136 - DNA, 122 bp, Homo sapiens
taaagaagaaactgagatttacaaaggacagggagcaaacttctgcatcccagcctgggccgggttcccctcaaatggacatttgctctctcatgtgggcacactgctgacatctcatttat

SEQ ID NO: 475137 - DNA, 122 bp, Homo sapiens
gggacgctgcatgtgtggatggttgcgtggggcagcagccagggcctgcgtctggaggcacggaggacgtggaagggcatgccgcactcttatcctagccattgctcgtggcaccttttctt

SEQ ID NO: 475138 - DNA, 122 bp, Homo sapiens
tcacagacacacacagaaagaatgtttctatttgggaaccctgtggcacagtcatgttgacgcataaaattgaccacaatactagatctgacccaatttccagcatgcttcttgggaaaaaa

SEQ ID NO: 475139 - DNA, 122 bp, Homo sapiens
tgtgttaagcgtgaggcagagggagacgttagtccagcatttccaaagtgtgggtgggtccgttggttcccaagatacttttaggtggtatggggcctgcattaagtggcacaaaatcagag

SEQ ID NO: 475140 - DNA, 122 bp, Homo sapiens
ggcggagcaggagccctccagctcccgccccatcactggtgattggcatgggacctagctcgtccccgcccccacttgactgaaggttcggccctggcaccgccctgagtccccaggcgcta

SEQ ID NO: 475141 - DNA, 122 bp, Homo sapiens
tctctgactagccgtacactccttatgctgagatccttaaagatagcatctatgtcgccccgaaccgtattgaaaggtagatttcctacgtatgctgtgtaggggggctctgtgggcaactc

SEQ ID NO: 475142 - DNA, 122 bp, Homo sapiens
ctgcgccgctggtcggcctgggccccgggggaggtcactttccctcaggcctctcccgggcgtgggctgtttacccagctccccagtcggggctaatgcagctcgggcctttccccctggaa

SEQ ID NO: 475143 - DNA, 122 bp, Homo sapiens
atgagttctctaaaagctacaagttcctctttaagctaatttaatgacaaaatggggaaacgagagttggttggaatattaaagaccatcaggtctttgaagaatttatgccgtactaaaca

SEQ ID NO: 475144 - DNA, 122 bp, Homo sapiens
gccgtgtaggcctggaggagccgaagagcaggcggaccccctccgcgggggaacagtttccgccgggagcacaaagcaacggaccggaagtggggggcggaagtgcagtgggctcagcgccg

SEQ ID NO: 475145 - DNA, 122 bp, Homo sapiens
cgccccgctcctggccgccgccggcctgcatgcttcgcccatgtccgccgaccgggtggtcgcctttatggaccacatacggatcttccaagagcaagtggagaagctcaaggcgctgcacg

SEQ ID NO: 475146 - DNA, 122 bp, Homo sapiens
agcaccgctggccacagatgaaccgcctcctcagcgcaggtccgggattcggggaggcagcgccaatatccggtctctgcagccatcttccctccgtccctccgcccaccgagggtcggccc

SEQ ID NO: 475147 - DNA, 122 bp, Homo sapiens
tgtgagcgcgtgtgtgcgcgtgtgggagtgtgctcggtgtgtgcgcttggcgctctgggccggactgtgcagctatttccccgcgtgagccttcgcttgctcgctccctcctcactttctct

SEQ ID NO: 475148 - DNA, 122 bp, Homo sapiens
gggtggaatgtggtcatgtttcagactgccgatggcttccacttcccagacaggcccagacggccccgccagcagccgagagacattcctcaatagcccagtggctgccaagccaccaaagc

SEQ ID NO: 475149 - DNA, 122 bp, Homo sapiens
tgaaggggagggcagcaagactggaagcagagagagagagcaagagtgagagagagcgagcgagcgtagtcaggagatggtgttgtattccaggagagagttgatgataccctgagttgggg

SEQ ID NO: 475150 - DNA, 122 bp, Homo sapiens
cattttcccccgccctcccggggtttgccctactcggggggtcagaagacaggagattggcggccattttagacgcagtaaccgaggttggagttgaagggctactgcagaggagggagggt

SEQ ID NO: 475151 - DNA, 122 bp, Homo sapiens
ccactttttttcccagtcccaggaggcgtaagataaaacctctgatttgctgcgtgctgccgggcacattctctgccctctcgtccgaaggacgagtttaaaatggagagtttaaaataata

SEQ ID NO: 475152 - DNA, 122 bp, Homo sapiens
ggtcccatgatccaggagaaaagaggatgatattactttcaatatcacagggtgtgtacacgcccccagtgatattgttcctaatttcagcgtgggagaggatgatactacaccaaatgccg

SEQ ID NO: 475153 - DNA, 122 bp, Homo sapiens
ctccgctcagggggcctgtcccgcgcggctggcacaggcgctcacaataacctcctaaagcggtgccagccgcacctccgcgcggccccggcacaagcagccaatgaacacgcggctgcgcc

SEQ ID NO: 475154 - DNA, 122 bp, Homo sapiens
cgccggcctccgggaaccttgtgcctgggaccccgcagcggctgcttgtttctcggggcacgaggtccccaagctcatccttgttgggatggtcccatttaaaacagcactgcgataagcac

SEQ ID NO: 475155 - DNA, 122 bp, Homo sapiens
gcatatttctcattgtttcttggcaggactatgtcattatggcaaaatgagagctcaaagcgataggtagtagctgcatgattcataagtgtagcttggaaatgctctttcagaaatccaga

SEQ ID NO: 475156 - DNA, 122 bp, Homo sapiens
aaaaggcaaagttcagagtaataaagggaaacggccggtcatttcctgagaccattcttccgtgtctttctagcagaccttactgttggatgagaaacgctagagagtgtagtcccaaaata

SEQ ID NO: 475157 - DNA, 122 bp, Homo sapiens
gcggggcagggggcggggggaccctgaggcactgcgacaatgaagtgtcacatgggatcccgggacagagaggggcggtagggagtgggaaatctgaataaaatgtggctccttggctctaa

SEQ ID NO: 475158 - DNA, 122 bp, Homo sapiens
ttccttttaattccctattcagaacagaccagaatagaggcatattccatctgcaggctacgttctagacctctcctttcaccattattttcattcatttgcatatatgtccaatggccttg

SEQ ID NO: 475159 - DNA, 122 bp, Homo sapiens
ctctctgcaatacactgaactctccagacagtgccgcactccgccgcctcctggactccccgggaccctgctgtacctggggacagtgtctggctcagggacctgaagtagccaggctcaga

SEQ ID NO: 475160 - DNA, 122 bp, Homo sapiens
tcatgtcacactttcctttgttttcttttccccttgcgggctggttcctagaccgtcttgcgcgcgcgcgcgcgcgcgcgcgcacacacacacacacacacacacacacacacacatctggg

SEQ ID NO: 475161 - DNA, 122 bp, Homo sapiens
agaagggacactctaagagcagcccaggaaccggtgcacttgggcggcctcggaagaagccggggctcctggaggcggaggcgaggcctgggacccaataagaagggcgcggctagagagga

SEQ ID NO: 475162 - DNA, 122 bp, Homo sapiens
caggctatgcaggtgagtgagtccggctctcgaggagggctctgaagccatgcagggtgccgttggggtgcccccaccactcctagccttgaccctgtgccctcttcccttccccccaggtc

SEQ ID NO: 475163 - DNA, 122 bp, Homo sapiens
ataaaatatctttttgtttaaaactaaatttaagcacttgttttcctttgtaggtataagcgtgtcttttcagttggaactcatgcgattactacatataatcccaataccttagaagtaac

SEQ ID NO: 475164 - DNA, 122 bp, Homo sapiens
cgctcgggtcctttttcaaaaccagtgtgatgcacgatatgtgactactcgccagagtctcgggagagtgtgacgagcgatgggtggctactcaccagagcgactggatttctgtctgaggc

SEQ ID NO: 475165 - DNA, 122 bp, Homo sapiens
agccccgcccctcatggaggcgtggcgttcgcgccccactgccggctgcgtcttctccctcgctgaaagtctgaagggagccggcttacgtttctgctccgcttgcctagtgagtcttgagc

SEQ ID NO: 475166 - DNA, 122 bp, Homo sapiens
gggagggggtgtggacaggacccgcctgctgacggtgacacctcttcgacaccacgtccacgccagtcctcagctccaggagctgggcgggatccctcatcccgctcagctgggagatgccc

SEQ ID NO: 475167 - DNA, 122 bp, Homo sapiens
gcgggaggaggggactcggcggcccagagccgccccccggcaggaaaccagccgcggccccgcctcctctgcgcgtctgatcccgctcccgaggccgccgccgccctctccctccggaaacg

SEQ ID NO: 475168 - DNA, 122 bp, Homo sapiens
agatggtattacttccaaaatcgtaaacacattgtgtgtacacccccctgtgatattgttcgtaatattcggggtgggggggagaggatgacgttactttaaatatcgtaaacacgttgtgt

SEQ ID NO: 475169 - DNA, 122 bp, Homo sapiens
tccgcgggactgtgaatgtggacaggcacgagcaggccaagccacccagcaggctcacggcggctcctgtccacacggctcctgctaggcagcgcccctcctgccgtgggtctgaatccgtc

SEQ ID NO: 475170 - DNA, 122 bp, Homo sapiens
gagaccatagcggcggtggagcgcgcaggctggactggagcagggagtgcctgttgccagcgtcctgctattaagctgagcagatagctcattgcctcggtgccctggctgcctcttatacc

SEQ ID NO: 475171 - DNA, 122 bp, Homo sapiens
attcctaggtttctgtgttgagcagaccatctagaggaatgatgggaccatccactgagacgaaaagatgggagcagagcaggtctggagtaggactccatttgtgatccattgccttggag

SEQ ID NO: 475172 - DNA, 122 bp, Homo sapiens
taggacagacacactcgtgtactgtacaacggggtcaagtctcaatgtcgggggccgagacgcatatttgatttctacaggaaataaacatcgcctcctgatgtgtaacaaccacgcgagtt

SEQ ID NO: 475173 - DNA, 122 bp, Homo sapiens
ctgcccttcgcttggtctagttcgtgctcgccaaacctgccaccgttttgtgtctgctcacggaacgtgatctctctatacgcgttaagacgtttgatttggttcttgttctgcttatggaa

SEQ ID NO: 475174 - DNA, 122 bp, Homo sapiens
gatggaggcgtcatggcaaggcaaggcctgccccctggtggtcagagagcatgggaggcccgagctaccaatggtggcttttctcaactgggccttgattccagcttctgcccgatccccta

SEQ ID NO: 475175 - DNA, 122 bp, Homo sapiens
ctgcgcagtgagatgaggggactcacagttgccaagaggggtctttgccgtgggccccctcgccagccactcaccagctgcatgcactgagaggggaggtttccacacccctcccctgggcc

SEQ ID NO: 475176 - DNA, 122 bp, Homo sapiens
catgtgtttaccggccacctgaatttcctcttctggagctgcttattcatattctttcctcgtttttctatcgggttgctgttcgtttactgttttttgagaaattcttttgtgtattctag

SEQ ID NO: 475177 - DNA, 122 bp, Homo sapiens
gagagccccccatgccggctcgagagctcgggtttcggtggtggagaacgtagtacctttcggggacattggacactactctaggaccgggtgagagagttcacctcagttctgaggtccgg

SEQ ID NO: 475178 - DNA, 122 bp, Homo sapiens
gaggcaggcaagtccctagcgtggaggggcagcatgctggcagcacttggggaggcggtgcgctaagggattcacgctgtaactgggaccgcagcagggaactacaatttccatagtgctcc

SEQ ID NO: 475179 - DNA, 122 bp, Homo sapiens
agacagcatttcactgaaaaaccattccgtataaataaagccaaacaaaactgtttctaccgctgcggtggatgattttttaaaggcatctccgcccaaggatgctctgccctcgccctctt

SEQ ID NO: 475180 - DNA, 122 bp, Homo sapiens
tttacattcggaagtgaggtttgatatacggtggtgggctgcccttcgcttggtctagttcgtgctcgccaaacctgccaccgttttgtgtctgctcacggaacgtgatctctctatacgcg

SEQ ID NO: 475181 - DNA, 122 bp, Homo sapiens
ctctacagcaaagatttacataggaaaggagagggcctggagcgaccagaactcaaaccacgcaagggctgcagagccataccttgaactgtcctctggtgagctagggccacctggattcc

SEQ ID NO: 475182 - DNA, 122 bp, Homo sapiens
aatcttgagctataatctggctgcctgaaaatctaacaggtgtaacattaaggccacaatcgtggtgtgctacaaagattttatctgcttttaacattaataaattgtgatgatggtgtata

SEQ ID NO: 475183 - DNA, 122 bp, Homo sapiens
tcctgtctcctcagctttacacccaaagcagccgctgcctcaggtccaagcctgagcccgcggcagaacattgggctgcctcccaggccctgacacccccagccccgaggtcctgtccaccc

SEQ ID NO: 475184 - DNA, 122 bp, Homo sapiens
cgaggccgagctgaggtccacctgcgcccgaagcctgggctggccatttcctgccgcccgcgcctttcaggacagaacacaggggcccagaggcccttctgggtcctccactggagttccct

SEQ ID NO: 475185 - DNA, 122 bp, Homo sapiens
gtgttttctagatgaggaaacttgcttggagaggtgttaagtaacttgccaccggtctcacgggaagggcaaagccagttttggagggctcttggcttttgagcacaccctttcccaccctc

SEQ ID NO: 475186 - DNA, 122 bp, Homo sapiens
gacatttttgccagatgactcccccttttcggagtacaccgatatcattgggcgagcacacgccatggcggagagaggagacagccacgctcctctcagcccggctgctgccacaggaaaag

SEQ ID NO: 475187 - DNA, 122 bp, Homo sapiens
gaccctgaggctttgtcatgctgcagtctctgctgtcaagagacacagaggaagaaatcccggtcctgccggctgtggagggacagtggtagcagcttttaaaatcctctccctggcgctgg

SEQ ID NO: 475188 - DNA, 122 bp, Homo sapiens
cgccgcctgcactgaaaggtctgtacctgagcctggatacttgaacagaggcagacactgcggctcaaaaccccaagggtaggtacctattgtgcggagtctcggaacgcctgcctggaaga

SEQ ID NO: 475189 - DNA, 122 bp, Homo sapiens
cttccgcgacgccaggccaggcgcagggcaggggagaagatggggggcgccctggattcgcggttccagctgcaggcagttacctggggtagtgagtgctctctacagacccgggctacccc

SEQ ID NO: 475190 - DNA, 122 bp, Homo sapiens
gagagcaggctgctgggccaggcgctgacagctcgccccatggagccgccacctggactccgggaggcgccaaggcttcagcccccacgtgctcttaacatcatccgtgcaaatatcatcac

SEQ ID NO: 475191 - DNA, 122 bp, Homo sapiens
tcctcagagctcaccttgccagagccccgcttgggcgcacccctgtcaccgccaaagaagcgcccgatggagtcaaggatgcccgtgtctctgtgccttgggaggaagccatgcctggcatg

SEQ ID NO: 475192 - DNA, 122 bp, Homo sapiens
aaggagggagctgaggctcacaaagaagcgaggccctggtatctgatcagttcgtggagacgtgggagagcctgcttgtcatctggaacagtttagcagcctcggcctccctgtctctccca

SEQ ID NO: 475193 - DNA, 122 bp, Homo sapiens
ctggtcttctacggataggggcttctctgaggcacagattggggaacagtcttcaggctacgcccggtgcttcaccctttcactgttgggtttgtgccccgcttctgtaaacagcagggtct

SEQ ID NO: 475194 - DNA, 122 bp, Homo sapiens
acgtgggctccttcacctgtctgtctgcctgcttcccctcccataaggggtttgagcaaccgcgaggacctaacagacgatccacacccgtgtcatacgtcctgagacggggatcagggaac

SEQ ID NO: 475195 - DNA, 122 bp, Homo sapiens
atactgaggggcacttggcaggtttgtgagcaacacccgggacacggcattgagtgccagcgctgagcaggggctgcccggtgtctcccgggtgcgcgcctcggggctggaggtccgtcccc

SEQ ID NO: 475196 - DNA, 122 bp, Homo sapiens
ccgcgccccacgcgggtcccagcgcccctccgcgccgcactcccctcccccggacggttccgcccggcagccccctccaagcctggggcgcactcagcgctgccctccgctggcgggggcgg

SEQ ID NO: 475197 - DNA, 122 bp, Homo sapiens
aatagaaaaaaaaaaaaaaaagaattagaaggggaaggaaagagaagcaccttaactcttcgccggcagagatcttgttacacagcagcatcgccccacagggcagaggcctctgcagccat

SEQ ID NO: 475198 - DNA, 122 bp, Homo sapiens
cgtgaataagaatcttctgacgctgcctgggaacctgctggcttcttggcgggatacagacgcaggcacgggttgcagaggtgactactgccaggcacttgttcacaggcaactggaattac

SEQ ID NO: 475199 - DNA, 122 bp, Homo sapiens
ggcacagccgccttttatttttctggctgagccaatcacaagaggaggcggactctgttacgcccaatccctgaggtgggattccctccagcagccaatggatctgaggatctgagtcagcg

SEQ ID NO: 475200 - DNA, 122 bp, Homo sapiens
acaaagatgaactgagggatgaagccatcagttattgctcccatacctaaaacagtcaagcgaattactaccaaatatttgaagtggcttaataaatatcaatactgaaattaaaagtgtct

SEQ ID NO: 475201 - DNA, 122 bp, Homo sapiens
ggaggggcgggcggcgccgcgtgaggcccggcggattgggccggctgccgtccatctggccgtgagagcccttcgattggctcatctcgccaagggaggcgggcatcccttccggcctcggg

SEQ ID NO: 475202 - DNA, 122 bp, Homo sapiens
ttcaaggtcagcacccccagctcctgccagttatgaccttgcagttctcctccgaggctgcgtccatcttcacgcagccattttagcagctgtggccaggcacatggacagtcctgtgagcc

SEQ ID NO: 475203 - DNA, 122 bp, Homo sapiens
gcagtggctctcagtgggtcccggtgctggcgggagcgtggggggagcaggctctgtctgcgtgcgtcttttaggggtcctagggctgactccacctgagaaccccgtccggggctgtgtta

SEQ ID NO: 475204 - DNA, 122 bp, Homo sapiens
ttccaggtgccgtccatcacccctttctttgactcagaaagggaactccctgaccccttgcgcttccgaagtgaggcaatgcctcgccctgcttcggcttttgcacggtgcgctgcacccac

SEQ ID NO: 475205 - DNA, 122 bp, Homo sapiens
tcctccacacgtgggctggtagaaagacagctgcagcaggcatgtgcctcacctctccagcggcacccagagccgggagaggcactgcctcctgcagcctgctccagagcgaagaaagcatt

SEQ ID NO: 475206 - DNA, 122 bp, Homo sapiens
acaggggccttagggggaagcggggcactcccggtccagggctgggggcgggaatggcggcgccccggccgcttcagtgacgctcccgctttctctgccccttaggagaatggccacgtgaa

SEQ ID NO: 475207 - DNA, 122 bp, Homo sapiens
acgcccagctaagttttggtatttttagtacccaaagttgatgagtcgacctgctccacgcgtaatttcaaggtggtcacgttggggtcaccccttgcagcttgtagctgctgtgaacgcca

SEQ ID NO: 475208 - DNA, 122 bp, Homo sapiens
tttgcagttccactgctgtatggcctgggaaaattcacctagcccctctgagctttagtacgtgtgttggttatggggcatacacttctgcctacttttctaggtccgtgtgagattataca

SEQ ID NO: 475209 - DNA, 122 bp, Homo sapiens
cagaagttgagtttttgttggtgacactgacaagctttgtttccctccctgtgctccacacgggctctggtcctctaacacaatcttcctgggtcccgtgctctgcagggccaggtcagatg

SEQ ID NO: 475210 - DNA, 122 bp, Homo sapiens
gggcgcgcaggcacgcgcactcgcgggtgcgcgcgcggacggccgggcggcggcggctcccggaggtggtggcttcactttccaggactcaggggcagccacagcgacagccgcgggcagca

SEQ ID NO: 475211 - DNA, 122 bp, Homo sapiens
tgggggcaagggagacttggctgtgaggcaggaggggcaggtaggctgtggtgccagagacgttttctacgaggtccgtatcccagggagaagcaatggtgtgggcttcagagtggcatggc

SEQ ID NO: 475212 - DNA, 122 bp, Homo sapiens
gcgcgcggccgccagacaatgcctgcctagagggacgggccagtggcgggcagcagcgaccggctttcagaaagccccgccggctctggggtatattcccagggcaggcggataagaacctg

SEQ ID NO: 475213 - DNA, 122 bp, Homo sapiens
ggaaagataagccagtttttcctgactcctcatatctatattatcataccactaggaaatcgtgtcacctctcatggtgttctgtcccgtctggtaaaggtgaccaaacacttgagaagccc

SEQ ID NO: 475214 - DNA, 122 bp, Homo sapiens
acaatccctatcaaaatcccagcagggattttatagaaaattgacaaaataggccgggcgcggtggctcatgccggtaatcccagcactttgggaggctgaggcgggcggatcatgagatca

SEQ ID NO: 475215 - DNA, 122 bp, Homo sapiens
caggtcctccctttcgcgagccgggaagctacagagtaacaacccgagagagtgacaacccggacgcgacgagacggacccagagccgcgccagggccacaggctccgccccgcgcagcctc

SEQ ID NO: 475216 - DNA, 122 bp, Homo sapiens
aaagcacaggaatctcactctgttaaagctggtctgttctaactgaggtaactaaagtcgcgtctctccttagtctacatgagataggaaatggtctttctgagggactcccaaagggtata

SEQ ID NO: 475217 - DNA, 122 bp, Homo sapiens
tttccctattcccaagccactccctggcaaagattttccctagggtattgggtgccctctcgcagatgacttgggaaccatttagtgtatttagactgtaatgatcccttgttacccacaag

SEQ ID NO: 475218 - DNA, 122 bp, Homo sapiens
ccagggaaacctcctcacagttttcatccagccacgggccagcatgtctgggggcaaatacgtagactcggaggtaggcatccgtgggggggcgccggctcgggcgtgcggggagtgtccgc

SEQ ID NO: 475219 - DNA, 122 bp, Homo sapiens
ttgatggttttttttttcttttttgccaaattgactgtcacgcggcagcttcagggagctcgcattctcttgtgttcgtgttgccctcgtgcccatcaagtgcagtcgggacctcccaggac

SEQ ID NO: 475220 - DNA, 122 bp, Homo sapiens
aaaagcgactccaggcctggagggagggcgtccattcccagcttgatcaccaaaggaaaacgaggcctgaattccgcaagctctttactgcggacctaagaacactgcacccctctccaccc

SEQ ID NO: 475221 - DNA, 122 bp, Homo sapiens
acactcagcgtcctcacgcctaggccctcatcccttagtgcttgtccaggccgcacaggccgcacttcccgcccttggctcgcggaccttcaaagactgcgacccactgtcgactacgctcc

SEQ ID NO: 475222 - DNA, 122 bp, Homo sapiens
gaccatgtgattgtgaccgtgtcgctaggtgtgctaaagaggcagtacaccagtttcttccggccaggcctgcccacagagaaggtggctgccatccaccgcctgggcattggcaccaccga

SEQ ID NO: 475223 - DNA, 122 bp, Homo sapiens
tacctgatgcactgcttccagctgatgctcactgccaagccaaacacaaactcctggggccgcgggtcccagagccctttaaagtcaattgccttcccgcggtggctcatgcctggaacccc

SEQ ID NO: 475224 - DNA, 122 bp, Homo sapiens
aaaactcccaggcatggtgggaaaccctgggtaatttcacgttcagcactcaccaaaggtcgtgcctgcttcgggcctgctcaccgaggacacgatgacgaagccgaagccctcgttctccc

SEQ ID NO: 475225 - DNA, 122 bp, Homo sapiens
ggtgggaggaggctgcggcgctagatgcggacacctggaccgccgcgccgaggctcccggcgctcgctgctcccgcggcccgcgccatgccctcctacacggtcaccgtggccactggcagc

SEQ ID NO: 475226 - DNA, 122 bp, Homo sapiens
gctctgtttggaattagaaaagttgctactctcagtgtctggtataacccagtttccccacgtgatcttctaccaagtcaagcatcctctgggcatctgccaggctcgtcagccaggctcct

SEQ ID NO: 475227 - DNA, 122 bp, Homo sapiens
gccggggatcgacaagctgcccatcgaggagacgctggaggacagcccgcaggtgaggcgcgggagctggtgggcgacgagggagagcccagctggccgaccccaggtctggcgcctccgcg

SEQ ID NO: 475228 - DNA, 122 bp, Homo sapiens
tcattctcctttcttctgtacaggccccatcgtcaccttcctcgcccatagctaaggacccgaggtatgagaagcgctggctggacaccttgtccgtgcctctgtccatggctcgcatctca

SEQ ID NO: 475229 - DNA, 122 bp, Homo sapiens
tcataacccatagtttacaagaatttagtgtattgtgtagttaacggctgactgcctgtgcggtccagtatttttatggtcctgagaaaagcataggtttctctgtgaagcagttgtggaaa

SEQ ID NO: 475230 - DNA, 122 bp, Homo sapiens
ccggctccctcagcttgcagggaagtgtgaacggagagcaggaaccggagctgcacgcggcgcttgcgggccagctggagttccgggttggcgtgggcttggcgggccccgcactcggagca

SEQ ID NO: 475231 - DNA, 122 bp, Homo sapiens
agcgggagcggccggaggagccatggactgcagcctcgtgcggacgctcgtgcacagatacgtgagtgctcccggcgcgggctgggggacccggggaccagacagacgcgggccggccccgc

SEQ ID NO: 475232 - DNA, 122 bp, Homo sapiens
catggttggttgcttaaggcagacacgggcagaggcggccctgcagaggacagctcgtggcgtctgtctggcacggtttggctatacttggtcagctcttcttttcacacacaaaaactttc

SEQ ID NO: 475233 - DNA, 122 bp, Homo sapiens
ccattataaaaatgaaccaacctccacttgggtggtatttgagagaaaggaagtagctgccgcctggtctctgggtcagactgttgctccccaagggctttatcaaatgagcaaaccaaaca

SEQ ID NO: 475234 - DNA, 122 bp, Homo sapiens
taatgagctcaggaggctaaggagaaactcgctgtaacctacattgccggcagctctcatcggaggatgtgtttccagagagctggtctatttcagactgacaggccactgcctcgcatcac

SEQ ID NO: 475235 - DNA, 122 bp, Homo sapiens
tggggttccctggccattcctctgtgatgggggcctttccttcttggcttcctggatggccgccactaagattttcgcatgtcttttggatgccttatcggcggccttttcagttgcctgag

SEQ ID NO: 475236 - DNA, 122 bp, Homo sapiens
gagtgtacttgggcaagtcacagtctccttgtagctcagtggtgtcagggaaatggtgaccgtagacctatctgctgtcccttccttttctatcactgtgaaactcaaaccagggaatcacg

SEQ ID NO: 475237 - DNA, 122 bp, Homo sapiens
tcttgttctccagttgcccctcgccatggcctgcagagtctcgggaaagttgccattgcccggcgtatgccacctccagccaaccttccaagcctgaaagccgagaacaaaggcaatgaccc

SEQ ID NO: 475238 - DNA, 122 bp, Homo sapiens
gaggtgctttcagttgggtcatttggtagcgtttaggcttagaagttactaatttggagccgtgagtatatgtgtataagctagtaacacgtgatggtcaagggaagtactaccatttcctg

SEQ ID NO: 475239 - DNA, 122 bp, Homo sapiens
gcaaaggactcacttaagctgtgctcagactctcacccatagaaactatgagataataaacgtgtgctattttggaccactgagtatgtggtcatattgttatgcaggaaaatttaattcca

SEQ ID NO: 475240 - DNA, 122 bp, Homo sapiens
gaacccttggagccacttaccaaacaccaagctcatcatgaccagcactattaagaggaccgtgtagagggcttgggggctgctgtggaagcacaggggacccagactctggctccctgcag

SEQ ID NO: 475241 - DNA, 122 bp, Homo sapiens
attcgaaggaaataaggagggctgaacgcagtcgacgggtggccagttgctgggccagttcgcagtcctgactgtcccttgattagtcttagaggcccaaaggcctgaagttgggcggggag

SEQ ID NO: 475242 - DNA, 122 bp, Homo sapiens
ttcagcatctggctggtgtttgcaggatcctcgtctttgctgtcggcatcgtgtgagctgcggcagtgcacggcagccgaggaacccaaagaaggggccagatgtggctgcgggtcccactc

SEQ ID NO: 475243 - DNA, 122 bp, Homo sapiens
agtcttctgcgggcgccggggctcagcgggcgcccccaagtccgcgggaacctgcggatgcgtacatccagcccttcagcaagcagggaccgctgtgcctcccggccctgagggagaccccg

SEQ ID NO: 475244 - DNA, 122 bp, Homo sapiens
aatgtatggcacaattttattttctctgtcttgctgaaaccacagactgctttcttctggcgacaatggcctatgaccgctatgtggccatatgccacccactgcagtaccacaccatgatg

SEQ ID NO: 475245 - DNA, 122 bp, Homo sapiens
tgccccggtaactgcctccccaacacctgcctgccttccactgcgaaacctgctctcggacgccctgaccataccgcacacaatactgcaagcctgtgtgggcctgggggtgggatggaccc

SEQ ID NO: 475246 - DNA, 122 bp, Homo sapiens
cctcatccctgagctatgatggtctttccctccttagttgggagccccatcacgttcctccgaagctctagttgtgtgataaggagggtggaatctgagacagagaacgatggccctccaag

SEQ ID NO: 475247 - DNA, 122 bp, Homo sapiens
tggtccgcgccctggggaggctaattgcacacgaacgcccccctcttccccgccccccaccgtaccctctgcagcgccacccgcgtcgcctctccgccgtgcgccaccctgagggctcccgc

SEQ ID NO: 475248 - DNA, 122 bp, Homo sapiens
cgtgctgccggctgcaattactccagaggtggctgcatgtcagggaagcgctagaggatgcgaatgcacaggaaacaagggttgctaacagcacccaggctgtgccatccaatccctcccga

SEQ ID NO: 475249 - DNA, 122 bp, Homo sapiens
gacgagatctatttcctaacatttaaacggaaaatgacacgcagcggtcctttccttgagcgtctgcgtctaaactgcccacagacctcccccgcagtatatccctttggagtgccccgggg

SEQ ID NO: 475250 - DNA, 122 bp, Homo sapiens
ggctgccagggctcaggcccggctgcatctccaactcctcctcgggctcgttctcggcctcgtcctcccaggccgtctcgcccgtcagcgggttgtagaagaacaccctgcggctctcctca

SEQ ID NO: 475251 - DNA, 122 bp, Homo sapiens
agttccgggttggtttcctccagacccatgcgctccgcctacggaggcccacgtgggctccggtccacatggttaacacgcacgcaagcccgtgttgggagcaaactgcttctctgaaagtc

SEQ ID NO: 475252 - DNA, 122 bp, Homo sapiens
tgttctgtttccctcctttgtaagtaagacttagctcttcagatgaacatctctgcctgtcggcatattgtaaggaaggcactctggtgccatgatcactgtatatttttacactttccaac

SEQ ID NO: 475253 - DNA, 122 bp, Homo sapiens
agtttcaggaaatgatggacccagccttccttaaaaagaggagtcagatacctccttgcacgcatgtgcacacatgtgtgtacacacatgcagacacacacacaatagagattgtctaaagg

SEQ ID NO: 475254 - DNA, 122 bp, Homo sapiens
aaggtggaagtggggccggggcagggtcgggctgggcagggcagcagcctgggttcctcccggctcgactgcggagcgcgactcgcgcgtcggtcccttcttcccacgagggggtatcatgg

SEQ ID NO: 475255 - DNA, 122 bp, Homo sapiens
tcttcctcctaatggtaagtgtttattaaccataatgactaataaagaggttctggcctccgtcacctgagaagaacaaaacagtggggtttttctgcagctcggctggatcccagcttcta

SEQ ID NO: 475256 - DNA, 122 bp, Homo sapiens
ttttaaaaatattcagcccttcaagacttcttctctcagcaaggggtcctctgccgtgcccgtcgaagtcagaggtccaggagagctgcccttcactggagaagggggaaagggaatggttc

SEQ ID NO: 475257 - DNA, 122 bp, Homo sapiens
tcaccacacccgcggcggcggctgctgccgaggtttcctgggggtcactgccagctgcgccgcatgctcccataaatacaggggctgtccagcttctgggaatctcgctctaattaggagcc

SEQ ID NO: 475258 - DNA, 122 bp, Homo sapiens
agaccagaggcaccatcctcagagcccccggtctgcctgggactgggagcatggctgtggcgcccaatgagaacatagtgtccatagtgaccatgattcttcaagtggtgtctgaatttccc

SEQ ID NO: 475259 - DNA, 122 bp, Homo sapiens
tgatgtgcagttgtcacaggaaaccgtgaaggagctggtgtgagcactgctgagctgggccgggtctctgcagaggcagaaacgagagatgaacaaacagaaccgaccactcctttcggacc

SEQ ID NO: 475260 - DNA, 122 bp, Homo sapiens
atcctaaaggcttgggacttctggggaagtggcggcttttagcccctgcgggagccgagccgggccgggggaggagggatggtgctgtttctgggatgagtgcgagttgggggccgagggaa

SEQ ID NO: 475261 - DNA, 122 bp, Homo sapiens
ttgtattttggctccctgccagccctggggatactgcttttgcaaagcagtctgctacatcggctcatatcccctaaagaacttagggttccacttcccaagagtttgtaattttcctgagg

SEQ ID NO: 475262 - DNA, 122 bp, Homo sapiens
ctgacaacgtttacttatataatctagcccaataacaaactcaactgatcatatgtgatacgtacattttattgaacactttttttgatgccaggtaataggtaatactgagcacttcatat

SEQ ID NO: 475263 - DNA, 122 bp, Homo sapiens
gcgggatgccctctcccttcctgcttctaggtaggggctgagccgagcatcccttctaagcgcggagcttctgtgatggctgcacgcagcctcttctgcttctggcccggccacacccgcat

SEQ ID NO: 475264 - DNA, 122 bp, Homo sapiens
gtgtacacacacacacacacacacacacgcacacgcaccccttccgccaatgggagccggcgggtgtccctgcgcctatccccggagagatctaatctatggcacgcgcgagctgggggcgg

SEQ ID NO: 475265 - DNA, 122 bp, Homo sapiens
ccttccctgggagccaagaagctggggccccttctttctaacctgccaatggaaccctcgcgttcccccagactcatattccaggaagggctcctgaggtgaggagacccagcaagggggaa

SEQ ID NO: 475266 - DNA, 122 bp, Homo sapiens
tttatgccccagccaggtcccctgtcccaggaccgcggttgacagggtttggattggctgcgttcctgtctgaaggcagctgcttgggaggaggacagctgacattctttcatgcgaaatct

SEQ ID NO: 475267 - DNA, 122 bp, Homo sapiens
cggcgggagacagacttcaaggagcgaggcaagactaacggaagtgggtggggctccaggcgacaggaggaacttggggcacaatctctgcctggggaaagcatctccttgaatgaaaatca

SEQ ID NO: 475268 - DNA, 122 bp, Homo sapiens
gaacatttttcgtttttgaacagaaagacttgtctgtaggaacgacagctcaggcagccacgtgggctgcggactgtgtttgtggactacatctcccaaagtgctccgcaggcgcgcccaca

SEQ ID NO: 475269 - DNA, 122 bp, Homo sapiens
cgctcacaccgtgcccaggagcgagcgaggacgtcgagtaaccgtggtcgccaggctgggcgggggcgtccacctcgctgctacctgggcccaccttggggtttttccctcccgtccatccg

SEQ ID NO: 475270 - DNA, 122 bp, Homo sapiens
gaaggatggacgcagccccaacaaatcagacaagtaccacatccggtggcccatgagtggcgctcatgatcttcagcaggcggcaccaggccctggcggggcgcaccagggtcaccccaacc

SEQ ID NO: 475271 - DNA, 122 bp, Homo sapiens
taacatctgtgctgatttttttttcagttgtattgtttaatggacattataaactcagggcggtttctattctctgagaataatgatctctcctggccaggtttgttcctcttttgtattta

SEQ ID NO: 475272 - DNA, 122 bp, Homo sapiens
aggaagtgcgcgtcatccacggaggtgaagccaccattgtcgggcttattcttgatatagcgcctcacggcctcccggcccagccagcccacagtgagctgcgcgtcctggcagggcactgc

SEQ ID NO: 475273 - DNA, 122 bp, Homo sapiens
gttttaacccgaagatcgctatcttatttatgctttaaaaagacctctctggcctttctgcgaagctctatccttagctttctcttgttagcattttgattaacgaatgtgggcacgaacag

SEQ ID NO: 475274 - DNA, 122 bp, Homo sapiens
gccccagaagctgagtcatccgggatgactggtggccctgaagtcccgcccacagaaggacggccatgggagcctggcacactgccccttggtggcacaaatcctgagcaagccatgcccta

SEQ ID NO: 475275 - DNA, 122 bp, Homo sapiens
taacactcaccacgaaggtctgcagcttcactcctgaagccactaagaccacgagcccaccgggaggaatgaacaactccggccgcgctgccttaagagctataacactcaccgcgaaggtc

SEQ ID NO: 475276 - DNA, 122 bp, Homo sapiens
gggagcgggtgcgaggtagggagcagctgccgaagccgagttagtggtgtgcagagattccgtaagagcaggactggaaaagagtcatggatgattccaggtcccttagatcatcagctaca

SEQ ID NO: 475277 - DNA, 122 bp, Homo sapiens
gggggcctccaggaactggatgacgctgacgcggctcggcggggcatcgctccaggtctccgagaggctcccctgctgcccagcatcctctgcagcaggtgagcgtcaggacccaggctagt

SEQ ID NO: 475278 - DNA, 122 bp, Homo sapiens
ggtcaaccagctttcccaccatgctagaatccctggcaggagacctgtccttgcattaaccgacaggcagcagcatgactgcctgaagagggaaatctgtggggacaggcagtgacaaatgg

SEQ ID NO: 475279 - DNA, 122 bp, Homo sapiens
tccagtaattttcatttgagtgagaaggcgagcgccggacagcggcagggactcgccacccgcagccgtggagccgggccatgagcgcctgtgcggcgctgggtcgctgtccagcagatgtc

SEQ ID NO: 475280 - DNA, 122 bp, Homo sapiens
gaactcctattaatctttaaaaatgcagtccagtgagatcgaccacgaactctttcttgacgctccaattaccattccttccattatgtctgtaagtctccgtaggtgcttctataactgtt

SEQ ID NO: 475281 - DNA, 122 bp, Homo sapiens
cgtattcccttcttggtggaggcctactctagaagaatcaaaaaccgatgaccctctcagcgaatccgatgttaaagctcctaactaggtgaccctttagcactacagacgtaaaaatgact

SEQ ID NO: 475282 - DNA, 122 bp, Homo sapiens
acttggatgccgcttctgcccttcccaacagcgccctgtcttgtcattgcaagtagaatccgggcagccgctttcctctggataaactcaccttttcccttcccacacctctgccgttgtcc

SEQ ID NO: 475283 - DNA, 122 bp, Homo sapiens
catctcccatctgttgctttctctcaggtctccttcttatgcatgggtatttcagatgttcgccaagaatttgagtggggttcatattcagattttgggtttcctccctctgcagctccctc

SEQ ID NO: 475284 - DNA, 122 bp, Homo sapiens
ggggagcagggggggagagtggacagcgaggcggtggatgttgaggcagttgtgcgtccacggcggggcctgcctccgtggcagcgctcccagcaccctgtgcgtcccttgcacccttgccc

SEQ ID NO: 475285 - DNA, 122 bp, Homo sapiens
cgccgagttttctggacaggatgggctagagatcactcaccgattccatagtgaatctctcgacgaaaaactggagagcctggaggctgaagatctcatgtctcagccgtcacatcagaaaa

SEQ ID NO: 475286 - DNA, 122 bp, Homo sapiens
gctccgggttttgcctggagccggatggggccaggacgcaggcgaggacggtgaagaccgcggacagccgaggcctgagcaggcggactggagggacaggggtttggccggggcgctttagg

SEQ ID NO: 475287 - DNA, 122 bp, Homo sapiens
acatacccactcacaacacatttacatatatgtttatgtttctccctttaatgggattcacgttattttttaatttttttttttactttaatagctttagaagtataagtggtttttggtta

SEQ ID NO: 475288 - DNA, 122 bp, Homo sapiens
gggaggcgcgcgggagccggtggggcgccgaggggggaaagttgcgcccttcggccggcccggagcctgatttcgcatttggaggatgtgatgtcacccgaagcccccgccgaggagagtca

SEQ ID NO: 475289 - DNA, 122 bp, Homo sapiens
catcgcaggcgccgcctcaggtccccacccgcttccccccgggtttgcggacggagctggcgcctctgaaggcggaggcgagggccccgctccttgaccgttcttgctcctccgcgggagcc

SEQ ID NO: 475290 - DNA, 122 bp, Homo sapiens
ccagcgaagctctctgaccacccctcttttctagagttctgcctcgcttcccggcgcggtcgcagccctcagcccacttaggataatggcgacagctgagggtgagtaacagggatccgggc

SEQ ID NO: 475291 - DNA, 122 bp, Homo sapiens
cgggaagagtgtgagcccaattagattacaagccctagagcaaaggggatcacaaacctccgggtttgctaatctgctggtgcggagttcagatctccgaagcctccctggagtatttctag

SEQ ID NO: 475292 - DNA, 122 bp, Homo sapiens
tgagagcagtcaggaaggagatgcttcagctgggtcacagctcggtgcagccaggggcagcggggtggagtcagcgacagaccagagaaggatcaagtacgaatccagggtttgagtcctga

SEQ ID NO: 475293 - DNA, 122 bp, Homo sapiens
aggccctgcgagagggcgttccctggggagaacattccagagcaaggtaacatccataaacggaggctgaaacggcctgagacgtcccgggagtaacgaagaccccaaggcggccccaactt

SEQ ID NO: 475294 - DNA, 122 bp, Homo sapiens
ggagtggacagtgtctgcggccagctctgggatccagggccagctgatgctgggaacagccgtccttgccctgtgcctctccacactgcgagagcccctgcagcccagaggggctccacctc

SEQ ID NO: 475295 - DNA, 122 bp, Homo sapiens
tcttcaaagtgcagatctttacgatcgtgatggtctcagcggaaatgcatccttccctatcgcaggtatcgctccgactcccatcacactgacctccattgaattcagggatctgcacctga

SEQ ID NO: 475296 - DNA, 122 bp, Homo sapiens
tctgtgcacggctggccagaggcggccagtgtgtgcgctgctggcccacatgaatccatgcgtgtgtgcatgtgtgtgtgtgtgtgtgtgtgtgtgcgtgcgcgtgcatgttcctggggtga

SEQ ID NO: 475297 - DNA, 122 bp, Homo sapiens
aacctacagaaacagatttgccagggcaggggtatggacactgtgttttaaagcctcacacgtgatgctgcagcagcttagccagcatggagcaggtcagcattaagtacccactgtcttcg

SEQ ID NO: 475298 - DNA, 122 bp, Homo sapiens
ttgcgggccagcgcgagttcccggtgggcgtgggctcggcgggcccctcactcagagccgcgggacctgccagccccgagcagtgaggggcttagcacctgggccagcagctgctgtggtcg

SEQ ID NO: 475299 - DNA, 122 bp, Homo sapiens
ggcggtggcggtggcgggggcggggacggaaccaatcagctgtgaggacggggccgggggcggagccgcgcagagtttcaaatcggctgcggtgggcgaggagcagctgtgctgcggctgtg

SEQ ID NO: 475300 - DNA, 122 bp, Homo sapiens
gcctaacagccagacccacccacgccgatgcccgccggagacgccccgccgcagacacagcgcaaccagcttcacacacctggggacgccccacagaagtcacatccaccctaacacacctg

SEQ ID NO: 475301 - DNA, 122 bp, Homo sapiens
tgagggtcttcggaggagggctcatcacacaccctgcatgagccaagtatgtggtcagaccggcttcgagcccctagcattggcacccttccagccaagtcgccaacaagaggagcccctac

SEQ ID NO: 475302 - DNA, 122 bp, Homo sapiens
ttttaactttggagggcggggagaacttgggcatgttgtaaagcagataatgcagtgcgccgtcatttccctcacaggtgccgtgtgcatcactaacgcagcttctccaccacatagctcaa

SEQ ID NO: 475303 - DNA, 122 bp, Homo sapiens
ggacaggaaccagggaaatatatatttatatagatactctaatatagaccacatctcacccgcgcgctgagcccgcgcgccccactgccctccccaacacctgctcgcccggacgcccgggt

SEQ ID NO: 475304 - DNA, 122 bp, Homo sapiens
gggccaagcaggtgcaggaaaccacctgttgaatttagacccaatcaggggctgtgaaggcgagtcctgcccacagcttcgggctgatggaggccgctgccaccgcctcccacctcactgag

SEQ ID NO: 475305 - DNA, 122 bp, Homo sapiens
aaattcttgcattcattgttttcgtgaaagaattgtacatcatggaactccttgtaatgtcgacgctgggcttttctcccacctgtatgcagttgctgctgaatttcaggggatgtgatttg

SEQ ID NO: 475306 - DNA, 122 bp, Homo sapiens
gtgcaacagcgccgtggcaagccatgtggcccctgcaggcattttggctgcagcagctaccgccctgacctgtctcttgccaggactgtggagcggatagggggagtaggagtagagaaggg

SEQ ID NO: 475307 - DNA, 122 bp, Homo sapiens
agagattctcctgccttagcctcctgagtagctgggatttattacaggcgcctgccacctcgccgggctaatttttgtatttttagtagagacagggtttcaccacgttggccaggctggtc

SEQ ID NO: 475308 - DNA, 122 bp, Homo sapiens
tacccagggaagtggagctgggcttgccctggggacttggctggagctcacacccctccacgccccccaaggcctgcgcgggggccctcccctagctccctccctcctcctcctcctcctcc

SEQ ID NO: 475309 - DNA, 122 bp, Homo sapiens
cgcaccccaaacctctgccagtagagaacccgaaccgggaaatgggtgcctcaagaaggccgtggcccttgcacgtggccggcgaggcagcgcgtcctcggggcccacccccaccttgccgc

SEQ ID NO: 475310 - DNA, 122 bp, Homo sapiens
ctgtatatacttccttggttatagatagcttttctgttgagtggtggctttctcagatgccgattatagtagtaatgtagtggacatatgctcaggcgcgctatcttctgtggcgctgggag

SEQ ID NO: 475311 - DNA, 122 bp, Homo sapiens
ccgcgtgtggaacgtctgtcagcgtgtggaaggtctgtccgcgtgtggaacgtctgtcagcgtgtatgagttctgggcactgctttggctgtgagatcccagtctgcatcagggaagcaatt

SEQ ID NO: 475312 - DNA, 122 bp, Homo sapiens
gggacagtgcagagccaggaccagcccggcccatggtcccccagcgtgcaccacctggcccggcactgtgtgctcagccatgaggactgggaagagtcctgcccacagctcaagtgtctaca

SEQ ID NO: 475313 - DNA, 122 bp, Homo sapiens
tttagaagcaagcaccctcctatccgagccctttccaggggtggggacacttgaccctcccgagtctcaaactaggggcatttaaaatgcaaagatagctgtacacagttgttcaaaaatgt

SEQ ID NO: 475314 - DNA, 122 bp, Homo sapiens
cagcccaccgcctgccgacttgtgtcatgccctacgttggtataatcacatcaagtcttacgaaaaggaaaaggccaggtaaaatcatctttgtatagagctgaagaataagactgctctcg

SEQ ID NO: 475315 - DNA, 122 bp, Homo sapiens
gtgccaccagcttttgtgacactagataacctcaggccaatggcatgcccccagtggcagcgacgacccattcaaaaatctgccttatcaactttcgatggtagttgctgtgcctaccacgg

SEQ ID NO: 475316 - DNA, 122 bp, Homo sapiens
cctagggaggttttagggccagggtggtcccgggctgtggcaggggctctcagatcgcctcgggctctcagctgcaaggtgaaaaataccatgaggaattgatctgccaagggcggtcttgt

SEQ ID NO: 475317 - DNA, 122 bp, Homo sapiens
ctggcgcgcccgcagcggcgctctatttttagcaggcgctgtggcaatataaggaatgcgcggcgcgctaggcgctcggggcgcacgctggcggcgcggtcgctttaaggaggcgccggggc

SEQ ID NO: 475318 - DNA, 122 bp, Homo sapiens
ggcttgtaccgagctctgattggcttcctattctgattttttttttcctttccccgccctcgttagtttgtccaaccggtgggacataatctgccccattcccccggatgagccccggggag

SEQ ID NO: 475319 - DNA, 122 bp, Homo sapiens
gcggaggccggatgcgggacaggggcggtttgggaagcacccgggaccgccctgctggaccgccccactcacccttcgctctaccggcggcggcgggaacccacccccgggagcgagaacaa

SEQ ID NO: 475320 - DNA, 122 bp, Homo sapiens
tacacctgcgccttgcccagcctgggtctcgcctgcaccaccacgtaggcctgcccaaggcggccctgcttagctcagcctggtgccgctgtgctcagcgcagagagcagaaatcagaaatg

SEQ ID NO: 475321 - DNA, 122 bp, Homo sapiens
gaaaattattcctaatattcggaaatatttatgaataaaacaaattcctcaaaagttttccgtgtgttagtaaaagatagcataatagcaggatatagaatttcataaatttaacctttatc

SEQ ID NO: 475322 - DNA, 122 bp, Homo sapiens
cctggcccttgcgggtcctcggtactacacgccggccccaagtcagccgcggccccggcccgccctgtgggggctgaaccccagccccggcccgatccctcacggtgcagccagcccttggg

SEQ ID NO: 475323 - DNA, 122 bp, Homo sapiens
ttcaggcagacagcatacgcagtttggaagaaagcaaagtgctttgcaagtgaaggggagcggaacatgccaccttaaaatctgtcactttggcataaggattaagtggagctgccggcaat

SEQ ID NO: 475324 - DNA, 122 bp, Homo sapiens
cgtgtgcaacggcgcacggtgagccccagcgtctgcagccccagcgagtggcgagccaggcgcatcacgtagaggatgcgcagcgctcgcagcacacgcaggaccagccccaccttctccag

SEQ ID NO: 475325 - DNA, 122 bp, Homo sapiens
tcacgagacaggatgatggtcactattctcacgatgtgcgttttctagatggagagaggccgtgtccatagggaaagtcccctgacttcccgctgcgtgtttccccatccggggtcatttcc

SEQ ID NO: 475326 - DNA, 122 bp, Homo sapiens
caatggtcagcctggtaggatggctccctgtgaggaagggggtacgactggggttgccagcgccccctgaggctggatggatttaactcagagtcagggttagggagccctgccctccaggc

SEQ ID NO: 475327 - DNA, 122 bp, Homo sapiens
gggcacctgcagcggggctggtgcgagtgttgtcccgggaaatgccggaatgagacgagacgatgaaaaccttaagtgtggaactgcgtctcaggccagtgttctggctgagtcacccctag

SEQ ID NO: 475328 - DNA, 122 bp, Homo sapiens
acccagcctctcccgtgtttatctgtatctatctgtcatctacccccaccttacacccagcgtccgtccatgcacacacgctcacctcgcacccagagtccgtccgtgcacacactcacctt

SEQ ID NO: 475329 - DNA, 122 bp, Homo sapiens
caaacactgcagcaagttgcagcaaggcgggcaaataccgacagcgcgcgtgggggcgggcggcgggcgccgcggggcccaccccctccccggtctccccgcgccctcgccgcctcccgcgc

SEQ ID NO: 475330 - DNA, 122 bp, Homo sapiens
cagcctgaggccagccctgggggatggcttttcacctgcctgccagaggccttgtatccacgctttgattcttttttttttttttttttttttttttgagatggagtctcactctgtcacca

SEQ ID NO: 475331 - DNA, 122 bp, Homo sapiens
cgcgtcgccgccgctggtctccgtctccgccgagtggcgcaggcggcgctgcagcggctgcgagcagagggaccccagagctgccgagagctccctctgcaaggctggctgagctgctcgca

SEQ ID NO: 475332 - DNA, 122 bp, Homo sapiens
gctcccggcgcccccgtcccgcggacgccctccaagccggccacgtggcctccgtcgccccgcctctctgcgctcgccccaagtgccgcacttggcccacggcccctaagcccgcgctggcg

SEQ ID NO: 475333 - DNA, 122 bp, Homo sapiens
ccattcaagatgacacagagtcccaggctttgggaatgggctgggtaattgctgaaaggccgaaggaacaaggagaaattgtgcaagtggagttttctttgggagccttaagaactgaaagc

SEQ ID NO: 475334 - DNA, 122 bp, Homo sapiens
tgagaagttgttctttccttgtattaccatatggtttttctcttaacagttcctcactgccgcctggcgctctctgttctgctgcttgtgtgagacaatttccttgggggttttcttggctc

SEQ ID NO: 475335 - DNA, 122 bp, Homo sapiens
agtaaaagtttggagaatatctcatggcctgaccctccatatttggcagcatgcacagggcgcgggctattaattaagcagaaatgattgactgggggctgcttgttcagagttccagcaaa

SEQ ID NO: 475336 - DNA, 122 bp, Homo sapiens
gcccgggcgtcctcatctgtgagatgggcctgctggggcttccccacgctggaagacagacgacacccaggcctcccgtcctacctcccacccagaccagcttcacactgtcacacgttgtg

SEQ ID NO: 475337 - DNA, 122 bp, Homo sapiens
ctccttccccagatgaactccgcgtaacgtggctgagtgcagcgaccccatctcctcccccgaacaggtgaacgcatccccctgccctgggctggctggcaaccaaacacgtagtaactctg

SEQ ID NO: 475338 - DNA, 122 bp, Homo sapiens
tgccagacatcgtccgcatggtccaacttgcctttggcacgtatctggaaaaatctcctgcgctgttcgtttattgcactgactggtcaaaggaaagagtgttcccttagtcaccttgacaa

SEQ ID NO: 475339 - DNA, 122 bp, Homo sapiens
cccgcggggctgcgcagcccactcggccatcctggcctgaaggggccgcccccggcctcgcgggaaagcctgagcctcccgggccttctcgggccttctcggactttcccccaggcgtcctg

SEQ ID NO: 475340 - DNA, 122 bp, Homo sapiens
aacccgcttatccctctgccctaagaacccccgatcatggtttcccacggaactgccacacggagtccccactaaacttctattaaggagccccccaccgtggctcaccatagaactcccag

SEQ ID NO: 475341 - DNA, 122 bp, Homo sapiens
tttatacattcattcattcaacattctgagtgcctactatgttccaggacctgaacacaccgctagagacacagggatgaacaaaacacaatccctacccacaaaaagctccttgcctagtg

SEQ ID NO: 475342 - DNA, 122 bp, Homo sapiens
gtagataataccaacacatagagaccacacagggttgtagttagtattctatcagatcaccggggttaaagtactttgaaaactccatgcaaagtgctccacaaatattagattggtggaca

SEQ ID NO: 475343 - DNA, 122 bp, Homo sapiens
aaaaggtgcagaagacggaaaactttgttccttctcccacatcttacagatgggcaccgacggcacttcccgacattgcctccctcactgtttctgtagagttgacatcctatatgaaatac

SEQ ID NO: 475344 - DNA, 122 bp, Homo sapiens
cagacggggtggtgaccgggcagaggctgtaatctccgcactctgggaggccaaggcaggcggctgggaggtggaggccatagctagccgagatcacgccactgcactccagcctgggcaac

SEQ ID NO: 475345 - DNA, 122 bp, Homo sapiens
attgggcgccggggcggagcggcctttgctctttgcgtggtcgcgggggtataacagcggcgcgcgtggctcgcagaccggggagacgggcgggcgcacagccggcgcggaggccccacagc

SEQ ID NO: 475346 - DNA, 122 bp, Homo sapiens
ctggccacatcgacctgcgtcacactcatgggcaaaaccccaagtactgcaggctgccatcgccaccaccagctagtctgtaaacagtcctcaacgcacagatctgagaaagcacttgagct

SEQ ID NO: 475347 - DNA, 122 bp, Homo sapiens
cagaagatcaggctgagactccctaactcgccagaggccagacacatcacgcaggccccgcgccgatagctctcacgaaggcagaagtctctggtccaagagcctgagctgacagggtggga

SEQ ID NO: 475348 - DNA, 122 bp, Homo sapiens
atcccagggacagctccaatcccagctacatcactctcaggttggctgctgtgctcctgccggacctgctgtctttctcttgtggatgcgctttgctgatctacaaggcagacactgggggg

SEQ ID NO: 475349 - DNA, 122 bp, Homo sapiens
tcacgcagcccggaccacaggctccttacaagaatcggaagggtccctgcaatcgcccttcgcactgaggcttcctactgtgtggtgtaaaaacacaggcttgtcctcccttgctgcccacg

SEQ ID NO: 475350 - DNA, 122 bp, Homo sapiens
tggataaatacggtattgggctttcagcaggacaatcagttaccctccggaaattgcgcgcgctctgcgctgccaccctgccctccaggactaaggaggtttgctgaccggccccccccccc

SEQ ID NO: 475351 - DNA, 122 bp, Homo sapiens
ctcactgcctgggggccagcggtgccagccggctgctccgagtgcggggcctgccaagcccgcacccacctggaactcgtgctggactgcgagtgccacgcacagccccagtttccgcccac

SEQ ID NO: 475352 - DNA, 122 bp, Homo sapiens
gcgtccgcgcccaagggccgcgcccccgaggcagccaatcacaaagaggcgctgaggtcacgtccgagagagacgctctgtcgtccccacccttaagcgcgagatgtaacgtcagcgcgcgc

SEQ ID NO: 475353 - DNA, 122 bp, Homo sapiens
agaaagttgcttgatgtgattctttgcaggtggactctgtcaagaaaagcccaaaatattcgttaccagacacgcaaccaggagatgaacacaaagcaaggatgggggaaacaaaacagagg

SEQ ID NO: 475354 - DNA, 122 bp, Homo sapiens
cgagacttgggttccccaggtccttggtggggaggtttccaggaggctcgggcgcgcccccgtccacggccccggaagctgacgtcgccgaagcgtacgccgctgcccagcctgcgctctct

SEQ ID NO: 475355 - DNA, 122 bp, Homo sapiens
gtttttcagccctcactctccccaccagagtcaagcagcaaaaatgctaggccttgtgggcggggccggggtgcccgctcttgccactggtccaatcacagcgcggcgttcctcctggccgg

SEQ ID NO: 475356 - DNA, 122 bp, Homo sapiens
ctcatggctctcctgccccagctcatctatggccttgttctgctgcccatccactttgttcgcagccctggcttcatgctcctgcctctgctcctgactattttcccaaggcggcagctgcc

SEQ ID NO: 475357 - DNA, 122 bp, Homo sapiens
tggggccgaggaggcgggggccagggtctcagccaatcgtgggccacccgtttggccaatcgcgcagggcgcggctccacgcccggccccattgaggaagcgcgtacgcgtggcgcgtggct

SEQ ID NO: 475358 - DNA, 122 bp, Homo sapiens
accatctctacaccaaattgagagactggaattataaggtgaatgcaattaactggcagtcgcatccatgttgagaacacagtcatccctttaatagagaacatttgctgtgcttgacaaac

SEQ ID NO: 475359 - DNA, 122 bp, Homo sapiens
ctagctttgcccacgaatggcatcccaacagagttaaagaaactgcttgcaggggctgggcgtggtggctcatgcctgtaatcccagcactttgggaggccgaggcgggcagatcacgaggt

SEQ ID NO: 475360 - DNA, 122 bp, Homo sapiens
cccttcggtcatgttgttccgaatatcctgtgtgggagcggatgttacgactcccaaaatcgcagtgggcggagacctcccccgtgatactgttccgaacatccaaaggtggagaggatgat

SEQ ID NO: 475361 - DNA, 122 bp, Homo sapiens
gaatcaaggtggacagcttctgagcaggagccggaaacgcgcggggccttcaaacaggcacgcctagtgagggcaggagagaggaggacgcacacacacacacacacacaaatatggtgaaa

SEQ ID NO: 475362 - DNA, 122 bp, Homo sapiens
tgtccactacctcctggcctgccacttggctgtgagtcctttctgggcggtgtccaggggcggttccagtgatcaggcaggtgctgagaagcacaggcaggtgagttaagcactggaagaag

SEQ ID NO: 475363 - DNA, 122 bp, Homo sapiens
ggaggaggggctgtggaggcgggggcaggggcgctgcgggcccgaaggttcgcagggtcgcggggggcgtctcttctccccggaggggctacggctcgccgctcgccggctctttgtgagga

SEQ ID NO: 475364 - DNA, 122 bp, Homo sapiens
ttggcctggcgcggccaggggcgaggcgctcattggccaatagggctgagtgacacgagtcggccccgagccgccctccgcgcgcccaggctccgggctctgaatcttactacccgcgggac

SEQ ID NO: 475365 - DNA, 122 bp, Homo sapiens
ctccgcggacaggccagctcagccccagcccttcctccagcagttcagcctggatcaaagcggagagcagctcagcttttatagcaaaatgattaaaaccacgtggggcttgtttcctcaca

SEQ ID NO: 475366 - DNA, 122 bp, Homo sapiens
aatcacttgaacccaggagacacaggatgccgtgctgcctggacgtggggagacaaagctcggcctgctcaccaagccacagtgtgcccccacgctgcgtgtgcctccccagctcagagaag

SEQ ID NO: 475367 - DNA, 122 bp, Homo sapiens
tgaaggctcccgtgggcaatgggaactctgtgtaggggaactcagccttgcctcctctctcgagtcagggaatgcctacattctggaccgatgaacaccttgcttattagcaagttttctcc

SEQ ID NO: 475368 - DNA, 122 bp, Homo sapiens
gccgggccgcgggagctgggccggggcctgcacaaggcggcgtctgtggagctgccgcagcgccggagccccagcccgggagccacccgcctggcccggggaggcctgggtgagggcgagta

SEQ ID NO: 475369 - DNA, 122 bp, Homo sapiens
gaagaaaagacgttttgaaatgaccactgcgaccttcgcctgagggttcagaggttgacccgaggagaatccctcccacttagttggtatacttttttttattctggctgttatctcgtttt

SEQ ID NO: 475370 - DNA, 122 bp, Homo sapiens
tcttaaagttatttaaaattgtatttaatgttttgttctctgtgtttcatctctttctcccgacccacacgtttataagtgaatggtggtaaaattcccaactcttcatttggcctcctctg

SEQ ID NO: 475371 - DNA, 122 bp, Homo sapiens
tgtcttttgcggcggtgggtcgccgccgggagaagcgtgaggggacagatttgtgaccggcgcggtttttgtcagcttactccggccaaaaaagaactgcacctctggagcgggttagtggt

SEQ ID NO: 475372 - DNA, 122 bp, Homo sapiens
aggcactgtgaggttggtctgaagttctgagacggagccttcagcagacttagcagcctccgaggatagctgaccttggcttactggcagttttgggtatttctgtttggaacatcagtcct

SEQ ID NO: 475373 - DNA, 122 bp, Homo sapiens
ctgctcccagccgcattggttcccccgtggggtgagcctggcaggacagggccagcccagcgcccagagacaaagtgaggagaccgtgtttccgccagagccacagggcagctccccgcaga

SEQ ID NO: 475374 - DNA, 122 bp, Homo sapiens
gagggccttggaggacctgcaggcagtgccccgcccacccagatttgggtgactttctggcgagtccggtgggccagactgcgcccccattggccgaggggaggtgggcggggcgtccctac

SEQ ID NO: 475375 - DNA, 122 bp, Homo sapiens
agaagtggactggccattgaggaggctctcagcggagtcgctcttcacaggagtcttgaacgcggtgtggaatcggcagcgaggaatcctggagcacagagaagctcccagctttgaaggtc

SEQ ID NO: 475376 - DNA, 122 bp, Homo sapiens
caatggatataaatacaaatacagcagcaccagcctgtcttcttggctccgggcagggtgcgccgatgggaaacccccaatcggctgggtgattttttttttttggaggggggagctgtccc

SEQ ID NO: 475377 - DNA, 122 bp, Homo sapiens
tcccagctccaccattcacaagctgtgggaccctgggtaagtcacttaacgtctctgggtcgcagtttcttcatctaaaaaatgggactagtagggtcgggcgcggtggctcatgcctgtaa

SEQ ID NO: 475378 - DNA, 122 bp, Homo sapiens
gccctgcgtagttgagagatgtcggtttccgactccctgggaagacggcttaggatcctccgcgttatttaacttggcagctggttaaactccgcggtggagcctgcccaaaggtattagcg

SEQ ID NO: 475379 - DNA, 122 bp, Homo sapiens
gcggcggctctcggggcctgtggcaccagcttttgagtatttttggcggtgtcaagtcttcggcagcgagaggagcaaagtccgaagaatgaatggatggtgaacgcctggacttggttttg

SEQ ID NO: 475380 - DNA, 122 bp, Homo sapiens
cgctcctcctccgctacaaaccccgggaggaggggggtgacaggcgcaggccgacggcgtcgtctacgccacgcgtcaccctcggcgcgaccccttttgcgtcatctcgccggcgccgcccc

SEQ ID NO: 475381 - DNA, 122 bp, Homo sapiens
cacaagctgctggacggcgagagaacatcgagaggatgtccagggagcacgtcaagaggacgtggagggagtatgcaggtggaagagcacaccgacagacgtcggcacagcagccagccgtc

SEQ ID NO: 475382 - DNA, 122 bp, Homo sapiens
agcagcctccactgttattttttagcactttgcctaaggaatttatttatccttcaaatacgtatcatttgcatattgcgggttaggcctgaggcggtacacagtggcacacccacatgggg

SEQ ID NO: 475383 - DNA, 122 bp, Homo sapiens
ccgcattcgccctcctgcaggggtgggcatttcctaagtcctctccagccccgtgtgcgtcggttagtgactctctttaaggtcgagaaaactttttacactgaaaaggtcaaacgcatttc

SEQ ID NO: 475384 - DNA, 122 bp, Homo sapiens
aatattgagatatttgcagttggtacgatgtgatttgtaaattctttgtttttcattgtgcgtatatggtaaagagatcttttcagctgctattttggaataatgactatcatatatcataa

SEQ ID NO: 475385 - DNA, 122 bp, Homo sapiens
tgaggaagaagttcaggctaaagtgttttttattcagcttacattggagagccctcagtccggagtgcaccacgcaacctggagttactaagggccttttgcactatctctgcctgtcttcc

SEQ ID NO: 475386 - DNA, 122 bp, Homo sapiens
cccacttccctcttccctcccgggacccactgctccaggattgggcgaacctcaggtgagcgcctgctcccctcttccgcgaaccttcgcctacggcggccgggaggcatcaggagcgcggt

SEQ ID NO: 475387 - DNA, 122 bp, Homo sapiens
aggttgttgtaaagatcaaaagagagatccagattgtgaagccactggtgatctgtaaatcgatttgaatacatagtttggttagttgaggatctcaaagcactttgaaaatgacacttgag

SEQ ID NO: 475388 - DNA, 122 bp, Homo sapiens
taagaacagagttgtatgcctcactctgaaatatttttaattaactatattttggggcggcgggagatgagtaaattcattcagctcttaaagaaagtcatggaaataatttttctacagtg

SEQ ID NO: 475389 - DNA, 122 bp, Homo sapiens
aggcgcaggaaactgccgttttgattggtttccagtgtggcgcgggggtctcctgggatccgaaagaacctgcctttccgcccggaagtcggcgtcttgagtcataggagtgagccacgccc

SEQ ID NO: 475390 - DNA, 122 bp, Homo sapiens
tcgcgtgattcaagaggcgaaggaagcattggagccgggactcacggtcagacaaaggggcgactgcagtgcttccccgcctctggcagccccctgggtccctctggctccgctgtcagggg

SEQ ID NO: 475391 - DNA, 122 bp, Homo sapiens
ggccccattctcaagctgactctgcatggcatcacctcgtcacttggtggcactgaccaccgccagtggcacgttcatctcaggagcccggtgtgcacagccctgttcccctgtctgcagga

SEQ ID NO: 475392 - DNA, 122 bp, Homo sapiens
gttgtgcgcagggaggaggcgtgtgcccggcctggcgagtttcattgagcggaattagcccggatgacatcagcttcccagccccccggcgggcccagctcattggcgaggcagcccctcca

SEQ ID NO: 475393 - DNA, 122 bp, Homo sapiens
agggctccttggtctagctgtagcgccagcatgtgggaagacgcccgttgacaagcggaccgtggtctggcggtagcgtcagtgttaaggaaaaacacccgctacttagcagacagggaaag

SEQ ID NO: 475394 - DNA, 122 bp, Homo sapiens
gggagggggagtggaatcgttggcggggggaagaggagagaagccgccctgtctcccgcgcgcccaccacctgcgccatcgtcagccaatcagcagccgtctcaggggtctcgcgctcgggg

SEQ ID NO: 475395 - DNA, 122 bp, Homo sapiens
aaggcgatggactgctaatccattgtgctctgcacgcgtgggttcgaatcccaccttcgtcgaccgttttctttaagagggtaaccaggtttttgtcgcaggtctgagttgctctcagaaaa

SEQ ID NO: 475396 - DNA, 122 bp, Homo sapiens
ggggaagctggtggattgcaaggtgtcagcccagaaactgctgagcttactggaaaaggacgagttcaagtctggagcccacgtggacttctatgacaaataagcccatgtttttggcttcc

SEQ ID NO: 475397 - DNA, 122 bp, Homo sapiens
aaagaggaagatgtgaagaggaggcagacaaaagcaaaaggacatcctgtcagtaggaaacggccgaattacaattcagatgtgcaatgtttgcataagtaaactgacacgggactattata

SEQ ID NO: 475398 - DNA, 122 bp, Homo sapiens
aggacagttagcagtaatttatcatttctcagctgggttttcatgctttcgctgactgcccgtagaaatctgttagccacttctacacagatcactatgaaatctgctttatctttgtgcaa

SEQ ID NO: 475399 - DNA, 122 bp, Homo sapiens
aggcaaacgtctcctcctccctcccacaccctctgccggttttcccgctctgcctcctggcgcccttttccgcccagaaagcaggagcccgcctagtccttcatggcgggagaacagcgccc

SEQ ID NO: 475400 - DNA, 122 bp, Homo sapiens
ttgaatcaccagcttcaaaatgcatgggacgcctaaaggcatgattttctcttctgtctccgatctgtatggagaaagtgaaaatgggctttcactgccaactccatagatcttcctgtaga

SEQ ID NO: 475401 - DNA, 122 bp, Homo sapiens
cagctttccatgtgctggccaggttgtggcttaacaccactgaggccaccagagatgaggcggggcgtgtgcatcaaaagtccacacctctgcatcctggtactgatcctagactcatggaa

SEQ ID NO: 475402 - DNA, 122 bp, Homo sapiens
tgagtattaagcgacattcacttgcaaggctgtgttgtagtcagagctcagtcatgcagccgttactgtggctgctaaccgcttcagagtctccgggtaaggatttctcaatctagatcaaa

SEQ ID NO: 475403 - DNA, 122 bp, Homo sapiens
ccagcagtggcgcagagaccatcctcagttctgtgtgtggatgggaccagagaagccggccggccgagctaatgttcttcccttcctggaagagagtagtttccaaacaacccgatctctgt

SEQ ID NO: 475404 - DNA, 122 bp, Homo sapiens
agcctctccactctagcaccagaacaccgcagcggatacttgcacgccatctcccctgggcgcggccatgttggagaaaactgcactacatttcccatgagcccgcgggacaacgaacagcg

SEQ ID NO: 475405 - DNA, 122 bp, Homo sapiens
cagcccaaagaaacctgcattgtgacacggatggacacagcttcctttgttggcaagatccggattagacttgtgcctgatccactggagcagagcctgggaagccttcgaggtgggcttgt

SEQ ID NO: 475406 - DNA, 122 bp, Homo sapiens
gtcattcctgactcctctcttttctcacatacacacatctgatctctcggtgaacgctgtcggttctgttttcagaacgtgcctgtcattcaggatctggccacttcttaccatggtcttgg

SEQ ID NO: 475407 - DNA, 122 bp, Homo sapiens
caggtagagtttctggagccggggcagctgcacgaacacgtttgccttgatggcccgcagcgcgttcctgctcaggtccagctcccggagctcggccaggccgctgaagagcgcgggctgca

SEQ ID NO: 475408 - DNA, 122 bp, Homo sapiens
ttaaaatcatttggaaacgggctccaaggggcgaccctgcgcagaaaaccaaattccatccggggcgggcagggagtgctagactccaaggaagacgtttcccacattcggtggtgaggagt

SEQ ID NO: 475409 - DNA, 122 bp, Homo sapiens
gtccagtcaatatagaaatttgggatcccctgttcctgcataaatactgaagcaggtgtccggggtctagaaatcttctgtatttttctgtttaccaaacttcgttaagagctcccctggtt

SEQ ID NO: 475410 - DNA, 122 bp, Homo sapiens
gcatgggatatttgaaagggcaaattccttccatattgttcttacactagaagttaagggcgcagggggcataggttaggtgtgtggggtctggggtcagaccgtttgctttgagtcttgtt

SEQ ID NO: 475411 - DNA, 122 bp, Homo sapiens
ccagaaagtccacaaaggagcagtgaagcagggcttggtgcagaggccatgcggaaggcacggatttttggagactggagaacccaagcgcaaatccctaccccactgctcaccagcaggtt

SEQ ID NO: 475412 - DNA, 122 bp, Homo sapiens
ctagtaagagagaattagcctccaggcctggaaccattagagtatacaaccatctacctgcggtatccccacagcaccgaatgcctgtggtgggagggacagcccaccgcttcatcccacct

SEQ ID NO: 475413 - DNA, 122 bp, Homo sapiens
gccccccagcgtggacccccgcgggcggccgagggcgcggcgcccgctgcctgcccccgccgccccggcggccgcttacctcggctcaccagtttgaagctctgggatttcctgcttctttt

SEQ ID NO: 475414 - DNA, 122 bp, Homo sapiens
tttctgccctgagagatgatttggagttccgatgtgtatttcattagcagattgatgaaacgtggtggcacatgccaaccgtctggaagtgtgacagtgcatccaggctggtctcgcctcat

SEQ ID NO: 475415 - DNA, 122 bp, Homo sapiens
gagccgggagcccagagttcggaacctagagttcggagccggctagggagccggcgttgtcgcggcgaggaggtgggcgcgctggagcaggagcggggccggaactggagccgaggcgcagg

SEQ ID NO: 475416 - DNA, 122 bp, Homo sapiens
aaatgtaatttttcaaccatgatcaactccattttaatctgagggagacaaatggcaaaacgaatatcaggaatttacttaaaccagaggaggagaagagaaaggaagaaacaggccgggcg

SEQ ID NO: 475417 - DNA, 122 bp, Homo sapiens
gtgtcgttctccctctcccccacttcatttttacaataaatgtcagtgcacacccaggagcgggtggtcccacaggggacatcttaacgcccacccaggagcggctggtcccacagaggacc

SEQ ID NO: 475418 - DNA, 122 bp, Homo sapiens
aaagggccgggagccgacgcggaggcggtgggcggggcgttagggggcggggccgggagccgccgagggggcggtgggcggggtattcggggggcggagccgggagcctcccagggggcagt

SEQ ID NO: 475419 - DNA, 122 bp, Homo sapiens
ggtgcggaggcgggcagaagccgttgaccagatgaaacctctccaggcaagtggcccccgcggcggccgccgccgccgctgccgccgccgccgccgccgccgccgccttggctttgtaggac

SEQ ID NO: 475420 - DNA, 122 bp, Homo sapiens
ggactgcgtgtcattctgtgtctgctttgaagtttgccatgccttttccccacactcacacgtgctgtctgccagccccctccatcatctgccagccccctccaaccgcaggactactcagt

SEQ ID NO: 475421 - DNA, 122 bp, Homo sapiens
atatccacattttcagtatgcatctctctgggctctagttttgcacacatgccatttttacgcacttgcatgtttttgcagactcttcatccttgactcactctgcctcagcatccatgtta

SEQ ID NO: 475422 - DNA, 122 bp, Homo sapiens
tcacaagaacacaaagcgcttgcttgtgggacacaggattgctcggccggctcgtcttcacgcatgaatcaccacagcgagatgtgtgcacgtttccttcatgccaaggcagagggagccat

SEQ ID NO: 475423 - DNA, 122 bp, Homo sapiens
accgctacttccacctccaccacaaccgccgcccccactgttaccgcctcctccctgactcgccgccatgttcctgggagagagaatagcccccgacaatactgtcagcctgtgccgcgagt

SEQ ID NO: 475424 - DNA, 122 bp, Homo sapiens
gctcggcggccggcttgaccaggtggccgctgaaggtgatgtagaggtctccgtgctcgccgtagatggcgttgtcccggtcgcgctggaacatgcgcacccagacggcgtcgcccgccgcc

SEQ ID NO: 475425 - DNA, 122 bp, Homo sapiens
ttctaagtgactggtaaagttccgcacctatcagcgctccaagtttgtttttgttttggccgactttgcaaaacggattgggcgggatgagaggtggggggcgccgcccaaggagggagagt

SEQ ID NO: 475426 - DNA, 122 bp, Homo sapiens
gagggagggaagggagagaccaggcagcttctgcagaggcttcctgaagcccactgactccgcgggagggggttgcagagggacgggggcgggcgacagggggaggagtgtgcaaattgaca

SEQ ID NO: 475427 - DNA, 122 bp, Homo sapiens
ggacgaagcagagggcgtacaccgccacccaccactccagggccggccggttgtggtacacgtaggggctattgatgaacacgaagatgaggcaggccacgaaggtctccagcaccttcagc

SEQ ID NO: 475428 - DNA, 122 bp, Homo sapiens
ggaagcccaggtggagcagctgctggggatggtcgagggcttggtgctggagcacaagggcgcccattactccaacgaggtgtatgagctggcgcaggtgctgcgctgggcaggccctgagg

SEQ ID NO: 475429 - DNA, 122 bp, Homo sapiens
agcgcgcgaaccgctctccgccccaggtcccgccccccccgccgccggcgtcacacgcaccgccacttccggcatgcgcagggacgcaccttccggctcagctcctccgtggctgccgtggt

SEQ ID NO: 475430 - DNA, 122 bp, Homo sapiens
tgggaagacgatgagcaaagatctactgggaccccatcctgcatttgcaagctcggtccgcgtgcccctcccggcacacccggaggtgagaagtgccctccggtgcctccgtccgcagcccc

SEQ ID NO: 475431 - DNA, 122 bp, Homo sapiens
gcaggaacgggggtctcctctcctgctggtccctgccggcgtgcctctagggacgggcgacgctgctgtgtgtggtctcagagcctctgcttccttaggttacaaaacaaaacagggagaga

SEQ ID NO: 475432 - DNA, 122 bp, Homo sapiens
ccgttacgccgcggctcttcctgccgcccaaatcctcggttcaaatcggcaggatgtttacggtcaaaatggtacctgtgcgcctgcgcagccagcccaagcccccccctccccccagaagg

SEQ ID NO: 475433 - DNA, 122 bp, Homo sapiens
tctctgctgtccagcatgctggggtccccgtgtgggcagccgtatccagctccagaattgcgtggcatctgcctcgggcttccactgaagacagctcagtcacccactgagagaggctagcc

SEQ ID NO: 475434 - DNA, 122 bp, Homo sapiens
agagagacgtgaaatgccaaagccatgatgtttatgctgtgagggaaccaggcaacctaccggtttgcatgaggcccccaacccagggcagctgtagcctattagtgctgggttcagtggag

SEQ ID NO: 475435 - DNA, 122 bp, Homo sapiens
gcctccccttcacgcctcgagataacaaacgctcttcactgataaaggctaagaaaagcccgaattccaggtctggaaggacagccaagagccagccctccagtaaaagagtgagtcagacc

SEQ ID NO: 475436 - DNA, 122 bp, Homo sapiens
ggtgggagccgcagtagagtccgcgcttggagagcgcctaagcagcgctgggaacgtttccgttcctttcaggagagagagaaggagcagggtttgcgcttctccgggccagacggtgtttt

SEQ ID NO: 475437 - DNA, 122 bp, Homo sapiens
cccgcccccaggacaaacccctgcagtgatttggagagtaactgtgtgccactagttgcccgagaaaatgagtagacgcacaaacaccaatgtttgtgcttgcataggggtctttctggaag

SEQ ID NO: 475438 - DNA, 122 bp, Homo sapiens
tgaacgcgcttaggtgtgcgctcaaagccagcaacctggctgggtccgcacggagacaggcggggcagcgcggggaggggccaccggaagccccacccctttcctcgcgtccggtcgcccgg

SEQ ID NO: 475439 - DNA, 122 bp, Homo sapiens
ctaacacagttattactagtgcctcctttgacttgcaaatgttccagtgtgaagaatacacgataaggctaccatcaatccacagagcctgtgtccaggggcccaagggtagatggcaggag

SEQ ID NO: 475440 - DNA, 122 bp, Homo sapiens
ttaattctggattgattaatttttggattgcttatttttctcctccatcaatgcagactgcgaattgactaaatacagttaacaaacttcaaattagaacaagaagctgttaattgagaaaa

SEQ ID NO: 475441 - DNA, 122 bp, Homo sapiens
acccagttaagggtccagaagagccccaggaccccatagatttgcagattgaagacagaacgttggattaggcctttggatgagtagccctggaagacgcacatcagccctgggcacgagga

SEQ ID NO: 475442 - DNA, 122 bp, Homo sapiens
cccaggctggtgtgcagtagtgctatcttggctagctgcaacttctgcctcgtgggtgcacgtgattctcctgccacagcctcctgagtagctatgattacaggagcacaccactatacctg

SEQ ID NO: 475443 - DNA, 122 bp, Homo sapiens
cagggaaggcagtgacggggccccaggggaggtgcgggcaagcctggtgcggcatccgcacgtccctgtcccatcccccacgcagagcccgaccccaccctgccaggcccacctgtgtagct

SEQ ID NO: 475444 - DNA, 122 bp, Homo sapiens
cgcaggtaagatccgttttcagaccaaaaccctgaaaacaagcgcagccagtcaagcgaacggaagcgcaggcccggcccaggctttgtcccggcccgccctggtcccagccagtccggcct

SEQ ID NO: 475445 - DNA, 122 bp, Homo sapiens
ctcccgcctcaccgtggcaggagggttttgctgactctgaaggacggctgggtggggttccgtctgtccgtgtttgagaacagaccatgtcccgtgccccttcccgacttttcccctgtgag

SEQ ID NO: 475446 - DNA, 122 bp, Homo sapiens
agcttcctttccaggcgagacaggcgagacgccgggacacgcgcaccaagtggcgcctggcggtgacagctggggcaccaggtcccctgggggctgactctggacccctgccctgccccctc

SEQ ID NO: 475447 - DNA, 122 bp, Homo sapiens
aagcactgtgtcaggtgggagatgacagcttggtgaaacctctgtcaggctgtcttcctccgctttctctatccctgggtttccccctgcctaaaaaggattttgtgcttcgtggcttgtcc

SEQ ID NO: 475448 - DNA, 122 bp, Homo sapiens
gggacaggacctcacctccccgaaagcatcggccagattaagagaatctgaaattgtcaccgcccatcacagaactgggcagcggcctccccccaggcagcgcaaagggggttgtcaccacc

SEQ ID NO: 475449 - DNA, 122 bp, Homo sapiens
cccaaccttcacacccagacctcggacgagggaacgttagcgcccggcggcagtggatttcgggagagggtcacgccctaaacattatgtccgggtttggagacagacatccatttggattt

SEQ ID NO: 475450 - DNA, 122 bp, Homo sapiens
tcccggccgtgcctgtgcagtgggggaactgcggggatacaggtgagccgcgggggcgcgcgccctcggaacactttctaactctggaggagcgtaaaggaacaagacctcactgagaccgc

SEQ ID NO: 475451 - DNA, 122 bp, Homo sapiens
ctagggaagaccctggacttcactagggtgtgacttcttttctcgtaggcattccttctgcgttgaacgcatattcactattctagctgaagggtataatatacagccacgaagggggtcga

SEQ ID NO: 475452 - DNA, 122 bp, Homo sapiens
tgggcacatcgtatggacagtcacccccggaggacccgggagcagcgaatatttgatcatcgttccagggactttctggaatgaatgaacgttggcctctcttggtctttttatcaaagagt

SEQ ID NO: 475453 - DNA, 122 bp, Homo sapiens
cggtggtactgcctcaacaccaacacccatggctgtcgccgcatcgtggtgtcccgcggccgtctgcgccgcctcctctggatcgggttcacactgactgccgtggccctcatcctctggca

SEQ ID NO: 475454 - DNA, 122 bp, Homo sapiens
gctctttgagccgctgtccaggtctgcaggtcctcgttcagggacatgaaatctccttgtcgtaggcggacttaaagtgtccttcgaggaagctcctgtccggagccaccacccagccagac

SEQ ID NO: 475455 - DNA, 122 bp, Homo sapiens
ggtggacttggtgatggtggggccagccacggtgggggacttggtgatgctgggactcatcgtgttggagcccgctaaggtgggaagcctcgctgtggtggaaggactcactgtagggattg

SEQ ID NO: 475456 - DNA, 122 bp, Homo sapiens
ctgacccttagaatggtaagaggctgggaaagtggtagagagatcagagttcaaacagaacgcagcccacagaatacctaagtgggtagatacttactagacatggagactaatgtaaatgc

SEQ ID NO: 475457 - DNA, 122 bp, Homo sapiens
gaccctggaagacagtggggtttagttaagcacagattgtacatcgggggcctcataaggcgcctggaagcattcaagaacaccacgcttgtaaggacaaagcactcggtcacgggcgcctt

SEQ ID NO: 475458 - DNA, 122 bp, Homo sapiens
ggaccagaaggaggctttcgtttagggtgggggcagcactaaagtctgattggagtcttgcggtccgcgcgtcgcagaagcgccttcggttttgcagagagcaaagagggagcagcgagtgc

SEQ ID NO: 475459 - DNA, 122 bp, Homo sapiens
tctctcttttctttcttttctttcttttctttcttcttttttttttctgaggcagagtctcgctctgtcgcccaggctggagtgcagtggtgtgatctcggctcactgcaagctccgcctcc

SEQ ID NO: 475460 - DNA, 122 bp, Homo sapiens
cccgcccttagcctgcctcttcctagatcttccaggacattgatttccgagtaggaagcccgcgctgctaggggaggggcgtcctctgtgggtcgtgggggggtttcccttctctccacagt

SEQ ID NO: 475461 - DNA, 122 bp, Homo sapiens
ctttgtctgaattttctactctctgattcctatcagaagaaacaaattaagttttatggccgtagggagtatctacagagagttctaactaaatggagagaggttaaatggtctacacactt

SEQ ID NO: 475462 - DNA, 122 bp, Homo sapiens
ctcctagaagaaaaggctaaaaacaagacacacagaacaagaaattgcactctctcaaaacgacagtcgccctgaaacggacgctggaagaggtttccaggcccgtggcgacggtgaggggg

SEQ ID NO: 475463 - DNA, 122 bp, Homo sapiens
aaaaaatcgaggctgggtaggagcagggcagtgaggatttctcaacccttactttcaccccggcgctgtccactgcatctgacagagcgcggagctgggctgctacagccgcaaccccaggg

SEQ ID NO: 475464 - DNA, 122 bp, Homo sapiens
gctcgaacaatcgattggctaacgaggtcgatgacgccaggcacaagatgctgggcctaccgcggtagcgtgagggaagccgtgcgttctgttccaaggcatctgtgagcccatggagtata

SEQ ID NO: 475465 - DNA, 122 bp, Homo sapiens
tgctgtaccacaccgatgcttggtcagtaccgtgttgattttcgtgcacgtgttgattttcgtgcacgtgttggtgctgtgccaccctgacgcttggtcagtactgtgctgatgttggtgca

SEQ ID NO: 475466 - DNA, 122 bp, Homo sapiens
cttcatggagtgctggtttctggcactgggctggaaggaggccagctccagggatctggccgggggtgggcaggcagaattcaagaattcatcttcaacaagcgagtgacagcagaggctcc

SEQ ID NO: 475467 - DNA, 122 bp, Homo sapiens
aactgagaggtgcgttctgtggtttgtcagctgctcggcctaaggtgcttcggtcgcagccgcctgaacagaccaggacggcaccctctactgcccagacccactcgtggccgttcggccgc

SEQ ID NO: 475468 - DNA, 122 bp, Homo sapiens
gctcaagcgatccttccgcctcggcttccaaaatgttggaattataggcgtaagccatcacgcccggtgggttcagcaagtttttacctacaagaaaatattttggtgaatgttacatgttt

SEQ ID NO: 475469 - DNA, 122 bp, Homo sapiens
aaagaccagcacctgacaggccctctctgcaaagaacactagtgtgggagaagccacattcggtcacgtttctagggcttaaggtcaccccggaagagaaaggacctggcaggtcccaggat

SEQ ID NO: 475470 - DNA, 122 bp, Homo sapiens
cagcagggatcttgctgtggatgtcttgacttggtttaattaaattaaccatgatgttgacgctattatacttgtggtgagtaatatcctttttgggggttgctgtttattttaggaaattg

SEQ ID NO: 475471 - DNA, 122 bp, Homo sapiens
ctgcacctgactgcgaggcgcgggaaatgaccgggtctgtcagcctcccatcgcggcttccgtctacaggtactacctgtgctctgtccagcctcagccactggacgatccttcccgtagcc

SEQ ID NO: 475472 - DNA, 122 bp, Homo sapiens
gctctgggcctgagcttccctttacacgagtgccatgagaactacaagcccctctgtggacgaaggatgctcagctctggccatctcattcatccccaaagcagctcagaaagccacgcagc

SEQ ID NO: 475473 - DNA, 122 bp, Homo sapiens
ttgagttagcactggagttatttggagggatggtagcctgggcttttcaatcactggaaacgattaaaagccagaacaacctgcacaggccggcccagcagttctagcttactcagaagatc

SEQ ID NO: 475474 - DNA, 122 bp, Homo sapiens
ccgccgccgccacggctttttgcccccccgccgccgcggcttattccccccaccccgcctcggctttttgcccgccgctgctttgtgcccccccggcgccagggcttttagcccgccgcggc

SEQ ID NO: 475475 - DNA, 122 bp, Homo sapiens
ggagacagagatttcctgttccatgaactggtgtagtgagagtctgttcagatttggcgccggtgtccaggtcttcaatccctgggaagactacaaaaggagatccagaggaatgcatagaa

SEQ ID NO: 475476 - DNA, 122 bp, Homo sapiens
attcgttcgcgccgccgccagttgaggagaacggcagggactcggtgccttctgggaagtcgggcgctctgcggctgtgacgtcacaaccggtgccttgtttccggtgcagaagcctggtct

SEQ ID NO: 475477 - DNA, 122 bp, Homo sapiens
gccacttccctacatagccttctatgcagaaatgctatatttccacttcacaacccagaacgtgcattttattttacatttagaggaggaacaaacaaccagaaggcaaaaactggtgcatt

SEQ ID NO: 475478 - DNA, 122 bp, Homo sapiens
ggcgcctcctgccgcagtaaacacaaagtggggtacagaaacgaaaactccgggaagaaacggccagcacgggcctcgccgtgccggctactcaacacgccttcctgagagcacagaacatc

SEQ ID NO: 475479 - DNA, 122 bp, Homo sapiens
gcggcacctccccacggtcgccccaaggggggtaggaaaaaagatgcttcattgatcccccgcccactaactgggcccgcccatctcccgccaccccaatggctcatatggctgccgctcat

SEQ ID NO: 475480 - DNA, 122 bp, Homo sapiens
aacatccttctcttccaccacctccccggcttaccgagtctgccgcagcacccctgcgcccgccccaagcttgaggtagtctgcatggactcagatttatttagacgtccttgagaaatcca

SEQ ID NO: 475481 - DNA, 122 bp, Homo sapiens
ggcctcagcaaccggatgataccgcgagagaggacgcctgacgtaattaaagtgcgcgaacggaagtggcgcggaacatgacggaaaatcagtacggttggtcccttaaggaccagcgggaa

SEQ ID NO: 475482 - DNA, 122 bp, Homo sapiens
gccacagctcgcggctctcccagctgggctcggtgtcccaaggaccctactcgagcgccccgccgctgtcccacaccccgtcgtcggacttccagccgccctacttcccacccccctaccag

SEQ ID NO: 475483 - DNA, 122 bp, Homo sapiens
ctgagtctcggtctccccatctgtaggatgggtgtgcctttccatgtggaggcacccacacgttccgtttcctcttcccaccctacagagcacggctccggcaattccacagctcaggctta

SEQ ID NO: 475484 - DNA, 122 bp, Homo sapiens
ctctttctggaaacgcacagaaccctctgcgggaactcagaatggagcactcggttctcccgtcatgaacgaattgttcctattggcgctcagagcgagtgtctgtgttgtgggcaaagagc

SEQ ID NO: 475485 - DNA, 122 bp, Homo sapiens
catgtacagtaagaacgggaccatgcacggcttcgtcaaccacaccctctcctccttcaacgtcagtgacttccagaacggcacggcccccaatgaccccctggacctgggctacgaggtgc

SEQ ID NO: 475486 - DNA, 122 bp, Homo sapiens
gactccagccaaccagcctccagcctttacctgtggctgactggccaacgccagagaagccgcgatgtcgtaggtccgaagagagtgcgggttagcgaccccgctcgacggccgagcgctgt

SEQ ID NO: 475487 - DNA, 122 bp, Homo sapiens
atttatttttttattttaatgatcaaaaaggtgtatttgaaagcactatgaaaactgtgacgggtacaaacatatgataatactaactgggaaataatttaagaaaaagtggcacgggaaaa

SEQ ID NO: 475488 - DNA, 122 bp, Homo sapiens
gttcgtacattgggttcttacttaattttgtcttacttgtagatatttccttcctgaatacgtcttcatttaaaaaaggtcagatcgggctgggcgcgctggctcacgctgtaatcctagca

SEQ ID NO: 475489 - DNA, 122 bp, Homo sapiens
gtcctaaccagccctgcaggtgatcccccgcaggtgaaggctgagaacccctgcggtccacgttggcatgcacccaaggcacaagtcattgaaagctaaatttccaggtaacggcctcctgg

SEQ ID NO: 475490 - DNA, 122 bp, Homo sapiens
ctccttccagaatagggccttgaaccagtccagcagcttgttgaacaaagcgatcatggtcgctgccgccggccccgcccggtgccaggtccccgccgcccctcgctgccctcgcgctgcgg

SEQ ID NO: 475491 - DNA, 122 bp, Homo sapiens
aagccgatcagaccttgagggtgaggggttctttctaaactgacctacctattcctcggccgcctcccacacctccgggcctcactcgcgcctccccgccaggccgtgcgccccgcgtgccc

SEQ ID NO: 475492 - DNA, 122 bp, Homo sapiens
ctcgggcctttcaaaccccggcgcgccggcgccggcgtcgacactgcgcaagcccagtcgcgcctctccagagcgggaagagcgctgcgttccttagcaacgagcgtttcctccagccccgc

SEQ ID NO: 475493 - DNA, 122 bp, Homo sapiens
gggctcagtgtcctaaccctgcacggtgccctcatggtcgccttcaagccctgcacgctccgtgctccacaggctctgaggggtcaagccactggtccgaggccacacgagacagagggtcc

SEQ ID NO: 475494 - DNA, 122 bp, Homo sapiens
gatgcagctgccggtgctgctccagggcagtggggtcagcaaaggcccagccacactccccgcaggccagcggggccaggtccgcagggggctcctggcccggggctcggcggtgctggctc

SEQ ID NO: 475495 - DNA, 122 bp, Homo sapiens
accttcaatttgttaaaaatgcaatatctgtgaagcacagtaaagtgaagagcagtaacacgaggtatgcctgtactggcgaactcacaaatgacttccacactagtcaagcaagattaaaa

SEQ ID NO: 475496 - DNA, 122 bp, Homo sapiens
gtggattgggtcaccttgtaacagtgacttacctttatgggtcacggttgaaaacatttccggtgcagtggctgactgtaatcccagcactttgggaggccgaggctggaagatcacttgaa

SEQ ID NO: 475497 - DNA, 122 bp, Homo sapiens
cgcagctgggccgcccgagccggagggactggttggttgagggagaaagggagggaatcccgggctgcccaaccgcatgttcagcctgctcgctcctgcagggcagcccttcggctctctgc

SEQ ID NO: 475498 - DNA, 122 bp, Homo sapiens
acctcaagcccttgcttaagggcctttttcagagagacccaatgcccagaaggctagatgcgtggggaggagccacatacgagaaactgcctccctgcttcgggtcagaacaagccccagga

SEQ ID NO: 475499 - DNA, 122 bp, Homo sapiens
aagaggcggattctctcctactacagaaagacgtctgctgttttgattggctaggaaagacgtccgttaggacgtgttgccctttctgtgtaagctgtgagcgtaggcggccctgagggggt

SEQ ID NO: 475500 - DNA, 122 bp, Homo sapiens
atggtccatagctgtagattctcaaaggagctggaaccaaaactcaggttgccccatgcccgagacggcgcaagagtataaatcccacatccattaaccccatcttccttctcagagaaacc

SEQ ID NO: 475501 - DNA, 122 bp, Homo sapiens
gctgtgggagtggagcaggtggttgaatgccaggctggcttggtccttctctctgggtgccggctgtggctcccgcccaggtgggcaccacgtctgaataatgtatgaagcctctggttgcg

SEQ ID NO: 475502 - DNA, 122 bp, Homo sapiens
atcagacgcctagcgcttcagaagcacgactggtgagaactgggcagcccttccacgctccgcactgcaagaactgcctgtccggaagggtgactgcaccagctccgctccggatatcttgg

SEQ ID NO: 475503 - DNA, 122 bp, Homo sapiens
ggaaaggaagtcaggtaatgggtagtggggttgctgatcacagtttgtccttgtgggggtcgttgtgaggacttttactctgagtgagatggggaatcattggatgattttaagcagagaga

SEQ ID NO: 475504 - DNA, 122 bp, Homo sapiens
gaggcccgttaaaaattaccttgcccttttttctgccctctaccaacacggcttccgtggcgtcgttcacgtgacattcctggactacggcgcgggagagggggtaggagggcccttgaagg

SEQ ID NO: 475505 - DNA, 122 bp, Homo sapiens
ctgaaagtgttgtctaggtgggagttattccacaattgcagactgtctttgattattcaacgagcttttatcaagtttagattatccagactcattattatgagattattaaactggccaac

SEQ ID NO: 475506 - DNA, 122 bp, Homo sapiens
gatttgaacttttcacccggggtcagacagctgcgatgctctgtccccagcagaggccagcgccggggccccttccacctcacactttcacagtttttttcctgcctgccaggaggccagcc

SEQ ID NO: 475507 - DNA, 122 bp, Homo sapiens
cacacacacacacacacacacgcagcagcacagggtcgtgcactaggaacgggtgagcttcgcggcgtgcacactcggcgagactcctccaggaaagccggggagccgcgcgggatttagct

SEQ ID NO: 475508 - DNA, 122 bp, Homo sapiens
ggacagggctggaactacacttcccagtgtgccaggcggggcggggcgcggcggggagggcgcaggctccttcccagaagcaaaagcggaaacaaaagagtctcgccggcgtccccgcccgc

SEQ ID NO: 475509 - DNA, 122 bp, Homo sapiens
aggacgcccaggcttccggaagactcgggggtcccatccccactgtgcagagggctagagcgggagctgggggagggagaggtcagaggtcaaggctgccgcgtggagcgtgggccgtggag

SEQ ID NO: 475510 - DNA, 122 bp, Homo sapiens
gtcaaaatggtaaggacagattttattcagtaatgacttgcaacagggaagagagtccagcgtgaactaaactgagctttgccaaagcaaaaggcaggagactttttcaaggttggagtgtg

SEQ ID NO: 475511 - DNA, 122 bp, Homo sapiens
tgataaaacataacaaagaaaacacaaggagattaatgggcattcctgtataacaatgctcgttctttcctcaaaggaaacagaagtgttgtggaaaaggagagtgtgatgggctaaattgt

SEQ ID NO: 475512 - DNA, 122 bp, Homo sapiens
ctagcgccccgagcgccgcccgctcgctgcatgagcgcccgagtcctgcttcccacccaccggggcaggcgctcacagactgtgtccactgaacttcatcttgtttttgttattattattat

SEQ ID NO: 475513 - DNA, 122 bp, Homo sapiens
tccgtgccgggcacccacctccagctctggctgtgtcgagcgagaagtgagctcagtgctcgtctgcagtgaagggtggcccaggcttccgcttcctgcccacataccccacctgcccctcc

SEQ ID NO: 475514 - DNA, 122 bp, Homo sapiens
ggctctggtgggcggggtgttaaaaaaaaaaaaaagcctggaggtgctgggagccgctcgcgcccatctcacctggagctgaggaaaactgggatttaactgatttaccaccgcagccagct

SEQ ID NO: 475515 - DNA, 122 bp, Homo sapiens
aagcggtccaagtagcaggagggcggtgcagggcccggagggagcagcccagggcggaggcggcgggcctgggctggaccggccgggggcgctggcctctcgcggatgggccctgccgttga

SEQ ID NO: 475516 - DNA, 122 bp, Homo sapiens
tgcccgccgtcctctggggctcccacccgctcttcccaagctcccgttggccctcaccgtcgaagtcaatgcggccgtcgttgttcttgtcgccgtctttcatcagagattcgatctcctcg

SEQ ID NO: 475517 - DNA, 122 bp, Homo sapiens
ggttccgctattccctccgtctggaatacccaccactctctcccaccccgcgcttgcatccggcaatactgtatcagcctcagggcctctgctgtcccgctttctgctctcagagcctttgt

SEQ ID NO: 475518 - DNA, 122 bp, Homo sapiens
tgccgcctcagtgggctctagcagtagaaaagtaaagcgactaccctaagatacccagagcgagaggagaggggctagaagggtgctggaggcaggctgtagtggggctaaaggagctgact

SEQ ID NO: 475519 - DNA, 122 bp, Homo sapiens
tgtcggctgctcacatgtatgcagcacgtcaggaacactggcattgctttccaatggaaacgcagttttgccctctccttcctggcagcactggtagcacagagcccagatattttgcactc

SEQ ID NO: 475520 - DNA, 122 bp, Homo sapiens
atgtggggcttagtcacaggagcataggtcaggtcctgctgagccccctttccaagtgtgcggtgcgcaagccgcccaacccaggggccggcagctgggacagggcgagcagtgggctgcag

SEQ ID NO: 475521 - DNA, 122 bp, Homo sapiens
caatacatactttgaaagcaaaaatacaatcaaacacattgacacgtatataaagatccacgcgtggctgtgcgtgatatctcacactctgaattcttacttgatggaggttttgtttgctg

SEQ ID NO: 475522 - DNA, 122 bp, Homo sapiens
cgctttattcagcaagtttttataaggcagatctcatatggactatgctttgcataagcacggtgttagatgggaagaaaaaagtggtgggatccttcctcctcttcctttcttcccagctc

SEQ ID NO: 475523 - DNA, 122 bp, Homo sapiens
gaacgtgttacaatccctgacctcactgtaaagccagtggacaatgttaaggagctagcacggaactggaaccaggggaagtgctatgacacaggacacatctgctggggaaacccagcggg

SEQ ID NO: 475524 - DNA, 122 bp, Homo sapiens
cctgatgagcaatccagctgctgccgtgggcatgattcctggcaaggatcgggggcctgccgggctctacacccaccctgggcctgtgggctctccaggcatgatgatgtccatgcagggca

SEQ ID NO: 475525 - DNA, 122 bp, Homo sapiens
tatcacgtgcaagatatatagctaatacatgtttacgtgaagttggccaaatcagtcacccggatgacataaaatgggaaagacctcattcatttagtggtttattttctctttgccaacta

SEQ ID NO: 475526 - DNA, 122 bp, Homo sapiens
tgtctggcaagggcatggctaggagtggcctctgtgcttatgtttgctctcttcttagcacgtgggtcctggcccctttgccactcaccctcaggcttattgcttttgtcatttattctata

SEQ ID NO: 475527 - DNA, 122 bp, Homo sapiens
actaacagccgctcacagtccggaatcccacgctccctagcccgcggtgagcgggggaaacggcactcgctcccggaagtggatgttgccaagagcaacagtgaagcagagttaaagagccg

SEQ ID NO: 475528 - DNA, 122 bp, Homo sapiens
agcggatgctggagcacgaggacctgtcccggcttctcaggaggtcctgcccgttctctgcgcatccctctcacggacccttctgcctgcagctcccagggctgcagccggtggggcctggg

SEQ ID NO: 475529 - DNA, 122 bp, Homo sapiens
agttcaccatatataccattacattttgtttctcccatctctcaggtagacttacactttcggcccagcacatcagtcatcgcccttgcttgctttcctattcactcctgttctggaaggtg

SEQ ID NO: 475530 - DNA, 122 bp, Homo sapiens
tgcactttctgacttgctcaggttttttgccagagttatgtcactgtcaatccatgtggccgaaaccatcttaactctaccagctaagataccccagcattggggaaggcagggttttgtat

SEQ ID NO: 475531 - DNA, 122 bp, Homo sapiens
gcaggagtcagggaagtgtggctatgaaagggcagcaggggggagccttgtgttaatggacgtgtttggaatcttggctgtgctaatgtcagcttcctggctgtgtattgtactatggcttt

SEQ ID NO: 475532 - DNA, 122 bp, Homo sapiens
gacggccactacctggcacccgtggggcccgcaggcaccctcaaggccggccgaaacacgcgacctggcaaggatgagctctttgatctggaggagagtcacccacaggtggtgctggtggc

SEQ ID NO: 475533 - DNA, 122 bp, Homo sapiens
aatgccctgcaagtgacgtcatgcccttccgagccttgcagcttctgctggtgggaaggccgatggcagagcccagggaagttatgtaacgggcccagctaatgagtggcagaggccagagg

SEQ ID NO: 475534 - DNA, 122 bp, Homo sapiens
ctgttcagacgactgctcccagctccgtgctggtgacccccgaaatctgcctgccatccccggcgtctcctctggtgcactcaaaggccctcctgggtcctctgcagcctctgccacctttg

SEQ ID NO: 475535 - DNA, 122 bp, Homo sapiens
aaagaaaaattaaatacataaataaaatgtgtcttcctccactaaaagagtaggacacatcgcagaagccgataaatatttgttcaatgtttacatgaacaaacacggtcactcagccgtct

SEQ ID NO: 475536 - DNA, 122 bp, Homo sapiens
ctcattttagaaagtatgatattaaatgatttacccaagccatacttcaggttaatgacacgatagaagctagtacctgtgtctctcaaatttttctaacactttttatcttccgatcaggt

SEQ ID NO: 475537 - DNA, 122 bp, Homo sapiens
ggtgtagctttacttagagtgacacttggcagttacttgacaccctggaatgttggtggacgtggcactggtaaaatggcggggggggggggaataagggggacaaagcagggttcaagaat

SEQ ID NO: 475538 - DNA, 122 bp, Homo sapiens
caatgttactgaagcttaaggccaacctttaaaacatgtaccgtctctcaaaacaattatcgatttacttttacatgtcattttttcaagatgactgacccggctttccttttaaggagcca

SEQ ID NO: 475539 - DNA, 122 bp, Homo sapiens
gggaggctcaagggaaggtgacaccctcactcccgcagctaccgtgcgttccctttaaaccgttaaattccaacacgaacagagtggtgcgtttcgcagtggccgcagattccgggtcggct

SEQ ID NO: 475540 - DNA, 122 bp, Homo sapiens
tgtgcaaggatgacatgcaaatttgtgaagcattccatatttgccggtcgtggtgactctcgcctgtaattctagtactttaggaggcccaggctggaggatcacttgaggctgagagttcg

SEQ ID NO: 475541 - DNA, 122 bp, Homo sapiens
tctgcagccacagtggtgcagaggagatgtgtgggcctggccagccaacctcacctgccccggcgtgttccccgtgtgccacagcgcgttcctcaggtgctcgcccgtccccgtggtggagt

SEQ ID NO: 475542 - DNA, 122 bp, Homo sapiens
cagctgttgtgcaaattccatcagccattaactggggagctgagttctggggccctcccccgagaatcttcttccagatttcctgcccctagaccaggctgtagaaagtaggataggagggg

SEQ ID NO: 475543 - DNA, 122 bp, Homo sapiens
aatccctctgaaccagccagagagtcggctgcatggaaacatttcgcagcgaagctcctgcgaggaggcggcttcgcgcgtcgggaagatcaggcggttgcttgctggccagggtctgcaga

SEQ ID NO: 475544 - DNA, 122 bp, Homo sapiens
gcttagcgtaggggaggccccaggagccatgggatttccatgatctgcccggggagagggcggcgtggcatcccggttccaggccctcagccaaccggggtccctgcaccgtggccggcaag

SEQ ID NO: 475545 - DNA, 122 bp, Homo sapiens
tgttaaagcccgggtggacttctccgaagcttcgtgcagcagagtcacctaaaggcgctgcgtccttatttggggcccccagagacatggagatgtggcacccaggactggaggggggaata

SEQ ID NO: 475546 - DNA, 122 bp, Homo sapiens
gggttaaagccctaggcacgcaggtcttgcctcaactgcgcctgcgcgagtcaggacgagcgcttgccccagatcttgacgtttcaggcggcccctcctaatccggaacacgactcacattc

SEQ ID NO: 475547 - DNA, 122 bp, Homo sapiens
ggtctgatcagctaactgaacttctgcaaggacaatgtacgacatccacagtaacagacacggctcaggtcagaccttgtggtgggttatgcttccctcgcgcaggcttctacacgcccgca

SEQ ID NO: 475548 - DNA, 122 bp, Homo sapiens
ggggtctccgagctcacctccgagggttcggtgccggcccggcccctggatccccgcgggcggacgcgctcccccagctcagccctcgcgaccctaacgcggtccgttccttttgcaggagc

SEQ ID NO: 475549 - DNA, 122 bp, Homo sapiens
ggcagtcaacttaggaaacattagcgcagcgtggagtttggagactctgcctgcagcacacgtgccaggtaggcaatgaggcgagaggaaagcgggtcggccaggctcggagctgggtgttc

SEQ ID NO: 475550 - DNA, 122 bp, Homo sapiens
tcagactcctgggctcaagctgtcctcccacttagcctcccaaagtgctgggactacaggcgtgtgccacggggcccagccattttttcgaatattttcaatctgcagttgtttgaatccac

SEQ ID NO: 475551 - DNA, 122 bp, Homo sapiens
ttgtggcctcggtgttggtgggcagagggccaggcacggctgttggccattttttcatgtcggctgctgtgtatcgggtgtgtgggttgattttccgcttcagtatttgagctctgtgttct

SEQ ID NO: 475552 - DNA, 122 bp, Homo sapiens
ccggctccggctccagcaggctggaggggcggccaggccagacccagactggctgggcctcgtccggcgctgggcccgttcccctgacaacggcgcgggctacggcgccccacagcggccaa

SEQ ID NO: 475553 - DNA, 122 bp, Homo sapiens
gggaaggccgcgtcctctgtctggtcccgggatcctgcagaccccacccttgtcttaaggcgccctcgcgcccccccccccccacctccctcctcctgccgggccctgctgcttcctaggtc

SEQ ID NO: 475554 - DNA, 122 bp, Homo sapiens
ctaccgcaagctgatcatcagtgatgtccacgcagaggacgaggacacctacacctgtgacgccggtgatgtcaagaccagtgcacagttcttcgtggaaggtgcaggcagggagggcagct

SEQ ID NO: 475555 - DNA, 122 bp, Homo sapiens
tcgctgcgtggtgagaaaactgatgcctggagtctgtgacctgcctaggaccacagaactcggtagtaggaaaaatcgtatttttaaatccagtcctgagtgggaagatttgaggaaatagc

SEQ ID NO: 475556 - DNA, 122 bp, Homo sapiens
ataagtaaatttattaataaattctagtctctagcttgcaaggaagactacgtttcccggcgtgcagcgtgctggccgtaagcattacgtcctccatcgcgggcgcgcaatgcacctcgggg

SEQ ID NO: 475557 - DNA, 122 bp, Homo sapiens
ggagccagacccaaaaagtcaaggaagggaagcgccttccaggccactcctgagaagaaacgaactacaattcccatgaggcggtggggccacgggaccacaagtcccagcatccaccgcgc

SEQ ID NO: 475558 - DNA, 122 bp, Homo sapiens
tgtgtaacctctcggcttctggggcgccggctcggctgcaccgctcttactggcctggggcgcttggcaaagccgagcttcccaagtggctctggagccctgaggcgggatggggggcaggt

SEQ ID NO: 475559 - DNA, 122 bp, Homo sapiens
tctccggcgctagactgcgaactgcctgagagcatcccttctgcagccgcggggcataagcggcaaagactcggggctggcaggcgcatagggagtggggcggggctggccgggcccagagg

SEQ ID NO: 475560 - DNA, 122 bp, Homo sapiens
atgaccgagtatgggagagacggtgctgtgcatctccaggcaagtcaccatccctccctgcgccattgtcatcaccttttgagtaattatcctatgccaaggacttgaagtggatgacctca

SEQ ID NO: 475561 - DNA, 122 bp, Homo sapiens
ctgacaatgtttttttccattcttggttgcagtgagttatagtttgtaaaggtaaacacacgtgaggacaaattcatgctctccagagttaggatttcagatcattaacagggcttctggga

SEQ ID NO: 475562 - DNA, 122 bp, Homo sapiens
ttcagagaatagccatgtgcgcggcggttacttaaatgttccccgggtcttggttctttgcgctaggtctttgttaagtgtaagctctagagaccaggatctgcgtgctggacactcagcct

SEQ ID NO: 475563 - DNA, 122 bp, Homo sapiens
ggccggggccctctgcggatcagggcgctttcccagtgccagggggactcctgccttcgccgggagctccccccacggcttttgatgttggaggctttgctcaggaaattgccttatacttg

SEQ ID NO: 475564 - DNA, 122 bp, Homo sapiens
gggggcgggctgcatgccacggggaggccgggagccacatggcacacacagacagacacacggctacacttggaagcctggacaatgtgaacggaggtcgtttgtacccagcgtttctttcc

SEQ ID NO: 475565 - DNA, 122 bp, Homo sapiens
accaccacagcccaggaactctcaaccccatcggatgcatttacacaggccatgtgtgtgcgctggtgcagtgcaggggccccgccctcagtgcctggcatactgctgctatcaccttgagg

SEQ ID NO: 475566 - DNA, 122 bp, Homo sapiens
gtcagggtattactggccagattggggtccggtttcagaaagaagggaggagcctgggggcggggcctgggtagagaccctcacctcacgcatccaccatccaggagcaggtcctagaccat

SEQ ID NO: 475567 - DNA, 122 bp, Homo sapiens
tccattgtgaggcagccctcaaggctcaaggaagcttcctgggcaggattgagtgttgcccgtacatgccccatgtgcaccacaagtgaggggccccaaaaggcagcccactatgagttata

SEQ ID NO: 475568 - DNA, 122 bp, Homo sapiens
gagctcttattcagccactagctcggcctttcctgcttcaattgtaatgcttgttctgcccggggacacactattgacagcagaaacaatgaatttcctccaaacccggcaatgttggtggc

SEQ ID NO: 475569 - DNA, 122 bp, Homo sapiens
ggggccactcggaagaccgcggagccccggccttaggcgccgtcgcggctgccaggcccgcgcaccttccagctgcggtgagcgcgctgcccttatcccggtgcctcacctcttccgcgcca

SEQ ID NO: 475570 - DNA, 122 bp, Homo sapiens
cacgaggtcctgtggcccaagcatgagcaatagccatctgagcgcccctttgtggagctgcgtgccggcgacaggtgaaggcacagccctttaggagcttctgcctcttcttgcctcagagg

SEQ ID NO: 475571 - DNA, 122 bp, Homo sapiens
gcgtcacagggaccgagttatggtgaggaattcaagacatgcctttctgacttggaaaagcggacacggccggctctggtaggattaggatccccagatcgatcccggctggtcactcactt

SEQ ID NO: 475572 - DNA, 122 bp, Homo sapiens
cggagctccgcgagaggccctccaaaaagacgctggcacggaactcgcggctctcctgcccgttggatcccgaagcaccagtcggggccccagacacgaggccccacttccgcttacgcgcc

SEQ ID NO: 475573 - DNA, 122 bp, Homo sapiens
taccaggatgaatatgctttagattttttttttctttttaggctttcatagtgcttccgtcgctcatttcagtgaccatattattgcttcataggcagcaaaaaaatttgcttccccaaaga

SEQ ID NO: 475574 - DNA, 122 bp, Homo sapiens
cggaaaagccaggcccaccgacagtccctgccggcaccttgaggagccctgggtgtaggacgcatctgccccgcgaggcgtcattccctgggaggatgttggcaggcggtcctggcggagtg

SEQ ID NO: 475575 - DNA, 122 bp, Homo sapiens
gcccccggcagctgcgtggctgtgcactgcgtggcgggcctgggccggtgagtgtcggggcggggtagggctcgccatgtcaggtggttgggcatctcgtggtctgacagcctcgcttttgg

SEQ ID NO: 475576 - DNA, 122 bp, Homo sapiens
agtttgccctggcaggtggctcatccctgtggcccggccggcgccaggagtcgggcatcccggacttacctggtctctgcagctcgccagacgcccgccccgacggcccactcgccgccgcc

SEQ ID NO: 475577 - DNA, 122 bp, Homo sapiens
atttacagctccagggggcgttcctacaaccccgacaggttagccgaggggcggggcgggcgggccccggggcgggttcggcgtcctcctgcgccaatgggagcacccaagcccctgcgcgg

SEQ ID NO: 475578 - DNA, 122 bp, Homo sapiens
gcccgggccccagtcttgctgagcgcaaggcggtggaggcctgaggcctgaggcctggggcggggtggcggccgggctggccttggcctcgcgccttcccctgcggccgccgcgggctccgc

SEQ ID NO: 475579 - DNA, 122 bp, Homo sapiens
gtacctggaactacaggcacacatcaccatgcctggttaatttattattttttgtagagacgtggtttcaccatattggccaggctggtcttgaactcctgagcttgagcgatcctcctgcc

SEQ ID NO: 475580 - DNA, 122 bp, Homo sapiens
ctgaagattaaccttggcttcgccccaaaagacctaagaaaccgctcagctgcaggataacgaggtttttcgcgtgggggaggtggggggtgagggaaaggctggcgatagcctgacccccg

SEQ ID NO: 475581 - DNA, 122 bp, Homo sapiens
cccacagaggagcagcggcagcaccccggcctgcagagccaggtgcagacggtgctggtgcgcatgggcggcctcttcgtgctgctgctgactgtgggtcgctggctggacctgctgggcat

SEQ ID NO: 475582 - DNA, 122 bp, Homo sapiens
gtaaaaaatgagataagctctacaattgtcccaattttctgcctaaggatactttctggacgtgtggaagaaaacccaaggagggcatgggaggcttgctgagcttaggagacagacattag

SEQ ID NO: 475583 - DNA, 122 bp, Homo sapiens
attccggtcaaacaggtacaggttgtggacagtcatctgcagggcagggagtgtgagcctcgctccggggccgcccccactccttgggctcgggttcccggacccacagccttccaaccagg

SEQ ID NO: 475584 - DNA, 122 bp, Homo sapiens
cgtgatccgcccgcctcggcctcccaaagtgctgggattacaggcgtgagccaccacgcccggcctcatgggaggattttgaacatgtttatggaaatcaagaagagagaatagttggaaat

SEQ ID NO: 475585 - DNA, 122 bp, Homo sapiens
gctgtggtaggggttcactctcaccatgagcagcaggaagaggtgggcgcgattgatgtccggatggacttcgctgggcaaccagctgctgaccatccacctctctggagcaggtgagtcga

SEQ ID NO: 475586 - DNA, 122 bp, Homo sapiens
accccgagcgaagggatggaacccagaaagcacgggggtcgggacaggacaggccgacgacggggcccacagggaaggggcggggccgaggggacgcgggcggggccggctcactcttttgg

SEQ ID NO: 475587 - DNA, 122 bp, Homo sapiens
acaaatattttatgagtgcccactttgtgccaggcaccattctgggcaccggagatgcaccgaggatgccaccaggcatggtctctactctcactgggctgtgttctgggtagccggagaca

SEQ ID NO: 475588 - DNA, 122 bp, Homo sapiens
ttggccccagcccctcatagaacctggcaaacacggtggttggggaggcagcctcgccaccggccaatgagccccagcctacagccatcattggcgtagccacaccttagcagtgagcttgg

SEQ ID NO: 475589 - DNA, 122 bp, Homo sapiens
cagatttcctctctccagcttagacacattaataattaacttgcctacctaggagcttgccggcgttgccataaaagatgagtaatggcaccggagtcccagccctatgcccgcgggcttca

SEQ ID NO: 475590 - DNA, 122 bp, Homo sapiens
caggaacaaagacgctgggaccagctcaagacacagacgtctggacagccttactggagacggtggggacttggaggccagggagggcgaggggccggggggacaaggaggggcggaggagg

SEQ ID NO: 475591 - DNA, 122 bp, Homo sapiens
gttggggggccgtgccaggctcgatcaccccacccgcatccctggggcgggtccctgccccgtacctgggagtccgctgtcaagaccttgatcctcttggtggagacgaacaggtccacctc

SEQ ID NO: 475592 - DNA, 122 bp, Homo sapiens
caggaccctagactgagattcccccaaaggaggcatctagatacccacaaaccaggccttcgaacccctaccctccctctgaagccctcacatggactgaagacccctgggatcagacctag

SEQ ID NO: 475593 - DNA, 122 bp, Homo sapiens
ttgggagcacttaaaaaaaaattcaaaaccccaaatttctagacctgtaaatgtagctcccgggcagtgtgacaaaaaacactacaaggcccttgtacagtacagagctctgccttcccgct

SEQ ID NO: 475594 - DNA, 122 bp, Homo sapiens
ctttgaaaggccctacctccaaatgcaaccacatggacgtcctgggggtcaggactttgacgcatgaatctgggggacacgatgcagccgatgcaggacggcatcggtgacacccgccctcc

SEQ ID NO: 475595 - DNA, 122 bp, Homo sapiens
cccttggcctctgccgtccacaggacgccctcttgctcccggaaacgtgtggtcacccgccgtccactgcacggctggtacggccttgtcttcaggtctcgaggcctgactccgggggacag

SEQ ID NO: 475596 - DNA, 122 bp, Homo sapiens
tgcttttctgatcccaagattgttcttcatgtacctgtataggccacactttcggcaatccgaggactcacacaatgatattaaaataaagttgtttgtttgttttgggtgaaccatgattt

SEQ ID NO: 475597 - DNA, 122 bp, Homo sapiens
ccccagcacctgccgccctgggcgcctcctccacctgcgcgccccacgcccgcttccggccggcttccaggcctcagaggcgatcccgaggaatcgttccgctcccaaggggcggagctttc

SEQ ID NO: 475598 - DNA, 122 bp, Homo sapiens
acaggaggagtaagtggatgagcggtgtgtgacacacccgcctcagcgtcgcccggagtccgcaaggctgcggctcaccgttctctgccccatagctggcattgtggagtgaaagggaacgt

SEQ ID NO: 475599 - DNA, 122 bp, Homo sapiens
gggaatagaaagtcatggggaagaccagtcttggagaagcagagcctgagataatatgcacgtgaaatattgagtagtcctctctctcttactcttatctttggcttacatattcctttaag

SEQ ID NO: 475600 - DNA, 122 bp, Homo sapiens
ctttttctgggccctgatagggaggagacccaagcaagcccctgctctgttgctctagggcgcgagttccccaggtatctgtaacatgaaaacacaaacacactcgtgcacacacacaggca

SEQ ID NO: 475601 - DNA, 122 bp, Homo sapiens
ccaaagccctggccttcaatggggcacccgaccccggtaattccccggatcacttcctgccggccctaattacaggaggaactaggatttccgcggttccggtcctctctggtgtggaagat

SEQ ID NO: 475602 - DNA, 122 bp, Homo sapiens
tgctcttttagtttcccgtctataggtgacttgtgttcatcagctcaattcgacccccttcgttatcacaaggacagagggatttctgtatcccggggtttctgtatcccggggtttcttgc

SEQ ID NO: 475603 - DNA, 122 bp, Homo sapiens
ttttgtagagatgaggttttgccatgttggccaggctggtctccaactcctcggctcaagcgatcaatccacctcttgaccggagatttcagaggtcagaggttagatacaagagtcaaaac

SEQ ID NO: 475604 - DNA, 122 bp, Homo sapiens
cctttggagctcatgttgcaagctgaatcacatctgtggttcttttcttggcaatgtactcgccttggttttttcagtttccttcacttggtttatctgatagcctctgagctccttattta

SEQ ID NO: 475605 - DNA, 122 bp, Homo sapiens
tcaagaggccggcgttcgcggagatgtcgtcttaaagggctgtcccccaagcgtgtaggccgcgcacgggtctccttagcgggcgggcaaaatgggcgccggtactcgggaggcgcctgccc

SEQ ID NO: 475606 - DNA, 122 bp, Homo sapiens
caatacagcagtagcgccactcataaaaggtgtatttaaaggtaaggcgatttgattcctcgaacgtaacatatatattccttgagcatatactatgtgccaagcactgtgcttgggcactg

SEQ ID NO: 475607 - DNA, 122 bp, Homo sapiens
acccgggacttgggggcgctgagccgggccgggaagcagagcctggtcgtgaggaacagccgcccgttgctgtctgcccctttgcggacagcgtctccctcgactccgcttaggaagtggtg

SEQ ID NO: 475608 - DNA, 122 bp, Homo sapiens
taccaggcactgtcaacaactaacacagcagaaaaacaccaaggtgctgagccttgggttcgggcttcccactgcagacagacatcacctaactaccagacattccattccactggaaaact

SEQ ID NO: 475609 - DNA, 122 bp, Homo sapiens
cccccctcgctttcctgcgccgccccccaaagttggcagcccttgtgtttggccctgccccgaggttgtccgttgagattatgtaactgaacaatgggcctcgtctggaacttcatcttaca

SEQ ID NO: 475610 - DNA, 122 bp, Homo sapiens
gaagcgtgtagcttcagagttcagagcttgtggagaaaccttgctttgaccatctctgagcgcccccacgggactcagaaccctgaggctcttctagagacaccaacttgcggtggtggggt

SEQ ID NO: 475611 - DNA, 122 bp, Homo sapiens
tatggcatatgaggggatgacctcctctgcaaggtgccggatcccggggctgccctaggccggctgcagacttgctgtgtggcctccaagcaagatcttgccctctctgagcctcagatttc

SEQ ID NO: 475612 - DNA, 122 bp, Homo sapiens
ctggcatcacaggcgcacactaccacaccggctggttttttctatttttagtagaaacagcgtttcaccatgttagccaggctggtctcgaactcctgaccttaggtgatccacctgccttg

SEQ ID NO: 475613 - DNA, 122 bp, Homo sapiens
ggcttctgaatctgatttctaaacaccatggtcttgcatcatacacaaatttgatttatacgattaaactatgcatgctggcatataatgacaggataataatcatgctgttgataataatg

SEQ ID NO: 475614 - DNA, 122 bp, Homo sapiens
actctttccttttggagttttccctgatcattgaagttatgcccttgtcccttctgcacccgcgcttctgggcaccgagctcctcccgctgaagtgatcggcttgcactgactgcgcttggg

SEQ ID NO: 475615 - DNA, 122 bp, Homo sapiens
gtaactgcttctatcaaatttttctttcaagaacctggaaagcggttcattttgttttatcgagcagattgtgaaaagagttttcttgcagagtttttgttttataatcaaaataattcgag

SEQ ID NO: 475616 - DNA, 122 bp, Homo sapiens
ttgttgacatgtttgcgtttttatcgtcagcctcgtcgaaaggggcgtacgattgctccccgaaaccagggtctttcccggccgattccccagctagcaacaagccccttgcaaagaggagg

SEQ ID NO: 475617 - DNA, 122 bp, Homo sapiens
ttgttaatagagtcaatgtctcttgtcttttttctgccaactggaataatccctactccacgtatgtgagctatatcctgtatcagaaatgtagaggaggcgtggaattggcaaagatttgt

SEQ ID NO: 475618 - DNA, 122 bp, Homo sapiens
agaactgttggcctagctttctagacattttctgcagctcaagacggtccctgacacacccgtcagcctgcacagtcctgcaggactgggatgggaatgagagggcagagtgggaacagagc

SEQ ID NO: 475619 - DNA, 122 bp, Homo sapiens
tttgatttgcctggagaagccagcttgaaagccactgggagcttcagtttgccctgcaggcgtggggggaccgcggaggaatggcagggaaagatccaggtgttagaaagttcccactgggg

SEQ ID NO: 475620 - DNA, 122 bp, Homo sapiens
tgtgtgccgggccaggggcaagacactgccggccagtctgggaaccagggaggcttcagccgccgtctgcagggtctgaggccgcgagctgggaggggaaccccgaggagcgtccagcctgt

SEQ ID NO: 475621 - DNA, 122 bp, Homo sapiens
caagggcagcacacttaccattgagtctgtgtgggtgtgccagggcagtacagttactgtcgagtgtgtgtgggtgtgcaagggcagtacacttaccgttgagtgtgtgtggtgcacgtcct

SEQ ID NO: 475622 - DNA, 122 bp, Homo sapiens
ggggcagagggagaaaagaaaaacagaggaaactgcattttcagagggcaacatgtataccgcattgttactatgcaatctttaggaaagctttacatgtgatagatcttcatttggaaagg

SEQ ID NO: 475623 - DNA, 122 bp, Homo sapiens
agaactgtgtcctcgctttgcagattctgtggtaatttatcactgttaccttagttgtcacggaactgtgtgaaatgaggacacatttccaatatgcaaaagtttcagttaacacaggatta

SEQ ID NO: 475624 - DNA, 122 bp, Homo sapiens
cgctcaccccacacccagcacagtttgcacgtgagacccccagcgtctgcagccctgggccgtcctggggcctacgcagccattgctgtgcaccgcgcacctctcctgttagcccgaaaacc

SEQ ID NO: 475625 - DNA, 122 bp, Homo sapiens
aaagacttgctacactttgtggtgtgctcaccccgtgttgcagctcagtaggctgtatagcgtatcaacctccccctgcctcctaacttctaccctacctgatccttatgccacctggccct

SEQ ID NO: 475626 - DNA, 122 bp, Homo sapiens
gcttttcctgactacttcttttcatctgcctggtcccatggaccaagaatttagggattccgaagggagagaggggaaagatctgcttaaaaccagaggacttgcaggaacctcttctgggc

SEQ ID NO: 475627 - DNA, 122 bp, Homo sapiens
gctgtaatagaagttcacttagctactttagataaccttgcattaccactggtctggccacgtttgttaaatccttatactgatattcttctaaagagtaaatctcatcatttttccagaca

SEQ ID NO: 475628 - DNA, 122 bp, Homo sapiens
gacgctgtacactgcgggggactctaacagacgctgtacactgctggggactctaacagacgctgtacactgctggggactctgtaacagacgctgtacactgctggggactctgtaacaga

SEQ ID NO: 475629 - DNA, 122 bp, Homo sapiens
atcttgggacatgtagtctttggaggggcagctgcctccaccaagtctcctcccccaagacgctgcctttcggcctcgggacgccgtgacgttgcgttcctccagtcccttgccacctccct

SEQ ID NO: 475630 - DNA, 122 bp, Homo sapiens
gaagcatagacgttccagagtgctgacgcagacccctaagttccaagggctttgcaaaatcggcttctgttgtgaatgtcatttgtatcgattgaatactgtagcctgaggcgtcttggaga

SEQ ID NO: 475631 - DNA, 122 bp, Homo sapiens
ttctggcacgggccccccggctcacctggaaggagtggaagaggtaccagaaggcccaggcgttgatgacgttgtagtacatggagaggaagaaagagaccaccacgctggcgacccctgcg

SEQ ID NO: 475632 - DNA, 122 bp, Homo sapiens
ttcttcttgggggtgggatgcctcccttcccatgctcccacccctcccatcccagaactccgttgggctcagtgtcctctgttgagggaaggtcttggtgcccagatgcctactctgcagga

SEQ ID NO: 475633 - DNA, 122 bp, Homo sapiens
acagtaggagttgtagcagagaaagagtttaataatcacagggcagctgcatgaggaggacgggagataattcttaaatcctacccatagagaattcagaggctagggtttttcaaggatgg

SEQ ID NO: 475634 - DNA, 122 bp, Homo sapiens
ctgtcctggagaaccttgggcagcctgatattgatgagccccgtctgctcctaaaagctacgacttcgagcggctcggagaagcgggtgatgtgtgcagcgtttagcagagcagaccttccg

SEQ ID NO: 475635 - DNA, 122 bp, Homo sapiens
ccccgtattttgctgagatttgtggaggactctaggatatgacatttcccacgggcacaacgctcctcttagagcctcgaactgtgtgagacaccagggacttgctgcttttcccggaagcg

SEQ ID NO: 475636 - DNA, 122 bp, Homo sapiens
acagccagaagtgcgtcacagccaggagtctgctttctttaaaggcacagcaagcttccccgatctgggagcgacagcaagcaggggactctcagtgggggtggggcccagagggagggggt

SEQ ID NO: 475637 - DNA, 122 bp, Homo sapiens
cagaaatccaatagaaaaatttcataatgtaattttgcaagtgttagttcttacctgcaacgtaaatttcatctagtttttcagcaactttctgtggtaaaccagcatcaagcaatgtctga

SEQ ID NO: 475638 - DNA, 122 bp, Homo sapiens
ttttgatccaaaggcggcagttatcactaagtggtttatttccttctaagacctagccaacggtctcagagccaatgctgctggtacaactactctattaatgggatagttttggtaagtct

SEQ ID NO: 475639 - DNA, 122 bp, Homo sapiens
gccgcggctggcgccgggcaccgacagagcggtccctccccccgccccccggagtccccgcgccccgcagcccgagcctccaccgagcacgatccgctcgcacaatccccgtaggctccggg

SEQ ID NO: 475640 - DNA, 122 bp, Homo sapiens
tccaggaaacaccttctcatttcctaggggctgtttccaacctgcatccgctacctcccgcgcagcaagctgccagtgggtgccaaagaggtgctcccgagcccggacacacctgtgcaggc

SEQ ID NO: 475641 - DNA, 122 bp, Homo sapiens
ggaggggcctgcgggccggccctcgggctccggacgctggatccttctgggacccgaacccgcaaaccttggctccccacccccaggccagcagacgcccccgagccggctgctcgctttcg

SEQ ID NO: 475642 - DNA, 122 bp, Homo sapiens
ctgccccactgtttcctttctgctggctggcctgcacactagcctgcctttgtgaggaagcggctgttaagcagacacagcaggagaagtttagaagtcaggagtttcattccttgcctaat

SEQ ID NO: 475643 - DNA, 122 bp, Homo sapiens
gacatgtgcctggcgcgcagcaggaactcacggctggctgtagcctggatgcatcagagacgatggcaaacccttctcacacgtgccaggttccagcaacccaccctagccccgcaattcct

SEQ ID NO: 475644 - DNA, 122 bp, Homo sapiens
cgagaactgctggtttgcagacccctaactggcccccgctggcccccgcagctgactcagcgcaccctaaactcggaggaagtgccagacggccaggtcctgggcagcccgggcgctcgctc

SEQ ID NO: 475645 - DNA, 122 bp, Homo sapiens
tttcgctgccctgaaaatcccctgtactccacggccttagaggtctggcggtgtgagcctcgtcattgatgttttgggtggtggggaatgtaggtgtttttcagttactatcctccgcttta

SEQ ID NO: 475646 - DNA, 122 bp, Homo sapiens
cattcattattcattcaggagctttttaggagctgtcatcgacctagacctccggctggtcggttgtgaggcatgagggagaggaggggccaggagtgtctcgcggaagggttgatgatgga

SEQ ID NO: 475647 - DNA, 122 bp, Homo sapiens
gtcacttttattattgtttctaagttttttacagacctgtcctcccaatggcccctgtgacgctgtcctggattaaagtacaggaatcccggaattgctgcttacatcttacacactttcag

SEQ ID NO: 475648 - DNA, 122 bp, Homo sapiens
caggccccgtccgggtgctggagtgagactctcgcgctggcctctggagcgcggggtgggcgtcccgtcaccctgcgcccagcttccccggcccgttcccgcagggccggcctcccggcgcc

SEQ ID NO: 475649 - DNA, 122 bp, Homo sapiens
gattaacttccatcataaagatgtgatttaaattcctgttggtatgaggccctccacttgcggtctcttattaaaacaatataccacagtaagtagtggatgttcttttcttctaattactg

SEQ ID NO: 475650 - DNA, 122 bp, Homo sapiens
attggcctcattatgaggatttcaaagttatctcagtacaaggaagtttttcctctctgccgaaacctcctgagaatcctccaaaggaagcctaattcttgacatgtttttaaggttctctg

SEQ ID NO: 475651 - DNA, 122 bp, Homo sapiens
gtggagggctgggactttccaggcttccttagtgatgtcacccttctgtcattaggcacccgagaccagtattcaaaaaaagaatgttgtcgttatataactatattggagataagtattcc

SEQ ID NO: 475652 - DNA, 122 bp, Homo sapiens
ttgtttatgtttgtagcccatatttctgccatctcagtatcctcaaatcttccagattaacgggatcatgctttcttttaacattgaaataaaaatggctgaaatattcgtcctatgtcttg

SEQ ID NO: 475653 - DNA, 122 bp, Homo sapiens
cttgtgaggcccttcttttattggcctaacggaagattaatgaacaatttttactgctttcgggccaatggagaaaatttcaggcattaagaaagaagaaagaaaaaaaaacaaccaaaaac

SEQ ID NO: 475654 - DNA, 122 bp, Homo sapiens
ggccaagctttccattagcccactattctgaagctcacaccaggaagacaccagcagggacgccagccgctactcttctgctgcagatttacatgtaatacagaggctctcagagtacaaaa

SEQ ID NO: 475655 - DNA, 122 bp, Homo sapiens
cgtccacgttgtgcttctgccagttgcccacggggtgctccggttccatggtgtagtagacgcggtagccgcggatcaggccgttgggctccaccggctcctcccactgcacaatcatggtg

SEQ ID NO: 475656 - DNA, 122 bp, Homo sapiens
caactgtgaatttctctcaggcctgtgggagtaatggtaatttttctacttgcagcactccggaagttgttctttccgcgttttttgatgtgtatggtctcatagactctcatccttggcac

SEQ ID NO: 475657 - DNA, 122 bp, Homo sapiens
ctccagctttcagagctgggacagaggcccacagtggtcaagccacctacccaaggccctcggccggtaggtgtaaagtcaggattacggccaatgcagaatcccaacttcacacctactgg

SEQ ID NO: 475658 - DNA, 122 bp, Homo sapiens
gacaacttggtgtgactacagaaaggccctccttctgcaagacactttgctgccaatggccggaaaattgtcatgaaaaccagacaaatctgcaatggctagcagaagaaggatggccctgg

SEQ ID NO: 475659 - DNA, 122 bp, Homo sapiens
aatacaaaaattagccgggctatggtggctgacgcttgtaatctcagctactcaggaggccgaggcaggagaatcacttgaacccaggagcggacgttgcagcgaccggagatcgtaccacc

SEQ ID NO: 475660 - DNA, 122 bp, Homo sapiens
tggaggaaggcaggctagcatatcctttcaatccaagagttcactatcaaattagagaaacgcatgtacataagtaatgatggtacaaaataggctgtgttgaatgatataatttttaaaaa

SEQ ID NO: 475661 - DNA, 122 bp, Homo sapiens
cctttggctgcgagcgggcgagctagctgcacattgcaaagaaggctcttaggagccaggcgactggggagcggcttcagcactgcagccacgacccgcctggttaggctgcacgcggagag

SEQ ID NO: 475662 - DNA, 122 bp, Homo sapiens
cccctcgtgttcatgggagctcgttttcttttcctctaggcagagaagaggcgatggcggcgatggcatctctcggcgccctggcgctgctcctgctgtccagcctctcccgctgctcaggt

SEQ ID NO: 475663 - DNA, 122 bp, Homo sapiens
tttgcttggggagggggtggccggcagcgaaggggtgtgcgccctccgggcctcctgtttcggttggcctgtcagttcgagacggaggagttcgtttagaccgtttagcgaagattccacgt

SEQ ID NO: 475664 - DNA, 122 bp, Homo sapiens
tctgattccttctcaaacaaaccaatgaatgcgacgacggagacagcagcgtgccccaggcgctagaagtggctctgccccttctactttgctgccctttggtcgccatgcttagtgtggct

SEQ ID NO: 475665 - DNA, 122 bp, Homo sapiens
ggcgctggacaggcagaggctgaggctgctgctatccagggaagacacaccctcacgctgcgtgccctctaggtgcactcggcacagccagggttccagctgccaggagggatcgggcgtct

SEQ ID NO: 475666 - DNA, 122 bp, Homo sapiens
taaagagtgaaaaaggcaggcaggagggagggagaagaggtctacaatgtggataactgacgaaggattagaatctgtagcacccaaagaagcctccaaatcgtaaagaaataaaaagacag

SEQ ID NO: 475667 - DNA, 122 bp, Homo sapiens
gacggcctaagaataaagggttacttctgatgattcccacggtcaaatcattactgctggcgatcccgcacattcccagcgcttggcagctcgagaacgtcttttgcacagaggattcatct

SEQ ID NO: 475668 - DNA, 122 bp, Homo sapiens
ggcgcgcggcgcgccccgcctctcgccccgaggctggattgggggccactgcgccgcctccgcccaggggtcactcactggccaactgaggggactttgggcggcctcttccaccttcccag

SEQ ID NO: 475669 - DNA, 122 bp, Homo sapiens
gaccagcaggagagaggggtgcctgccacaggttgtcaccctcgccgcctcccccggcggcgccccgccccttactcagccctcattactgcagcgcctcgcgggggtctggcccggagtgg

SEQ ID NO: 475670 - DNA, 122 bp, Homo sapiens
tgctgtctgacctatttagaagcagtgaatttttacacaaactccctattgaagaagtcacgctttgcctaaactaccttggaaacatgtctcccaaccacccattccttacatttgcaatc

SEQ ID NO: 475671 - DNA, 122 bp, Homo sapiens
cacggagaatcttctagggaaattagtgcacaggataagcttttaacagattatcagaaacgttttcatcctagtgtttcctgtgaccatgtggcccgcccatccaggatggtctgcatcca

SEQ ID NO: 475672 - DNA, 122 bp, Homo sapiens
cccagcatccagccacccctgggtgtcaagtcttctaatattttgtcaatccggtgtctgcgtgacaaataaaattccattgatcctttcatttccagcttccctgctgatatgtgtgtgtc

SEQ ID NO: 475673 - DNA, 122 bp, Homo sapiens
ggccggcctggcagcgagggaactggccgcgcagccggagcttggctcgggggccctgggcgctcactgccggccacgggagcagcctcactccttgcccgcgcccagtcaggggaggtggg

SEQ ID NO: 475674 - DNA, 122 bp, Homo sapiens
gattgctctttgagcaaagctttgcctagcccgctgaagtccccgctgcgcggagccctccgaaaaaggctaccaaggtgcacagaggctcacagagggatggtgaccacggtgcgtttcct

SEQ ID NO: 475675 - DNA, 122 bp, Homo sapiens
gccagagtggcagggctctgagttccctcctccacttctaggggagcagcccaggccaggcgttgtctagaagttctctgcagaatgccctgctgccaaacaactgcacacctggccagggc

SEQ ID NO: 475676 - DNA, 122 bp, Homo sapiens
ccgggccaaggtcgcggcagtagtcggcaagcgtttgattctctggcattggatcgcgagcggtgtctgcttgttccgcagagggctcccaggacagatttgtccattagtttaacttcatt

SEQ ID NO: 475677 - DNA, 122 bp, Homo sapiens
ctagttcctccctccttttagactaaaaagacaccccatttttggtctgggcatgggcagcgttatttccagcctcccttgctgctgggtgtggccaagttcccagataaaaatgagcagaa

SEQ ID NO: 475678 - DNA, 122 bp, Homo sapiens
tgggtgggaaagctgggcctgggagcgtttagctggtggggtcttggcgaaggcgggggacgggcagaaccttgggttcatcatctctgggaaccctttgtgcacccatcacctagcaacag

SEQ ID NO: 475679 - DNA, 122 bp, Homo sapiens
ctaatctaaggctgtggttctgaaccttactgagcatcaggttacctgagccctgcctcccgagatcagcaatcagcgggtctggggcaggggctgggattctgcgtttctaacaagctttc

SEQ ID NO: 475680 - DNA, 122 bp, Homo sapiens
gcaggtcacccgtctgcccagcggctatgggctggcctaccgcctgacccctggggtgcacgagctgccggtgcagcagccggagcaccgcatcctgaaggtgtccatgaaagagctcaaca

SEQ ID NO: 475681 - DNA, 122 bp, Homo sapiens
ggaatggggaggacgggagggagctgggactgttcggctgcagggtgagtcctcgctgcccgctgagtcggagaagatgcatttggggcccttttcccccctctcagggatggcttctcagc

SEQ ID NO: 475682 - DNA, 122 bp, Homo sapiens
ctgggggagggcgcagcgcagggcggggcaggaaggctggggctctggcgctttctgccacggcgtcatctggaagacccgctttttcaagggcgaagaccccacattcttggagggcctag

SEQ ID NO: 475683 - DNA, 122 bp, Homo sapiens
gaagctctcttgcaccgggctttttcgcctggtgattgatgtcccagagtcaacagcgagcgagcagccggagcggggaagcagaagccagagaggggaagaatacggcgccccctctctcc

SEQ ID NO: 475684 - DNA, 122 bp, Homo sapiens
gaaattctatgcgcggcagttttgcaataaaacaacccgggcttcgcaatgggagaacttcggtgcggcgtgccgtgagagtcctttgacaatctcagctttcatctaggtctgaaattaaa

SEQ ID NO: 475685 - DNA, 122 bp, Homo sapiens
ccgctccgtgcaggggccgctccgtgcaggggccgctctgtgcagcggctggttcagggacgtggctggggtgtggtcacctccggggttaagagcaaccgccgggcagaggctcagctcca

SEQ ID NO: 475686 - DNA, 122 bp, Homo sapiens
ctgagcagagctcaggacgtctcaggagtactggcagctgaacaggaaccaggacaggcacggtggctcatgcctgtaatcccagcactttgggaggttgaggcaggcagcccacttgaggt

SEQ ID NO: 475687 - DNA, 122 bp, Homo sapiens
ggccggggggcagaggccgtgcacacagggctggcacacaggggaggcggcgacaaagaacgcagcctctaacgttatatattaaaatagccacagttcttgtgcacacaattccatcctct

SEQ ID NO: 475688 - DNA, 122 bp, Homo sapiens
aatctccttcatgacaaccctccaaagcaatccaagttcattcccagaaaccggttaagtcgctttatatttacataactagaaatcacaaacaatgctatattttattctatcttaattcc

SEQ ID NO: 475689 - DNA, 122 bp, Homo sapiens
ccggccatttcctagtctcttacctaatacgcaaggagtctacctaacagtgtttaccttcggtcaagttctgtgtcactgaaggaagaatcagagtgagtaactccaactggaagatcttt

SEQ ID NO: 475690 - DNA, 122 bp, Homo sapiens
gcacatgaaaacagaaattaaaaactgacagtccaaggcgtccttcctgacctccttcagcgtgtgttccatgtctcgcggggaaactctggcccacaaatatggaaccacaggatgctgac

SEQ ID NO: 475691 - DNA, 122 bp, Homo sapiens
cgggctgagccgcacccccatctcctttctctttcctccgccgctaaacacagacgagcacgtgagcgtcgcagcccgtcccagctgtgcctcagctgaccgcctcctgattggctgagagc

SEQ ID NO: 475692 - DNA, 122 bp, Homo sapiens
acaagtttctgtcacagcttagttcaatctgatacattcttaaatgagcttcctttgtttcggccaacacatgttccatgtatgccagccactaattttagtgcatcccccgctttgtttgt

SEQ ID NO: 475693 - DNA, 122 bp, Homo sapiens
attatctgcaggaacacgtcctgccaactttgtagtcgagtcacctatttcggttggtagcggccgctatttctttaaaagggcagtggatttcgaaacaggagggggaggtcaggaaaagg

SEQ ID NO: 475694 - DNA, 122 bp, Homo sapiens
tctggaccctttatttatcaagattaatcactacgggcatcactttttgtgcgtgccatacgttcccaggaacagcacttaatccagaaagttcccggatgggtggctctgacaatgggcat

SEQ ID NO: 475695 - DNA, 122 bp, Homo sapiens
gccaaggcctacacttctgcgtcagctcctgagagaggagatcactgtagcagccagtcccgtgacccagagcctcttgttcactgtattcaaaaacatatggactagtgattttctgactt

SEQ ID NO: 475696 - DNA, 122 bp, Homo sapiens
ctcacatgacccctgctccagcaacttgaacaggacaagcagcagctacatccttaaggtcgggaaagtaagatgaggatttggatcctgcattgccctgcctcccaccctatctctcccca

SEQ ID NO: 475697 - DNA, 122 bp, Homo sapiens
gacttccacacatccaccgagagcagcttgcaggagaggagaaggggctgagagcacatgcggcagtggcaggcctgggactggcgatctgcctctggtctgcaccctcccctccagggcac

SEQ ID NO: 475698 - DNA, 122 bp, Homo sapiens
cagaagttaatagcctgggcaaaattgagagaccttgtctctatcacaatcaaaactagccgggcatggttgtgagtgcctgtagtctctgctacttgggaggctgaggtgggaggagcctt

SEQ ID NO: 475699 - DNA, 122 bp, Homo sapiens
gcaactgcaagagtcagacaatacttgatagtgttgatattgacacttgagatttgtgatcgcataggcattgatttgagtcctgactctgttacttactcttggattatatgaacttggat

SEQ ID NO: 475700 - DNA, 122 bp, Homo sapiens
aagtggttttcatctcttttaacgtgcaagtgccccttctcgttaaaaagctggcagggccggacgtggtggcttacacgtgtaatcccagcctttgggaggccgaggcgggcggatcatga

SEQ ID NO: 475701 - DNA, 122 bp, Homo sapiens
cgcagggaacagctgattctgtttttccttcccagccaatggtgatcaaaagcttcaggacgctggtgagtcactgcggaggagccgaacactgaccgcgccgtccccgccaggctcccgcg

SEQ ID NO: 475702 - DNA, 122 bp, Homo sapiens
gcggtggtcaggtcccggtattcccggtacatgttgtgggtgccgctccgggagtcatagcgcagccagatcccgaagttcttcacccgcaaggggaacttctcaaacacctgcccacagta

SEQ ID NO: 475703 - DNA, 122 bp, Homo sapiens
ccccgctaaacaaaactgtgtagtggggccgccctcacccaccactggcctctcttcacacgggcatgattaaggcaaccaggaccgcagcaagcccttctcaaaaggagagaaattatggc

SEQ ID NO: 475704 - DNA, 122 bp, Homo sapiens
cacggacctggccgctgttacggagggagatgctcaccgggaccagggtgccctcatcagcgctgatttaagaacaaaggggaacccagggctccaaatttagtcacagaaatgaaccatta

SEQ ID NO: 475705 - DNA, 122 bp, Homo sapiens
gccctggtgccctgataccctggaggacgcacgcatgctgccccagcgttggggacagcgcgccggatgagaggggctctgggaaaggggacccgggccgcgctggtgacaggtctgtctcc

SEQ ID NO: 475706 - DNA, 122 bp, Homo sapiens
gaagcagctgccggttctgtgtcataagcttcttcgagtctcaggtccaagaggggcttccggaggccctgccctttccccagccaggctctggcctcagtgactgcccggccttacaagtg

SEQ ID NO: 475707 - DNA, 122 bp, Homo sapiens
aaccattctaacttcaatatgtctgaacttcaaccctcccctttccatcccaactgcggtcgttttttttcaggccatcgccctttccagcgtgggcgattcctgcctagcatttgtccatg

SEQ ID NO: 475708 - DNA, 122 bp, Homo sapiens
gaggctggtggtagccactcacactggatataccaggccctccagatggcgttgttcaggcggatcttgtctctgcagagcagcttgaggcctttgaaattcttccacttgggagacaccag

SEQ ID NO: 475709 - DNA, 122 bp, Homo sapiens
cctgcgggaagtcgggccgggggactcttcggaaactccgagcctcagagaaatgtgagtcggagggttggactaggccggatccggcgttagggcgggggcccgcaggcggcccgcgcggg

SEQ ID NO: 475710 - DNA, 122 bp, Homo sapiens
cgtcgccccgcgtgttgggcagggccgctaggcccaggggcggcgccgctggaggccgggcgcgcgggccctactcggcagggcctgctcggggccggcttcgggcctgcccggccgggcct

SEQ ID NO: 475711 - DNA, 122 bp, Homo sapiens
tcggcttcactagtattatcctcatcctcctcgtccggatcttctactgcctcctcggggcgccaaggccgcttggcatggaactccaaaggctccttgactgcggccatggcgggcaaagc

SEQ ID NO: 475712 - DNA, 122 bp, Homo sapiens
gctttgaagccaccccggtcaaaggatgctgagtccggagcgcctagccctaccggactacgagtatctgggtaggaaccccctttaactttggggagggaaagacgtgcagacgaattagg

SEQ ID NO: 475713 - DNA, 122 bp, Homo sapiens
cagaagggacacacccagagcctgggaagcggcagaggttgggggtttctggagcagatccgtgcccagcggcttgtcagctctgacctcagagacgattggtcacgaggtccctgctcctc

SEQ ID NO: 475714 - DNA, 122 bp, Homo sapiens
ggggcgcagcggggcggggcgggcctggagctgcacctgcttctgggcggacgcacttggcgcgcggcgcgggctgcagacggctgcgaggcgctgggcacaggtcagacgtccgtacccgc

SEQ ID NO: 475715 - DNA, 122 bp, Homo sapiens
agcttaattcttagtaggtaaaaacactgatgcactctgcttaccatgtaagcctcttaacgtaagatgtacagttttacatcacataacctggttgttcctgtcttgaagagtaagccaca

SEQ ID NO: 475716 - DNA, 122 bp, Homo sapiens
cagccaggtccccgagtgtttcttagactgaagcgcgaaaccgtccccacccgccctgagcgcttcaatccaagagtgcaacttctccaggccgccctgcaaagccgaaggaacccgcggcc

SEQ ID NO: 475717 - DNA, 122 bp, Homo sapiens
ctgagatcgcaccattgcactccagcctgggtgacagagcaagactcccgtctcaaaaaacgaaagaaaagaaagaaaccactcccagactccctgcctgggcgggatcctttgatcaagcc

SEQ ID NO: 475718 - DNA, 122 bp, Homo sapiens
tgcccccatgtgtccttttccttaaagcatcaatgggatcttaccacgtattctgttctgcgacttgctttcttcacagtagtgtctttccatatcaggacatactgagccatctcattctg

SEQ ID NO: 475719 - DNA, 122 bp, Homo sapiens
gccagccacatcccacaccagggccagactcagagctcttctgttccaaggaggttggagcgggctcagggacaggaaaggattttgcaagccagccgcctccctctcactggctttggaac

SEQ ID NO: 475720 - DNA, 122 bp, Homo sapiens
cttgaccaaagagcgtttttttcacaaacacatgaggcagcccatgtgactccagggacccgcaaagcacagcttgagaaatgttggtatgtttcaatggaaatgtatgtaattaagaatat

SEQ ID NO: 475721 - DNA, 122 bp, Homo sapiens
gcagggctgccggggctcggtgtcctctgggtcacactcccggggtcggggtcagctctgcggcgcctcgggaagcgccgtgggtccaccccgccggaagtccgctccccagagccggtgtg

SEQ ID NO: 475722 - DNA, 122 bp, Homo sapiens
cagcctcaccaagccaagaacagtcaactcacagatatgttcgcaaaaataaatgtttttcgtaccttaagttttatataattattgacctatagttaactgatatacaatatacattaatc

SEQ ID NO: 475723 - DNA, 122 bp, Homo sapiens
tattctaaacaaattaaagataacactacaacaattaaaaaatacaaacagggctgggcacggtggctcatgcctgtaatctcagcactttgggaggctgaggcgggaggattgcctgaggt

SEQ ID NO: 475724 - DNA, 122 bp, Homo sapiens
tcccgggcgtcctctggaggcgcagaagtgcgtgcggcctcggtgtccaggtaggaggggcggggtctggaggctgggacctgtacagaggggaggaaggggaggttaggggctgagcctgg

SEQ ID NO: 475725 - DNA, 122 bp, Homo sapiens
acacacttggcaaacataggtggagacctgcaatcatctggcagaatcagactctcatttcgtcctgtggggctgcagacagaagctccctgtggacagcacgctgcatctgggtccagctc

SEQ ID NO: 475726 - DNA, 122 bp, Homo sapiens
tcactgaaagtagagagacgcgaaaaacctggagagacgaaagagccgccccagtccgagcgcagccagattttgttcaagttgccttgcagccagcctggaaaataaataaataaacctag

SEQ ID NO: 475727 - DNA, 122 bp, Homo sapiens
aaccttaggactcctgctccaggcctgcagctgggggacagtgtctctctgcagggaccccggctgccctaacccctagtggctcagtgcagaacctctggtggcttctctcctcctccagg

SEQ ID NO: 475728 - DNA, 122 bp, Homo sapiens
cgatccgtctgggcagcggctcttcgggggccacgccctccgggccctgggggcctagcgcgcgacggtggggtggagctagcctcgtgaccttttaccccaacatggctgcgcccgtggga

SEQ ID NO: 475729 - DNA, 122 bp, Homo sapiens
agctgtcggccctagaagtgcagttccaccgcgactcgcagcagcaggaggctgagacgccgccaacttcgtcctccggttgcgggggcggtgcgggcaaacctcgcgaggagaagaggacg

SEQ ID NO: 475730 - DNA, 122 bp, Homo sapiens
gcactggactacgtggccagcaacgcttctgtcatgaaccttctggtgatcagttttgaccgttacttttccatcacaagacccttgacatatcgggccaagcgtactccgaaaagggctgg

SEQ ID NO: 475731 - DNA, 122 bp, Homo sapiens
ggctgagtgatcaaaatagaggaagatggttgtcgccgcaatccagggctttgcaaggcgcggtttaatgggccgcctgtcagcttcctgctcgcaggaggaggtgacaagccaagcgagcc

SEQ ID NO: 475732 - DNA, 122 bp, Homo sapiens
agagcccccaaaaggcgagctctccaaagcaaaattctctggcctgccctatgctgatttcgccgctaggagacgcctgtaacccacgtttgcggagagagttccattcaaacacatctgct

SEQ ID NO: 475733 - DNA, 122 bp, Homo sapiens
tccagcagcaatgccttcctcggccatggcagtgggttacgggtgaacctgaatcttgaacgcacccaagcctccgcctccgcgcgactcggcggcaggagggaaagggcgagaactgatga

SEQ ID NO: 475734 - DNA, 122 bp, Homo sapiens
ggagagcgctctgggtagaggccgggcccgggcagcaggtggccccaggtagctcagtggcgtggcagtctccttctcgcccggtccggagcggaggggagcggctcaggtgccggctcggg

SEQ ID NO: 475735 - DNA, 122 bp, Homo sapiens
tttctaggaaaaggtagtaacttctggttcattgagtctgccgcggaaagcggggggtaacgcccagtggcaacagtaaactgacaggtgcactgggggcgtgtctgatggaaaactgcttc

SEQ ID NO: 475736 - DNA, 122 bp, Homo sapiens
ggctgtggttggtaggctagggctgtggtagggactcaagaagaaaactgtgggtgagaacgaatatttggaagttactgacttcagctgggactctcaatgaatcatgatcagtgtacaag

SEQ ID NO: 475737 - DNA, 122 bp, Homo sapiens
ttctgggggaggctctggatgtctctaaagaggtcctgggcctcagcctcgaagagccggcggttgtccgtgttctgcaggggctgcgcccagaaggagccaatgtagacgcgcagtacctc

SEQ ID NO: 475738 - DNA, 122 bp, Homo sapiens
ctgggagggcggcgggttggaagcaggtgccaccatggctagtggcagctgtcaggggtgcgaagaggacgaggaaactctgaagaagttgatagtcaggctgaacaatgtccaggaaggaa

SEQ ID NO: 475739 - DNA, 122 bp, Homo sapiens
cagctttgaagacattgcttgtatttttaaaaatctgtttaaaatttttctcattactttcgtatcttatcagtttcctctgctgctgtctcctgaagtgtcttctctgaatatggaaatgt

SEQ ID NO: 475740 - DNA, 122 bp, Homo sapiens
cgaaagtctgcagcttcactcctgagctagcaagaccacgaacccaccagaaggaagaaacgccgaacacatccgaacatcggaaggaacaaactccagacgcgccaccttaagagctgtaa

SEQ ID NO: 475741 - DNA, 122 bp, Homo sapiens
cctgtgacgaagtaggcaccgagatgtgaatgaagctggcccagaggagcgacagccgtccgcaggaccgaggcttctgagtcggagaggtcacccacaatcaccgtgatgtctggttccag

SEQ ID NO: 475742 - DNA, 122 bp, Homo sapiens
cgttcatgggctgatctccctccccaggactctgtggtgcccctgcaaagccaacattgccggaaggggcctcacttgggttcaagaggggcttccctagctcacctcggatgcctgtgggc

SEQ ID NO: 475743 - DNA, 122 bp, Homo sapiens
agccaccacacccagcctgtctttatattttcatttaatgtggaccttgttacattttaccgcagattttgtatttttgtgtgtgtttgtttgtttgttggtttttgagacagtctacctct

SEQ ID NO: 475744 - DNA, 122 bp, Homo sapiens
tatgagcaaaaattgcatttctctacatttattttttaactttgcaaggtttgtcaccatcgttgtactctaattcacattttaaataagggtttcctaccctttatatgacattttccttt

SEQ ID NO: 475745 - DNA, 122 bp, Homo sapiens
gagaaagaaggccacaaacctagaagctggagcccctagaagctagaaaaggcagggagccgattcatcccttaagcctccagaagggacatagccccgctggcaccttgattttagcccag

SEQ ID NO: 475746 - DNA, 122 bp, Homo sapiens
ggaagctcacactccacatagtcattgtgcatattatgtatccaataaagaaaatgtgaacgtcttggtctgctagtaagaaggagttggaatttcattttgtaatccaggtgttcccaaat

SEQ ID NO: 475747 - DNA, 122 bp, Homo sapiens
gctgggcatggtggggcgtgcctgtagtcctagctactccagaggcagaggtgagagactcgcttgaacccgggagatggaggtagcagtgagccgagacatgccaatgcattccagcctgg

SEQ ID NO: 475748 - DNA, 122 bp, Homo sapiens
cttctgtggctggatcgtcggagaacccgctttctcgctgggtgcagccctttgaggatccggatgccacagaggcctctggctgtacggcccgcatcccggcctcctgttcctgaggacct

SEQ ID NO: 475749 - DNA, 122 bp, Homo sapiens
cccgcagagcaaaggcgagtggttgtggacgtgcctgttgataatctgatcttgacatggcgccgcctgcgttgagactgttgctccatcaccccgtaggagcttagccatgaaatgttccc

SEQ ID NO: 475750 - DNA, 122 bp, Homo sapiens
gaagtttttttttctttagttttgctcttgatagctagatgtttcttttaacttttatttcgtaagtaaatatacacaaaggcattcatctttgttgaatctgttgtgcagatttttcttga

SEQ ID NO: 475751 - DNA, 122 bp, Homo sapiens
agcactgtgctggagtagactgtcgggggtcaaaagaaacacagggcttactccctgctccgggggctgggggtctgaaacacagatgtgggtgcaagagcactcacctgtaatagttaaat

SEQ ID NO: 475752 - DNA, 122 bp, Homo sapiens
ctggttattgtggtattccatcaaaaaggactcggtattatccaaggcttcatgaaggaacgtaaaaggggagggactcgcatgtttctttacctctagagcatgtatgttgaaggaggaac

SEQ ID NO: 475753 - DNA, 122 bp, Homo sapiens
ctgaagccctgtctaaaacagacaacccccaatgccgccaccgcccacatcactcctcatcgtagcacttatccctgacgttatcgtacagatttgtttattgtttaacccctcccacggga

SEQ ID NO: 475754 - DNA, 122 bp, Homo sapiens
caggacttcacaacgggataaagtgaagtagcttcggcttgtgaatgtgcattgcagagacgtgggagaagaaagctgcaaaagtcattataagcaacacccttgatcttaggggtgctggt

SEQ ID NO: 475755 - DNA, 122 bp, Homo sapiens
gtgaagaggcattcacagccaggcatttttctccagaaagctgtccctttggggtttcctcgtctttccctcccagtgagaccctggttcacctgctgtctctccagctgtcaagcagtggt

SEQ ID NO: 475756 - DNA, 122 bp, Homo sapiens
cgcacgcgcagcacagaacgagttccggtctggccgaggcttgtctcctaaaaatagccccggtgtggggatccgtgcgcggatgtcccggcgagtcccgggctgaaagaggcggctccggg

SEQ ID NO: 475757 - DNA, 122 bp, Homo sapiens
cccccaccccaccaagattcacatcccttctccggggaagatgtgcgcgatgtgacagcccgtgagtccgtccattccggggacactatgggggtcactgcggggggcgggcaaacagaggt

SEQ ID NO: 475758 - DNA, 122 bp, Homo sapiens
cttcatttatgttcttattttacattacaccacatcatgttccagaaaacaattgccattcgcaaatcatgcacaaaagtataacatttaaaacggagtgaaaaagacaaaaaagtgaatag

SEQ ID NO: 475759 - DNA, 122 bp, Homo sapiens
ataaccacttactgcaaaacacaagcacatagctccacaaaacctacatctaaactgccacgcccttgaacgcacacacaaactcaatactcatgtagttctctacatgccctaaatatacc

SEQ ID NO: 475760 - DNA, 122 bp, Homo sapiens
ccgcggtcctgcagttgccgctccggtccccagcgctggccggcgacccgaggcgcggctcgcacctacctgcagccccgcttcccggtggcggcaacacctagcgatgctcctgcagcttt

SEQ ID NO: 475761 - DNA, 122 bp, Homo sapiens
gcagggtcagtgctgagccatcccgggtgtgtggacctgctacgctaggtctggtctggacggtgctgatgggaccggggatgacagagccaggaggggccagaatgaaagtcgcagaaaac

SEQ ID NO: 475762 - DNA, 122 bp, Homo sapiens
ggctccacaagcatgtggcaaagctgcaacttcaccagagacatgtccaggagcgactgccgctgcaggctgtatgaggacactgtcttcaagccggccagggctccctccacgtcttcctc

SEQ ID NO: 475763 - DNA, 122 bp, Homo sapiens
gccccgggactgtgcgcagagtggatggggttcctttcaggtgtgtgcccctccttcactcgtgattgggggacacgctcagatcagtagcctcggtactgcctgtcagagcccaggagaga

SEQ ID NO: 475764 - DNA, 122 bp, Homo sapiens
gggaacccagacctgtctgcggcacaaagacctgtcttcccagggcccgaggggagccggcggccagaggtggaggcggccctcagacacctgcagctgtgcctggatgtaggccccccggg

SEQ ID NO: 475765 - DNA, 122 bp, Homo sapiens
agcggcgaaagaaccgaaaaaaggctcgacgctaccgtgtatgaggaactttgatccttgcgggccaccattccggaagtagaatttagaggaagaaaataccggagttgcagggtataggt

SEQ ID NO: 475766 - DNA, 122 bp, Homo sapiens
ccctctcgcgggggccgggccacgccagggcgcttgctccttacttggggggctcagcggcgcgggagctgccgcccgcctagatacctgactttatagccttgggggtctccatggcaatg

SEQ ID NO: 475767 - DNA, 122 bp, Homo sapiens
agcctcctgcccctccagttggggagccacggatgtcaaagaggcctgggtagaggggtccggaaggcaggatgggcagggacgagggcctgggcgcagggctgaccttgtgctccgaggcg

SEQ ID NO: 475768 - DNA, 122 bp, Homo sapiens
tcacagcgtgaccctggtgacctcgggcccttctgtgttttgaatagcaagctccctctgcggctgctctgtgaagggtctctacgagaaggtgaccgggagcggcggcccgttcaagagtg

SEQ ID NO: 475769 - DNA, 122 bp, Homo sapiens
cagtggctgacggaactctgctcccttccagtcacttttccaagtccagcaaattgtagacgagggaagattggtcactcggcaaacctcatgatcggcaggattgtcccaaaggtcacttg

SEQ ID NO: 475770 - DNA, 122 bp, Homo sapiens
ggattacaagtgtgagccacagcatccggccagaagcactcttaatatcttttgacacagcgaagtccacagagatataaatggtgtcttctggtgacttctgtggctaatgatggtataga

SEQ ID NO: 475771 - DNA, 122 bp, Homo sapiens
tgccccaccccctgagtcagcgccggcaggacttctcaccaagcccttctcccccttttccgctccctgttcctggttcctaggaagcagcccaaggagaagggaaaaggcaggtctgggca

SEQ ID NO: 475772 - DNA, 122 bp, Homo sapiens
cgtgggactgctgacctgggcgaccttggggcttctggtggctggactcgggggtcatgacgacctgcacgacgatctgcaagaggacttccatggccacagccacaggcactcacatgaag

SEQ ID NO: 475773 - DNA, 122 bp, Homo sapiens
ctgaggccacttctgcggcgtcttccatctccgcgagcagcggcctcctttactgagcgccggcccacatctgagatacaagtcaagacctctaggggagaatgaggcaaacaagacccggc

SEQ ID NO: 475774 - DNA, 122 bp, Homo sapiens
gaatggcactgggcaggagaattcagaaggtgccaactccctgcaggctggccctgtggccgggggctggggtttgagtggggtccgctggagggggcctgcgttccacagcgaggttggag

SEQ ID NO: 475775 - DNA, 122 bp, Homo sapiens
actaaacagagtacaaagaaaaggctctggacccaagcggaatcagcatcccagctcagccgctgctgcgctgggtgacttgactctctctgagccttggggaatgggctggatgctccctg

SEQ ID NO: 475776 - DNA, 122 bp, Homo sapiens
ccggcgtccccacgaccggccccgactaggcccccggctgggcccttcttcagctgggcgcgcacctctccttggagtagagctgcagctgctgctcctgctgcttcttccggataaacgcc

SEQ ID NO: 475777 - DNA, 122 bp, Homo sapiens
ttgcagatcctgccccagagtcagtgaaatttctttttcccttatactatctcaactttacgcagccaaccctgtgtacccaataatagctcaatttagtggcatccgctaaagtcttgtat

SEQ ID NO: 475778 - DNA, 122 bp, Homo sapiens
ctcccccgtgataccgtccctaacatccaaaggtggagaggatgatatttcttccaatttcgccgagggtgcacaccacccttgtgatattgatcctaatctccaggcggcgagaggatgat

SEQ ID NO: 475779 - DNA, 122 bp, Homo sapiens
gtctccggcacgaactggagcgcctgagcgaaggttgccgtactccgcaaggctggcgtccgcagcagggccggctgtggaagggaacagccgcgagtgaggactcggtcaggggatcgctc

SEQ ID NO: 475780 - DNA, 122 bp, Homo sapiens
gcggtcacctgaaggcctggccgtctcaccttgtcatgattcctccacatttgagagtgacggaggggcagggagtcagggctgtgtccacagtgtgtcctcaacccagactgagccaggcc

SEQ ID NO: 475781 - DNA, 122 bp, Homo sapiens
tgccctgattctctcattgataaaatagataactgtggctctaaccttgtagggttgctacgaagctagatgagttcccagtgttcctaaatgcagggcccgacacacagtaagaaagaatg

SEQ ID NO: 475782 - DNA, 122 bp, Homo sapiens
tcaccatgcggattttacaacgtgtgccaggtttgtttatcctgtaacctcaggaagaaacgaccaccaagaaacacagtgggaagtgaggcagatgagaggaggaagccatttcttttgaa

SEQ ID NO: 475783 - DNA, 122 bp, Homo sapiens
agcactcgcggccccactcgcggtccttgggcggcccgcgccctcatgcggcacacccggcggggccggcagattgcttgaattcaagtgtccgagaccagcctgggcaacatgaggaaacc

SEQ ID NO: 475784 - DNA, 122 bp, Homo sapiens
atgagaaaaaagagaaagtaagagggctcacacgagaggtttatcaccagctggacctgacgcatgcccttcctgtggccacacactgttcactggtcaagactgagactcacggccccact

SEQ ID NO: 475785 - DNA, 122 bp, Homo sapiens
aaggagtgcaagtcagcccttttaccctctgggctactcactgctcaacgaatgtctccacgctcttcctgttgcattcaatagccattacttaccactgacaagaaatcctaggcttcctt

SEQ ID NO: 475786 - DNA, 122 bp, Homo sapiens
cacaggggtggcccccttgtgcggggccgggagaggtttggggacaggagaaagaccagccggacggactcaggtacagagctcagcacccaggaagtttgtgaacgctttactaaaccaca

SEQ ID NO: 475787 - DNA, 122 bp, Homo sapiens
gaagcagcggctgcagcagcatcttagaacccctgcatcccctctaaggatgcaagtcaccgggtgcaagcttggttcagagcttaaaaacatctccgctctgtccccggcccgcccaccgt

SEQ ID NO: 475788 - DNA, 122 bp, Homo sapiens
gtgggtagcgagtcccctccaacttcatcttctttatcaactgcttcagatcctcagccacgatgagcccagtcagctctggtttgctctctgtagccaagaccagcggggttaaggggcga

SEQ ID NO: 475789 - DNA, 122 bp, Homo sapiens
tcaccttgtcttgtccgtgccttgtggaagctgtatgtcctgacccagggactgcagactcggggccctgtttcccttgtttctggttaaagcagacatctggatcacatatgcagccccca

SEQ ID NO: 475790 - DNA, 122 bp, Homo sapiens
ctccaggccagcaaggcgcgcgctccctccgccagccgctatggtggcctgggaaaggcccggcctgcagaacgtaactgacatcgcggaggctctctgggcctcagtttctcctcccgagc

SEQ ID NO: 475791 - DNA, 122 bp, Homo sapiens
caatttcctgaatgtctgctaggatggtgcataattaatgcatggatcttgttataactgcggatcaccagcatgcacataaatcaacagaaaacatgcaaatgtgcattttaaaaatgctt

SEQ ID NO: 475792 - DNA, 122 bp, Homo sapiens
gctggggttgagttggggcggctcgtcccgtggccgctgggtcgtctggtttccgctttccgaaagaaatgagaggagaggcaagtggagtcgctgaactttaattaaaccgtagagaagac

SEQ ID NO: 475793 - DNA, 122 bp, Homo sapiens
ttcctgaggcctccccagaagcagatgcaggcactaggtttcctgtacagcctgtagaaccgtgagccaattaaacttcttttcttataaattactcagcctcaggtacttatagcaatgca

SEQ ID NO: 475794 - DNA, 122 bp, Homo sapiens
agctttttttggctctaaatgaagtgacagcaatgagtgattttaaaattctcagctcttcgtggtttaaggtgtctgctcggagtgctggccgcacgtaacagatttttcgttttctgcaa

SEQ ID NO: 475795 - DNA, 122 bp, Homo sapiens
ggggctgggggttgtgggcacgcgcgggctggggctgggggttgtgggcacccccggccccgccccgccctgactcgtgcgccccacagcctccagtgtcaccactttcaccggggagccca

SEQ ID NO: 475796 - DNA, 122 bp, Homo sapiens
ccacctagcaacggtatctaagatcagggagcagcggttcccccttctgtgtggttcctgcgccgaggatccatctgggtgttccggaggggggagctgcgtgggtgtttccagccgggccg

SEQ ID NO: 475797 - DNA, 122 bp, Homo sapiens
cgctgatagggcagcctcccgacgccactcaaaacatcttaaaggccccaagccaaaccccgctactagtagaaccaacagtctaaacgaaagagccacgacgctctgcgcatgtgcgctct

SEQ ID NO: 475798 - DNA, 122 bp, Homo sapiens
aaattttcacaacataatatacatataatgttaaatgcacaaagccgaataaaaattctacgataggaacacaactatgtaagcaaaccaaaaaaagactgaaaaggtcgtcaccaggagtg

SEQ ID NO: 475799 - DNA, 122 bp, Homo sapiens
tctccttccccacgccatttgatggtcaggggcctgttgggtgatgcgtgggatcctccacgacctgcccagcctggactgccctggagaggtagagggacagtgctggcccaagccgttca

SEQ ID NO: 475800 - DNA, 122 bp, Homo sapiens
cccatgggactcaccatttccctgcaggaagatcaggcctatgaccatgcagagggggtgcgcgttgaactgcaggtcgctctcccaggcaatgccgcctcggtacagcccgagccacgcgc

SEQ ID NO: 475801 - DNA, 122 bp, Homo sapiens
gtggcctacagcggagagaacacttttggcttctgagggccattgctgggctaggtgcaccgtaactgcttgtgtatcttgtaaatagccagccattttcagttattataccagaacctctt

SEQ ID NO: 475802 - DNA, 122 bp, Homo sapiens
ggatgggggtgtctctccccctgccctcggcggtgggcacacagcgtgggggaggggcttcggtaaacagcttggggggtctttggcaagctattggagtgatctcttgcaaacggtggggg

SEQ ID NO: 475803 - DNA, 122 bp, Homo sapiens
cctgggaactcgaagaagcttgatgggggcagggagggtgagaggtggcggccgggcgagcgcactgtaggacccgagcacaatggagagagcccccgaactgctggagatgaaaaggtgga

SEQ ID NO: 475804 - DNA, 122 bp, Homo sapiens
tggcagctgcgggacccttggcttgtcccccaccgacaagtcccacctgctgggtgaggacgagactgtttccatctcaggcatgtatcccaccaagtgcctccctcacagccatgcccaga

SEQ ID NO: 475805 - DNA, 122 bp, Homo sapiens
cccggtccccttcccttcaccccggccgcctcctccggcattcctctcccgccctcaccccgggggtccccgagcgcgcccgcaaacccacccctcacggctacatcccccgccccgcccac

SEQ ID NO: 475806 - DNA, 122 bp, Homo sapiens
caggctggcgcccatgcggctctacacgctctccaagcgccactttgtcctcgtgtttgtcgtcttcttcatctgctttggcctgaccatcttcgttgggatcagaggtaaggttcggtttt

SEQ ID NO: 475807 - DNA, 122 bp, Homo sapiens
tggcaggaaggaagaagccgcgggtgtggcggaggtgaggtggccgggcccctgctccctcgcgctgggctgcgtgctctggatggggtggtgtcagggctctgcgcctccgcccggcggcc

SEQ ID NO: 475808 - DNA, 122 bp, Homo sapiens
cgtcagacggctgcgtgtcctgggcgcgctgaggggcctttttggcgcgggccccagttgcgcggacgggcggcctctcctgggtgtccggggcgctctttttctgccgggatcccgacttc

SEQ ID NO: 475809 - DNA, 122 bp, Homo sapiens
cgggggcgggaggggaggcggaggcgggccctcccggggcgctgtgaactttagctgggccgccgcctgtcagccccagaaagcgttaaaggtgcagcagcccgcgccagcctccgcagccg

SEQ ID NO: 475810 - DNA, 122 bp, Homo sapiens
ctcttcttctgagtcagaactctctcgtgctctgttatctgtgtatggccgagaatagcgcgtcctctctcgataaggggagctcctatggtagcgacgatcagagtcataataatgagatc

SEQ ID NO: 475811 - DNA, 122 bp, Homo sapiens
tcctccacgtcgatcagcaggttacagagtttccggtagtttttgtgaatcaggtcgatgcgctccgggcagacctcctcaaaggccatcaccacactgcccgccaccagctggggaaagaa

SEQ ID NO: 475812 - DNA, 122 bp, Homo sapiens
ccaagtgggcgaaaggcaaggggcctgtcctagtttccctgcactgggggcccccaccctcgccagcgctccctccggtgcgccctgggcgcgcagtctgtgcgctcgggagcccccagcgc

SEQ ID NO: 475813 - DNA, 122 bp, Homo sapiens
gagcataaccgctgggcagcgggcagcggacagcgggcggcatgaaccgccccactttgccggatacctggagctgcaggaacgacccacacccaggcctctttacccctaccgccccgtta

SEQ ID NO: 475814 - DNA, 122 bp, Homo sapiens
aacattcctttgataaaagtggttacacactgtaaacatcaatgagccaggaacattctccggtgcaacaggattctgataaagcagtcctattttgcaaaaccttccagtgtgaaacatcc

SEQ ID NO: 475815 - DNA, 122 bp, Homo sapiens
gtgtttatttatcttttttaactggagggaaagagcagggatgaggagaggagatgccttcggtattggagaaaaacaatattgtagagttttccatcctggtactaataaaattataaagg

SEQ ID NO: 475816 - DNA, 122 bp, Homo sapiens
aaatgtggtcacaagtcagtcctcggctcgcgtacgaagaggcggtctgcccagtggggacgcgggacccccctgtttcccctatttttatttattttttactttttttgagacagagtctc

SEQ ID NO: 475817 - DNA, 122 bp, Homo sapiens
aggctggaacaccgcagcaccgcaggagagatcggcaaacccaaaaggacagcgctgctgcgttcaaatggctttaggagacctcctgtcagagctgcaaacgtagctatggctgccgtatc

SEQ ID NO: 475818 - DNA, 122 bp, Homo sapiens
ccaagcacagagtttggtaaactcgggggaactggctccagcagagactgcctgagagagcgctccatcttccaacaatgggcccttgtaactggtgagcaagaaattacatttcagaagaa

SEQ ID NO: 475819 - DNA, 122 bp, Homo sapiens
gggatccgaggcaagcgttggttctgtgcgcctcaggtacgtgttgggcggcagtgggcgcggactcggtgcggtctctcgcgggctgcggtcgggcccgggatcctgctcctggccgagtc

SEQ ID NO: 475820 - DNA, 122 bp, Homo sapiens
cttaccttggagtcttccaagataccattttccctgcctggaattttccctcattctttccgtgagatcccaattcaattgtcttttggaaaaaccttctttgacacttcacccagttttca

SEQ ID NO: 475821 - DNA, 122 bp, Homo sapiens
tctcggcggctacgtagctccttcccgcccgctcttccctccgccccgcgacctgaacctcgacccctgaccccagcagcaggaaacgcatggcgattcaaaaccagtacagctttattggc

SEQ ID NO: 475822 - DNA, 122 bp, Homo sapiens
cggaggcccggggtccagggcgccccctgctgggaagctgggaaccaagccttagaggtccggcaggtacagatggaaccaggcccagggcgacccctcctagggaaaccaagggtttctag

SEQ ID NO: 475823 - DNA, 122 bp, Homo sapiens
cccgaaaggggacaagaggcgggtctggccacaggcagcgctagcgagagcttctccagccggcccccacacccacattccccaccctccagaccccagaccgagagccacagactggctgc

SEQ ID NO: 475824 - DNA, 122 bp, Homo sapiens
aacgaaaaaaaagtctactggaaaacactctccagaaaactcttagctttctgtcccttccgtctcaattattaagcactgccagaaagcttcatttgcttaacacttaccaaaaaacaaac

SEQ ID NO: 475825 - DNA, 122 bp, Homo sapiens
ggatggcgggcagctcaggggatccgggcgacggggtctggcgggcagggttgttccagccgcctttataaagccggcctccccgacccctcctcctctctgcagctctcccctcctccctt

SEQ ID NO: 475826 - DNA, 122 bp, Homo sapiens
cgcattcttgctcccgaatactagccaagtccctacagaggctgatcccgtgcaggggctcggttggacctttagcctcaaactcccgtggtggaaacagttaggattggtggacgctgcac

SEQ ID NO: 475827 - DNA, 122 bp, Homo sapiens
tctggcaggtaggctgcccgtgcaacttgttctgggagatgccgtgctcagatggggtgccgggctctggggaggagaggagcctctctgctagctgcctgctccctgcagctggtggagta

SEQ ID NO: 475828 - DNA, 122 bp, Homo sapiens
acgttaaagtgaccagagcggatgttcgatggcgcctcggggcagtttggggttctgggtcggttccagcggctttaggcagaaagtgctcgctctcacccagcacatctctctccttgtcc

SEQ ID NO: 475829 - DNA, 122 bp, Homo sapiens
ccttcaggactcccagctctgtccccacagaacctctccgcttcccacttcccaacggggcggaatggacaggacactaggcaaacgccagaaagaaaccacgtgcagttggcagctggggc

SEQ ID NO: 475830 - DNA, 122 bp, Homo sapiens
gataccccagggatacttacagctgcaccaacagcgtgtgcgctcctgcggagcacctcgcgcggtcttccccgtccgcgctgtaggtggcgccatacaagtgcagcacctgggcgctcctg

SEQ ID NO: 475831 - DNA, 122 bp, Homo sapiens
gtttagcctccgtttcaggggtcctggggagggcaagatgccgggagcaggcgggtagtccgtgttcgcacaggacacactggcatgactcaccatccagacccggcggaatggcttgcact

SEQ ID NO: 475832 - DNA, 122 bp, Homo sapiens
tggatactaccaaacgccaaatgactctaacacgtaggctaattgcaaggaccttaaaatcgcaaataaaaaggcgcctgtaggtcgggcgcggtggcccacacctgtaatcccagcacttt

SEQ ID NO: 475833 - DNA, 122 bp, Homo sapiens
tgaaaagatagaaagggctataacaatttgtttggttggctgaaatactcaccaaaaaaacgtggatcacagtgatcaagctggaaatgctgggctgacttgatttaacatagagcagggga

SEQ ID NO: 475834 - DNA, 122 bp, Homo sapiens
gcagggcaggtcttggaagtttgaaattggcggttacgcaggatgctgcgtttgaggacgcgactgttaatctaggatccctgaggaggtcgccagggcgctgtcccctgctctcggccacc

SEQ ID NO: 475835 - DNA, 122 bp, Homo sapiens
ccagttcctgcaccttcagctgccactccatcctctgcacggcgttcagggccgcggcctcgtgctgctgccgcatgaggaggcaagtcttcatgcggtcatacttgtcatccacgtcctgg

SEQ ID NO: 475836 - DNA, 122 bp, Homo sapiens
aggcgataagacacgcctcccatcagagagcagatgctgagcattcttggcctcgcaggccgtaggcctctgctgcacctgtcaactccacctggcggcacagaagctgccaacggtacgtc

SEQ ID NO: 475837 - DNA, 122 bp, Homo sapiens
ctgagactttcttttatttggcttcttcctcagctgtaaagtgaagtctttaaatctaaccgatctcacagtatgaattgatccccataagttctcttactgttccaggcaacaatgacatg

SEQ ID NO: 475838 - DNA, 122 bp, Homo sapiens
ctctggatccctgaaccctgccacaggtttatgtgacagccttacgtaagaaggggtactcgagagcaatttacttttctcttcccagagattcagcactgacacactttttgcacattgca

SEQ ID NO: 475839 - DNA, 122 bp, Homo sapiens
gacccgcgagtcccagcaccgcggcaccacggggaagactccgaggtttgctccgcgaggcgcccccctaccgaagaggaagccgaggagaaagaagccacccgccagcaccagcgccccag

SEQ ID NO: 475840 - DNA, 122 bp, Homo sapiens
ccctcccagactcttgaagtctccagcattatcaagactctagtgaatgaaagacattcacgaagtagtcctgagttttcacccttggaaatgaagaagccacgctcttgtctgtcttcagc

SEQ ID NO: 475841 - DNA, 122 bp, Homo sapiens
ctttactctctgtagtcgtccctccctctgccagtcctgctgtacttttcaaattctcctcgcctgctccaaacccgactcacctcctgctcccctcatcccaatagccccagcggacgact

SEQ ID NO: 475842 - DNA, 122 bp, Homo sapiens
gtgcaggagatggggccagtggggacatgaacctggagaaagcataactgaacacactgtcgatcatccaaatgcccaaacatttaacctggaaaaaaatggatccttcaatccccaatctt

SEQ ID NO: 475843 - DNA, 122 bp, Homo sapiens
tcccagctgggccatcgcgctaattgtccagctcgcctgatgccgggcgcgcggggcgctcgctcgcctgctcaccggcagagggttttagcagaccgaatttaaattttggtgagtgtttt

SEQ ID NO: 475844 - DNA, 122 bp, Homo sapiens
tagcaggtcgcctggttagaggccgtggacgaagcggtccaggcacagccagctgcagggcgcggcctcggcggcgctgctcgtggccctggtcagtgagcgcactcactcctggactaagg

SEQ ID NO: 475845 - DNA, 122 bp, Homo sapiens
cacatcatgagtcaccagaggcccttgacccttcctcccacaaccttcccccactgcgcccgctctcaccctggtcacagttagccgagtgtgtgcagggaactgtgtatgaaggtcaggcc

SEQ ID NO: 475846 - DNA, 122 bp, Homo sapiens
gtctgcactttgggaagattctttcctctcctaggcaagtgcccgcggggcctgagctctcgatagcggggccccaggagccacgttgtggggtctgctatccggcctccctctgcacgcgc

SEQ ID NO: 475847 - DNA, 122 bp, Homo sapiens
ctttccccatcagagggtttatggcacccaattctcattcacattctgtctctcctttctcgttcttctctatctctcctctctctgtctccttttctcttcctctctccctctctgtcttc

SEQ ID NO: 475848 - DNA, 122 bp, Homo sapiens
atgttaattgtgattttgtttattgtaactcagagagagcgtgaaagaaggaacagtgaccgatccgaagatggctaccattcagatggtgactatggtgagcacgactataggcatgacat

SEQ ID NO: 475849 - DNA, 122 bp, Homo sapiens
cccggccagcctcctgtgcgaggttgtggggggactctgtcgtggaacccagtacgtcttcgtgtgctggcttgtttgttggctctgtagttaacgggctgccccacgtggacaggcactgg

SEQ ID NO: 475850 - DNA, 122 bp, Homo sapiens
gcaggtgagtctggccaggggtcccttggcaccaggggttgctcaccttactgaggaccccgcagcgctccacaggcggcccagactccgtctctggatcctcctccgagcccgacgagttc

SEQ ID NO: 475851 - DNA, 122 bp, Homo sapiens
acggtggttggggaacgttagggagattggcgcgcggaccactgggtgagcgcccaggaacgccggacgcgcgccttcacgcccgggtgcctggcggcgttttagaaaagctgtatttgaaa

SEQ ID NO: 475852 - DNA, 122 bp, Homo sapiens
gcctgctttctcaggaagaggacggcctcccgcgcgctgccggcttcctcaggaagaggacggcctcccgcgcgctgcctgcttcctcaggaagaggacggcctcccgcctgctgccggttt

SEQ ID NO: 475853 - DNA, 122 bp, Homo sapiens
agcagagggagtgtgttacggtgtatgttaaggtgtgactggtgctgctggaggaatacccggatgaggaagtgtgcatgtgtgcctgtgcacactcatcagccagctgtaacttcacttct

SEQ ID NO: 475854 - DNA, 122 bp, Homo sapiens
ttcgcggtgaaaagtgaggggttgaggcgaggcaccgtgcggaccccgggtgcgggggagcggggctggcagcgcccgccgccgtcccgggcagggcgcgggcgggggctcacctgtgtggt

SEQ ID NO: 475855 - DNA, 122 bp, Homo sapiens
cttcatgatttggtgatgctactaacgcgggcgtgctcgcgaggcagagcccggctgccgcggaacctggaggcctgggagccacctactcgtccagactggtcagtccgggcttttggact

SEQ ID NO: 475856 - DNA, 122 bp, Homo sapiens
tgcatgggatatacttatactaaaaaggcatccctattttatctggtaactctcttcctgcgtccccccgcgtccgtgtgtgtcctgcccctgtgcggttctgccgtctttcaggcctccgt

SEQ ID NO: 475857 - DNA, 122 bp, Homo sapiens
gtacgtcgcgcggaggtcagaagagtcgctgaggaccgggtgcggcgggttcttattgctcgccgcccccttcctccgacaactcggaagcctcggaagccggagagccgcgagttcgtctg

SEQ ID NO: 475858 - DNA, 122 bp, Homo sapiens
ctccgccgacatgccgggtagcagcggcggacggcgatcccaggatctctccgcgccctgcggcctgctcccgaagaccctcggccggcccccagcccttgggccagaccgctcggcgcaca

SEQ ID NO: 475859 - DNA, 122 bp, Homo sapiens
taaaagcctccaaaggcgaccaagagccaggtctggccgtttgcccaaatcccaaacgcccgaaggaaactacttagatcaatttcaatcacgtcctagggagcagcttctttgaggaggaa

SEQ ID NO: 475860 - DNA, 122 bp, Homo sapiens
tggttgcacagcagatggacacaccagccaatgtggtaaataaacccttgggtccagctacgttctgcgcgctctctgccagcacagaggagcagcgagtcagggtacggagcgggtagcgt

SEQ ID NO: 475861 - DNA, 122 bp, Homo sapiens
aaaggaaacatctttttcacagtttctggagcctcattgcttcctgcatacagtgctttccgtgggaaatgggaatgtaagcctttctcctttatgtgtctattgcaggaaaagagtggagg

SEQ ID NO: 475862 - DNA, 122 bp, Homo sapiens
cctgggtgacagagtgagactccatcttaaaaagtttgttttctgtgtcattttatggtgcggaatccaagttccattttgtaagaaactgaaactttatgaaatgattagttccttatatc

SEQ ID NO: 475863 - DNA, 122 bp, Homo sapiens
ggaacagcaggaagactggtcagcagtggggactggtagtgtgggagccaagcaacagaacgacagagcagaggtcatcactttaaaccttatggaggtgactgattgcatgggctggagct

SEQ ID NO: 475864 - DNA, 122 bp, Homo sapiens
aaggagaccgcccatttttgctggggcaatcagggaactgcgtctgcggatggctgccctcgggggaccattcgccggggcggcgcgccgctggggactcggcgtgaaccgggcagcgggcg

SEQ ID NO: 475865 - DNA, 122 bp, Homo sapiens
ccggggtctgtgaatactaaaacctctcgaactttaacactgtcgtcgcctcattgaagccgcacccacaatccaacccacgatgtgaggctgcccgaaagcgacctgggcagttggatccc

SEQ ID NO: 475866 - DNA, 122 bp, Homo sapiens
cggcgggcggcactaaacagacgctttcctggggcaacaaacccagccgggcgcgggcaccgctcaggctcccttggtctagcgccctccagtgttgccggccagcactgctgcagaggccg

SEQ ID NO: 475867 - DNA, 122 bp, Homo sapiens
cacttcccttcttcttagaagaccctcggggaagtgtgtctgcatggatgcgtgtgcatgcgtgtgtctggctccgtgactcttggggtgcagcctggatgggtgggctcccagcacaggca

SEQ ID NO: 475868 - DNA, 122 bp, Homo sapiens
cacatcacaacagcgacactttgcactatcaacaatgaagcttgccctcaacaattatgacgttactggttttagtaacataaaaatacattgctggttgacaggaaggataaaaatgacat

SEQ ID NO: 475869 - DNA, 122 bp, Homo sapiens
actagatgtcagtataatttccccagttatgaaaaccaaaaaaagtctctaggccgggcacggtggctcccacctgtaatcccagcactttgggaggctgaggcaggcagatcacctgaggt

SEQ ID NO: 475870 - DNA, 122 bp, Homo sapiens
ttctgggagatacaattcaagttgagatttcggtggggacacatctaaaccatatcacaccggtaacatggttatttattatcattatcaagtattatgtcctgtatataattgcatgtgct

SEQ ID NO: 475871 - DNA, 122 bp, Homo sapiens
aagggaagaaggagacggagatggtgggaaagagggtggaggtgggcgctcgttaggaatcggctttcaaggaggcagaaaggaagttgtttctataaagaacacaaataatgaaattgctt

SEQ ID NO: 475872 - DNA, 122 bp, Homo sapiens
ccaccgcaacgtcattcggcgggacgctgccggacgctggttcgcctgacgcgcgagctacgcagcatgctctgcggtcccacaggcggcgctatggctctaccttagtattttgtaaatat

SEQ ID NO: 475873 - DNA, 122 bp, Homo sapiens
gggccccgcccatggggcgcgcagtgtaggtcggggcctgaggtcccacggtcttctcgccgcgtgcggccgggagcaaacgcactacaggttccgtggcgcctcgcgcgaggccagaccgg

SEQ ID NO: 475874 - DNA, 122 bp, Homo sapiens
ctccacattcagcagaggcagcagcagcagcaggggttgcagcagcggtggtggagacatcgctggggacctgggtgtgaacccaggtgtcctggggcctcattttctttcccctgtgactc

SEQ ID NO: 475875 - DNA, 122 bp, Homo sapiens
tttgtataaccactgccgtaatcagaatatagaatatgccttcaccttcaagctccctgtcgtcatacctgtggccacccaccggcctgggtttcctgggactgaggggtttcgtgtggatg

SEQ ID NO: 475876 - DNA, 122 bp, Homo sapiens
agtccaagggagcattggggcagacttgtactcagagccacctgagggacttggcggtggcgcccagcactgtcccctcccctcgtagagacacggttgtcgtttgggagtagggaacactg

SEQ ID NO: 475877 - DNA, 122 bp, Homo sapiens
cacctgatattcctcctgcccgcagctacgattcatgtgtttgcacccaccgagctgctgcgggcagcctccccagcactggacccagcaagcaagttatctcgccgactcccagcgctgtc

SEQ ID NO: 475878 - DNA, 122 bp, Homo sapiens
gcgacccaggcttagttggggaggctgctctgccaccttcggaaggcgggcctctgtgcccgcccggccaatcgcgagcaacctctccggtgtgggcgggtagaagcggttccgcgtcccgg

SEQ ID NO: 475879 - DNA, 122 bp, Homo sapiens
accagactcctgaaactcaggtttgtttgtccctcttccacccttagcttaggtatctttcgcctccaaaatgaatatagagcagcagacatgaatgttgtttcatctacctgtctctcagg

SEQ ID NO: 475880 - DNA, 122 bp, Homo sapiens
gtgtccggaggcctgctaaggaataaggctgtgtgccaggctggggagctggaggccatccgagggctttgcggaaccgtgggagggttttgtgacttaaaaagatctctcttgcgcggatg

SEQ ID NO: 475881 - DNA, 122 bp, Homo sapiens
ccgccggaaggccttcctccactggtacacaggcgagggcatggacgagatggagttcaccgaggctgagagcaacatgaacgacctcgtctctgagtatcagcagtaccaggatgccaccg

SEQ ID NO: 475882 - DNA, 122 bp, Homo sapiens
agctagagtaatgaagactgtgtggtactggcataaggatgaccatacagacccgtggaccggaattgagaatccagaaataaatgcatactttcacaacccatcaatttttggcagcggtg

SEQ ID NO: 475883 - DNA, 122 bp, Homo sapiens
tacagggaagcctaagatatagtgggggacacagtgctacccctaaccctcagcatggcacgtgagcaggaattgcagcagagaaactgagaccgagggaagtggccccgcctgcgctggtg

SEQ ID NO: 475884 - DNA, 122 bp, Homo sapiens
cactcagccgccggggccagagcgggagtcaaggtgagggcgcccccaggtggccgctctcggccgcggcgatcgccctttgggaaagcaccgcctgagtgcagggcaggttggcctggtgt

SEQ ID NO: 475885 - DNA, 122 bp, Homo sapiens
gcggccggtgctttggccgatcccgcgccgctgcctcgggccttgggcggcagcgccccccgcccaacccgcctctgcagcgttcctggcgtcagcccctatcctccagcttcctccgcccc

SEQ ID NO: 475886 - DNA, 122 bp, Homo sapiens
cgcctatggcagagcccgtaggcggtccccagcaaccgccgagcagcattgaccaacagacggccggtttatcaaacagactgtcgatttcaccaatagtagtggaaaggcgggcatgaaca

SEQ ID NO: 475887 - DNA, 122 bp, Homo sapiens
tcaggtacatccccgagggcctgcagtgctcgtgtggaatcgactactacacgctcaagccggaggtcaacaacgagtcttttgtcatctacatgttcgtggtccacttcaccatccccatg

SEQ ID NO: 475888 - DNA, 122 bp, Homo sapiens
gtatctgtgtccgcttgctttactcaatagccgacgtaaactgaggtggacgtcagtgtccgcgtccgcttgctttactcaatagccgacgtaaactgaggtggacgttggcgtccgcgtct

SEQ ID NO: 475889 - DNA, 122 bp, Homo sapiens
ggtcccggcggccggcgcagacccgagcagactccgcgaggcaccccgcagacccggccccgcagacagaaggggaaggatccccgccctgaccagatcccagctccctcgtagacgcggcc

SEQ ID NO: 475890 - DNA, 122 bp, Homo sapiens
tgaacacctcccccagagccttggggcttagaattcccacctttgttcctagcccttgtccgcagaagccctttgttaaaaatacagaagttaactgggaaggaccatatgttgacagagat

SEQ ID NO: 475891 - DNA, 122 bp, Homo sapiens
gggtgggtggaagggaaccactctcagagcgatgctgcatcctcccgctggcgactaccccgagcccacctggcggtcaggtagcagatcctcacctgccccgagaggcgccttccccaggg

SEQ ID NO: 475892 - DNA, 122 bp, Homo sapiens
ttcagctgtctcctgctaagtgagcgtactccccctttcaggctgacttcctcatttctccgtttccctgataaatgggcggggcctcggggaggtatggaaactgaaaagaaatcattatt

SEQ ID NO: 475893 - DNA, 122 bp, Homo sapiens
tggttggcgtctccgggacggatttgaaacttggcggttaaagctccggctgggacagggcggcgggaggcccagggagaacggggaagggacatttagtttggtgagttacgggggcacac

SEQ ID NO: 475894 - DNA, 122 bp, Homo sapiens
gctgactgttcgccgcatggaattgaaggcagatcagctgtacaaacagaaattcattcgcggtttctgtcacctgtgcgatggtcaggaagcttgttgcgtgggccttgaggccggcataa

SEQ ID NO: 475895 - DNA, 122 bp, Homo sapiens
ctctggagtgggctgtcctgggacaggctgaccgggaacaagtccccgcccggggcttatcgctctgagtcagagaaggaagagggcttagtccatctccacaccagcatgtcctctcctgc

SEQ ID NO: 475896 - DNA, 122 bp, Homo sapiens
gcgtccggagtgcaaactacaagccccagaaggcaatgcgccagcagtgatgggagtgggcgcggaggcgcgggctccccgactacgcctgcgcagcggggctgagttggagaacgtcttag

SEQ ID NO: 475897 - DNA, 122 bp, Homo sapiens
aagacgcgtttgagggcgctagggcctcagggagccggggtggcgggggacttctgtacccgggcgggaggagggctgcaaacacctagatcaaggaggtcagggggcccctgggtgggagt

SEQ ID NO: 475898 - DNA, 122 bp, Homo sapiens
cctctctccgccaatgccaggcgcgcgggggagccattaggaggcgaggagagaggagggcgcagctcccgcccagcccagccctgcccagccctgcccggaggcagacgcgccggaaccgg

SEQ ID NO: 475899 - DNA, 122 bp, Homo sapiens
gctggcgagccaacccggaacctcccggtccgcctcccgcccccggccccggccccagcgcgcctcctgcatacacgcccgcacccagaaagttcagtcaggggcgagcccggctcggcgcc

SEQ ID NO: 475900 - DNA, 122 bp, Homo sapiens
gtgcaaggccgtcaaatgccgtacttgaaaccagttggtcacccagggaggccaaagccccgggaggtgccaggcctgctttgtgccagggtgacattgcccaaaggcaaaccagagtcccc

SEQ ID NO: 475901 - DNA, 122 bp, Homo sapiens
tcacctcagacctacagtctcagaaaattgggtgtggggcacagcaacaaaccttccagccgttttgatgcaagctaaagtttgaggacctccggcctataaagcaaggcaagactagacgt

SEQ ID NO: 475902 - DNA, 122 bp, Homo sapiens
gcgccggtgctgttgccttcaggtgaccacggattcgccatcgtgagttccaggtgggcgcgcggggcccacgtagggcaggaggccagccccggggggatcgggcccgggactctgcggaa

SEQ ID NO: 475903 - DNA, 122 bp, Homo sapiens
caccgctccatggctgagaagccgaaacgccgggtcccagggacccaggtcggcctgagacgctggatgccctgaggctgacagaagacagggagcagactatgagcctcagacgccggggt

SEQ ID NO: 475904 - DNA, 122 bp, Homo sapiens
acccttgtcacctgccaggcccagttccaccactatacatagtctatgtgtcacttatgccgattgaataaagcactattttaaacaaccacatttgcagggaacaaaaataacaccatcaa

SEQ ID NO: 475905 - DNA, 122 bp, Homo sapiens
gcattttctgtgggtattttttagtttaattatttacttcaccctcttttgcctctgctccggttttttctgttgttcttttgtctaaagattttttgttttgttttgttttgttttgcttt

SEQ ID NO: 475906 - DNA, 122 bp, Homo sapiens
acatccacgcccctcagttgctgccgctccagcacctggctccgaagtctgtgcagaaggcgaggctcccgtagtgctcgagagggccttgcacgctccccgtggagggaacaaagctacgt

SEQ ID NO: 475907 - DNA, 122 bp, Homo sapiens
aaaagataaaaagtgattttaaagaacccaacaactgagtaaaggacttatcttttaccccgtgtaactttgctgaatatatccagtatttccaggagtaaagtttccgctgcagaatattt

SEQ ID NO: 475908 - DNA, 122 bp, Homo sapiens
ccctcaccgaatgcttagcagccacctcgagccctggggcagggggcggggtgtcgggtgcgttcacaccactagtctgggcttgcctgatggttaccaccccgccgaagctgccgccttgc

SEQ ID NO: 475909 - DNA, 122 bp, Homo sapiens
gtgttgctagtcagatcggtgcacgatcttattgctgttcatggttatttccctgataatcgctccccagaggtcagtctggctacaacctagcatatttgagcacagtgatttgcaagatg

SEQ ID NO: 475910 - DNA, 122 bp, Homo sapiens
agggccagagaggctgaacgcactaagtcaaggcaaaagaagaaacatgtggaccttcagcggaagcaagtgtcaggttgtatgtggccttggaataggagctttgattttattccaggtgt

SEQ ID NO: 475911 - DNA, 122 bp, Homo sapiens
catcaggccgggcgatgggctcgagtttcaggccttgtcactcagctgtcaccaaacaaacgaagctctcagagcccaggagagggagagctacctgctattcatgacccctggagcaggtg

SEQ ID NO: 475912 - DNA, 122 bp, Homo sapiens
tccactagctccttcctagtcacaaccgaactcacggggcggaggcccttaaggagcactcgcatccttcaatcgccgactagaagctcgcccggtgggcggagccgtgccagctcagggca

SEQ ID NO: 475913 - DNA, 122 bp, Homo sapiens
cagacgccggggagggggcaggcgttcattgataaaacgctgggctcccctgggcgccagcgcagcgtagcaaatccaggcagcgccacgcgcggccggggccgggcggaaccgagaagccg

SEQ ID NO: 475914 - DNA, 122 bp, Homo sapiens
gaggttaacttggtggcctaggagagggagaagccaggagaagcacttactccaaccacacgtctttccactacatcggcttgttttactaagtaggattttattttagggttcaaagaaac

SEQ ID NO: 475915 - DNA, 122 bp, Homo sapiens
cctattccagaaccaatcactcgagttctagtggggagcgcctaagccaatggaaatgctcgctgcggcagctgccgggtcctgggcgctgggaggcggtgccgggggcggggtgcggctgg

SEQ ID NO: 475916 - DNA, 122 bp, Homo sapiens
ccgcgcggtgacgcacttcacccagtcctgcttctttcttctggcgccgccagtggcccgcggtgcgcattctaatccgtttcacacacggtgctgctacctcgtttgcttcgtgcgtgcgt

SEQ ID NO: 475917 - DNA, 122 bp, Homo sapiens
cgcccgagtccccccggtgcccaccagcccgtcccctgcatctccctcgcccatcacagccggctccttccggtcccacgcagcctccaccacctgcccggaggtgagcctggggaagggaa

SEQ ID NO: 475918 - DNA, 122 bp, Homo sapiens
atgagttcaccttcacaggggcggcgggttaggactttaacacgtcttttcgggggacaccgtgcagctgcctgagccgctccggctgtgtgaccacggaggagttgccccctagcacccag

SEQ ID NO: 475919 - DNA, 122 bp, Homo sapiens
gagcaaataaatcaactaccatgatcggaagggcttgtcaatccatcgtctttgctttatcgtgtgcaaagtgtgctactgccccctgagcttcctgcatttctcttttcttgaaaaatcag

SEQ ID NO: 475920 - DNA, 122 bp, Homo sapiens
gacccctcaggggaaaccggctgcatatctgggacacttccctcttgcctcagtttcctccgccaagccccgccccggtcggccccgcccccgtccctccccacccgagggcagggcgacca

SEQ ID NO: 475921 - DNA, 122 bp, Homo sapiens
tgtgcgtttcgttacgcgtatgtgagtatgtgcacgtgatttccagaaaggagaagcgcacgatactgcccgtgctctgtgactcctgagtgcacgcttcctctgcatttgggctcctaggt

SEQ ID NO: 475922 - DNA, 122 bp, Homo sapiens
ctggagaggtgcctgtgatccttggctgtctcaatccgacctctgcctccatggtcacagcgtcttctcccttctaaggagccctgtgattatatgggatccacctggataatccaggctaa

SEQ ID NO: 475923 - DNA, 122 bp, Homo sapiens
accgcgtcctgcccagagctccgataggcgggccgcgttgggggattgtgggggccggcgcgcaggggaaccgtccactcccagggtggcaccaggatgtgactatttccatacccaaatga

SEQ ID NO: 475924 - DNA, 122 bp, Homo sapiens
gcggggcgggaatacggcaacgggccgcgggggctgttactgtcgctaccaatcaagagtcgagatggctttgatggacaggcatagcgcgagtgcgggctttcgcccaaccggcgggccgc

SEQ ID NO: 475925 - DNA, 122 bp, Homo sapiens
tcggtaagatttcagtagataccgcaaacagaagagcaagcagaaagggagatttccaagcgaacaaaaccggccctagctactgagcatgctcaatgtcacttagaaacccgcagaagttt

SEQ ID NO: 475926 - DNA, 122 bp, Homo sapiens
tcacccaacctttaggtaagagacaaaaggcgccaatgagaagattcactcctgaggcaacgccctgcctcagccaaggagctcttacctgccctcagataggcatgcccgtacttcaagac

SEQ ID NO: 475927 - DNA, 122 bp, Homo sapiens
cctctgcctccccctttcccagtcacagcatgacaggggaccgcaggtctcgggaaaccccgggggaggaaaagcatgttgtgcattgcaagctgcttaaggaaactaattaatgaattgtt

SEQ ID NO: 475928 - DNA, 122 bp, Homo sapiens
ggtccgcaggcccccgagtctctgggagaacagcctccggccacgccgtgcgctctcggtcgcagacacaggcgtccctgggtcccgcaggatcctgccaccagcccgcgggccccgctggc

SEQ ID NO: 475929 - DNA, 122 bp, Homo sapiens
atggagcacgtccaggctgaccacgagcttttcctccaggcctttgagagtgagtgtgtgcgaggctttgagggcaggaagacccactctgccaacaccggggatgggacactctgctgggc

SEQ ID NO: 475930 - DNA, 122 bp, Homo sapiens
gagccccaggcttgcctcccggctccggggaaatcggttccctccactggggccggcatgcgctctgcatccccaggctgtcctcctcgggcttgggggggtctcctgctgtgcctctgtct

SEQ ID NO: 475931 - DNA, 122 bp, Homo sapiens
cgtcttcgcgcgcgccgcagcctgggcgcccggccctcggaggtggctccgcccgcaccacgccccctccggctggtcccgcccccccagccggcaccgccccctccagccgcccgggcgcc

SEQ ID NO: 475932 - DNA, 122 bp, Homo sapiens
aatgactaagtccacaactcaactctcaatgttaaggcagcacagctacagtgatagcaacgctaaccaaaaggtaatgaacatttagtcacttgccagcccttttgttacaacagtgtagt

SEQ ID NO: 475933 - DNA, 122 bp, Homo sapiens
ctagagccgggggctgggcggggaccgggcttgtcggtgaagcggcagtggcggcggcggcggcggctcggcaggcgggttcaggcttcgggggccaggtcggttgggtgggtgggtgtctc

SEQ ID NO: 475934 - DNA, 122 bp, Homo sapiens
tttcttagaaagaaatgttgaatagggacttatgtccagaagccatgtctgtgtctaggacggcgagacaagatggtgaatccccacaattacaccccagacccagggtttatatatcatag

SEQ ID NO: 475935 - DNA, 122 bp, Homo sapiens
ggggcacgaggtgcctgggacccccaggggtatcctaagggtcacgggaaagacaccacacgcctgcccactcaggcctaggcaggtccatagacgcactaggaaataaggaaacatatcaa

SEQ ID NO: 475936 - DNA, 122 bp, Homo sapiens
tttgctcttgaagggaatcatctgggctctgaccctggcttgtgtatttcattcccctgtcgtctgccttcagaccataagctgccttgtggtgcagcctggaccagcaggggcttgcattc

SEQ ID NO: 475937 - DNA, 122 bp, Homo sapiens
ctcttccgcggccggcgcggggagcgagtcgctcttctccaggtgatgcgctcctggaggcggcttgagagaggagagttgtttttgattgtgcaagttccagtgggagctgtagttaagca

SEQ ID NO: 475938 - DNA, 122 bp, Homo sapiens
cacggcgggtgggtggggggaggttcccacatggcgggctgcaggtcccgaggccagccccgcggggaggcagctaaggcccgggcgagaaatctagcaaagcagctgctggcccaggtgct

SEQ ID NO: 475939 - DNA, 122 bp, Homo sapiens
gcctcacaggaaaattctaaataatatatctaaataccccttcttccaatagcgggagctcgatttctgccccacccacccccactttgattatgggctatgcctagtaacttgattccaaa

SEQ ID NO: 475940 - DNA, 122 bp, Homo sapiens
gagatcacgaacccaccagaaggatgaaactccgaacacaacatcaaaaggagcaaactccggccacgccgcctttaagaactgtgatattcaccgtgagggtccgtggcttcattcttcaa

SEQ ID NO: 475941 - DNA, 122 bp, Homo sapiens
gcttttgccaaatagggaaggggcataggctgtgagctgggatatgcctgcgagcacgtccggtacagatattttggttaaagtacaaagacatggaatgtattacgtgcctgtgagcatgt

SEQ ID NO: 475942 - DNA, 122 bp, Homo sapiens
ttccacccatgccattgttggggaacaggtgtgaggaggcacctagtccaaggcagggcccggccactgagtaattgcttctctgagcctcaccttcttaggtaaagacagggtgcacgggc

SEQ ID NO: 475943 - DNA, 122 bp, Homo sapiens
ctagttttgaatctcagtccaccacttcatattttcacttgacaaatgtttactaaggaccgattttgtgccaggcctggttctaagtgctgagaatgaggaagtgagcaagatagtcaggg

SEQ ID NO: 475944 - DNA, 122 bp, Homo sapiens
caaaagtcccagcttcctcgcaggggcagggacccgcacgccggcccagggcttggcacgcggggatgctgaaacagggccaggcctggtttccagccgatcgtcagagtcccaaggcccag

SEQ ID NO: 475945 - DNA, 122 bp, Homo sapiens
gctttttaaatcaaccattctctctttctctctctatcatttttttctgagacagagtctcgctcgtcgcccaggctggagtgcagtggcgcgatctcagctcactacaacgtccacctccc

SEQ ID NO: 475946 - DNA, 122 bp, Homo sapiens
ttctcagtggaagtatcatggtcctcacgagtgtccttggcggccgccatgggggcgcagcggtggccgctcacctgggtctgttatcgctggctccgcggcctctcggcggctacgtagct

SEQ ID NO: 475947 - DNA, 122 bp, Homo sapiens
tatccaggcctcatcctcactccctttctctactgataattggacccaacaggaccattccgaatcatttttctctcttcagttattcttcagttctactcaaagggtcagtttagggcata

SEQ ID NO: 475948 - DNA, 122 bp, Homo sapiens
cccacagcacagaagggaaccccacccctcaggctgtgcgctgggccagacccactccttcgtcaataactacaaaggtatatcaaattccaaaacgccacggggacgcctgaagcaaacag

SEQ ID NO: 475949 - DNA, 122 bp, Homo sapiens
ggaggccccggggacaggctcgtcggtcttgtcggtcttggtggaggctgtggagttgcccgagtcgctgctcacagaaagcgtgtgttccacgtggttgggggtggccgacagtgtaggac

SEQ ID NO: 475950 - DNA, 122 bp, Homo sapiens
aagagaggatgtcaatagcaggtattggtgtgtaaacaagtcaaatttaggtaaaagaagcgcggacacgtttcattatggattcttggaagccattccctgcagatttaagtgggtaattg

SEQ ID NO: 475951 - DNA, 122 bp, Homo sapiens
agggagagcagcagatggctaacacatctttcagaaccagaatgcacagccagtattagacggtatttactgcaaatattgtaacatgttgagtctaagagagccaggggaaccgaaaggaa

SEQ ID NO: 475952 - DNA, 122 bp, Homo sapiens
agcccctgccactcccggcagccctctgtcatctccgacgcatctgccgccgaaggcgaccggtcgtccacaccgagcgacatcaactcccctcgacaccggacacactccctctgcaacgt

SEQ ID NO: 475953 - DNA, 122 bp, Homo sapiens
ccggggcgtcgctctcattaacccccaatcagttcacctaataccaggtcgaaatctgagcgcagcgggagggcgtggctgcgcctgccgctaggctccagccggctccgggggcggtaccc

SEQ ID NO: 475954 - DNA, 122 bp, Homo sapiens
agacttatctcggggtagggccgcagccggatttccaaatcgcgggtttgattttcgctgcgtcctctccgcgacgcgcgcagggagcgcgcccggccacctgcagcctctggctgcggcca

SEQ ID NO: 475955 - DNA, 122 bp, Homo sapiens
aaggctgcctcaatctggggctgactgagcgggaagatgcagggcaactcgaggatggcccggggcagccgccctgggtcgcggaagcccacgcccctgttttgggcgccgggcagcaggga

SEQ ID NO: 475956 - DNA, 122 bp, Homo sapiens
gctgtctcctttacctttttcaggtctctagtcatttgtcacctagggtgagtctttcctcgaacactctacttaaaattgcaatcaaccatgtacacacatcctcacactcactttatttt

SEQ ID NO: 475957 - DNA, 122 bp, Homo sapiens
gcttctttcccccccccgccccgcctccgcccccgcccccgccgcgccgcctctctcccgcgctccggaaggcctgcgtccccgctccccagccaggcgccaccacctgccgcccaggcagc

SEQ ID NO: 475958 - DNA, 122 bp, Homo sapiens
tgcggtggcggacagggacggggccctactgccaagagactcactgagacagtgaacactcggtggaggatggggcctcacatgtgcctggtgcgggtctggctgacggcgccttagtgtgg

SEQ ID NO: 475959 - DNA, 122 bp, Homo sapiens
caggacagccccaagaaaggagtggctaattcttcctgggaacattgaaaaggatatcttcgaggacgtgggttttaaactaagtcttgagaagctcctttggctgagaagtgaggaaaggg

SEQ ID NO: 475960 - DNA, 122 bp, Homo sapiens
gagagggaaccccacctgccacagataccagctaggtgtacatacagaggctgcaggaggcggtgtctgatttgcatagggtccatgggattggtttgactaggcatgtcattcacatagcc

SEQ ID NO: 475961 - DNA, 122 bp, Homo sapiens
cgaaggagcggtgggccacgaaccctcagagcggtcggcgcagctcacacccgacggccgcgggccaggaacacagaaaggccgagcacacgccacttccggtcccagtcaactaagggcct

SEQ ID NO: 475962 - DNA, 122 bp, Homo sapiens
ctgaggccagctggacccaggggagcagcggggaaccagaaggagcaagggcatggccatcgggacagactactcacaagacctggctgagctgatggaactgctccagagcctggcgacac

SEQ ID NO: 475963 - DNA, 122 bp, Homo sapiens
ctcttttttgcacgttaggagaaactacatttcccataatcctttgttccagggctggagcggctctgggctccggaatcgcccgcagccggtactgcgggacccactgcggatatggctgt

SEQ ID NO: 475964 - DNA, 122 bp, Homo sapiens
ttctagttcaaggcagtaaatatgcagcagactataaccattatatagacgctatccagtcgtgggggtcctccacgcaattaccagcaaaattaccagaacagtgagagtggggaaaagaa

SEQ ID NO: 475965 - DNA, 122 bp, Homo sapiens
ctttctttttattttcttttctattaggaacactactgcaataaaaaatatttggacacacgttttgggtacgtgtgtctatttctgtagaatatattcctacagctggaattgctgggtgt

SEQ ID NO: 475966 - DNA, 122 bp, Homo sapiens
gtgtcagcgcagcctccatcttatggctgaaccggactgaggtcgagctaggcaagaactcggggcacagatgtggagctgactgcggggaggcctgagtcccgccacagccacttcccacc

SEQ ID NO: 475967 - DNA, 122 bp, Homo sapiens
agacctatttgtctgggagctgcaggagccttgcagttgattgtggagccctgacaggggcgtttcagagaaagtcaggagctgccttcgtgtgtctggatgaaggggccacggcaagatcc

SEQ ID NO: 475968 - DNA, 122 bp, Homo sapiens
actatatgatggtacgctactgtgcatatcttccccgttcagtgttcagtgccctcgtatcggcagcttgaactagctcatggtacacgctgggaatcagggtgggaatcagttgtaaacca

SEQ ID NO: 475969 - DNA, 122 bp, Homo sapiens
tatagctctttttttaagagtaagggaaactttccccaaattcatccagacacttcctctcgtgtcttgttagtcagaatgaagttacacgcccgttcataaactaatcactgggtcaccgt

SEQ ID NO: 475970 - DNA, 122 bp, Homo sapiens
aagccttcacgcccctcgggccttgcagatccctctcccagtttccgcggcggtccggtgcggtcagtacctgtctaaaatcaatattgccgaggcctccgcagcagtcaggccctgccacc

SEQ ID NO: 475971 - DNA, 122 bp, Homo sapiens
ttacaggcctgagccacagcacctggcctgctatctcattttatcttcacaataacccaacgtattatataaggctgaaattatttggattccagacacagatggtaaaaacaaggttatga

SEQ ID NO: 475972 - DNA, 122 bp, Homo sapiens
ggcacaggcacggcccccgggcccacctccctcatccttgcatcataaagcggcgaagaccgtgtggaataaagtaagtgaaggagtcagtccctcacaaaacaggctccagaagccacagc

SEQ ID NO: 475973 - DNA, 122 bp, Homo sapiens
aggtccagctcatagctccgctccaggcagcgcacgcggcacacagtaggtacgccgctgcggctcagttccgccccctccgcaggctccacccacggctcagctttgagcctccctgggcg

SEQ ID NO: 475974 - DNA, 122 bp, Homo sapiens
tgaggtgttggccagctaatcacatgtagtcatctcctcagaaggatccaggcagcaaaacgaaccagagttatgagtaagtgtcctgaggtggccctgagggcacagaccctgaccatacc

SEQ ID NO: 475975 - DNA, 122 bp, Homo sapiens
tgaggacttccagaaccaaaacttgttatagattggttattattttcagtttctccttcccgccctaggaaagtattattacatatccacaccctttgccatgttacttggcagtgcttccc

SEQ ID NO: 475976 - DNA, 122 bp, Homo sapiens
gccccaccccaccctcttgatttctggggccggtgaccaggcccaacgcagccttcaagtcggcccaaacacggtttctgcctcaaggattatttatataaccattgcttattggctgctgg

SEQ ID NO: 475977 - DNA, 122 bp, Homo sapiens
ttccccgcagggtctccaggtgtcccgggtctccctgtcccaatagtcgagtgtctttctcgagttggtgacaacaagctgcatgccagcgtgtgtgtccagcttacagtggggatgtgttt

SEQ ID NO: 475978 - DNA, 122 bp, Homo sapiens
tgggatcaaccagaacatggatgctgttacagaagagctgcaggccaaaacagggtcactcgaagaaatgactcagaggctcagggagttccaggaaagctttaagaatattgaaaagaagg

SEQ ID NO: 475979 - DNA, 122 bp, Homo sapiens
ccgcgactccggccgcctcagcccggacctcagcgtgtgcggccagcccagggacggcgacgagctgggcatcagtgcctccctgttcagctctctggcctcgccctgccccgggtccccaa

SEQ ID NO: 475980 - DNA, 122 bp, Homo sapiens
caggcaacaaagccccgcccactgtcgcacgaggcgtgggacgccaccgccccacctcttcgtccttagtggctgggagtaatctcagctgcgttcatccaatcgacagacccgcccctcca

SEQ ID NO: 475981 - DNA, 122 bp, Homo sapiens
tcttcagacagtgtgatcccagaggtccctggaccaaacactgaatgatgtccatcctaacgtccccgcatcactcctcagccaccacctctccctccactctcctcctcacccccattctt

SEQ ID NO: 475982 - DNA, 122 bp, Homo sapiens
atttgccggtatggttgccatagaaactgggacctggagcgtgcccattttcggaggttccgaggctgttccacttgcctcatccctgcaatccttgagcagccaagggacttcagtactaa

SEQ ID NO: 475983 - DNA, 122 bp, Homo sapiens
ggagtggagggaggaggggtatagggacactgcctcagtccactagagttcacattccttcgtctggtcaatgttgactttttagtctgcctgcttcctgtttgtggcttttaagcttttta

SEQ ID NO: 475984 - DNA, 122 bp, Homo sapiens
ccccgaggtcacctgttagtgaaggctgccaggttcttgatggcccattctgcaaggtagcgggcagcgtcccatgtgaccaggcctgtggtaccgtgggagatgatggctgtgctcggaga

SEQ ID NO: 475985 - DNA, 122 bp, Homo sapiens
agctgagagcaggtgaagctgcgctggccgaggacgctcggagcggctgcgtgtgaaacacgggaagcctgggctctggcctgaactctccgggctgtgtgggaggaaagcgtcctgatgag

SEQ ID NO: 475986 - DNA, 122 bp, Homo sapiens
accagtatgagagagtcctttctcgggctagctgcttcagtaggaatcagtgatctggtacgtggggtttgctcttggtttctgcatttcttggtaaaaggaaaaccttttaaaatgctaag

SEQ ID NO: 475987 - DNA, 122 bp, Homo sapiens
gcccgcgggcgaggccttccttggccagtgcaggcgctatgaagtggactggaaccagagcgccctcagctgtgtagaccccctggctagcctggccaccaacaggagccacctgccgctgg

SEQ ID NO: 475988 - DNA, 122 bp, Homo sapiens
cctcattcctcgtggcctccttttcattgctgttgcttcctcaatcggtccttagtgaaacgccaatctcagtggtgtgggaacgagtatgagagacctcgctctaggtgctcgcacggaac

SEQ ID NO: 475989 - DNA, 122 bp, Homo sapiens
ggagtgcaagcatcttgagggtatcttttcgtggtgcaccatgggtatgcaaatcacaggcggctccgggctgttccgcgccaccggggaagccatgggtcactgatctcctttgctctcct

SEQ ID NO: 475990 - DNA, 122 bp, Homo sapiens
gagctgcttcaagccactgaggggtggatggaggctgggttttgggccagagtctggagacgcactagtcatgtcctggcccctgggctgagctcaggacaggtcccctcgagctgctggag

SEQ ID NO: 475991 - DNA, 122 bp, Homo sapiens
ctgtggaatacccaggggcgtcaccccagtgagtttcggcagcaccctgcaggtggttcccggtaagtctggcagacaccccagcaggcagcatcctcacaaggttcagtagagcaaacctg

SEQ ID NO: 475992 - DNA, 122 bp, Homo sapiens
tagcccaggcggccctctctactatcatgggccttgcagattgagttctcctcttcctgccgggccgcctgcctttgttgtcctgaggactgacaggtaatgtttgtggcagacctgttggt

SEQ ID NO: 475993 - DNA, 122 bp, Homo sapiens
gcagcacgcgccattttatagtgcgcgccgctcgcaaggccggtcctcggcgccagcccgcgctccgcccgaggcgtccaatacacacgcctgtttgggaaaccccatttcatgcttaggga

SEQ ID NO: 475994 - DNA, 122 bp, Homo sapiens
atctggcagcgtctggccttctccgggcctcggcctccccatttgctgggtggagaatcacggcccggccacatcggagccaatggctggtctctggacctcggtctccacatttgctcagc

SEQ ID NO: 475995 - DNA, 122 bp, Homo sapiens
gagaagcttttttattttacagataataactgcatatctttacctgagggagctcaggttcgctctatctagcagcttccacgtgtcatctctgtatgtgcagttggtgcctgcattaagga

SEQ ID NO: 475996 - DNA, 122 bp, Homo sapiens
atggatgcaaaaatattttagtaccatgtaaatgctgactgccgctcacgttttcatcatcgattagtgctatctggtctgaggctcagtttccaggtctagtggaatgaatgggtttccca

SEQ ID NO: 475997 - DNA, 122 bp, Homo sapiens
accttcctgagggcccgtgcgcgagacaccccgggcagtcccacgtcgtggcgcgtcttccggcccaggatctggaacttctgcctgttaactttcacctcgaacggattggagttggcctt

SEQ ID NO: 475998 - DNA, 122 bp, Homo sapiens
tcccagtatttccatcacacctttttgacctactgaaggaattgcagttccataaactgtcgaatttgcacacaccattccctctacccttctcttacaggtatcaactagcaaactcatgt

SEQ ID NO: 475999 - DNA, 122 bp, Homo sapiens
ggaggggaccagactccgcaatgagagcaagcatactggtccgccagggtcttgggcgggcgcccagggccctgagaaaccggctagccaggcttttcttatatgggggcggggacggctgg

SEQ ID NO: 476000 - DNA, 122 bp, Homo sapiens
agacatctccacgggaaagtcaaaggcctggaggaagtgcggacctgacgacagatgccccgcacgctggccgggaccgggaagggcggtcaagggtggaaaggggctggcggctgccaggc

SEQ ID NO: 476001 - DNA, 122 bp, Homo sapiens
ggggagatgcactttagcccaggggggtctctggagtctgctctctgccctctgggtgtgcgttttaacccttccacagccagccaaggcccggcctctacagcagattcccacaggggtgc

SEQ ID NO: 476002 - DNA, 122 bp, Homo sapiens
gggtggggagagcggttgccacgggcagctttccttgtgagccacagggccctctggacacgctgctgtctggccacgccccctttccctttcatctttctcattgaccaatgggcttggag

SEQ ID NO: 476003 - DNA, 122 bp, Homo sapiens
agtgtcagggcgggggcctggaggagcccaaggtgctgcagcagaagagagaaaagagaacgacaacactcagctcgccagtctggtcgctgggttcactgccaccatggcaatgagacaga

SEQ ID NO: 476004 - DNA, 122 bp, Homo sapiens
gctctctctctagtgagagagaggagattcctgagaggaaagacgggccggtggtggaggcgacagattttatagtcaggcttgaggaggcgtctgatttacatagggctcacagattggtt

SEQ ID NO: 476005 - DNA, 122 bp, Homo sapiens
gctggagctcgcaaaggccggggctgctgcagattctgacgctttgtggacccctactaccgagcgcagccgcaccgcaggttttcttcgctgctggttagatccaaagcccatcccatcct

SEQ ID NO: 476006 - DNA, 122 bp, Homo sapiens
gtggctgccaccgtttgtgttttcccgagtttgaattcttgcaggtaggggaaacttccgcgaatttaggacagagagcaatcctgttattaaggcttgcaagtcgagagaaaggagagatg

SEQ ID NO: 476007 - DNA, 122 bp, Homo sapiens
ttcaagttaatgtcttctcagccaatgcactaatttcctgctgatcctatcaatgggtcgcgtctgggaatcacagcacctacaatgtcaacagggagaatatgcagatgtctctggtggaa

SEQ ID NO: 476008 - DNA, 122 bp, Homo sapiens
ccgcggtggcttgtgggaaaagtggctcggaaccccaaatcccggttagattgcaggcaccgccggacgctggctcccggaggttttagttttccctctaccaggagtgtgaagacacagag

SEQ ID NO: 476009 - DNA, 122 bp, Homo sapiens
tccgtagcacgtggtgacccatttccccagcctgaactcccgcgcgcgtccacgccggggcgcaggaccgccggccttccctccgcgggcgctgctcattcccagcatcagccatgccctct

SEQ ID NO: 476010 - DNA, 122 bp, Homo sapiens
ttctaatctggagcattgagaacttattttaagaaacaaaggcttctttaaaccaatatacgtaatttagagactgaaaggaaggccatgtgtctagaatgccacacgtgttattcagctgt

SEQ ID NO: 476011 - DNA, 122 bp, Homo sapiens
tttaacgcgctggggcctccctttatagggtcacatgtgatggggaggaggatacaagcccggaatctgggataggtggtaatagggccaccagctgcttttagttttacgcttcttatgtc

SEQ ID NO: 476012 - DNA, 122 bp, Homo sapiens
cgaactctggacctcgagcgatctgcatgcctcgacctcccaaagtgctaggattacaggcgtgagccaccacgcccagcccagaaagccagttttactgaatcagaaaacttgttatggga

SEQ ID NO: 476013 - DNA, 122 bp, Homo sapiens
cctgattggtgcgagcgtctcgtttagggaaggctctaggagggccggtggatggaattccgagcttcacctggttgtatgccgcccacttcaagcagcgcagagcagctgccggttgagtg

SEQ ID NO: 476014 - DNA, 122 bp, Homo sapiens
aataaaaattataggaggccattgttttggactaaactcctgcactactgatggcagtcacgggccatccggagcagccgctaccatcgcgctggcagcagaagggaggtgtgagcggtgat

SEQ ID NO: 476015 - DNA, 122 bp, Homo sapiens
cagcacctgcgctcagcgctggaaactttcctgaggcagcgggacctggaggctgcgtaccgggccctgacgctgggaggctggacggcccgctacttccagagccggggcccgcggcagga

SEQ ID NO: 476016 - DNA, 122 bp, Homo sapiens
gcacaggtggtgccatgctgcggatcctgtgcctggcactctgcagcctgctgactggcacgcgagctgaccctggggcactgctgcggttgggcatggacatcatgaaccgtggtgagctt

SEQ ID NO: 476017 - DNA, 122 bp, Homo sapiens
aaccccacgcacacggagctcatggcctgtgccagggtgggcgggagaccttcacccacccgccgggtccccgggacacagcgtgtccgcctgctcttccccaggggtctcagggctctctg

SEQ ID NO: 476018 - DNA, 122 bp, Homo sapiens
ccccctcagtccctcctgcctgacccccaggggttccaaccccaatccagcccctgctgccgctgcaggagggggctctgcattcctggctaagcagctggatttgctgtgctccaggaact

SEQ ID NO: 476019 - DNA, 122 bp, Homo sapiens
agagtccaggcagatcctggtgacaaggggcaggaggctttgcccagctctggggttccacgtggcctctagggccaccaggatgtgccgggagccagtgaggcaagagtcaaggaagacac

SEQ ID NO: 476020 - DNA, 122 bp, Homo sapiens
acggtgctgtaggggcggagggtgtccccaggttgcggaaccctcttgcactgctcccagcgcgcacctatttccctaatgaaacgcttcagattgcgttctaggtctcttcccgcagctgc

SEQ ID NO: 476021 - DNA, 122 bp, Homo sapiens
aatctcccaggaccctaatatcgcccgaggatgctgggaggaacgctgagccgacctctccgttaggctgaaggtctgaattttcaaacccaggggtcacagggccggggtcatggactttg

SEQ ID NO: 476022 - DNA, 122 bp, Homo sapiens
gctgctattaattcaaaagccatgggaaaccgtatgcagcgaacccaggaaaaggacacgcgtaatatttattatctcttttgcgtcatttgcttacacacatctacagtatttaaatcttc

SEQ ID NO: 476023 - DNA, 122 bp, Homo sapiens
tatgttctgcaaatggggaatgacagtgcttatcaccacgcaactccagaggagtctgggcggagacaccacaaatgttccctttaataggcactttctcctttcttcccccttcccttaat

SEQ ID NO: 476024 - DNA, 122 bp, Homo sapiens
cccttggccctccctgaagagctggtgaccttaccgtcaaagccccgggatgccatggatcgtcctcgttggcggcttctggacactgagccactagagggcatcggtcccggtagggccgg

SEQ ID NO: 476025 - DNA, 122 bp, Homo sapiens
cacttaaagaggtcctcgctttacatttcgaagaagggatgccagttcataaacagttttcggtgatttacttccctgcaaatgagttgtttcatattttgcactgtcttttcatgatcatt

SEQ ID NO: 476026 - DNA, 122 bp, Homo sapiens
ggctggggcggggtcccgggagtgggctgactgggtcgggggcggggctctccaggtgggcggggatcttggccacccctggccacacctctctccggctcgagctggtctaggcggggcgg

SEQ ID NO: 476027 - DNA, 122 bp, Homo sapiens
aggggaaggtgtgaagccccgggcctccgtctgcccggtgagtccggggacgcgcgcccccggggatgccatctggctcctgggctgtgaccagtcacagctcacatagctctgggcactgg

SEQ ID NO: 476028 - DNA, 122 bp, Homo sapiens
cgcgtggcagccccccgtgccgttccagataggagcgctgcaggagggcagtgaggtccgcgcccaggaaactagatgtgggggccatgcctgagggcgtcctgctgcattataagtttctg

SEQ ID NO: 476029 - DNA, 122 bp, Homo sapiens
accgcgtaggggtcgtagtcatccggaagccggttcatggtggcctgcagcggcctacaccgtccacaagcaatttgcagcgtctctgtttacactgcaagtccagtccctaaagcgcccct

SEQ ID NO: 476030 - DNA, 122 bp, Homo sapiens
tgcttttctcttgtctctctctcttcctcattcctagaggaagatccctgccccagcacacgcacaaaagggaaattgaggccccaagatcctattatagaagatcctttgtaggatcagcc

SEQ ID NO: 476031 - DNA, 122 bp, Homo sapiens
gctgctaagaagtgcattcatgcctactagtagtcctggtcattatcagtcccactaaaccgggacctagtcctggtccagactagaaattggagtccatcatttcagagtcagtggtgacg

SEQ ID NO: 476032 - DNA, 122 bp, Homo sapiens
tgcctgggccgactcgaagcccttataaggcgcggagacaccggctctggctgggccgcccgcctccacagccgccgcccagggttctcccgccactgccgcccgcacccccgcccccgcgg

SEQ ID NO: 476033 - DNA, 122 bp, Homo sapiens
agagcctcccaggggagccacagttcaggtgccaaagtccccagggaaggagcacttgctcgcggtgataataacctaacagcccagatgttatcacatctgcggtaagagagctggagagc

SEQ ID NO: 476034 - DNA, 122 bp, Homo sapiens
tggaggccaggccggagggccagggcgagggccaggggcgctcgctggagggacccaggccgggtggtggcgggggcgggggcgccggggcggggagcgcctgggacagggaccgggccccc

SEQ ID NO: 476035 - DNA, 122 bp, Homo sapiens
tcctgatgaaggaggagccatgggagacttgaccaatcgactaccgcatctgcagacgtgcgcggaaatggcacgcccgtttccgtgtgaacccgaaactgccacttgctggctgaggagag

SEQ ID NO: 476036 - DNA, 122 bp, Homo sapiens
gtgagacaccccaacaaactctgcttccaactggtatgtgagtgcaagcacttggatgtccgtggcagagaggctggggtagtctcctgttttctttgaaaactcagtcactgtaaacaaca

SEQ ID NO: 476037 - DNA, 122 bp, Homo sapiens
ggacccagccaccttgtatgaggtggaagagctggagacggccactgagcgctacctgcacgtacgcccccagcctttggctggagaggatccccctgcttaccaggcccgcttgttacagg

SEQ ID NO: 476038 - DNA, 122 bp, Homo sapiens
tgattagtacccagaagggactgtgtccaaaaggagccggccagaaacgggttgcggacacggctgggctgacagaaggcagcccccacgaggcctttggctctgaggaccctgggtcagag

SEQ ID NO: 476039 - DNA, 122 bp, Homo sapiens
gagcccagggaggtgcccacagggccggggcagcaccgcccccgcgagggggcccgaggccggggctgaagatcccagtgtcctctgagcccacccagctcccccacccgttcacgcacact

SEQ ID NO: 476040 - DNA, 122 bp, Homo sapiens
agtcatctgtgtctccaatatgggatgtcccacatcatgcatatgcacagtgaaaaaaagcgaggtccttgggtacagtacagcattcaaaaattaaagatctgaaaaacacaagacatctc

SEQ ID NO: 476041 - DNA, 122 bp, Homo sapiens
acggcacctggggtgtaagtactgcttgtgggagagccccacaggaaatccagagtattgcgcatgcgtgctgtccagaaggcgcttgaactcggcggcttccgtagcgggagggcgaaaga

SEQ ID NO: 476042 - DNA, 122 bp, Homo sapiens
ggccagcagccggccagcccgcgggcggggcaggaagggggagccgaggctccgggcacccgagatccttaactgcagcttccaaagccctggctgatcctaatcagtgtgggaaaggagcg

SEQ ID NO: 476043 - DNA, 122 bp, Homo sapiens
catactgagcccaggagcttcagtctctacaaattagtgatgtagacaaatgaagatatccgtgcttatcacccctagcatatcatctcatccctggtaaaaggagatggacttgaagattt

SEQ ID NO: 476044 - DNA, 122 bp, Homo sapiens
gtattcatgtgcttcaaacgttgttgatctgtcttgtctgagtttgtggggaaacggggccgtgttaacctctcgtttgttgtttgatccatggccgtgtgtggtcacgggaggaactcgtg

SEQ ID NO: 476045 - DNA, 122 bp, Homo sapiens
cagggtcgccagtgtcctgttgactcagtcataagggccttggctgctgtggggtgtgttcgctgcggtggactgggacaccttcgcgtacgtgcccataggcaccttgcggtgcagattcc

SEQ ID NO: 476046 - DNA, 122 bp, Homo sapiens
ctcacaacactaaacatttcacatgaaagggtcgtgattgatttgagcaagcaggcggtacgtgacaggctgcatgcactggcagtcagagagaaacaacacggcagggagtttcacaaatg

SEQ ID NO: 476047 - DNA, 122 bp, Homo sapiens
cagctgatctgagtaaactggcttgcctaaccacacagtgcagatctggtcttctgaccccgggggctttccttccatcaccaggctttctcctactcccaatgaaggaaagtaagactggg

SEQ ID NO: 476048 - DNA, 122 bp, Homo sapiens
gaagctgtggcgggaggatcagttgagttcaggagttcgacaccaccctgggcaacatagcgagaccacatctctacaaaaaaaatacaaaaattagcccggtgtgatggcgcgcgcctgta

SEQ ID NO: 476049 - DNA, 122 bp, Homo sapiens
tcgtctctgcagagaggatattgaaggggtgggcctgggccggcctgtgcccggcaggagcggggcgcccagagggcctcacctgagtgagcggtggctctccaccatgaggcggccaaagg

SEQ ID NO: 476050 - DNA, 122 bp, Homo sapiens
ttggtcaaaggatacaaactttccattataagaagagtaagtgctggagatcaactgttacgcatggtaattttctgggatcatttgtgctgccataacaaaatacctgaggcttaatgact

SEQ ID NO: 476051 - DNA, 122 bp, Homo sapiens
agctggtgaagagagagacaaagagaaaggcaaggggaaagtgaacacttgaagtaggcacggcgatcctaaagccaacgaaactcaaaagaaattggaggcgtagtctgacctgctccttc

SEQ ID NO: 476052 - DNA, 122 bp, Homo sapiens
gggatggttgctaacgcaactctctgcagggcagacccaccagcacccgcacgcaaactacgggctggagcagtctaacagaaactctctcaaagtcgctcacgggttgccattctaggtaa

SEQ ID NO: 476053 - DNA, 122 bp, Homo sapiens
ctcttggaataaaagaaaaatcactccaatttcagtcaactggagcagaatcaaatgactcgttaaagtaatccatcactggctggaaatgggaatgccgcaacggaatgatgaagggaatg

SEQ ID NO: 476054 - DNA, 122 bp, Homo sapiens
gcatgagagttcctttctgtaaagtatttagtacttgctaaattaaaatgaatgactctacggttataattcttcagttcgtaatgcttgtagggctgactagagagaattcaacaagcatt

SEQ ID NO: 476055 - DNA, 122 bp, Homo sapiens
acagaaacagcggccacggaccacagaaatgcaggacggagctctcctgctcccacgccacgaggctggaacatcagccccagtgcctggtgcacacacaggctcaggaaaactagctcctt

SEQ ID NO: 476056 - DNA, 122 bp, Homo sapiens
cccagtgctcgctccgatgccctcgcccctgaagccgtacccgccagctccaggatgtgtcgcgctccccgcggacatggcgaccgcttctactcaaccacccgccaactatccgactacca

SEQ ID NO: 476057 - DNA, 122 bp, Homo sapiens
tgcagaacccggaggaagcggttgccaagctgcagaacgcaggacccccctggcagtccccgctgagcgtctcgagggattccggtctgtgtccctgggcgcagggcgggcgccaaggccgc

SEQ ID NO: 476058 - DNA, 122 bp, Homo sapiens
tgttacatcctctgtgtcttattctccgtttaaaatctggtttgcctggttcgtctatcccgaggtttgacaaatgaacttctaaaataactcgtcaggagaagacttgcgctaacaagctg

SEQ ID NO: 476059 - DNA, 122 bp, Homo sapiens
gctcccggcctggctagcggagcgccgtgtgcgggtggcgctgggtgccaaggcagcggccgcggaggccgcgggggccgcggaggccccggaccgcttctgcccgcgcagcttggcggccg

SEQ ID NO: 476060 - DNA, 122 bp, Homo sapiens
tcagactttgggagcgtcccctcacttctccggaccccaggagtggccgcgcctgctccgcgctcaccctcggggagtctaggagccccctgctaagttgctgagcgagtcggagccccaag

SEQ ID NO: 476061 - DNA, 122 bp, Homo sapiens
tgacgcaaggcgggcttcattaatgaaattgctgtcaattagcgaagggcggaaaccaggcgaagagggcggtcctttagaaccacactcgcgcgactggctcctctctttacaggcttagc

SEQ ID NO: 476062 - DNA, 122 bp, Homo sapiens
agtgagtccggccttccctggggtgcccgcctggcgggagggtcggctggggagggctggcggggtccttcttccctagggcccatcggcatcctggcctcgtggggccaccctctgcccaa

SEQ ID NO: 476063 - DNA, 122 bp, Homo sapiens
cagcggggaaatggaacacgccccttgccagtgacactcggagggcgcaagagtcagtgtcgggctcatcgtgagcaggttctttctgcccccagttcagcaacccgtctgaacagatctgg

SEQ ID NO: 476064 - DNA, 122 bp, Homo sapiens
gcggatggggggatgtcgcctagagccccccggccggcccacaaactcccgtcccccttccggctctgcctggacgtccctgcgggccccgggggaaagcacccaacttctcccgcctcggc

SEQ ID NO: 476065 - DNA, 122 bp, Homo sapiens
cagtcacatggggcagtcgagctgcctgcgtgaatgctaggcgcgggacaatggcaactccgggacaaagtgcagggagactcctgaagagataagagggaagggcgaaggaagggggcggg

SEQ ID NO: 476066 - DNA, 122 bp, Homo sapiens
ctgggaaccgcctgaggatttctgggcgaccaggagccagggccgccaccgttcccgggacggggaagaggaggttcacatttcactcctggaaggagaaaatggaaaatgttctaccggga

SEQ ID NO: 476067 - DNA, 122 bp, Homo sapiens
agctcccgccttcatcccccgcactctccgtcaagatccccacctttaaagggatccgagcgacgttctagaaagcagccaaagcctgtcctgtagccacaactttcaggaggcggtatgag

SEQ ID NO: 476068 - DNA, 122 bp, Homo sapiens
acccgggatgaaaggtctagggaggcatctcctgagggggccttgtgcgaccctgcgagacgcctccttctgtgctgtgcctcaccccggtcctgggactgagtgaacacacaactttaaaa

SEQ ID NO: 476069 - DNA, 122 bp, Homo sapiens
cgcacaggcacgtcaacagctgagcacgctatgtatcgggggtctgtgtacgctcacatacgtgtcggggtctgggtacgtgcacatacgtgtaggggtctgtgtgcacatgcgtgtcgggc

SEQ ID NO: 476070 - DNA, 122 bp, Homo sapiens
gtcagtgtgtggctcgactcaagacctaagcattggaaatgtgttccaccagagtagctacgggaagaaagggttcaccgctcttgtgacataggtcagagtaactcagagagagtttcagt

SEQ ID NO: 476071 - DNA, 122 bp, Homo sapiens
cgtagctccggggtgcccagctgagtcaggtgcggacgcagatagcgcaaggcctgaccccgagcggccggaggccgggaccgccccgcaagcgcgctcacctcggcccgcggcgccggctc

SEQ ID NO: 476072 - DNA, 122 bp, Homo sapiens
ttttaaaaaagcaatttgctgtcaagaaccaagcagaaaacaaacagaggcatgccagaccgagtgtcagagtctctgaattggatctctgatgtgacccagagcctgggcctgtacaaacc

SEQ ID NO: 476073 - DNA, 122 bp, Homo sapiens
tcccccatccagacatgcccatttgattcctcttctacccacacacccagaaagacagcgcgctttcctcccggcatccgccccctctttttgcctaaaacattccctagggaggagcgacc

SEQ ID NO: 476074 - DNA, 122 bp, Homo sapiens
aaactgtcactagtcagctggctctttttcctatgaaatctatcagtacctttctccatccgttgttctcaatatgaccacagagcctgagtataccaagaaaaccaatattcgcattacag

SEQ ID NO: 476075 - DNA, 122 bp, Homo sapiens
gtagagagaggctcagttacagctctttgaagattaaggtaagaagaacacaggttttggcgtcagactagcaagagtgccagacgactctagaccacctatgagctgtgccctatatttgt

SEQ ID NO: 476076 - DNA, 122 bp, Homo sapiens
ctcagttccgatggggccgctgagtggggtggggagcggtgcgagggctcccaggggctccggcctgtggcttctgttggaattttttttttttaaagaaagaaaactagggcgatgcaatg

SEQ ID NO: 476077 - DNA, 122 bp, Homo sapiens
gctcttgggtttcaacggcttcctcgggcctcagtttccccacctgctgttgggatgggccggttcagaacagacaagaggctgacgccaggctgccacctacccaatatccgaggcgtctc

SEQ ID NO: 476078 - DNA, 122 bp, Homo sapiens
tccgcctagtgagctgggaaggcgggcggctggagtggttcggctgcaacaaggagaccacgcgctgcttcggaaccgtggtgggcgacacgcccgcctacctctacgaggagcgctggacg

SEQ ID NO: 476079 - DNA, 122 bp, Homo sapiens
aactgggtatcgggggcctgccatggctgtggcttccaggctgcagattcctgaaatgggcgaggacccttctgcctccccgtgcttgagagggctctgggggacccagaaaaccccctggg

SEQ ID NO: 476080 - DNA, 122 bp, Homo sapiens
aggtcacaataggatgctaagtttggattttaggcaattaagaacaaagatgaaatttcccgacttgtaataatgactaggtagatgaatatatggaaattgatctctgagaggttttgttt

SEQ ID NO: 476081 - DNA, 122 bp, Homo sapiens
tattagtcagcttttgctgtgtaacaaactataataaaatctcaggggcataaaacgatacgttgtttcttgctcatatgtctatgggtcagctggagaagccttacttcaagctggggcca

SEQ ID NO: 476082 - DNA, 122 bp, Homo sapiens
ccctggtccctaagattctcatgctctccgaattttccgtcctggacccgatctgtagggcgcaaagtcccctgtactgaggcgttcccagggcgcccgcctcccgcgtttacatttcttag

SEQ ID NO: 476083 - DNA, 122 bp, Homo sapiens
gtcggggagaaacacgtcggtgccgcttcccactcgtgtgccctcaccacccacgtggcccgcggagagccaggtcgccgtaaaccacagatgcctgttcctgctcaactcctagggacagt

SEQ ID NO: 476084 - DNA, 122 bp, Homo sapiens
tcccagtactacctcagcgtcaatcactttctgctttcctttgcctaggtcccaggcaaccgtatgacttccactaacttggccttggtgtttggatctgctctcctgaaaaaaggaaagtt

SEQ ID NO: 476085 - DNA, 122 bp, Homo sapiens
cagtcttatccagtttggcctggtcttgtctggtttggtccagtcttgttgagttctgtccggtcttatccagtctggcccagtcttgtcctatctggttcggtctggactggtctggttca

SEQ ID NO: 476086 - DNA, 122 bp, Homo sapiens
ccttccgccccaccccactccaccccactccactctcacgcccgagatcggagagaagcccggccgcgggtttcttgccccgcacccaccgcaccctcaaccacaccccacccaggccttcc

SEQ ID NO: 476087 - DNA, 122 bp, Homo sapiens
tttgcagtctactagaacgataacacatattggcatcagacagatcttggttcaaaacctcgctccaccagtttctgtgttgagctagaccaagtgacatgatatactgagtctcagttcct

SEQ ID NO: 476088 - DNA, 122 bp, Homo sapiens
gaaagctaccagcactgcactgtgagactctcatccctgagctgaattcatctgattcgacggcaagctttggtgagaacatagatatatttctgaggtaagtacacaatttccagagtagg

SEQ ID NO: 476089 - DNA, 122 bp, Homo sapiens
agccagcactagggaggagaggccgagaggggctgctactggggctgccacggcagtgcccgaggccatgagtgcttctctggcgtcaccaacagagaaagctttatgggtgggcagagcac

SEQ ID NO: 476090 - DNA, 122 bp, Homo sapiens
ggcccgggcctcaccggcaggcgcgggacgatctccacggagcagcagtggcagaagtaccgtccgggatgcggcgacgcctcggccatggccgccgccacctactccgcgccgcccgcccc

SEQ ID NO: 476091 - DNA, 122 bp, Homo sapiens
gatgggagtatttagaggagcaggacccagtcctgcctgcgaggggcttaaggtggggtgcgtagaagcactgacagttatccagagctagggactgaatcggatccctcacgcagctctca

SEQ ID NO: 476092 - DNA, 122 bp, Homo sapiens
cctgtagcctgtgtatggcattttctaaatacggtttcatgtaggcaacattccctcctccgtttcctgctcctacacttgtgattctctctcctacttttgatttatggtgtcttaatgta

SEQ ID NO: 476093 - DNA, 122 bp, Homo sapiens
ggtgtctgtgtctttgtgcccggctggtgcctcatctcccctcaaattgctgccgcagtccgtgttactgaatcaaggacttggtgagcctggtgtccgttcaaaggatggtcttccaaatg

SEQ ID NO: 476094 - DNA, 122 bp, Homo sapiens
aaagtattgtcaatcttcctatttatcaagaagttctaaaaaaattagtttcacccccctcggaagtttatcttcaagaagacagaactgttctaggctctcaggaagtaaaacccacttgg

SEQ ID NO: 476095 - DNA, 122 bp, Homo sapiens
cagcagaaatttagttcctgagttccaagaatcttgcggtctgggagggaagggcacagacgcctctccaggcagcacgtcgcccacaccctctctggccgttcccatcctgccctctgaaa

SEQ ID NO: 476096 - DNA, 122 bp, Homo sapiens
tagcctctgtcagctccatcatcatagttcagcatttccaccaccggtcacttattgttccgtggacatagtcatcgttaacccctcctctgccagccggccaggagcacctgggctaagat

SEQ ID NO: 476097 - DNA, 122 bp, Homo sapiens
attgggaggaatttgttttctcaaggcacatctgctgggatgtgggttgcttgaagatgccggtcccacacacccagaacactgcctgtcgaatggctccacagctggcccaggagaactgg

SEQ ID NO: 476098 - DNA, 122 bp, Homo sapiens
gttttgctgctcatggagatccccagcgccccctccaaggcgtccctgtcccaggggctgcggggcctgcacggaaggacaggggcgcctcccagacccacccttcccgccgccaccctcgg

SEQ ID NO: 476099 - DNA, 122 bp, Homo sapiens
acccttctctccaccctgtcaccacaggtccgggctctgtttccctgtgagaagccgcctcggcccaccgagatgtcccggcaccatagccgcttcgaaagagattaccgggtgggctggga

SEQ ID NO: 476100 - DNA, 122 bp, Homo sapiens
gtatgtaaaagcggtaagcattgccctcaataagtagaataaactctccctccccactaccgtcaccaacaccaagattctttgtctgctttctggcattttagtgactgctgtcgtgtctc

SEQ ID NO: 476101 - DNA, 122 bp, Homo sapiens
accttcacagtgagtgttacagctcataaaggtagtgcggacccaaacagtgagcagcagcgagatttactatgaagagtgaaagaacgaagcttccacagcatggaagagaacccgagcgg

SEQ ID NO: 476102 - DNA, 122 bp, Homo sapiens
tcggttgaggctggggttgcgccgcggtttggtgtccgttacgagcgccggcccgggccgcgccgcgccgcttgccagccatcctggaccgccttccctcggcgcccaccaggaaggacagc

SEQ ID NO: 476103 - DNA, 122 bp, Homo sapiens
ggccgcgctctgtgtctttgtccaggctgggaggggccgatggccgttaaaagccccgcccgccgccgctcgccgccgcctggccccacccccgtatccatggagacccgacgccgccggac

SEQ ID NO: 476104 - DNA, 122 bp, Homo sapiens
taaatgccgcgggggtggcgcgcggggagtgggtttgggcaccctcctcgccctcccgcgcggaaaaactggcacatagatgccgcctgactcctccaaagccattagaagatttggggtgg

SEQ ID NO: 476105 - DNA, 122 bp, Homo sapiens
gcatcataggccagcggtgcctcctggaagcctcctgtctcctcagggtgtcttttcagtcgcttggttagtttctccacaaattcctgggatgtcttgggaggaaaaaatcatgaggaaag

SEQ ID NO: 476106 - DNA, 122 bp, Homo sapiens
gtccatggctgccttttgtacagtttagtccatttgagtaatctctacaagcctgcacctcgagggcaaacttcctgctcttctggggaatttaattgtgaattgtctgtttcggggcccat

SEQ ID NO: 476107 - DNA, 122 bp, Homo sapiens
ttcttctccttggccttctgccctgattgaatttgggacctgggcctgtgcccacactctcgctcttagaaccccggactacagtggggtcagatgggcaagtggctaatggctgttgagct

SEQ ID NO: 476108 - DNA, 122 bp, Homo sapiens
aggcctgagggacgggcaggacctccccctcaccttgggctgcaccccaaccccacgcaccgggagtcagccttgccaggttgcagcacggaactgcacttcccgagcttttaggggaagag

SEQ ID NO: 476109 - DNA, 122 bp, Homo sapiens
ttttcacccatcactctactgagtgtgtgtctgacttgtttatctggacgcaatctttgtcgcacccagttatctcgctcagcgaccggggcgaccacgtttccttaaatcagagccccgtg

SEQ ID NO: 476110 - DNA, 122 bp, Homo sapiens
gtgctcaaggcgcaggatctggagttctcggtttccaagcaagactggtcgagtctaggtcggattggctgcgatagaacgaggggcaggggttgtaccgaatcacaaagctaggattttca

SEQ ID NO: 476111 - DNA, 122 bp, Homo sapiens
tcacagcttcttaaacagatggtcaagagcttacatgcggttccttatcccaacccgccgcggcccgatgcgccctggctttttctggaactgttgttctgtggatcctcgccgagaacgcc

SEQ ID NO: 476112 - DNA, 122 bp, Homo sapiens
cttcagggtgactccagccctggggagggatattgtaaaatctaataaggacctctgtcccgggggctctcgtcaacaggatgggtattaggtattcttttagctaccaagaccagaggctg

SEQ ID NO: 476113 - DNA, 122 bp, Homo sapiens
cctggagcccctgccctgtcctggcgtcttagccggacacacctgccccgcgccggtccccgctattactgtctgcacctacgaagcatgccagcttcctaggattggcggggattgatcta

SEQ ID NO: 476114 - DNA, 122 bp, Homo sapiens
ctctctggcctccatttcctccctcatctgtaaaatatgtgttgaagaggaagggggaagcgataataaatctaccacggtaggttactttaagaaccaaaagaagtcacttgagtaactgc

SEQ ID NO: 476115 - DNA, 122 bp, Homo sapiens
cctttcatgccaacatgctcctccctgctaagcagatagattgtaggtccgtgggcagcacgatcaactgtgccctggcccctctttctgcaggcagccttccctctcctgcctcagctcca

SEQ ID NO: 476116 - DNA, 122 bp, Homo sapiens
cttcaaaccagaacagcccctctccactgtggactgacttttccttttaaaaactgatgtcgtatttgagttcagaataatacattctcattaaatgaaagttacaaaccaggaggaatagg

SEQ ID NO: 476117 - DNA, 122 bp, Homo sapiens
agggtggtgggtggttgttggtgagtgggtagtgactgaaagtggtcaggaggagggttccggggcgctggtgtacatatcatacttctattaaaagtttaacaaaaacgaattactttcat

SEQ ID NO: 476118 - DNA, 122 bp, Homo sapiens
cccttctctgagacacaacttagcagaattgctgaaaataatggtgacacactgtctcagcgctggggctttcagggagatggaggaggggagcgagggctgcttctcaccagcgctcagga

SEQ ID NO: 476119 - DNA, 122 bp, Homo sapiens
ggtggtcatcctgaccatgtggtccagggcgccccggtcctccaggccacacacggagcgcggcgtcagcgcggaaggcttgcagtccctgaccatctgcagccagttcttccagccctcgg

SEQ ID NO: 476120 - DNA, 122 bp, Homo sapiens
ccagggccacacacctgcccccaggagcaggacgtccctgaggctagagtccagctggagcggtggaagggtctcaccctttgccctttgactcctcttgtaggcaccctcgctgggctcct

SEQ ID NO: 476121 - DNA, 122 bp, Homo sapiens
agatattattgacaataccgtcaacacgctgtgtgaccacggtggatcgtcatatccaggcggggagaggggggtgctattactccccgcatcgtggggggagcccacccccctgcgatgtg

SEQ ID NO: 476122 - DNA, 122 bp, Homo sapiens
aagccaccatcgggcctcgaggttgcccccctaacatccggcctgcacgcctggcgggggcgcaacagtgtctcacggctcgggagctcgtttttggcttctgagcaaggtatttttttcat

SEQ ID NO: 476123 - DNA, 122 bp, Homo sapiens
tcaccacacatcagacccctgtgaccaaccgccatccacagtcaccacacatcagacccccgtgaccgactgccatccacagtcacgtggcacaagtggcactcgagctcccgggcctctcc

SEQ ID NO: 476124 - DNA, 122 bp, Homo sapiens
gaaaagccagcccaaggtagttcttcagatctaagattcccaaattcataggaaaagggccgggttgcacaggagccaactcacttgccatcatcagcatggtaggctacagagtcaggcaa

SEQ ID NO: 476125 - DNA, 122 bp, Homo sapiens
tgatgactgagctatttctcaggatctgtcagtttggtttttgctctcccgaacctctggcgcatgatgctagatgtattcgctcctaaacgaaatccaggcgtgcaagtgccatctaaagc

SEQ ID NO: 476126 - DNA, 122 bp, Homo sapiens
cacttgctgatcatttggaagttatccttctcccaaggctggcttcactgactggagtgccggccccgttctctacaagaacatatttgtcaccacaaggaggagcctcatgcaagctttct

SEQ ID NO: 476127 - DNA, 122 bp, Homo sapiens
gcacgtaggctagcgctcagcacatgagtctatggaacccaggggaagcaattgcagtttcgtagtagtttgtgtcttaattaagggagcccctagaccttactctttcactttacctagga

SEQ ID NO: 476128 - DNA, 122 bp, Homo sapiens
tcctagtacagaaattctacaaccaaccataatcatggaagagccaacttccagcaccaacgagaataaaatgaagagcccctgtgaatctaacaaaagaaaagttgacaaggtcagattgt

SEQ ID NO: 476129 - DNA, 122 bp, Homo sapiens
gccttcacccccgagtctgccctcaggggtgtcccctttggtctggcagctcactttaaacggcgcggggactacatctcccagcggccccgggccttcctgacgcagccccccctttcagc

SEQ ID NO: 476130 - DNA, 122 bp, Homo sapiens
caaacccttgtagcagagcgcatctccccatatataccagcattgtacctagggtggacgcgttcctcctcttactttcgggaacgctctactctgtctacgaagtagctgtccttttacca

SEQ ID NO: 476131 - DNA, 122 bp, Homo sapiens
tgtgatccacccacctcagcctcgcaaagtcctgggattacaggcatgagccaccgcacccggccaaaataattggttttcatatgtagaaagggaaaggaaataggttgcgtttaagcaag

SEQ ID NO: 476132 - DNA, 122 bp, Homo sapiens
gttcagggccaaggatgggcaaccagcccgtgctccccggtacacacccatgtccaacatcgctctcagatggcccacctttcagaggaaggaggaccggagtttgcaggtcttgggagagt

SEQ ID NO: 476133 - DNA, 122 bp, Homo sapiens
tggcccaagaagtgtttgcatattcagttttcatgattctcacccccaccgccagcaccacgttcccaacacaggagacgcgaagcctggaccgagggagatgacgcggtcagaaacggctg

SEQ ID NO: 476134 - DNA, 122 bp, Homo sapiens
ccaagattagcccaggtatacaatgaaacactgaaaatctcttaataagccattgacagtcgactgacaattgatcagtcttggatttatcaaaaactaccttgagactattagtccattat

SEQ ID NO: 476135 - DNA, 122 bp, Homo sapiens
cccttgactgccgcttaccgctaggcaggccaagcgtgaaagtgctcagacccggaattgcgtggagaaggaaatctctgttcttcaggcaaaccccatccagccttttgggattctcctga

SEQ ID NO: 476136 - DNA, 122 bp, Homo sapiens
catgtcccttccacccacacgtcctatgggagcaaaaacatgcatcaggtgtgtctccaccgtgctattccaggagagatgaaaataacctgttcaaaaataaaaacactccagcaacgtgg

SEQ ID NO: 476137 - DNA, 122 bp, Homo sapiens
aggcttgctcgaggacctgtggtggtgagtgctccgtaactgctcaggcagacaggaagccgccgtggagcacgcagcactgcctggcggtggttgctttgggacatgacccatcactggag

SEQ ID NO: 476138 - DNA, 122 bp, Homo sapiens
gaagagctgcctgacgccgttgcactgggccgaggatcgtgaagagccctttggcgaggccgaggcggccccttccccagcagcgcccggcctgccgaggctgcgctgggcctgacagccga

SEQ ID NO: 476139 - DNA, 122 bp, Homo sapiens
ggtccccgccaccgtctccggggcgccccacacactggcgcctgcggtggggcctgctcccggcggaggacaaagaatccagacccttcctggacgcttgtccccagacgttccttccctct

SEQ ID NO: 476140 - DNA, 122 bp, Homo sapiens
ccaaacaaaaggtactttgtaaggagtatttttgatgccttggtttctagtcaacataagcgcaaggtgagatgtgtgttgctgcacatgggttttagtttataatgttctcattctacctc

SEQ ID NO: 476141 - DNA, 122 bp, Homo sapiens
acagtcgtcctcaaaatcatactccctcctagagacagggaacccgggtgtcagggcgggcggggcctcgtcctggcgggggactggggagctccggcctcctgggctgctgtggcgtcggt

SEQ ID NO: 476142 - DNA, 122 bp, Homo sapiens
tcctgcacccccacctggggccccgcaaagaggcgggcagggaggcaggcagggggcgcacgcgggcgggcgcgcggccgccgcgcgggggcgagggagggggcgcgcggccgccggagcct

SEQ ID NO: 476143 - DNA, 122 bp, Homo sapiens
ggctatgtgttcacgttcagcacgctcggctgagagctttcatttttagggcaaacgagccgagttaccggggaagcgagaggtggggcgctgcaagggagccggatgaggtgatacacgct

SEQ ID NO: 476144 - DNA, 122 bp, Homo sapiens
aacacgcagacccctgcacatcccgtgccggcttcttaccttctgctgcacagcctccaacgagcaggaccacaaggaggcccatgggaccaaccacagacaccatgccagggccccaggtg

SEQ ID NO: 476145 - DNA, 122 bp, Homo sapiens
tcaatctcccggtctatatctaataacacatctgtcgtgcctatattttggtacctgatacgtagtcattcattcattcaatgagagaacatttaatgagaggttaaggggcttagaacaac

SEQ ID NO: 476146 - DNA, 122 bp, Homo sapiens
ccttaacatggaagcacccggcagaggctgatctgtggggctggggagaaatggagcaatcgccaacactccaggctcgtctgtgaaccccaaattccattaagaaaagaaactgcttagca

SEQ ID NO: 476147 - DNA, 122 bp, Homo sapiens
acttcctggttggtacgggatgccggtcccatcgcccccaccagcccagtcatgccaccgcgcacccgaaccaagggcgcccggatgacctggggacaccacacacactgcacccgaagccc

SEQ ID NO: 476148 - DNA, 122 bp, Homo sapiens
ccggagcgcagctcccacttccccgcgactcacctaggaacaggaccagggtctcctccccggtgtctaaggctctaaggctcgggccgagactgccaaagcctcatggggcgcgcggggag

SEQ ID NO: 476149 - DNA, 122 bp, Homo sapiens
acacccggagcatgcgcacaagtgaggggaagccccgccgcgggcgcttaaatgcgtgcccgtcgccccctagcgctcgggaggccacacaccgcttctctgcccagggcatttaaaaggga

SEQ ID NO: 476150 - DNA, 122 bp, Homo sapiens
gctcaggggtttcttgtggagatgatctgatgagcattttgccattacaaacagtggaggcggagaaagtacggacttgagcctgagttatggtaaaacatactcatttttaaaggagagtt

SEQ ID NO: 476151 - DNA, 122 bp, Homo sapiens
gaccagccctcctgtgcccctaggagtttgaccctgaggaattttaccacctgctggaggcggctgagggccatgcgcgggagggccaaggcattaagactgaccttccacagtacatcatt

SEQ ID NO: 476152 - DNA, 122 bp, Homo sapiens
cttcctgtgagcagtttccgccttaggtgaaaggaagaggcggtcacatgaaggactgcgcgttccaaactgaccaatcagatagatgattgctatctccacgggaggaactaaaaagacag

SEQ ID NO: 476153 - DNA, 122 bp, Homo sapiens
gcatttagagttgcccctgcatctacccattaagtttatactcctgtgttctcatattaacgtctgtgtttgcgaatagtctctctagtctttgattcactaactcccccaattctaaccca

SEQ ID NO: 476154 - DNA, 122 bp, Homo sapiens
caaaaagatgtcaccacttgcctgacaaacagggcactgagtcacctattcacacagatgcgaaatggcaaaaaaaatacacgagaaagatcctttatgcagaccagtttggccagaagcag

SEQ ID NO: 476155 - DNA, 122 bp, Homo sapiens
ttggtttatatagattttccaaaacagtaaagtccaagggtctatcctgaactgggttagcggaggcgagaagattcccagaagactcctgatctcaagcaatcctcccacctcagcctccg

SEQ ID NO: 476156 - DNA, 122 bp, Homo sapiens
cttcactgctttgcactcgctgcagactcagtcctcaaccactgcttcatgtgagggcaacggggtggaaaggagacgacctggcatgcccggtgtggaatgccaaggacctctgtaagatg

SEQ ID NO: 476157 - DNA, 122 bp, Homo sapiens
caagaaaaccacaccgaggggtgtgtttataaccagagccttacaggcagttggctccaacgcccacctgcattggagagcaaagttcacaggagactgaggtgggaggggaagaagcctct

SEQ ID NO: 476158 - DNA, 122 bp, Homo sapiens
gcactgcagtacgcagtcgcggtacaccggctcacggtcgccctgggagccgctcgccagcgccgctgccccagctagcaggaccaaccgcgccgccaggccggccatcctttctccctggc

SEQ ID NO: 476159 - DNA, 122 bp, Homo sapiens
cctcaagcacatggctgactaccccgactacaagtaccggcccaggaagaaggtgaagtccggcaacgccaactccagctcctcggccgccgcctcctccaagccgggggagaagggagaca

SEQ ID NO: 476160 - DNA, 122 bp, Homo sapiens
cgcccagtgcgcagccgcattccgagctcgccccgccccaagcccagtctcaggctctctcggcccttgaattacgcctgcgcggaggctttccgagtccatctcctaggacgccagactga

SEQ ID NO: 476161 - DNA, 122 bp, Homo sapiens
cggctgtgccggtggtggggtaggggaaccccgtcactgcaggaaacggggcccgagacacgtgtgagaggcacaaggggacccacctggcaccccctccccgtacacctagcccccccgcg

SEQ ID NO: 476162 - DNA, 122 bp, Homo sapiens
atattcctgagggagaagaaccctgaggcttcagggcggcaacggctcgtcagtggggagcggggaagggatgttgtcaccatctgcctcgtgtctgtctgcgactaaaataatactggggt

SEQ ID NO: 476163 - DNA, 122 bp, Homo sapiens
actgcgagggttgaagaaaaggaatgaggtgaccttggggttcaggcctgggtgatgaggcgctttagtggtgcctttattcagatttgagtctggagtcgggtctgaggggtggggctcgt

SEQ ID NO: 476164 - DNA, 122 bp, Homo sapiens
aagggctgagtgcttgcctgctgagcactgaccgccgggctttgtcgtgcgtgaaccccacgacatgggggaatttccatggcatgaaaattctcaggcttttccatgagtggacccccaag

SEQ ID NO: 476165 - DNA, 122 bp, Homo sapiens
aaagtgtgggtccaggctttcaaggtggaaggtggccagtttggctctggtgagtgtcaccgagggcagctgtcgcggggtgtggaggacgtgcttcagactccgcctgtggacgtttagtc

SEQ ID NO: 476166 - DNA, 122 bp, Homo sapiens
tactattatcttaggcttagagagggtaaggagcttgcagaaccaaggtttaaacccaggcggttcatctccagagaaggcttgaaggctgaataaagtgagtagcaattacatcataaata

SEQ ID NO: 476167 - DNA, 122 bp, Homo sapiens
aaagtgctgatataggagagaaaatagtggcagggtgagtgcaagagagaaagtgaaggccgactcacccagtaaaagttttgagttacccatgacaaatggctgtttagaccctggttctt

SEQ ID NO: 476168 - DNA, 122 bp, Homo sapiens
tttggtgctggtggtcccgctgtgtcccgtccctggcccccgagcagcgctcaccatctccggaccttctcgatggtcgccatcaccttcttgatgtcatccttggcccggctccgggtctc

SEQ ID NO: 476169 - DNA, 122 bp, Homo sapiens
aattcccctgcaacaaagtttgtaccaggagcatttggcgagtgtccagcaagatgtgcccgtggatgtggatctccccaggccctgcccttcccgcaccctcggcgggctcttaccagctc

SEQ ID NO: 476170 - DNA, 122 bp, Homo sapiens
atggccctcctgggagcaatggaggatggacctggacaagccctggagaaggagggccggcgcagatgtccaaggtaaagctgggctttgccccagggcccggggttgagagagcatgttgt

SEQ ID NO: 476171 - DNA, 122 bp, Homo sapiens
catcaccctcagccaacacccagttgggtggaagtcattcaggcgggaaggcttttgttacgccttaggtgtgtcacctgttctgaggccgaaggtcccatgaatgacttcaggtgttgttc

SEQ ID NO: 476172 - DNA, 122 bp, Homo sapiens
cctgctcctcccggaaggtggcttcaagagcactcaggaggtgacagatgctgtcaagaccggcccagggaaggcacagggcaggtttcccagcacccaccacgcgccagcgagcacagagc

SEQ ID NO: 476173 - DNA, 122 bp, Homo sapiens
cccgtccgaccctggggagacgcgggtggctgggatggcaggatgagcgcgccctggaggcgagccaggcccgtcaccacctcccagcggccccgcccctccccgcaggtccctcccctctc

SEQ ID NO: 476174 - DNA, 122 bp, Homo sapiens
ggcccctccctggctgcaccgtaatcgccccctgcaggcccccctgcgcctccccccccccgccactggcgcctggcttcccccgggcacctgggaccagcacatgcccagcgcacgcggcg

SEQ ID NO: 476175 - DNA, 122 bp, Homo sapiens
agaggcgtcccttaaggcttggtcatccctcaggagcccgaatggccaacacactttttgcgtccccgggagtcttctaaccctttgcttgtccttatgggttttgtcaccgagtattctgt

SEQ ID NO: 476176 - DNA, 122 bp, Homo sapiens
cagtatctgcccatctccctcctggctccgcgcggccgctgcgtccgagtggcgtgtgtgcggcaggtggggctggctgacaaacgtggacgttaattagagccattttaattagaaattat

SEQ ID NO: 476177 - DNA, 122 bp, Homo sapiens
aaagagattgttgaccgttagctatgatatgagatgggccccagagaaagaggtggctggcgaaggtgttttccttagttatggggtgagagtgggagaaaaataacattttgactgagaat

SEQ ID NO: 476178 - DNA, 122 bp, Homo sapiens
gttcttttgctcagtgtgtggcaccaccccacgtttgtataccagcaaccacatagagcccggcgtagtcagttttgtgaaggtgcaaagagggaaggagccagactgccgatgtctgaatc

SEQ ID NO: 476179 - DNA, 122 bp, Homo sapiens
gggagttgagaacgcagggagttgcctagcaacagcgtcctaggctgaggatgggccccacggtggtcgcctcagcccccgccccagagtactttttttctgttttcagagcacattccctc

SEQ ID NO: 476180 - DNA, 122 bp, Homo sapiens
cccagcccctgccccgcccccaagctcgaatcacatgaaggagacggcagcacccacctgcgcacgcaccccgcccctgcatgcctgacccctcgtcctagaagacgcttcccgacctcggg

SEQ ID NO: 476181 - DNA, 122 bp, Homo sapiens
gctggaggactccagtatatcttggatcacaacgtgtcaatgcacagagacacgtgaacacgagcactgtggtggagagaaagtgggggctcgtgccggtgaccataggggtgggggccagg

SEQ ID NO: 476182 - DNA, 122 bp, Homo sapiens
ttcttcttggccgcctccagctcgctcacaaaggtcgccattgctccgcgtgtctcagcccgaccgcagaccgcccggccaccgcgatcaacaacccaaaaaccaactcggcggaaggcctt

SEQ ID NO: 476183 - DNA, 122 bp, Homo sapiens
ccagccaatcaaggaggcctatgcaaatagggtccctgtcgccccggtaaccatgatgcacggcagccaatggaaaccagcaagtcgcggccctgctccatgattgggactgaagtaaggag

SEQ ID NO: 476184 - DNA, 122 bp, Homo sapiens
agggtcttagtattcagttcagaaaaggggagaaaccattcctccacccccaccgctccccggaggtctccgatgaaaacggggccgagtaaggggcagagcgctgcctctctgcaggccgt

SEQ ID NO: 476185 - DNA, 122 bp, Homo sapiens
acggagttgttacaatgccacaaatcaaaaggattattccagttccaccaacttaatctacgtgcaagataaaggacccagctggtacaggtgtaccagttttcttgagtttgctttacaaa

SEQ ID NO: 476186 - DNA, 122 bp, Homo sapiens
gcatcccagacagtcaactctgggatccctagtccaacaggagggcctgggagtggagcccgcgggccccacgcgccttgcggtccacactcctggctgcctcccacatctccgccgagctc

SEQ ID NO: 476187 - DNA, 122 bp, Homo sapiens
acattccagcctgggtgacacagcaagacctggtgtcaaaaactaaaaaccatctcgaatcggcgcccccgccacaagcattttttctcgtcggcagctcagttttcagctgtgcttagtct

SEQ ID NO: 476188 - DNA, 122 bp, Homo sapiens
cggccgcggggggcaggctgttcatggggttgctctggaagaactcgaggtactccttggcgcggaggaggttgcgctgatcaatttgatctacaaggtccagctgcccggcgtcggcgccc

SEQ ID NO: 476189 - DNA, 122 bp, Homo sapiens
gttcacaagggtggatggcagaggaccactgttgcacgacagcaagacagaaggctggtgcgttgccagtattaataatatcttttattatattggagtgactcatttgcttcctaggaatc

SEQ ID NO: 476190 - DNA, 122 bp, Homo sapiens
agaactggcatcatgctgcccatttcccgcctctccccacccagacccctgcctcagggacgcctgtcctcagcccagccctcagctgcagccaggccttcagcctccgtaacccccgctca

SEQ ID NO: 476191 - DNA, 122 bp, Homo sapiens
gggagtgttggaaacagcttctctgagcgactccaccatgggggcgtctctcttccttcccggtgtgggtcaagggctcagagatgtgctctttgccttggacccaaagctgtgtgtgggag

SEQ ID NO: 476192 - DNA, 122 bp, Homo sapiens
gagacttggagaggttaaataacttgcagccaggtcacaaaattaatcactgagttgagacgacaattaaggtatggccgactccatactgcctcctagccgtctcctcgagtagttcatgc

SEQ ID NO: 476193 - DNA, 122 bp, Homo sapiens
ccgcggggctttgtgtagagtcaaggccgggatagaaattttgcctcgcgggggacgggtcgagggggtaggaggccgacgcggggcaccccaaacctgcgttgccacgaatggtgggcggg

SEQ ID NO: 476194 - DNA, 122 bp, Homo sapiens
tgcttcccctttgcaaggttcttcccacattttgcctccttgatagaggaaagtctgcaacgaacagtgataggaatggaacctggacagatggcaattctacttcaagaaaagcaagtggc

SEQ ID NO: 476195 - DNA, 122 bp, Homo sapiens
tccttcattgagttttggtgcttcatcctctatctgccctctaaatgttggtgtccctatcgtctaaggctgggcacttttctcctacctgatgcccttttcttagattatgccaattatcc

SEQ ID NO: 476196 - DNA, 122 bp, Homo sapiens
gctcaaaaccggctccctctgcgagggtttcccaggttaagccatcaggaaacaggaagacgcctaagaacgatacactggactttggggactcggagggaagggtgggagggggacaagga

SEQ ID NO: 476197 - DNA, 122 bp, Homo sapiens
gcaggccgccccgccccccacgtccccaggcccttgggcggcgaagaggtctgggcgtagcggtgacgaatcctaagacaggggatctccactactgcggccacacacttttctcccaaacg

SEQ ID NO: 476198 - DNA, 122 bp, Homo sapiens
gaagttgtttccttttttatctcctgcttttacctctccctttaagatggatttgcttcccgtgatatgtcttatcatgttttgtacactctactttttaagcaaacagtgagtgaccaatg

SEQ ID NO: 476199 - DNA, 122 bp, Homo sapiens
aggccttggaacttcggtttccccaccttagtgtctgaatctgtagggcatgatactccccgtggtgctggtggcagagaacatgggtgcagccctttgtcataacaatttggcaatataga

SEQ ID NO: 476200 - DNA, 122 bp, Homo sapiens
agctgatgtacacgtaggttctcatctgcaatgtggttcgcccgggttgaggcctaggctcgggtccgcacgccccaattcacaatggggcagagaagtctgtcagtccccgccaactcgcg

SEQ ID NO: 476201 - DNA, 122 bp, Homo sapiens
caaacttcgtgtcctgtgggaaatgttgctgtccacggttctgtcactcaggggcaggggcgggacaagccagccgcacacccctactcccaaagggtgaggcggaaaagaggcgaggctct

SEQ ID NO: 476202 - DNA, 122 bp, Homo sapiens
cccccatcaaatggagctgtgattaacagaaaatgcaggcagcgaaaatgcaaatggctccgcacaaagagcttctcacaaattggcgtcaccatttctcaaattatatcattactatattt

SEQ ID NO: 476203 - DNA, 122 bp, Homo sapiens
aaaactagaaagctcgacttctgcctgcggggccggaagccccgctgcggccccagcccgcggttagcccctgtttgtcattttgcaaatctggtcaacccacctccggtgaaaactcccaa

SEQ ID NO: 476204 - DNA, 122 bp, Homo sapiens
gcactgattcaagatccctgggccaggcagtctgcactaagccagtctcgttgttaatcccgctctgattttgacttgtgttcctcatgactcatgctggacttctagtttttttcctctct

SEQ ID NO: 476205 - DNA, 122 bp, Homo sapiens
gtgagggcgtgctcccggccgggcgtgggaaaggcggccctcctgccgcccttcctgacgcgctgcctctgctcccctaagaaagtcttcatcgtgccggtggggaaccattccaacatccc

SEQ ID NO: 476206 - DNA, 122 bp, Homo sapiens
gcggggatggggaggggtggccgcctgccgcgcggctcccgcgggccgtcgccaggtgcacggtccccctggtcccccgcagggaggacgccccctggtgcccccgccgccgccgggcctgg

SEQ ID NO: 476207 - DNA, 122 bp, Homo sapiens
ggtggcgtcccatcccagagccattttgccggggcctggctctgcagtagtcactgacaccggagatcccctgagtgacctggaaactatgagagaccccaggtaccccgacaggtcattct

SEQ ID NO: 476208 - DNA, 122 bp, Homo sapiens
ccttgagaagggcaagctcagcagaggtacctagctagagcacctgagacgggtctgctccgactccaaagggctctgctgcaccctgggagaaacagaggggaggctttctatccctcaga

SEQ ID NO: 476209 - DNA, 122 bp, Homo sapiens
tctaggattaacaatagtatattgttttgtgaaactttcagttttatgcatatgcacacacgtctctatatactggctcatgatataaaatgtgtttcttactgtgggtcatggccaaaaaa

SEQ ID NO: 476210 - DNA, 122 bp, Homo sapiens
cattctaccttggcaggagttgctagtgctgcgttaagcctggcatgccgtgcaagagagcgataaaaatacttctggcatccatcccatgaagacgagatttctgtaagcagcctggaaaa

SEQ ID NO: 476211 - DNA, 122 bp, Homo sapiens
gtctcactgtatcttggttgaatcgatcctcccacctcagcctctggagtagcagaggcacgagtcaccacagccggcttatatctgttcttgtttttgttgttgtggtggctgtcttgttt

SEQ ID NO: 476212 - DNA, 122 bp, Homo sapiens
gctgagccgccggttggccggctgggcgcggagcagagccgacacggctggcgggggaggcggtggaggcggacaagcgaggacgtttctggagaggagaagggaggggaggggaggggata

SEQ ID NO: 476213 - DNA, 122 bp, Homo sapiens
gcagcgcccccgccccgcgtcgcctcccagccctggctcccagtgctccgggcttgctgacggtacagggtggacagccccgagacattttcatcagatctcgtctcccgcagcccagcgct

SEQ ID NO: 476214 - DNA, 122 bp, Homo sapiens
tctcgttggccatacggatcctttgcttggcgaccatcttcgcggcgccaccacctgccccggccacccctcggactcgctcactcgcctgcctcctctggagccgctgcgaggctcggctc

SEQ ID NO: 476215 - DNA, 122 bp, Homo sapiens
aggctggtctcgccccaggaccctggagccgcggaagggagtgttcagggcgcaggtgaacgcagaggtggttaggatacccgggcacacaagcgcctgcgtcagccatccttcctcaccct

SEQ ID NO: 476216 - DNA, 122 bp, Homo sapiens
cgattctcgccgcctcctgctcctgtgtagtaactgggccttcagactttagtctcgctccgcagcctccgtttcagaagccccatcacacctgtatctctccttcattgagcagtgatttt

SEQ ID NO: 476217 - DNA, 122 bp, Homo sapiens
tacaggcgtgatccaccgcacccggcctattttttgagagagggtcacactctgtcgtcccggctggaatgcagtgatgcgatcaccgcccactacagcctcgacctccgggctcaagcaat

SEQ ID NO: 476218 - DNA, 122 bp, Homo sapiens
atgcggggtgcaggggccggttccaggtcccctgagctcaagtctcgccccaccccgccccgcaagtctagaaaagatgcccctgcccttggctgggtaatctctggatttacctactgtct

SEQ ID NO: 476219 - DNA, 122 bp, Homo sapiens
cagccacttttcctcaactttctctcagagccagacgaactctggggacgctctcagggccgggcagaactcatccccatcctgtgacccgagtttagatctaacctgcatggctgccatct

SEQ ID NO: 476220 - DNA, 122 bp, Homo sapiens
aactttcgccctttttaaagaacaaacttagatttccccccaccaagcttaaagaaatagcgccatttgtccttttcccctctaaatgcggctggccagagccggggcagtggcccacctta

SEQ ID NO: 476221 - DNA, 122 bp, Homo sapiens
atactctcaagaggggattctggaaggacctcagtatttaggccattttagcgaggaggccgtggagaagggacctgattactcaggttgcagaatggaatgctcctcagcctgcatcccct

SEQ ID NO: 476222 - DNA, 122 bp, Homo sapiens
cgaagaggtggtcgtggagggcggggcagcagagcaggtgaggggcactgtggctaattgcgtgacgcggcccgaaccgagtgggaggctgcagttgggccgttggagggagggagggcagg

SEQ ID NO: 476223 - DNA, 122 bp, Homo sapiens
aaaaaaaaaatgacacgaagaaaggcttgtttacccaccctgaccctgggcactatatggcgctttccaccctccctctccgcgctgacccttgcccctcgcttcttattctgctggggcgg

SEQ ID NO: 476224 - DNA, 122 bp, Homo sapiens
tgcttttttttcatcacaaaagaattaatgttttcacagccctttgaagacgtggtgtcacgcatgtgctgttattaataataaaatacagatctgtttcacaccatctgaaaaacagggtt

SEQ ID NO: 476225 - DNA, 122 bp, Homo sapiens
cggcccggcacatgcaaacagggctggaggcagcagaaaccccgactctgaaatccacgccgccccccgcgccggggaggggcagctgaaggaggacgcagctgctgagcccaggagagagc

SEQ ID NO: 476226 - DNA, 122 bp, Homo sapiens
atctaaagaaaagaatatataagactcccagaggcactgttctatagcaggagtttaatacgtcaatgcaggctttagcaaataagggcttttgtcaatatttccctggcacatcacccaca

SEQ ID NO: 476227 - DNA, 122 bp, Homo sapiens
acccaggcggcgctctgtgccttccccatggtggagctgggtgccagcatggagcaggcccggagactctgctacacggcgggcggccggggccccagcggcgcagaggaagccaccgtgga

SEQ ID NO: 476228 - DNA, 122 bp, Homo sapiens
caaggcaggcacgggatgaatggtccctggtgtcacgctgagatcctgtggctgggcccccggtcacctgggcaaggctatcttgtgattcactgctaaggatcttaagcccaccttggccc

SEQ ID NO: 476229 - DNA, 122 bp, Homo sapiens
tagttcttttttccatctcctctcctttttcctttgttttagttatgatagaggaaatcacgctatcgaaaaacatttcgtatggacatttgctaacatttcaaataatgctttgggtggta

SEQ ID NO: 476230 - DNA, 122 bp, Homo sapiens
acctttctctctccatcctctttctcaatgtctttctccccattctatctgttcttttgtcgcagggctcaaggagcctctctccttccatgtcacctggatcgcatccttttacaaccatt

SEQ ID NO: 476231 - DNA, 122 bp, Homo sapiens
ggccattctctcacaccagatttctagtttctgtgcccaccccaccctcagtcccactgacgttgctctactagggttgctaaagactccaggtcatcaaatccaagagttacttttcaatc

SEQ ID NO: 476232 - DNA, 122 bp, Homo sapiens
ttccctggttcccttcttgcctacctctggatctgttggatgcagggcaggacaaagacacgccctccagccaccatgactggggggcttcggcagaaccctgcaaggtgtggggcagtgag

SEQ ID NO: 476233 - DNA, 122 bp, Homo sapiens
aatgtagtcacaaaggtccttataagagggaggcaggagggtcacatgggagaaggaccacgtaacgacagaggtcagagagatttgaaggtgctacactgtgggctttgaagatggaggaa

SEQ ID NO: 476234 - DNA, 122 bp, Homo sapiens
atttacataataatagctaacaatcgctgtgcattattaggagccaggccctgagctaatcgttttaggtgtattatctcattgaaagttcacaaaactctgtgacatggatgccattacta

SEQ ID NO: 476235 - DNA, 122 bp, Homo sapiens
ctggcgctgctggccgcgctgctgctggccgcacgcggggctgctgcccaaggtaagaggcgcccgccggcccccgcccgcccagaccccctgacccgtggccacccttccgccgtccagcc

SEQ ID NO: 476236 - DNA, 122 bp, Homo sapiens
gggcggaccgagctggtcagcgccgggccgcggcggccggggcggggaccggggaggctgcgcggggcccgccccctaccttggtcatgccattgcccatgatcccgggggcggcggtccgg

SEQ ID NO: 476237 - DNA, 122 bp, Homo sapiens
tcaaagccctgtgtttttgcctccaacagccctcatgcctagaccatcccttgtgctgaacgtgcacctaattcaacaccctagtcttcagacccgtgcaattttcactccctgtaaggaag

SEQ ID NO: 476238 - DNA, 122 bp, Homo sapiens
cccggcgccgacgtccgacgcccccctcagcggcgactgtgaggcgcggggtggctggggcggcttgggagccgcctcccggtgcttgttccgcgcctgcaggaccatcttggcatagtcgc

SEQ ID NO: 476239 - DNA, 122 bp, Homo sapiens
ccagccctgcaccgcgtcccctgagggcgggctgcaggcggccgggaagccttgcacaaccggcccaaaagaggaagcccagaaagtgctgaagtaaacactttgggagaccgttgcaacat

SEQ ID NO: 476240 - DNA, 122 bp, Homo sapiens
ccgccccgcccagttccgacttgagccccgccctctccccgcccccatcgcgggattctccgcccttggtcccgtttccttacgtatccccgagaacagtccggccccgcctccatccccgc

SEQ ID NO: 476241 - DNA, 122 bp, Homo sapiens
aaccccgcccccatccacaaacccaccactcacaggcggtcccgcctggttccagcgagccgcttccggcacggtagctcgagaaatgagcaagcggccactaagactatggtagctaggag

SEQ ID NO: 476242 - DNA, 122 bp, Homo sapiens
gcgggtcaccttctgaatttttaccttcataaacagcaaggactgcgctctttcgcacggcgccccgttttttcgtagagttccgtcggccaaaaccacttgaaactcgctcagcggcgtcg

SEQ ID NO: 476243 - DNA, 122 bp, Homo sapiens
cctggagtggaggtggaggtggaggcaaggagctgaaattctgcgtagccggagtgagaccgctctgcaaaccactgcgtgctttgcagagtgattatcagcacagttccctgccctggata

SEQ ID NO: 476244 - DNA, 122 bp, Homo sapiens
gtcgggaggcgcggcgggaagggcccctagcgaagcagtacttcgggcgggcagggctggcgggctggcctgggcggggagagaggatatgctcagctcgggtcttggccctgcggctgaca

SEQ ID NO: 476245 - DNA, 122 bp, Homo sapiens
cagcctggactcggcagcttccttaaagccgcagccgcggcgggagcttggggtgccgggcggtggctacatcaggcggcctccgcacgctgcccccacccccatcgctcggccgccccaaa

SEQ ID NO: 476246 - DNA, 122 bp, Homo sapiens
ccccctgtcccccgccccccagcggagacgcggaaaaccactcgcagccggagagacacccggacacaaagacctcgtgccagccgcagacccaagtttctcccggagagactgggggtccg

SEQ ID NO: 476247 - DNA, 122 bp, Homo sapiens
aacgcacccttgaagtcatcgggttggtcaaagcgcagcctgatctggtcccggaagcggcgggtgctctggcacacgctggtgatgccaaagcagaagcagggcaggcaggcggcgctgtg

SEQ ID NO: 476248 - DNA, 122 bp, Homo sapiens
ccaggaataacttgtatgatctttcatttcagaataccaggagcgatatggttctcgccccgtctgggctgactaccgccgcaaccacaagggtggtgtacccccacagcggactcggaaga

SEQ ID NO: 476249 - DNA, 122 bp, Homo sapiens
cactcacacctgccatttcggaaaaggattaggaatccagatgccgtgaatttaactattcgttacaggcttgtcctgcaatatgctctggagcaacttgcctgcagagatttctgtatcca

SEQ ID NO: 476250 - DNA, 122 bp, Homo sapiens
cagtcatccctgggtgcctcctgcgcaagcgcagttgtcctcctgcgccgacctcgaatgcggtcctcctgctgcagaccacgcccaccaagggctggccgcagccactgtagctgagctca

SEQ ID NO: 476251 - DNA, 122 bp, Homo sapiens
agggaagcacctgttttctcattttcacactgtgagctagcagtgaccccaggtattatacgggatggagttcccataccgtagttcagaggcatagggacttctgcatttgaagggtggga

SEQ ID NO: 476252 - DNA, 122 bp, Homo sapiens
gggcttaatgaggcctaaatctgtcaacagtggaggctgctgcttgtggtaaatatttggcgtccagctccatttggcatggttatatttgctccattgggggaaaaaataactctctgttt

SEQ ID NO: 476253 - DNA, 122 bp, Homo sapiens
actcggcatcccctctccctcgcctctctctgcttctttggtgggctcacgaccacctgtcgcatccctacgcgtgcctgcgccccttcccaggcaccaaaagccttgcgctccggactagg

SEQ ID NO: 476254 - DNA, 122 bp, Homo sapiens
gcgcagctgaggcgaggccgtggcccccgcagaccgcggagacctcgccggcggccggcgcggaggtgtctgcccccgccgggcttgaaggcacttgttggtaaaagacacagacgtgtcgg

SEQ ID NO: 476255 - DNA, 122 bp, Homo sapiens
aaaggaaaacatcatttctagccagtgtttcaggaaaaatcttgtcatttccctccaatgcgactcatcataagagccctaaggaaatagtgtttaaaatcaattaaccaaaaaggccaaaa

SEQ ID NO: 476256 - DNA, 122 bp, Homo sapiens
ttttattttttaaaaaatatatcagccgggcacagcgggctgatcacgaggtcaggagctcgagaccagcctggccaatatagtgaaaccccgtatctactaaaaatacaaaaattagccgg

SEQ ID NO: 476257 - DNA, 122 bp, Homo sapiens
tcacctctccccggcgcccctttaccttggcttgcagatactgggggtaatagtaggtggcgtactgagggtacatctgctgtttccacactttgcccatgaagctggaagggagcctgccg

SEQ ID NO: 476258 - DNA, 122 bp, Homo sapiens
tccaagtcgcttagaccccggccaatgaaaacaataggaggaaaaccagagggctgtaaccgcagtcactggagtcccaggagcagcggaaaactctaaagggcaatgctgttttcatggcg

SEQ ID NO: 476259 - DNA, 122 bp, Homo sapiens
ggagacagccctctcctcttccctcccccgcctctgggccctgacccactgcctggtttgcgctagagccgtttaaaaaagaaagaaaggaagaaaggagccgggctctggtaccccgatgc

SEQ ID NO: 476260 - DNA, 122 bp, Homo sapiens
gtttccaagcaggggaacggcgaggccaggtgtaagttttagcaggatgggcctggctgccgagcaaagatgactgtagtgtcagggggccccagtgtggctggcgggaactctccggctga

SEQ ID NO: 476261 - DNA, 122 bp, Homo sapiens
cgaccccatgcaaggctgtgtggataagccgctgtgaaaccgcctggtacaacgtgatgacgagcagagatacattttgcatccccgactcattatttcgctgtcaaaatgttccatttcct

SEQ ID NO: 476262 - DNA, 122 bp, Homo sapiens
taccagagattttgatctgacctatatccctttaatctctatttaaacaaatttctctggcgattctgatgctaaagatgcagaccattcttgagaaacatatgttacactactctgaaaaa

SEQ ID NO: 476263 - DNA, 122 bp, Homo sapiens
gacaagatgcacaaggcagggccatccaggagatagcgggctctgctcagagctgccagccgtcctctccccgtggagccctgcggcgcgctggcttctcctggtgacggtgtgcaccagct

SEQ ID NO: 476264 - DNA, 122 bp, Homo sapiens
gattttcttcccatatggctcagcccagctccgctgccccacaggtgtcctgtcaggatccgcttcacatttataatacctagcaccccacccccagccccgcccctgccccaccagccacc

SEQ ID NO: 476265 - DNA, 122 bp, Homo sapiens
tagactctggtgttctattgctgagaagcaaaccgccctgcagcatccctcagcctgtaccggtttggctggcttgtttgatttcaacatgagtgtattttttaaaattgatttttctcttc

SEQ ID NO: 476266 - DNA, 122 bp, Homo sapiens
cccactaaagccttgagaactcttggctgctctgcaagactgagccccatgaaggagccacgtgcggcgtggaaagagtgctgagttcaaattgtagccctgccactaatttgctgggccag

SEQ ID NO: 476267 - DNA, 122 bp, Homo sapiens
aagcatcaatcatgtttctggtcaaagaagcgaaccaagtcaattctcaggcagaagcagcggagattctccgcagccggcagcgcccagggcgcccggaacccagagagcgagaccgcgtg

SEQ ID NO: 476268 - DNA, 122 bp, Homo sapiens
cagcatgggctgcgcagaactgaggcagacacccagaggctgccaaattgtcatctgagccggaccgggtttcggcggccgcgctttatagtcgctggagcctggtgacctattccagggct

SEQ ID NO: 476269 - DNA, 122 bp, Homo sapiens
ttactcattcattacagtttttatttattgtctgtctttcccactagaatttaaactcttcgggccaagactatcttgttcactgaccattcccaagcacctagaacactgtctgacacata

SEQ ID NO: 476270 - DNA, 122 bp, Homo sapiens
tcttttatgctggcaggatgcctgaatgacacttaacagatgttcaatcaatgtcagtcccggaaaagtcttggtccacctagagccaactctgcgctttatagttataaattcttaggaag

SEQ ID NO: 476271 - DNA, 122 bp, Homo sapiens
ctcagctcagcgcccagtgaagagggcggaggaaggaatgaaggcagccacgggtgaggacgagggcccagggctccactgagcaaagctcctggcaccaacccagacagaagacgtcctgg

SEQ ID NO: 476272 - DNA, 122 bp, Homo sapiens
ctgtttttctttacaaatgtcatctgaaaacaaacacttactggctctgcccggctgccccgaccccttggagagtgggggcagggaccaggcctggctacccccgtccaggtggctgggga

SEQ ID NO: 476273 - DNA, 122 bp, Homo sapiens
cacggaaagggatttcgcgccaaatgcaaagcccttctggagaaagcccatctgcctttgcgcctgcgcagtgtagccgtggcccgcgggtatttttggctgctggaacaagttcgaatctg

SEQ ID NO: 476274 - DNA, 122 bp, Homo sapiens
ttcacacatcctagagctgcctctgcttctgccaggaatattaatgccaaccacctctgacgtctaataaatgcagatgaaacaaccaacaatcacagacaagctaaacatttatttcaaag

SEQ ID NO: 476275 - DNA, 122 bp, Homo sapiens
attttccagaaatcacaatggccagtcagtcccaggcagatgactacctgtgaaaaggctcgtcgccccagcccctgctagaacttttcccacccatcctcccagccctgtcctatccccgg

SEQ ID NO: 476276 - DNA, 122 bp, Homo sapiens
tttttcccctcttttaattccccgagcgcaatttggggcgcatgcgtccacgagacgccccgctaccgccctctaagggtgaagcagggactccagccagtcctcaaaatcccagggcaccg

SEQ ID NO: 476277 - DNA, 122 bp, Homo sapiens
ttaaaggtatctaggggattggccagcaatgggttttcatggtagcttacctgaaaatagcgggcaactcccttctggaaatggtactgggaaaagtggtacaggaaaagatcctcctagga

SEQ ID NO: 476278 - DNA, 122 bp, Homo sapiens
gtggatgagaatgttctggccactggggatgacacaggtggtatctgtctctgggaccagcggaaggagggccccttaatggatatgaggcaacatgaagagtacatcgcagacatggctct

SEQ ID NO: 476279 - DNA, 122 bp, Homo sapiens
ctgcacacgaccccgacagccaggagaatgcccaggtcacttactctgtgaccgaggacacgctgcagggggcgcccctgtcctcgtatatctccatcaactctgacaccggtgtcctgtat

SEQ ID NO: 476280 - DNA, 122 bp, Homo sapiens
ccccacccttcctccaaaaaagttccccgcaagacaagttacttctcaaagttggggagacggaggcggtgcttttaatgtctttccattttacagagatggagataggtccgcagagaagt

SEQ ID NO: 476281 - DNA, 122 bp, Homo sapiens
gccatgcagatgtccaagcagttctggtttgattatcaaggagcatgtgtaaaatagctacgtgtgaatggggtctctgcaaatggaaactggcgggggaggctcaggactcttaagaggtc

SEQ ID NO: 476282 - DNA, 122 bp, Homo sapiens
atcttagagaaagagaattaaacctcttacgaaaacagaagtttgtaaacagaccagtatcgtctacttgaataaactgatttctcctatttgcacattatagcaacaggtaactacttaca

SEQ ID NO: 476283 - DNA, 122 bp, Homo sapiens
ttgctgaatgtttctgttccccagtttactcatctgcagagtgagaataacttggagttacggagattacatacaatgatgtgcgcaatatttagcacaaaatgaatgctgaaaagagaagg

SEQ ID NO: 476284 - DNA, 122 bp, Homo sapiens
actggctaaagcctgagagcgacagttgaatacaccaatgggaccctggaagagtctaagcgacagccaaaatcaccattcaatgtcagctaggtgcaaggcgggactttaagtacggaagc

SEQ ID NO: 476285 - DNA, 122 bp, Homo sapiens
ctccgccatctctgcctccgtggccacgcggcatcttctccctggcatgggctgaaccaccgcatctcgggcaggtctgacggcgtttctatcagcacagcccacaatgatggtcttctccc

SEQ ID NO: 476286 - DNA, 122 bp, Homo sapiens
agggcatcacggcctccatacctgggagatgaagacagaccaggagcaggcccagaggagcgcagctccctgccacgcggccctgcatcctgctcagcacccgatctccctcagccccaaga

SEQ ID NO: 476287 - DNA, 122 bp, Homo sapiens
tggtgttcgtggcagcagggaagccaggtaccagtgcatgaggacttggaaccaggacttcgaagacgctgggctgaggagaagaccaaccaggctggggctggcatagggtccagggaggg

SEQ ID NO: 476288 - DNA, 122 bp, Homo sapiens
gaagcagaagaaggcagacgggaaggaggaggaaggaaaggagccttgtggcttcgtgtccgaccctcccgcccttggcccgcgtgcctggagccagccccaccgcgcccgcgtttcctccc

SEQ ID NO: 476289 - DNA, 122 bp, Homo sapiens
gttgggtttcagccgagcaagtctgaggcccctttcccgcgccctctggtggaaagtgttcgcttttctgtccacccatgtgaaggattcaccccgaccctcctcaggtggcctttactttg

SEQ ID NO: 476290 - DNA, 122 bp, Homo sapiens
aagggctgaattggaatgagcgcacgcgtgtagctgcagccatgttaacagaatgacctgcgtgacccaccctcgccgccagacagcaagcccacatgcgggctcatttgtgcaccgaaggg

SEQ ID NO: 476291 - DNA, 122 bp, Homo sapiens
ttagtgaagacaggaggaaggaaattgtctgagacacacttcttgcagacctgagaatggcgctgagcaggcccaaggaactgctctaagagccaagaagaccaggaggagcaggagccact

SEQ ID NO: 476292 - DNA, 122 bp, Homo sapiens
tttaaaaagtgaaaatgaagtctccctcccagtccccacgcccccaggttcagtccggggcgcctggacaggttggcattggaaagcgtgaggaagcagccacacccagagcgcactgcggc

SEQ ID NO: 476293 - DNA, 122 bp, Homo sapiens
gcgaggcacatttatgcctcccattctcccataccgttggtcgacttattgctctcctaacgacaactgaaacgacatccttccggcccagcacgcaatttctgaggtgtggtgggagaaga

SEQ ID NO: 476294 - DNA, 122 bp, Homo sapiens
agctctggtggaagagaagcctttgcaaaatgtgcttccaccctggaaagcgtcgggggccgcgggctccagcgggtcactctgcccgccccgggtgccgcccgccacagctggactcttgt

SEQ ID NO: 476295 - DNA, 122 bp, Homo sapiens
agtctcctctgcaactttccctgtggacaaaggcagtttcctgggatggtctttccttcccgttccaccacttttatgggtttaagaaaaccactaacacaggacagcggtggataattccc

SEQ ID NO: 476296 - DNA, 122 bp, Homo sapiens
gctgtcctggctggaactgaaacttagaaatgattccgtttcctctgcagggctcctggccggagtccccgatcccctaggggcctgagggctgtggtgggggcctggcagggctccaggta

SEQ ID NO: 476297 - DNA, 122 bp, Homo sapiens
gggcatggccgagggacgccagctgtggggggggccaagcgaggggcgtcacggagggaccgcggagtgctccctccccaccacgggcactggacgggcaccgtgcccggggcgacgatgag

SEQ ID NO: 476298 - DNA, 122 bp, Homo sapiens
aaatacgccctgatccccacataaagggccaattaactgcgccgtctccgggaacaaatccgctaacagggtgacaagcccctagacgctggcaggccctgtgtttgcggagaggccagccg

SEQ ID NO: 476299 - DNA, 122 bp, Homo sapiens
cgctttcgtcaccctgcagccgcacccgggcctttgggtggtgagagctgggcctgggttcgacgcccgcgggcgcagggagaccggctcccctttgctgtgtgaaagtttagttctttgta

SEQ ID NO: 476300 - DNA, 122 bp, Homo sapiens
tggtctctgttttgttaattatattacctttggtgatgcaccttgttctttcactggcttcgtgctttctgatgctgactgactcaagccttcttatcccaccttgtacccacaaaacactt

SEQ ID NO: 476301 - DNA, 122 bp, Homo sapiens
cgctgttgccattccaggctcgtgtgggagaagattgttgtgcgcctgggtctgtccgcccgggcggctccagcctctggtttataaaaggtgcagatggttaaaacacaaacgtgtgacgt

SEQ ID NO: 476302 - DNA, 122 bp, Homo sapiens
gggaggtgctttgtcagggccaacatcaatggccacaccagggctggaacccaggctcaccgactcccaggccactgtgcttggctctgccctctccctgaaccagccttagcacctcaagg

SEQ ID NO: 476303 - DNA, 122 bp, Homo sapiens
ccccaaatcagagtccagacaacacagtgggggttcacactggtttattgggggccctgccgggccaagagctcttcagtgcataggcagacatgcatgtggggcagtgctaggaactgggg

SEQ ID NO: 476304 - DNA, 122 bp, Homo sapiens
ttggtctctgcttttccttgcctgtggcaactgacagcacctcccagcctagcaggccggcggctgctcacccagccagtcagttggtctgggcactgcagcaggctcggctctgtcccagc

SEQ ID NO: 476305 - DNA, 122 bp, Homo sapiens
cgaacccgtccccgcctcagacgttgcagcaccagataactcccccaacctgccccctgccgtgggccatgcagccacggattggacccccaaccaactccctcgccgctggcagtgacgcc

SEQ ID NO: 476306 - DNA, 122 bp, Homo sapiens
accaccgtgaggaagatgatgctgccctggcggttcatagccaacatgaagagcatcagccggcaagggatgtccccaaacttccagtcccaacgcctcacatagttgtccatcaggaaggg

SEQ ID NO: 476307 - DNA, 122 bp, Homo sapiens
aagttaagtggagccacggctgacgtgagtcaacaaaggtcacgtgaggcgtgcgggccgcgccgattggtggcgccagccgggcggggagggggggtcacggcggcggcgtggggttcgct

SEQ ID NO: 476308 - DNA, 122 bp, Homo sapiens
gagtggaaccgaggtcatctctgagggatgtggaaatgtcttctgcagcatccctgaaaacggggcagctagcctctgcttgcatacctcatgggacggggagctcacttcctttctatatc

SEQ ID NO: 476309 - DNA, 122 bp, Homo sapiens
taccagagactcgggagatcttttctcttctctattggaagagacagcccacccacttggcggatgcccagctctccagactgagtgccaagaaaagaataagagaggtcctgagaccctgg

SEQ ID NO: 476310 - DNA, 122 bp, Homo sapiens
aatgggctgcgcggagcgtcacttcccggcagcgggaggcgagtggcgagtggcgagtggcgagtgtcaggggggcggccggcgggggcggggcggccggaggaggcgttggcagcgggctc

SEQ ID NO: 476311 - DNA, 122 bp, Homo sapiens
ccctgctcccctagacagccagggattcaggccacaactggttaactcagcgggcgaattcgagcccgcagcagtgctggctgactgtcttcactcagcgctgtaatcggcacatctgcaga

SEQ ID NO: 476312 - DNA, 122 bp, Homo sapiens
tcatcccttctcttccccttttcctgctggagctcgggccaggacgggcaacttcagccccggtttgcagcctgcatgcttcctgtgtgagaagagcccctgcggctccaggcaactacccg

SEQ ID NO: 476313 - DNA, 122 bp, Homo sapiens
ttgtgctgttttcgctttcagttcagtgatggggagccgtgtttggcagtgcagaggtagcgaagtgtcccaagaacatggaaggtaaggaagtcttccgaggaaaaacttcaaaaaattag

SEQ ID NO: 476314 - DNA, 122 bp, Homo sapiens
ctcagctacccgacagcgcttttctcatactggggcatatttgggtgatatgacctaagccggcgaacggaccggaccgacagacagaggtagatgtgggcattttgcagagaaatttaaag

SEQ ID NO: 476315 - DNA, 122 bp, Homo sapiens
atagaaaaagcagggccataaagagttgcgatttttagcctgagggcaattgggagctagcggacttttttgaagggaggttatcctgtgaaagcgacatttttgttcatttctcttcagag

SEQ ID NO: 476316 - DNA, 122 bp, Homo sapiens
ctcactttggcctctgcagttcacacccaggaatgtgggggaggagaagtagcatgctggcggtgttggatgcaaacacaattcccaaggaccaaaagcgagtgggtggggtggggatggct

SEQ ID NO: 476317 - DNA, 122 bp, Homo sapiens
cttccttatgtatactcagtctggccactgagtatgcctaaaaacggagcacacacctaccgttagctgcggaggctactgttgctcttcctctttgctcaatttcctgaggagggagggac

SEQ ID NO: 476318 - DNA, 122 bp, Homo sapiens
gcggagactctacatgggaatcggatatcggctacaaattcatcaccagaaaacaccgctcgggcgggggccgggtcacgccggcggggcggcggctctgggccccggggcgcgcccggcgc

SEQ ID NO: 476319 - DNA, 122 bp, Homo sapiens
acttgacaggtatatatttgtctgtttactgtctgtctctccccactgaattctcaactccgtgagagtaggatttgaactgctttattcactgctatatcccaagtgcctataacagtgtc

SEQ ID NO: 476320 - DNA, 122 bp, Homo sapiens
aggggctgcatggggactgcttgctcccgggagggtgtgggcaggagtctggtgtatatccggccaagaatccctttgcgacgtgtctccatgcctgggtgtgtgtgtatggacctccgtgt

SEQ ID NO: 476321 - DNA, 122 bp, Homo sapiens
agcgcccgtgtcttctggactgtttccacgacttctgtgccggctgcctgcgtggccgcgcgaccgacggccgcctcacctgcccgctgtgccagtaagtgtcccaaagttccccaaaaccc

SEQ ID NO: 476322 - DNA, 122 bp, Homo sapiens
ctgccaaaatctgaatgtatatcctcttgattttccttaaatttatctctgtggatatatcgtagcctgatttgattaattagtcatgtggcttgaccattgttcatatgggcatttctgta

SEQ ID NO: 476323 - DNA, 122 bp, Homo sapiens
ggaggccagagaactgagagaggaaagggagacgaagacagaaggtggggcggcaggcagcgggccccttaccaaagtgaagggggtgttgagcagcgtgatcattatgtcggcaactgcca

SEQ ID NO: 476324 - DNA, 122 bp, Homo sapiens
agtaacttaatcaaaaagttaaattatatgaaaagcctcattcccatctgcttcaccacccgtgtcccccaaccagataaccactgttcacatttcttgagtacatctctggtgttgattac

SEQ ID NO: 476325 - DNA, 122 bp, Homo sapiens
gtttagcttggggcttgggtggtcaaggaagccttcacagatcaaaagtaactggataagcgcttaaaggaagacacaatcagactcacttttatgaatgtaaataggacaaagacagcttc

SEQ ID NO: 476326 - DNA, 122 bp, Homo sapiens
tgcctggacggctctccaattcgaacccagttttgctgccctctggggtctcaactgttacgtgaggcaaattaggagagaagcccctgggcaccttgccccagtcgcacgagtgtccccgc

SEQ ID NO: 476327 - DNA, 122 bp, Homo sapiens
ccttcctgcctgaccctgcaagacccctgtctcagtctctctcaacatgtctgaaggactcgagggcaggtgtcaaaggtgaaggccctcatctggatttaatgtcctggaccttgaaacag

SEQ ID NO: 476328 - DNA, 122 bp, Homo sapiens
tgaccgtgggccagggaagaccggagagagagaaagtaaagtgtccaggactggaactcacgtccctgaggcaggggacagtaagtttgcttgtaacacagacagttttccttgactgcagg

SEQ ID NO: 476329 - DNA, 122 bp, Homo sapiens
cgcaaggcggggctgtagccgccccgggaccgccctgctcaggcgccgtggggttcggcgcggctacgtgcagaatccgtctagctaaaatgtaatttcagattggacaagtactgtaagtg

SEQ ID NO: 476330 - DNA, 122 bp, Homo sapiens
gggatggttcagccccgccccgctagggcggggcctgcgcctgcgcgctcagcggccgggcgtgtaacccacgggtgcgcgcccacgaccgccagactcgagcagtctctggaacacgctgc

SEQ ID NO: 476331 - DNA, 122 bp, Homo sapiens
aggaagtgtgtgctgattggtccatgggtggccatgggcgggcccaggaaaaagaacaagcgccccctgtggtccatggggctgtcgtcccggcccccaggcttcaggccttccccagcctg

SEQ ID NO: 476332 - DNA, 122 bp, Homo sapiens
tatggaagggacaactcaaaaattttgcattgccagtaagtggtggagctggaatttatccgccccaaagcttcacagacttgctttacagaagatggtataattctatctcacaccagtta

SEQ ID NO: 476333 - DNA, 122 bp, Homo sapiens
tgccattggcagctcctctctttattgtaccaagatctgtttccttcacgtttcacccaacgtcaaccagcccttcccttctttggactaagtctcccttcaacacatcctcaaatgacaca

SEQ ID NO: 476334 - DNA, 122 bp, Homo sapiens
accgttagcgcgaggccccgccccgtcctcagcgactccgcccccaccgctcactgactccgcccccaccgctcactggctccgcccccaccgctcactggctccgcccccaacgcgctcag

SEQ ID NO: 476335 - DNA, 122 bp, Homo sapiens
tcaagggcaggacactcgctgtcttgaggggcgctgtaatgccagggccaggtccctgctcgtctggcgctcagcccgtgctgctctacacgtgtttgctgaatgaatggagcagtgaaccc

SEQ ID NO: 476336 - DNA, 122 bp, Homo sapiens
aaggggtccgggatagctgcgaggcagctggaccaatcctgaacgaaagacatcagtgatcgcaagaggcgctaaaacttctgccgaaacccgggatcgaaccagggacctttagatcttca

SEQ ID NO: 476337 - DNA, 122 bp, Homo sapiens
aaatgccttcacatatttggaatgagctgattatggaaactatgacaagatgtgctttcccgttagaagaagcacactctctctcttcaccttagcctggcagtgcccaatgcaacaagaag

SEQ ID NO: 476338 - DNA, 122 bp, Homo sapiens
gaggaaggaaacgggagggcgccggccagacggcggcaggcgcggaggcgttggtccgggcgggctgtgcagcctctagtggagacggtccgaagactacatctcccaggctgctctgggcc

SEQ ID NO: 476339 - DNA, 122 bp, Homo sapiens
ccctgtccctgacccagagctctggtcactacagactttggggctctccgagcctgtcctcgtatattccaaataaatatcagacttaaggaaggagggataggtgttttcctccatagtgg

SEQ ID NO: 476340 - DNA, 122 bp, Homo sapiens
cgaactcacactggtaagtggaagcccacggctgggaggagcacgccggatccgcctggccgcggccgtgcgggaaaagtccagcaccccctgctctccctcggtgacgggcagcctgggag

SEQ ID NO: 476341 - DNA, 122 bp, Homo sapiens
aggagcccagcctgggctcggaggagcagctggagcttccgctttcccgggaaacgggctcgtcaggcgccttctggaaagagaagcgaagtgagggatgggatgcccggagggggctcgcc

SEQ ID NO: 476342 - DNA, 122 bp, Homo sapiens
agggacgggatggggcaggcgttcatctgcctcgcacctcgtgacgtcacaggcgcgctgcgcctcctgattggccagccggcgcatcgcccgcagtaataatagctgggcgaagggcaacc

SEQ ID NO: 476343 - DNA, 122 bp, Homo sapiens
ccgtcctcgtccgccactgagatatcccccacggtctacccacccgtcggctcccacctgcgacccaaggacccaagtcttccaagagctcagccgttagaattcaaaggttcttcttttta

SEQ ID NO: 476344 - DNA, 122 bp, Homo sapiens
gaggacacagctgctgcgtggagtcacgggaccgagaggccacagaacctaaatgggacccgtgggtctgggggtgcggccgtgagtggcagcggagtccttcagggtaccggccgggcgca

SEQ ID NO: 476345 - DNA, 122 bp, Homo sapiens
aaatggacgaggttgcagaacatttagaggcgtggtcttcctgcgtcgttgagctgggaacgttgctacctctgagcttggggcctaacctgggattaacctagcccagagagcccagggat

SEQ ID NO: 476346 - DNA, 122 bp, Homo sapiens
ctcctggtgggatgggtactggaaagcagacggtgaaagagggtcatctttccctgaagccgcaccatctgaagttagctgcgtctatctgtagtcttcaacactcttgctgcttctctgct

SEQ ID NO: 476347 - DNA, 122 bp, Homo sapiens
ctcatcccatggatattgatacacaaataaattcgtgacatactaaggaataaagctgaccgtaaaactaccttaagtatgcatacccgtgggggcgcggtggctcacgcctgtaatcccag

SEQ ID NO: 476348 - DNA, 122 bp, Homo sapiens
tttctcttgaaataatctgcaagctaaaatgagattgaaaagggaatcagtttttcactgcgtgcttcactgttatttaatatggtttagctatgtagtcatcattagtgctgttcagcaaa

SEQ ID NO: 476349 - DNA, 122 bp, Homo sapiens
ttctagagcccgggttaaagcaatgagctctgccttctgggctgaagtgccgtgaggcaacggtttgtcttcaataacatcatccaaggtcaccaccgcacatcctgcgcatctttctcctt

SEQ ID NO: 476350 - DNA, 122 bp, Homo sapiens
ttacttttcttgggggtgggagggatagatcaagcccccattaatttttactgccaccgtcgactcttgtgtagaaagctttgaagtctgagacctgggttttcagctcaacatctcagctt

SEQ ID NO: 476351 - DNA, 122 bp, Homo sapiens
tcggcagccccgggggcgtcggcagtgcccgcgggtggcgtccggaaaatgggctggcagcggggcgcgcgctgccgccggggctgagcctctgccgctagctttccccagccgagcgcctc

SEQ ID NO: 476352 - DNA, 122 bp, Homo sapiens
cttcccagcctctagaactgtgagaaatacatttctgttgtttataagtcacccagtctacggtattttgttatagacacctaaaaggaccaagacattctccctgtttgccaagaccatcg

SEQ ID NO: 476353 - DNA, 122 bp, Homo sapiens
ccctcagagacaccacggggcgagagggggtgtcctgcccccacaagccgagtgaggaggcgtcacggagatcacggctgccagagtggcttagatgctgcccagagccatgctgggagtca

SEQ ID NO: 476354 - DNA, 122 bp, Homo sapiens
ctcaggactggtgcaggtcagcggctccgcaggggtgagctgggcgctgcctgcatctgacgagatagcagtatgttagcatctgtggtgttctgtctaccgcagagtcctgtgagcctccg

SEQ ID NO: 476355 - DNA, 122 bp, Homo sapiens
aaacacagtttcaacaaaatgagctttgctgactcagtacctgccccaggaccccagcagcgccagggtttacgctcatttctccatccctggaggaagcgggcaggagagaaagtgaattc

SEQ ID NO: 476356 - DNA, 122 bp, Homo sapiens
ggtgtcccagtcaacagcgtggtacttatgacagccgcgagaaagcgcactactaaagcccggctagcagagctgggaggcaaaccagaccgtcagcaccagggcggcccacgcctgcttcc

SEQ ID NO: 476357 - DNA, 122 bp, Homo sapiens
aaagagaaacctttggggccaggcttagggtagacggggctgaggcctggcaagacagcccgtctacagtcattggacataggggaaacccacagggcatggggcacacctgctgctcaggg

SEQ ID NO: 476358 - DNA, 122 bp, Homo sapiens
ccggtctctcccctgagaccctggagaaagctcgcctggagctcaatgaaaacccagacacgctgcaccaggacatccaggaggtgagggatatggtcatcaccaggccggacattggcttt

SEQ ID NO: 476359 - DNA, 122 bp, Homo sapiens
taagctcgagttcgactttctcagtctctctctctctctctctttctcattcagaggcaacgttttcaaaaaccggcaattgcgtgtgcgtttggggtgtgcaagtgtgagtgtagatgtgt

SEQ ID NO: 476360 - DNA, 122 bp, Homo sapiens
cttgagggttatactacattccattaatactgtttttgtttttgttttgagacagagtctcgccctgtcgcccaggcgggagtgcaatgtcctgatctcggctcactgcaaccgctgcttcc

SEQ ID NO: 476361 - DNA, 122 bp, Homo sapiens
gcttgtccagaaaattaaagcccgctgtctcctgcagtgcagctgagccctggagggtggcggggggccgggggatgtgggtgtcagctctcgcggccaggggcacgctgtgcccccgcgcc

SEQ ID NO: 476362 - DNA, 122 bp, Homo sapiens
gtcatctccgtgatgaatcgggccaagaaagcaggtgagctggggcccgctgctgggtcacggccaggtcacagacgttggtcacatatactgacctctgacacccttagggaagtcagtgg

SEQ ID NO: 476363 - DNA, 122 bp, Homo sapiens
agctgaggtgtgagcctggagctggtgcttccaccaccgcactgcctgacagaactttctcgacggtaaaaacctcctgcgtctgcactgcccagtgccgtcacggctggcgccatgtggct

SEQ ID NO: 476364 - DNA, 122 bp, Homo sapiens
cggccaggtcgcggtgcacgcagcggcgggagcccaggtactccatgccctgcgggcgggcggtgtgagcgtgcagagaggatcccaggataatccggcaggtaccccaagcgtgacctggc

SEQ ID NO: 476365 - DNA, 122 bp, Homo sapiens
ggcacagcccagctcagtcaggcgaggtccagaaaggcctgacttgcctggcagcctcaacggacttgtccccgcagcccttgcggacctcctggtcgtcatggcgactgtgaaatgtgggg

SEQ ID NO: 476366 - DNA, 122 bp, Homo sapiens
cctgtccctgcccatacagctccccacagcatggcaacaagaggaatggggctcggccatcgcctgtccctgcccacacgtctccccacagcgtggcaacatgaggaacggaggcaccgtgc

SEQ ID NO: 476367 - DNA, 122 bp, Homo sapiens
gcgcgcatgcgccgcgccggcgcccccgcccccggatatccccgcgcgcccccgcggccacgccccccgcggccccgcccccagcccgcagaccccggccccgccccagccccgcgcccccc

SEQ ID NO: 476368 - DNA, 122 bp, Homo sapiens
ctctggtctgcacgccgtatgcagcggggagtgtggagcagatggacgtagacacgttaccgggtctgacccccaccccagagatggggcgcctctcacccacctgcaaaccccacatctcg

SEQ ID NO: 476369 - DNA, 122 bp, Homo sapiens
gtcgtgggaactttggctcaggcaggcggattcgggggattctgggaagtgtagtccagacgcctgtggcatcatcgacacttccggtctccgagcaggacactgctacttaacaaggtggt

SEQ ID NO: 476370 - DNA, 122 bp, Homo sapiens
tggtggacagcttgggcgtgaggccaggagcgccctggaaatgggcagtttggcggcagccgggccgacggagtgtgtgtgtgtgtgtgtgtgtgtgtgtgtgtgtgtgtgtgtggtggaga

SEQ ID NO: 476371 - DNA, 122 bp, Homo sapiens
cacggcaggtggcccggctgggccgcactgtgcggctgcagtgcccagtggagggggacccgccgccgctgaccatgtggaccaaggatggccgcaccatccacagcggctggagccgcttc

SEQ ID NO: 476372 - DNA, 122 bp, Homo sapiens
gctcagtgcagcaagccagggcccgcccctgacaggaatccgttggctaagcagccgctccggccttggccacgatcccaggaaagaagagcaaggggctttccacctgcccctagcctaac

SEQ ID NO: 476373 - DNA, 122 bp, Homo sapiens
gtcctaccacagccaaggctgggattccagggcgccggcagggctgctgccccaaacccgcggttcacttgcctggctactgagggccaaggccgcggtcagccaactccccagggtgtttc

SEQ ID NO: 476374 - DNA, 122 bp, Homo sapiens
gggcagggagccccaatgtcagagcataagagcagggaatctctgctttcaaattcccatcgagtttgcaaaaaaggaagaaaatatcccacaaaaagtgacgcaaatttgtgtaaacccaa

SEQ ID NO: 476375 - DNA, 122 bp, Homo sapiens
ttatccagagcaggagattgtcaatctcttcatcccaacccagggtgtgggcgccatcatcgggaagaaaggggcacacatcaaacagctggcgagattcgtgggagcctccatcaagatcg

SEQ ID NO: 476376 - DNA, 122 bp, Homo sapiens
catacctgcgcggcggccccgcctccacccatccattggctagatccgccgcccgtcagacgagcccccggggcccgcccccagccctgagctgcgcctcttagctctggggccacagcgcc

SEQ ID NO: 476377 - DNA, 122 bp, Homo sapiens
acctgggctgccccttcccaaggcagtaaaggcggctccagtcccagtctttcccggctgcggccaagactgggcagtccttaacatctggggcggctgccgggtctttgtcagcctgagtc

SEQ ID NO: 476378 - DNA, 122 bp, Homo sapiens
ggacaacgtcttaatggttccaccattgtgcaaagaggatgaccactcccagtgcgtgcacgttctctccgctaatgtcactgctcaaaacgttcagaaaattaacacttacgccagggtcg

SEQ ID NO: 476379 - DNA, 122 bp, Homo sapiens
aaaagaaagaaatctaaacaagcacagtcagaaatgacaaaggcaatactacaacttatacgacagaagatcctcagagactcctataaacaactctatgtacacaaattagtaaatctgga

SEQ ID NO: 476380 - DNA, 122 bp, Homo sapiens
ggctgcgcttccgcgtcagccgagagctcaggatctctaagaccaagaagctggtgcgatcgcgggcgcccagacttcagtctgaggctcggcggcggcggcggcggcagcggtcgtcctgg

SEQ ID NO: 476381 - DNA, 122 bp, Homo sapiens
ttggctgccgctcgcgtgatgtcatcacgtcggacgctgtcacggctcgcggcagcttggcgccaagaagctcagcctggctgcgcaggggaagctctttgcttgctcgtcaccgtggcaac

SEQ ID NO: 476382 - DNA, 122 bp, Homo sapiens
agcagaatcccccacccgctggctgcctctgccagccataaacacagcacggccccgtggcgggaggccatgcgcctccgcacaccccccagctgcgggaaccctccttgaaggagaggggc

SEQ ID NO: 476383 - DNA, 122 bp, Homo sapiens
caggggacacggaggcagggagaggcccgagacccacagagacacagagagacacagagacggagagatgcagacatatgcagaaacagagacacagagatagaggagaggggtaggaatag

SEQ ID NO: 476384 - DNA, 122 bp, Homo sapiens
aaatgtgttaagagcttttaaccacttctcaaagtgcttttccatctattgcctaaactgcggctagctacaaaggattttgaaaggattgccctggctggggattttgagatgtctagtcc

SEQ ID NO: 476385 - DNA, 122 bp, Homo sapiens
ctgactactaggctggaatattcactgagaacatcaacatgccaaagagaagccaatcatcgaactaacctggtggtagcaggctactgggagttaatgaaaatggaagtgggaggcaacac

SEQ ID NO: 476386 - DNA, 122 bp, Homo sapiens
cggaggactccggccctgagcttccggaagggacatctggggaaggtgggggggtggaaacgcgacaggttcatgaattatccatcaaggtaggagaggaggtgtgggttcttcagatgctg

SEQ ID NO: 476387 - DNA, 122 bp, Homo sapiens
ctacattggagttcaaaaagtgtataggataagggagagaagtagcgttagtgggaataacgttggtgggaaacgaaaacaaaatgaaagaaacctgagaagttcattaactcattagtaga

SEQ ID NO: 476388 - DNA, 122 bp, Homo sapiens
gatgtttatcccctaacaggtcagtcctaaagaaaaagctaattgtttcaagggtggtaacggaagaattttaagtaaggattatattaaatacatctagtttgatgcaaactgagttttat

SEQ ID NO: 476389 - DNA, 122 bp, Homo sapiens
gatagggactcgggggctgggagcaggctgttctcagacgatagaggttcttggccgacacgtttgaacttgttcctgcagaccaggggtccagagaaggtgctgtgtggggaggaacgaga

SEQ ID NO: 476390 - DNA, 122 bp, Homo sapiens
gcggccagactcactgtactttaatgtgctgtttgactcagcagttaacctcctgtgatacggcctgtctgttctgttgccaaattacataaatttgttattagactttgaggacttacagc

SEQ ID NO: 476391 - DNA, 122 bp, Homo sapiens
aacaaagaaaaaccaaaacacattcttgacgttgttgcatgtcaatgtctactcattccacgtatccacggaagatgtcctggctctctaatgaggcatacaaagtcgtctcataacattct

SEQ ID NO: 476392 - DNA, 122 bp, Homo sapiens
gggtcgttccccccggacagccctacgccggcaaaggtctcgagatgtgagtagtgagagcgcctaccccatacgtgctgccgctccccttcttttacccagtgatctagacctagtctagg

SEQ ID NO: 476393 - DNA, 122 bp, Homo sapiens
gcgcgacccatcaccacaccgacaaagtggttcctcaaagcaaaacactgcggcagttcccggtaaccagcagccaaccgcctcctggagcctataggggcctctccagccgccaccacctc

SEQ ID NO: 476394 - DNA, 122 bp, Homo sapiens
agcctctgtttctctgtctctgaaatgaggataatagaaatatttacttcaaaaagttgtcgggaaaagattaaatgagataatgtatgcaaagtgttcagccaaggaagagtttaatattc

SEQ ID NO: 476395 - DNA, 122 bp, Homo sapiens
ggcgcttccccggccctcccccatggagcctctccatggcatcccccgccctactctattcgcatccgcccgcccgtccccaagaccccaagtcccgcttgcagcgcccttaaaccggccac

SEQ ID NO: 476396 - DNA, 122 bp, Homo sapiens
aactaaaagttcttgaaggaaaaggggctaagggaaactttggtctagggatttcttcctcgccttatagttaaagcgtcgcacacaggtactggatcacagaatgcgtttaattgagccaa

SEQ ID NO: 476397 - DNA, 122 bp, Homo sapiens
gcgacattcatcaccttccaatggtaagatgcctccaccccacaatgtcattggaggccacgtgaggagcacctcctcccaagccagggtggtgcagcagaggccactataatagaagattt

SEQ ID NO: 476398 - DNA, 122 bp, Homo sapiens
aggaggggtcgccggcccgcagagttggcggcaggcggcggaagtagctccacaggcttgcgaccccggcagccctgggggctcctcagggtcctgttccgtgctgcactcttgacccactt

SEQ ID NO: 476399 - DNA, 122 bp, Homo sapiens
cacggatccgccggcaggcgcgaggcgagccagggatccgcgtggggacgcactgcgcggcggatcaaaggaatggaggggtcaccgaccctcctcacagcaaccagccggtgcgcggcgcg

SEQ ID NO: 476400 - DNA, 122 bp, Homo sapiens
ccctcagactgtggttccctgaggccggaggcgatacctccatctcaccctgagggcagacgctaaagcttcccttgtgtctgggagtcaccaagcctcctctgatggcacttgggacaccc

SEQ ID NO: 476401 - DNA, 122 bp, Homo sapiens
ataaaacgtgatagatggaacagtagacatacaacttgaataacaagtcacagtgcatcgcgccatgaaaacacccctcccgcccacccaccccaccgtaccccacccactctggtttctga

SEQ ID NO: 476402 - DNA, 122 bp, Homo sapiens
ctccctctcctaccatcgcatgtggatggtgcgctggcccgtcaactaccgcctcagcaacgccaagaagcaggcactgcatgccgtcatgggcatctggatggtcagcttcatcctctcca

SEQ ID NO: 476403 - DNA, 122 bp, Homo sapiens
aggctgcactttaactcctgatatcaaataattctctcatctcagcctgccaaagtgctacgattacaggtatgagccaccatgtgcttatgcaatttattgagattatttccaataataaa

SEQ ID NO: 476404 - DNA, 122 bp, Homo sapiens
tcctgcaggtgcttctgatgccagctgaggtgggagaatcgaggcatcctaacattaaaacgtggctgatgctcaccattcctgccgtagagtcgtgcctacctaggccagtatcagccttt

SEQ ID NO: 476405 - DNA, 122 bp, Homo sapiens
ggcgaagaggaggaatttttttaaaaaacaaaaaaacacagattataaatagaggcttcccggagcagcgggcacctgcccagcccagtccagcatgctgatcctcagcacgggggagggag

SEQ ID NO: 476406 - DNA, 122 bp, Homo sapiens
agagatgtgcctggaaccactcctgatgccatggctagagtggcccccctgacttctgcccggggtgttgacctcgcctcacctttcacagaccagaccggcacaggctttgagctcattat

SEQ ID NO: 476407 - DNA, 122 bp, Homo sapiens
ttgcttccacagtgtttggatggaacagatccgggaactcacttccagcctccgaccacccgctgatttcctctcttcttgcaacctccaggagcatcggctcagccatctcctgcttctcg

SEQ ID NO: 476408 - DNA, 122 bp, Homo sapiens
cactctgggaaatgtggttttcgcggcgctctctggggcttgaccccgaagcgggaggggcggggcccagagaggagggtcgtcaagggactggggcgcggcggggcagggagaggcagggc

SEQ ID NO: 476409 - DNA, 122 bp, Homo sapiens
aaccctgctcggggccggcgggtgaccttcctaggcactgctgggggcggagccaggaaacggctcgccccgccattggctggggcgccggatttctttaaaaactccggcttccattggct

SEQ ID NO: 476410 - DNA, 122 bp, Homo sapiens
tctggccctctgagcccccggcggacccagggcattcaaggagcggctctgggctgccagcgcaggcctccgcgcaaacacagcaggctggaagtggcgctcatcaccggcacgtcttccca

SEQ ID NO: 476411 - DNA, 122 bp, Homo sapiens
aaaatccccgtccttcttgccaagcccctgtcccacaggtaataaacaagaagccgggcccgtctcgccgcccaggagggcagagcttgcagtgccctgcggctggtaaggctgagggtcgc

SEQ ID NO: 476412 - DNA, 122 bp, Homo sapiens
agaaaagagaaacaaagtagatgtagaaactccaaggggaagcaaagagaaagtgtgggccgcatgactctcaggtcctctgcatctcacacgctcagcagggttcgggggtggaggtcaga

SEQ ID NO: 476413 - DNA, 122 bp, Homo sapiens
gagggggcagcctgcgctgaggatgtgagtgagttgggggcgggggttggggcttctccacggctacttatccaaatgaagtacctgcttcctgtccttggcccctgctgaaagctgcagag

SEQ ID NO: 476414 - DNA, 122 bp, Homo sapiens
ctgagtcacacgcagcgtggccgccttcgcgttgcccaatgtggcagctcccagggaggacggtcagtggtcctgctgtcagcctcagcctcccaggccggggactctctccccggtggcct

SEQ ID NO: 476415 - DNA, 122 bp, Homo sapiens
aatcttaacccagatgaaaatgacagagacacaccagctctttcttctcttggcttttcccgaagcttccctttccattaggccactgggggttggcgcccgaagcttccctttctcaccag

SEQ ID NO: 476416 - DNA, 122 bp, Homo sapiens
gccctccaggagccggccggtgtccgcgctcgcgggcggctctgggaccgggagaggctgcggctccccgctaaggctcctgcggccggcgcctcctggacccacccacccacctcggaaga

SEQ ID NO: 476417 - DNA, 122 bp, Homo sapiens
acctctccaaggtgtgagtcccccagcggtccttttgtttctgggttggcaattataatccgaacccctggaagtatctatttgggagaggaaaagtctcttgtcaatgggaggaatacagg

SEQ ID NO: 476418 - DNA, 122 bp, Homo sapiens
tttttgccctcccctcctcaggtgccgtggttatttgcccaccagggctttttgcacccccgccgcgcggctttttgacgccagccgccatggctttttaccccccgccgccgcggctttct

SEQ ID NO: 476419 - DNA, 122 bp, Homo sapiens
agttcttcctcagagccacagtccacacagcaggggtccctgcatcctgtcctgcacacgcggttgcgtatctgcaccgagatgagaggataaacaggctgaggctgactgcattggttttt

SEQ ID NO: 476420 - DNA, 122 bp, Homo sapiens
gggctcctagcccagctccggccggcgccccggctcgggaggcgccggagctggggccagcggttacctgttgtccagcttaacggaaaccacatcccctccaagcagagaagagaagaagg

SEQ ID NO: 476421 - DNA, 122 bp, Homo sapiens
ttttgcttgaggtattaagctggtgcaaaagtaattgtggtctttgtcaatggcaaaaaccgcaattacctttgcaccaatctaatgatatttaacataaacaaactcagggcagagtgcac

SEQ ID NO: 476422 - DNA, 122 bp, Homo sapiens
tatcccaggcctccgtgtcgacgcattcccagcgcacatacctggtcttttgctgcctgtcgtcaccgccaccccaacagccgggcaggcatcgctgccgccatcttggaagcgggcgctgc

SEQ ID NO: 476423 - DNA, 122 bp, Homo sapiens
cacgccgcctgccaggcgtgagtcttcctcccgctctgcgccgtcgccccgcccacacgccgccaccctcgcgtcagttgtcgctccgcgcctgcgcccgttgtctccctgctcgctccggg

SEQ ID NO: 476424 - DNA, 122 bp, Homo sapiens
cctgatggcgcgggtggaccaggggacaggtggccaggttgccagcacagggtaggagtgcgtgggctcggcgagggctcaagggctcctctgcagtcagcgtggggctgcgccacggcccc

SEQ ID NO: 476425 - DNA, 122 bp, Homo sapiens
aggccagttcctggaaaacacacatggtcaccctatccctagaccatatgctgtcttgctcggcatccttcttaacactttccgtttttttctgcccctcagactacaccttgtacttctct

SEQ ID NO: 476426 - DNA, 122 bp, Homo sapiens
actggccgtcgctgtacatgaaggccgtgtccagttcggtgtggccgcgctccagaaaggcgcgcacggccgcggcgctggcgggcgcgtccatgcggcgccccatctccatggtgcccagc

SEQ ID NO: 476427 - DNA, 122 bp, Homo sapiens
atggtgtgccccgagcctacttcccgcgcagtcctccaagacgcggcctccagcaggggtcgctgcttcgctgccgccctggcctcgcgccccgcccgacccgctctcactgcgccggcgcc

SEQ ID NO: 476428 - DNA, 122 bp, Homo sapiens
cagacgccatttgttgttggagccacgcacctgacgcagtgggcgtcttgcacgtgcagccgtttaagtcgcgtgggcgcctgcgagggcttgggagagcaagccgcggagaggtgagtggg

SEQ ID NO: 476429 - DNA, 122 bp, Homo sapiens
caccgaaaacggtgtcaaaatcagtgactccgcggaggcctattctcaggctctttaaaccgtcgtcttgggatgggcccagtgacaagcaaaaaactccgtaactttctctgcttgctagg

SEQ ID NO: 476430 - DNA, 122 bp, Homo sapiens
ctcgacctcccggggttcaagtgatcctctcatctcagcctctcaattagctgggactaccggcatgtgccactatgcctggcttatatttgtattttttgtaaagatggggtttcaccata

SEQ ID NO: 476431 - DNA, 122 bp, Homo sapiens
ttcggaaagctgacttacttgcgccccctggtgtttcacatgctgtgaatctctcacgaccgaggtctggccgcgcgccacctctctgagggaaggacagggtcagtggccaggaaggggcc

SEQ ID NO: 476432 - DNA, 122 bp, Homo sapiens
acaatgtataaaaaataataaaaactttaattctggggattatagctttacagttccgatcggtgctgagatctgtaacatatggctacaattccgagcagatcttctctgcatccaataac

SEQ ID NO: 476433 - DNA, 122 bp, Homo sapiens
tggacactgcagggcactaagccccggtcgaggctcggggaccctccgtgaccttagcagcgtcctcgaggctacaagtgacaaactgcttgtgctgagaaatggagaagccgcgtcccttc

SEQ ID NO: 476434 - DNA, 122 bp, Homo sapiens
tatgcctcaaaagccagtcattacatagaaaggaccactcaagtgactcatcatatctagcgattgcaggccagatagagctcagttgaagcagtgctggagagttctcttctttccaattt

SEQ ID NO: 476435 - DNA, 122 bp, Homo sapiens
aggagtgagatggatgcaggacagagtaagggaattgagggcaggaattaaccacgacatcggaacagacgataggagaggctgagtgataaagaggacaaagagttcattcataaagaaaa

SEQ ID NO: 476436 - DNA, 122 bp, Homo sapiens
gggcaggtggagggagtcctccctctgcattaatagaaaacaaaaacaattgggcctattcggcattgttggaaatgttctatgtcttgatctggtgggtttttacctgtgtacaatatatg

SEQ ID NO: 476437 - DNA, 122 bp, Homo sapiens
cgctgccatcctttcagcaaagagcaaacgaataaggagagatccgggcccatccctcctcgcgcagcagtttctagatttttaccccggcttcataaatggctaccagctggcagtcacaa

SEQ ID NO: 476438 - DNA, 122 bp, Homo sapiens
cctgcgagaggggaccatggcctggggctcagcagcctcctcggggcaccaggcagcctgcggagagaacaaggggagataagcttgaagaccgtggaccagcacaactgcacctcgggcag

SEQ ID NO: 476439 - DNA, 122 bp, Homo sapiens
agtgcccgctgccgagctccagagcctgcaggggcggacggcgttcactgggggcaccatcgagcctctccccaaacagcacaggccccgcccgtcacgtgcagcgcccgaggctcttggat

SEQ ID NO: 476440 - DNA, 122 bp, Homo sapiens
ggctggtgcgctcctgccaggagccggcgcgcgcgggagcacgtccggggcttttacggccggaactcgggctattaaaaagcccaggcgcgattttctaattaaacttttgatacaggacc

SEQ ID NO: 476441 - DNA, 122 bp, Homo sapiens
tacatcgggtgtggagagtgtcatcggcagcgtgcacacgtggctggcggaggccatcaacgccctccaggacaacagggacacgctcacggccaaggtgcgggcaggaggacgtgacgagc

SEQ ID NO: 476442 - DNA, 122 bp, Homo sapiens
acaacagggctgcccgcacggaggaacctgcacatcaacgtgcttgtgcacccaagtgtgcgttctgaatgtgagtgagcgcgtgggattgagcatgtgtgctccaggtaactgtgagcgtg

SEQ ID NO: 476443 - DNA, 122 bp, Homo sapiens
gagatgttggcctgggaacgacagtgcaagaggacagagggaggcctggcgggtggagggcgctgccatcttggagatagagggcaggtgtgatgagcacagcatgaggcctgtgggctcga

SEQ ID NO: 476444 - DNA, 122 bp, Homo sapiens
agggaatctggattttcaaacttaaaatttggcccaaagcccactgctgcccgcaatggccgccagacacattcctcttcccttttagtttctatgggaatactctctttgaagaacccatg

SEQ ID NO: 476445 - DNA, 122 bp, Homo sapiens
atcattccttgtacagtgttgaccggactacttgcctggtcccagaccagtgttcagcaccggggagatgtagtggtgagcaggacagagaaagcccccaactgctctgagcaggtgaagga

SEQ ID NO: 476446 - DNA, 122 bp, Homo sapiens
aaccttgacaacaggcgcatcctcccaggccaccaacccagccataggctcttctctgtccgcagggcttctggggccaaatgggtgaatctttgcttttaacattgtgtgatttcttttct

SEQ ID NO: 476447 - DNA, 122 bp, Homo sapiens
agcccagagcaggaagccacagctgtctctgggaaagcaagggaggcttcctggaggaagcggcattgttatgagccttgaaggaagagacagactctgctacattcaacctcgtgacttca

SEQ ID NO: 476448 - DNA, 122 bp, Homo sapiens
caccgacatgcctgggcaggggacgtgtgggtatatcatcgtctcccatgggaaacagaccgtttgcgtctcttggcattgcctttggaccagtgtagagggctctctctaggggaagtgct

SEQ ID NO: 476449 - DNA, 122 bp, Homo sapiens
gggctgcgccggcctctggagccccgggagccagtgccgaggtagggagacaacttccgccgcagggcgccggacggtcggggcagagcaggcgacaggtgtccctaggccgcagggcgctt

SEQ ID NO: 476450 - DNA, 122 bp, Homo sapiens
agaaaactgacatggctgtaactcagcctctaggacaagcccctcagagcctgccggcctcggtagccctcccaggctgagggaccccaaaggagtgcacggcacccgtggtccctgaacta

SEQ ID NO: 476451 - DNA, 122 bp, Homo sapiens
agcacgccagatcacctttcctaaacccatcacgatcgcttttccttttcttgcttgtttcggctactctcttccatccggctttgccttactttcatatcggtcccaaacaacttttctcc

SEQ ID NO: 476452 - DNA, 122 bp, Homo sapiens
tcccaaacttgcagtttggtgtcgaaattaaggttgtttgtacagaactgtgccctcatacgttgtagtttggctaactccaggcacttctatattattttgtgctttattctgcctctggt

SEQ ID NO: 476453 - DNA, 122 bp, Homo sapiens
gagtcactaagtaactaacgttgccatttccaaggaagaagggaggagactcctgttttccgctgcgggaggatcagtcccccaacatgcactaccttcataacttaaaaattagaactgcc

SEQ ID NO: 476454 - DNA, 122 bp, Homo sapiens
tggtaacccacagccccgaccacgaaggcaacagggaatgtgacataaggagcataggtacgaaccacggtccaaaacacaggccacatgacatctgcggaaaagcacaaggcagcattaga

SEQ ID NO: 476455 - DNA, 122 bp, Homo sapiens
tccagcacactcactctctggtccagtcttagacacagtttattctctctctgcacctgtcgtcaattcataagaggcagcagcatcagagcatcacctacctggggaatcatgagacagca

SEQ ID NO: 476456 - DNA, 122 bp, Homo sapiens
cctggggcggcgcgggggaagctcggcgtggggtgggggctcaaggcgggcgctgaatggcggcgcggggtggggcgacgggcgtgggggccgggcccgggggcagggagccctccccaggg

SEQ ID NO: 476457 - DNA, 122 bp, Homo sapiens
gctggatcgccttatgccttgagttatctttgtttattctttggtcctaggaagcatagacgttccagagtgctgacgcagacccctaagttccaagggctttgcaaaatcggcttctgttg

SEQ ID NO: 476458 - DNA, 122 bp, Homo sapiens
cttactcggagatccggcaccgtgcgcacttcctatacacacaggatcctggaattgggccgggatgatgactcaacactgacgataaggatgtccccgggtgccttgggttgacttagaat

SEQ ID NO: 476459 - DNA, 122 bp, Homo sapiens
tattaggtgttcagagcgacagtggtcccacactatttcagtccaggaaaccatgaactccgttagtggcaatgcccccgaagaggcgcaggtgtgtgcacctgtgattaagggtgtcgagg

SEQ ID NO: 476460 - DNA, 122 bp, Homo sapiens
caagtgagaattctgtgcacaccctgcccttgtgtggcatggcgcctgcgcactgcgtttcgtgtgcctgcgttctgcctgctggctattggtggctgtgttgtcttgacagcgtccgcatt

SEQ ID NO: 476461 - DNA, 122 bp, Homo sapiens
ccaagtgtagaaaatttatgatgcctcttttaggatcataaaactaacagaggagactggcgtttgtgcagaggcctgggctgtcatctaagtgaataatccgctgaaaaggtttcggcttg

SEQ ID NO: 476462 - DNA, 122 bp, Homo sapiens
gcctgtggccggaggctgggagggagggcaggcgagtgatgccagacgcctgactggaggcggatccagccggccagctgcctctctggagcccagctcttgggccccctgcactcacctgc

SEQ ID NO: 476463 - DNA, 122 bp, Homo sapiens
ttcagtatgttacactgttaagacttccagctgtcaagtgcttccactataaacaggaggcgggaagaatgggatctagagggaatagagattgcataaaagtgaaacttcatgatgtgagg

SEQ ID NO: 476464 - DNA, 122 bp, Homo sapiens
cctgtgggtgagaaacatgggtaagcgtgtgcagacgtggagagggcgtggggtgagggacgcccacccctgtgggtgagaaaatgggcaagcatgcgcagacgtggagagggtgtggggga

SEQ ID NO: 476465 - DNA, 122 bp, Homo sapiens
ggagaggaaggagtggaaaatggggggggggtgggcaagtgaataagggggagaaaaatacgaggacaagaaaaggcaaagaaatgtcccttctagtataaggggacaagaaatagaaagat

SEQ ID NO: 476466 - DNA, 122 bp, Homo sapiens
ttgtaactgtttagtgcttaactaacatatattcctgctgcatcttctgcttttcttcatcgtagtataaaaaattatgtttaaattatacaattcagagaaaatattaacctgcatgcttt

SEQ ID NO: 476467 - DNA, 122 bp, Homo sapiens
gcctctgcagggtggtccagcctaggtgacagggtggtccagtcaaggtgacagagacaacgtgacaaggttactgtctcaaaaaaaaaaaaagaatattaaacagatggacactgaccata

SEQ ID NO: 476468 - DNA, 122 bp, Homo sapiens
gtgaacgttctaggattcttcagtgattcctggtgccatgtgtatgccaaaaccacattacggcagacacagtcaaagatgaatcctcccagcccttgggaatcacctgtgcactctgatcc

SEQ ID NO: 476469 - DNA, 122 bp, Homo sapiens
tcacttccccgctactaaacttcggttgtctcaactctaagatgggtggagaccaggcagcgccgagatcacggagcggggcccaaatgccagtccacacaggcaaggaggctgcgccgccg

SEQ ID NO: 476470 - DNA, 122 bp, Homo sapiens
ctcctcttcccggtggatggaatcccagctgggctgtgctgagccctcgctcacagtccccggcagcagatggcctggggcggactgtccccaacagcagcaggactccagagggccaggtc

SEQ ID NO: 476471 - DNA, 122 bp, Homo sapiens
ctgtggccgcgcgctggcctggaggctgacctggaggctcatctggaggccgagctgacccggcaggccttgcgcgggcaacatggcggcgcccggcgagcggggccgcttccacggcggga

SEQ ID NO: 476472 - DNA, 122 bp, Homo sapiens
gccaccgcgcccggccaatgtcttcattttctaattggggaatccgttgagggcgcagctcggccttaaaaacctgtacttgcgattctaagaccagcgcgggttttccgtgccccaccttg

SEQ ID NO: 476473 - DNA, 122 bp, Homo sapiens
cctaacggggttataaaaacagcgccctcggcggggtccagtcctctgccactctcgctccgaggtccccgcgccagagacgcagccgcgctcccaccacccacacccaccgcgccctcgtt

SEQ ID NO: 476474 - DNA, 122 bp, Homo sapiens
ggcagattgaacgtggtgctctgtggaaaaatgtggtctggccatacccagtgctatgcacgtgtttaccaccattgcctccccttctcccatctcatgttatcggtctgtaaagtgggtgt

SEQ ID NO: 476475 - DNA, 122 bp, Homo sapiens
taaatggcatggagatatatgcatatgtatacgcaggcacacgcaccgtctacacttccacggaacagactaattaacagcggctctggcagatgtgtcagagatgagcagagacaggagct

SEQ ID NO: 476476 - DNA, 122 bp, Homo sapiens
ccgctttgcctaaatcctcacaccttgttcacacacccctgtgtgcgtggccgctgacctcgggactaagactaagagccagtgcctttctgtcgagcagtcaaccatctttatgctttctc

SEQ ID NO: 476477 - DNA, 122 bp, Homo sapiens
gccgcacgccggtgccccctaccgtccggagtcatccctcccgccccggcgctcgggctgcgatcctggtccctgccagtggaatctggaacaccagccagttgtgcgcactatgccctcag

SEQ ID NO: 476478 - DNA, 122 bp, Homo sapiens
gcaggctcaaaccagacccaagaggccccgaggacagtttgtttggtggctctgggcccccgctcagtgacagtgtggacgtttgtctctcgtaaggagtgagaataaacagaggacagaaa

SEQ ID NO: 476479 - DNA, 122 bp, Homo sapiens
aagcttttgcattcctaaatttatcgaacttcctccagcctaaagaaaagtttttctggccgggcgcagtggctcatgcctgtaatcccagcactttgggaggccgaggcgggcggaccacc

SEQ ID NO: 476480 - DNA, 122 bp, Homo sapiens
cccatgggaccctgaccggtgctgccaaaagcatgccctggaaccaggtgataaaggtcacgagttagagagcttccattgtccctgagagcagtgcagtggggcagatccatttcagaagt

SEQ ID NO: 476481 - DNA, 122 bp, Homo sapiens
acgtcgcggagcttgtttgctgtgcggcgtagcggcccctctctcagacagtcgtctgtgcgccgtgagactttggacctactgcgcaggcgtcatcctgttggaacctggtcagctgggtt

SEQ ID NO: 476482 - DNA, 122 bp, Homo sapiens
ctcctgtgaaacctgggagaccagagtcccctttagggttcccggagctccgggaagacccgcccatcccaggactccagatgccaggagccctgctgcccacatgcaaggaccagcatctc

SEQ ID NO: 476483 - DNA, 122 bp, Homo sapiens
acgggtttctgaagggcagaaaggagagggggttgggaagcaaagggtatttatcagtgacgcagtgcaaaaggccctctggcttgggaagctgagcagggtactcagggtgcatggacagg

SEQ ID NO: 476484 - DNA, 122 bp, Homo sapiens
ccaatcctggctcctccccgggccccggccccgccccagtcccaagccgcaccccttccccgtccccgcagggctaacgtcagcctccaatcctggctccgccctggaccccggcctcgccc

SEQ ID NO: 476485 - DNA, 122 bp, Homo sapiens
caccccttccctccccactccccgcggccaggtctacttgttccttgaggatccaggctccgaaaagccctgaggcaggacaggactccacaccgcgctgcgagaggaaagccagcctgcac

SEQ ID NO: 476486 - DNA, 122 bp, Homo sapiens
ggggcagatgagatctttgtactgcattaagtggatagcgctcaggtcctttgggcttggcgctttggcaatctccaggcagctcactttggcctctgttcctggatcccctttgctctttt

SEQ ID NO: 476487 - DNA, 122 bp, Homo sapiens
accgccccgccttctgcgtctacagccctgggttctgggacctttggaaaccgctttggacgaagctgagcatctctttccccacgctgacctcccccatagactccggatgggagtaaatg

SEQ ID NO: 476488 - DNA, 122 bp, Homo sapiens
tagttataatatggataatagattagaaggggatcaagaatggcataggaggaactgttgcgagtctatcacagcaatccacaagagagaggatgtagctctgaccagggtcacggcagaag

SEQ ID NO: 476489 - DNA, 122 bp, Homo sapiens
aagctcaattaatgaatattactaagaaattttcagaaatcactgcttagaaatcagcaacggggtagagtgagttacttacagatgaatattcgaatcaggggtttcaggaaaaactgatg

SEQ ID NO: 476490 - DNA, 122 bp, Homo sapiens
tccctcccaaaggccctggggaaggtggtgcgggggctcagcaggtcagtttgtggcagccgagcttctccccgtgtggttctgggtaggtcactccaagtcgccaggttgctgtctcctca

SEQ ID NO: 476491 - DNA, 122 bp, Homo sapiens
gtccctgggaggcgccactggtcaggcctggacacctccaggtgactaagtgggtaggaccggcagggccagctgcgccaggacgttcggggctgggctgtgagtggggggagcgaggctca

SEQ ID NO: 476492 - DNA, 122 bp, Homo sapiens
ggatccgttctaggcggttcagggagccagactccagtttcaggcaggtctctccagggacgactggggcgggtaggcggaggatcttcaaagagagggggtgcccctggccaagggtcacc

SEQ ID NO: 476493 - DNA, 122 bp, Homo sapiens
cacgagaccgttgggtgggaggagccagcagccagggaggttctagtctgttctgcctcgcggcagccgccctcttctgcgtggtcatgccaagccagcacctgggcctggaaccgggccgc

SEQ ID NO: 476494 - DNA, 122 bp, Homo sapiens
tttttgataacagatcctaagcctggatgctggaggtgcttaaaaatgtgcattgtgggccgggtgcagtggcttaagcctgtaatcctagcactttgggatctgaggagggaggatcactt

SEQ ID NO: 476495 - DNA, 122 bp, Homo sapiens
tctgaatggtctggacatcagttggcgagagaaaggcactgaagaaattttcagattcatcgaccacagtcctccgaactggctttgtgattgctttaggagaggctattggtggactctga

SEQ ID NO: 476496 - DNA, 122 bp, Homo sapiens
agccaacttcaccctaaagaaactcttcctggcgtttgcaacgagctcctttactcctaacgtccagctcttggctcaggacctgcagagcgtcacagctgttgcagaaaggcgaagtcgag

SEQ ID NO: 476497 - DNA, 122 bp, Homo sapiens
aggacaagggccgggacgaagtggaggacgcaggcagagtctccaagcctgctcgaaagccggcaaccaccctccgaggctcgaatctccgctgctctctcccgggcctgggctaccccggg

SEQ ID NO: 476498 - DNA, 122 bp, Homo sapiens
gtggcttccatattttacaccctggttatccccatgttgaatcccttgatctatagtttacgaaacaaagatgtaaaatatgccctacgaaggacatggaataacttatgtaatatttttgt

SEQ ID NO: 476499 - DNA, 122 bp, Homo sapiens
ctgggagtgtgtgcagggaggggccgacatctgtcgttttacccatgctcctgcccataccgcccccacctcagctccctgccctgggcaggaggtggctccaagcagcagtgggagggttt

SEQ ID NO: 476500 - DNA, 122 bp, Homo sapiens
tgacctcatgatccgcccgcctcagccttccaaagtgttgggattaaaggcatgagtcatcgtgcccagccagaaacagcatttttaagcaactgtttgctttgggttctctaggctatcaa

SEQ ID NO: 476501 - DNA, 122 bp, Homo sapiens
gtgaattttgggtagagatagaacaatcaccaagttaccttgctccaaaaaagaaatttacgtatgggattgttttcaaagcgggaagttagctgtgtaaataacaacaattttatatattt

SEQ ID NO: 476502 - DNA, 122 bp, Homo sapiens
atttcgggagcgacttcacctttccacaggatcatcctcttggcaagatgaggctgaggccgggggttcggggctcagcatcgaaagccggggcctgggtgccacaggccgtgacctcttcc

SEQ ID NO: 476503 - DNA, 122 bp, Homo sapiens
gaggcccttaaatgtgtatggatacgtcaggcgagctgaagactaagcaaatcccagcagcggccctttctctctttcgagatggtaaaaattctccccaaatacctacagtccgtctcagt

SEQ ID NO: 476504 - DNA, 122 bp, Homo sapiens
tgggtggcagagtcctggcctccccgccttcccagtgggtagcacactcccctcttcccccggccttagctctggatttcctggcacagccgtgattactccacctcggccccctcccctgg

SEQ ID NO: 476505 - DNA, 122 bp, Homo sapiens
tggctcctttgcctggcctggtcagtgacactttgctcagacttcccttgttttcgatgacgttgatggtcttgaggaacactgccaggcatttggtaaaatatccctcaatgtaggtttga

SEQ ID NO: 476506 - DNA, 122 bp, Homo sapiens
cctagagtctctgaagccacagatctcttaagaactttctgtctccaaaccgtggctgctcgataaatcagacagaacagttaatcctcaatttaagcctgatctaacccctagaaacaggt

SEQ ID NO: 476507 - DNA, 122 bp, Homo sapiens
ccaggacacgtcacaggggcggggccgattttaaagagccgggcgcggaaaaaaaaaggccgcctgtcgtcgtggagagaatgagtcacagatttactgagttaacaaaatatctttaataa

SEQ ID NO: 476508 - DNA, 122 bp, Homo sapiens
cgcccctgccgaggccggggatgctcatcgttgcccagagttggcccgaggagccctctccgttttcccaatacttttccctgcatcagtgcagccatccccgccgcctttgtctctccaac

SEQ ID NO: 476509 - DNA, 122 bp, Homo sapiens
caaccatgaagtgtgtttatgtcactaagtttgtgataatttgttacacggcaatgataacgaatacacacagacacacacacagagaaccaggagataactgaaggcactacttgaagcaa

SEQ ID NO: 476510 - DNA, 122 bp, Homo sapiens
tcacctgggcgaggcagcatctacccccggctgggtggcaccgaggccggctccgcggggcgcccgggctccccggctcggccacgcatccttccccgcccgagacagactcgagctaaacc

SEQ ID NO: 476511 - DNA, 122 bp, Homo sapiens
gtgcctttctgtaccccaagccagcacaagattggaccaatcctttttgcaccaaagtgccggacaacctttgtggtgggggggggtcttcacattatcataacctctcctctaaaggggag

SEQ ID NO: 476512 - DNA, 122 bp, Homo sapiens
gcaagcgggagcctgcgggggggtgctggggacttcggcttggctgggccgcctttgagtcgcctgtcggccgggcggtgcccgccttcgctttcggtgccgtcccggggcgggtcctcgct

SEQ ID NO: 476513 - DNA, 122 bp, Homo sapiens
ggtcatgtttactgaaggtgcttgttttctgtctctccattcattcggttacaggacacccgacgggacaaagcgtgttgtaaccgaccaccaatggagccggctctgttcacggattatgg

SEQ ID NO: 476514 - DNA, 122 bp, Homo sapiens
gtgaccaacatcccctattttttaaaaattccgtgtgagacctgagaacacactgtgaagcggggttcggagaacgacccctcccgcgttccgcgcccagcggggtcgcagggctgcgagcc

SEQ ID NO: 476515 - DNA, 122 bp, Homo sapiens
tctacaggtgtcatacaaaaatcaatactgagccaaggattattggatcccatagaaccacggagacttggtagtgaaattcttccaaaggtgagtaggggcattgatttcctttcccatgc

SEQ ID NO: 476516 - DNA, 122 bp, Homo sapiens
ctgtcctgtgaatggcaggcagaggaacgaggacgcctgaaggaagagctggaagaggctcgggacatagcccggcggcgctctttagggaatatcaagtttattggagagttgttcaaact

SEQ ID NO: 476517 - DNA, 122 bp, Homo sapiens
aaaaaaaacaggcttttagtatgcattcatttgaattaggtcttgtttacctgcaacaaacgctatgtaagaaaagtacgaaaggtaagatccttccctctccatccagctgcccagggccc

SEQ ID NO: 476518 - DNA, 122 bp, Homo sapiens
gtgattgctgtgctgggcaaagctggtcagggcaagagctattgggctggggcagtgagccgggcctgggcttgtggccggcttccccagtacgactttgtcttctctgtcccctgccattg

SEQ ID NO: 476519 - DNA, 122 bp, Homo sapiens
agcagagaagaagaggttctccagcacagccgtgcaggccatccaccagcgcctccggtacgcctgttgcagcgtgggggccatgctggccccgagcctgcacagaaacagagcgctgggtg

SEQ ID NO: 476520 - DNA, 122 bp, Homo sapiens
tgcctaattacctctgccttgatgttgtttcatgtcagctcagatccaacatgtctcaaacgcaagccaccctcccctcccttctccaaagtatctcttcctcctccaaaccctcctcctcc

SEQ ID NO: 476521 - DNA, 122 bp, Homo sapiens
tgtgcggcgctcacgctgccagagcccgggcggagtgcagtcgcctccaaagccttagagcggcgccccagtcactgcagctcttcaccctagagctgtgccctgggaccacagagaccaag

SEQ ID NO: 476522 - DNA, 122 bp, Homo sapiens
gtggttggatttcaactccagcatcccaatgacaccagcctctgcacaaattcttcccagcgatggtgagctcattacctccaaatggctttaatcactttgactactagctcaacttccct

SEQ ID NO: 476523 - DNA, 122 bp, Homo sapiens
attgtaccccaggaagaaacacatccagtcatgggcacggaacgggacgtcagcacaaaccgtttaccagaaaaaaacgcatctctcctttgggacgtaccatccccggtctccatgagctc

SEQ ID NO: 476524 - DNA, 122 bp, Homo sapiens
gagctgaggcatgtggaccggtctccagcacccaaccctgccgggtttccaggggacatacgttgtatgtgttctggtcaaggtttatgctttcgttcacatctgaccctctgacattccac

SEQ ID NO: 476525 - DNA, 122 bp, Homo sapiens
ctgggaaaaataacacctgtcttatagagttgccatggggatgacatgaggcatgtgtctcgttcatatcccatgctcagtgaattagtagcagcagccactgtgtgtttgtgtgtctttat

SEQ ID NO: 476526 - DNA, 122 bp, Homo sapiens
gattaagtagccttgtttctaatggctttgcagttttttcttaattcaggcctttcacatcgttcaccctcttagtcaaccatatgcagtttatagcttcactatagacattttctataacc

SEQ ID NO: 476527 - DNA, 122 bp, Homo sapiens
ctcaagctatcttccctcctcagccctcgaagtagctgggactacaggtgcacgccaccacgcccggctaattttttgcatttgttgtcaagactgggtttctccatgttgcccaggctagt

SEQ ID NO: 476528 - DNA, 122 bp, Homo sapiens
tggagtgtgtcggcccacaggggccagccaaaggcagcaggaaggcttgaaagggaatgtcgaggcacctgtggtgtgaaggaaaacgcaaattgcacggcagaggtacccctcccatggac

SEQ ID NO: 476529 - DNA, 122 bp, Homo sapiens
tccccgccccccaccgccccctcccgctccgcagcccccgagtggcgtcagcacgcccgccgggcatgggctttaaatgcccactagcgggagctcaggcgcttctgccctggagcgcggtc

SEQ ID NO: 476530 - DNA, 122 bp, Homo sapiens
cctcgttccaactagcagttcccacagagacgcggggcacggagacgtcccacagagatgcggggcacggagacgtcccacagagacgcgggacacggagacgtcccccagagacgcggggc

SEQ ID NO: 476531 - DNA, 122 bp, Homo sapiens
acgcataggggattcattccaggacaccccatggataacaacatccatggatgctcaagtcgctgatataaaatggcctagtatttgcatataacctatgcacatcctctcgtatactttaa

SEQ ID NO: 476532 - DNA, 122 bp, Homo sapiens
tcagaaacagcagaggagagcagggccgtgctcactgattggtccctcggtggagcgggccggaccgggcattccctttggagccaatcaggaaggcgagagaccgaattggcccgtgcgcc

SEQ ID NO: 476533 - DNA, 122 bp, Homo sapiens
tgccgctgattctatgtaatcattctgaaggaacgcaagctacccttagtgttctgtccccgtgcactgtcccctctctccaagggctctttgtgcaagaccagtgacaatgaagccttcct

SEQ ID NO: 476534 - DNA, 122 bp, Homo sapiens
tcctaagtagccaagtccgcctggtggcacagcccgggttttatacatggggaaattgggcggcgcatctggcggaggtctcagtggtaggaggcgcctggaggaagcgcgggttcctaacc

SEQ ID NO: 476535 - DNA, 122 bp, Homo sapiens
gacctcatgatctacgagcctcacttcacttattccctcctggaacacgtggagctgcctcgcagccgcgaggtgagggggctcctcttgggcaggactccgggggaggccccccccagcca

SEQ ID NO: 476536 - DNA, 122 bp, Homo sapiens
ggaggaggaggcgcgagacgagcaagacatggtgctcctgcaaacatgagcttgtccaggcgaataggagaggtgatgacgaagagtgtattcaaggctgcctttttggcctttatatacac

SEQ ID NO: 476537 - DNA, 122 bp, Homo sapiens
ccaggcggcgagaggctgcaaattccctggttccgaggcctcagggaagagcccacctgccgggcgagcgtctccaagagtgaaaaggaatccgcaccccgcgcgagggagccgggtcctgt

SEQ ID NO: 476538 - DNA, 122 bp, Homo sapiens
cctgcaggacattcttgctaaaaaggcagcctgaccctaagcccgcccgaccaagagcctcgtctcggctctgtgcaagagccagaggagtgaagactgccgtcctctgtggggttgcaaac

SEQ ID NO: 476539 - DNA, 122 bp, Homo sapiens
ttgaaacttgtggaggtcattcatcctcaaaggctgagctcacacaggctgtgcctgccccggccccggccccggcccctctcccccggcctccccactgggcagcaccccagcagccgtgt

SEQ ID NO: 476540 - DNA, 122 bp, Homo sapiens
gaatagatggggagacccataggctgggctctctccacattcatcttttccttgatccatcgcttagggctgcttttctcctgagtgttcaattccgagcaggcattcaacagccttttggt

SEQ ID NO: 476541 - DNA, 122 bp, Homo sapiens
gggatgcggggcctggcggtcttcatctcggatatccgcaactgtgagtggcgggggcggcgtggggccggggccggggccgccggcggagacggggtctgggagcggaggcccggggcggg

SEQ ID NO: 476542 - DNA, 122 bp, Homo sapiens
agctggtgtgagccgtgtggggccaaggacatgtgggcaaaccgggctggctggtgctggcgacgtgttgacacaggtcctcgcggcatgctggccggatactccacagcctggagcagagg

SEQ ID NO: 476543 - DNA, 122 bp, Homo sapiens
agcctctatccagcagcgacgacaagtaaagtaaagttcagggaagctgctctttgggatcgctccaaatcgagttgtgcctggagtgatgtttaagccaatgtcagggcaaggcaacagtc

SEQ ID NO: 476544 - DNA, 122 bp, Homo sapiens
ttatcctagacgtgctggcagctgactagatggtgctcacccggatagagggtgggtttgcgtcttctagcctactgactcaaatgttaatttcctgtggcaacaccctcacagacacaccc

SEQ ID NO: 476545 - DNA, 122 bp, Homo sapiens
ggtaggaaaatctaaatacagaaaaggacacggctactgcatgtaatctgtgagagcagccgtaagaaatcactgaccaacccactatcttttttaagcatggttctttctttctgtctcta

SEQ ID NO: 476546 - DNA, 122 bp, Homo sapiens
aggaatgtattagccaaacctaccgcgattttgccgggaggacgccaaaaaagacgatcacgtgtcaaataaccatggaaacggggtgacaaaaggaacttatgccttcgctcccttgttta

SEQ ID NO: 476547 - DNA, 122 bp, Homo sapiens
taatgatcctcttcaaaatagtatgccgccatccattttctcgagttgtgagcatttatgcgtattcattcataaaaactgtcagtgtgcaatatgcacaaacatgccatttatgcaacatt

SEQ ID NO: 476548 - DNA, 122 bp, Homo sapiens
tgagccatcagaaaggttcttttttgtccaggtagttatagtgccctgttgggggagtaccgcacccagatttccctgacttggtgttcacagaggacttgatgcaattgtggtttaaaaaa

SEQ ID NO: 476549 - DNA, 122 bp, Homo sapiens
tgagttcgcactatgcatcaggcagggaactaagcactcagaacactgacaagactgagacgatctctgtctaagcgagtcctagaggacagtggggaagtcagaagaggaatctgaacaag

SEQ ID NO: 476550 - DNA, 122 bp, Homo sapiens
gcctgtggccagacgtggggtcagcccgggccccgctcactcgctccctcccttcccccacgaccccggcctgcccatggctcaccgctggtcttggtcgtggaccgcatgagggccctggg

SEQ ID NO: 476551 - DNA, 122 bp, Homo sapiens
ttgggacacctgcccatcagggtggcatgtcactgcctccccatcaccaaatcctctccccggccttagaacgcagctgcatcccgctggtggccctgccaaaacggtccccacatgcaaag

SEQ ID NO: 476552 - DNA, 122 bp, Homo sapiens
gcctgattcccacccccgcccccaacccaccccggcaccagtcgcccgcatcgcggctctcgctaagatcggccctaagagagaatggaaggctgtttcctagaaaggagcattggtggcgg

SEQ ID NO: 476553 - DNA, 122 bp, Homo sapiens
atgaggatgggcaggtgtcgtgcagcctccacacacccacgtctcaaacacactgttccacgccaggccaccggtcaccgcaccttcccacaccgccaagcacactgacacacggggccgct

SEQ ID NO: 476554 - DNA, 122 bp, Homo sapiens
atgatactgaacctcagagatcagttaaatctactgctggaatggggattctttctaaaccgtgttgttccctctcttcaaacagctggagctgtacacagatggaaaaacatttggtcaga

SEQ ID NO: 476555 - DNA, 122 bp, Homo sapiens
ggagggtgcgagttaactgtggcccggtctcgcccggacctcgccctaggtgggagcacgcgcaccgggtctgagaacctgcaagagcctcgcccggcgccggctttctctgggccccccgc

SEQ ID NO: 476556 - DNA, 122 bp, Homo sapiens
ttatctctctgtcttcctgacccttccccagagggtgcggctttcagctcagcttttcctcgccttccctcgctgacctccgcacgccctctttcatctttcacccctccctttgctgtgaa

SEQ ID NO: 476557 - DNA, 122 bp, Homo sapiens
tgcactgtatgcaccctgtacattgcggagccatttgtatctttggccacaagtccttctcgtggtgtaagagatcttggtgttgcctggtagcattcaggagaatttattttgttgtggtt

SEQ ID NO: 476558 - DNA, 122 bp, Homo sapiens
acgcatgcgcacaagcagcagaggggaacccgcccagtgctgagttgtcttcgaggttggcgctcctccaggaaagcgattggctgcgtggagtttagaatgggaaaggaatgccatcaacc

SEQ ID NO: 476559 - DNA, 122 bp, Homo sapiens
gcagggtggcggccccgcacggtaggggagcagagtgggcaggccgggggtgagggctcgcgctccgggagctgcacggggctgcgtggaaagagcgccgagcggtggcgtcgttgtcgccc

SEQ ID NO: 476560 - DNA, 122 bp, Homo sapiens
ccgaagtggtggagcgccgacgcctcctgctggaaaaagggacacaggagcgctcgcgatcggtgaggagctaccaggccccaggaccagccgagagcccctctgaccctcgagcccactcc

SEQ ID NO: 476561 - DNA, 122 bp, Homo sapiens
gtggcagctccgccgctggctgctgtgcaccttggatgggttgctttcgtctctgagccccggtggcctaaaggtgataaggcgcaatgcagcccacgtggctgctagtgagggctgtttac

SEQ ID NO: 476562 - DNA, 122 bp, Homo sapiens
gttggccgggaggcggggccctggcgcgcgggttggccttcacgccccttctgtccccagcgtgtgcctctggtagaacccctggataacccgggaatataaccaacgaagatttggcgcca

SEQ ID NO: 476563 - DNA, 122 bp, Homo sapiens
caggccatgtgggccgcatccagctggaagccctcaaaacagtcacaggtgtagccctcccgcacgcgcacacagcggccattctcacagccgttcaggatgccgcactcctccgcctgaag

SEQ ID NO: 476564 - DNA, 122 bp, Homo sapiens
ggccatctgcaccgcgtccgtctccatctcgggcttctcgcccttgctccggcctttcttcgacatgcttccccttgggtcagagtgctgagatcctgcggtccacacctgttcacgcacgc

SEQ ID NO: 476565 - DNA, 122 bp, Homo sapiens
gaggggaaaactgacactcagtgaaggaccgtcagagggccggcttccaggaaaatgggccgcagcaggcagggaaaacacaaggatctatcctgcaactcggagaacccttttcaaaagaa

SEQ ID NO: 476566 - DNA, 122 bp, Homo sapiens
gtctggagctggcagctcggccggttccgcattcccgacccctccccgccgcccaggggccgctatatagccggggctgatgcaacccgtcccgccgcccgccacagcctgcgggagggacg

SEQ ID NO: 476567 - DNA, 122 bp, Homo sapiens
cgagggcggctgcgacgcgccgagaggccgcggtgagtgcagcagcactgggggggtggtcgtcccgacccccgggctcccgggtgggaaggagcagctgggctgcgcggagcaggcccccg

SEQ ID NO: 476568 - DNA, 122 bp, Homo sapiens
gagccgcgtgggcgcgtcagagccacctccgctctctctcacgtcgccagggattcttgacggatgattccgctgtcagatgccagcttgcctctgtcacaccgttttcctgaacgcagtag

SEQ ID NO: 476569 - DNA, 122 bp, Homo sapiens
gaggggtgaaagggcggggccggcttgcgtggcgcctgcgttctgcgtgtccgcagagcccggagagtccctgataatctaagactcatagccaccgactagcaatttgttaggatcctggg

SEQ ID NO: 476570 - DNA, 122 bp, Homo sapiens
gctggctgtgggagctccacctccttcagtgacagatgtgggctgtgtattccattctgacgggtctggagatcagactaacctttgtctttaggagaggaactgaagtgacacaactcaga

SEQ ID NO: 476571 - DNA, 122 bp, Homo sapiens
ctcttactctgattctaaatagggctaatgaggaggttggaatcagtggcacccaacctccgaaacaagccccaaagattctcaccatttggtattcatgccttggatagtaccttccaaca

SEQ ID NO: 476572 - DNA, 122 bp, Homo sapiens
cagcagctgggaaggcaaggaaacattctcccctagagccttggagagggcatggttctgcgagagccttgatttcaggcttctggtctccagaactgtgagagaataaatttctgtcatgt

SEQ ID NO: 476573 - DNA, 122 bp, Homo sapiens
ccccgcgcccggggacgcgaacctgcaggctggggactggaatccccgccttgccgcttacgcgccatagattcctcatctgtcagcaccgcagaaaggccccctcctcgctggggtgtgag

SEQ ID NO: 476574 - DNA, 122 bp, Homo sapiens
acccagaagtcccggacttccacaccagccccgcatccaagcgcgcgcctttgaaaccttcggcctctcctgccagccagagacccgccctgccgttgccatcgggacacgcgggatcttta

SEQ ID NO: 476575 - DNA, 122 bp, Homo sapiens
ctcatcccacccagaccccacccatcccgccgcggccacgccccatcctgcccgaagccccgccccatcccgcccgaagccccgccccatcccgccgcggcccaaccatccgctaggcccca

SEQ ID NO: 476576 - DNA, 122 bp, Homo sapiens
agggccaaggccaggagccgcctgcaggctgggacgatccagggaatggggcagccccgccggtcaggtggtaccacaccgtgggattctgggcaagatttgctgatgggctggatatgagg

SEQ ID NO: 476577 - DNA, 122 bp, Homo sapiens
atcagcagcagaggctgcagaacagcgaatattcgtgaacagcaaacgttgctgcctgatcgtttctctggaagtttcgtctcagaggggtacccagccatgtgaggtgtcagtctgcccct

SEQ ID NO: 476578 - DNA, 122 bp, Homo sapiens
ctagttcaaggtcgcaggtggctagagcctctcccagggcacaaagcctggacaggacgccgttccatcacaggacacactcgcacccacacctggtcagactgggaccacttagatgtcca

SEQ ID NO: 476579 - DNA, 122 bp, Homo sapiens
taaaaagtaccgattcagctcctagccaatctgctcaaacatgcttcagaacactatgcccgcggtattcggaattgaagagttttacaacaattacgggggaaaccatagtcagcctaaca

SEQ ID NO: 476580 - DNA, 122 bp, Homo sapiens
cgggacccctggcggggagggacagctgggtccaggctttggccatcagtctgcaccgaccggggtgcggagcgcacatgcgacccgggcgcaattacttgggcctcctcgccccgcccccc

SEQ ID NO: 476581 - DNA, 122 bp, Homo sapiens
aatggtgacgtttatcacaagggtcatgccgtgggctcccataaaagacattgtagagcacgataaagaacgttttctcccagaagaacatttatttctaaaacccagttccccatgttaaa

SEQ ID NO: 476582 - DNA, 122 bp, Homo sapiens
gcttcattgccatatttgtacacgctgccaggctgcctctgcccggcagcgaagagctgccgtgtctgctttcacacgctgaggctgtaaggcgcacagaggagaaaggagagccaggactc

SEQ ID NO: 476583 - DNA, 122 bp, Homo sapiens
gagacctaagttaagtagcagcaccaaaacgtatccaccaaacaaaggctcttcctcagacggccccttctggagagaacctttcctaatattttccagtagggggaactaaagactcacca

SEQ ID NO: 476584 - DNA, 122 bp, Homo sapiens
gcggatcacgggtgcccaggggctcggaggccgcctcctctgggaagcctgcccaggttccgatggactcccacaggcaatacccctgggccttcctcgcggcccctgttggccccaattcc

SEQ ID NO: 476585 - DNA, 122 bp, Homo sapiens
gagggcgacgagtgccgggtccctaagagaagccgagcccggccccgcccccgccggccccgcctccttgtaggccccgcccccagccgccaagtcctgcctccggataggccccgtcctca

SEQ ID NO: 476586 - DNA, 122 bp, Homo sapiens
ctttcattatctcagtaaattctgggctattgatcactttgcagcccatatagggggtaacgtatattctgtcaaatggaagtccccatcagggaacgatccttgcagcttgctaaaagaag

SEQ ID NO: 476587 - DNA, 122 bp, Homo sapiens
cctgggctctaaaatacttagggaactcttgggactgtggaagcccaggagaccagatttcgtttcctgcatctccaaacatggcgacctaggagaaggggaagaacaattttttctcctct

SEQ ID NO: 476588 - DNA, 122 bp, Homo sapiens
ccacagaggggaatcaacaaaccagaaacaaacctccctctttacttagcacctagcatgcgtccaacaccgggttacaaaaatacttttgatctgtttacgcttccaacaaccctatgagg

SEQ ID NO: 476589 - DNA, 122 bp, Homo sapiens
ggaagctgcccccaagccgaagacgtgggacaccaagttcacccgtctcttccgcaaccacgagaagtctaatgatgggaaaatggaaccagcccacacagcgacactggagtcacctcttg

SEQ ID NO: 476590 - DNA, 122 bp, Homo sapiens
tggctccgagtccgcctccgtctcctaatccccggcccgcgccttccttcttcctccgggcgggttctcacctggtaaggaaagtgtcatgtggaacccggagggagattcaggagccaggc

SEQ ID NO: 476591 - DNA, 122 bp, Homo sapiens
ttcttaatctcttaggattcacagactcttgagcatggaatctgtgcttcctatccctgccgcacacccccacctccccaccaccccattaaatgtatacagacacagacaaaattttacag

SEQ ID NO: 476592 - DNA, 122 bp, Homo sapiens
tcggggagaggggtgagaccgtctcttccctttctggcctcactgcccccgactgtaaaacgaactgcttggttttgataggttgtggtttcaccaccactgcgagcctcaaggcccctggc

SEQ ID NO: 476593 - DNA, 122 bp, Homo sapiens
aacatttttatgaaatgatatgggaggggactggtctagggtttctaatagcctccacatcgcccagcggcagagcccacaaaactgccactggccgccaccgggttcctccacctccttcc

SEQ ID NO: 476594 - DNA, 122 bp, Homo sapiens
cagctgtgcccatagtgggggcaggcgccggtgagacttggttcatccaatgcaggcaggcgactcccagagcctgcctgcacagcaacctccccactcacaagtccggtggaaccctggga

SEQ ID NO: 476595 - DNA, 122 bp, Homo sapiens
attgaacagtcttttcccagcaaaactcaacttaagtcccatccatcttatcccaggacacgacacgattcgtttttccgcgccaactatccatagcctcccttttatttggcaatcatcac

SEQ ID NO: 476596 - DNA, 122 bp, Homo sapiens
ctccttcaattgttaatgattgtcctacagtaatcactattcaaaaaagaaaggagttggcgtcaatgcaaatgaaagcactgcaacgtaaatgaacaagtgagccctattggtgcttgcca

SEQ ID NO: 476597 - DNA, 122 bp, Homo sapiens
acaatgcctggctagtatcagtagatattattgttagtatttccttacatcccctttcttcgtcctggctaaaacttgttcagtatagacaggaagcgatgggagaattcatcttgccttct

SEQ ID NO: 476598 - DNA, 122 bp, Homo sapiens
caccgcctgtctctgggccccatctgtgtgtggacatgtccgtctcctaccctgcactctcgcctctgcattcctggcacccagcagcaccagccacaaagattttcagccagtgacaaagg

SEQ ID NO: 476599 - DNA, 122 bp, Homo sapiens
cacatgcggctgatgacagcacttctgctgagacgctgtgattgctctgtccaaagtaaacgccctgacgcactgtgggaagggtgagatgggcaccgccagccccatcacgtgccccctga

SEQ ID NO: 476600 - DNA, 122 bp, Homo sapiens
ccatactggtgaccagagtgacattccagaaaggttttgggaacccaagtgcagccaggacgcctcccgctgcatctggctgccccggccaacagtgtcccttacctgcggctcctgcaggc

SEQ ID NO: 476601 - DNA, 122 bp, Homo sapiens
cagggtgccacacatttgtcttcctcctcagtgagggggcgtgcacagggcagccgaagtcggcaactttcagctcgccctcaagccctgagagtagattatctggcttcatgtctgggagt

SEQ ID NO: 476602 - DNA, 122 bp, Homo sapiens
acctgcacacgggcccacgcccgccagctgcgagtctttccctcctcccggccagaggcacggctgcagcaccgcagcccacgcctacctccttgtgcttctccatggtggcatacagcttc

SEQ ID NO: 476603 - DNA, 122 bp, Homo sapiens
agcgctgaatatcattaataccttcccactgttaaatcgatcactgtcatccccggatgccggcgtgcggcggggcacatggctgccagccagaacgccttccagagccccggcaggccagg

SEQ ID NO: 476604 - DNA, 122 bp, Homo sapiens
ggggaagcggatgggcagcatgttggtgcagtgccccaggctcagcaggatagtgagggccgccaggacgaagcagagggcgtacaccgccacccaccactccagggccggccggttgtggt

SEQ ID NO: 476605 - DNA, 122 bp, Homo sapiens
ggggcggggggtggtaaaaggaatcactcgggtttggcaggtggaggctccaaatatccacggaacaagttctgttgcctggcccgaggggtgcacagagtcctcgcggctggagcctgggg

SEQ ID NO: 476606 - DNA, 122 bp, Homo sapiens
gcccgagccctcccattctccactccttcgacccaattccactaagtcaagaaccgtggtcggtctcagccactcactcagcgccactctatgctccgaagtccgtgtagcaccaccgctcc

SEQ ID NO: 476607 - DNA, 122 bp, Homo sapiens
atatctatttgttgaataagtgactgcttttcccgttgtgcatgggccagtgccaggggtcgagttgtagtgaactgagagtacatggacagtgctgaatggggaaatgaaagttatcaaaa

SEQ ID NO: 476608 - DNA, 122 bp, Homo sapiens
ggggagctcccggagctcgctgcttcagtggacctgccccgaggactcattgcccctagccgtgttttatgggccgctggacgcgaaaaacccgctcctggcctcttgtgagaaggagatcc

SEQ ID NO: 476609 - DNA, 122 bp, Homo sapiens
tcttacagttctgtgtccagaaaacacagggcacgttacccggtatcgtggtctacacctcgcccacaaatccatcccaggctgtatcctcatggaagctttttccagatgtgcttgagggt

SEQ ID NO: 476610 - DNA, 122 bp, Homo sapiens
gcagagccaatcaaattggctgatgtgggaaaccagctcacactctccatctcaatcaagcgctctaatccagagatgttccagctttaaagcacacacaaatcactgtgatcttgttaaaa

SEQ ID NO: 476611 - DNA, 122 bp, Homo sapiens
cagaaggtagtcgggagcgttgggggagccatctccaagaggccggtaaagctcagccctcgggtcctgccatccagctcctgactgctgccctcccaatcctacaaggctccaatggggac

SEQ ID NO: 476612 - DNA, 122 bp, Homo sapiens
tcgcgggtcttccgccccgcgctagaggacgcactccgtgacgggaattgcggtctcggccgcccccggcctcaggctttccgggctctgctgcctccagaaaactacaagtcccaggatgc

SEQ ID NO: 476613 - DNA, 122 bp, Homo sapiens
acaggcgggcagtaggacagcgcagtctgtccccttgcacgcgtcagggtccgagcctttcgccatggccttgcttcccccagcccgcagggtgagaagctcctggatcccaggctgcctcc

SEQ ID NO: 476614 - DNA, 122 bp, Homo sapiens
gtgacttcatctgtcttgttatcttctgcatctggagcttcaaaggcacagcctggcacacggtaggacctcaataaacagtggatgaatagattggggttctcaactcaccttagcaccta

SEQ ID NO: 476615 - DNA, 122 bp, Homo sapiens
gacctgccttacgacgactccttggctttgctagagggaggcacgagaaaccaccatgggcgtggttaggagagtggcaaagtaaagctctttagccgtgaaagctctgtggcataggagat

SEQ ID NO: 476616 - DNA, 122 bp, Homo sapiens
tcctgacttccggtgttttctgcctccacattttttttttgtctttttcatgtcctacagcgttttataatatttgtttacttattattgttggccattttcactagatcttttatttttat

SEQ ID NO: 476617 - DNA, 122 bp, Homo sapiens
actcctcacacaatgccctatgtgcctgccctcaagtgctggttcaattcttggtggtcacgtccttcagtcagaagaaaagatctagaaatctaaaaatgaaataatacattttagctact

SEQ ID NO: 476618 - DNA, 122 bp, Homo sapiens
gaggaggaaggggaggagacaggcgtccagggcgcctggggaaccggcacggcggagcagcggcggcggggctggggggaggccgccgagtcggccgcggccgaggaggggcaggcggaggt

SEQ ID NO: 476619 - DNA, 122 bp, Homo sapiens
tgccccctgcctggagtcatgcagaaactcacccgctcgttcttgtcagtgcagaagagccgggtgtggtgcctcttctgcaccacgatgaaggtgatcccgggctggtagtctttttctag

SEQ ID NO: 476620 - DNA, 122 bp, Homo sapiens
catctaaccaagtaccatttactgctcattctttgttatccctacagggtgcacaaagtgcgcaagggccactacccttacaaagggtgctatgcttcattcttcatttctaatactctgaa

SEQ ID NO: 476621 - DNA, 122 bp, Homo sapiens
ggaggccttggtgtcttgattctgattctggtcctgttgctgtgtggtctttgaggggagcgggagacgccatcttgccttctttgttatatctccatgaggggacattttgtgggtgtgag

SEQ ID NO: 476622 - DNA, 122 bp, Homo sapiens
ggaattcctgattccctggtggaccctggaagttgtccttaaataaatatatcgctggcccgcggttgagcagccacctcgtcagagcagcatgtggactggctcgccgggtcccctccgtg

SEQ ID NO: 476623 - DNA, 122 bp, Homo sapiens
tgaagaacttgttccgggcttggggtgtgggtgactgaagtgacatttttgcttagatatcgctatgcagctgcggatcatttgctgggtttcccctaacagggctgccaaaaaaaccaaag

SEQ ID NO: 476624 - DNA, 122 bp, Homo sapiens
ttgatgggattctggccaaggtccccgagtcctgtgatggcaaactgccggacagccagccgccggggccctccacgtcccagaccgaggcgtccctgtcgccgcccgctaagtccacccct

SEQ ID NO: 476625 - DNA, 122 bp, Homo sapiens
ccgggcccccagccgcctccagcctggagccgccatccctgcacccgcaggcgggggacgcggaccgaataaatacttttagtgtactgcgactgggcgcggtggctcactcctgtatccca

SEQ ID NO: 476626 - DNA, 122 bp, Homo sapiens
tgccgcggtgaaactttgctcaagttggtggtgctctgaggtctccagggctggaggccgcgcgacgcgaatcgccgacactggattctcgggcgttagtccgaagtttaagttcccttcgt

SEQ ID NO: 476627 - DNA, 122 bp, Homo sapiens
ccgcgcgcgccggtgattcacctgtcgaagggcggggcagccgcgggctcattcacctgtcggcagtattccaggcgcggagctccactgcgcaggcgcccggccccaccgctcgccctccc

SEQ ID NO: 476628 - DNA, 122 bp, Homo sapiens
ctgtcttctccctttctcagcgggcacttccaggccccataggtctgtagctctgtccagcgagttcaaggctggccctgctagcacctccccccttccaccaccaccaccaaaaagaaaaa

SEQ ID NO: 476629 - DNA, 122 bp, Homo sapiens
gtcctcatggacagaaagcgcggtcgtcagcctcgagtcctcatggacagaaagcatggtcgtcagcctcgagtcctcacggacagaaagcatggtcgtcagcctcgagtcctcacggacag

SEQ ID NO: 476630 - DNA, 122 bp, Homo sapiens
atgtctatagaaatgagcagtttctctacttctttcccagaaattaatctccaatgctgacgtgagcacaaagaccttatgtactgcgctgggaaatatgttgtgttttaagaataaaaatt

SEQ ID NO: 476631 - DNA, 122 bp, Homo sapiens
gacaagatatgtgagcagaaccctcataaacgtctgggtgttaggcaaaaatccatacatcgaggaagagggagcagtgttgaaggcactgaacaggtgaatacagagcagaccgtaaatgg

SEQ ID NO: 476632 - DNA, 122 bp, Homo sapiens
cccgcaccggcccatcctgcaggccgggctcccggccaacaccacagccgtggtgggcagcgacgtggagctgctgtgcaaggtgtacagcgatgcccagccccacatccagtggctgaagc

SEQ ID NO: 476633 - DNA, 122 bp, Homo sapiens
cttagagacataaaggagtgtttcttcttcctttctttctattattattaagatatttttcgcaaacttattttttgtatgctctaaagccatcagtcatgtgttccagttcaaaagaagct

SEQ ID NO: 476634 - DNA, 122 bp, Homo sapiens
cgtggctggatgtcctcaaaggcgtctcagctcgacttccagggttgctgccctccaccccgggaactgaggatctatagcgcagccacagcaatcttctggcagtgtccattggcgaatgc

SEQ ID NO: 476635 - DNA, 122 bp, Homo sapiens
aagcaggcccagttactccccgccgcccagacacttggctctgctggttcattttcacctcgggtttcctcaaagacaaaacctacaggtgccgcagaggcagcgaccgggagcaggagtgc

SEQ ID NO: 476636 - DNA, 122 bp, Homo sapiens
aacgagactgaagaagagagcaaggtgggaggggcgcgctggggagcttcggcgcatgcgcgctgaggcctgcctgaccgaccttcagcagggctgtggctaccatgttctctcgcgcgggt

SEQ ID NO: 476637 - DNA, 122 bp, Homo sapiens
cgctcctcccgctgcctcggccgcctctagcctgcaagccaggccgcgccgtcagagccccgccgagccccgcgccccctacccggccggccatcccgcctctggatcagggagggtggacg

SEQ ID NO: 476638 - DNA, 122 bp, Homo sapiens
cattcccaggagggtatgttcagcaagggcctggatgagaaactgatgacagaattgctccgagcaggatgagagggaggacagaagcgcagctcccttgggctagaaaaggaattgctcag

SEQ ID NO: 476639 - DNA, 122 bp, Homo sapiens
atcttagtcctgctagcgctgcgatgcccattgcccagtgtgtcagtcctcattctggggcgccaaatggggcagcatttttttttttttttgagactgagcctctctctgtagcccaggct

SEQ ID NO: 476640 - DNA, 122 bp, Homo sapiens
gagctcacttgcaaatacaggtagatttgccctacttctctggggttgctctcaaattcacgttccataaagagaggtgccccaaccaggacatcatccagtctgtaaggaacaaagaaagc

SEQ ID NO: 476641 - DNA, 122 bp, Homo sapiens
aatatcaatcacaatgaacgtccctgtcaggccaattccagcactacagtgcaccacgaccggccctgcatccgtgatgctcccctgcttatggtacacctcctccaggaagtccagcacga

SEQ ID NO: 476642 - DNA, 122 bp, Homo sapiens
gggtgggtctgggggagtcttgcgggagtgaggttgcggcagtgacgttgcggcagttagcgctcccagccgtggctgacagctgcgaggtccctgtaggagcctggacagcttcagcggga

SEQ ID NO: 476643 - DNA, 122 bp, Homo sapiens
ccatgctggcggctgctttctggatggcccccagccaacccatgaagtccagccgccgctcgccctgtatgtacagtgtcctgggccagggacagtcagtcactgaggggcctacacctatc

SEQ ID NO: 476644 - DNA, 122 bp, Homo sapiens
gttttttcatctgtgaaatgaaagctgtgtgtaagatacaatgactgatcttttcccaaccgaagaacttttctggaacttagagagccagggagagagctagtaccagtgtgaagattgtt

SEQ ID NO: 476645 - DNA, 122 bp, Homo sapiens
cgtggtttgaagccaggcccaggcccagggactcctgaggtctggtctcagtggtgctgtcgcggcctccagaccctcccaccctgagcccaccagtccccacccattgaagtggcggccag

SEQ ID NO: 476646 - DNA, 122 bp, Homo sapiens
tgctcccaaactccgggatcccaagcgggccccatactctgaggcggcctgcatcacgtgcgcgtacccagcccggagccaaagccctgtaccccaaggagcaccctgactcctctctcgca

SEQ ID NO: 476647 - DNA, 122 bp, Homo sapiens
ctaaaacaatgaaaatcattccattgggtcaattatctgggtcaagggtatataatcttacgtacaaaataccttcccaattctaggagaccacagagtttaatagcaggttatttattgaa

SEQ ID NO: 476648 - DNA, 122 bp, Homo sapiens
aaataagaaatggggaaatggatcagcaagaaagtgcccgccccaggcatgggtgccgtgcgggacggggacgcggcccagccgggaatcggggtgcccagggtgcgatgtgcgaggggctc

SEQ ID NO: 476649 - DNA, 122 bp, Homo sapiens
ccggcgcagacaagctccgtgcgtcaagacataacagcgtaagtgtacgacgttgcgcagcgacgcgggggccttcgggaaatgtagtctacaactggaaaccggccggatcgtgtctgcgc

SEQ ID NO: 476650 - DNA, 122 bp, Homo sapiens
cctggaaggctccagaagcctccgggtctgaggaggcttctaaaagggcctcacatgccccgggagccacgtggatacagaacgagggttcccgctctcggagagttggtccccagttccca

SEQ ID NO: 476651 - DNA, 122 bp, Homo sapiens
aactctatcatctaaagcgttccctcctcactgtggtcctagtcaatgcgtggtaggtagcgtttccagtgatcaacaaaagtaaatatttgaccagtaagtctccaatcgagaggcccctc

SEQ ID NO: 476652 - DNA, 122 bp, Homo sapiens
cgtggctaaacaggtactgctgggtaagtcgctgctcgtggcccctctgtcatgggcccccgctggaggtcagtgatgagcaacattcaccatctttcgtttgagtctcacggccatgagat

SEQ ID NO: 476653 - DNA, 122 bp, Homo sapiens
ggcttcgaagtgcttgagctcctcctggaacaaggtttccataggtgagtgttcccttcccgtgctcgccacgccatcttgtggtcccgggtgaactgcaaggacgccaaaggacggcgcca

SEQ ID NO: 476654 - DNA, 122 bp, Homo sapiens
aagggctgggatcttgccgctgaccttcatccccctggccgggggagccaggcgagggtgcgtggggcagcccagggcttcagctccagcctggagacctgcttcttgtcacatgcttctta

SEQ ID NO: 476655 - DNA, 122 bp, Homo sapiens
cacagacccagaggggacacagacttcctcgtggaatcgcaaagcctgtgtctgagaacacgcactttaaaaagagtccttacgaagcatggctatcgcacaagcaaacggattcattcaag

SEQ ID NO: 476656 - DNA, 122 bp, Homo sapiens
caagccgaaacccctcacgcgggtgggcacacaatgcccggcgtgtcgcctgggcctcctcggaggtgctttaacaggctcttgcgcttttgaacggccctcctggactctgatctgtttaa

SEQ ID NO: 476657 - DNA, 122 bp, Homo sapiens
cctgtctgggtctcggttttgccatgaatatgaaagctagtcgtgtcactctaggagaagcggtttgtgttggtggcaggtgcgccccctcccaataggtgacaagaacacgcactctcccg

SEQ ID NO: 476658 - DNA, 122 bp, Homo sapiens
ccccagcagcaggggcgggagttgcctgccctcttccagcctggaagagcatctgtcctacgctcctccttccgggagtgactcccgcccgcatctcggggtgggaagggttcaggaaacac

SEQ ID NO: 476659 - DNA, 122 bp, Homo sapiens
cttctgtttcgaatactctgaattaagtttttatgataatcacatatgtaaagatgcctgcgctcttatccagctcgatcttcaccttctgggatatgctcttctggatcctcttgctgaag

SEQ ID NO: 476660 - DNA, 122 bp, Homo sapiens
tattccaagcaaagcccctgaccttgaaaagatggcaaacatttcagtttgggttgggttcgtctaggagtaacaggggcagactagcccattattagttacacatattgagtgtttgaaga

SEQ ID NO: 476661 - DNA, 122 bp, Homo sapiens
tagtttcccttccaagcctttgaggtgtttgaagggctgtaattttgagtacgataagaacggttagtctatactattttacagtatagcctctgctgtcaaagccttggtctgtcttgaaa

SEQ ID NO: 476662 - DNA, 122 bp, Homo sapiens
gggagagagagacggcaggactgacagggaagggtcactctccttccactctccgggaagcgtgcaacacagccggggcaacccgactcccagcgctcacctgtctggggcccagaggcggg

SEQ ID NO: 476663 - DNA, 122 bp, Homo sapiens
cctgtaccgtatttcatggactcctaggcgccatcgattttaagacgcgctcgcattccacgcaccactgagcagaacgttcgaaccggacaaaagtgcgagtcaaggcgcccttccttgtc

SEQ ID NO: 476664 - DNA, 122 bp, Homo sapiens
acacatcacccgtgtcccctgcagtccagttctccttagtggtgactgagactcagggcccgtggtcgcctgccttacccttgacatagggggtgaccagcacagggtgtatatggtttagg

SEQ ID NO: 476665 - DNA, 122 bp, Homo sapiens
actccctctcctgggacctccttgcctcaggtgggtgttcaaaaactgtgccttcccactcgtctgtgcagaggctgggcctgaggtctcagtgtggagagcagcagaagacccaggaaagc

SEQ ID NO: 476666 - DNA, 122 bp, Homo sapiens
acgattgtccctgtgcagaaagaccaagctcaaagcccagagaccccttgagatcaccagcgacaaacattccacacagatcacaaatgagcattgttctgctcgcagagttcttgctcagt

SEQ ID NO: 476667 - DNA, 122 bp, Homo sapiens
cacaacccccggtgctcggggcggctctcaggtccctgaagtcctgtcctctcccggagccgacgtgttctcagctcctgggccgcagctcctggagtaggggccctcctttctcgggaccc

SEQ ID NO: 476668 - DNA, 122 bp, Homo sapiens
cggtcttgcccccacaggctaggctgcagcttggccctggtgcacccgagcccagagcagcggggacgggcgtccgggagctcgcccgggtgcggggtcgctcctgaggcctgggccggggc

SEQ ID NO: 476669 - DNA, 122 bp, Homo sapiens
atagacccattaattaagcaggaggctttgcttaacactcagttactaaaaacagagatccggtaactgataacagggagctcagcacccctcaagtgtggagtgggttttgcacaggcagt

SEQ ID NO: 476670 - DNA, 122 bp, Homo sapiens
gggtgacagacggcacctggaaaatcgggtcactcccacccgaatactgcgcttttccgacgggcttaaaaaacggtgcaccacgagattatatcccgcaccttgctcggagggtcctaccc

SEQ ID NO: 476671 - DNA, 122 bp, Homo sapiens
tccgcgctcgggctcggaattttggcagcctccgccccctggagacttgggaggagcgagcgtgggtgacagtcttttcgcgacgagtgccctccgccaccctcgccacgcccctgctcccc

SEQ ID NO: 476672 - DNA, 122 bp, Homo sapiens
cgactttgctccttagtaaagattaataaaactccatgagactgttgtccagaggtcctgcgtccggcccccacccccatcctcaccaacaataaacaccagcctctttctgaaaccacttt

SEQ ID NO: 476673 - DNA, 122 bp, Homo sapiens
ctaaccgagcataagctggctaatcagaacctatacagccccctatacatacagttaagacgctgtacttaggttaatgctctctgcgtgcccctataagcagctactagtaggcatgatct

SEQ ID NO: 476674 - DNA, 122 bp, Homo sapiens
gcggaagaagatggagaacgggggtgggacagagttgtggacaacctctcaggagagggtcgcaaggtgggaccctgaacagtggtagaaacaaaatgagattgtccctgaagtttgccctt

SEQ ID NO: 476675 - DNA, 122 bp, Homo sapiens
cagcaagcagaggctgcgccaccagcacgggggcgcaggagctaccgcagcctcggcagccgcaccacgagagagctttaacgcaggggccactgcagcagaatggagactcaggtggcgac

SEQ ID NO: 476676 - DNA, 122 bp, Homo sapiens
ggggtgagctggagacacgggccagttctctgcgtgatgtgttcaccaccccggggtgaccgcgtgaggacagcggccgcaccccgacactgctgtgggccctcggtgtggaggcctgtggg

SEQ ID NO: 476677 - DNA, 122 bp, Homo sapiens
aggtcaggctagggctgacgatgctggctaagcgggggcgcacgtctgggaagtcgtcgtcgtagtcaccgatgtccgtgaccttccagaggtactcttcgctgaacgtctcaggggcctcc

SEQ ID NO: 476678 - DNA, 122 bp, Homo sapiens
aagttaccagtttcaaacttcccgccacgccccctgccctgaccctattggctgagccgacgtagttcccataggccctccacgtaagacccgcctcgagccaaaggaagctgttggtctgg

SEQ ID NO: 476679 - DNA, 122 bp, Homo sapiens
actacagtgctatctcctttctcagactctgatttctcctcactctaggctagcatctatcgttctaaccatggtaccttcagtgttatctgatcatgcattctaaatactttgtccagatc

SEQ ID NO: 476680 - DNA, 122 bp, Homo sapiens
cctccagtactttgctgctcaagtttcaggagctgtttttcaagttttgaggtgtttactcgatgcatcatcagaaactggccattcaagtgaaagacaggaatatcaaatttatacctttc

SEQ ID NO: 476681 - DNA, 122 bp, Homo sapiens
gcacagatttcccatttcccagatttcaggcatgcattgaaattgcaagcagaatagtgtcgcaataaacatgttgtgcacatgtatcataaaacttcttaaagtataataataataataaa

SEQ ID NO: 476682 - DNA, 122 bp, Homo sapiens
aacggcccagttctgatctcgggaggtcccctgggtgctgctgtgggcagatgctagccccggcacgggggcaccagaagagggtgctgggctggggtccacgatggcttgtcctccgtttg

SEQ ID NO: 476683 - DNA, 122 bp, Homo sapiens
tccacaggggcgccccctaaggccacgccctcccgatgccggtccgcgcaccgctccgcacgcctcatatttagcattacctgtgctggggcaagcgattgacatactgtagcggacgcaag

SEQ ID NO: 476684 - DNA, 122 bp, Homo sapiens
gcgcccggccgcccgctccagacggtacggaattgaataataaagacagcgtttcagtggcgccgctcctccccgcaggctaattaggtcgtgtttgtaaagcacttggaagacaaaacgcg

SEQ ID NO: 476685 - DNA, 122 bp, Homo sapiens
gggctagaaatggtgatggtgattacacatccactagccaaggcctctgctagccccatccggatggggcctgggaagagcaagagccaggaaggcgagcagggcaggggctagcacaacat

SEQ ID NO: 476686 - DNA, 122 bp, Homo sapiens
ttcgccctctgttcatttcacgtcgtgagtgggttgtgttgcatcttttctgctgaactgcggttttccttggaggcagggccgtgcccgccatggtgtggaatcctcccctgcgtctcccc

SEQ ID NO: 476687 - DNA, 122 bp, Homo sapiens
gcgcccctaaagcggcggagaggagtgtcgggctgagtttccggctgagagtccttctagcggcgccggtgagtccgcgtgtggaagtctgtgaggcgcagaggtggggcaggccgtctgac

SEQ ID NO: 476688 - DNA, 122 bp, Homo sapiens
agacgcagaaggcggttccttgggggcaaagcaggagccagtctggggcctaccccttctcgccctgagggattctgtcctggagagaactgtaattgcccaggtctgtgtaagcaatctgg

SEQ ID NO: 476689 - DNA, 122 bp, Homo sapiens
aatcaagcgcatccaggattcatttataatctctctcgttgagtagaagtccgcatctctcgatattgtctggttacctgcatgaagtattctaaaggaggaaaatagctcaaagaggacat

SEQ ID NO: 476690 - DNA, 122 bp, Homo sapiens
aaagcgccccgccccgccctctgatctccccgtcccgcccccaatcaccccgccccgccccgattgctggccccgtggacgccctaccccgcctctgatcctgcaggcccgcccagtcctcg

SEQ ID NO: 476691 - DNA, 122 bp, Homo sapiens
tgacattttgctctgcttccctctgcccactccccagcgggattccctccctggcagacgcgcgcgccccagcccgccctcgcacaacctccaatagcaggtcaactggcttgtaacgctgg

SEQ ID NO: 476692 - DNA, 122 bp, Homo sapiens
gagaaatggcttatccaagtcctagggcagtggagggacttcgccctttcttaaatgggtcgtaatcagacagcatattagaggtgccatctgcaactgatcacccaagtgtttggggaata

SEQ ID NO: 476693 - DNA, 122 bp, Homo sapiens
ggggctcttgtttttgtatcttgcagtttggctcgcactccacagatgtctagggtcgcccgcctcttcccctgcccctcttcctctccgcatggccaagtccagccagggttagcgctgac

SEQ ID NO: 476694 - DNA, 122 bp, Homo sapiens
aatcaccgcgccgagaaggcggggcgggagctctcgcaggccaataacgacaggacgggccgcctggcccacccggctccacccccaagccaggcgaggcaggttccgaggttggaacacct

SEQ ID NO: 476695 - DNA, 122 bp, Homo sapiens
ccagcctgcgcaatctgcaggcgccatcaatttttcagcacttttctcatttctcattaccgtcaggcccatgcggctccccgctcaacaccctcctcggccggccggccgcactgccgggg

SEQ ID NO: 476696 - DNA, 122 bp, Homo sapiens
gcctgacagaaacgctgtgttttcatgttccctgtgtggacaaatcacaatcgacccgggcggccagcagtggagacaaggaggagagacctctccgcgggggttaggtcccctcagaaact

SEQ ID NO: 476697 - DNA, 122 bp, Homo sapiens
ggaggctgcacgggttgccagtataccttttaaatatatcttctttgtaacacagaagagcgctgttgtttctgaaatatgcacacatttgccaattcagtattgtatggcttgagtcccac

SEQ ID NO: 476698 - DNA, 122 bp, Homo sapiens
atggctgttccagcctcagcagccagtttgaaggattcccagggggtagccaccttgcttcggcctcttccaggctgggaagtgggagcctgtgcctttaaattctcagcaggttgaaatgg

SEQ ID NO: 476699 - DNA, 122 bp, Homo sapiens
atcccgtgccgacccaggcggagctggttctctaatctgattcagcctcagatcccgtgccgacccaggcggagctggttctctaatctgattcgacctcagatcccgtgccgacatggacc

SEQ ID NO: 476700 - DNA, 122 bp, Homo sapiens
cgtgatctgcccgcctgggcctcccaaagtgctaggattacaggcgtgagccaccgtgcccggccaatatgcatattaagaaaccaaaagataatacagaatttcagggcatctcaacaaag

SEQ ID NO: 476701 - DNA, 122 bp, Homo sapiens
gactcttcttcccttctctaacaaggacactcgtcattgggtttatggcccactctaatccgggatgatctcatatgcaagtccttaacttaattacatctgcaaagacccttttgccaaat

SEQ ID NO: 476702 - DNA, 122 bp, Homo sapiens
tctcaatacagcattctccctggaacagggagacagcgcaggctgtcagcccagcatctccgaaacactggtagccctgggagccatacagcagctcttggctgcattgacacttgagagcc

SEQ ID NO: 476703 - DNA, 122 bp, Homo sapiens
caaatgactgcaccggccctcatgggacttccatttcagtggattcaggggaaagcagcacgtgtttttgagagaccttggcaacgcaggcgaccttgacgtcgaccaaaagaagagagatt

SEQ ID NO: 476704 - DNA, 122 bp, Homo sapiens
gaagacacccgctttgttttcccagaactaaagtgctgattcaggcaaaggggcctttgccgcacctcccgcacaggtgggactcctccaagcctgcccggtggcccacggagggtgtgaat

SEQ ID NO: 476705 - DNA, 122 bp, Homo sapiens
acacacaatagtgagtgataaagacaaaagatcactgaaaatacctcacgtctgttcactcgtctccctctctacttccataccactgtcatcgctgatccggaacacttccattgtcatta

SEQ ID NO: 476706 - DNA, 122 bp, Homo sapiens
tccgtcttcagcaggacttgggctggagctgggctgattcattcggggctggaactcgaacgctgacgttggctcctgagccgggcgctgcctcgcgcctgattggcgggtcctcggggccg

SEQ ID NO: 476707 - DNA, 122 bp, Homo sapiens
gctggcttcacctagtgaatccaccatcagggccgtgggcggagctgccctccagtccggcggtgtgcgcccacactcctcagcccttgggcagttaatgagaccgggtgccggcggaggag

SEQ ID NO: 476708 - DNA, 122 bp, Homo sapiens
gccggttgccgctggtgacagtggctgcccggccaggcacctccgagcagcaggtctgagcgtttttggcgtcccaagcgttccgggccgcgtcttccagagcctctgctcccagcggggtc

SEQ ID NO: 476709 - DNA, 122 bp, Homo sapiens
gttgctagtagtgaaaggattgttgactacatttcagtttgctggtagaaaaaaatacttcgttgttggagcattactgattaatatgctgaatcaagttgttttaactttaagctcttttc

SEQ ID NO: 476710 - DNA, 122 bp, Homo sapiens
cacagaaaacaaggaatagccctgtcctttgagccttcagaacagacagggccaaggggccggctgcacctccaggaaggagaagctgccccacttcccccgtgaggcagtgagttccccag

SEQ ID NO: 476711 - DNA, 122 bp, Homo sapiens
agccggcgaaggcactgtcaggggcagcaggagatgggattacaggggcaacagggtcggcgccggtggtggctaaaggaagtggggccttcgccaacaaaccgcaacatggtttttttttt

SEQ ID NO: 476712 - DNA, 122 bp, Homo sapiens
gctctgggctcaggctggccaactgggtgctgaacggacagctcccaagccccgggccgccgcccaggaacgggcgcagcctcgctctctctgggacctttccagtcaggctttcctttccg

SEQ ID NO: 476713 - DNA, 122 bp, Homo sapiens
gggccacatctgagcctgggggcccaatgctcagagcgtgcctggctttctggggaaaagcgccaggaacatgaacgagctacgaagagctggagcgggcgctgcgggagcagcgtgtgggg

SEQ ID NO: 476714 - DNA, 122 bp, Homo sapiens
gcagttacggtttcgccgaatgtccggcagagggcgctgcgaacacgccgctccagccgccgggcaggggagagcggaatgatattcccaatgaccgcagtcagaaccatcagcgcattcct

SEQ ID NO: 476715 - DNA, 122 bp, Homo sapiens
ccttggcgtcagtgaagatggtggtcttgtggcgccggatcacgaggaacacgtccatagcggttgctgcctctcccctcgctgcgccggcgcggccgcgctccgccccgttccctgcagcc

SEQ ID NO: 476716 - DNA, 122 bp, Homo sapiens
tccagagttttttcctccagatgttcaaatgtgcctggagtttcttccttctggtgggttcgtggtctcgctgacttcaggagtaaagctgcagaccttcgccgtgagtgttacagctcata

SEQ ID NO: 476717 - DNA, 122 bp, Homo sapiens
aaggtgtatggagggactgtgggaaaggtgacagaggcatgtgggaaggcattcaggatacgcttttggcagacatgactaagggaaaacagaaacttacagaagtgaggggaaagggggtg

SEQ ID NO: 476718 - DNA, 122 bp, Homo sapiens
cttgggtagtgctgctctaagtctgtgaccgcgactagaggcgcgatattgggcttcactcgtgattcatgccatagagccgtggcgtagtgttccgcgctaggagctaggaggtttcccca

SEQ ID NO: 476719 - DNA, 122 bp, Homo sapiens
tcccaatgggctgagattctgcttcaggcacagacgaagacagggaaatgatcctgatgccggtggcgtgaggactcaccaagttccccagctcgtcaatcttaatggctccggtggagagg

SEQ ID NO: 476720 - DNA, 122 bp, Homo sapiens
atacaaaaattaatttacaatgagctgatggacccacccggggtcaagacagtgaccaagcgaaatgggcgtgggcgtcacgaggtgtctgcggaaggaagttggaggagagtggtccgagc

SEQ ID NO: 476721 - DNA, 122 bp, Homo sapiens
tgtgcccaggacagtcaactcaggcgctggactctcattctggttggattttatgacagccgtattcgccataagaattctagagccagaccttgttacttcacaattgcctcacgttgcag

SEQ ID NO: 476722 - DNA, 122 bp, Homo sapiens
tagttcggagcccggcagaaagctgactgctcgcggttacgagagctccctcttataaggcggtgaggccgtcacgtgatgggagtggtaaggggcggggccagctggggcaggcctgactg

SEQ ID NO: 476723 - DNA, 122 bp, Homo sapiens
gagcctccggcttacttgctcagggctttcttcccgcgtgtgcttggcgctgctcacaaacgcgctctcctctagcaccgcctgctgggccgaccacgaggcgcctgggctccgtgtagcgg

SEQ ID NO: 476724 - DNA, 122 bp, Homo sapiens
cggcggccgggagcggacttaccttaccttctctgccttcggcgcgcttctcagccgggccgccgacccaaaggagccgtccgactatgtctaacatggagaaacacctgttcaacctgaag

SEQ ID NO: 476725 - DNA, 122 bp, Homo sapiens
gaattccagctcgctctgaaacactacgtggagagtgcttcctcccaaagtggatgcttgcggtaagtgctccgactcctgcaccttaggcctttggcagcctgggaatacagtgaaggcat

SEQ ID NO: 476726 - DNA, 122 bp, Homo sapiens
atcccaatgagaaaccactagacatcaaccagaatggctcaaactaaatacttggtaaggcgaatgtcagcaaggatgtggtcatgtcagcaactggaactcttatattttgctgatgggag

SEQ ID NO: 476727 - DNA, 122 bp, Homo sapiens
ggggtgcaccatggatgggtggcctctgagaacggggccgaggccctgatcactgcaccccggccgtccctgtgaagggcctggacctggcttccggcctttgggtcctagtggctcctgcc

SEQ ID NO: 476728 - DNA, 122 bp, Homo sapiens
tccccgcttctttctcccctcaaaatctcaccaatccgaacgaacgccttctcgaatttccgattttattcaattactttcaacaatgtgccaaggactaaggttgggggcggtgggagaga

SEQ ID NO: 476729 - DNA, 122 bp, Homo sapiens
gcacagttatcttataatattcctgtataatggttgccaaggggatgtttaatgttgttacgcaggaagctgtgctgaacaagagtcttttgctttcagatcagactctgggcaggaagtga

SEQ ID NO: 476730 - DNA, 122 bp, Homo sapiens
gtttcttcccgctgtggtgcaccttcttgggctgtttctggatctgtctgcatgcacccacggccacccccatgctcgcctccacctcagagtaagtgttgtgttttgccacgtttcagact

SEQ ID NO: 476731 - DNA, 122 bp, Homo sapiens
cacatagtatctgtggagacaccataggaattatctgaattacatgaacttcctccttagcgtttgctaaatagtgaacaactttcttcactggaagagactggttctaacaaaccagttgc

SEQ ID NO: 476732 - DNA, 122 bp, Homo sapiens
gtggccgctgcaggcacaacgcgcccaacaagcgccatggggatccgttgcttgagggtgcggctgcaagagccaggctgcgagagcttagactgccggcccagagcctctcgaaccgccgc

SEQ ID NO: 476733 - DNA, 122 bp, Homo sapiens
ctcactgcctctttgccccagttttccagggtcccgcagctgcaattcagcagccaccggcgcctcctgaccgtggtcccaccgtagcgccgcctgcggatacggttccagtgaaccgccga

SEQ ID NO: 476734 - DNA, 122 bp, Homo sapiens
ccgcgccgggggcgccggctccgggccccgggctccgccaccagcgcagcagagcccgcgcgggctccaggctcacggcgcagcgctgctgcttcacccacagcacggattgcagcggctcc

SEQ ID NO: 476735 - DNA, 122 bp, Homo sapiens
gagtggccggggggtgtggattcaggatcctgagctctgctctgcctccgttgttctggccgtgcctgagagttggtttgggttgatttcaagggcactttaatgagatttagcaataggag

SEQ ID NO: 476736 - DNA, 122 bp, Homo sapiens
aggctgaaaaaagctggcctccgagcaggaggaagctcagagcacaaacctaggcctgggcgtggccactgggagctgctgatagcgaaccccagctcacaccagtttcttttttggtcgtg

SEQ ID NO: 476737 - DNA, 122 bp, Homo sapiens
tcgagggaccggctataaaaggctggcgctgggttaggtttcgagcttcctggccgtaagcgataaggctttaactgagaaccaccttgtgctgtaggctttggcccttttcctcacatctg

SEQ ID NO: 476738 - DNA, 122 bp, Homo sapiens
ccagcacggacctgacccccaacacggacctgatacccaacacggacctgacccccaacacggacctgacccccagcacggacctgacccccaacacggacctgatccccaacacggacctg

SEQ ID NO: 476739 - DNA, 122 bp, Homo sapiens
gggaaaatggagaaaaaaatattcctgaaggcaattggagagatgagagacatacccattcgctcccttcgggggccctcgcacctacccacccgcaaaagattagcggtagtcgctaatta

SEQ ID NO: 476740 - DNA, 122 bp, Homo sapiens
gtggccctgaaaagggccgttggttttgcggtagtgtactgtagaggtaagctcagccgccgaagccataaagagtgcgtccctggcgcttgagcgcgtacaccacgtccatggctgtgact

SEQ ID NO: 476741 - DNA, 122 bp, Homo sapiens
ttaacaatttgatctgacgacctaaatgctgtatttggaatgagttttacatttgttattcggggagaactactaaaagttcaatagtaaagcacatttacttttaaagctacacaactata

SEQ ID NO: 476742 - DNA, 122 bp, Homo sapiens
ggagccaccgttgagaggctgcagctgcatgcgagggcgtgggctgccatcccaccaactcggtagggcgtggggcttctgctgggatcgtctgtttccggcccccacctgctctgcggagt

SEQ ID NO: 476743 - DNA, 122 bp, Homo sapiens
gtgcttcaggcatctctaccctgtgcttctccgccttctgcattcaactaccaatgcatacgtctgcatctccatccctagtgtgcacttcctgagatctgcgcccttgtcacctgcatctt

SEQ ID NO: 476744 - DNA, 122 bp, Homo sapiens
gcaccggcagctcttctttctcctcctcttccccctcctcctcctcttcctcctcttcctcgcccgctgatgacaaggagaagttatcctgactcacacaggccatgagctttttcatggag

SEQ ID NO: 476745 - DNA, 122 bp, Homo sapiens
aaacatactagtgatatatatatgatttatggatgttgacgccaatgttcagtttgggtacgttggtgtattgcaaggggagaggcttttataacaatagatttgaacatttttaaaaaatt

SEQ ID NO: 476746 - DNA, 122 bp, Homo sapiens
ggggtgggggccggcgctgagacgcggtgctagctggaggcggttcctgtccggggtgtgcgtccgcgtgcagggtgcgcgcgtgtcttggccgcgcgtggcggcgtgtgcggcaggggcgg

SEQ ID NO: 476747 - DNA, 122 bp, Homo sapiens
ctcaatcactcatcccaaagagctccatcaatgacctgagaaatccgtcacaatcaacaacggacgccacagaaccccatcaccgaagcctgaaaccgcaatcactaactccacaggcaacc

SEQ ID NO: 476748 - DNA, 122 bp, Homo sapiens
ccggcaaccactcatctgctttctgtttgagaccttagctcttgaacctacaggttgcaccggaaccagcccagcctcgacctctaggggagtaaagggagagcaggtttgtcagggaatct

SEQ ID NO: 476749 - DNA, 122 bp, Homo sapiens
ttctgaagtcgcaaggtgctgcccagggcctcggggctccgagggactgggtttctgctccgtccctgcgctgtggcttcctgcgctcggtcagtctcctgggtgccccggcactcccctgg

SEQ ID NO: 476750 - DNA, 122 bp, Homo sapiens
gaggcagggcctgggtcatacccggacgtccggctccagacttcatggtgttgcccagtgcggcctctgggttgctctagttccaaatttcagcgtgaatgtgaacgtgcctcccaagagcc

SEQ ID NO: 476751 - DNA, 122 bp, Homo sapiens
agaatgaataaccttgtatagctaacaagtagaaggtttggaatttaatcccagatcttccgaatttcaaagcttgggcttttaacctcaagccactggaaagatacagcggtaactcttat

SEQ ID NO: 476752 - DNA, 122 bp, Homo sapiens
aggaattgaggtttagagatgttaaatggcaacacttagtgttacacaggtgataaattacgatgtttggagttgaaaacaggtctgtctgaaacagattttactcttaatgcttttaacca

SEQ ID NO: 476753 - DNA, 122 bp, Homo sapiens
tgaaacatcagtttatgtggatgctgtttctgcaataagacaccttccctctttgggtatcgctggtcattccccccaagtgggctgaggccttgccaagtcctgccctgctgagccagttc

SEQ ID NO: 476754 - DNA, 122 bp, Homo sapiens
gccagatcctgcaccctgtgacgagcacggccagtgggacagacagatggatgtgctgcccgtgaccttcgccacagcgagttcagaggccggaggcatccagtgtccacagagtgaccggt

SEQ ID NO: 476755 - DNA, 122 bp, Homo sapiens
gacacgtgggcgcggtagtgagcagggccggctctactgaggaggtcggtgagcagagtccgcagcggaaaaggcgaaggcgacgtgacgtccagcaagctcgccatgttgagaaggtaaca

SEQ ID NO: 476756 - DNA, 122 bp, Homo sapiens
ttacaggcgtgagccaccgcgcctggcccaatcctatgctgtttcttaaatcgcctactgcgttccacatatatggtcatttgtaaattgacagagtataccaggtgccaggatcataatat

SEQ ID NO: 476757 - DNA, 122 bp, Homo sapiens
ccacagaagccaatcggctcctgctacatcacagaccccgccctcaaaccttgaggagcccgccccacgcactgctgacccggagccaaaagaactgcgtggcgtccgattctggcgtcact

SEQ ID NO: 476758 - DNA, 122 bp, Homo sapiens
caaacatggcaagaggctctccatggaatgtgtagctgaaagaggtagcattggcaccaccgccgctaccgccactggggccgctgccctttagggcttcctcccggtagtggtcgaagatc

SEQ ID NO: 476759 - DNA, 122 bp, Homo sapiens
agagggctgttgttggagcttgtgatggtgtactcctgagagatgccttcccagctggggcgggtgcctacctgtttcttattcctagctgtgttttggggctctggccccttcactagatg

SEQ ID NO: 476760 - DNA, 122 bp, Homo sapiens
gacttgtggtccctcattatctgcttttatacacacccttcggacaggcatattttttgtcgtcttctgtgtggcagctcatatggaaaagaaagagaatgatccccatccttccataccaa

SEQ ID NO: 476761 - DNA, 122 bp, Homo sapiens
tcaacgcagatgtacctcccaacaatactgtgagagaaaaaggcaagtcaccaaagaacacgtatgtatgaggccattcaaatagctcttctggatttcactcctggggatgtcaaggaccc

SEQ ID NO: 476762 - DNA, 122 bp, Homo sapiens
ctcccggctcctccacacgctacgcagctgcccgcctcaagagcgtctgcgtgcttccagcgttaagtggaattccaagcagcctccggggcacagttagtctggtcactgcggccagactg

SEQ ID NO: 476763 - DNA, 122 bp, Homo sapiens
cacgcacgtacgcacgcacttgccacaaggagacgctgttcagtttaccggatcctgtcccgcgccagccaaccaggacaaggccggggagctcgagacaggcagcctagaccaagaaccgg

SEQ ID NO: 476764 - DNA, 122 bp, Homo sapiens
tgccacctcctgttcatttagaactatgcaaagactccgcttccgttttcctgagctcctcgggccccagagtctctgtttgattatttatttatttatttatttatttgccaaaaattctc

SEQ ID NO: 476765 - DNA, 122 bp, Homo sapiens
gcggcggcggcgggagcgcgaacggctggagctgggtgaggggcagtgccggcgcgggggcgggagcgggggcggagaggggcgcttctggaggggcggggtctacgcgaggggcggccccc

SEQ ID NO: 476766 - DNA, 122 bp, Homo sapiens
gcgccacagccacttgggggaagagaggggagcccctgaaaggatccctccctctcacaacgggcctctttttggacaagtggccttcaaaagttcgaggccatttacctagataacgaggc

SEQ ID NO: 476767 - DNA, 122 bp, Homo sapiens
aggcaccaagagcacccagcccagtacgtggcacctaacagaacagtcagaaatagtggccgccctcacccctcaggcccgtggccccgccccctggccctgaactccacccttgagctgcc

SEQ ID NO: 476768 - DNA, 122 bp, Homo sapiens
ttcactcttgttttaagcctttttcttatctacagactactttaatatgtcctcagataccgtggatatactaatgattcccatatttttgcctttagcttattctatcccctaaactgccc

SEQ ID NO: 476769 - DNA, 122 bp, Homo sapiens
taaagcgggtttggcagcaagaaaatcaaagtgaaactggcgaagaaagggccggcctcacgagaccccggggactcagacccagtgagcgcacctcttgctgcctcctgctgtgtctgggg

SEQ ID NO: 476770 - DNA, 122 bp, Homo sapiens
cggtgctgcagtaaggccttgaggactgcccaggctacatgaggggggccagaggggctacggggcaccacagggttaatggtgacctcttggtccccagagtgtggtgcgtgaatggaccc

SEQ ID NO: 476771 - DNA, 122 bp, Homo sapiens
ctctttgatgacaacaggatcctcctgtgctctgtttacttagcaaatactgattaaagtcggtgaggcagaggacctgtcctatctaaggaggcttgacggggaaagaagtcggaaacggc

SEQ ID NO: 476772 - DNA, 122 bp, Homo sapiens
ccgccgcccccgcctccctttctgtgagcatctgccggggagaacagatgtgggcacctgcggtgaccggctgcgtgcgttccatcccattcacaggcattcagacgtggccacaatgagcg

SEQ ID NO: 476773 - DNA, 122 bp, Homo sapiens
ggtttgttcgcggcagaggccggcggcgcggtcctgggtggcgggcggcgtgggggcaggcgagcggagcccccggagccaagttactcacaggagcgtagaggacattatttttatttaat

SEQ ID NO: 476774 - DNA, 122 bp, Homo sapiens
ggtgcgggacttcagcctgagcagcagctacaaggaaggcgagctcatcaccatcggagtcgccacctggggcactgtccaccgccgcgagggcctgatccatcccacggtgagtgcggccc

SEQ ID NO: 476775 - DNA, 122 bp, Homo sapiens
ttgtacttgtcaaagcacatatccatatttttggtctagaaaatatggtcattgtacttacggaagatatctgagaaaacttttatgaaatgtccatcagcttcttttgaagggggcatttt

SEQ ID NO: 476776 - DNA, 122 bp, Homo sapiens
actcgcacccgaggggatggcaggaaatacccagagctggtgctggacacagaactggatcgcgaggagcaggccgagctcagattaaccttgacagcggtggacggtggctctccaccccg

SEQ ID NO: 476777 - DNA, 122 bp, Homo sapiens
ggcaggcagctatggggggcggggcctcaggagggaggacaggctggtggacggggcctacggacacctcgccccgcccccagtggtgctccgcactccccacaccccgcggcccccctagg

SEQ ID NO: 476778 - DNA, 122 bp, Homo sapiens
catcaagttgacattcaaattctatgtgtagaaagggaatgactttctactcttagacagcgtgggtgctccacatggctcctggcagccagctccacaccaccagtacctgatgggcaacc

SEQ ID NO: 476779 - DNA, 122 bp, Homo sapiens
tgggggcgaggcggagatgcgcgcctggcctcgccaccccagcgaaggggcccctgcctgcgccagttctgtgggaaagcacgcaaacttggaggactggggcagaggaagcgggatctgca

SEQ ID NO: 476780 - DNA, 122 bp, Homo sapiens
tcagatacttgttcctgggtgagcttcttgtcgctctccagcaggatggacacgtagtggcggatcatgtctacgaagagtgataacgatgggtaggaccacccagaggcagatgttggagt

SEQ ID NO: 476781 - DNA, 122 bp, Homo sapiens
ggttcgtttccggtggtctcgcgtttgctgagctgtcgcctggctttctaaatctggtcccgggtgtgtggcgagggtgacgggtgggatgtgtgcctgagtgttttgtaatcctttgtcta

SEQ ID NO: 476782 - DNA, 122 bp, Homo sapiens
cattccccttaccttccgtggcgccccagcgagccacccctaagccagcgaagccgcacacgcacacacagaggggtcccgagaacacccaggactcagtagtagccagacctgggagaacg

SEQ ID NO: 476783 - DNA, 122 bp, Homo sapiens
ggctcgggacctgcagccctccatgcctgaccctccccccaccccccgtgggctcctgtgcggccggagcctccccaaggagcgccgccccctgctccacagcgcccagtcccatcgaccac

SEQ ID NO: 476784 - DNA, 122 bp, Homo sapiens
gggaggggagagcaaggaagggcggtgtgagcatgcgcaatagccacgtttttaccttctcgattccagttcctggataggatggagtgggtgtacacactggctgttcttggtaaaccaga

SEQ ID NO: 476785 - DNA, 122 bp, Homo sapiens
gcgtgggggctgctgattgattcagcctggcatggagctcttccagctttccagacttgccgctgccagatgcggttctctgagttctctggttacataagatcggcagggctcagccacga

SEQ ID NO: 476786 - DNA, 122 bp, Homo sapiens
tttgtaataagaatataacatctgacattaatgtaatgcttaaggtttttccgcccctctcgtgtgtgttatgagatcaaggaggctggtgatactagcaccactactcccattttacagat

SEQ ID NO: 476787 - DNA, 122 bp, Homo sapiens
cggcggaggacgaggaagagttgtggcgaggcagatcctgccccgtggccgcggccgtctcgtaggtgcgggcggcggggcccacgggaccgcggcggggtcggccgggcgcagagctctcg

SEQ ID NO: 476788 - DNA, 122 bp, Homo sapiens
aggcggggaccgtccagcgtcagcgcggggcctgggggcggtggcttgagggctcgaagccgggcggctgggcgcccagagccccgtctgggcccttcgctctttctcctcccccctccccc

SEQ ID NO: 476789 - DNA, 122 bp, Homo sapiens
aatttcacaacttcacacattctgtaggagccaaaagtactctttagatttttacaaacacgtgtgactggtagtatataaggttatcacgaagaaatatactatacaaaacattatagcat

SEQ ID NO: 476790 - DNA, 122 bp, Homo sapiens
tcttctagccagttaatagcagagaaagaatttagttttggtagctcataagtcagtaaccgtatgccatgtctccagaagtaaaatccgtctgttttccagaaaaatgtgatgtgtgaatt

SEQ ID NO: 476791 - DNA, 122 bp, Homo sapiens
tatgcaccgcgagttcgcggactaaacaggcataaactacaagccccagaatgccttgggcgagacgcgagagcacggaggagcggaggggcgtggccacgtcgaccgcgcgggaccgttaa

SEQ ID NO: 476792 - DNA, 122 bp, Homo sapiens
gaaccagaatcttcacagccgctctccggatggggtggaagggactgaggacatacaaggcgttggtggcactgaaccggaagatggtcttgcctttattcagtacgatgaaagtctgggga

SEQ ID NO: 476793 - DNA, 122 bp, Homo sapiens
aacagcatattcaatatcggagtgaacagggcgcttcacgctttccaccccgccccgccccgccccttttgttggtcctgcgaggcctccgtctggggtaactggatgtgacgccccggatt

SEQ ID NO: 476794 - DNA, 122 bp, Homo sapiens
gattttagccacttgcccccagagcagcagcgaaaacggcttcaacagcagttggaagaacgcagtcgtgaacttcagaaggaggttgaccagaggtaaggtggtggggtagggaaggacag

SEQ ID NO: 476795 - DNA, 122 bp, Homo sapiens
aagggcattaaaaacaacagaatcaaactctgtaattaagactgccatttaatgtttgttcgcacacggtattcatttctgtgtatccctgccaaagatccattgtgtaatgttgtcctcac

SEQ ID NO: 476796 - DNA, 122 bp, Homo sapiens
aggactcccagtgcagcccttcacttgataatggagcaaaaagggaggcatgtttccccacgggttcgcaccccagccactgtccaggggttcatacatcagcccttctaccccagaggtga

SEQ ID NO: 476797 - DNA, 122 bp, Homo sapiens
ctgcaaggctgggcgcccgctcccagtcttgggaggggtgtagcgggtcgcaagccttctcgtgacctggacagcggccctcctgggcgagcgctgctcaattctccgcttatgcgcggctc

SEQ ID NO: 476798 - DNA, 122 bp, Homo sapiens
agttgctggagtacaccaaccccttgatagagccctggcggctctccacgccggccaacacgcctgcagctgcagcatacagccccatgttcccgcgcgcctttacggctctgtggcaaaac

SEQ ID NO: 476799 - DNA, 122 bp, Homo sapiens
cgctgcgcccagcgtctcgcgaggaccctccccccgggtcccccagctctgccgcggccgcgcccagatggccgtcggatcccccctcaaggtccccctgtcggctccgccctcggtcgccc

SEQ ID NO: 476800 - DNA, 122 bp, Homo sapiens
ctgacgtcactttggcgggagaaacaagcgtgtgtgagcgagtaggcgggggcgttttcccgatggaaacacttcatcagactcccgggctccttgtatagaagctgatctgtgtcatcata

SEQ ID NO: 476801 - DNA, 122 bp, Homo sapiens
tccccggcagttccgacagtctcaggttctttcagcttcatcttcttgcaattcctgccccgccccttttatccgggtaaattgccccccgacggggggccgggcgcgctctcggccggcgg

SEQ ID NO: 476802 - DNA, 122 bp, Homo sapiens
ggaaacaatgcacctccctccacttcaggtcccccttgcctgtaaacctcgagagctggacgtcccttagcctgggagttcctggacactgtgcacaatcactcgtcaaccgctacctacta

SEQ ID NO: 476803 - DNA, 122 bp, Homo sapiens
cgtgattcgctcgcctcagcctcccaaagtgctgggattacaggcatgagtcactgcacccggccgaagagatgtctttctaattcactcacagatgctatataggctagctggggctctgc

SEQ ID NO: 476804 - DNA, 122 bp, Homo sapiens
ctcctgattgtccaaacgcaattctcgagtctatggctccggccgagagttgagtctggacgtcccgagccgccgcccccaaacctcgagcgggagagcgggtcggagggtctagggagagc

SEQ ID NO: 476805 - DNA, 122 bp, Homo sapiens
cgcagccgcggcggcaataaaacatcctggcacgtgctccggctccaggcgcgcccacgccggccggctgatgtcaaactgcagctcggctggtgtagctcttaaagggcccgcgggcgccg

SEQ ID NO: 476806 - DNA, 122 bp, Homo sapiens
atggcggacgaggagaaactgccgcctggctgggaaaagcgcatgagccgcccctcaggccgagggtactacttcaaccacatcactaaccccagccagtgggagcggcccagcgggaacag

SEQ ID NO: 476807 - DNA, 122 bp, Homo sapiens
accgcaccgcggggcgcaggaccccagccccccgccacgccgcccccggagtgcccagaccgccgggaaggcgcccacccagagaccccgcgccccccgccccaaacccggcctcagcgccg

SEQ ID NO: 476808 - DNA, 122 bp, Homo sapiens
acaaaagggcttctttaagtgcaatttctcaatttaataaaggaagggaaaaactatatgcggagactaagatctatggtaagaatgagtcttctatctaaaattttgaaggaaaagaaatt

SEQ ID NO: 476809 - DNA, 122 bp, Homo sapiens
gacagggtcttaaccccttcccgccagcccgagcccagcatcccctccagctcccctcggcgtcccaaccccaagcaaagccatccccaaaggatgctccgcagagaggcggggtccgggtc

SEQ ID NO: 476810 - DNA, 122 bp, Homo sapiens
tagaaactaagagggggcaagatcacatcataatcgctaacccttatgtgcaaaacagcacgattgacactttacaaggaccatttcagtcattagtcgcaacagccagccccataatgtag

SEQ ID NO: 476811 - DNA, 122 bp, Homo sapiens
gccaaggctgcagtccactccttcatccacagcccgttctccccaagggtctcacttcatcgaaggcgcagataacacagtagggtggcctccactggtctgcccatgctcagcaaccatgg

SEQ ID NO: 476812 - DNA, 122 bp, Homo sapiens
gagaactggtacggagggagtcgagccgggctcacttaagggctacgacttaacgggccgcgtcactcaatggcgcggacacgcctctttgcccgggcagaggcatgtacagcgcatgccca

SEQ ID NO: 476813 - DNA, 122 bp, Homo sapiens
caaagctaaggccaccaatgcttttatttatcgctttgcgtggagacaaagcacaagctccgagtgtgctgggagctctccattaactagagctcctggttggggtggagctctgggaaaag

SEQ ID NO: 476814 - DNA, 122 bp, Homo sapiens
gcattttccgccttgggatggcagtttaagaatttgcaggatttccacgcgtgcatgcatcgcaggtgcggcagctgatgcacttattatttaaaggccaacaaaggagaggttatatccac

SEQ ID NO: 476815 - DNA, 122 bp, Homo sapiens
cgtcacggccgccggcgcctcgccgcgcccccgccccccgctcgcgtctgcgacgagtggcgagactcgctgataaagtttcaaacgatgggcccagcgagcgataaaggccagcccggacc

SEQ ID NO: 476816 - DNA, 122 bp, Homo sapiens
atttggggagttagtcaccctcattttacacagctgagcaaacagagtctcagcaagacccgatgctgaagttgagaacgggcagcccgcaggctgtgttttgtttaggcagcatagtacat

SEQ ID NO: 476817 - DNA, 122 bp, Homo sapiens
acgatgacgtagcgaggagcggaaaacgcggtaaccaaggcggccccaggcgcgcacttccgcccggccttccaccggtccaggtctgcccctccgcagcgatagttcacgctctcggcggg

SEQ ID NO: 476818 - DNA, 122 bp, Homo sapiens
tgcctcccagagggcggagactgagaggcgaagggaccggccgactctgggtgcggcgggcgtccctccccaccgggagggtgtgtgctgcgggcatccctttgcaaccgctggaggggcct

SEQ ID NO: 476819 - DNA, 122 bp, Homo sapiens
ctatgggatgagattcagaccaagaactgcagcagccccttatggggatgaagaggaaggcggctgggaggagtggaggcttccacctccagtctggatgtgacctggctccgagtccccat

SEQ ID NO: 476820 - DNA, 122 bp, Homo sapiens
gggccctgcgggtggcctcggcctccacctgctccttgggccgggctgtgctgtggtggacgtggtggtggacgtgtcggtggtggtgcaggccggccgcgtccagcttcgcccctgacttg

SEQ ID NO: 476821 - DNA, 122 bp, Homo sapiens
aaaccatttgcagatggcaaagctaaaggagcacactgtaacatacgcccacttgggcttcggaaatcgcagacacccacccctagatgctgctgtgaggccagagcccgaaagcgctcact

SEQ ID NO: 476822 - DNA, 122 bp, Homo sapiens
ggagaacaatgacacaccaactcctgcactggctgtttccagaaatacgagttggacagccgccctgagccacccactgtgccctgccccacccccgcaccttagctgcttcccgcgtccca

SEQ ID NO: 476823 - DNA, 122 bp, Homo sapiens
cctatccagcattctttcactcacaaagaagtaccaaagatatgtttatgttccattaaccgagtatgcagcaaattcattaaaatattacaactgctaaacacagaagaccagaaatcaaa

SEQ ID NO: 476824 - DNA, 122 bp, Homo sapiens
caggaagaggcaaagacgtgtactttccagagagccaccagtccccccctccaacacccacgcaccccaaccaccttcagtgtgattagttttactagcctgtgttgggatttaattgtccc

SEQ ID NO: 476825 - DNA, 122 bp, Homo sapiens
taactggaaaattgttcaaagtgaaagggctcaaggtgcaatcaaaattagaataccggccgggcgcggtggctcacgcctgtaatcccaacactttgggaggccgaggcgggcggatcacg

SEQ ID NO: 476826 - DNA, 122 bp, Homo sapiens
tagtagttccgctccgagggcggaagtgcgcgtctcttgtttgtgcggctgaccagttggcgacatggtggcacccgtgctggagacttctcacgtgttttgctgcccaaaccgggtgcggg

SEQ ID NO: 476827 - DNA, 122 bp, Homo sapiens
gagaggtgtgtgctgcgttcctggtggcaggtaccgaaggcggcgccggggcacgagtatcggttgcttaaccccacagtaccccaggacccatgtgcatgtaggctcaggcttccagtgcc

SEQ ID NO: 476828 - DNA, 122 bp, Homo sapiens
ccttctggcatgatgagacctgcctgatggtagccccaggacccaggatggctaacatttcgcaggcgccatgtgccaggcggtgttctaagtgctttgtgcattcctcacccctgaggtat

SEQ ID NO: 476829 - DNA, 122 bp, Homo sapiens
acgttactgtcttgtccccacagaagccgatcctactgcagggccatgagcggtccattacgcagattaagtataaccgcgaaggagacctcctctttactgtggccaaggaccctgtgagt

SEQ ID NO: 476830 - DNA, 122 bp, Homo sapiens
tcaatgtcccagaatctccagccacctgccaatttcttttccaagtagaaactcagctttcgaagaagtacactgaggtgtccagggtcaaattggatttctaacatacagagtcaagtttg

SEQ ID NO: 476831 - DNA, 122 bp, Homo sapiens
caacgtgccctccctctccgtgattggacgagcagggcgggccttccggaggcacacagccgaccaaccagagatctgcgcgtgctcgatctggtcatctgttttctgacatctggagccac

SEQ ID NO: 476832 - DNA, 122 bp, Homo sapiens
cctctaggagcgtgtgaggccaggctcagcttcactcctcgctggctcaatagcttcgctcgcctcctcctgccactgttacattgtaagccaagcccacttattagcagctggtctcattg

SEQ ID NO: 476833 - DNA, 122 bp, Homo sapiens
aggtcaagggacgggggcagggcagaggagttcaggtttcagcagctgccactccaccctcgtcctgtcagggacacctcgggccaaggcgctgtctggattttagccagcaatggggagtc

SEQ ID NO: 476834 - DNA, 122 bp, Homo sapiens
ttggttctttctgttgccctcatagaccgtatgtagcagttcgcgtgggcacagaacccacggtttcccgctagttcttcaaaggtgagggcaggtgccccgagttattttcctggggactg

SEQ ID NO: 476835 - DNA, 122 bp, Homo sapiens
gcctgatggacgaacaacgccctcggtgtcagacaccatgaaaagaacaacttcagaacacggaagctaatccatgctgtcgggaacagaccttacactgaaatgttctctttctagtttcc

SEQ ID NO: 476836 - DNA, 122 bp, Homo sapiens
gaggccagaaagcggccagtgatgtcaaaggacaagttggcgatacactcgccatggacccgctcaaagcactcctccttctcgccccgccgggtattgtagagatgaatactactgccact

SEQ ID NO: 476837 - DNA, 122 bp, Homo sapiens
aggggcagaggccaggggtgctgctgaacatcctgcagtacacagaacagcccctgcaaccgagagttatctggccaaaatgtcagtggtgccacagttgagaaacctgttcaaggtgaccc

SEQ ID NO: 476838 - DNA, 122 bp, Homo sapiens
ggaggaacggagactcccctgtactctgtatagggctcatgtgctgtttgggcaaagaaacggactcaaagagccaaatggccacaaagggtatgatccaactgaagggcaaagtgaaagga

SEQ ID NO: 476839 - DNA, 122 bp, Homo sapiens
ctctagccctctacctccctggaccatgaggtcccgactgctcaagagcctggcttgctccggtgctctgtggtcctgactgcagcctgggctgcacccctgtgttgcagacgtctatgcct

SEQ ID NO: 476840 - DNA, 122 bp, Homo sapiens
tctcttaacagctctttctgttgggaagatcatccaaaaactgaaaataaaaatgctgaccgaattccctgaactaattaagcatctaggtgacgcagaacagcaaaagtgcaaagcaagag

SEQ ID NO: 476841 - DNA, 122 bp, Homo sapiens
gccggagcctgggacaggcgggacctgaggtggtggggcggggccggaacgtggagtgggcggggcctgaggctgtggggcgggaccggagcgcgggatgactggggccacgggtgtgggcg

SEQ ID NO: 476842 - DNA, 122 bp, Homo sapiens
ttcagaggcgaggaaagagaaaaatcctgatgcaaagcaaaagtgttggcagaggaaagacgagccaacaagagtgtctctagggccggtagaaataaacaaatggtggagattggtgagtg

SEQ ID NO: 476843 - DNA, 122 bp, Homo sapiens
attccaaaaagtgagtccggggaaggggcagtcctcacgctgccgggacccagccccacccggcccacacctcacacagcggctcccgggcccccgacacagacgagcagggcacggccacc

SEQ ID NO: 476844 - DNA, 122 bp, Homo sapiens
ctcagatgatccacctgcctcggcctcccaaagtgctgggattacaggcatgagccaccgcgcccggcttgtattttttttatagagatgggctctccctatgttgcccaggctgatctcga

SEQ ID NO: 476845 - DNA, 122 bp, Homo sapiens
tgatggttatctgtggaaattttcattctgatctagttaagtggtgactttgtgagtttccgtgtgcttaaaaagactgcaaatctctcattgtggctgccctggaacttagtttatataat

SEQ ID NO: 476846 - DNA, 122 bp, Homo sapiens
aggctgcagtgtggttggaagtggcatgcagctgagggaacagtctggaagcttcatttgcgcagcaaactcacttttttttacataggctgtttctggtctagtttgatgagaggtactct

SEQ ID NO: 476847 - DNA, 122 bp, Homo sapiens
tttccccatttatctactttgttattttgaatgtactcatgctgtgttacactccatagtcggctcctggggaatttgcataaaaataaaactctattttaagggtctttattatttcgtta

SEQ ID NO: 476848 - DNA, 122 bp, Homo sapiens
gccggccgtgaggcggtggaaggggttgcggtggccatggtgacaggaggcggggcgccgcgcccctccggcagtcaccgaggcccggacctgcggcgtcggcggcgcgcgcagagggccag

SEQ ID NO: 476849 - DNA, 122 bp, Homo sapiens
accattttggttgctgtacactgaagcctcactggattgcatggtggcttccccaaattccgtatgccttaggatatgatgcttggcacacagttttcctttagtgctccttttaataattt

SEQ ID NO: 476850 - DNA, 122 bp, Homo sapiens
atctaatttcttaatgaggggaaaatgtctttgcagcttcttcatctgcacttacagcctcgtctgcacagacagtttaacactgtggaaagtacagtagttcttgaagatactaaaccagc

SEQ ID NO: 476851 - DNA, 122 bp, Homo sapiens
gtgaaacggtagcttagtttgctcccatctcctgttccgcgctgctggttttcgattgtgcgtcactgaattgccatcagaagtccagtcccgactgcgtgtgcgaggccagggagggaggt

SEQ ID NO: 476852 - DNA, 122 bp, Homo sapiens
actgcaccttgcacagggtctgttcccagcggcccctagaggatgtgccccatttccctgcggggctggtatttgtgaatgtttcccttcggtgtggattttaagggatgggtcttccccgc

SEQ ID NO: 476853 - DNA, 122 bp, Homo sapiens
gccgtcttggtccgctcccaaacccacgatgcctcccttttctatacctgccccagttaccgatacttgtccctaatgggtgtattttgaatggacccgcctcagtttaggaggttcagaaa

SEQ ID NO: 476854 - DNA, 122 bp, Homo sapiens
ccactcgttgaaggtctcagctcggggcagagccagtacctcgggctgctgtggccctagcgtccacgaaaacaaagcgcagggctgctgtgctctgtggatggcccagcgggcccaggcca

SEQ ID NO: 476855 - DNA, 122 bp, Homo sapiens
acagctcgtttaaactttcctggctgagccaacagctccgatcatgtttcctgatcctatcgaagtggattaaaactgcaggagtttctcgctgtcagatcagcaggaggctatttcagacc

SEQ ID NO: 476856 - DNA, 122 bp, Homo sapiens
ctctgggatgacaaagacctcacttcccttttctggtgttcacacaacaatgagaaagtacgggtagcctgcagaaagacctctccattcatggtcccccaggggtgtgggttctgagaggt

SEQ ID NO: 476857 - DNA, 122 bp, Homo sapiens
agccgctacgggtcagagcttttattggaagaccaggtttgccttgatgcagccaaagtgcgttccagttcaccccactcttgcttgtgtttcttctttatgtaaattgtgtgatgtttcaa

SEQ ID NO: 476858 - DNA, 122 bp, Homo sapiens
ggaagcacttgatctgggggattccgctgccagcagccaccggctgaaagaggggaagcacggctgagtgggtcacggccaggctgagacagatgcagcccctcagccccaggagccccagg

SEQ ID NO: 476859 - DNA, 122 bp, Homo sapiens
gtgtctggtggttcactgaaggtaccttctccctgtgtcctcacatggctaggctctctgcggtctcttataggtgcactaatcccaatcatgagggctccactttcatgaactaatcacct

SEQ ID NO: 476860 - DNA, 122 bp, Homo sapiens
gagaaggttcctttgtggaagggataaaggcagctcagccggttgtgggggggatgctgacgtttagggtgcaccagctgttcaaaagtcgaccccatttccggaaacaccccatttccgga

SEQ ID NO: 476861 - DNA, 122 bp, Homo sapiens
gcgcagaccgaccctattcccccaaacacactctttgtttctccccagctgaaacagaaccgcatgagggaaagaggaaagtggaatctctgtggcccatcttcaggatccaccaccagaaa

SEQ ID NO: 476862 - DNA, 122 bp, Homo sapiens
tatgcaactcagctcgctctgcgtatgcaactcagctcgctctgcgtatgcaactcagctcgcactgcgtatgcaactcgcactgcgtatgcaactcaactcgcactgcgtatgcaactcaa

SEQ ID NO: 476863 - DNA, 122 bp, Homo sapiens
cagatgcggaagcagacagcttgaggacaggcaagggcacctggagatctggagggtccccgtcaaagctgcgcaccttgatagggtagaagctattcagctacagattgaggagagaaggt

SEQ ID NO: 476864 - DNA, 122 bp, Homo sapiens
gtgcaattgtacccaggagcctctggacaagggagccccggaacgtccagaatgtggcttcgtgctctgcttccaggctgcgcggcatccccagcaaggctgttcacaccaagcatggggga

SEQ ID NO: 476865 - DNA, 122 bp, Homo sapiens
ggcaggaatggagtgcaatctccgggaaattcgggagggccgggattatagcagggacgccgcgtaccgccaggagcacagcccctccaaagcgagcgtgagccaaagggccgcccccaggg

SEQ ID NO: 476866 - DNA, 122 bp, Homo sapiens
tatctagggcatccagtggacaattaggcttcgtgagccccaattccaaatgcttggatacgctaacattttaagcatttctgtctgtaagttaaaacgaagagccccaaagagggtgttaa

SEQ ID NO: 476867 - DNA, 122 bp, Homo sapiens
ctgatgcagccggctcaggggctttgcacgggccacggaggggccaccgtgacgcccaggcggagctctcagagggctacagtttgcctggcccagagccccccaggtatcaccagcagatc

SEQ ID NO: 476868 - DNA, 122 bp, Homo sapiens
caggatgaagggaggacacgagggtcggtgtagttctagaagcccgcactcacactagcgcgtcctccgtcccgagccgccacccgatatcccgacgctctgaggggatggcggcccctaac

SEQ ID NO: 476869 - DNA, 122 bp, Homo sapiens
ccagcgggccccctcggaggaggaggtattcagctgttcctagaggatgcagggactccccggaatgatcactgggggcattgtttttgcataggcccagggggccactgtctcaagcccac

SEQ ID NO: 476870 - DNA, 122 bp, Homo sapiens
catcccccgtcacctgtaggtcttctcgtggccgggttggggtattcctggtcagtctcgcggccgggttggggtattcctggtcagtctcgtggttgggttggggtattcctggtcagtct

SEQ ID NO: 476871 - DNA, 122 bp, Homo sapiens
ggcatggggggagcgccgagcggccccggcggccgggccggcatcaccgcggcgtctctccgctagaggaggggacaagccagttctcctttgcagcaaaaaattacatgtatatattatta

SEQ ID NO: 476872 - DNA, 122 bp, Homo sapiens
cgcgcagtgcattcctgagtattgactaagggatttgtgcatgggagaccggtttccccacggcagcgcctctccgcaagcctgggcctggggcctgtccggacctccgtccaggcagcgaa

SEQ ID NO: 476873 - DNA, 122 bp, Homo sapiens
aaccttgaataccttgcaacttgagaatcgcggcggtgctctagctagatccaccggaggcgattttgacacctccctccgccccccgggacagatggcaacgcctggggacgtttttggtt

SEQ ID NO: 476874 - DNA, 122 bp, Homo sapiens
accacgccccagaccctggagtttccgggtgcgcagacccttgccatcagcagaggctgccgctgcgcgtcccctaggcgcggaagaggcggctggtggtccctgacggcaaggtgaagtcg

SEQ ID NO: 476875 - DNA, 122 bp, Homo sapiens
gtgcgtgggagaaggaaagagtctattgaagcctcccattctctgtctcctaccctagggcgggtcagcgaggacgcagtctgtcctggggtcctatgggagggtgcggggaggctcgctca

SEQ ID NO: 476876 - DNA, 122 bp, Homo sapiens
catcattaaaaattgatggctcaataatttaatttatctgggtcataagttccttgtgagcggaagctgtgtgttttgtttatacagaagtttcagtaccatacacacatttgtaaatactg

SEQ ID NO: 476877 - DNA, 122 bp, Homo sapiens
cggtaggagtgatagtagaagggaagctcaccaggcagggatttctgtctgttttgtgcgcgactgcagtaccggaacagtgcctgcccactgcagatgtataattagtgcttgtagcatga

SEQ ID NO: 476878 - DNA, 122 bp, Homo sapiens
tcattctttcctaccaattctgactgggcctcagaatccttcctagcacaatgccctagacgtaatgtaccaagtgatcagagaaacatgagttagaacctaaatttcaatagatttgtgag

SEQ ID NO: 476879 - DNA, 122 bp, Homo sapiens
aagccaaggtcccactttaacattcagtgacatcgaacggagggagttatctgtagcaatcgccttcctgggggacccgtacaacacgcatgaccactgaaactgactgagtcccttctagg

SEQ ID NO: 476880 - DNA, 122 bp, Homo sapiens
gcacgcacatcatccggcaccatttccgtgccccgaagacgcccgcgcgggacctgggaccgccagtgaagaacccctcctgggctctttaacgagcagcagatgcgcatgctgcttctctc

SEQ ID NO: 476881 - DNA, 122 bp, Homo sapiens
agtccagatggctttgcagcctgtaaaacagactttactcactgatgcctctcggagtgtcggcagggcaatgtctttctcgcagcagaaatgcaaaacaaaagacagcatctgtggcttgc

SEQ ID NO: 476882 - DNA, 122 bp, Homo sapiens
gggggctggggggatgtagacagggcggggtcagagagaacccggacagagtctggggtgcgcagcgggggtgggcgggctccagggcagggcgcgggaccgggcgggatggggcggggcgg

SEQ ID NO: 476883 - DNA, 122 bp, Homo sapiens
ctcagcaaatatgttttcctgagacccagtgcgggctggagctctagtccacggattgtccgaggcctctttattgccgcttcgaggcgcgtgtggtcgggggtttacatattcattaagca

SEQ ID NO: 476884 - DNA, 122 bp, Homo sapiens
caagaaggaagtcatcatgggccggcctggaacaggtaagaggtggaagtggatgggctgcgccaggctcacctcgtagagggcctcttgcaagctgaactcttgagaggtgagctcctcac

SEQ ID NO: 476885 - DNA, 122 bp, Homo sapiens
gttaggggcaatgacattaggtcagggcttggcttagctcagccctgggctcctccgagtcggtaggagcttggcatgagctcccctcccttctgcctgcctcctattcttcactcctcagg

SEQ ID NO: 476886 - DNA, 122 bp, Homo sapiens
gtttcccgacacaaatgccacctttccagacaatctaaagtaacctcaaaatcatttgctcgcacatcactttgttttatttctcctggtattaatcactatgtgaaattttctggttcata

SEQ ID NO: 476887 - DNA, 122 bp, Homo sapiens
ctttcccatttctcaccattgccacttaatggtctgaggggggcttttcctgttactgcacgcaccagagccaacagctgaaaacagtaggcaacagtactctccctactaaagagcgctgc

SEQ ID NO: 476888 - DNA, 122 bp, Homo sapiens
gggcctttgggaggccctgcttcctgcgagctgtcccggcaggacagagactcttcccgccgcggccctgccattccaggctgaggctgtgagcagcaccatgacaagctccagccgcagtg

SEQ ID NO: 476889 - DNA, 122 bp, Homo sapiens
cagccagcgagtgtcaggacttcacctccctcagcaccaggacacgagggagcagcctcccggctacgccatcgacacggtgcaggtcaatggacaggagaagtacttgatcgtgagtgctg

SEQ ID NO: 476890 - DNA, 122 bp, Homo sapiens
aacttcagaactgttgcagaataatgcagcattttgagtaagtttgtctctgttggtcaccgcaaattcagtcctgcctagctaggcaattccgttcctgttaaagtctaaagattggtctc

SEQ ID NO: 476891 - DNA, 122 bp, Homo sapiens
agatgaatttagtggcgcggctgcctccctgaatccgaacggtaatgatggatttatcaacggggattcgccttcagcccagcgagggaggtttactcagcaaatatgtcggcgagcaccca

SEQ ID NO: 476892 - DNA, 122 bp, Homo sapiens
gaagcatggcagcagcatcacacgcctctttgtggtgtcctgctcgctggtggtcaacgccgtgctctcagcagtcctgctacggctgcagctcacagccgccttcttcctggccacattgc

SEQ ID NO: 476893 - DNA, 122 bp, Homo sapiens
aagaacgagatttttttgaagaaacaaacccaggctgcaggccgagggagctgtcagcatcgttcatcctcatgttcgctgggctggggggaggaactggcagctgttcgccagtgattcag

SEQ ID NO: 476894 - DNA, 122 bp, Homo sapiens
ccgaggaaaggaaagagagatgcaagccaccctagctacttttactcccctttaaggctgcgtggttacggtcctgggaaagaaaactcctgcattcctcccctttaattgggtttattgtt

SEQ ID NO: 476895 - DNA, 122 bp, Homo sapiens
ggaagaagttacactgcctctgagctgccttctctacatcgcagtggggtcagcttctaccggggcggcgtcccggggtcttggaactgcatgcagactgcctgcttgggaaacatacttct

SEQ ID NO: 476896 - DNA, 122 bp, Homo sapiens
ggtggggctcaggcgctggaggggtcggggccgtggtctcagtttccgtttcttccctgccggctggttcacagagacaggtagagacagatggctggtgtgtcgctgcacccagactctca

SEQ ID NO: 476897 - DNA, 122 bp, Homo sapiens
cgccacaggaaaaaggaaaaagtctcaggtgggcatgcgtgtaactccctaaacgcactgcgcgtgctcaattccaaaggctaaggaaagcattgcgcatgcgggaaacccacgctgaggga

SEQ ID NO: 476898 - DNA, 122 bp, Homo sapiens
ccctggtgcccacttgctcctctaagccttcagcagtcctcccagcctcaaggggtgatccgttcatcttccccccacctctggaaatcccagcgtttgaacgctggggggaactgcaagtc

SEQ ID NO: 476899 - DNA, 122 bp, Homo sapiens
atggaataggtagccataggaaaaaaggaagcgctatatgtactgatgtggaaaaatctccgatacactaggtgataagagcaagaacaaagggtatataccactgaccatttaaagacatt

SEQ ID NO: 476900 - DNA, 122 bp, Homo sapiens
acgggggactgagactccagcccagacggacagtgaggggaagccccgccctggcgcacacgccccgtgtggaaagctaacgtgctctttatttgggagacgggacagaaaacgcaggacgg

SEQ ID NO: 476901 - DNA, 122 bp, Homo sapiens
tatctgaggcctcctgctaacagtcaacaccaactcatcaggcatgtgagtgagccaccacggaactggatcctccagccccactgaagcctttagatgactgcatgactgcaaccctggcc

SEQ ID NO: 476902 - DNA, 122 bp, Homo sapiens
gcccgcccaaaatccgcctgtgcgtgcactgcctgcaggccgtgttccccttcaagccgccgcagcgcatcgaggcccgtacacacctgcagctgggctccgttctctatcaccacaccaag

SEQ ID NO: 476903 - DNA, 122 bp, Homo sapiens
aagtcctgaggccttgctgactgcaggattctctggttcgacaatggaagtcgaacacctcgggcttttaaaaattctggcatttaactcatttgttccccggtagctgcagcgtgatggag

SEQ ID NO: 476904 - DNA, 122 bp, Homo sapiens
ccagcctcactctgcctcctcccgggtggtcttggcaagttggagaggacagctgtgtggcgtcccactggctgctaggaggaggtggggaccggggctgttcctgtggggtgattccccct

SEQ ID NO: 476905 - DNA, 122 bp, Homo sapiens
ttcaccgttaactctacaggcactccatcttgatgctgctgtctcctggacgcacaagtacggaggcgtggtggtggaagaaagccactgtctccactgtctacgtccccaccctgctgtcc

SEQ ID NO: 476906 - DNA, 122 bp, Homo sapiens
agctacttgggaggctgaggcagaattgcttgaacccaggaggcagatgttacagtgggccgagacggtgccactgccagcctggatgacagagcaatactccgtctcaaaaaacaaaaaca

SEQ ID NO: 476907 - DNA, 122 bp, Homo sapiens
tgaccagaactgcgaacaaagcgcggagggaagctcttaaaggaggccaaagcggccgggcgctgtggctcacacctgtaaccccagcctgtaagcctagctactcgggaggccgaggcaga

SEQ ID NO: 476908 - DNA, 122 bp, Homo sapiens
cagaaaaatttaaaacttggtcatggcaggtacagagttgggccccactgattttgttgacgttggggtcagcagattctgtaaattttcactatacctctcatatgatctgccgccacacc

SEQ ID NO: 476909 - DNA, 122 bp, Homo sapiens
agagatattctctctcttacatatgaggaagtatggctccgagtagtttagtaacttgtccggatttcatatctactaatgtcagaacctaaggagaactcaaggtctttagttactcctca

SEQ ID NO: 476910 - DNA, 122 bp, Homo sapiens
ccggtcccgggggagggcctgagccgcacagcccgcccaggggtggtgcgtgtaaacgggcgtctggatccccgaatggttgcgtgtttccgtgtgtgggtccgggggaggcccacgaacgc

SEQ ID NO: 476911 - DNA, 122 bp, Homo sapiens
gggccgtggcgctcgcaccacaggcattacttaggtatgaggctggttgagcatttttctcgtgttcactggctactcacgcagctttgtgaatggcttcggagatcactggacaggcaatt

SEQ ID NO: 476912 - DNA, 122 bp, Homo sapiens
gcctgatttgagccctggaatttcagcaacctaggagcccttctttgtccccagaagtcccgacccagatggttggtcaccccatgtacagggttttaaatgtttaaacattgcaccttaat

SEQ ID NO: 476913 - DNA, 122 bp, Homo sapiens
ctgcacgggtagcagagaaagctgccttcagtcagactcaccggttaactgggttgagaccgcggggcactggagggaaggggacacagccgtctctgctgagggtcaaccctgcaagtggc

SEQ ID NO: 476914 - DNA, 122 bp, Homo sapiens
ggcatcccaccaggcagggagctgtttggcctcagctctgcgacgtcggggcctgttccccggaggacctgtatttcccaggacaacaaggcctctgctgtgtcctccactcatcagttgaa

SEQ ID NO: 476915 - DNA, 122 bp, Homo sapiens
ttgcattattaagaattagtttctgaaagtgggctttgtgaatctatgtgggaagggctacgaatcagactggctgataatttggtgcaattgctaaaatacttgatgcaattctggactgc

SEQ ID NO: 476916 - DNA, 122 bp, Homo sapiens
caaaccggtgacgtgagccaggagtcacccagcagaagacaaagtcactcgcgctctgggcggccaccgcgccgggaccagggacctgccgatctggccaccggccgtggggcagaggcagg

SEQ ID NO: 476917 - DNA, 122 bp, Homo sapiens
tgtccgcctgtcacgccctcaccaccctccccttccagccaccaccctttccgttccgctcgggccttcccagaagcgtcctgtgactctgggagaggtgacacctcactaaggggccgacc

SEQ ID NO: 476918 - DNA, 122 bp, Homo sapiens
tgctgcctcgtgtccaggggaacctctcgtgcagtgtagatgcatgcatgtgctgaagggcggcctctgggaagggaggggtccttccaggccgggcaggaaacaccataaagccaccatgc

SEQ ID NO: 476919 - DNA, 122 bp, Homo sapiens
ccggccttccctgtgagaagtcaacggctcctgggtggtttcccaccgaaaggcccagcgcggggtgtggggggaggggctgaagtgtctttgcccaaacccgttcttctttctccccagct

SEQ ID NO: 476920 - DNA, 122 bp, Homo sapiens
ggcgggcctggggggcggggaggccgggtgggcggagcgggccgcggaggggacgtgggccgggatggggacgtgcggcggggacgccgggggatggacgcgcgggagcggggcggggcggg

SEQ ID NO: 476921 - DNA, 122 bp, Homo sapiens
ttttcattacgttcccttactcgttagggtttgcagttagtccacgttacacgtttccttcgtgtttttcttgaacttcatgaactctggcgtttcatttcacggatgtatatccaagggaa

SEQ ID NO: 476922 - DNA, 122 bp, Homo sapiens
gcggcgagcaagggagcaggcggtaggggttctgcggcgatgggcgggctaggggcggggcgcgggtgggctctaaaagtcggtgcccactcgctccgcgctgccgcggcaaccagcacacc

SEQ ID NO: 476923 - DNA, 122 bp, Homo sapiens
ccccgcccgggcttccatataaagtaggggccctagtggaggccgcagcagtagcaccagcggctgcggcggcggagctcctccgaggtccgggtcaccagtctctgctcttcccagcctct

SEQ ID NO: 476924 - DNA, 122 bp, Homo sapiens
tagccccgcggtgcttctcacagccttcgccggcagggacgcgcgggacaaccgcgcaggcggctctgcaggggtgggcgcgccatcacccctctcggtccctgcctgcttggcgctttccg

SEQ ID NO: 476925 - DNA, 122 bp, Homo sapiens
attgaaggaagtctctcttgctttgagtcctttattctgataagcaaccaagcaatcattcgatttgaacacaccaattccactgaaagtcctttggctacaaatgtgacctgaggccagaa

SEQ ID NO: 476926 - DNA, 122 bp, Homo sapiens
agagaagataggagatcttgacttggccgaggctatctaaccagtccctgatagtgtcagcgcctagcctctgcctgtcttgaatctcacgaaagttctattacatcctgctgtttcttggc

SEQ ID NO: 476927 - DNA, 122 bp, Homo sapiens
gccttggtagcggctggctgaaacaagccttgttggggtccttagtaatgtgccaggaggcgggttagaatgaaggccctgggcatcttttcagagaaatctagatcagtgtccctaagaag

SEQ ID NO: 476928 - DNA, 122 bp, Homo sapiens
tccactggttaaagcgattctcctgcgtcagcctcccgagtagctgagattacaggcgcccgccaccacgcctgtctaacttttgtgtttttagtagagacggattttttagtagagacgcg

SEQ ID NO: 476929 - DNA, 122 bp, Homo sapiens
gacgggagcgtgcggggcggtgggcgcagggtcacgttgggcggcgcagacaaaggcgggcgcgcgcacgtcctgacgcagcttgggcccgcggcggcggcaagggcgggagggagcggtcg

SEQ ID NO: 476930 - DNA, 122 bp, Homo sapiens
aagaaagaaccggccacacaatggcgtccatcttctggacaagggctggagccgcagagccgggcagggcctgggcgggggcgggggcgggggcgctgctgcctgcgctctggcttctcaac

SEQ ID NO: 476931 - DNA, 122 bp, Homo sapiens
gactctcccaccatggtgcaggctcagccgtgcgggtcctggcgttgagtccccaactcacgtttccacggagtctgtctcctagctgagccacaggcctgggctgagcggccttctttgat

SEQ ID NO: 476932 - DNA, 122 bp, Homo sapiens
tccttttcttcctcctgcttggacgactgtcttccgcctcaactgtggagcctcgccgaccgttagtcctcacagacacctcaggggcaaccgacgcagcgccacctcatcgtgtccgccat

SEQ ID NO: 476933 - DNA, 122 bp, Homo sapiens
cccggtccccacctgactccccctcccgccgagcccccagggcccggcgcccggctcactcgcctcccgcgcacccactcccgggcgccctctcccgcgcgcctccccgaccccccttgggc

SEQ ID NO: 476934 - DNA, 122 bp, Homo sapiens
aagctcccagggccacccaatcacagggccagtcatccgttgagaccctgcctccgcgcccggcagccactccgtatcttcctcgcattatcgcagggttgggccgaggcccgcgcatgcct

SEQ ID NO: 476935 - DNA, 122 bp, Homo sapiens
gctgcccggccctccgcaggagttggctccccacaaggttccggggccgagatgacagggcggttctgtggtgctgggtgctgggacttgaggggcataggggcacctgccctggaggaggc

SEQ ID NO: 476936 - DNA, 122 bp, Homo sapiens
ggcagggggcggggcaggaagcagccacatccggttccagattcggctctcagaggcttccggcgccgagaccgagatccccgtcggctcggtgtatcctcgctggtggagtaccctctgct

SEQ ID NO: 476937 - DNA, 122 bp, Homo sapiens
agcaagcgcccaggagtggcacctcccgcacagctactcctgctacctccgggaacgatacggagggctcccccaactgcccagattgccctggagccgccctgcatcctggcctctcctca

SEQ ID NO: 476938 - DNA, 122 bp, Homo sapiens
ggtaaattaaattcccaccagggtttgctgtcagtattttaacacccacattagtatatgcgtccagggtcataaccccctaaaatccatcatgcaaccttattaatctgtcttgggattcc

SEQ ID NO: 476939 - DNA, 122 bp, Homo sapiens
tttttcataaagttctaattttgtggctgagaaagctctccccataacccatttgctgcacgtcaaccaagttcctcttagtaggaattgagtggttgagtttgaggttgtttgtaaatatc

SEQ ID NO: 476940 - DNA, 122 bp, Homo sapiens
ggtgggaatctgtctcgcagctggctgctgcttcaagggtaggataagctgggggaagtacggtgtttgctgtaagactccagtggcaaattaacacagacatttgccttgagcatcagaaa

SEQ ID NO: 476941 - DNA, 122 bp, Homo sapiens
gagtgccctctgccgtccagaatggcgaacaactcagcatccaggcaggttcagaccagacgaggagatggggaaaaaacctacagccgttctcccatctctgggcaaacactggacgtatt

SEQ ID NO: 476942 - DNA, 122 bp, Homo sapiens
atccagtatctgcctcagcccagggcagaggggcgtgacggacagacgcccaggcttgagcgagtgtgcgtgcggacgtctgggtgcgtgtgctgctgagcatggagggccaacggatccac

SEQ ID NO: 476943 - DNA, 122 bp, Homo sapiens
cggctgcggcggcacttccgggttggccttctccatgttggtctcgggaacgtgaaggggcggggcctcgaggtcaggggtcagcacctccctggttgccgtggcgactggaggcgcgcgac

SEQ ID NO: 476944 - DNA, 122 bp, Homo sapiens
tggggtatcccatgatgtcaccacactgctatatggaaaagaacattaatcgagcacctacgtgcttgattctcttaattctgtgactgaactctcaaaacaccctgggtaagcactatcat

SEQ ID NO: 476945 - DNA, 122 bp, Homo sapiens
acgcggggaacggccccggaccagggtggggcgtggcaagggtttgaagggcgtgtcctacgaagaggtagggcttggcaaggacccacggggcgtgtcctaggactcggtgagggcgtgac

SEQ ID NO: 476946 - DNA, 122 bp, Homo sapiens
tccgtgcccacttgcagcggactacgtagccctggcagacaggcaattgcttcaaacaagcgccctccaagggcgtaagctagaggggcccgggcgggcgctttcccgtggaccctcccacc

SEQ ID NO: 476947 - DNA, 122 bp, Homo sapiens
cattaactaggggcctcccaagtctgattccaggacactggtacctgtttctgtgctcaacgttcagatcctacaatccagtgctaaaatgaacagtaagagatatgaagaaataggaaaca

SEQ ID NO: 476948 - DNA, 122 bp, Homo sapiens
gccgcccagtcgctctttagccagccgccgcgccccgcctcattagcatgccgggctgcgcgcgcctcatgaatatacaacgacgacgcctcgctcccgcccgcctgccccacttccgcccg

SEQ ID NO: 476949 - DNA, 122 bp, Homo sapiens
ccatcgaattgtgtgctaattagccacaatttgcaccgcggcaggggcgccccgaggccacgcctgccctctagggggtggcagggatcgggttgggtaccccccacccagacacccaggca

SEQ ID NO: 476950 - DNA, 122 bp, Homo sapiens
gtgagcgccgggaagtggcctggtaacggctgggaagggactgcttgggctctgggaggccgcgcgggcccagcttgtgcagtccgggatcgcgtccccttgggagacttggcgaggggcga

SEQ ID NO: 476951 - DNA, 122 bp, Homo sapiens
gtagaaatgggtacatagtgtgaaccaaattttgttaatcctactgcttgtcagactgcccgccaggtgttgccttcaggctgatgagagctgcctggccctttggccagctttggctgatt

SEQ ID NO: 476952 - DNA, 122 bp, Homo sapiens
atatttcttcccattgcccttttccgcctaggacgtatttcaagcttcacacttgtttatcgttgccttatcttttatgggattgcctgcagagactacagccccagacatattttgcacct

SEQ ID NO: 476953 - DNA, 122 bp, Homo sapiens
tctggaacagatcccttccatgctgcacatcagacctcttagatgggggtcacgatggtccgtcctaacgccacatgacctcaagtggtgtagatgtgaggacatgtcagtgtggggaaaga

SEQ ID NO: 476954 - DNA, 122 bp, Homo sapiens
cgcaagatcctggatgacgtctccatccccctgctgctccgcctgccactggctggtggccgtggccaggcctatgacctctgcagtgtggtggtgcactctggagtgtcttcggagagtgg

SEQ ID NO: 476955 - DNA, 122 bp, Homo sapiens
ctatgggccacttgagagttggaatgcacattagtcctttgaggcttgatcctggttctccgggcagccagctccaagagtagaaagaaattatatgtgcatatagtcaataaataggtgtc

SEQ ID NO: 476956 - DNA, 122 bp, Homo sapiens
ggctcccactagccccggcttacagcggcctgagcgggagttctcggtgctgtaggctttcgggacgctgtgtatgcccggcaggggcttccagtgggggccaccccaagtcgcctccagcg

SEQ ID NO: 476957 - DNA, 122 bp, Homo sapiens
tctgagatgtgtccacattggtatctgcagctctatttccttctttaagctgcagtagagcgctccattatgtaattattaccacagtgtttctcttctgctgctgacttgctgactgacat

SEQ ID NO: 476958 - DNA, 122 bp, Homo sapiens
agggagacagcccccaggatacccgctaacgaccgagacgcctggatcatcgctggtcaccgtctgtgtgtgtaatctgacgtgatgaaagcaaagtcaaccaacaggcagaacctgcgcct

SEQ ID NO: 476959 - DNA, 122 bp, Homo sapiens
cagaggagtgagaaggtgcgggcatggagataaagagtggggaaaagaggggagcagagccgcctatggggcccaggacctccacaggagaccctagcggtgaatacatgctctccaggcac

SEQ ID NO: 476960 - DNA, 122 bp, Homo sapiens
tcctcgaagagctaacccggtttctgagtgcctgacttggctctcagggagcagcttaagcgtcataagactctgactcactcagtcactttgagccaaaggatcccacggaagcctgtgcc

SEQ ID NO: 476961 - DNA, 122 bp, Homo sapiens
aggctcccattacaagcaaccaagcgtgatgggcgagggcctggctgctggagggggcctcggagtcgggtccaggtccgccccctaatcccgtgatctaagtgagctgcttcatctctgcc

SEQ ID NO: 476962 - DNA, 122 bp, Homo sapiens
ctgggacccacaggtgggcatgaaagggccgcagcaggggctcccagcagtgtgtaagaccgggagctggtctggcaccactgccctggtccttccagctgcctgtcactggtatgatggcc

SEQ ID NO: 476963 - DNA, 122 bp, Homo sapiens
caataaaagtatttatttttatcacaagagctgttgaaaaatttgactcattatttcagccgcctcacccctcactgtcgttgcacccattcagccttcagccctgtttttgctcagctttt

SEQ ID NO: 476964 - DNA, 122 bp, Homo sapiens
cgggcagagtcctgtctcctcatctaattcaatgtggcctcacctggcgctccaggagggcgctggcaggctcaccttacaggggctcactgtacacagctgctgaactagggatggtgaac

SEQ ID NO: 476965 - DNA, 122 bp, Homo sapiens
cccatgcattgtgggagggacccaggggaaggtaattgaatcatgggggctggtcttccccgttattctcgtgatagtgagtaagtctcacgatacctggagggtttatcaagggttcctgc

SEQ ID NO: 476966 - DNA, 122 bp, Homo sapiens
ccagcccggtgctctcgtgaggcgtgccagtcagattccgcgggagagcggcagagataccgcgatatttgggagcggccccgagacgcgcctggcgcgggtgagcagtggaagggggctgg

SEQ ID NO: 476967 - DNA, 122 bp, Homo sapiens
ctggcaggccggccgcggagtcagctgacgccggcgctccagcctcgcctccccgcgccgcgctctgcgctccccgaaagtggctgcaagccggccgcccactgtcagggttggggggacag

SEQ ID NO: 476968 - DNA, 122 bp, Homo sapiens
acgttcagatagggatcgtagaaggatcttcctgggttcggtggtgcgaagattgcacaccggtaccggggcttttaagcagcggaaaacctggaggagcccagggagctccgagccttgct

SEQ ID NO: 476969 - DNA, 122 bp, Homo sapiens
ggaagagccggagcgcgttgatgtggttgccgagacaaccaagagggtggccggatttaacggctggggattaagcactttcaccgttgtaagggaaatctcgcgcacgcgcaatggggact

SEQ ID NO: 476970 - DNA, 122 bp, Homo sapiens
aaaacaaagcaatgcttgtaaaacgcatgtcagtattagaagcttctctggtttgttccccggaagacattccccgccaggccccaactcacaatcaaggagaccccaaggtaaacattcct

SEQ ID NO: 476971 - DNA, 122 bp, Homo sapiens
tttgataatgagaaactcagaaattacagaggttggtaacacagcatcagcatataataccgtctgaaaaacctgggctccagttatcttgtgataggcagcgacagcagagattaaaaccc

SEQ ID NO: 476972 - DNA, 122 bp, Homo sapiens
cagccactcggacgctggtgctcctcactgacttctcatcgctcctgtgctcgctgtagacggtgtttaactcagaatccacatgcaggatgttctcggttttcaggtgtgcgtgggtcagc

SEQ ID NO: 476973 - DNA, 122 bp, Homo sapiens
gagagggtggggctgtggggctcaccttggcgaccaggatgtgccaggcgtcctcgtgcgcgcgcaccacgcggtaatacagggcgtccccgctctctgcgcagggtgagctgtctaggagg

SEQ ID NO: 476974 - DNA, 122 bp, Homo sapiens
tttagattttaaattaagcgtcctcgggattctcagagcacttggatgtggccatctcgccgccacaattctcagaagcagcagctgggccagcccctgccccgtctccgtccgtctcccac

SEQ ID NO: 476975 - DNA, 122 bp, Homo sapiens
agctcgaagggccgagttgggccaggacgatttccgagcagagccctcggctcggatgctcgttagggatgttagtggttattggaagcggcgcggagaatggcgtgttccgaggccagatt

SEQ ID NO: 476976 - DNA, 122 bp, Homo sapiens
agcgagcctagcctccccgcgccctgggcagtgtggccatggagaatcaggtgttgacgccgcatgtctactgggctcagcgacaccgcgagctatatctgcgcgtggagctgagtgacgta

SEQ ID NO: 476977 - DNA, 122 bp, Homo sapiens
cctggctctcctatctcggccccgtaaccgctgtccgcacggtggcgccacatacgtactcgtcaccccttggccctccctgaagagctggtgaccttaccgtcaaagccccgggatgccat

SEQ ID NO: 476978 - DNA, 122 bp, Homo sapiens
ccttcgtcctcaaatctcaaaggtcaaatacttcacaactaccaataggcaccaagagctcgcgttctttcctccagtaaccagagccccgcccgctagcggtccgtcaacgaccgcaaagc

SEQ ID NO: 476979 - DNA, 122 bp, Homo sapiens
ggcgtctttcctgagatcgctggagctgtcactcgcagggcgtttcagcctcccagtaagcggcctcgtgcggatcctcgagaaccttattattattgttattacttttctggttaaagtaa

SEQ ID NO: 476980 - DNA, 122 bp, Homo sapiens
gcactcggtaacgttttttgaattaataactgatgaatgaatgaatgaaccaaccaataccggcaggagacacaaatataggctcctccacagtagcccactgaggcagcctttttggggaa

SEQ ID NO: 476981 - DNA, 122 bp, Homo sapiens
acagtgacgagcatgttctggggctttgttggcttctttgtgccctagttcgtcactaagcggcctaactggggagttatcatcaccatgatggtgacctgttcagtttgccactctctttt

SEQ ID NO: 476982 - DNA, 122 bp, Homo sapiens
tgaatcctggttctgtcccacccatagctgtgtggccctgaggaacttgcttagtctggccgagccttagttccactgtctggaaaacaggagcagcaagagagagttacattgggaggtga

SEQ ID NO: 476983 - DNA, 122 bp, Homo sapiens
ttttggggcctgttcttgacagaaagcccgggaggccaggggtcagggctgccagcatcacgtgtctgttttttatctcctgagtgccaacagatgggaagtggatctgggggtcttgccac

SEQ ID NO: 476984 - DNA, 122 bp, Homo sapiens
catgatcctcccgctttggcctcccaaagtgctgggattacaggcatgagccactgtgcccggcccaaattgttcactttcaaatggttacttttatgttatgagaatttcatctcaatttt

SEQ ID NO: 476985 - DNA, 122 bp, Homo sapiens
caaactgaaggtgtgtgcactgcgcatgaccagccaggcccgcagcggcatcctcggggccgggggcaagatcctcacttttgaccagctggcccctgatgccccgaaaggctgtggcaccg

SEQ ID NO: 476986 - DNA, 122 bp, Homo sapiens
atggttcaatgtctttttctagatccatcaactccaacaagaagaaacaagcctggccctcgtagtaaaaagatgaccagagtcaaaatctgaaaccaattttgagcttggctctgtcattt

SEQ ID NO: 476987 - DNA, 122 bp, Homo sapiens
tgttagagccaaggccagggcaggaaggaagctgccagctaagcggctactggaaactcccgctgaggatgcggcaccaggaacacaaccttatgactgtcagaacatcatagctgcacatt

SEQ ID NO: 476988 - DNA, 122 bp, Homo sapiens
tatttcttattaccttgcctagtaagattaaataaatgttaggtgttaagtgaagatttacgggaattataagtatcatggacagttgaggacatagatggtactgaagctaagagtaggag

SEQ ID NO: 476989 - DNA, 122 bp, Homo sapiens
tatttcatttgtttcacccactgtcaatgtatttattttttttaaaagtctgagggctaccgttggaggtctctcttagtgagacaatgtaatgcattatctattgcaggtgtcaggctttg

SEQ ID NO: 476990 - DNA, 122 bp, Homo sapiens
tatcatactaatcttcatctcaatgtctgctccccagggaacccagtctgcgatggtggccgttcttttaccatatgttgttataggatactgcctcgaatacttttggataatcagtttta

SEQ ID NO: 476991 - DNA, 122 bp, Homo sapiens
ggttttccgtgccccaccttgtctgccggtggagactgagcagtcagcccgctgtaatagcgaggccgacgcgggaggtgatgccgcctggccggtcaggtgctgaggcgccgaggagagga

SEQ ID NO: 476992 - DNA, 122 bp, Homo sapiens
ccgccgcctcgagaaccaaactccagtgagctgcccccgcgcggagtactctgggtagtccgcgccgcacgcagcgtcggcgccacgctgaggaggttgggagatggggcgggcggagacgc

SEQ ID NO: 476993 - DNA, 122 bp, Homo sapiens
gcgggcccgggtgggtcctggtaccgggtggggagagcggaaccctcccaaaacttggggcgcggggcggggccgtcgggcggtgacgtgaggggcggggccgggccccattggcgggcggg

SEQ ID NO: 476994 - DNA, 122 bp, Homo sapiens
cccgcctggggtgagtggggttggtttcggcgccccacagatttctctgctgctcctgcgcgccagggacctgcgacctgtgacccctatggttccggaacaccctccttgctcccctgcag

SEQ ID NO: 476995 - DNA, 122 bp, Homo sapiens
actgttaattcattcgagcccctggtccctaatgtgagctgtggctgcaggtgggaggtgcgggttggaggcacgtgcagggagagagacgcggtgcgcacgtgtgagctcagcccgtctga

SEQ ID NO: 476996 - DNA, 122 bp, Homo sapiens
cctgggttctttagtctcgaaatatataagacttttcgttcttcgctagtcttctgagctcgagatgaagcacagaaggctaaaacaatgagggacagcgttccagtagccctgccacagct

SEQ ID NO: 476997 - DNA, 122 bp, Homo sapiens
aggtggccacacactcccgacatttgtccatctgcatatggagtcacagacacctgcgcacgtgcccagtggcacatacacaccctcatggatagcagacatatgcacacgcaggctgctcc

SEQ ID NO: 476998 - DNA, 122 bp, Homo sapiens
gttcgcctcctaacgcgtgccggtgggcgagccgtatgcccccgcgggacccagttcctccggggtacaatgagtggctgacctccaggcagcgccagtgccaacctgcctccgggcgggtg

SEQ ID NO: 476999 - DNA, 122 bp, Homo sapiens
ggcgtaagatccgtgcaaattcttgttacgctgtttcccaccccctctcgccggcacacacgctttttgttcagtaaaaagtggaaggtctgagtttgggaattttaagtggaaaagatctg

SEQ ID NO: 477000 - DNA, 122 bp, Homo sapiens
catagggccccaggaccactagcttctggccagcagtcatgccctccacagagctgggtccgtggaaattgcatgtaggagacacaccagactcccaggacagagcccttttgggatggcca

SEQ ID NO: 477001 - DNA, 122 bp, Homo sapiens
cgtaggtggttcgcttgagcccaagagttgagcccaagagttcaagcctggggaacacagcgagaaccgcctctctttaaaaaacaaaaaaggctgggcgcggtggttcatgcctgtaatcc

SEQ ID NO: 477002 - DNA, 122 bp, Homo sapiens
ccagcggaaccgccgcagcgtctcccgggcaaccggaacgctagggcgcgcggggcactgcggcttccggagcgggttcccctggcgctggcagccccagccctgatccttctgagaggtga

SEQ ID NO: 477003 - DNA, 122 bp, Homo sapiens
tatgcgtcagatgttcaaagtacttaccaaagattagctcatttaattcacacgatgctgcgtgatgaatctggtattatcgttattttacagaaagggaataagaggatcagagagaatga

SEQ ID NO: 477004 - DNA, 122 bp, Homo sapiens
aggaggagctgaaaatgcagatttagcatcaagcacagacctacactcgctctttctctccggtacacacagctccccacattcgcacccctgcccgcgcgccgggccgcctgactgcacgg

SEQ ID NO: 477005 - DNA, 122 bp, Homo sapiens
cctcagggtacaacctgaacaacagtatatggcagccttggtatcaagtgctggtccttccgcagcaatgggaaataggtaattacagtacactgtgataaagaataaagtaaaataaatgt

SEQ ID NO: 477006 - DNA, 122 bp, Homo sapiens
agaaggcagatggaaagggaaagggataaagaaggaagggggacacagagaaggagagtccggagcttagggaagaaaccacagatgctgtttcaattatttgtatcacatgagtgaaacag

SEQ ID NO: 477007 - DNA, 122 bp, Homo sapiens
tgtgctttgtttcacagtggcagcggcacgctggtgtccacagtgtgaggacgctgaccccgggcagccgctgctctgaagagcttccgcgccttccccctggtctcgtccgttttcctcct

SEQ ID NO: 477008 - DNA, 122 bp, Homo sapiens
gtggttaaccaagtccccgtggctaaccacagtgcctggacatagaaagggcttaatacacgtatatgtaatttctacttttctaaaggaaattgtctgatatacataaatctggaaagaac

SEQ ID NO: 477009 - DNA, 122 bp, Homo sapiens
cgtagctgatgttgaggcagctgctgctctgggggtcttcttgtaccttctgcacgatggcgctcacggccttgtgcacctgctcgggctcgccgctgaccgtcaccacgcgctcctgcagg

SEQ ID NO: 477010 - DNA, 122 bp, Homo sapiens
ggtctagcggggcgggaggcacccaggggggcttgtgcaggaaaaccggtccggattgcccgaggacggtgaccggcctcggtcttccggcctgacttgcggcctgggaatgagagggaaag

SEQ ID NO: 477011 - DNA, 122 bp, Homo sapiens
ggcgctggctggggtggcaggaagccagcagccctggaacatttgccttggacacgaaggcgaaggcggctttattgacctcatcaggcagcccaggtgattgaattgtgtttatctcacag

SEQ ID NO: 477012 - DNA, 122 bp, Homo sapiens
gatctgatggttttataaggggcatttcccccttttgctcagtacttcttgatgctgccacgtgaagaaggacatgtttgcttccccttccaccatgatcctaaggcctccccagccataca

SEQ ID NO: 477013 - DNA, 122 bp, Homo sapiens
gctctgctccaagcaccccgggcataaaggcgggccttggctcggtcaagagtccaggcacgcacactggcataaaacactcctccgaaggaatatggaaatgttccattttactttgttca

SEQ ID NO: 477014 - DNA, 122 bp, Homo sapiens
aggttctgtctcccttacagtgattggttcaaataaaagcacgtgaccaagtcaggccaacgaggcacaaggagaggtcagctgtagcggcttccggcaaagtccctcctctttgtacttca

SEQ ID NO: 477015 - DNA, 122 bp, Homo sapiens
ccagggcccaaagaaacttcgtttacctttcagatggatgtgagtaacgtagaggcgatccgcagccggacacaggaagcgggagctctcggtgtgtctgaccgtggttcctggagagacgc

SEQ ID NO: 477016 - DNA, 122 bp, Homo sapiens
aaacctaggaccagacatcacttcccattgtccagggcagatggagagaatctgggtttgcgtgagctagattcaacacacttggtgtaatttcctcacttggacacaggcagaaaggaggc

SEQ ID NO: 477017 - DNA, 122 bp, Homo sapiens
acctctgagtgggaggcagccctggctgagctgtctcctcaccttagcatccgcctgtcccggcgcccatgtagcttccttgtcatccatcttctgggctggcccaggacacgtgcccccat

SEQ ID NO: 477018 - DNA, 122 bp, Homo sapiens
tttcatgtatctgggacacatgagctgcctcacctgtggtcctatggtctctcctcttcccgcctgctagcttattcacatcatggtctcatggttctaagggctgtggggagggcttggca

SEQ ID NO: 477019 - DNA, 122 bp, Homo sapiens
ctcccccagagccatcaggagccagccaggcccctgacaacaagctgcaaggtgaccctccgtgggtctattttgagttcctggtgcctctcaacatgctgctgctaagttagaagcagtga

SEQ ID NO: 477020 - DNA, 122 bp, Homo sapiens
cggacaaaggcccctccatcttcaacgcaggggtatacgtcgacttccactcacacacaccgcgggcaaccagtatcatctcacctcagccaaccagcgaccagagcagtgatgcgtggagc

SEQ ID NO: 477021 - DNA, 122 bp, Homo sapiens
gggttcacggacttgggggggatgaggtctaggtcctcgtcgtcggggatctcatctaaccggtagccgtccttcagcagctggatgttcaaatcttggttgatctgctgtaggcaaagggg

SEQ ID NO: 477022 - DNA, 122 bp, Homo sapiens
tcatggaaattaaagcgctagatacttattttaagtgtaagagaatcactccaaaagactcgacatgcaaaaacccacagccaagcccaggcttcccacagttcccaaaagaaaaatcaaaa

SEQ ID NO: 477023 - DNA, 122 bp, Homo sapiens
atggtggcagcatctggaaccgagagcgccggcctcccgcgaggcgtaccccggggaccgcgctggcacattccagagcgcactgccgtcccacctcgctgcgccggacccaggtcaggtgc

SEQ ID NO: 477024 - DNA, 122 bp, Homo sapiens
tggggcccagccctttgttccatgtcagttggtcattggctgtaggcagacaagcaggcacgtgtgcatgcacacacacatacacacaccccacattggagggaggcatcattgcctgaccc

SEQ ID NO: 477025 - DNA, 122 bp, Homo sapiens
actctaattattaatatattttttaaaacctattctgagaagcaaaactataattgttaacgtgtctcagtttaatttttaagaggagaaaggcgctactggggaccccacagcccaccctc

SEQ ID NO: 477026 - DNA, 122 bp, Homo sapiens
ctacgggcaagagctcccatcccggtctgaaactgtgagaaccgcaagctccgatgggggcggggaaggacgacctttaattcccaccccactgtacggagcccagcagggccatccgcagg

SEQ ID NO: 477027 - DNA, 122 bp, Homo sapiens
cgtgggctgcttgttaaaaaaaatacaggttcctgggactcatccaaggttaatgaattacgctctcttggggcgggatttgggactctacatttttgaactgcctcaagtgctttttaagt

SEQ ID NO: 477028 - DNA, 122 bp, Homo sapiens
caggagatcccgagttacagacctgagctcgtaaacaaacgctcaccactttacagtcgccgcctcatcctgaaactccggtcagaaatgctggaaggcctttgctaatgcgcagtgaaaat

SEQ ID NO: 477029 - DNA, 122 bp, Homo sapiens
gtgaggcggcgcagccaaacagtcacatccggggccgagaggaaccgcgaacgagctgggcgtgcgcccttgcttcgtgccctcaacccgcatggcggagccgctggcgcgccgcggagagg

SEQ ID NO: 477030 - DNA, 122 bp, Homo sapiens
tgcctggcccggtgcaggtctggccccgccctggccccgcccctgccccgcccccaccagcgcccgaaccgcccccagccgctctcacaggtttgttatgtaaccgccgggccagccccgcc

SEQ ID NO: 477031 - DNA, 122 bp, Homo sapiens
atcccgtgctgcaggtgctaagagcccatagggcagagctgagtcggcagaaaaggtgaccgaccctccatccccagagtctatgacactgggccccggagacctctgagacccggttaggc

SEQ ID NO: 477032 - DNA, 122 bp, Homo sapiens
cagattcttcttccacaaggagtattttttctacaatattctgatatgcattcctccccacgttctttctagtacttctttgttcatattttattttctgagtcaagctcattatgtgtatt

SEQ ID NO: 477033 - DNA, 122 bp, Homo sapiens
ctcaatcattaacatgaagtagtatatcaattctgatagactacttacaatatgtgcttacggaatttaattgaagagatgaactccagtgtgccagaaaggacgtgagatttagcattata

SEQ ID NO: 477034 - DNA, 122 bp, Homo sapiens
gcggggcgggggtttggtggctgccctcagtattgcctgcacaaatatctaccaggtctgcgacgaatagctccagcaacttcgcaccgtgttttccactcagcctaccgacaggcactgtg

SEQ ID NO: 477035 - DNA, 122 bp, Homo sapiens
tctgggagctgggagaagggtccgcttctcctccgcccctcaaatcaaaggcacccccttcggatgattcctagaaaggcaatcgcatcagtgtccccaagcacttcatctccccaaaagaa

SEQ ID NO: 477036 - DNA, 122 bp, Homo sapiens
gagccaagactccagctgctcttcttccaccttgggtcctatccaaacagaacctgtgcccggggccccgacaggcctcaaaggtatcgcctccctggaacctgggggtctggcccagtcta

SEQ ID NO: 477037 - DNA, 122 bp, Homo sapiens
cagctttgcaaaagccgtctatgacctcagagaaatcacaccgtcgctgggactcagtctcgtgaacacgcggataatgtttcattctactttcctgcctccccggctgtcagtgccttcat

SEQ ID NO: 477038 - DNA, 122 bp, Homo sapiens
cctttttcatacgtgtgggcattcctgggagttgtgactttggatgaccatctccctcttcgtcacaccttccctggtgataccgatctagtctcctggcttcgataactttcttcattctg

SEQ ID NO: 477039 - DNA, 122 bp, Homo sapiens
tcgtcaccaaagtcaagaataccttcttctgcaccacattctcggagattttccaaatcccgggcattttcaggccttcactccctccactaataccccacagcttactcctcccaagtgaa

SEQ ID NO: 477040 - DNA, 122 bp, Homo sapiens
gagcggtcgccgaagacgccgggaggcgaggggcgaggtaagacgccgcctaaagaggcccgggctctcccccggggtcgttgttggaaaagcaaattccacggtgaactctaccaagctca

SEQ ID NO: 477041 - DNA, 122 bp, Homo sapiens
accaaagccacgagagaggtgggcgccgtcggccaggcgccctctcggtgcgcacacacgcgcgtccccaggcgccgctgtgcccccgccgcccaccacgtgccctggccaagcccgccaag

SEQ ID NO: 477042 - DNA, 122 bp, Homo sapiens
gcagcttgggatgcagcttggaggactgagtgggctcggggagggagttccagcaggccacggggaacccaggacagcctgaggacggaggcacagccagacgcaccaaggggggcgaccca

SEQ ID NO: 477043 - DNA, 122 bp, Homo sapiens
tggcccggctgcaggcatttgtttggaaggtgattccaggcagtcctgggaacggacacacggaaggagacgagctagtaatggagggtgggccgtggggtgaggaaggtgcccaaatttgc

SEQ ID NO: 477044 - DNA, 122 bp, Homo sapiens
agccaatcagcgcccgcggcctaaggtaagagatgagtctgtagttcagcctgtcaatcacgcgcccctcccgcccggcccacaactcgggctccgggaagggcatcgcccagcaaacttgg

SEQ ID NO: 477045 - DNA, 122 bp, Homo sapiens
caccaagggtgtctcccagacatcctcttgaatggttgccgtgacatcatttcctgaggtcggaaattgggagctaaacttcaatttgaattcaatttgaatcctgtctctacaattcccaa

SEQ ID NO: 477046 - DNA, 122 bp, Homo sapiens
caggcaggggcgactcacgatcgaggtgcagcagtcaggccgggaagatcctgcatgttgcgctagggactgcgcgcggcgccaagcgacaaccccccagcggccactgccccggcagcagc

SEQ ID NO: 477047 - DNA, 122 bp, Homo sapiens
cgcccgcgcccgaatgcagaggctcctgcgatggccccggagtgagtcccccagaggagccggattagggctggaggcggccgagtcccccgagaggcccctcccgacattcccgcccccgc

SEQ ID NO: 477048 - DNA, 122 bp, Homo sapiens
gttcaactctgtgagttgaatgccatcatcacaaagtagtttctgacaatggttctctctcgtatttatgtgaagatatttcaatttccaccacaggcctcaaagccctccaaacgtccact

SEQ ID NO: 477049 - DNA, 122 bp, Homo sapiens
caaggagcgccagcgccaggactggaagaagcacaagctcgtgtgccagggcagcgagggcgccctcggccacggagggggccctcaccaggactccggccccgcgccgcccgctgcagcgc

SEQ ID NO: 477050 - DNA, 122 bp, Homo sapiens
cagaagggactaaaacaaagtataaatctccctgggctgcaagcatcgggagggcaggtccgggggctctgtgtccccactgggcccccagcactgcgcagcgcacacagtgggcgctcacc

SEQ ID NO: 477051 - DNA, 122 bp, Homo sapiens
taaataacgagtaagccaccatttcaaacctgccctgtggaggaaatgccagtttattaacgagtaagtcaccgtttcaaacctgccctgtggaggaaatgccagtttagtaacgagtaagt

SEQ ID NO: 477052 - DNA, 122 bp, Homo sapiens
gatttgggacaatggcacaaaataagtaaaatcatagcagggaaaaccccagataccaaacgtagactagatcactgttttccttttaacattcttaactgaattcttctaatgatctgttt

SEQ ID NO: 477053 - DNA, 122 bp, Homo sapiens
tgtgccacaacaggtctgacctgcatgtgttggcgctgctgtggcctcctccaggctgcacgccttagaagcaggctacgccttcctgcccttggcctgagaagggcttctccagcacctcg

SEQ ID NO: 477054 - DNA, 122 bp, Homo sapiens
cccccacacccgtgtcatgtgtctgtttataaacatgtccccttccctttccttccccctcggccacccgcctccctctcaaccttgtaaattccccttcccaaccccgaggggcttgcagg

SEQ ID NO: 477055 - DNA, 122 bp, Homo sapiens
aaatgagggctgcggctatctccaaggtccctgggaaactcagctgctggacaatggtgccgcccaccctaggccatgctctcagctgctgcaaaggctcaatcaggtctgctacagctccg

SEQ ID NO: 477056 - DNA, 122 bp, Homo sapiens
tcctacctttccagttccatctcacttctgtttcttacatgtagatgtttcccaggattccggctccatataacgttttcccagccataactaactactacactgaacatccaacagcttta

SEQ ID NO: 477057 - DNA, 122 bp, Homo sapiens
cagcgaccggcgcaggtgagcacgacaggacacctgagccgctcggggtaggcggggaagcgcgcaaggcagaggggaactcggcttaccgtcctcggggtctgattggacagatctcggga

SEQ ID NO: 477058 - DNA, 122 bp, Homo sapiens
tccatttcatcaaaatcggggaacaaattcagaaaaggtgcagctggttttctccctacacgtgccctaaaactcgggggctggatccacttttcatagctgtttaataagaactccgggca

SEQ ID NO: 477059 - DNA, 122 bp, Homo sapiens
tgcccccttccagcggggagctgggtgaggcctcccacgcagggtcccgctcaccagggccgactcggtgctccctccgctcgcacaatgtggggagctgttctaggtgttggtgtggcgtg

SEQ ID NO: 477060 - DNA, 122 bp, Homo sapiens
tttcccatcaggccccacctctaacattagggatcaaatttcaatatgcagtttgggggacgaacgtccaaagtatagcaatcagccttttaaaacttacccttttcattttgagataattg

SEQ ID NO: 477061 - DNA, 122 bp, Homo sapiens
tccaacatgctgtgttgagacgcctcttctgggttaaaacaaaatgaaaacagtcacagacgaggcaggggaaagtgctggcaaagcgtgggctcctcgcagacagctccaggtcctccggc

SEQ ID NO: 477062 - DNA, 122 bp, Homo sapiens
cccactgccctttccccgctgcacagcttgcgagtggagatttagagcccgggaatgaggcgccgtgtccttaggaatctcgcgcccggggagcgctgagggaccggggagccgggtgggga

SEQ ID NO: 477063 - DNA, 122 bp, Homo sapiens
cagtcctggatcagggccggagctgtcacttcttcctcttcttgttgtccgggggcgcctcgttcttcttgcccagaatctttagaaggctcttggacatgtagtagggccggtccagggag

SEQ ID NO: 477064 - DNA, 122 bp, Homo sapiens
aagcgggaaaggagtgacccgtatgcttccgaagcacgcgaccgtgattttggatggaggcgggcgggcagggactgactttgcctagctgctgccggttcctgtaaaggactattttttct

SEQ ID NO: 477065 - DNA, 122 bp, Homo sapiens
gtgggctctcccctcccctcccccggcttcacctcccctcctcccggccggcccggcccccgcctggcccattgcagggcagcacccagttgttatcgtggaggcccaggcggcagccggga

SEQ ID NO: 477066 - DNA, 122 bp, Homo sapiens
aaatgtgtagtttagtgagtaatagtgcgccaatcaaactggtttcttagatgtgatcaacgtaacatagtaaaataattaagatgttcacaataggagaaactaggtgaggagacaggaac

SEQ ID NO: 477067 - DNA, 122 bp, Homo sapiens
aataatttacattgggtggctattctggttcaaactagagaatgaatgttaaataataaacgtgatcataattgctttatggaagaacactgctgtgaactcagccataaacatcactctgc

SEQ ID NO: 477068 - DNA, 122 bp, Homo sapiens
gaaataggagaattccttgagcccaggagtttgaggttgctgtgagccgtgatcgcactacggcattccagcctgggcaacagagtgaaaccctgccttaaaaaaaaaaaaaaaaaagttca

SEQ ID NO: 477069 - DNA, 122 bp, Homo sapiens
aatggcaaaggagaagtttttccaaatgggcatatccacaaaccatgacgaatcccatctcggatatgatgtgaagtccaggatataaataacatccagggaagaaagcaccatgagtcttt

SEQ ID NO: 477070 - DNA, 122 bp, Homo sapiens
tcctccctacgcccgctcttgcctccagccccgccatcttggatccgggcaccgttcgggcgcccgccctgccgctaggggtcagcctggcccagccttgtgcatccgagggtggtcccacc

SEQ ID NO: 477071 - DNA, 122 bp, Homo sapiens
cgcccgcatgcgcgggcgcacacgaatgcgggcgcacacgaatgcgggcgcacacgaatgcgggcgcacccttgagtcccctccacaaccgcggtttgatcccagcggtccagtcggccggt

SEQ ID NO: 477072 - DNA, 122 bp, Homo sapiens
aacaaccacctctgttaagaaattaatgtacacatttccaaatctatccctgagtttaggcgatccaggccatgggtcataaactatgagagccacctagtgggaaaatttggtaattgcac

SEQ ID NO: 477073 - DNA, 122 bp, Homo sapiens
ttccctcttttcctaaaaaggatgactgctacgaagttctcccccctggaccccctcttccgctgcaccccaccggcgcaccccgcctccgggctgcgcaccctttctcctcctcctggtcc

SEQ ID NO: 477074 - DNA, 122 bp, Homo sapiens
gctagtgctgagatcataaccactgtcaacaggcactcaaagagaaggaagaacaaggtgcgcaacaggactcaaggaagatctcccaggaagagggattcgagcctggctaaggagcagga

SEQ ID NO: 477075 - DNA, 122 bp, Homo sapiens
ggtttcccctccctcggcgcagcggggagggagcgtccgctctggtcccggggcaggtgccgcccggctcgtccccacctgcggcgctccccacggctccgcctcccgccccgcgcgccgcc

SEQ ID NO: 477076 - DNA, 122 bp, Homo sapiens
tcggggggcgctcggcacccgcgactgttggcgactttggagacggcgcggtctgcgggacgcggggaccccagactgtgcccggtccccggcccccgcccctgcgccccacttcggggtct

SEQ ID NO: 477077 - DNA, 122 bp, Homo sapiens
tccaggggagcccacggaccggctccgcgctccaggtcggccgccccatgcgccgcgccccgcagtccccagggcctggctggctccacctgctgccagggaagaccctcggccggagagcc

SEQ ID NO: 477078 - DNA, 122 bp, Homo sapiens
gaagcatttcgttcagtggagaaagacacctctctgtactttcagctctccaacttctgacgtttcacttaatctctgagagcctcagttgccaacatctataaatgagaatcatgttattc

SEQ ID NO: 477079 - DNA, 122 bp, Homo sapiens
gcaatttggttaatgtttctctctctctctctgccttgtgtgtacacagctccttctggccggcagcaggaagagtggccctgtgtgtgccaggccctgcagtctctcctctcagctggtgt

SEQ ID NO: 477080 - DNA, 122 bp, Homo sapiens
attgaccttggcagccctgatgaggcgagattttcacaaagtactggtgaagaatttttccggtgataaaaggcaaggatcaatgctttttaccccagcatggcaattgaccttaaaaacaa

SEQ ID NO: 477081 - DNA, 122 bp, Homo sapiens
tagttatggttacctccttctacaggagctccagatgaaagactctgcctcttacttctgcgctgtgagagacacagtgactatgaggcctccttaactgtgccaaaattcaaaagacaatc

SEQ ID NO: 477082 - DNA, 122 bp, Homo sapiens
ggaggacggagaacgacggtcagggctttaagtacctttgcccacgtcagctcctggtcacgtgagggctgcatcgccagtaagcttgggtccccaatttccactcccaccaagagtacgag

SEQ ID NO: 477083 - DNA, 122 bp, Homo sapiens
gctagaaggctattgcctctttgagggaaagggttttgtcttgaccatctaagcaaagaccgtagcagatagtagatgctcagtaatttacaggaaagaaggaaggaaggagaaaaagaggg

SEQ ID NO: 477084 - DNA, 122 bp, Homo sapiens
cccatctgccctaagaacaaagagcttgtaaaccaataaattgggtggaggccgagagctcggggccgtcagcaagcctccagctccggtcccctggacccgccttttagactcttattctg

SEQ ID NO: 477085 - DNA, 122 bp, Homo sapiens
atcaatgttttaagaaggctaattaacatccgatgaaggtcaattttcaaattcaagtttcgttgtttagtttcccagaaagaggtgttaagcttcagctgagagattcagcttccacaaag

SEQ ID NO: 477086 - DNA, 122 bp, Homo sapiens
ccgaccgaaccgcgggcggcgcggacggcgtcgcgcgagggacaaggtgcgcgaggcgcacgcatcttcacctccactgtcgggagttgacctgctcctcccgcgtggttacccgtcgctgt

SEQ ID NO: 477087 - DNA, 122 bp, Homo sapiens
tttagtttaacgatttttttctagtgccgaggtctccctccctcagaacgcacagcagcccgcagggagggctcagccccattcttggttaggtttggctttcgctggaggtgccgcaagtt

SEQ ID NO: 477088 - DNA, 122 bp, Homo sapiens
agataaataaataaccatagatccacgcgcaaccgagtactgtttagaaatgaaaaggagcggtcgcctggtgcacaggacagtgggaacaaatctcagaaacgcacgccaggtggaagaca

SEQ ID NO: 477089 - DNA, 122 bp, Homo sapiens
agagacaagatccggctcaataatgccatctggcgggcctggtacatgcagtgtaagtgccgcccagcctgggcgccggtggtggtcagaacttcacggcctggaggcctgggcacccaggg

SEQ ID NO: 477090 - DNA, 122 bp, Homo sapiens
gcggccacccaggagggttgaggaggagcgcgaggaagtggcgctctgggcacggggtggcggcgctcaccagtggtgcagcacgtcattgatcaggtagatgaggtgcagccgcagctcga

SEQ ID NO: 477091 - DNA, 122 bp, Homo sapiens
atagcattgagacttgtgtagatgcttctcagaacatgaaatcaaattggaaatctgtaacgcagcttccgtaagcatgtgtgggcaaaaaagcaataatcctactcctcaaaatagaaagt

SEQ ID NO: 477092 - DNA, 122 bp, Homo sapiens
gccactttccctaaaatggggtctttccctgtttggtgccatgaagccaatatgcaaaaccgaaagtgagcctcaagcagtgcaggctttatttggtggccatggaattgagaagtgagagc

SEQ ID NO: 477093 - DNA, 122 bp, Homo sapiens
tggttctggttgtattttaaatgaaatctcatcccagcgtagacaccacgtctggaattacgatccaccctgtgatctgtcacttttatatacacacaggggaggggaccgtttccatagag

SEQ ID NO: 477094 - DNA, 122 bp, Homo sapiens
tgcgtgtccccccacgtgctccccagcgcgcgcagcaccccgcctctgcgcttccccgagcgtgcagcttccggtgagggcagccccacgcacagcccccaacaccctccccagcgcctgca

SEQ ID NO: 477095 - DNA, 122 bp, Homo sapiens
tagaatagacacggggtccccagtgctccacaatgcacgcatgtcctggcctcaccgccacgcgtttgttcctgcttccacaccaaaagaatgcatcagcggggctcagaacgggacagtga

SEQ ID NO: 477096 - DNA, 122 bp, Homo sapiens
ataaggaaagggctagggacagtttgacactcggtccgctgagcaactctaaactcaaaccggagtccacagaactctgtaccctcagactcagctgcccatggtatgtctctctactagag

SEQ ID NO: 477097 - DNA, 122 bp, Homo sapiens
ttttttttttccatcataattcagtctcttcttattctacagtgtgcactttatgcctctcgccttttgataatagttgttcagtgaaggaagtcagctgccagaatattaagaagggtctc

SEQ ID NO: 477098 - DNA, 122 bp, Homo sapiens
cctcaccctttggaagacataccagttcccactcaggaaggctgagaggtgaacgactaacgactttctaaccgcccagagtagaagggggcaggtccacactctgagagactcagccatga

SEQ ID NO: 477099 - DNA, 122 bp, Homo sapiens
cgcccgcgcgcgcgcgggaagagtcccagggtcattaacggaccatgggctgctgggaaacggcttaggagcagcacccggctggcgctggccggccggcgccggggactttcttccgcctg

SEQ ID NO: 477100 - DNA, 122 bp, Homo sapiens
cggttccaggcccccggggtcttcccaccagactgaggctgggcagacgggaggggcctgcgcgtggctgtgaccccgccagggcaaccccagagattcccgccgccttcaggcccctgtca

SEQ ID NO: 477101 - DNA, 122 bp, Homo sapiens
gtatagcaaaaatttttttttaatttttttagtatttattgatcattcttgggtgtttctcggagatgtatagcaaaattaaaagttaactagtgtttctttaaaaagtctctctgaatcac

SEQ ID NO: 477102 - DNA, 122 bp, Homo sapiens
ccactcctgctggacaccgagtcctccaacaagcaacttgcttcgtggagggtagttccccgcagtgctgtctgtggctctttctacccagtctctccttctacagatgccagacccacacc

SEQ ID NO: 477103 - DNA, 122 bp, Homo sapiens
tcacttaacaagatttcacactaggaaaagtgtttaaattcacagcacttgcactctatccgtgctgcacttaaatctcaattttccaatcatatcacaatttctatttcttacttatttaa

SEQ ID NO: 477104 - DNA, 122 bp, Homo sapiens
aggcaggccccagcccagcagggccatggcagagctgcagtgcttatgacctctaatgcacgcctcctggggggtctctggtgaggcctttctaagtccagcaactcagggctgctccagct

SEQ ID NO: 477105 - DNA, 122 bp, Homo sapiens
cactcaccatggctgcaggcaggtgatgggccatgggatgagtgggacccgagctggggccgctgccttcaggaagtgactgtggcttctgctccacggtcagcacacagggtgggggctgc

SEQ ID NO: 477106 - DNA, 122 bp, Homo sapiens
caagtgttgtttggacaaaaatgtatgagctaaccaaaactgaatttccagggctgggcgcggtggctcatgcatgtaatcccagcactttgggaagccaaggcaggtggatcacttgaggt

SEQ ID NO: 477107 - DNA, 122 bp, Homo sapiens
agcctgggcgacacagcacgactcttttaaaaacaggttttgttgagtgccgcattgatccggtccctcccacgccccctgtgcttcacaaaaacgtcaggtccgagctccggcgcggcggt

SEQ ID NO: 477108 - DNA, 122 bp, Homo sapiens
tctctgaacacagcgagactttaagtatgggctgtgggcgcctcgggtctcttaaggactcggcctcccaacaaaaatgaactaggagcaaagctgtcagcgagaaccgcaaatgccgaccc

SEQ ID NO: 477109 - DNA, 122 bp, Homo sapiens
tcccagttagagatcctggcgtgtttctagagccagctgaaaacactgtgaatcctggcgcgttcggtgatctctcttcccagagagaaagtggcagtggacttccatcagatgatcgcttg

SEQ ID NO: 477110 - DNA, 122 bp, Homo sapiens
tcacttagctcaggagtccactgtgaacctagacagaatttgctagattgcttgcaggggcgggttcaaagattctggtccagccaacaattattaaatacttgctacttgccaatgattat

SEQ ID NO: 477111 - DNA, 122 bp, Homo sapiens
attcagaaatatctataaatgtgacacaatgtttcctctgctccccccaacccccacccccgagttataattaaacacagatcctaggaccatagaggtaatgaagaatggacagtgaatgt

SEQ ID NO: 477112 - DNA, 122 bp, Homo sapiens
caaacttctggcctcatgtaatccacctgcctcggcctcccaaagtgctaggattataggcgtgagccaccacacctggcccacatatggcttttctatcaagcacagcagatgccacttca

SEQ ID NO: 477113 - DNA, 122 bp, Homo sapiens
tacagcaaagtctcagcacctgtaaacttgcaacactgagacaaatgaaacccctcgcgccggcatccgctggcgcacaagctcctgcggcccccgtcgcttgctctggaactcctagctct

SEQ ID NO: 477114 - DNA, 122 bp, Homo sapiens
cggtaaacagctgcttaaagagtgcggggactgctgcagggacttcctttttccactaggcggcaccacagccaaagtgataagaagtcaagcgtggggcgggtggctggagattgtctctt

SEQ ID NO: 477115 - DNA, 122 bp, Homo sapiens
ggcggtcccgcctggttccagcgagccgcttccggcacggtagctcgagaaatgagcaagcggccactaagactatggtagctaggagttccaggactcagtttcccctttgagcctccttt

SEQ ID NO: 477116 - DNA, 122 bp, Homo sapiens
gacggcggagcggcggaagaacagagtgcgagagctggcagcggcgactgagaccgaccgcggcctcccccgccgttatttaagcggaagcggcgcgcccgcgcggcccggcggcgcgcgcg

SEQ ID NO: 477117 - DNA, 122 bp, Homo sapiens
aacaacatgagagccaacataatatactatcatataattgcagatatgtattgcaatatacgtaactgcagaatccactttacagcatcagaggttcagcagtgaccatgggatccactgga

SEQ ID NO: 477118 - DNA, 122 bp, Homo sapiens
ctacccccaccgacccgcgaagcaccctcacagctcacggccctccctccaggccggaaacgtctccgcccgcttccgcttcccgatgcagccgccactgcccgaagcaaagatggcgccaa

SEQ ID NO: 477119 - DNA, 122 bp, Homo sapiens
ttgacatcccctgtggggcgttagagatccagatttcaaagcaagatttttttctagcagcggttgaaggccaggcccctgccagctcctgggctcccatgttagcattttcagttaattaa

SEQ ID NO: 477120 - DNA, 122 bp, Homo sapiens
gtcttcaggggcctggggaggggtctgccggttcaggctcggcgaagaaggtccgggatccgcacctggaaggagagggccgaggggcctgattacagcccgagatacccgagaggcctctg

SEQ ID NO: 477121 - DNA, 122 bp, Homo sapiens
aacctatagatttacgcaaacgccctcactccgagagacacgtttccttttgagttcttacgtgattctaatgaatgagcgaggttaccaatgattgcccaactgccctgctatgtagcagg

SEQ ID NO: 477122 - DNA, 122 bp, Homo sapiens
cacatacaaccattaccaatataataatattaaatgattacttaacagacatcctaataacgcaaacaccttttattcacatttgctgagtagcaattacagtgttttcttcattagttttc

SEQ ID NO: 477123 - DNA, 122 bp, Homo sapiens
cacctgcggaaggacactcgggctgcttccagtttggggtgactgtgactaaagctgctccgaacactcttgtggggttttgtgtgagcatcggtgcttctctcccataagtaaacacctca

SEQ ID NO: 477124 - DNA, 122 bp, Homo sapiens
gcagcagatcctcaacttcatctatacgtccaagctgctggtcaacgcggccaacgtccacgaggtgctcagcgccgcctcattgctgcagatggctgacatcgctgcgtcctgccaagagc

SEQ ID NO: 477125 - DNA, 122 bp, Homo sapiens
cctaaagcctggatggcagtcctgccctctttcccatgaaagagggcttgagagggggaacgaagacagagctcctgcaaggggaggccgagtgccttcatctcccagttcacccctgccag

SEQ ID NO: 477126 - DNA, 122 bp, Homo sapiens
gaatgaggaaaagagggaaggcagggctacgctgggaaagctctttgtcccctatccacgcgcacaaaacagttgtcacaactgacgtcaccaggggcggagcctttggacggaagtgacgc

SEQ ID NO: 477127 - DNA, 122 bp, Homo sapiens
tatgaggaatttggggctcagttgaaaagcctaaactgcctctcgggaggttgggcgcggcgaactactttcagcggcgcacggagacggcgtctacgtgaggggtgataagtgacgcaaca

SEQ ID NO: 477128 - DNA, 122 bp, Homo sapiens
ggtgaataaaactcgggccagagccggagaaccccatcgtggtgatcaaattgtttgggccgtttttcttctccctcccacggtgctggagagggaggcttccccggggtgtgcattggcca

SEQ ID NO: 477129 - DNA, 122 bp, Homo sapiens
gcgcctgtgaatcgcgcccaccggagggtctcacagcgaaatacaaaagcagctgggaagcggcggggactcgagttcccagcgccgggcggagcgccggacagagccccgcagcgccccgc

SEQ ID NO: 477130 - DNA, 122 bp, Homo sapiens
aaagaatctggcaggaggtctggatggttactaatcagttatcacccttccattacatctcgttgcaccaagtggttgtcacaaatttgtctccttttgtgttttcccctctaacttatcag

SEQ ID NO: 477131 - DNA, 122 bp, Homo sapiens
gagaagtggcacacacaagcggatgcggctccccatgcagctcagccggggctcagcacacgtgccccacatgggcagagggcagagccagtgactcaagtactcctgacatgcacagaccc

SEQ ID NO: 477132 - DNA, 122 bp, Homo sapiens
ttgcatctactcgcaatggtcagtcgtaaccatgtgaatgaagcgattcacagaggcacacggggatcaattatagcaaaatggccgaggtgaacatcaccctaatccattaaactgctcca

SEQ ID NO: 477133 - DNA, 122 bp, Homo sapiens
ggtctggggccttttcaacaccccctgtggccggggacagctggggcagaaaccggcaggcggcagaagcctcaagcagctctgacctctggcacctccccaagacccagagcacaacatct

SEQ ID NO: 477134 - DNA, 122 bp, Homo sapiens
ggcaaaacacttagaccggaacgagcgaggccagaggagacaacaactcccagcaggcgtcgcggcagcgggaagtcacgcacgcgcaacccaggccacaggagtaaaatctctctgcccgt

SEQ ID NO: 477135 - DNA, 122 bp, Homo sapiens
cctgtctgtctcggacagaaaacacgaggctccttgtgtcaagcttcctgtgatggaaagcgacctctccaaccaccacactccccgccgtacagttctccagaatcccaggcgatgacaag

SEQ ID NO: 477136 - DNA, 122 bp, Homo sapiens
tggaggaggcgggacgggggcagggccgggaacctgggcaagccaataaaggctgcggcgcgcggctgcgcgggactcggccttctgggcgcgcgcgacgtcagtttgagttctgtgttctc

SEQ ID NO: 477137 - DNA, 122 bp, Homo sapiens
tgtgggtctctgcggcactcttctgcctggtgactgacaccttggaaatgaagtttatgacgtcatcgttgcggctggccaatagaaaaagctcccgcggagaggtgttccttccccttcga

SEQ ID NO: 477138 - DNA, 122 bp, Homo sapiens
atgcacttctaattactattaatgaatttgttcctttgaggttcatactgtcctgttcttcgggaatgatagaagttggaacctcaatggaaatgtggctacagatgtagttttgagatgaa

SEQ ID NO: 477139 - DNA, 122 bp, Homo sapiens
agaggttggaggactagaactccagaagtccctgaacgaagtgggccggatttcccgtgacgcacctggcccaggtgttgcagccccgcccacctccctgccgctttccgccatcctcacac

SEQ ID NO: 477140 - DNA, 122 bp, Homo sapiens
ccgctgaggtcaccactgcaggggctggcccttgcagtaggggcactcaggtgcggtggccgcacacggctcacagaggatgtggtgctgacagggccgcaggacagcaccgtgggcccgct

SEQ ID NO: 477141 - DNA, 122 bp, Homo sapiens
cctcggcctccccctcggccgccagccccggcatggtgtccgcccggcacaggggaggcccggaggtgacccacacagcggaagtattaaggggctttgagctaagaggattgggcggctgc

SEQ ID NO: 477142 - DNA, 122 bp, Homo sapiens
aaggacatgtgtatttagaagcctttgtgtacaaactagctctgtgcgctctcagtttaccgtcctcacactttattgttagctgttctttaagtttctcacacattattggcaattatgta

SEQ ID NO: 477143 - DNA, 122 bp, Homo sapiens
aagatgtgggagtcaggtgaatagttcccatcgccagtaaccccagagcgcctccccctgcgttgtttccttttaatgttagatccgccgcctgggtgcccatacttagctaaggcccctca

SEQ ID NO: 477144 - DNA, 122 bp, Homo sapiens
gtggccatcagtggaggattgaataaagaaaatgtggtacatatacaccatggaattctacgcagccataaaaaggaatgaaatcaggatggtgcggtggctcatgcctgtaattcccacac

SEQ ID NO: 477145 - DNA, 122 bp, Homo sapiens
cgcacctgccaaaactctcctctgagcaagtgcatcctggcagacagaaaggctgagctgcgtgtgtatccagaaagaccagaactaacaggaagtaatgaaaaactgaagccatatttctc

SEQ ID NO: 477146 - DNA, 122 bp, Homo sapiens
aatcctcggccagctctggtccgtctccttccgcgaaacccaatcagcatgctcgctcctcgctcgacccgctagttctccggcccattcctcgagctccaccgccccttacctccctcttc

SEQ ID NO: 477147 - DNA, 122 bp, Homo sapiens
gatctgcggcaggtgggagggagagaccgcggagccacggccccttccctcctagcctggcgctgtctacgggaaccaccttcacacctagtttctgaaaggtggatttggcttcagggatt

SEQ ID NO: 477148 - DNA, 122 bp, Homo sapiens
cctgcttcaagtgcggcaactcgggacactgggccagccggtgccctagccaacagcaaccgtcctgcctgccttacaactgtttcaagtgcggcaatccaggtcattgggcaaagcagtgc

SEQ ID NO: 477149 - DNA, 122 bp, Homo sapiens
cgggcacgcgcaaggaagcgcgcctgccggggtgtggcgaggcggaggcgggacctggcgcgcgccgccgcagtgcgactgcgcacagtctaatccgcggggagagagaattgcgcatgcgc

SEQ ID NO: 477150 - DNA, 122 bp, Homo sapiens
cagagctggagaggccctcgggagttacctggtccagccacagtgggggctccgggtgagcgcctccgcccctggatcctgccagcacctggcagggccaatacagaccagcagccacaggg

SEQ ID NO: 477151 - DNA, 122 bp, Homo sapiens
cggtcgccgtggtcaccacggcttttctcagaggttttaacgcccctagacttcatttcccgacagggactgcgggtctggatattccgtcgtggactacgtttcccactgacgacggagaa

SEQ ID NO: 477152 - DNA, 122 bp, Homo sapiens
ctggtcttgcgggaaaggaggaggcgtcccgccaaggaaccaggcgctcagaagctgaaccggggtcacagagccgcgaagccagacctcagtcgctgcgtgcatttcatccctgctcttgc

SEQ ID NO: 477153 - DNA, 122 bp, Homo sapiens
gggccagctttgcgggccaacttccgggtccttcctcgagagccactgttgctggtggcccgggcaagactgccggcaccctcccctgaggctggcgtgacatcacacactcttctggaaca

SEQ ID NO: 477154 - DNA, 122 bp, Homo sapiens
ttccatgaggacctgctccccgtgttgtgttccgtgaggacctgctccccgtgttgtgttcggtgaggacctgctcccggtgttgtgttccgtgaggacctgctccccgtgttgtgttcggt

SEQ ID NO: 477155 - DNA, 122 bp, Homo sapiens
tgtggccaaggcggacagtactgcagaagtgaggtaagcttgcattttcagacccagaaccgtggcctgcctcagtgccacccacatgggagctgtggttaccagtctgcaggcagctccgg

SEQ ID NO: 477156 - DNA, 122 bp, Homo sapiens
gttgtttaccaggtcgggagtgttgactcagaagacagatgactttcagcacatgcaaaccgagtattgcaaaagctatcttccacccgtgttagtagctcacagttagtctccagcagccc

SEQ ID NO: 477157 - DNA, 122 bp, Homo sapiens
agtcgacctgtgctgtgtaccataggagcctgatcatccagcagcagggctgcagctcctcggagcccgtgcgcctggcttactgccgggggaactgtggggacagctcttccatgtacgtg

SEQ ID NO: 477158 - DNA, 122 bp, Homo sapiens
cgctcctttcaatatgttgcagctgcgaaattgtgttggaaaaattttccactccagtcacgccgcttccccctacacccggaagattggccctcccggaggaactcccacacggggcgggg

SEQ ID NO: 477159 - DNA, 122 bp, Homo sapiens
ccgcgcgcaggacgggggcaacttttcccctccgactcaactcagagcatggggctcttgcgccccaccgcctctcctttccgtgcccccctgtccattcctcccttgtctacccaccccca

SEQ ID NO: 477160 - DNA, 122 bp, Homo sapiens
cacagagaggccagtgccatgagagaagtgccgtcatgcctgggaggatgtgaggatgagcgatatgacaggaatgagtgtggggtcagccccaggccacctaacagccaggccagaggttg

SEQ ID NO: 477161 - DNA, 122 bp, Homo sapiens
aatttcactgcatcaaagaggcctgctatgaactttcttctccttacctttccctcatgtcgttagttattacattctttatgtatttcctttatatcaactcttccaatttataattattt

SEQ ID NO: 477162 - DNA, 122 bp, Homo sapiens
tttttctttcacggttcttgttataatttgaagttacacatttgtttgtctatcccactacgctataaaactccaagaaggcagagccatgcctgttttgttcactgtggtattcccagcac

SEQ ID NO: 477163 - DNA, 122 bp, Homo sapiens
ttgtatgttatgagactctggatcttatttaagtctgttttagtgatcatcctttgacaccgcactagttgagcaaagagggtgctgcctcactgctgtcaggttgggggagaggcccaggt

SEQ ID NO: 477164 - DNA, 122 bp, Homo sapiens
ctgctctgtgcagcctcccctcccccggcccgcagagttgagcacagagggacagaggcacggaacccccagaaatgtccctcctcagaaacaggctccaggccctgcctgccctgtgcctc

SEQ ID NO: 477165 - DNA, 122 bp, Homo sapiens
gagttccgggaaggtggagggggtcgggggctgtcgaggggctcccgagcccccaggccccgggagagcgggcacccctccaccccgcgccgctcccgcccgcgcccagccccgcccccgtc

SEQ ID NO: 477166 - DNA, 122 bp, Homo sapiens
catgtagggtaacttcctgacgttgccacggcatttgtaaactgtcatggcgctggtgggcgtgtaccagtgagggcaaccagaggtcactctcatagccatcttggttttggaggattttg

SEQ ID NO: 477167 - DNA, 122 bp, Homo sapiens
agggaggccgagcagggctgcccgggccgccggcgtgggggtccgagctccggctggctccgcggagcctcagaggcaggtccgagccgccctcacccaggagcccctccgtgcggttctgg

SEQ ID NO: 477168 - DNA, 122 bp, Homo sapiens
cagcaggatacctgggaaacagatggattgaccaacagtcttggtttgttcagtagtgagcgatttcgcaggatgcaggaatttcaatgctaacacagagacagtccactacaaactgggaa

SEQ ID NO: 477169 - DNA, 122 bp, Homo sapiens
ttcactttttaaaattttcttttcactgtaaggtacattttcccaagaaagtaatttgcccgggctggagggcagtgatctcgaactcctggggctcaggtgattctcacacctcaacctcc

SEQ ID NO: 477170 - DNA, 122 bp, Homo sapiens
ggcgctcccagagttttggtcctttggggttctctgagtcctccctcacgtgtagaattgcgtaggtgcctgttgcctgctcctagcacttgttccttgccctgctggggattgggaataaa

SEQ ID NO: 477171 - DNA, 122 bp, Homo sapiens
cctttctcgcgcgccagctcacgcacgcgcgagtgcgcgctgcttccctccccttcccctcgcgggagccgagtgaccaatcccgaggctgcatacaaatgaccacgcagcacgggggcggg

SEQ ID NO: 477172 - DNA, 122 bp, Homo sapiens
ggttgcagcagcctcagaacaggctgtcctgcctgagtcgttcctcgtgatcactgctggcgtttctcctgctggccttcatggcaaggctgatggccagggcacacaggagcaacggcact

SEQ ID NO: 477173 - DNA, 122 bp, Homo sapiens
ctttcctttagaacttgagcatgtgtacgcaggaggcaaacacttggattgattctcaagcgcgcataccctgggaggcacagtattcatggcgtccttgccatgaggtccagtgaggcctt

SEQ ID NO: 477174 - DNA, 122 bp, Homo sapiens
ggttatattaatagggccaaagacaagagctgttgcaagaagcagaagcagtaacaatggcggacacttagcaagagtttacagcagcctggagatgttctgggatcttcatacccaatgag

SEQ ID NO: 477175 - DNA, 122 bp, Homo sapiens
aaagcaaatgttcagtgcatctccctcttcctgtcagagcttatagaggaaggaagaccccgcaatgtggaggcatattgtattacaattacttttaatggcaaaaactgcagttacttttg

SEQ ID NO: 477176 - DNA, 122 bp, Homo sapiens
tgcgtggtgcggctctgagaattgcgacaagtgcatctccccgccgtggctgctacagagcgctgctacagagcgctgccactcccgaaacgccctccgtgctccgcctgctcatccctccc

SEQ ID NO: 477177 - DNA, 122 bp, Homo sapiens
catccctgcttgtgcagtcgccaggcagccaagcgcgtgcgctctgcatttgtcccgccgcggccccgccccacgcacgcgctccgaaccctctagtcccctacgccgtctcgcatgcgctt

SEQ ID NO: 477178 - DNA, 122 bp, Homo sapiens
ttggtgcaagaacaggaattcaggaattaacatttctagtcatttctgcactctgtactccgtcctacttggcttaatgtccctgggttgcttttttgtttgtttgttttttcccatcgtgt

SEQ ID NO: 477179 - DNA, 122 bp, Homo sapiens
aaagacggacctctcctgaggaggaagaaggaattccacctccagatggtcctcgggctccgccacagcatcagctttcctcggggcctccagccacctgggctcctctatcagattccggg

SEQ ID NO: 477180 - DNA, 122 bp, Homo sapiens
aagtatggggcctagcttgcgattatttctgactggtttttgcgtctacactaagttgcgcgtcccatgttttatgttgttgttttttttttccttgctggcatttacaagcttaagtacca

SEQ ID NO: 477181 - DNA, 122 bp, Homo sapiens
acctaaactggcccagtctgggtccagtttagggaggaagaaacaggcattggtgtcaagcgcatgccactttgttttgccttaaacagagcagctctgttaggagggattatcatctgcaa

SEQ ID NO: 477182 - DNA, 122 bp, Homo sapiens
cggctcacctcctcacagatggccccagtgatggtcaccgggaagatgcgcacgatgccacgccccagattctcccgcttccgctgctggctaaaggctcggagctctttcttttcctcctc

SEQ ID NO: 477183 - DNA, 122 bp, Homo sapiens
ggcgggcgggaggctagctgttgtcgtggttgctcggaggcacgtgtgcagtcccggaagcggcgaggggaaactgctccgcgcgcgccgcgggaggaggaaccgcccggtcctttagggtc

SEQ ID NO: 477184 - DNA, 122 bp, Homo sapiens
ggcagggccaaagcccatccttcaagggctggagtcagttaggtaacaggccacgggccccgggctcaggccactgcacggacccagggaacgggctgacagtccagcagaggcctcagcga

SEQ ID NO: 477185 - DNA, 122 bp, Homo sapiens
agggtgggtttggggccgggggcgggtctgggggcggacccggaggcggggctgtctctgcggcagggcccagcttcgctccccccggtctgtctctgtctctcctcctccctcctcctgct

SEQ ID NO: 477186 - DNA, 122 bp, Homo sapiens
acctgcccgccgtcttggcccccggcaaggagttcctgcagctgccgtccatcgagatcacgccctccagcgacgaggacaccccgtggtccaactgctccacacccagcgcgtccccgcgc

SEQ ID NO: 477187 - DNA, 122 bp, Homo sapiens
agcaagggttaggatggcagtaaagcttcccaatatgaagcaagtataccaacataaaaacgagaaaagacagtcccaaaaggcagggaatgggggtccagattagggctcactcacccagg

SEQ ID NO: 477188 - DNA, 122 bp, Homo sapiens
ttgtggagtttgctacagccctccccttccctcactggaccaatctgagggagcttcaagcgcgcgtttctagtcttaggccctggaattcttccgctaggccctgtgtctaaaggtagagg

SEQ ID NO: 477189 - DNA, 122 bp, Homo sapiens
cctccgccatcgcggcggcgctggctggggaggcggtgctcggggccgggccggagcggccgcagctccctctagtgcctcccgccgtactgcttggagtcggagcccgggcgctacgcccc

SEQ ID NO: 477190 - DNA, 122 bp, Homo sapiens
ccaggcttactgtctctgggtcttgcttacgtggatgtcatttttccagttgcaccaaatcgaaagaggttaattggtttgttggagttcctttgtaggtgaagggcagagccaggagcttg

SEQ ID NO: 477191 - DNA, 122 bp, Homo sapiens
ggggaagggctggttccggatctaaaccactggggcgctggagctggggctggtgggaggcgggtttccctcagctggctgttggggaggggcgggccgcggcgagtgggtgccctctcgct

SEQ ID NO: 477192 - DNA, 122 bp, Homo sapiens
gcgtttgtcttgaggccgtgttgaataccctttgccaactgtaaattcggcgtgtgtgcccgaaactgctagccctgaccaggggctcggcagcacatggccaggcacacaccgaactcctc

SEQ ID NO: 477193 - DNA, 122 bp, Homo sapiens
tgagcgatctagagaagcataactgatgtcccaccacagacctcaggctgctgggggcagcgtctgcgcctggggatggcgtccccagacgccgacttcaaccctgtcgcgctcctttaggt

SEQ ID NO: 477194 - DNA, 122 bp, Homo sapiens
agatgctaactctagtttccccaaagctgtcttttgcctgctggctttggtcctattccacgtgactgtggagtgcctcaaactcaagacagcaaatgggaaaggaacaggatctggctcct

SEQ ID NO: 477195 - DNA, 122 bp, Homo sapiens
ctggggagggggcctcagaagatcttgaagcccttcaggagagtcagggtaggcgccttgcgcttgctctgggcccgggatgacttcacggtgaccagcttggcctgggccacagtgggcat

SEQ ID NO: 477196 - DNA, 122 bp, Homo sapiens
ccctggctatgccaagaaactcggactgcagcagtgtgtggatcctgaatgagaaaggtgcgaatcagacagaagctcgcagcctaaggccagcgaaggccacggccacagcgacatctaaa

SEQ ID NO: 477197 - DNA, 122 bp, Homo sapiens
gggtgaacacgcgaagctgggcggtccgtgtctgcttcatccagactcccccagagtttgcgtgttagcacgtgtgccccagtatgcccctttcttccctcggcaccctccctctgcatgtg

SEQ ID NO: 477198 - DNA, 122 bp, Homo sapiens
acagattctggtgtccagttgggttatgtcatcagaaattaacatacactctctttcctacgttctctgaaagggggttggaagcccaaatcattggacccaggcttgtagagcaacatgtc

SEQ ID NO: 477199 - DNA, 122 bp, Homo sapiens
tggaaccagccactgcattccacatctgtctcgtctgggaacgcctgcgcggcggtgccccgagatacgggtgggaaacaagatctggaaatgtctgcaatggaaagccggggcccgcgggg

SEQ ID NO: 477200 - DNA, 122 bp, Homo sapiens
gttacctgggctgtggctgagccctggggctcaccggctgtatggccctgggcaagtcctcggagccttaggttctctgcaaaatggagatgatgtttaatagaaaatgtttctataacttt

SEQ ID NO: 477201 - DNA, 122 bp, Homo sapiens
gtccctcgcgctgccctggcttcccggtccgcgggcgactcgcgctgctcccgggtttgtcgggaccccaggagggcgctcaagcctgtcggcccctacttgtgtgtagagaataggcccgg

SEQ ID NO: 477202 - DNA, 122 bp, Homo sapiens
gcctacctctcctccctgtcctccaacaactgccctcccaagccccacaatgcaactcgccggaactatgctcagttcttggggtgctccaagctgtcctccacttagccaagctccccacc

SEQ ID NO: 477203 - DNA, 122 bp, Homo sapiens
tgtcaactcaagttaggtttttagcttctgacagttttcccaagcatagccatcatcacccgaggtaaagcattagtggaatctctgtctggtgccatcactggaaatcttgtcctaagcct

SEQ ID NO: 477204 - DNA, 122 bp, Homo sapiens
gtgtaggccacggaccgctgtttcctttctccttggtaggggggttgtcccgaacttcctcgccccgctccgccccgccccgcgcggctcgggcctgcgcaggcgccgtcccctccgcgggg

SEQ ID NO: 477205 - DNA, 122 bp, Homo sapiens
gacctgcgagccccaccgctaggggccgcttaggtgcagcccccaggtgggcggggactgcgtttcggggcgtggcctccgccgcggcagcccccgcccaagctcctcctaagcgcctgggg

SEQ ID NO: 477206 - DNA, 122 bp, Homo sapiens
gcagtgggtcaggcagaaaggttttgtagctgaacagcatgcaagacattgaaaaaatatcgtatgtatgatttttttaggtaacctgtgtaaaagtggtgacatatgtctctgcctggtta

SEQ ID NO: 477207 - DNA, 122 bp, Homo sapiens
cgctccggagccggcgggctgatcgagtggctgggctgggccccagggagcggcgaaccccgccccgccattgccccgccccacgccacacccacctcggctcggtcccgcctctccccgcg

SEQ ID NO: 477208 - DNA, 122 bp, Homo sapiens
gtgctccttgcagcggccggtagaggcaaaagagccacagcgggcacaggagcccgtggtcggcacagccttggccattcccaacagagctgaggacgagggtggtggtccacgcccacgtg

SEQ ID NO: 477209 - DNA, 122 bp, Homo sapiens
gagggtggtgccaccagccctgccactcgcagtcctgacgggcaggggctgcggaccgcccggccttggacccatccggagccacaggttggaggagataagtagctgtccccgtgctcatc

SEQ ID NO: 477210 - DNA, 122 bp, Homo sapiens
taacgccacccgcccccgccgctcacgatggcgccaggcatagagggggatgggaccaggcggtggctgaccctcagacagtgctggttctttacgaatcagtctgcagactccagggctac

SEQ ID NO: 477211 - DNA, 122 bp, Homo sapiens
aagaaagctcaaggaggggacccaaggtctgggcccacctggcctacctggctcagggggcgggggctgtaaaccggaaccggtggaggagggggcgctcatcaggaaaggcagcccccact

SEQ ID NO: 477212 - DNA, 122 bp, Homo sapiens
ccacacagacctgaagtccctggacctgagctacaaccagctgaatgaccaagcaggtaacgcctgcgcagggcaccatggccatgaaagctcagcttcctggggcagggatgggtgggggt

SEQ ID NO: 477213 - DNA, 122 bp, Homo sapiens
acggagacgcaggagaagaacaccctgccgaccaaagagagtgagtgtgcctcggtctcccgcgccccagcccagcccctcaccctgctcttccttgcaaacccactcctccaccccccacc

SEQ ID NO: 477214 - DNA, 122 bp, Homo sapiens
cgcccccgcccccgccaccgctgccgccgtcgccgctgccaccgggctataaaaaccggccgagcccctaaaggtgcggatgcttattatagatcgacgcgacaccagcgcccggtgccagg

SEQ ID NO: 477215 - DNA, 122 bp, Homo sapiens
agggcgggaagagggactggctctcagtccctgcctcgcggggggtgcctccgcccccagcgatggggtcctaagagcaaaggtgggaagaggggctcgctctcagtccccgcgtcgcgagg

SEQ ID NO: 477216 - DNA, 122 bp, Homo sapiens
tcctgtcttctctctcctgggttgacctccacagatcctctcagaagagcgttttccaggcgtgaatctccgcagagtggagataaaggctgaggccccaacgcacgcgcactcacgcgagt

SEQ ID NO: 477217 - DNA, 122 bp, Homo sapiens
ggagggcctgggatgagggcctggaggcagaggccagagcccgtgcgaaggcgctgagttcggcaggagacagactgagtgtgggagggacgcagagggcgcagagggtggggccgggcctc

SEQ ID NO: 477218 - DNA, 122 bp, Homo sapiens
cgcccgggcctccacccgcgcctgcacaggctgccccagacctgaagctcccggagagggcgcgctgccagtcccagcccttaggtcggcagcttcctccgttaggggaattccatctcttg

SEQ ID NO: 477219 - DNA, 122 bp, Homo sapiens
tttcatcccagcctcgctgactcccgcttccgtggtagcaggcagtctgtgtgccacatgcgtgtcgtctctgcatgagtgtttgctggagcgtttgtcgtctgtgtgagtcgtccctttgt

SEQ ID NO: 477220 - DNA, 122 bp, Homo sapiens
cccacctcaacttcccaaagcaatgggatttcaggcatgagccactgtgcctggcagatacgctgaattgaggttttcttacacgctcatcatcccttattctgaaaattccaggggcccca

SEQ ID NO: 477221 - DNA, 122 bp, Homo sapiens
aaatcggacaacagaccacagtgaataaaagaattcttttatggaagcagcgggtgttttcgtcattctctaacctaccagaaggtggtgcaaattcactgctgatacagtaaaggaggacg

SEQ ID NO: 477222 - DNA, 122 bp, Homo sapiens
acagccaagcaggccggggtttagggggctcagaatgaagaggtctgatttggccagcgccggcaaagctcacccttaggcgaggtcacaacagaggcaggtccttcctgcccagcctgccg

SEQ ID NO: 477223 - DNA, 122 bp, Homo sapiens
aaggacccgacgcaggttgggagaagtgaaactcaggggagtggagaatccccaacgcggcgcctccccaatgcagacacggcccttggagcctgagaccctgagagccccgcccgggacct

SEQ ID NO: 477224 - DNA, 122 bp, Homo sapiens
caggctgggccccggcgcagtggcctagcctggaccgcaaggccgaagccgcctccgggccgcgtcccggtgtttcgggttgtgtaaccttggccaaaatgcttaagcttttttcctggctg

SEQ ID NO: 477225 - DNA, 122 bp, Homo sapiens
tgcaagtcttctccggtgctcccttccggagggtgaggacaagctggctactgatctgcccgtccctatccctcctcccagggagctggcactgactctagcacctgcccttaaacatttct

SEQ ID NO: 477226 - DNA, 122 bp, Homo sapiens
aaaaaaaaaacaacccacaaaaccaaaatgctattaatcctgccacaatatttttaattacgtacaaagatctgacatgtcacccagggacccatttcacccactgctctgtttggccgcca

SEQ ID NO: 477227 - DNA, 122 bp, Homo sapiens
ttttttctttttttttgagacagggtctcactctgtcacctaggctggtgtgcagtggtgcgatcatagctcgctgcagcattgacctcctgttgctcaagcaatcctcccacctcagcctc

SEQ ID NO: 477228 - DNA, 122 bp, Homo sapiens
aggcaagcagccttttcctcacagacaccccttctgttgaagaccaggtgatagcggggacgggaggcacggacccctcaagtctgctcatcatttgcattgttgtgcatgaatttgcgtgg

SEQ ID NO: 477229 - DNA, 122 bp, Homo sapiens
ctctccccaaactccgatgtggggctcaggtgacccttgccgcccccaacccgctccacacggcccctctggcctctgctccccactctacgcccagggccggtctccagagcggctccgag

SEQ ID NO: 477230 - DNA, 122 bp, Homo sapiens
caaagggatgcctcacagatccctgagaaagatccccaggctgtaaaacccagcaagaggcggagagatttacatgtcaaagggtcagaggaaacattcaccaatggaagttggctaaagta

SEQ ID NO: 477231 - DNA, 122 bp, Homo sapiens
cctggactttaacccccgtgtttgtggaagcagtgactatgatgatgataggagagctggcgccctcacgcgcttgtcacctgctgcgggcatcagtgagcgcttgctgccgcctctgagat

SEQ ID NO: 477232 - DNA, 122 bp, Homo sapiens
catggcaatattgttcctttagcagagaagccactttatcttcttttgtaacacacagaacgaaggactacatgtttaaaaggcagttggaggactaacaagcttccactgcactgtgagcc

SEQ ID NO: 477233 - DNA, 122 bp, Homo sapiens
acggcgctatacatgatggccattatccggtcctgaatcatggaggtggctgaagcaggacgaatatatgtgaagcccacaggtccatagaaaagacataccaccataaaatgggaggcaca

SEQ ID NO: 477234 - DNA, 122 bp, Homo sapiens
gttaccgagtttcctgatgagccctgccaggaccatctcgtcccgtcaatctgcagccgccggagaattaaactgccgcgccactgcgtccagccacaattaatgtacccccggaaacacgt

SEQ ID NO: 477235 - DNA, 122 bp, Homo sapiens
gagatgagccgggaagtacacggacagggagtgtggggcgcggccagggaggttccgcgacgccctcccctgactctcactccagctaccagggtgagggtgaatcaccccgattttagctt

SEQ ID NO: 477236 - DNA, 122 bp, Homo sapiens
taagtgttgtttatcaagagaaactatttcttagcccacatattcccatttcttagttcacgaacacaggtcagtgacaagcacctgaggtttcttcaaagcactggaagccattgtttatg

SEQ ID NO: 477237 - DNA, 122 bp, Homo sapiens
cagccgacttgagggtggaacccggcggcggaggcctctaaagcctgaccgaggcggggccgccggatcccgctgccccttgaccggaagcgggagcccagcctcggccaggaagagatgat

SEQ ID NO: 477238 - DNA, 122 bp, Homo sapiens
aaagctcaaatatttgctcatatgactcaggcccttgcctgcctaccaggaacctggccacgaactagagtggccagataggtctttcaggcccagagtgctggcctgccccatgggctccc

SEQ ID NO: 477239 - DNA, 122 bp, Homo sapiens
aaacgcagagaacagacttgccaccggtgaaaaccacaaagctgaaatggaggccctgcccggaacgcagaggccaccgccactgtgcgtctcactccctgcaatggacggcggcccccctc

SEQ ID NO: 477240 - DNA, 122 bp, Homo sapiens
acagccaatatcatactgaatgggcaaaaactggacgcattccatttgaaaaccagcacacgacaaggataccctttctcacaactcctattcaacatggtattggaagttctggctggggc

SEQ ID NO: 477241 - DNA, 122 bp, Homo sapiens
tcgcatccgctccggtccggggagaagtgtttaaagttcggatcccgcagccatggcccccgcggcgtcctggggagggggcaccggggcgaggggcggggtggggggagatgcccggagcc

SEQ ID NO: 477242 - DNA, 122 bp, Homo sapiens
aaagaggtgacattttagctaagtactgaataatgagaaaactccagccatgtaaagatccgagtaaagagtggtccaaacaatgggaacaacaaaagaaaatgttcagagacaggaatgaa

SEQ ID NO: 477243 - DNA, 122 bp, Homo sapiens
gcctcctctctccaagtcaccatggcctaatccaccctgtcctttccgtaaccccccctccgaattttgccgtaggccctgagaccttttcctgttagaagcccacctgatgactattctca

SEQ ID NO: 477244 - DNA, 122 bp, Homo sapiens
tcgttgctcttatcggttcccatcccagttgttgatcttatgcaagacgctgcacgaccccgcgcccgcttgtcgccacggcacttgaggcagccggagatactctgagttactcggagccc

SEQ ID NO: 477245 - DNA, 122 bp, Homo sapiens
gcgcgcgcacactcgcacaccgcacctcagcgcctgcccggcctcgcccccacccgcgagcgccgaacctcctggggccggatgccatgggtaacaacttctccagtatcccctcgctgccc

SEQ ID NO: 477246 - DNA, 122 bp, Homo sapiens
gagggcaggtttccagcaagttccaccagcacagcaccacagcaagtattctacctgcctcgagccatggttgtgccctccctacaaggtctgaatttcatccctgggaagtagggagcctc

SEQ ID NO: 477247 - DNA, 122 bp, Homo sapiens
tctctccctccctctttccctcacagccgacgaggcaacaattaggctttggggataaaacgaggtgcggagagcgggctggggcatttctccccgagatggcgggtctgacggcggcggcc

SEQ ID NO: 477248 - DNA, 122 bp, Homo sapiens
aaagccacaaattcctctcatcctaatgtgcataccattgtgcaatctctgccattcattcgtcccatccatcactgaggcttatttctcccctctctccattctcccttcacctctctagt

SEQ ID NO: 477249 - DNA, 122 bp, Homo sapiens
agctaagtaacttcacccctctgatttgagattgtggtgaggatataaatagcttcacatcggccgggcatggtggctcacacctgtaatgccagcactttgggaggccgaggcgggcggat

SEQ ID NO: 477250 - DNA, 122 bp, Homo sapiens
gactgagggagcagcgcgggtgcaccttccacagcagaaccttccggaagtgttgtggcgcggatgccaggaggggctcgcttgtgtcacctagtcctcgtgagccctccccactgtggaga

SEQ ID NO: 477251 - DNA, 122 bp, Homo sapiens
gtagaggtggtagggggacgggttggcctggaagggcccgctctggttctgcggggcccccgggtagggtggcgggaggtaggtatggtggaagcggctggtggccggcatgcccgccacgc

SEQ ID NO: 477252 - DNA, 122 bp, Homo sapiens
aatttaggatgaactctgcgacaaatggtgtagtggagtcccctccccggagggctgtctcgtttacctcgggagcatgcgtggggtaggttgcatcctcccggctgtttgatacaggctga

SEQ ID NO: 477253 - DNA, 122 bp, Homo sapiens
ggcgtcagtctcaggctctcggaatcacgctctttgcgagccctgtgcgggagaagtctgcgggtagcagctccgagcctccagcgggctctgaggacgcgcggacccgccctcactctgcg

SEQ ID NO: 477254 - DNA, 122 bp, Homo sapiens
cctataggaaggcggtagacagcctataggcgctgtctgcgggcgggggggcggagaccgcgctcgcgaagagcccgcggattggcaaggccgagggaggctgcgcgccggccccgccccgg

SEQ ID NO: 477255 - DNA, 122 bp, Homo sapiens
cttctctttccctttccagcagccggagaagtgcgacaacaaccagtactttgatatctccgccctctcgtgtgttccttgtggagctaaccagaggcaagatgcccgaggtaagacggttt

SEQ ID NO: 477256 - DNA, 122 bp, Homo sapiens
ccccccactaccgactggttcgcagcgagaaggggggcaggacactgggctctttgcttgcggtggaactagtttgcacttagtagcaacaccctcagtggctggtgcccagaggtggcctg

SEQ ID NO: 477257 - DNA, 122 bp, Homo sapiens
gggtgatggatggcacctggaaaatcgggtcactcccacccgaatactgcgcttttccaacgggcttaaaaaacggcacatcacgagattatatcccgcacctggctccgagggtcctacgc

SEQ ID NO: 477258 - DNA, 122 bp, Homo sapiens
cacctacaccgtctgtgtgtctctatatggttacacataaatgtacaccacttgtgtacacgtgtatacacacgcccaaacattacttccagttcgctctggcctccaaaccttggcttgct

SEQ ID NO: 477259 - DNA, 122 bp, Homo sapiens
aacgttgatctctgaccctcaactccattgttcacctgctgccatgcaaagtgcctcaaccgcagggtttgtaacttcgtgcagattatcacagctgcccagatgttcattttaactgaatt

SEQ ID NO: 477260 - DNA, 122 bp, Homo sapiens
aaggggggggcaaaggacattaacagacatttctcaaaagaagatatgcagccggccgggcgcggtggctcacgcctgtaatcccagcactttgggaggccgaggcgggcggatcacgaggt

SEQ ID NO: 477261 - DNA, 122 bp, Homo sapiens
tgaaggagaagaatggagagcatgctcgtccctcccactcagtgcatttacgccgggagccgcagaaaagcgtctcgattataacaaaacaaaatgcaacaaggaaaaagtgctccagggac

SEQ ID NO: 477262 - DNA, 122 bp, Homo sapiens
gggaaccaggaactcaatcctggatcacatttataggaaatatcaggaccctggagtgagcgatgtgaggctgggctctgcactggatcacctgtgcctcttttgctggtgctgagctcaat

SEQ ID NO: 477263 - DNA, 122 bp, Homo sapiens
ggagagccgggaggctggattagatgggtcagcgccctgattgacagtgacacttcctcccgtgcccccgcctgccccccggcctctcccgctgttcctctcctgcctcacccgggccccat

SEQ ID NO: 477264 - DNA, 122 bp, Homo sapiens
agacactggcgcgctcggaggggatgcgctcaaagggtcccgcccaggcgggtcggcactcggcctcccacacagagaccctcggcttcacacctgcacccacagagaagctcaaacaggca

SEQ ID NO: 477265 - DNA, 122 bp, Homo sapiens
cgccagcagcaggcaggtgccaggctgggtgctgctcagtcccccttcaatgacctcaaccggcagctggtgaacatgggctttccgcagtggcatcttggcaaccatgctgtggagccggt

SEQ ID NO: 477266 - DNA, 122 bp, Homo sapiens
tatctgtgttttggctctgtgattgagggcatgtagcaacccacaccaaggaaaatttgacgagctgctaaagacaaatattggcaactagagacgacacaaaattctaactgctctgacct

SEQ ID NO: 477267 - DNA, 122 bp, Homo sapiens
ccgagaatagctacaggctggggggcattgcggtctgagccttccctcggcgcttcttcccgccgcctcagtacatacaactggaggcaagaatcttgcacggtaattgggacagaaagatc

SEQ ID NO: 477268 - DNA, 122 bp, Homo sapiens
ctaatttctactctccatcaagaataaactttttgtaagtccttctatacctaaaaattccgaatcatttctcttctcagtatacactaacttgctcactgtcccagagcataaaatgaggg

SEQ ID NO: 477269 - DNA, 122 bp, Homo sapiens
tggggaatcctccctccacagtgccctggcctgcccgcctttgcggctcttttcccgctccgaagtcagcacctgccccgctccagagagggtcaacgaactgggactgattgtcgattatg

SEQ ID NO: 477270 - DNA, 122 bp, Homo sapiens
caaatgaggggcgtgggcaggcggggcggggcgggcggggcgctgacctgacgtcaggctcgcggcccgggcagttggctcggcggcagcggagcggccggagctgcggtgcggaccggggc

SEQ ID NO: 477271 - DNA, 122 bp, Homo sapiens
tgagagcggtcccccgcccaaaccggcgcttcgccggcgccaagatagaaatgggtcgcccggctggtaaagaggctgccctgcaaccctgggctggagtattgctgtggtcctggatttct

SEQ ID NO: 477272 - DNA, 122 bp, Homo sapiens
ctatccgtggcattctgcaaggcgcattgcacagaaccccctttctttcttccatgaacacgccttgctctcagcagacagccaggtcagcatcagcagccaggtggtagcatcctgtactt

SEQ ID NO: 477273 - DNA, 122 bp, Homo sapiens
gcttttataaagcctgggtttaaccttttatctaaataatggtcaactcttcctacatcacgagcatttatgtgcaattaaaagccatcattaaattaagccagagtattaatatattcata

SEQ ID NO: 477274 - DNA, 122 bp, Homo sapiens
tagcggaggcggggccgaataaagtaaatggtaataaagggttgggtctcacttagtgggcggtgtttgatggacagctgaccttgcctattgaaagtagccactgatgcccaatgggaaat

SEQ ID NO: 477275 - DNA, 122 bp, Homo sapiens
tcggacttcgaactcgcgcctctgaccccaggcaggacatccctcagccccagcccggcccgacggccccactcacacagccccgttccggaagcccttaagcacggccaacgcagcgtggt

SEQ ID NO: 477276 - DNA, 122 bp, Homo sapiens
ctctcattcaaaactccgggaagagagcctctccttttaaacaggagtggctggtatgaacgactctcaaaatgcaagctgtcctgtaagtgctgactcacaggtggtcaccaatatcacct

SEQ ID NO: 477277 - DNA, 122 bp, Homo sapiens
gcgcggaggcaagaccctgtggtggcagcgaggcggggcccagcgaggaggcggggcctgcgccggcgcacgggctgctgcgcgctccgcagaggggcggggcgagggggctgagggcgggc

SEQ ID NO: 477278 - DNA, 122 bp, Homo sapiens
ttccagatgaaaacaatttaggcacaaagcagctgctaggctactggctcaaagcggcagcgtcaggacgcgaacccatgtctttcagctttccagagaggacaggaagccttgaacgcggg

SEQ ID NO: 477279 - DNA, 122 bp, Homo sapiens
gcacccaggttcctgcctcctggcttctgcctgtctccctgggtgtctctgaatctgcctcgtcctctcagcaccggtccttttcctgactcgtgtgtgtggctgtcacgtcccatatctat

SEQ ID NO: 477280 - DNA, 122 bp, Homo sapiens
tccgtgctttttctaagctagccatgaaaccgtgagcatattatttagctccccgacgctcgtttttttaaatctgtgaaatgagggttctaaaggtgcccctcatatgatttttgtgaaag

SEQ ID NO: 477281 - DNA, 122 bp, Homo sapiens
ctcttcgcgcagctggtccaggttctgctggatgcgtgcgtgcagggccttggccttgagcgtgagcttccgggagagcacctgcacgcagcgactgaggcgcgcggggctggcgggggcgt

SEQ ID NO: 477282 - DNA, 122 bp, Homo sapiens
taaaaatataataactgtgatacagtaaaaagactcagcagaagtttcccttgtaactcgcgtggccaaagcagatatcaaataaaagatgaaataaacaggaaatccatagaacgtgaaca

SEQ ID NO: 477283 - DNA, 122 bp, Homo sapiens
actgcatcgaactgagccaggcggcggagcccgcaggcccccaggacagtgcgactggctcgccctcggaccccagctcctcactggctcctgttcagcgccccaagctgcggaggcagggc

SEQ ID NO: 477284 - DNA, 122 bp, Homo sapiens
cctggtgaggccgggaggaaacttgctcattgttctgaatagtataaagccgggaggagccgggcctgttttgagaggcagacctggtgtccagtatgatcctgataacccgggttttgtgg

SEQ ID NO: 477285 - DNA, 122 bp, Homo sapiens
ggaaatcctgttccaggttttcgggcagcccgagtgattgacacatgatatcaccggaggcgtgtcctggagtggaggtggaggtggaggcaaggagctgaaattctgcgtagccggagtga

SEQ ID NO: 477286 - DNA, 122 bp, Homo sapiens
ggattttgtgcttctggggtcctgacctctttcacttgctgatctgtgggcgctcccacccgtgtgccagcgtgacggctcggggtgtccgctcccctctgggtcgaggccacagctgagtc

SEQ ID NO: 477287 - DNA, 122 bp, Homo sapiens
aagccctgagagctgcagatgtttggcctttggacctccaagtggacatcaattagcaagcgtgggctaggatggtgcagacactgacgtggcccttctgatgcctgggatgcctcatgagt

SEQ ID NO: 477288 - DNA, 122 bp, Homo sapiens
gggcggagctccgcctacgaaggctgagcatcgccgcaagaggcggagtctggagcgaggcggagctctcctaggggcggggaaaatggggcggggcctccggacagggggcggagcgtggc

SEQ ID NO: 477289 - DNA, 122 bp, Homo sapiens
ggcccccctcaccactcccggccccgctcccggcggcccgcctcaccactcccggcttcccggggcttaggcccgcaccatcgagtcgaaccgagtcctcatgttttcctagacaagccgct

SEQ ID NO: 477290 - DNA, 122 bp, Homo sapiens
cctcgtgacccttaggcctttcaggagtaatgccagggtccttcctgtgagcagctcagccgagtggggctagcggggagcagagatggggctgggacagagcacaagcacagccctggggt

SEQ ID NO: 477291 - DNA, 122 bp, Homo sapiens
agaggagccacctgggttttcagctagggtagactctctaggacagagttggtcaaattgcgtttgtaaccatttgattggtcataaaaccaatttttgtaatggattggaatacttaagaa

SEQ ID NO: 477292 - DNA, 122 bp, Homo sapiens
tgcagcaggtatgcacagggctgtgtctcctgtgggccccagccccagtgctctggtccccgaagtccctgaaggcaggtggcctccagcccatttgccagagcaggtcactgaggccctga

SEQ ID NO: 477293 - DNA, 122 bp, Homo sapiens
ggaaactgcgcagcaccggaagccggggggcggcggcggggcatggcgggacttgtagtccgcgggcgggcgcggggggcgcaggcgagaccctggcgcggccgggggtcctgcgggtggga

SEQ ID NO: 477294 - DNA, 122 bp, Homo sapiens
ctgtagtagtgaatcacaaccacagctattttattcccatttaatgccccaactaactcacgtctttcagtctcccactcccaacaatactagcaggcatcaaattaccagccttggccaga

SEQ ID NO: 477295 - DNA, 122 bp, Homo sapiens
aaatcagctacagatatctaatataaatgacctgaatgccttagggactagcagcaacaccgatattatgttagcacaatctcaaactattaagactttctaggaaaattcaagtaaatttc

SEQ ID NO: 477296 - DNA, 122 bp, Homo sapiens
ccctggtccttttcttcctagcctgcccattctgtcctggcacagggccttgaggtctagcgcgccgggctgcggcgtgctgaggcgttgagcctgctgcctcctctcaggaagaaacgggg

SEQ ID NO: 477297 - DNA, 122 bp, Homo sapiens
ttctagttggagacgagactcagctttccgctggtacaatgcggagcggagcacgagggtcgcaggtgcagaacagcgggaagatgcgctcccccagggggccaggcgcctggaaggcgtaa

SEQ ID NO: 477298 - DNA, 122 bp, Homo sapiens
ctctccggttgatctgggaaagagagaggatggcagatgcagcacccacccacccacggccgcctcgaacctgatgctggtgccacatgtccaaggtaaacagtgcccctcggcccccaccc

SEQ ID NO: 477299 - DNA, 122 bp, Homo sapiens
tgttgagccacgtgccaggtccccagctcggaagaccgatgttggagggtcactgcagagcgcctgctgtggagaaacaggctgggtccttcctgactgtgctgcgcgctcctcaccgcgtc

SEQ ID NO: 477300 - DNA, 122 bp, Homo sapiens
gcatgcgcacatgcactcttggtaatgcttgcaggtggcccgttcttcctctttgtccttcgctgccacgtgagaggggagtgtacgcgtgtgcgcgcgtgcgagtgtgcgcgtgtgcagtc

SEQ ID NO: 477301 - DNA, 122 bp, Homo sapiens
aggagccgtgatgtcagagcgggcggcgggcggtgatgtcagggctggtgctgatgctggcggcgcggtgcattgtgggcagctccccgctctgccgctgccgccgccgtcgcccaaggagg

SEQ ID NO: 477302 - DNA, 122 bp, Homo sapiens
agcacacacaggcacagatgcacatatcggtaaacatacatgcatgtacacacaggtacacgcgcgcacacacgcacaggcacacaagcatgcacatagatgccccctgcaatctcaacact

SEQ ID NO: 477303 - DNA, 122 bp, Homo sapiens
aattcatctccattctgccctgtacctgcaaagggagctgaatatatctggagaaaaactcgcaaccattctgactggtcttgaagcctcagtgggctgttggcaacccccaaatcatgact

SEQ ID NO: 477304 - DNA, 122 bp, Homo sapiens
ctagccccttagttttaccatgaagataactcaggccgtcggagaaagtggcctgcccaacgcaggtgctagagcgcgaaccaagagaagtcgatcctcctggtctccccggctgcctggtg

SEQ ID NO: 477305 - DNA, 122 bp, Homo sapiens
ccttccggggtccccaacctacttcctccttaaagaaacatgtatttgcagtcgcccaagcgcaaggattccccagtctccttcccgctctccccgtccaaaggggtccctcccctctccta

SEQ ID NO: 477306 - DNA, 122 bp, Homo sapiens
tcctcttaggaagcgcaggaggaacagcaggtgaaaagcagctgcggagatcccaccagacggtttcctggccccacccaacgctctcctggccccacccaacggtttcctggagaaattct

SEQ ID NO: 477307 - DNA, 122 bp, Homo sapiens
gtcagcagtggccatgtatccccttcccaccaggtgttaaggtgctcccggtgacttactcgcagatgaaggtcccctgtgggatggtctgcagggcgcggaccccccagcccatcttggct

SEQ ID NO: 477308 - DNA, 122 bp, Homo sapiens
agtcaacaaatagtcatttttggaccgaggttaatgtgttcaaaacgcgtccctcaggcacgaccaccgtcttttttttccctccaaacctctcaaagtaaggttatttcctaccgggaaaa

SEQ ID NO: 477309 - DNA, 122 bp, Homo sapiens
tctagaattctggtctatttccatatactcaggtgttaatgaattgagataattctgttacgtcagctgtggccacaattcttatcctgtgctgtgttttgtgttagcaactagcaagacta

SEQ ID NO: 477310 - DNA, 122 bp, Homo sapiens
cgcgggcccctccgcagcactcacgcacacgccccactgggttaggaatttctagaatagcgcgggcccctccgctgcactcacgcacacgccccactgggttaggaagttgtagaatagcg

SEQ ID NO: 477311 - DNA, 122 bp, Homo sapiens
ccgcacccccggcccctcctccgcgccaactgtgtaaatcagccgccgcagtcctctcgccgcgcatcgcaggcaaaatcccggcttaggaagcaaggaagcaagtgatctctctctctctc

SEQ ID NO: 477312 - DNA, 122 bp, Homo sapiens
tagatagtgctgagtttttaagaaactttctaaatattgtgggtggaaaaccatcactaacgtaatgttatccaaacggcccaaagcagcaaaagaatctgcaaataaagcatgcatctgtg

SEQ ID NO: 477313 - DNA, 122 bp, Homo sapiens
ctcttcaatccagagcagctcaacgacgtggctccctttctatgtatccctcaaagccttcgcgtcggattaaaggtgttcttgatccttctttaccaaccacggtgcgggccaggcgtgat

SEQ ID NO: 477314 - DNA, 122 bp, Homo sapiens
tcaggggcagtggacatatcctggaggcggctcctgggaggaggtgacggttgcagtcttcgtcgactgaaaggcggcctgggtaccgtcgtgggggctcagcgggtccccagccctggcac

SEQ ID NO: 477315 - DNA, 122 bp, Homo sapiens
gtgccgagaattcccctcctgctgctaggctggtttcaagtctgctccttctgcacttgacgtccttgccagtgtgatccagagctgctcacacgagcaagcgtcctcgagtcctagggatg

SEQ ID NO: 477316 - DNA, 122 bp, Homo sapiens
tgctgcaatacaatagtagctggaagctgtttggtggcttcaacaacccattgatcctctcggctccgtgggccagaaaatgcagtgcggaggcagccacggtcctcctggaggagctgctc

SEQ ID NO: 477317 - DNA, 122 bp, Homo sapiens
ttgggctgggtgtgagagagaaagcccaggcagagggtgtgtgtctgccctagccagcaccggcctgcctgcctgcctgcctggtagatgtgccatgaatgctgttgactccgggtgtgtgt

SEQ ID NO: 477318 - DNA, 122 bp, Homo sapiens
cctaccagcaaagtgaagctgtgttccagcagcatcccatactgttggacaagcttctctcgggtcacactggggagctccgggagtgtctcccgaatctggtcaatattgatcacttgctg

SEQ ID NO: 477319 - DNA, 122 bp, Homo sapiens
ttctccgttaaccattacatttactgccataggatccagatttgaacagcagggcggcatcggtccacaggcgtgtgccggctacctgggcatgagtgcgctctcgccctgcgtcacagacc

SEQ ID NO: 477320 - DNA, 122 bp, Homo sapiens
aggtggccgagtggttaaggcgatggactgctaatccattgtgctctgcacgcgtgggttcgaatcccatcctcgtcggctaaggaagtcctgtgctcagttttgtagcatcaaaactagga

SEQ ID NO: 477321 - DNA, 122 bp, Homo sapiens
actctcaagagaggaatgggtgtgcagattttaaagtctagaggatcccggacatcggtgcggaacactgtagaataggagtgcaagtttgaaagaggaagacggaaacccttctcactgac

SEQ ID NO: 477322 - DNA, 122 bp, Homo sapiens
tgctcctctcctcccccactcgcccccctgctgcctccgcagccccaagccctatagccccgcattgcattatcggctggctgctgctgtcagagtctccgggaagataatctatccggaaa

SEQ ID NO: 477323 - DNA, 122 bp, Homo sapiens
ttctcccacctgtggcctctcaggctcggccgcccgagggagtttcttttattcccagttcggctttcttttgcgaaggccgagatctgggcctgccaggggcctgcccgagtcctctatcg

SEQ ID NO: 477324 - DNA, 122 bp, Homo sapiens
tcgccgggacctcggtggagcgcttcccgccctcggcacccctacccccggtggcccagacgcgcccaggtcctcgcctgaggaaactccgaggacacccgacctcccgctctctctcaaac

SEQ ID NO: 477325 - DNA, 122 bp, Homo sapiens
aagccagccggggaaggcctctctaggtgggtcattgagtaggctgctcacttggagggccgcctgccagcctggggagggggacagaaggggagggctggggtggatgggggacactgtaa

SEQ ID NO: 477326 - DNA, 122 bp, Homo sapiens
cagaatctaaggaaacacataacagtcctgtatacacacagcagctggcagccctattcccggtgtgtcccatatacctaccattgacctgaaacccagtttgtacgtgctcattgaacatt

SEQ ID NO: 477327 - DNA, 122 bp, Homo sapiens
ctggaacaatgacgggattttgcttcccagtgagttcaaaactattcatgcttccttcaacgcttctacctttcccttccacccaccctcaaaaacacgtgtgcaaacacaaaaaaaaaggg

SEQ ID NO: 477328 - DNA, 122 bp, Homo sapiens
ccgccagcacgctcagggccagcaggttggaggccaggcccaccacgcagaaggaggcggcgaaccagggcgaggcgatcagccgtctctcctccagggtaatgtttgtgggccggaaacag

SEQ ID NO: 477329 - DNA, 122 bp, Homo sapiens
tgtggcttacggagagtccaagacgatggaggagaggtgtcctgatgtgtttagatttggcgtgtttcccacatcctagggaggtgtcatgagtcactccccagagccccatcccatggcct

SEQ ID NO: 477330 - DNA, 122 bp, Homo sapiens
ctccgcctcggttcctgtcttctgctcctgtttccgctctgcggtctccgagaccagcctcggggccgagttcatgtcccagtgacccccaagctccatacccgcgccggccgggggtcgga

SEQ ID NO: 477331 - DNA, 122 bp, Homo sapiens
ccactgagtacaggaagccgacagggcctgctccggaaaaccaggagctgtaaggtcagccgaaaggacgaagagacctgaagtcagtcaagtaagttttattaacctgctgggctgctccc

SEQ ID NO: 477332 - DNA, 122 bp, Homo sapiens
acccctggccgagctcttcgactacgggctgcagcagtactgggggtccagggcagcggccggctggagcctgacgctggagcggaagtacggccacatcacccccatggcccagaggaagc

SEQ ID NO: 477333 - DNA, 122 bp, Homo sapiens
gcaggtgagcactgcgagggaactgagatgcaagatcctcctgcctgaactcacaccccgcgtgctgctcccccaactcgcctcttggatctcagaccagaagcttcctttcctcaaaatcc

SEQ ID NO: 477334 - DNA, 122 bp, Homo sapiens
tgtggactaagagctgaattgtgtagggaagaacttgacaacagggagctgcgtgaaaggcggcagatgtaaaaaaggaaggacagtgggggctcttgttgccatggtgaatattaaggaag

SEQ ID NO: 477335 - DNA, 122 bp, Homo sapiens
ccacagggtgtgttcgacgagcatgatgaacacctgccttttccccagatgctcagatggcggcgtggctctgggctgtgttttctgaagttctaatgcaaccctcccaaggcctgatgaac

SEQ ID NO: 477336 - DNA, 122 bp, Homo sapiens
cgggctcagggatggctcccacggggtgtttccagttcccgggagagtcgagtaaggtcccggagcgcacggccctgaggcctggcctgggggctcgggagacagggcggccccagccggcc

SEQ ID NO: 477337 - DNA, 122 bp, Homo sapiens
cactcccccaagagcaggaggcagtggcacatctgagagagtggcgtttgcatttcccagcgtgacacagagcagcaaaagggctgcatctcacacacaaggtgtggcagatgacacgctgt

SEQ ID NO: 477338 - DNA, 122 bp, Homo sapiens
cacctcccagcctttggcggcttagatctccaaatgcagtctggatggcactcaggtattcgagcgccccagtttatcttatcaccgccccctacaaatacacatccattccagattggctt

SEQ ID NO: 477339 - DNA, 122 bp, Homo sapiens
aaacaaaacaaaaagtctttgaaggcaggcatggtggctcatgcctgtaatctgtaatcccggtgctttcagagatgggggtgggagcatcacttgaagccaggagttcaagaccagcctga

SEQ ID NO: 477340 - DNA, 122 bp, Homo sapiens
gcctcggggagccatgaagatgacgacatgatcgcagctcagcaggaagctcggtgctgccggaatgtggggaggccatccgtctcattcagcggcccggcaggccttattatgatgatgaa

SEQ ID NO: 477341 - DNA, 122 bp, Homo sapiens
aaatctgttgtccgattatgaacgactgtcaatgactgaattcaaagattcaagaaacagcgtttcaaatacacctgtgatctgcagccatgtcaaaaggcaggttttcttcctttagcaag

SEQ ID NO: 477342 - DNA, 122 bp, Homo sapiens
gcgtcccatttctcctcctggctgttaactgagcgctctcgctcagtgcagcgaggccagcgatgccttctggaccacacgctgtcctcgccgaggtcctggtttgttcctcaacgtcggct

SEQ ID NO: 477343 - DNA, 122 bp, Homo sapiens
ctgtctactcatagttagtgtcaggtctcaaaaatgcaggaagcatctataacagaagaccgcaacctctctaaaatgggagctttatctcatttttcttactgcctcaaaaccagctttca

SEQ ID NO: 477344 - DNA, 122 bp, Homo sapiens
gttggggcccaagtcggcagagaatgcagacctccaaccgacctctgctgtcctgaagagcgcacactggccaggtttccagtctgcgccaggcacggtgctcagagccttctgtgcatcgt

SEQ ID NO: 477345 - DNA, 122 bp, Homo sapiens
aaaaaaataatactctaagcaaatagcatgtgtataagagctaacataagggatttggcacgttagagagcaggcaatgctgccattccaagtttccattgttgtgcttgttgtgctgtgtg

SEQ ID NO: 477346 - DNA, 122 bp, Homo sapiens
tgccccgagagggagatgaccattccttcaggctcctgtctttctcttacaggaagattacgacaaagcagaaacagaggcatccaaaggtaggggaatggtgggccctggtgtggagctgt

SEQ ID NO: 477347 - DNA, 122 bp, Homo sapiens
tcttccccacttttacgaaaatagcattaattcccctttcactattcacacttccttcatcgtcacagtttgaccagcggtccagggtttatgatctcaagcatggccatatatatctattt

SEQ ID NO: 477348 - DNA, 122 bp, Homo sapiens
ggctgttggccctggctggggacagggcctgctgatagggacctagaggaagtcaaactgcgtctctttctgggcctttggccaccaggcttggtggaatgtcctcatcccatactcagggc

SEQ ID NO: 477349 - DNA, 122 bp, Homo sapiens
acagtcatgggttgccatggtgattattccaaatgcattgtgatcatatggaactggtgacgtgttctcatttccctttcagttataaaataagcctgatgttcctagccatcaaaatctca

SEQ ID NO: 477350 - DNA, 122 bp, Homo sapiens
gagagggaaaatgttattggattgcatagcaaatgcctgaaagttcacatcttaaatacacgttcacatccaacttccaatagatgaaaaagatcaaaagctcagaaatatcaggaatgtaa

SEQ ID NO: 477351 - DNA, 122 bp, Homo sapiens
cttagtcatgctttttatcctgaaattggtgaatgagatgagtcagttgctaagtgtaggcggcaggctgtttggaatctctagtgggtgtgtcagtcagtgcaagagttcattggtaaaaa

SEQ ID NO: 477352 - DNA, 122 bp, Homo sapiens
cacaccctttgccctcctttggtcctctgcccctgaggctggcctcctcttcctcacaaacgaattctcctggatcaactccaaaaaagacatctgccttagctatggggtgcatagcagga

SEQ ID NO: 477353 - DNA, 122 bp, Homo sapiens
ctggcctgctttctttggaatggtctgctttattttgaatttcaagcgattctgctgacacgaggcgcagacagagttggttctgagtcccctggcccttcgccagtgccctgagccaaggg

SEQ ID NO: 477354 - DNA, 122 bp, Homo sapiens
aatcccgcccactaagacgcgacccctcagacaggggtccaagaagcccctgctggaggacgaccctcagggtgccaggaagatctcgtcggagcctgttcctggcgagagtaagagccacc

SEQ ID NO: 477355 - DNA, 122 bp, Homo sapiens
ggagcaaggccgcaggccaccaagacagatgttgggatgcaggaagggcgtgtgcctgcacgtgcctgtgctatgttcattgccccaaaagaaaaccacaatctagacattcacaacaaaga

SEQ ID NO: 477356 - DNA, 122 bp, Homo sapiens
gttcctctgctggcaccggtgcccacggattgaccaaggcgctccaataaatgtcagctccggcatgaacattttgattaatgacacaaaagcaaagagagtgtgtctgactcccagctctg

SEQ ID NO: 477357 - DNA, 122 bp, Homo sapiens
taagagggcgccgacttactcatgttctgacgtcctctggagagttggatcgggcttgtgcgctgtaggttgtgccgccggcctaggaaccatgagggggaggaggccagggactgggaggc

SEQ ID NO: 477358 - DNA, 122 bp, Homo sapiens
ttggccttgttggcgctggtgaggcgcttgaggtgcacgagcagctgtggctggtcgcggcggaagtgcgggttgtggaagtgatggagcggcccattgcctgccggtttgccgccccccgg

SEQ ID NO: 477359 - DNA, 122 bp, Homo sapiens
tgaagatcactggagcccagggaaaggaaaagagctccaggaaaagagacgccaggcaagcgaagatgacataggacgatccctgaggagccctgcgcagaagagccaaacagaagaaaaga

SEQ ID NO: 477360 - DNA, 122 bp, Homo sapiens
ggctgggctggttttcatcagcaatggaaggggcccatttgcatgtctcctactatatagcgagttctggaagggatgcctcagagtgggctgtgtcccagagtggatatgagcgattatat

SEQ ID NO: 477361 - DNA, 122 bp, Homo sapiens
acctcagcagtgacagaagagagatccagggatgggtcttctctgacccagccagcattccgagtgactgaggtggatgtggacatcattgcttaccaatttttaccaacattgaggcaggg

SEQ ID NO: 477362 - DNA, 122 bp, Homo sapiens
cagctggcacgagggaacctggccgtcaggtttcccctgggatcctgggacggtatcaggcggggaatctgtgcggccgcggcgaggtaggtgaggtgaggcggggcgaggtgggcgagggg

SEQ ID NO: 477363 - DNA, 122 bp, Homo sapiens
cagcaggatgctcagccatctctggatttcactttataaaataagtaccttggccaagcacggcagctcgcacctgtaatcccagcacttagggaggccaaggtgataggatcgcttgagcc

SEQ ID NO: 477364 - DNA, 122 bp, Homo sapiens
agtcagcaggcatgggaactctgaccttgcttcttactcctgtactagtagcaggcattccgttcttgtggctttgggccaggatgaggtcatggtgactagtctttgggaactgggaaggg

SEQ ID NO: 477365 - DNA, 122 bp, Homo sapiens
ttgttccatacttatgatactgactcttaacttttgagattttgcagatgtgtggaatggcgtaggaaagtgaaaagtctaatataagagaagcactgttgtaagttaaatggatgtaataa

SEQ ID NO: 477366 - DNA, 122 bp, Homo sapiens
gagacttgattgggccattcacgcctcaggatgaggactggccagtctgcgcctggagggcgggccggtcccgctgatcacgtgacacgatttttgaaaggtgattggctgtcaaggagagg

SEQ ID NO: 477367 - DNA, 122 bp, Homo sapiens
cttccctcttgcctagcccatccaggaaggccgtcaagaaagggcaagttatataccacacgatgctgtcacatctaaaaggacactatccacatcacagagactgtaaatgtgtattttta

SEQ ID NO: 477368 - DNA, 122 bp, Homo sapiens
cgtgatcctggcacaggctgccttggaatccaggggggcagtggcagaaataggaggggccgctgtcgacacagaggcctccattgtggcaaagggaagagacgtctatgcctggggagaga

SEQ ID NO: 477369 - DNA, 122 bp, Homo sapiens
gtcacatctgccccatttgaggagtggaaacgaagcctcactcagagtcacctcgggtcacgcggcgggtcagtcggtgacgtcctggccttagctcgcaccccgagccccaagttctttgt

SEQ ID NO: 477370 - DNA, 122 bp, Homo sapiens
gggaggtggaggtttggcccaggtccaggtggggctgagggtctctatgccagcaggggacgctatccccccatggcccacagccccctggcagcgtcagagccatccgaccctgtccttgg

SEQ ID NO: 477371 - DNA, 122 bp, Homo sapiens
ctattatgatggcctttctgcaggcagtctgagaaggggcaacccagttgtaaagaataacgttgagaaattgatcatctctggtagcatctgtcactcccttgaaaatatccaccaggcta

SEQ ID NO: 477372 - DNA, 122 bp, Homo sapiens
aactacgtttcccagaaggctgtgggattgcgtcacaatgactgcgggattatagaagcccggggcatattgggaaatagagttcgggtgaaggggcgtggcgattagagttaaagattaga

SEQ ID NO: 477373 - DNA, 122 bp, Homo sapiens
tggttaggacaattgcacaatggcgctccggagactgcttcattcccagaggtttggtggcgtttgtggctgctgcagccctggtctgccggacggggccatacatcatcgtgtcattttac

SEQ ID NO: 477374 - DNA, 122 bp, Homo sapiens
tctcagaagcctctgctccaccgcggcgagaggcatgggcacgtggctgccgagggtggccgagctctgggaagaaaagcccgtgtgcctctgcatagcgtcgctacagcgctgactcggtg

SEQ ID NO: 477375 - DNA, 122 bp, Homo sapiens
gctggtcatatcctgcccgaaagggccgagcagggcctgagatgcggcaagatgctatctcgggtttattgcgtctcgtgagggtgcctcccaccccggccccccgccctctcccgccctgc

SEQ ID NO: 477376 - DNA, 122 bp, Homo sapiens
aggaagaagacttttattactcaatctggaaagtgcaaatacacacatgaacctgttagccgatgggcccactctgcatgggtggtggacgacgaccctggctcaggattctgcaggaaaca

SEQ ID NO: 477377 - DNA, 122 bp, Homo sapiens
acacagaatttcagaactagaaggcatctccaagttcaatcctctttcttcccaaaaaatcgcaaaacacttttcatattaatcctcagagtataccaattaacagacacttcattttgtat

SEQ ID NO: 477378 - DNA, 122 bp, Homo sapiens
caaggagacattgtcccaggtaggatgtgtcccagcaggaaaggacaggcaggttactttcgcccccttgatagtctccctgctactttgggttgatgcagggcatttcatggaagatcatg

SEQ ID NO: 477379 - DNA, 122 bp, Homo sapiens
actttctccgctggacttgtactgctttaaacacatcttcacgtttcagcaccacgaagtcgccgtcgcggatgcggtggtctccgggatgctgtggttgtgggcccggctgctcccctgag

SEQ ID NO: 477380 - DNA, 122 bp, Homo sapiens
aaggcccggagataggaccaaccgtcaggaatgcgaggaatgtttttcttcggactctatcgaggcacacagacagaccatggggattctgtctacagtgacagccttaacatttgccagag

SEQ ID NO: 477381 - DNA, 122 bp, Homo sapiens
ttagtatttaacccttcaatgctctgggatcatcagttgggaagcttgtccagataccatcgtgtgtatctcaggatgagaacatacgttatcaatgaccattctgtgtgtgtaaatttatt

SEQ ID NO: 477382 - DNA, 122 bp, Homo sapiens
ggccagcttgagaaataaagggacagagtacaaaagagagaaattttaaagccaggcgtccgggggggacatcacatgtcggtaggttccgtgatgccccacaagccacaaaaaccagcaag

SEQ ID NO: 477383 - DNA, 122 bp, Homo sapiens
gctccacccgccgctccccggcagagccccgggaccccctaattggctgcgggcgctccccggctccgcccgtcgccgcagggcactctggaaactgtagtccccccacaccacgctccgcg

SEQ ID NO: 477384 - DNA, 122 bp, Homo sapiens
aactgttacttctgttttggaggaattaacaaggaaaacccaggcttagtaaatcaacatcgaagttcagaagttcagagtaatttgtcttgggaacaaagtcctccctagagcgaagaggc

SEQ ID NO: 477385 - DNA, 122 bp, Homo sapiens
ctctctggagtgggaggtgtcagggagaggactggtgctcagggcctggtatggggtcagcgctgggagattgtggctgtcatagttgtaaatgacccaaagaagggaggagagaggaaaga

SEQ ID NO: 477386 - DNA, 122 bp, Homo sapiens
gatggccctttaagaggcactgtccagctctggttgccatggagacagctggacacagaccgggtagaggcaggcccacagcatgtcctccaaggtttactccacaggtgggaagaggactg

SEQ ID NO: 477387 - DNA, 122 bp, Homo sapiens
ggagcccaacagccagcggctgtttttatagtcaggagacggggccgggcgcagacgccccgccccgcccttgcacccagcccgctgagtccgcaccgcccgcggtcccggcctgggctgtg

SEQ ID NO: 477388 - DNA, 122 bp, Homo sapiens
ctacccagagcaagaccctgatggctgcggtgtttctggtaacgctttatgaatactcgccgcttttctacatcgcggtggtctttacctgcttcatcgtgaccaccggcctggtattggga

SEQ ID NO: 477389 - DNA, 122 bp, Homo sapiens
gtaggagagaggaagagctttgctgcctcacccctgggtgatgttcaggctagcctggtgcgcgagaggaggggaatggcaggtccccgcttcgcgtaccttggaaataagctcatcgtgtt

SEQ ID NO: 477390 - DNA, 122 bp, Homo sapiens
tggaatgattcatgagatgcctttttgcttccatgacagattccttcataactagtctgtcgcaggtctgaatttttatcattgcagattgattccttgttgcaacctcagggttcttcatt

SEQ ID NO: 477391 - DNA, 122 bp, Homo sapiens
cacattgtaagagcaaagaaactggaaatacggtaaatacacacccacggaaaacacaatcgtacaacagggtacagcacagccgttagaaagaaggaggcggattagcagcgtggatgtga

SEQ ID NO: 477392 - DNA, 122 bp, Homo sapiens
cccgtggcaggctgcagaggaagcagcattcgccccaggagtgaactggaagtgccagcccgggccagctgggtcaaggcccactgcctgaggctgccagctcgtgctctacctgcagccat

SEQ ID NO: 477393 - DNA, 122 bp, Homo sapiens
cccctcctgtttggtctctctcctcacaggagtccacttcccctttgaccttgtctgccacgtgatgatgcagcataaaagccctctgcagaagccagggccatgccccactcctagcctgc

SEQ ID NO: 477394 - DNA, 122 bp, Homo sapiens
ctccagggaccccaccaacgctacccggcacacccaggctccccaccgacgtgccccccacggtcactgccccgtgttctgcttggttccctggtggttggccaggagcctgtgaggatgag

SEQ ID NO: 477395 - DNA, 122 bp, Homo sapiens
tgggatgcgggcggggcccggggcctgagggtgcgggcggcgctcggggtcttggggtaccgggtctgggggtgggggccagggtgcggggtgggggtccagggtctgggggtgcgggcggc

SEQ ID NO: 477396 - DNA, 122 bp, Homo sapiens
gtgagataagaacgccagctgctaggaaaaaaaaaaaaaagactcagcgcggtctccgcccgcccgtctccaagcctgaggcgcaggcctatgggatgcacgggcttcttttaggcgcccgt

SEQ ID NO: 477397 - DNA, 122 bp, Homo sapiens
ctaacaatgccaagttctaacatatccctctacctccattgtttcagcctccatccatgtcgtttttacttgtatacaaacttctccaattttcttgctaatttagccctcttacctttttt

SEQ ID NO: 477398 - DNA, 122 bp, Homo sapiens
tgtgtgcgttgggagccatcctgtgacagggactttgggtggcttcaggcacccacctctcgactctgaggaggcctcaggaaacccttaatgagtcactgtcatctaaatcatttaggaaa

SEQ ID NO: 477399 - DNA, 122 bp, Homo sapiens
aagggaagtaagtttggtcgatcatattcagcataaagactgatctgtttttcatggtaacgctgccccttatggtggtctctcttgaaaagcttatgcaaatactaaaaggaacaaaagat

SEQ ID NO: 477400 - DNA, 122 bp, Homo sapiens
tgtaaacctgtgtaatttcccattgggtccaccttaggaaacagtctttaaagttttctccgtaaagcaagtaccagtatactcttttatggtcaatacaatgctaattcaaccttgcattc

SEQ ID NO: 477401 - DNA, 122 bp, Homo sapiens
tgtatcatccagacatacatcctcctctcctcccaactgcagcaagtccaagccagatctcgcaggatgagtaagcgacatatggcatgtgtgaaattccactccaccctgttgcccttccc

SEQ ID NO: 477402 - DNA, 122 bp, Homo sapiens
gatgaggatgtcattcaaattgtgaagaagtgaaacctttcccttttcccatctgccggacgaaccacaacagcgttccccatgatcaagcaccctaccccagttctttctggttttggcag

SEQ ID NO: 477403 - DNA, 122 bp, Homo sapiens
ccagccccaggccagtcagccgcagactttggaaagcccaacgaccatggagagatgggccgttgccatggtggacggactcccgggctgggcttttgaattggccttggggactactcggc

SEQ ID NO: 477404 - DNA, 122 bp, Homo sapiens
aatgatgaaaggttttaatcagtacagtcactcaaaatttgttagtctactaaattgtgacgtccttaagggtagggactatgtttcacccacctagtatttggcaaagtgctatcctagtg

SEQ ID NO: 477405 - DNA, 122 bp, Homo sapiens
ggctcttctgaggtctgagtttccctgtatctgcgcatttatcccaactgaacttttccacgggagtgcttctggcctcctctcagcctaacctccccacctctccacatcctgagcaaagg

SEQ ID NO: 477406 - DNA, 122 bp, Homo sapiens
atatcaagtatattccttttaaaataaacaatcaaaactcccttttatttgtagatcatgcgacagtttagttttcacactacacttgatttcatttgattttagaggtggggtgattgaca

SEQ ID NO: 477407 - DNA, 122 bp, Homo sapiens
catgggtctcgggggctcttctgccgccctggtgggcacggccggctgcagtccctccagcgagccctgtccgtcaggtactgactcagggccctcctcagtgcctcccgccgcgggtcctg

SEQ ID NO: 477408 - DNA, 122 bp, Homo sapiens
agtccacccgataacgagatgatggggcggcgggtggggacacctgtcaaaggacggggccggggccggggccggggccgcagcgggcgggctggctggcggcactgcggcggcggggaccg

SEQ ID NO: 477409 - DNA, 122 bp, Homo sapiens
taatgcagtcacaggtgtggttttaaacaggatttgtcctcaggagcactccctctgtcccgaagttcccgtctcagagcgcgcgctctccccaggtcagctccaggcaggtgtggggagga

SEQ ID NO: 477410 - DNA, 122 bp, Homo sapiens
attgcagggacgctctctgattatacacccacgtttcaagggtgtcagaccacgcagggacgcctgccttggtccttcaccattagcggcaagtcccgcttttctggggaaggggcaagtac

SEQ ID NO: 477411 - DNA, 122 bp, Homo sapiens
ccagtgcaaggggagcaaaagagaaaaggagccaggctgggcttcctgatcccacagcatcgcagagctcgggaggcacagctcacagacacaggaaacacaggactgctattctgctctcc

SEQ ID NO: 477412 - DNA, 122 bp, Homo sapiens
gccgaggaccctggccaggacgccagcccagtcgagggcctcccttgctccttttctccccgccctcagtgaacagcatccatccctctgtcgcagccactcgcgccgtgtgactctatcat

SEQ ID NO: 477413 - DNA, 122 bp, Homo sapiens
ttctgagtttcctgtataatgagtcaattatggggatgttatttatttgaatttagaatccgcttattttggactaatggagattttaattcgtgatcaaatttggctgtaatttacgaaga

SEQ ID NO: 477414 - DNA, 122 bp, Homo sapiens
acccagtggtgcttaaccagatcagagccacatcggaagcttctgccataacccggacaacggtaaggcttgtcaccagaggggctgccttggtggtgaatgaagccggggaggcaggctgt

SEQ ID NO: 477415 - DNA, 122 bp, Homo sapiens
ctcagtcctaggggcggagtaggggaagctgctacttggagagagctgctaggttttaagcgcgcccggaaacacgcctcgccaccacccagccaccaccaacggaaaatctgtcagtgcat

SEQ ID NO: 477416 - DNA, 122 bp, Homo sapiens
tgtgcctgtgtaggcaacagccccttaccccaaacggacaaactcgaaacggtgggtgaacgcttgcattgttttcccttgtgacaaagccattcccgtgcactttaacacaatgggagata

SEQ ID NO: 477417 - DNA, 122 bp, Homo sapiens
gcagtgcattgctttgggaaacagctaactttgtggtgttgccccgttcacgggagatcccgtccgtcctcgcgcttcaagcttcccgctgtacgtggactcactcctgcgctctccacctg

SEQ ID NO: 477418 - DNA, 122 bp, Homo sapiens
tgcccggctggtgtcacgaccgactgttgaatgggagcaaagtgccaggacagcggagggcggagcgcgcgccaggcatcccggggctcccccagctggcgctccggtggtccgaggttaat

SEQ ID NO: 477419 - DNA, 122 bp, Homo sapiens
aatgaaggctggatgtagacttccccaggaaagtcctctgtgtcttgtatttggttacaccgaggaggggggaaaatgaagtgagtgatgtttgagattgttaaatcagaaatcagagcatt

SEQ ID NO: 477420 - DNA, 122 bp, Homo sapiens
aacaggaagaccacagtgggaagaaagcatggaggagaagagcagcaggcacaggagggacgagcaggaggtagaattgggaacacagagagatcttcctcggagaagagtaagggccctcc

SEQ ID NO: 477421 - DNA, 122 bp, Homo sapiens
taatgtaaatcctagtaacaaacatgggattctggttactttgattaaacttcttatgctcggccggccgggcacggtggctccagcccgtaatcccagcactttggcaggccaaggtgggc

SEQ ID NO: 477422 - DNA, 122 bp, Homo sapiens
ccgagccgcctgcccggagggagccgggggtccgggcgaaagcaagccggagctttcggacggcctgggagagccgggagaaagttgtgaaaagtgagtttctctgaagcacaaccaaaaaa

SEQ ID NO: 477423 - DNA, 122 bp, Homo sapiens
ttgaaggcgtcctttttaactttaaacagaccacgccaggaggagactgctgacccagagcgcattacctaaaatctggtacccagagtgcacccttcgccctcgttggagttctctcctct

SEQ ID NO: 477424 - DNA, 122 bp, Homo sapiens
tgtctctacctccagatcacagctgggctggacccagtggggagaatccagatgaggacccggaggaccctccgtgggcacctggcaaagatctatgccatgcactgggggaccgactcaag

SEQ ID NO: 477425 - DNA, 122 bp, Homo sapiens
ccctgtgtcttcatacctaaactcggagcggggcgccaggtaaggatgagtattacagtccgagaagcgaacttccaagtcacctccgcccagtcgcacccaaggtacgcccctcccgcctt

SEQ ID NO: 477426 - DNA, 122 bp, Homo sapiens
ctcaagtctgaggctgattaaggctgcatggtaactttgtcttttttcctaatttggaagcgcgtaaatggttaaactcctggcctgggctgggctggtgcacagcctgggcccggcgcggc

SEQ ID NO: 477427 - DNA, 122 bp, Homo sapiens
acgtgcagagcccagaatctgctccctggtagctgactttgcaggcaggggccttgcccacgcagcctcggcagaggcccccgcacttcgcgaaccccagcaatggccccttccagacgcca

SEQ ID NO: 477428 - DNA, 122 bp, Homo sapiens
cactgaggactcctgctgttatcctctccagtcagtgagcatcaacaccacacttcctatcgccaaactcctttcttaaaagggtcagtgatgcagaaggtgggtgctaactgggacaactt

SEQ ID NO: 477429 - DNA, 122 bp, Homo sapiens
gggtgggttctgtgggctgggaacagccttattacccggctcaacgaaggaagttcagggcgggaccagagattggccattccgctactgcgcaaagatggtggaggaggagaacatccgcg

SEQ ID NO: 477430 - DNA, 122 bp, Homo sapiens
tgctggtccttctgcgctgccatgtctgcgtcgtgaggggtagagctgctgtaaccagcccggtaccctgaagaccccgccggccccgcccgacgccggccccacccagcggagtcgacgtg

SEQ ID NO: 477431 - DNA, 122 bp, Homo sapiens
tgatctggaggacaggtctgcctgtgtgtccgtgggctgctctctcacccgagtgtcgttcgcgtggagagcagaaccctgcagcctcaagggttgcctgccggctgaggtgggggtgcttc

SEQ ID NO: 477432 - DNA, 122 bp, Homo sapiens
acatcagctccctcaacagggaggctgccctgggtgacccgcgagggcacagggtacctccgtcctgctgagtggaagagggaggccatggcggaggcgggcgtgagggggactggcctgcc

SEQ ID NO: 477433 - DNA, 122 bp, Homo sapiens
tgaactcctgacctcacgtgatccacctgtctcggcctcccaaagtgctgcgattacaggcgtgagccaccgcacccggcctgctgaggaatttaatgtggggtataagagaaagaatcaag

SEQ ID NO: 477434 - DNA, 122 bp, Homo sapiens
caccaaggtctcatcgtccctgcagagcatctctgggggaggcgacggacagggcgcgagcgcggggcttggagggcaccaaggtccagggggatggcgggttcagtcccaatccctccgac

SEQ ID NO: 477435 - DNA, 122 bp, Homo sapiens
ggtacaggccgcgttacggcaagcgcagggagccaagcttcgtgtgattgcgaaaggccacggaaattaatattccaagtgattccttgctgggcttgctgtcaatgaggcaattgcggttc

SEQ ID NO: 477436 - DNA, 122 bp, Homo sapiens
attgcggagctcgtcgattaaaaccgcgatcgggtatagcgaatcatctccatctccacccgctgctcctgggccggtcccgagctctgatgcgcccgccatgttctttctcctcctgctgc

SEQ ID NO: 477437 - DNA, 122 bp, Homo sapiens
accaggccgagctgctaccaggctggcgacagaacgatggcagctgacctttcactggtgcggagcaaagccgagaacaggaagcctgtatgctcccacagaaaagtgtaaaaataaatttg

SEQ ID NO: 477438 - DNA, 122 bp, Homo sapiens
tcttgggggggccgggattggatgggttccccgggttgttgggcgtccggcggctggcggcgttctgggggttggtggccatggcagggatggccagcatggggccggggtcggtgctgttt

SEQ ID NO: 477439 - DNA, 122 bp, Homo sapiens
tcctcggcacccaccttgcgacggcgtagggtgtccaggcgcagccctgtgcccaggcaccgttcctatcagcgcacttgctgtcccatttcacagaagagcacgggggcgccaggagctgg

SEQ ID NO: 477440 - DNA, 122 bp, Homo sapiens
ttctgatgaaaacacactggttttgtgtacttaaacagaacgcttctgacaccaaatgtgcggggtttttgccaacactgaccaattcaaaaacagctgggtgtcctacaattcaattctga

SEQ ID NO: 477441 - DNA, 122 bp, Homo sapiens
ttatatactggagaggctaggagcgaataatcatacagtcatacagataatcggagggcacgttcccataggtgaagcccgacaggagacataagactttgctggtatgtgtgggtgggagt

SEQ ID NO: 477442 - DNA, 122 bp, Homo sapiens
gcttattttcacacccagcttccattcagagcagggccaggggctgcaccttgatgcccacgacgatgcccttatcctggatggttcggacgaagggaacaccattatcatctttctggtag

SEQ ID NO: 477443 - DNA, 122 bp, Homo sapiens
ggggccgcggggaaggggcaatggggggaacctcttctggttttgctccactcctggaggcgacaccattcatctgccacctactcgctgcctcctcttcttcagttccttgtatcgttttt

SEQ ID NO: 477444 - DNA, 122 bp, Homo sapiens
gctccgggcgcgggtcgatgccgcctcgcatctgacctttcccggcgcggggagggggcccgagaggatggagagagctggaccatcttggaagaaaactttattgacccgtctcttatctt

SEQ ID NO: 477445 - DNA, 122 bp, Homo sapiens
cttcctgcaccgtcgccacccccctcagccttctgaggtctctctcaggccactgccacccggcccccgttgccacaggcagggctcaccctccagaaaccgacggggtagatgagcttgcc

SEQ ID NO: 477446 - DNA, 122 bp, Homo sapiens
tagggtggaagattttatgtctgggcttgcatcatgtagtgacatcagtatgtacaaggacgatttgtaggatttttcaaaacgcctgttctaggataacttgttatgcatctgcaatatgc

SEQ ID NO: 477447 - DNA, 122 bp, Homo sapiens
ccgtgtttgcttcaggccattctatgcggcatccacgaggtctgtgggccagcggcacggcgcggccctgtcccccaaaaaggaggagaggcaggaggaagaggaagtggccgtacaggccg

SEQ ID NO: 477448 - DNA, 122 bp, Homo sapiens
gctccacattgttactgcagggaacaaagtttgagagagatctacctttattcttagggccgtgggagccatagagagcttgcgcaaacgagagacaccatctgagttaaatttgaaaaatc

SEQ ID NO: 477449 - DNA, 122 bp, Homo sapiens
ggcaaggctcaaacttgctccggtcatcgttaatccaacctccaaccacaagtttcaacacgtgttctctgggcaagtcggttgccccaagtgatagaaaagataaaaaagagaaaggagag

SEQ ID NO: 477450 - DNA, 122 bp, Homo sapiens
ggctccagaaagcatttcccccacaggagcaacaaagccggggcttgttgctggtcaaggcgcctttgcttgcttgggctggggcccagactgtgaggcagccgggaaggccaggggacgca

SEQ ID NO: 477451 - DNA, 122 bp, Homo sapiens
cacggtgcacgtgaccatgagcagcatgctgtagcccagcaggcagatgagcgacaggtccgagatgtcacacttgagcacacccctggcgaagcgggggtcgagtgtccgctggtcctgga

SEQ ID NO: 477452 - DNA, 122 bp, Homo sapiens
gtgctaatttcataagcctattgctacctaaagatcctacttcagcttagaactttagtccgccttgcttggcagaaatccagtgtaataaatcattactcactgatcattcactgggttta

SEQ ID NO: 477453 - DNA, 122 bp, Homo sapiens
gttaaccacagttttacaagactcctcttcccgcgtgtgggccattgtcatgctggtgggcgtcccgcccacctgaaaggtctccccgccccgactggggtttgttgttgaagaaggagaat

SEQ ID NO: 477454 - DNA, 122 bp, Homo sapiens
gctgctcccggctgctcccggctgctccccggctgctccccgctgctcccggctgctccccggctgctccccggctgctccccgctgctcccggctgctctcggctgctcccggctgctccc

SEQ ID NO: 477455 - DNA, 122 bp, Homo sapiens
cccgacacgcggatcttaaacagcccagaccaccaagcccgacaggccgggaaagctgagcgcgcgctgctggggggacgcacactttggaggctgtgtgggcgcgcgccggcaccccacaa

SEQ ID NO: 477456 - DNA, 122 bp, Homo sapiens
gactgagaatagaagagcggcgcggcgccagggacgctggcttctgcctgagcagcagcacgacacagcacttgggggagtcagacctgaggcgccctcagccagtggcccagcgctatttc

SEQ ID NO: 477457 - DNA, 122 bp, Homo sapiens
acgcaattcgtcgtaagtctcagggtcagcaggaggaaaccacgcactacatgctgggagcggcgcgacggaggaccgcgttgtatgctgggacttgtagtctcgcccttagccagacccct

SEQ ID NO: 477458 - DNA, 122 bp, Homo sapiens
ccacctttacgcctgaaagaagactcccaaagattgctttcttctgggacgctgcttggacgctaaccgcgttgattggaacagattttgtgtcttggctggctttgggtgaagaccgggga

SEQ ID NO: 477459 - DNA, 122 bp, Homo sapiens
taatgcccgacctgaagatctggtgcggctcccatgagtgtcctattcccagatgacccccgtgaaccctgcgacgcgtggcttgggtgacccgggacgtttccacgggcgaaccccagttg

SEQ ID NO: 477460 - DNA, 122 bp, Homo sapiens
ggggtcagggaattccctttcctactcaaagaaaggggtgacagatggcacctggaaaatcgggtcactcccacccgaatactgcgcttttccgaagggcttaaaaaactgcacaccaggag

SEQ ID NO: 477461 - DNA, 122 bp, Homo sapiens
ggaccgggaggtgtgcaggaagaccgcgcacagccatctgccctgagtaggctctgtctgcgtgttcgaggcagggctctgatccgatgaccgtgaagattcaacctctgtgctgaagagaa

SEQ ID NO: 477462 - DNA, 122 bp, Homo sapiens
acgattacaatgactgttactctacctcttattctcactgtagtgttcccagtgaagcggcggaaccggcacagcctagtggggcctcagcagctaggaggacggccagcccctgtccgacg

SEQ ID NO: 477463 - DNA, 122 bp, Homo sapiens
ccggtttgaagacctttgttttgaagaacgtggggtcagcgagttgatgaggaacaaggacgagctcatctgaggaaaaaacggaaggaagcacttgaaaccgggtttcgtttcactcccaa

SEQ ID NO: 477464 - DNA, 122 bp, Homo sapiens
cccaggaacggtccccggcttcgcgccccaatttctaacagcctgcctgtcccccgggaacgttctaacatccttggggagcgccccagctacaagacactgtcctgagaacgctgtcatca

SEQ ID NO: 477465 - DNA, 122 bp, Homo sapiens
ggattctgagactggataacattggatttcacacatagagaaaagaaagtaagctggtgccggacctggtgttgacacttggatcctccacttaccagcggggtgacctggacaatttctgt

SEQ ID NO: 477466 - DNA, 122 bp, Homo sapiens
ctatgcaccgtgtcgcaagtctcttccgcagccacagtgacttttcacttccgcttttcccgcctccgttttgactttgcaaccaaactacctgtactggtgaccgacagggacgtgtgacc

SEQ ID NO: 477467 - DNA, 122 bp, Homo sapiens
accacctacaagacagtaacacccgcgtcagggactgctggagaagcacaactcctctaccgttccgcataacacggcagccccttccgagaaccctggggttcgacccgagagcagcccct

SEQ ID NO: 477468 - DNA, 122 bp, Homo sapiens
ccagagccccggagctccgaggtgcacttgaagttcatctccactgccaggagaacgcagcgcaaactgtcaaagggctcccaatccttagggcgtcctccctgtctgcaatagctttttgt

SEQ ID NO: 477469 - DNA, 122 bp, Homo sapiens
acggtgcaggatcagggaaaggtgagtcctaggacgctgaggctctagaaaagtcgagagcgctcctgctcgtccccgtgagcttgaatcatccgaccccgcaggcctcccgggggtgtcgt

SEQ ID NO: 477470 - DNA, 122 bp, Homo sapiens
cctccccacccttgtctcttcacagctgggaactgctggctccgtcaagcgaagaacggccgctgccaggtcctgtacaagaccgaactgagcaaggaggagtgctgcagcaccggccggct

SEQ ID NO: 477471 - DNA, 122 bp, Homo sapiens
acaactgagatgtatcagcagaagaactgaagtccatttcagagtcatcctggtgcaatgcgatcattcttttccagtcactgtttctttctcatacttatatacagagataaatcaatcaa

SEQ ID NO: 477472 - DNA, 122 bp, Homo sapiens
gttttaaaaggaagagcggaggcctcagggaataaatgagcaccagaagtcattacagttcgagtcggtgattaggaagagtgaggggcagaacggaggtggctgggacttgggtcgctggc

SEQ ID NO: 477473 - DNA, 122 bp, Homo sapiens
gggctggggctggggctggggccgggaccgggagcgccgcctcctgggggggctctgatccgcccctccccacgcggcgccgcccgcgccccgcccgctcccgccggacacagcggaccctg

SEQ ID NO: 477474 - DNA, 122 bp, Homo sapiens
atccctcgccccacccgcgagggactggggtaggagtaggggcgttgccgtggttagcctcgaactcctaggctcagacgatactctcgcctcggcctcccgagcagctgggactacacgcg

SEQ ID NO: 477475 - DNA, 122 bp, Homo sapiens
cggacctaggaaggacccagggtccaaacatggcccgaggctggccgagagcacaacagccggcgggcgctgacgggcacggagcgcacgggaccgcggaggaacccgcgcgcgcccccgcc

SEQ ID NO: 477476 - DNA, 122 bp, Homo sapiens
aaaaaaacgcatctctcctttgggacgtaccatccccggtctccatgagctcggcgttgccgtacttgggcgctgtccgggaccccgtggaaccctgcggtctctccacctgtatcgagtgc

SEQ ID NO: 477477 - DNA, 122 bp, Homo sapiens
cacatgtattttgcaaaactacactgaagtttctgataatgacggatatcaacaattaaacgcttacttcttgccaaatgctgtgctaagtctcctgtaatcattctttcatttaatatttc

SEQ ID NO: 477478 - DNA, 122 bp, Homo sapiens
ccttagctcagtcactcaccagtcctttaaccttgccctttgaatggttttaggtgtttccgaaaaatccaatccaccctccaaggtggaaagtgtgccatctctgcccataatccaaatgg

SEQ ID NO: 477479 - DNA, 122 bp, Homo sapiens
gtatctcagtgagcactcatagaattgctgtctgtcctccagaacccgtgccaaggcctccgagtgcccagttactgaggcagctggggaaaaacgttgagtaaacatgattctacaattac

SEQ ID NO: 477480 - DNA, 122 bp, Homo sapiens
aggtttatggttattaagtttaagagttgcctaacagaccaaaggaaagtcaattaaacacgtacagtaagccctggtaggttgtcagtgactgccaggcgccccattccgtgggaaacact

SEQ ID NO: 477481 - DNA, 122 bp, Homo sapiens
ctctaatagtagagccagatttgtatgactccaaagctcatgtccacctgctgtgacccacggcttggaataaggacaagggctactgcagtgctcaagacagcttttaccctggactccaa

SEQ ID NO: 477482 - DNA, 122 bp, Homo sapiens
gaggcggaaaaccctgggcccgcctggcctgggcgcagatcccaggcccgcggtgcatggcggcctccagctggcctaggccccgccccgcccccgcagacagaggccggaggctggctggt

SEQ ID NO: 477483 - DNA, 122 bp, Homo sapiens
cgcaaacgtagcaaggatcggggctgtcactgatgacgcgagacgctgctgccgagtcaccgctgcgatgagtctgagcgagaaagatccggcctaccccgtagcggacggacattggttcc

SEQ ID NO: 477484 - DNA, 122 bp, Homo sapiens
caggagtcgagcgctgaatacttagaggcctgggcgaatcctcccgggcctgcgggtctacgaacagagaaccagccagagccagagagaaagaacgacaggagaagggagagggagccagg

SEQ ID NO: 477485 - DNA, 122 bp, Homo sapiens
cactgcagtgagggactcagacctgccccatggggtccatgaggggtggctcagccaggccgggctcagggttccataccttggcctgctcccagaactgctctcggttaatccgcttcatt

SEQ ID NO: 477486 - DNA, 122 bp, Homo sapiens
gacccggcccatgcctcagcgaggccgcagtgactcctcctggccagcagagggcgccagcggacacttggctaccggccgcccagggcgggcctcctcttgccgtccccttcctcgtcttt

SEQ ID NO: 477487 - DNA, 122 bp, Homo sapiens
aatggggtcatgttgtgtaaatccctaagcccagtgctgtctcggaaaagacctcagttccgggtttattgttctctctcccactcaggcaccatcagtctcaactgtcgctggccggagct

SEQ ID NO: 477488 - DNA, 122 bp, Homo sapiens
gggtgtggtctccctggtggagtacgtcggtgggttgggatggggagcggctggacagaccggtctcactccgtttggtgccactccacccgcccgggtttccgcgccctgccgcgctgctc

SEQ ID NO: 477489 - DNA, 122 bp, Homo sapiens
acccattctcctcatccctctgctctctggcctccagcctcccagcagcatggctttcaccggcaagttcgagatggagagtgagaagaattatgatgagttcatgaagctccttggtgagt

SEQ ID NO: 477490 - DNA, 122 bp, Homo sapiens
cttggcactgtgaagggcaggctcatggcttcaaactcctctgaggtggcttcattgtctcggatgtacatgagtccaggaataaaatccttatcaaccttttaaggagaaaaagaaagccc

SEQ ID NO: 477491 - DNA, 122 bp, Homo sapiens
gaaggctggtcaccccaccctaatcttgttatgcaaataggcttcccacttggcaggggccgtcttgtccactcgtttctgtaaacatgggtggcaaaaagagaagatggagctgccattta

SEQ ID NO: 477492 - DNA, 122 bp, Homo sapiens
gaccgatttacaggatcacagggagaaggaaatgggttgtacaaatcgcctgtcaagggacgtgtttcatccgcatgctgtgcaggtgtgaactgcccttgggcaggatgccgcactgcgtc

SEQ ID NO: 477493 - DNA, 122 bp, Homo sapiens
agctattctcctgtctcagcctcctgagtagctgggattacaggcatgtgccaccacgcccggctaattttatgtctttttagtagatatgggggtttcaccatgttggtcaggctggtctc

SEQ ID NO: 477494 - DNA, 122 bp, Homo sapiens
ggccgcggcgccgcgctggtgggtgggatcgtggcggagcgccaggcgcccaaagaggggcgagaaagcgccatggcggcggcggcggctgtgtccggtgctcacgccgcggcgaggtgagg

SEQ ID NO: 477495 - DNA, 122 bp, Homo sapiens
agcgcgcctgggcgaggaggaggttccgactggggcgggcgctgggcgggcggggggcggcgcgcggccggcggggggcgggggcgcgcggccggggggcgggggagcgggggtggcggccc

SEQ ID NO: 477496 - DNA, 122 bp, Homo sapiens
atcacactgagcacagagccccagacccagcttctctcagagtacttgcttgagtggtcccgctgtcactgtgctctgggcagtgagaactgtccccatggctagatggaccagaatatcct

SEQ ID NO: 477497 - DNA, 122 bp, Homo sapiens
gcttatgtgtgactttcgcgaggctgtgtatgcatgtgacagtacgtgtgtgaggatcttcgtgtgattgtgagcatcctcaagtgtatgtgaaagctatgtctgtaatagggtgttggagc

SEQ ID NO: 477498 - DNA, 122 bp, Homo sapiens
tcacatcaagaaaaatataaactggctgcaaggtcaagatatattttgggccattggaatcggcatccccaaaggtgttgctgtgaggactgaacaagggtggaatgctaaatatttaacat

SEQ ID NO: 477499 - DNA, 122 bp, Homo sapiens
ctaacagctccaaaatggatcaaaatgtttgttttggatgaagcagatgaaatgttgagccgtggttttaaggatcaaatctatgagattttccaaaaactaaacacaagtattcaggtaag

SEQ ID NO: 477500 - DNA, 122 bp, Homo sapiens
ggtgatccgcctgcctcggcctcccaaagtgctgccattacaggtgtgagccacggcacccggctgtgaactcatgatttaaacatataactggggccgggctcagtggcttatgcctgtaa

SEQ ID NO: 477501 - DNA, 122 bp, Homo sapiens
ggcctgggcggggcggagggggctcgggcccggaagtgcgggtgtggggcgcggccggggcggagacttcgggcccggctggcgggcggcgccgggagcgcgggggcggcgggcccgggtcg

SEQ ID NO: 477502 - DNA, 122 bp, Homo sapiens
tgggtgtcccgggagtgtgggtgtcccgggagtgtgggtgttccggaggcgagggtgtcccgggagtgtgcgtgtcccgggggcgtgggtgtcccgggggcgtgggtgtcccgggggcgtgg

SEQ ID NO: 477503 - DNA, 122 bp, Homo sapiens
aagtgcgtgggggcagctgcccccggcagaggctcgggctagcggggcccctgacgcgtccggcgttgaccacggctggtgggcgcggggagggcgaccaagggactacagcgttagggcgt

SEQ ID NO: 477504 - DNA, 122 bp, Homo sapiens
caggggcaggtctcccaacaaggaaaaccagcacaccacccatcgctgtgagcatggacgcgtctcagagaagagccctggcagaatcagctcagcccccgccccgctgagggaggccccga

SEQ ID NO: 477505 - DNA, 122 bp, Homo sapiens
ctcccacctcagcctcctgagtagctaggattacgggcacgcaccatgccgggctgctttcgttttgttgtagaaatggtgatatggtttggatttgtgtccccgcccacatctcatgttca

SEQ ID NO: 477506 - DNA, 122 bp, Homo sapiens
cattcaacaagctcagacacccaacgctccccggggccgggtcttaggcgcacattggctcgcggtgcacgtccactctcctgtaggctcgtgcccttgacatatccggggctgtcacagtc

SEQ ID NO: 477507 - DNA, 122 bp, Homo sapiens
ctgggctgggcgggggggctgtacctcaccctgggacttggtggactaagtccttcccaccgtttatcacccagatacctgcacggacaggatgcctttgtgcaacactttattgggaaaga

SEQ ID NO: 477508 - DNA, 122 bp, Homo sapiens
actctgccagagtttctgggttgagtgatgaagcacaaatgtttccctttccaacgctctcggaactgtcagccttatttctatggctgtcattctcttattcacaaaaacgaaaccgggct

SEQ ID NO: 477509 - DNA, 122 bp, Homo sapiens
tcattagaggggcccgaaatgataatagcttccatttatgtactgctttctaggtcgctacgttttgtttacattcattatttcatataggcctcataacccagtgaggctttattgttctc

SEQ ID NO: 477510 - DNA, 122 bp, Homo sapiens
ctcagcctgactagggtttcagctgcagccagagtggacattctccatgcacgctggcagcgcccacctcaggcagctgtggagtccctcaacttttccaactcaggttttattggaagctt

SEQ ID NO: 477511 - DNA, 122 bp, Homo sapiens
gcagcgctcgccgcgcctctagtgggagcctctggcctggtggtttccggggagagagcccgaagagcaagggcctcggcagcttcctcagtggggcagggccggcgatgccagccagggac

SEQ ID NO: 477512 - DNA, 122 bp, Homo sapiens
tcttcctaataagcctgggagcgctatgggagactggagtctatctcaccgctgcaatctcgaccataagagacaggtacgccccagaggggccagttcagagacctacccccctaggtgca

SEQ ID NO: 477513 - DNA, 122 bp, Homo sapiens
aattattactttggccagatggaaaaggttccatttactgcctgctggaggaggtttagtcggtaacactgaagagggaaggaagattgaaaatgaggtatttttcatgtgcactaaggctg

SEQ ID NO: 477514 - DNA, 122 bp, Homo sapiens
ccgcccatttcagtgggcctctgtgtttggagaacgaacttcgaaagactggaacacttccgcctgtcaggccagaagagatttcctgacaccacagctggaaacccatgtgcatttcagtt

SEQ ID NO: 477515 - DNA, 122 bp, Homo sapiens
ctgccagattcaagtgattctcctgcatcagcctcctgagtagctgggattactagaatgcgccaccacataaaaaatattaattgttcatggtggtatgcacttatagtccttgctacctg

SEQ ID NO: 477516 - DNA, 122 bp, Homo sapiens
cacgtaccacctccccttcctctgacctaatgagggctcgagttggaaaccacaaaccctcgttggccccacaggagccagcctctggcttctctctgcaatggccatgtgctgcagacccg

SEQ ID NO: 477517 - DNA, 122 bp, Homo sapiens
tccgcatctgtaacgccatgaaagtcgtgagggttaaaggcatgggcagacagctttgcacggtgctcaacagccaccatttactgtcatcattgtgaatacccagaggacaaatcataaat

SEQ ID NO: 477518 - DNA, 122 bp, Homo sapiens
ccctttcagcacacatgcagacacatacacacacccctgtttggactgtcacagctcatacgcttgccattgtgaattttcaaatctgcattctgtaggagtaaggagatccctgttcatct

SEQ ID NO: 477519 - DNA, 122 bp, Homo sapiens
taggactacgaactggaatcgtgggcagagggggttgataggttgtttccagtatgagaacgcctcactcccagacgcatctctcgcgctggatctacgtggtcatttcagcaccatggtca

SEQ ID NO: 477520 - DNA, 122 bp, Homo sapiens
ccagctccggcgggacatgggaacctctcaagagctggcagcggctgcgcggagggtccgcgaaccgcgaccactggacgcccgccttggaaacgctgcagcccggcggcgtggtgcagatg

SEQ ID NO: 477521 - DNA, 122 bp, Homo sapiens
gggggagtcctggccgcaaggctgaggtttgctgatggtcttctttcaccccaaaagcagcgctgacctctgcaataataataatataataataataataatgatagcaaccacaagaagaa

SEQ ID NO: 477522 - DNA, 122 bp, Homo sapiens
ggagaaagaagcagaatactgtcactgaacttatagttaagtgccagttgaagtatctaacgaaggaaaagttcatattcaggtgtcatgatagaggcataatttcaaatacagaatctttt

SEQ ID NO: 477523 - DNA, 122 bp, Homo sapiens
acagcactgacaacagcccgtgacagggccggcccttctgtctgcaccagcccagcacgccgggctgcacagcagattctccaacgcgtcttccagacctcagcttccacactgtgacggtt

SEQ ID NO: 477524 - DNA, 122 bp, Homo sapiens
tttctgaatcttcttcccaagttttctaaactagcacagtaaacagacaaactaatgtgccgtatggcctgctgcaattggcttctctgataacaaatatgtaccttacaacatatgtcatg

SEQ ID NO: 477525 - DNA, 122 bp, Homo sapiens
gatcacgagattagaaacgtggccgaggcctggtgcttcgtggacgagagctgtgggaatcgcattagggtctggggaggtcagggcggccccttgtgccccaacccccagaggaccctctg

SEQ ID NO: 477526 - DNA, 122 bp, Homo sapiens
gactcatctgggggctttgtaagcggactttgtttgctctctccacttggttggaggaaacgttcgaggtgggcgagaaagaaaagcgcttcgggagaaggtcgggcctccaggagtcccgg

SEQ ID NO: 477527 - DNA, 122 bp, Homo sapiens
agtgtgggggctggtcctttgatggccagaactctgctgtccccaccttcagagcctccacgcatctgagcacctctggtgccatttctcaggtcatgtgatgtagattacatctcgaatgt

SEQ ID NO: 477528 - DNA, 122 bp, Homo sapiens
ccatccagatctgaggttccatgggtgggggcctcctgcctctctcacccaggttttcctcgggaagagcagtgcctaattaaaaccacaaagggaaaaaccagggcggcagactgtgtgtt

SEQ ID NO: 477529 - DNA, 122 bp, Homo sapiens
cgttcgaccacagtgggataaacgattccgctgactgtgaagttcatccctctcaactttcgctacatgcttcaaactcgcgggtttctccgcttggttccacccagagctcctccagagcc

SEQ ID NO: 477530 - DNA, 122 bp, Homo sapiens
cggaaggggaacgtgcagacacccagagaggctgggagactggctggcagtgggcactgccgggaagcccgcggtgcgggtcgcagaggcgctccggatgcccgcaaggcggcaagagtccg

SEQ ID NO: 477531 - DNA, 122 bp, Homo sapiens
cttcccccagctgcaagagtttgcaaaaacattgggcgtctcatttggcgagcgttttggcgcggacagaggccgaggccggccggggaagccggacccgggccctggcgccgccgtggcct

SEQ ID NO: 477532 - DNA, 122 bp, Homo sapiens
ggcgccggggcctgggtgggctgggctggcgctgctggaaatcctagcactcaggtgggccggcgccctggcccgtggcagtgggagtgcagcaagagtgagcagccttcctgcacttctca

SEQ ID NO: 477533 - DNA, 122 bp, Homo sapiens
gaaccctcttcgccccgcccacggcccctgaacgctgggggaggagtgcatggggaggggcggccctcaaacgggtcattgccattaatagagacctcaaacaccgcctgctaaaaataccc

SEQ ID NO: 477534 - DNA, 122 bp, Homo sapiens
gccggccgggggccgccacataagacctgcaaggtggtgcctggggccctggctccttctcggctgcccctgcccacccagtaacagcccccaccagctacagagcccaggcgggtgccagc

SEQ ID NO: 477535 - DNA, 122 bp, Homo sapiens
tggctctggagaggttgggtatttagagatacagctgaagggatttgtgggtggaaaggacgtgtggttcctggagtagatgggatcagggatgcatcaagggtccagcctgtgctgtggaa

SEQ ID NO: 477536 - DNA, 122 bp, Homo sapiens
cgccgccgccgcactataattttccaaacaggatcttgcaatcagggccttattcattagcgcataaacaattttgtttctcggcactcgagcctgtcaatcacgcggagagggaacatctt

SEQ ID NO: 477537 - DNA, 122 bp, Homo sapiens
gcacactcttcccccaggtttcctggtagttgaattggtctcatcatctatgcctctgctcgagagttaactccttatgcaggtcttttctgaccatcatttctaaaacaggtgattgtatt

SEQ ID NO: 477538 - DNA, 122 bp, Homo sapiens
tacgaccacttccttcctccagcgcttcacctcccttctttccagaaagaggaaatgatgcgagtccacaccgcaggccacagcccccatgtctcggccccagcagctgggggacctggccc

SEQ ID NO: 477539 - DNA, 122 bp, Homo sapiens
ggcttgaaaaaattggctttgaaaaattgaaagtagtgtggtttgtttttattgtggaaccgatcaggaagaacaatttacagtcattgccattcttcacagatgaatggagtagaggtgcc

SEQ ID NO: 477540 - DNA, 122 bp, Homo sapiens
ttccacctttctttgtgaccttgggcactctttgatggcagataatttcctcttccagtgcggaatgccctgatgttaaactattagctaatatcctgggcacccattcacacatctgctgg

SEQ ID NO: 477541 - DNA, 122 bp, Homo sapiens
gtgccgcgcagaaagccgcggtccctctgcggaaggcgccgctcttggcttcggcggcgccgctgtagcttgaaggcggtacttcctccagcatttgccgcaagttattggcaagttcccct

SEQ ID NO: 477542 - DNA, 122 bp, Homo sapiens
ctacacaaaggcgctcacactttatccgaaacagcagtggggcttgggtgcggtggctcacgcctataatcccagcactttgggaggccgaggagggtggatcatctgaggtcaggagttca

SEQ ID NO: 477543 - DNA, 122 bp, Homo sapiens
gttcagatcagtggagtccagggggtcgggccccgcggggagtcccaccgcctcccctttcgagaggccattgtaaagctttagcatcctgtgcgccttccgccgacgctccgtgagcctcc

SEQ ID NO: 477544 - DNA, 122 bp, Homo sapiens
ctgggttggagtaggcatcttaaaagccatctttggctccagtcatactattctagaaatcgcagtatcattttggcactgttgattactccatccttgaaattccctttcttggtttccat

SEQ ID NO: 477545 - DNA, 122 bp, Homo sapiens
cctggtgctccagactgatgtcacccgggccgagtgctgtgcctccggcaacattgacaccgcctggtccaacctcacccacccggggaacaagatcaacctcctcggcttcttgggccttg

SEQ ID NO: 477546 - DNA, 122 bp, Homo sapiens
ctttacaaatgtactctatatttcttactaatctcaaattggctacagtacctcgcttttcgatcctattttcctttactccacaatcctaacagtttaaaatgtcggcttgtcaaatcctt

SEQ ID NO: 477547 - DNA, 122 bp, Homo sapiens
atacagccacacggagagagcccacgttctctttgataatactgtttattgtccacggaccgagcgattgctcaagaatgatacaaagcatcagagacatgcgcagtctgcttgtcaacttt

SEQ ID NO: 477548 - DNA, 122 bp, Homo sapiens
ggtgggttaaaaaaaaaaaaaaaaaaacctttcactcttgtagaataagccaggagccggcgtgtggtagacttctgggcctgtttcccgacagctggtttcgtttagatttttgtgtgatt

SEQ ID NO: 477549 - DNA, 122 bp, Homo sapiens
gggctcctgtttccgcgcggagggcagagtctggtgatcctggggagggaggcgacgctgcgcccaggtggtgggcacagctgaagtgtaacttgactgcttgactgctttttgcaggcctc

SEQ ID NO: 477550 - DNA, 122 bp, Homo sapiens
tctgtggaggacaggccggctccagagatcgctgcagttggcggagcgcctgcaggagtccggtcgttcattaggcacccaagagcaggcgacgctgcgcttctgcaccggagccccaccaa

SEQ ID NO: 477551 - DNA, 122 bp, Homo sapiens
cgaagcagggcaaggcattgcctcacttcggaagtgcaaggggtcagggagctccctttccgagtcaaagaaaggggggacggactcacctggaaaatcgggtcactcccaccagaattttg

SEQ ID NO: 477552 - DNA, 122 bp, Homo sapiens
taaagacttagaacaaagtcatagagaggcccagacaccctgaactctggccccaagagccgagcccgggagaccccctcagggaggaggcatgaactgtcccagcccctacttccctcctt

SEQ ID NO: 477553 - DNA, 122 bp, Homo sapiens
ccatgcctaactgtctctttgcttctcagttgcagatctgatctcttctgaacacctcatcgtgtctccatccctgggaatctgaccctagcaactggaccactttgttcttggaattttgg

SEQ ID NO: 477554 - DNA, 122 bp, Homo sapiens
ctgtggaggctggagtcctgtgggctggggacgacgggaagaccaagtcgtctgtataatcgccgtgggcgcagccggcagtgccacccacccacccacaaggcaacacggggcctgagtcc

SEQ ID NO: 477555 - DNA, 122 bp, Homo sapiens
gcagaggtaatggacgcagctggcggttcactcttagtctgagcattccttctttggtggcgtcgctccttcctgttctcctttgagccgcgtcaggaccgggcctagattccgcgacttct

SEQ ID NO: 477556 - DNA, 122 bp, Homo sapiens
cacttagaacaacgcgtgacacgtttgaacacggaagaacacggaagcctgtgtgttaggcgttaacattgttcccgcgtgaaggggtagaagaacaggcaaaatccatgatttttaaacgt

SEQ ID NO: 477557 - DNA, 122 bp, Homo sapiens
tattccggggaggtgttgggcaccaacatttttaaagccccgtgggtggttccctgggatcgcccagaccgaaaggccccgaacgtccagatcgcagggaatggggtcggaggggcggcgct

SEQ ID NO: 477558 - DNA, 122 bp, Homo sapiens
cagactgctgggccctgccccagcgatttctgattctcttgttctggggtggggccggaacgtggcagttaacagttgctgctgctgctgcactaataggttggaatttcagtatgaggtgc

SEQ ID NO: 477559 - DNA, 122 bp, Homo sapiens
atgcatgtgttgagaagagggtagctgttgcagccagagatggctgaactgaggttagtgcgacaagacagagagaagttaacaccagcgactcgcagggacgaacaggggccggggccggg

SEQ ID NO: 477560 - DNA, 122 bp, Homo sapiens
gcctggagcctgtattaccaaaggcagcaagaaaacaccaggctctggccaggcaggcttcggttctgatctcagatcttggactagctccgaggcctggcccagggcaagtcacctcatcc

SEQ ID NO: 477561 - DNA, 122 bp, Homo sapiens
gtcctccagtcccctcagctgccgcgcgcgcgtcaccgccgcccgcaccgccgctgccgccgctactgagcatgcccagaggccgtccaacgggattccggccccccaagtcagcggggcgg

SEQ ID NO: 477562 - DNA, 122 bp, Homo sapiens
tgaccctgactctgcttgcaagcatctttctgctgttgcacgttgtcgtcatcctctcagcgtcgtttcctaactggacctttgttggagagaatctccgtgcttcctgaaccttcaccagg

SEQ ID NO: 477563 - DNA, 122 bp, Homo sapiens
acggcgcctacagctcagcctcgtccttctcccgaccgctgggctacccctacgtcaactcggtcagcagccacgcatccagcccctacatcagttcggtgcagtcctacccgggcagcgcc

SEQ ID NO: 477564 - DNA, 122 bp, Homo sapiens
taccacctaggggtgcagctgctgacctgatgtctgattggatgcagggggtgctgtgggcgtctctatggacaacactgacccccatccctgtataggtacgccaccccactaatcaacaa

SEQ ID NO: 477565 - DNA, 122 bp, Homo sapiens
ttttcaatacattcaaaaagagagagtaaaaaagagaatgttcccatgctctggggtggacgtggctcagctcagagaggaagccctggctgaaaaggctgcagcttaggctgttactcttc

SEQ ID NO: 477566 - DNA, 122 bp, Homo sapiens
ggattatcccaggccagcccaagtcagggcagggctggaaactaggggcttgttgcccagcgaaccgccacaacagagagcggactcgatcctgcgctccggccgggctgacctgcctgcgt

SEQ ID NO: 477567 - DNA, 122 bp, Homo sapiens
ggcagacgggtcgcgggtgttgacagggtcctgagggagtttgaagccttattctcgagccgcctcctcttctctacccacacttgcaccgaggtcaccccggcaccctccgcaccggttcg

SEQ ID NO: 477568 - DNA, 122 bp, Homo sapiens
cgctatcttatgagcccttgtggggctgggacagaattttattcatctttctatcatcagcgtctagtacggggagtagcaaatagtgagcactcgatagatgtttgcggaataatggacta

SEQ ID NO: 477569 - DNA, 122 bp, Homo sapiens
taagccagcagtttcttctgttgccgggcaacgcgccttttaaacctgagggagcgggcgcgtgagcacatcacggcgcccgtgacagagccagcttaacggattaataagcgcagccaggt

SEQ ID NO: 477570 - DNA, 122 bp, Homo sapiens
tgtgggatccaaccagagggaagagatcatggccgatcgactagcgaggcggaagtaaggcggaagtactgcccttaactcccggcactctggattggaagacggcgcacagagcctgtgtc

SEQ ID NO: 477571 - DNA, 122 bp, Homo sapiens
tgtgaagttcacaaactgcagattgatcagcagggggaagggatcataatgccgtggtggcggcagcctactttttcaaaatcaatttcctactggagatgggtgggaaattgaagtcggtg

SEQ ID NO: 477572 - DNA, 122 bp, Homo sapiens
gaccggtgggctgaccgcctctgactgccgttccgtggctgctcagtgtggggtctgcgacgtctgtgaggagagaggaccaaactgggaatcggagctgctggaggtttccatagctatga

SEQ ID NO: 477573 - DNA, 122 bp, Homo sapiens
ttttttttttttttttctgagacaggatctggcagtatcgcgcaggttggagtgcggtggcgcgatcacggctcactgcaaactcaacctccagggctgggctcaagcctcagcctccccag

SEQ ID NO: 477574 - DNA, 122 bp, Homo sapiens
aactcagaatttcaaaaggaaatcacaaattcagctaatattagcattttcagtacttttcgtaaactaagtaaatacacaaaatgttgatttttctgaccataagacgtattttatgtcct

SEQ ID NO: 477575 - DNA, 122 bp, Homo sapiens
ggctccaggtggaacccgggacacgtgtacgtcctcagtggggcctccgcattccacactcgagcacatttgaaccccggacacctttacgccctcagtggagcctccatgttccacactga

SEQ ID NO: 477576 - DNA, 122 bp, Homo sapiens
tcaagagcatactctcacgtgcaggtctgtgcccaaagtcttcacagcaactgttgcttccgggacggctcgcttagtctcctatccacgattctttccaatccccagcactcccggaaatc

SEQ ID NO: 477577 - DNA, 122 bp, Homo sapiens
aagggtccctcggctcgtggtgctgcagtgagccaggctacaccctggctggcagagccccggggcttccagcagcgcagccctaggcctgcggagggaaggctgcactccagcctgtcggg

SEQ ID NO: 477578 - DNA, 122 bp, Homo sapiens
gggtcctaatctataactcacatctgttcccttggataccctcgctacaattgccattcccgcggaaactcttcttcctgccgaaaccgcttgccctaccactgtagcccacatttctgctc

SEQ ID NO: 477579 - DNA, 122 bp, Homo sapiens
catatgtcacatgtatgtgtgtctcacacgcctgcatatgtcacatgtatgtgtctcacacgcctgcataagtcacatgtatgtgtctcacacctgcatacaccacaggtatgtatgtctca

SEQ ID NO: 477580 - DNA, 122 bp, Homo sapiens
aggggcgtggagaggggaggtacaccacagcgatctgcagaatctcaaaggacaatattccgtggaggaggtgttatataaaagccagacggaggtccaaagaagccaggcgggccagtcgg

SEQ ID NO: 477581 - DNA, 122 bp, Homo sapiens
tcctgagctttcctccatctcgctctctgcgccttttttccaggttttggaggcgaaagccgccagtgaggctggagcagctcagcagtcattgaaatagtacctccctgagaagtcaacgt

SEQ ID NO: 477582 - DNA, 122 bp, Homo sapiens
agccgaccggggaccccggcgggggccaggcccgactgcccagcctcggaaccctggcatcgcccccgagggagggagtcactggtggctgacagtgtttggtaaccacagaaaccgagatc

SEQ ID NO: 477583 - DNA, 122 bp, Homo sapiens
taacttcaacttcaagtcaccagtggcattagcccctcacaagagactcagcctgtccttcgaagctttgaagccaggcattggcttctcctctctagctatgaaggtcttaggtggcatct

SEQ ID NO: 477584 - DNA, 122 bp, Homo sapiens
cgcgccttatccttggggctccccctggcggctaagccggtccctgcagggaaacgtgcccgttgtctcatctgcatccacttagcaccaagacggggtagctgagggggtcggcggaagag

SEQ ID NO: 477585 - DNA, 122 bp, Homo sapiens
gagcctcaggcagaggcgctggcgggccgcgctgccccaagcaggctgccaagagggccccgtgccccttgccacagtccagactggcgctccaggcacggcccacgcgagaagggactccc

SEQ ID NO: 477586 - DNA, 122 bp, Homo sapiens
gccgggggcggggagtgtggaccgattggatggagaaagggagagtttggtcatcaggcacgcattttcagtttgacaagaggaataagttctgatgtcctgttgcacagcatggagggctg

SEQ ID NO: 477587 - DNA, 122 bp, Homo sapiens
cgcacgcggacacacacacacacacacacacacacacacacacacggcccccatagccaccgcaactctcagcagcagccctagccccgacccgaggccccaagacggcgggccaggaaccc

SEQ ID NO: 477588 - DNA, 122 bp, Homo sapiens
ttctgcaacatctcctatccctacccccacccacccgggcctctccgagatccaggtctgcgtgccccccatatgacacgtgccagtctgtaacttgcctttgtcacctaacaaattatcag

SEQ ID NO: 477589 - DNA, 122 bp, Homo sapiens
gaggggcgggcgccttggcactcagatcttacggtcgcagagcataattgcccaaccaaccgcccaaagaaaaataacaagcggcggggggttggggagggaggagggccgacgtggaccac

SEQ ID NO: 477590 - DNA, 122 bp, Homo sapiens
agcaaagaagttctggtgctttaagtgttcctcgctcggctcagagactcggcttcgagccgcgactcaagacagcacctgggggtatttgttttgcctaagcctgctgcacttccacggcc

SEQ ID NO: 477591 - DNA, 122 bp, Homo sapiens
gggctgagaggaagcaagacgtaaagaattttcatcccgtatcacagtgtttttattgctcgcccagacaccatgtgcaataagattggtgttcgtttccatcatgtctgtatactcctgtc

SEQ ID NO: 477592 - DNA, 122 bp, Homo sapiens
gaaggtatggtttactaaccagatcccagaaactcacctgtgtgtaagagtctgatttctcgagcattcgcagccctgcaatagcaagtcagtgagaatggccttgagcacagcgtctaatc

SEQ ID NO: 477593 - DNA, 122 bp, Homo sapiens
agaactgtgactaaacaaccaccatattcatcagtggcaacaattcttgtaaacaagaaacgctgaatacaaaggctttgtgaaatcctgcccccaagaggccacatgtctaaagtcagtca

SEQ ID NO: 477594 - DNA, 122 bp, Homo sapiens
acgtcccctcctcccgctcccccgccaccgcgcctccgactcttctcccccgcgccgcggcgcccaccgcgtctcaggtttaatcccgggttggacctgctggtttgctctccccgctctga

SEQ ID NO: 477595 - DNA, 122 bp, Homo sapiens
attttattcagaactatggcaacaggggtaagcagtctcactacagaagggagtccaactcggaataagcacgaatgagtggggatctaccaccaaggggcagggtgggggtcgtggatgga

SEQ ID NO: 477596 - DNA, 122 bp, Homo sapiens
ctccatacagacaattccctcaggccacattccttccttctttttcctgtgtctgggcatcgagtagtttgaaggagctctcttttgtggcagtgtgaatgctggatagagcagaactggcc

SEQ ID NO: 477597 - DNA, 122 bp, Homo sapiens
gagcagcccccgccccccagtgcccgctccacacccctgcccggccccccaggctccccgcgctcctctggcgggacccccttgcactcgcctctgcacacgccccgggccagtcccaccgg

SEQ ID NO: 477598 - DNA, 122 bp, Homo sapiens
atggatggggagccggaagggccggggctctggggacccagctcagagcagcgagaacagcggaaaagcaggcagatcaaaacaaacacagtgtctgggaacaccaagaccctcctaatccc

SEQ ID NO: 477599 - DNA, 122 bp, Homo sapiens
accctcctccggcggcagcgggctgctcgtggacgtgttctcagactcggcctctgtggtcgcgcctctcgctcctggctccgaagacaactttgccaggtagtcaggtttcctgagtcctg

SEQ ID NO: 477600 - DNA, 122 bp, Homo sapiens
gctgtcaggggagggcgaaaccgcggacgccgctctccagaagtcgtctccccgggggcgcggggaggcctgaatggctctctttggcgtccccgttgggcccaccctctcccagcgtcacg

SEQ ID NO: 477601 - DNA, 122 bp, Homo sapiens
gcgcggcatcttcttccaggtcggtgtcatcaatgagggggatgtggggctgggaatcttcgatccggaattcaggatgagccatgaagttatggatggaggttcgagattcaggcttttct

SEQ ID NO: 477602 - DNA, 122 bp, Homo sapiens
cccaagatagctgccacacacttggtttctaatctctgtattgcttccccgccagaatgtcgaagtccttcccgaatatgcccagtcatactttctgaacttttgagcaaacaccgtccggc

SEQ ID NO: 477603 - DNA, 122 bp, Homo sapiens
agtgctccacgcggctcagtgctccacgcggctcagtgctgcacgagactcactgctccacgtggctgagtgctccacgagactcactgctccacatggctgagtgctccacgcgactcact

SEQ ID NO: 477604 - DNA, 122 bp, Homo sapiens
caaagcctatagttctgggaaaggagaaggaaactggccaaacaactaagctagaagttacgatagtctttatttccaaagaactaggtggggtagggatagtatcagagtgattgatattt

SEQ ID NO: 477605 - DNA, 122 bp, Homo sapiens
aaagcccggagactccaccttggcatggggcaggggtgccacatgggatctggccttgaacgggacattcctcattctgcttccggcagcgccaggttttctcgtccactactctgcggtgg

SEQ ID NO: 477606 - DNA, 122 bp, Homo sapiens
cctccggcggaagcgggagcctctgtcggccgcggaagcctggagtgggcggtacgcagacgcgcgcggtgagacccgctgtctgctcagcggactctgcccgcccccacctccccctgcgt

SEQ ID NO: 477607 - DNA, 122 bp, Homo sapiens
ctcgccctgcactaatctcctgggagaggcggcccggggcgggggtgggcagccggcttgcgcccgtggttcccacgcccttcggcctccgggggtcgccgcgggcgcgggctggggctcgg

SEQ ID NO: 477608 - DNA, 122 bp, Homo sapiens
cttctgtgagaaatgggtgtctgttcctttaaacagagcacagggcagacagagtggctccggggttgtttgcagcagagaggagggggagggagaaggaaggcatcctgttgttgagtaga

SEQ ID NO: 477609 - DNA, 122 bp, Homo sapiens
agcacttactctccatgttttcgatctgtcatcctgcaggtctgctgtagcaggtggctccgcttgaagcgagggaggaagtttcctccgatcagtagaggtcggtgtgggcgtgggggctg

SEQ ID NO: 477610 - DNA, 122 bp, Homo sapiens
tctggctgctacacgctggctgcggggaacgacgggaaagcagggccctccgtggtgcagcgcgtgagccgtgcgcagggcagtgtgccccccgaacgctgagcccgaggtgtgtcaatgac

SEQ ID NO: 477611 - DNA, 122 bp, Homo sapiens
gccccatccatcttcctttcttttgtttctccttggtcttccttccctgttctgagtaggcggctcagtctctgagcaatcagaccccacccccaccccgtgaggtccctccaagtgtagca

SEQ ID NO: 477612 - DNA, 122 bp, Homo sapiens
agcagaggggcggccccgtggcaaggtcctccaagtgctgtcagcaggcccagctgtgcacgggccgcgctgcctcctgctccagcacatacagcaccttaacacaaggtatctgctaccag

SEQ ID NO: 477613 - DNA, 122 bp, Homo sapiens
tttcagtccctggattttgtattatttcttgttcatatccacctgtccttgtttcatttccgccagtcggttcagaagttctcattcttgtctacggatgccattcctttctttgcctcttt

SEQ ID NO: 477614 - DNA, 122 bp, Homo sapiens
tgactctcatcagtggtttttcctttagatttcgaatgaagcaagtgaacattgttgggccgagcccctacagtccgtcttcccgggtcatccagaccctgcaggccccacccgacgtggct

SEQ ID NO: 477615 - DNA, 122 bp, Homo sapiens
caaagcggccagaaccgacgagtcaccaaaggggctaatcttccacagcggagttccgcacgggcgcagcagccctgccacttcaccgtacgctcccaacactggccccagggaccccgttc

SEQ ID NO: 477616 - DNA, 122 bp, Homo sapiens
ggaggctgaggcagcagtgagccatgactgcaccactgcactccagcctgggcgacagagcgagactccatctgaaaaaaaaacagggtctcgctctgtcgcccaggctggagggcagtggc

SEQ ID NO: 477617 - DNA, 122 bp, Homo sapiens
tcttaccagcggctcttggaatggagtcttactgggtaggcccttgacctgtgagcctaccgtcattggcacagtagaataggaggctaggaacaaggcaggaatgaaaacaatcagaagca

SEQ ID NO: 477618 - DNA, 122 bp, Homo sapiens
cacgcttcagctataaggggaaataccctctccatagggcatacaccgagtaaatgacttcgtaactttacttcaccgtcttcatttacatcgggcgtaccccaagcagaaggtatttaaat

SEQ ID NO: 477619 - DNA, 122 bp, Homo sapiens
gtccgattcccaatggacaaagaggcaatgcagtgcgagggagccagaggccagggctcccgtcccagctctgtcagtgactcattgtgtggccttgggaagatcctcgctgcctaggcctc

SEQ ID NO: 477620 - DNA, 122 bp, Homo sapiens
ccaggccgcggcccgggtgccgagcggctggaagtgtggggagccgtgcccaggttttaccgctccagcaagtcgctggcggggcgacgtctcgggactccggctccgaaacgtaccctctc

SEQ ID NO: 477621 - DNA, 122 bp, Homo sapiens
gttctgaacgcgcgtaacttttgcctcagtatctcacttcttggaatccggcggcgttcacgtgtgtgctccagagaagggcgccagagggtattccctgaaagtgaaaggtcggcgaaaga

SEQ ID NO: 477622 - DNA, 122 bp, Homo sapiens
gcatggcccacctgaggaaatgctgtgtggactgagtggagtctccacacctgtgtccgccgcctgtggcgatggctcggtttccccagataccttttcgagtcctatggcctgggccaaaa

SEQ ID NO: 477623 - DNA, 122 bp, Homo sapiens
cgggcgcgggtctccgggacggtctggggtggctagggggtgcggcgcccggcggggatccgaatagggggcagccagcgtacggtgtgggaactcgggccggcgcgggagcctgcggtcaa

SEQ ID NO: 477624 - DNA, 122 bp, Homo sapiens
catcctggaacagctgacaacgctgtggtcagacagctggtggggctgggccaggctggccgggctggctgggctggctggggtgggagtgtaggctgttatatgacacccagagcccatct

SEQ ID NO: 477625 - DNA, 122 bp, Homo sapiens
aatcctttttaaatgtacagttctgtggcattaagtacattcacaaccaccatcaccatccgtctccagaactttttcatgttccctgactgaaactctttacccaataagtcctcctcacc

SEQ ID NO: 477626 - DNA, 122 bp, Homo sapiens
gaagatcttctccatctgcaccatgctcatcggcggtgagcccggccgcgcgcgtcttcccggggccactcccagacttctgcccgcaggcggcgccgtcccactccccggagggcctgagg

SEQ ID NO: 477627 - DNA, 122 bp, Homo sapiens
attcctggctttctggggtccagataggctggcaagagctgtttttgcatccatttgcatcgtgaagactggcattttgatacttcagctgtttgttcctgggagaattctgagcacagatt

SEQ ID NO: 477628 - DNA, 122 bp, Homo sapiens
agtgttgaggctgtatcttacagtggggcctgggactcaatgtttaacaagctccccaggcgcatgcaatacatctggcctgtggaacacaattcaggaatcacagtatgagaggaagaagc

SEQ ID NO: 477629 - DNA, 122 bp, Homo sapiens
ccagcaacagaccccctgctcagcaggtcacctatctttgcgacagtttttcttttcccacgctaaccccagggctcatttgcataaggtctctgttgtgacaattagtttcaggtgagctg

SEQ ID NO: 477630 - DNA, 122 bp, Homo sapiens
agattgctccccctgcttccagatagataaaccaattacctgagcagctctgctcctggccgcccgcgatcgcctccttttgtaggctgcctccatggctggattacactcggtgtatctca

SEQ ID NO: 477631 - DNA, 122 bp, Homo sapiens
cagggcaggcgcgctctgtgcaaaaccgagtcgtgtgcgggcccagggtggcgctcggggcgcttccagcgcacgtcacctcatctgcgtcgtcaccactgtcgcctccgaaagcgcattcc

SEQ ID NO: 477632 - DNA, 122 bp, Homo sapiens
ggaaaccaggagaccaggatctagttttaccttcatgtcattttggacttctctgaacctcggttgtcccatctgcagaatgagcagagtgggggaaaaaaaacatggttttcttttttttt

SEQ ID NO: 477633 - DNA, 122 bp, Homo sapiens
gcgccgactggggagccgcagtggggaagaggaaaacctgagggaaaggcctaggcgcgacggcaacccccaccctggcgcaggcgcacaacgaccctccccgggtgggagccagcgagcgc

SEQ ID NO: 477634 - DNA, 122 bp, Homo sapiens
agggcagcagccgtcaccagggccgttagcacaccaaggaccacaggtacccaggatgtgcggctgtgaggagggcccttctggcctgcatggtcatgagaagagaccaccagtggctgact

SEQ ID NO: 477635 - DNA, 122 bp, Homo sapiens
aaacagccacgctctcctttactgtgcattgtgcatgcctctgtgatggtgttactatgccgggacctctaggccataattttacatgtattaatctattaatagctccttctccagatgta

SEQ ID NO: 477636 - DNA, 122 bp, Homo sapiens
tgcagccggcgaggccagagccagtccggggtggctttgccaaccggcggagttggccagcggcgggccctcctaccgtcggtccttccccgctcctcctcctctgccccctccgcccccgc

SEQ ID NO: 477637 - DNA, 122 bp, Homo sapiens
cgtcctcaccgcacacggaggcacccgctccgtcctcaccgcacacggagggacacgctccgtcctcaccgcacacggagggacacgctccatcctcaccgcacacggagggacacgctccg

SEQ ID NO: 477638 - DNA, 122 bp, Homo sapiens
cctggttggctgcttcaggcgcgcgcgtacgctcgggggtagagcccggggggcggggcccgcgttgaccacgcccccggccctgcctgcccctccgttgtcgagcgttttccgctgacgga

SEQ ID NO: 477639 - DNA, 122 bp, Homo sapiens
tctcctgctcaggaatgtcagtgcataataagagaaataaaatggattttgttgccttctcgtttggttgcctttgagccaacatattttaaagtgtttgtttacattccagaaaagggtaa

SEQ ID NO: 477640 - DNA, 122 bp, Homo sapiens
cgggagaaaacctggaagccgggttggatccggagcggccaaatccacttcctagggggccgcaccgggcgcccggcgctccttcgcgtgacacgccccacccggctcctccttcctcccct

SEQ ID NO: 477641 - DNA, 122 bp, Homo sapiens
tcaccatgggtccaaattggtacaattgaatattcctacacccaggtcaaaggtggggcccgggaatgtattataataatacctaaacaattattggcattgcaactgaaaaggagtcaagt

SEQ ID NO: 477642 - DNA, 122 bp, Homo sapiens
ctcccttgggaagctgacaggactcagacccagcagtatcatttcctagccctctgaccacgggctagtggcttgaactccttgtactgtcattgtccagattaggaatatgggttcataaa

SEQ ID NO: 477643 - DNA, 122 bp, Homo sapiens
tacaggcgtgagccaccgcgcccggcccggaaaatttttttaagagtataaccaactccccgaggatacaggggtccagggaagctaaatgactgcttcaaggtcacccagccagtgagtgg

SEQ ID NO: 477644 - DNA, 122 bp, Homo sapiens
aacatgtgggacagaccccggctggcctgagggaagtgtccttacactgcctgctccatccgggttggggggtctggcctgctgggctgggcaagtcatgatgacactgagtccatccccca

SEQ ID NO: 477645 - DNA, 122 bp, Homo sapiens
gcgcccgcgaggctcacaggaacggccctgtcacctagtccgctccctcctgcgtcttaccgtcctggacaaagactccaagtcgaaggagacaaagcttgtaacgcaatcacgggaatcac

SEQ ID NO: 477646 - DNA, 122 bp, Homo sapiens
ccacacccggggcagatggacgtaccggcccatcgaggccctcatcaacgtcagctttcccggagcaaaggtgctgctgggatctgtggcagcttcccccaggacccaagccccaaagcctg

SEQ ID NO: 477647 - DNA, 122 bp, Homo sapiens
ctagggatgcggatgcggatgggctgagggcgggggtcccagcagctcctacctgctcggcggctggacgggacactcccgggagacgccgaggcgccagccccgcccggaccccaccccct

SEQ ID NO: 477648 - DNA, 122 bp, Homo sapiens
atcagccagacgttttccgccaccaacgctcccgagaccccactcctgtcaccagttccccgaacattcctgcgagcaatgtcgcagatactgctcacagacgtccccataaccaacttctt

SEQ ID NO: 477649 - DNA, 122 bp, Homo sapiens
tcgtcaccctgagcttgttggctgctatctaattcttattctttcattttcttgcccgcacgttcttgatagcagatcactgacaacagccattggaagcttaggaaaagggtatgtgccgg

SEQ ID NO: 477650 - DNA, 122 bp, Homo sapiens
agtggaagcccctgcaagggaggctcccattcccttctgaatccctgggggaaggatgagcggactcagtatgaggctccaggagaaagtgagcacccagttatgcagccacacaagcgtag

SEQ ID NO: 477651 - DNA, 122 bp, Homo sapiens
agtgacccacccttcgttaagtgtcaggccactgggtaaaaatccctgcagcccctcgctcgcttctcttggctggaggccgcgggacgggctcgctccccccgccgggacccagatcggga

SEQ ID NO: 477652 - DNA, 122 bp, Homo sapiens
ctttaaggggaagtatgttccctcctagaaacactcccgccttggagaaggggttgagttcgcaactccacttacagactacggaggaaccccagggtcaaaccaaaccaaaccaattctgg

SEQ ID NO: 477653 - DNA, 122 bp, Homo sapiens
tcactgcttggcgataggcaattgtctcgtcgcttggcaataggcgatggtctcaccgctcggcgatagtctcaccgcttggcgataggcgatggtcccttcgtggtcgccaaaatgtgtcc

SEQ ID NO: 477654 - DNA, 122 bp, Homo sapiens
atattagatattacaactgagaactgtaatcaacatgatatacagaggacactgaagagacgtacaactcagttcctgatgattatcatatgcccaaaagctaagtcacgaccacatgcaca

SEQ ID NO: 477655 - DNA, 122 bp, Homo sapiens
aggtgctctccccacgattccctcttggcgctcatttgtttgccataatttactgtccttcgttcttcacccaacccccaccaccaacaggactctattataaacttttgttctaaacaagg

SEQ ID NO: 477656 - DNA, 122 bp, Homo sapiens
tgtttttagtagagacgggctttcaccatgtgagccaggatagtcttgatctccacacctcgtgatccacttgactcggcctcccaaagtgctgggattacaggcgtgaagctttttttttt

SEQ ID NO: 477657 - DNA, 122 bp, Homo sapiens
gtcagctccaccttcccccaccatgtcccatttcctgctggtggtgccatgcctcagtggcggtcaccttgtggctgttctgccacccctcgggcatggcgtcatggtccagagcctggccc

SEQ ID NO: 477658 - DNA, 122 bp, Homo sapiens
tcctccctaagttctcgatatccttatttgtctccccaactcagtgagagctccctgagccgctcctgcccgcttccttggcgtcagctccccctttccaaagggtgctgcatgcatctgcc

SEQ ID NO: 477659 - DNA, 122 bp, Homo sapiens
ggctgaaaccagcaaatgtagcccagacaggtggcaccacaccaaaacttatagccaaaccgaatgggctttccccgaataaattgtttgcacccgtgacgaccaaaataaggaaccatgaa

SEQ ID NO: 477660 - DNA, 122 bp, Homo sapiens
aaacatttttaaaaactgatgttggagacagagcactcaattgaattacatatggaacaccgactgtgtgaccttaggcaaggtaaagcctctatgctttagattcctgattgtaaactggg

SEQ ID NO: 477661 - DNA, 122 bp, Homo sapiens
tcagaggatggatgtacaaacatagatcggaggttagaatgacccttgtggtgtcggtgtcgcaatggaattggagataaaattgtgtgaacacatggttgtttacatagaagttaagtgtt

SEQ ID NO: 477662 - DNA, 122 bp, Homo sapiens
gccccggcgcgcggggggcacgggctgcaccccccaaaaaagttttgcagcaacttcctgcggccggtcctcgcgcccgggcggaactggtcgggccggttccaggccaactttcccacgcg

SEQ ID NO: 477663 - DNA, 122 bp, Homo sapiens
ggagttacaggtgtgagccactgcacccagccttcactaggctccttattgtgcaactgccgttagcatccccatgccattttccggtattggtccctaattcctgctttcatctacaagtt

SEQ ID NO: 477664 - DNA, 122 bp, Homo sapiens
gcaagttggctctgctgaagtagaaatggtgggcggggagtcgccactgaccatcgtctgcgcagagcaccttcctgctgaccgcagctgtgagcgccggctgtacgcaggtccctgctgtg

SEQ ID NO: 477665 - DNA, 122 bp, Homo sapiens
tatctttttccaccttcacattagatgagatgataaattctagccccagaatgactagttcgaaatcctattcctcagcagtttggtggcctggttccacgatgtgtaaaggcagaggggct

SEQ ID NO: 477666 - DNA, 122 bp, Homo sapiens
ttttagcagcaggcaccagttgcaacacgacattgaccatgcaacatcaactgaagcagccgccaactcgccagccaggcgcactggtgggtctccggcttccccattgcactctgcgcgca

SEQ ID NO: 477667 - DNA, 122 bp, Homo sapiens
ttaacattcaatgggtaccttgtgtgggggaggccctgctaaatgctttacatggacgtacgtccttacctctatgaggtaggtggccattatgatgctcatagaggctggacagctaatat

SEQ ID NO: 477668 - DNA, 122 bp, Homo sapiens
gtggggcggcatacccaaggcacgagtgctcccagtccccaggctgccggcacggagcagcggcggtcaagtgcagggagggcacgaaatggtaaattttatgttgtgtatattttaccaca

SEQ ID NO: 477669 - DNA, 122 bp, Homo sapiens
tgacagcagagttgagtagttgtgacagagtctgtgtggcctacaaagccaaaatatttacgatctggccctttccaggaagttttccagcccctggtttaaaagagtacaaattacctctg

SEQ ID NO: 477670 - DNA, 122 bp, Homo sapiens
attgcattcttgagggctatggaccgagggaaaaggatcccaaacagcactcctcagcaccggaaccagagttgctgctaaacacgtgttaattaactcgtttctatctgaatgcttttgca

SEQ ID NO: 477671 - DNA, 122 bp, Homo sapiens
gtcccaagcccacccttggaagttatagctgagcaactctcagtgaaataaatgttgtaacgggtcaagtaattagcaggcagaattatgattgggctgtaacctaactctaatcgctgacc

SEQ ID NO: 477672 - DNA, 122 bp, Homo sapiens
cgccgggcggggagaaaaacttgagagccctggaaggggaggagggcacggtggcacgggcggggggagggcgcaacttttggactggtggtaaaactttaattacctttaaagaaaaaaag

SEQ ID NO: 477673 - DNA, 122 bp, Homo sapiens
gtttagaatttccctttgcagactgggagccaggagcaggaatggggaggtgagagggcacggaccagagaaacggaagaatctccaggaggcagagctgccaacgctgggcccaggggctg

SEQ ID NO: 477674 - DNA, 122 bp, Homo sapiens
tctttcaaggatggacttgccactaaacaccccactgtcttcagagaatagccatgtgcgcggcggttacttaaatgttccccgggtcttggttctttgcgctaggtctttgttaagtgtaa

SEQ ID NO: 477675 - DNA, 122 bp, Homo sapiens
agggcccgtgaaaagaccagtactgacataaccccatgcaggatgtacagacacggagcccggcacgggacagcccccgagcttacttaaatgaaagagcatcaacacaatgttatagaaaa

SEQ ID NO: 477676 - DNA, 122 bp, Homo sapiens
tcgacgttccagcagggagcagagttcttccctgacttttgtatcccccttaatgcacaacgagccccctgctccgctctccttcagatggcggattccgtatttgcccagacttcctcttt

SEQ ID NO: 477677 - DNA, 122 bp, Homo sapiens
ctctcatgggatggtacagcggcctgggcaggggcggagctgagaacagaatttcacccccgaggttctcggactggagctccagaggagccgctgcccaggggcacttaccgtgtccttta

SEQ ID NO: 477678 - DNA, 122 bp, Homo sapiens
aggtgggttgggtgggggtgggggtgagggcccgcgggaggcggtgaagcggggagggggcgctgctcccggcccctgcagcgaatcaggcctgccgccccgcctcacgcaacccaggctgt

SEQ ID NO: 477679 - DNA, 122 bp, Homo sapiens
ccactcggctcctcccggggcagggacccggcgacactggggaatgggcggcagcgaggtcgaaccggagccccggggcggggtgggggagctctctgggtggttaacaggatgtggcgagc

SEQ ID NO: 477680 - DNA, 122 bp, Homo sapiens
ggggcagggaggtgagtgggcaacactccttcccccatgggtaaggcagacacccagcctcggaccacatcagagacgcctagggccccagccacagctgggatcactcagctgggtaatgt

SEQ ID NO: 477681 - DNA, 122 bp, Homo sapiens
gctctcccgggccccccgccggctttccggaccacagtccccagaaggcgtcgcggccaccgccctaccctgagggatctttgaggagcttctgctttaactacagagtttaggtgactgct

SEQ ID NO: 477682 - DNA, 122 bp, Homo sapiens
actttcccatatgattagaaaaactttaaaattttgacaaaaccaagtgttagagaggatcgtgggaaaccaaagattctcatgcactattagtgggaatgcaaatttattcaatcactttg

SEQ ID NO: 477683 - DNA, 122 bp, Homo sapiens
ggaggtgccgggccctgattctcgaggacacacgctgtgcacctttctcctcaccagggacgtcgccaagaatgccctgctgcgctggcgcgtgttcatctactggacgctcctgggactgt

SEQ ID NO: 477684 - DNA, 122 bp, Homo sapiens
aatatcaatgaagtgtgagcagcatcaaccgcaggagtaccaactgggaatcaccctgaccgagccttgcttcctttgagcaccgggagatcaaggaattcatttgttgtttactcatttga

SEQ ID NO: 477685 - DNA, 122 bp, Homo sapiens
gagaggccctgcctggagtttctgtctgcactgggcactggaggctgtccgaaaagggtccgaaaggggctgagtggcactgcctaggacaggcaccagggtcatgatgaacgtatagaaga

SEQ ID NO: 477686 - DNA, 122 bp, Homo sapiens
agaagatgttcggccgtggctcccgccaccgcaaggaggtggactacagcgactcactgacggagaagcagtggctcaaggtacatgctggagaggcccagcagctgccgcaggccagcgcc

SEQ ID NO: 477687 - DNA, 122 bp, Homo sapiens
ccgcgggaggcactgcccttcccggctggtgtcctcagtacccgctgggtgaggaaagtgcgcccccacggctgaggtggagcctgcccggccccaaggccccaccgttgttctaggaaggg

SEQ ID NO: 477688 - DNA, 122 bp, Homo sapiens
tcaaattgctttgtacatagtgttcactgggcagcagttcatctacctggataagggctccgagctacagggaccctgacattgggatgtatggagagttggaattcaggaacagttgtacc

SEQ ID NO: 477689 - DNA, 122 bp, Homo sapiens
ctcaaggctttgtgctgagttgtcgtttgaaccaagcatgatgttatcaagcacaaagcacgtggcaaaggaaagatgctcccatctcattctgaaaacaaatactgataaccaagcccacc

SEQ ID NO: 477690 - DNA, 122 bp, Homo sapiens
catttcttgcagagcaggctcatgccaggcctggaggcccagcacctgcagggcccagcccggggaccaccaatgcccagcctcttccagctcagaagtgcacacggcagccgccgggcagc

SEQ ID NO: 477691 - DNA, 122 bp, Homo sapiens
tgcagagactagggccgggagtggtgaggcaaggttggggcctggagggacagctatgaccgttgaacttgcagaccctggtccaccttcttggagtggaagccagcggtgcagaaggggac

SEQ ID NO: 477692 - DNA, 122 bp, Homo sapiens
ctggagtttcagttttctggaaatgggagctgccttactcctgagagacttggaagtggccgctttggagttgggaggtcctggaagctgcacatcccccaactggctaggaattggtcttt

SEQ ID NO: 477693 - DNA, 122 bp, Homo sapiens
cccatttcgcagaggcggggagaggcacgaagcggctcatctcgcagtgtggtgcgggggcgccccggggataccgcctgaaggcagcctggagggcgcccgcggggtctgagtgtagagaa

SEQ ID NO: 477694 - DNA, 122 bp, Homo sapiens
tgacaaccagaaggccctggttccactctgggctcctattgctcatgccagccacttctgcgaggtgaacagaccatcccaaaagatcctgagctggccgggcgcggtggctcacgcctgta

SEQ ID NO: 477695 - DNA, 122 bp, Homo sapiens
agaaggcaattcataacaatttggcccagcattttaattttgtctgttaaattattcatgcgaatactttcatgagttaagccatgaatatttgattggtggttgattcataaccataaact

SEQ ID NO: 477696 - DNA, 122 bp, Homo sapiens
gggaggggcgtttgggtggaatgggacctggcacgcctggaccttcccgtggctgctctgcgagagcctgagagatgggaggggaggctgaggtggggagggagcctagagagccgtaaaat

SEQ ID NO: 477697 - DNA, 122 bp, Homo sapiens
atgtttctttgcttttcatgtgttcttaggtcagtgtcatgtattttgctacctccctaacgagcttataatccaggatagggctgtggattctgtttatactaccaatacatattcagagc

SEQ ID NO: 477698 - DNA, 122 bp, Homo sapiens
ttgaggtctggcgtgtgccggggctgggcgctcatgctggggtgggaggggaggagtgggcggggcccttaccttcccggagaccctgaaagcctgacttctgatgctcaaatgccccaccc

SEQ ID NO: 477699 - DNA, 122 bp, Homo sapiens
gttagagaccaacttgggcaacgtaggagacctccgtctccacaagtaaaattaattagccggctgtggtggcgcgcacctgtggtcccagctactcaggaggctgaggtaggaggatcacc

SEQ ID NO: 477700 - DNA, 122 bp, Homo sapiens
agggtgaagagtatgttactgctttaaaaatagaggcctgagtgctttgatttctgctcccggcagtcaacagctctataagcagtctagatcagcactgtccaatagaaatataatgtgag

SEQ ID NO: 477701 - DNA, 122 bp, Homo sapiens
acagctaatttttgtatttttagtagacacagggtttctccgtattggtcaggctggtctcgaactcaccaactttaggtaatccgcctgcctcagggtcccaaagtgcagggattacaggc

SEQ ID NO: 477702 - DNA, 122 bp, Homo sapiens
tacagtttggtgctaaatgctcttttatgaatttaaggtgccagtagctgtctacttgaacggcatgcttaatctggaacgccatgtcgaccttcatcccccagttctttctccccaaatta

SEQ ID NO: 477703 - DNA, 122 bp, Homo sapiens
gggaactgagggcaccgctgccgcctgcctgcagagccgccctctggtcccgctggccgccggttgtagtttgctctgctgccaccaggccaccacttataaggcagtggctccacccagtc

SEQ ID NO: 477704 - DNA, 122 bp, Homo sapiens
ccctttctgctgaatgagttagtggcgccctagaagttatttgtacagtctcttatgaagcgcctggatttctcattaaagccacaaaggcagatgcagggatggggagggccagggtttgg

SEQ ID NO: 477705 - DNA, 122 bp, Homo sapiens
cgcccaagtgaatgtttcacattgattggcagggaaagtgcaaacaaagaggtgcatctccgggaaacaatgattttggagatcccctgcccaccaccccagacttgtgcgcggtgcggagg

SEQ ID NO: 477706 - DNA, 122 bp, Homo sapiens
tctagagcaggggttggcaaactagggtctgcaggccaaatccagcccaccgtctgcttccgtagggcccatgatatgcaaatattttgttgtatatttttacatttttcaatgtttgcaaa

SEQ ID NO: 477707 - DNA, 122 bp, Homo sapiens
tcttcccctgagtagcctgcgtcacacacgcacacgccatcctcgcaaaggccgtgcccacggcagtccccgggacagcgacggctcccacagtcctcaccggtgaagcccgggttgcacac

SEQ ID NO: 477708 - DNA, 122 bp, Homo sapiens
tttttttgcacccagtttggttgtttgcggccataagcttttctttaagcctttccaacccgtccttctagagaaagtgtcttcataaggaagtcacactgctcacgcctgtaatcccaaca

SEQ ID NO: 477709 - DNA, 122 bp, Homo sapiens
gttgagcttttccagaggcggcgagctgggcgggcttcaggcatccagagcgctctgtggcggccgaagaaccaggcgccccctagtgtgggataagcgggccatcgggttttttttggggc

SEQ ID NO: 477710 - DNA, 122 bp, Homo sapiens
aaagagaagtgctgttaaaacctccctctgtgcttttgtgccacaaggcctttttcacatcgtttagagaaaggagattgcattgcaggttgctcctttgtggcatttagggatcatttctc

SEQ ID NO: 477711 - DNA, 122 bp, Homo sapiens
cacaaacagaagcaacactaatggaaatactgataagaatacccaaaatggggatgttggcgatgcaggtcacaatgaggatgtcgctgttgtccaagaagatggacctcaagtagctggaa

SEQ ID NO: 477712 - DNA, 122 bp, Homo sapiens
cccagggcagcaggtgcagcttggccgggtgtagcctcgctggagacatgcgtctgcagccgggctctgtggggcctcgggacaggcactgggaaaccttagaaactgcagagccgggccag

SEQ ID NO: 477713 - DNA, 122 bp, Homo sapiens
ccgggagctctggaacataaggcattttctgaacagcctcggtccctcgggccagcgactcgcaagctgccaggtgcgtcctgtaactttccctcagactatgcgcgttccccggctgggcc

SEQ ID NO: 477714 - DNA, 122 bp, Homo sapiens
cccacccacacggccactcgcaggagcccccaccctcacaaccacttgcagggagccccccgcccacacggccactcgcaggagccccccacccacgcggccactcgcaggagcccccaccc

SEQ ID NO: 477715 - DNA, 122 bp, Homo sapiens
caccgcccgctgtcaggatgagcgatggccgtgcccctccccggccctcggccccaggcccggttcccgctcattagccactgacactgtttgctttcccgccatggacgcccaccccgtca

SEQ ID NO: 477716 - DNA, 122 bp, Homo sapiens
tttctgggaagctgtggaccggcttgggtcctcctgtcccaccctcgctgagtttggcctcgccttgcactcacgttcttgaagccccggtacaggacctgcaactccttgcgcgtgaattt

SEQ ID NO: 477717 - DNA, 122 bp, Homo sapiens
gtctgctgtggttacctgttttatacagggagatgtaggatgaggacaattgccacacagcgcaaagactgaaaaaatcctaaaatcaaatggtagatgctgtcatctataagttcttgtct

SEQ ID NO: 477718 - DNA, 122 bp, Homo sapiens
acgacttgtgtcaggattcgaacccctgaaaggtaggactgtgtctttgccacctctgtacgttccacagccacttattggcaaatggtaggtgctgcgtaacccttgaatttttaagttct

SEQ ID NO: 477719 - DNA, 122 bp, Homo sapiens
gcccgaagctgtacccaatcaggggcaccggggaggagctctgcgatcggtccaatcaggcgcgccgtcggggacgcagctgcagacgttcaaccttctcgcgggattttcatttctcgcgt

SEQ ID NO: 477720 - DNA, 122 bp, Homo sapiens
gcagctttacagcgtcaaaaccgtgatgcacacggggctatacaagatctcctaagtgaacgggaacagtttcgtcaagaaatgatagctacccagaagtatggcacttgtttacattctga

SEQ ID NO: 477721 - DNA, 122 bp, Homo sapiens
tttcaggagtttgtaatttcttgcttcctctggtgtctgtcttcagtaccgcaggttctccggcacagcaaagaactgcctggctctcttgctctcagcggtgtcaaggcattcaagctatg

SEQ ID NO: 477722 - DNA, 122 bp, Homo sapiens
aactccagggcattcaccacgtgggaaaaggggccgaggggaagacacccagtggacatgcgcagtgaggtcggtgcctgcctagtgggctgtggcgcctctcctagccccaccccatgccg

SEQ ID NO: 477723 - DNA, 122 bp, Homo sapiens
tcgcgcccctccattggtacagcgcggtgtgacgcggccgggggcccggccaatgggaggcggaggaggcgggatctctttttccttttttttttttttttttttttttttttaatcttttt

SEQ ID NO: 477724 - DNA, 122 bp, Homo sapiens
tgcggcctgggagctggcgcccggccaccccccacagcctccaacctacggcgtagacgtcgccactctgcagccttcctcacagttacagccgcccccgctgccggctcctcacctctttg

SEQ ID NO: 477725 - DNA, 122 bp, Homo sapiens
catcggagttgctctccaccccgactcctgcttcgccctcaggctgagaggtctccaagccgccttggggcactagccccactccaacctggggcccacagtacgccatccccccacagaac

SEQ ID NO: 477726 - DNA, 122 bp, Homo sapiens
tacgtgtaccctgggctagacacaccctcctctggcttgctgtggtctggcctcaccctgcgatgcaggggctccatccacagccctctgtccaggagcacccaggctgtgcttacattttt

SEQ ID NO: 477727 - DNA, 122 bp, Homo sapiens
catcaatcttcagcactctccagttatagctgatttgaaacttcccaatgaatcaggagtcgcggggagagggagtaaaaattaggaggatttccagatcgattcccagacttctgcttcac

SEQ ID NO: 477728 - DNA, 122 bp, Homo sapiens
ccggcgggtggagactttgggatggactggaggaggccagcgtccagctggcggtgctcccgggatgtgccctgacatggttaatttataacaccccgatttcctcttgggtcccctcaagc

SEQ ID NO: 477729 - DNA, 122 bp, Homo sapiens
gccagaggaagtggggccgcatcaaagagggcaggaaggggcagggacaggttggggggacgccaccctgagtcgcagaaactgcacacccactccaccctatgctgggggcagtagagaac

SEQ ID NO: 477730 - DNA, 122 bp, Homo sapiens
ttacaaagcagcctgctagtcaaagatctatagccttcaaacagaatgtgctggccccctcgcccattcatcaggacaggtgtctcaaaccttctctactctccaatctctagccacgcacc

SEQ ID NO: 477731 - DNA, 122 bp, Homo sapiens
cctggaggctggagctctgggaggagctcgtagccccgcctctttccgcgcccccgctcccgaattggtccaggccctcagacggatcccgcctcccggagattggcaggacaaggagaccg

SEQ ID NO: 477732 - DNA, 122 bp, Homo sapiens
tccttccaggcccgtggcgggtgggtggtggtacagtgaagcagtcgaggcgtttctccgcgcccctacacgggtgggaccacctcagccctggcccgatcccactcaaccgtagccccgat

SEQ ID NO: 477733 - DNA, 122 bp, Homo sapiens
tgccgcagcgctcctccctccgctcctaaaccacttgtggcgcgtgtcgggaatacagggcgctctggctcttcttggggcctccgctggtccgaccatctggcagctctcttaaccaccac

SEQ ID NO: 477734 - DNA, 122 bp, Homo sapiens
gtcaaaataactcaagggtagttgggcaaagtagccataatgagtaaacacttaacagggcgtttcacccagcaactgtctgcagatagcagttgcatgaatcatgcagaacacgtggatgt

SEQ ID NO: 477735 - DNA, 122 bp, Homo sapiens
cagtcttttcctggcttgcctctggccagctcctggcctctggtagagtgagacttcagacgttctgatgccttccggatgtcatctctccctgccccaggaatggaagatgtgaggacttc

SEQ ID NO: 477736 - DNA, 122 bp, Homo sapiens
gggagagtgagggtcgcctccacctccttccggaagtaaaggccaaacccctgtagggggcgctgggaaatggacactccaggttggggcggaggcgaggcttcgttctttcttaaaggaga

SEQ ID NO: 477737 - DNA, 122 bp, Homo sapiens
gaagtgggctgaaggaggcactgaggtcaggactgtcagggtcctgcgctgctggtctcacgcagccttcttccccgggccgcagccagcacggcctccaccgttttcctatgggccctgag

SEQ ID NO: 477738 - DNA, 122 bp, Homo sapiens
tcttttgcccttgaagccgagctggacttcgtgattgcctccactaggatgtgtgaaccccgaatattggagacgggtctccgttaatttagaaagtttattttgcccagattgaggatgtg

SEQ ID NO: 477739 - DNA, 122 bp, Homo sapiens
tggaaggggatacaagttgtgaaccggcggatatgtatgacaagggtacaaaatggaaggcgagacgttagttcttcgcctgtgaagatggttcttgagcaacactcaagaacgtgcacgtg

SEQ ID NO: 477740 - DNA, 122 bp, Homo sapiens
cccgtcgcagccccgcctttagcgccgctccccaggctgcggccagtttggcgcttgccccgcgcgtgaccccgtgttttcccgacccgagtccctaaagctcctggtctggagcattcttg

SEQ ID NO: 477741 - DNA, 122 bp, Homo sapiens
ctgtgctctacacaactctacaccactaggccaggtatagaatctcaccaaggtcctacacggtccatgatcagctactcctgaatatgggcttggaagaagggagaggagagggaggccac

SEQ ID NO: 477742 - DNA, 122 bp, Homo sapiens
ggaaggtaaaggccaagttgaaagttaagagtctgtttacctccaggagcccattcagctcggccccacagacagcctgtgacctttacagcccggcctttgagcgcggccgccgcgccccc

SEQ ID NO: 477743 - DNA, 122 bp, Homo sapiens
gggagctgaacgcccagagtctctatgaagctcagggccagagctggcaggagtggggaccgactgggccgtaactgggagctgagaccctagggaaaaggagagggtcaaagtcccagatc

SEQ ID NO: 477744 - DNA, 122 bp, Homo sapiens
ggataaggcctgtctacgtgaatcactgttgtgaactggttacccagggcccctgtccaacggtttccgtcccaatcctgccccttctccgcccagcccacagcgatatctttgaatctctt

SEQ ID NO: 477745 - DNA, 122 bp, Homo sapiens
caggtggacgtggtcttggcatccacgccaatgagaatgtgagggcggggcctgaatagacgcaggaaatggcgacggccgcgggtctgtgagcagcgggggcggggcctggttgtggcccc

SEQ ID NO: 477746 - DNA, 122 bp, Homo sapiens
tccttcctccttttgtgctgagcctcttcccggggcaggagcacttctcaggctcatgggcggggtctgtgcccaggacacctctctgtcccctcccctctcagtcctgcctccctgtccct

SEQ ID NO: 477747 - DNA, 122 bp, Homo sapiens
ccggcgggctctgtctgctggaggcgctccgctaaccctgctgtcgcctctttccaccagcgcaccgcctaggcaagccagctgacgccgggggcacagaccaccctccactgagtgcggag

SEQ ID NO: 477748 - DNA, 122 bp, Homo sapiens
ctgaaggaagaggccggggaaagagccctccctctctcccttgtccctccatccacccagcgccggcatctggagaccctatggcccgggctcactggggctgctgcccctggctggtcctc

SEQ ID NO: 477749 - DNA, 122 bp, Homo sapiens
agtggctggagactctggctcagccagagttgtttctctccactctgcctcatctctgtacgaatttgggtcccagccttgttgggttgtcagccatggacatggatttcaacccctggaga

SEQ ID NO: 477750 - DNA, 122 bp, Homo sapiens
tccctcagggcctcaatctcaaggaggttcagccaggcctagagcgtgggctcatccactcggtgggcatttagcaagttatttttctgtgcttgagagagaggctagtgtggggacacaga

SEQ ID NO: 477751 - DNA, 122 bp, Homo sapiens
ctcactgctccatgggggaagcatgttctggaccccaaagcatacaggcaacagaccttacggcaatccctgcaaaatacaatgggccaacccactcctccacacacacacctgcctgctcc

SEQ ID NO: 477752 - DNA, 122 bp, Homo sapiens
atcgggggccttgattggctgggcatccctaaccctgtaatcttccatcccgggggccagcgcgccgccgacaactgccggttggactgttccactgggctgactgtcaggggcagctaatg

SEQ ID NO: 477753 - DNA, 122 bp, Homo sapiens
cccacccccccccccgcgccccggtcccggccctgcccccacctcggccagcgacatgggcggctgccgcggcaggaaaagcgcagtgaggtcagccttcatctggtctttcttctcggcgt

SEQ ID NO: 477754 - DNA, 122 bp, Homo sapiens
atgtcacccgagagctctgaggatcgtgctggctccctggtcccttgtgtgaacggggaccgctgacgaggttccatttcagttcatggtcatgtcatggctctatgacaacacctcattga

SEQ ID NO: 477755 - DNA, 122 bp, Homo sapiens
tagtgtaagtgctgcatgtggttggcttcatccattacatttaatattattcagtgtcctcgtcaccttactggtccatcactctgccctcatctctacccctttcctgtcagtcactctgc

SEQ ID NO: 477756 - DNA, 122 bp, Homo sapiens
tccagggtcctgcttggggggttggggctgagggggcctgtcttctcttcatgactatgtcggaggccagagggagatgtgcagagggggctctgagcctgcatgtgggcaaccctttcgca

SEQ ID NO: 477757 - DNA, 122 bp, Homo sapiens
tgtccacagcctgagaagtgcccctctactaaggagcccagaagaagcctgttcacctcccggctgacttctttctctagaccaatgagcatgagctaggcagccctgagggcacacacagc

SEQ ID NO: 477758 - DNA, 122 bp, Homo sapiens
tgacgcgaagtgggtagccttgtcttcgtaggggatcagtttgcatcctgagagagggcacgagggccaggacccctcccaaccaggataaaggtttattgatctcctaggtgtcaggcccc

SEQ ID NO: 477759 - DNA, 122 bp, Homo sapiens
aaacagttgtaggttagaacccacgtcaaaggggcagttcatcccctttgggatattatacgggaggagggctaccaagaataacgtgtcaagagatcagatttatcacatttatattgaaa

SEQ ID NO: 477760 - DNA, 122 bp, Homo sapiens
ggagaaacgctttcggagcatttctcgaaaatcaacatcatatgggcctcattctgtgatcgcatgtgataaaatcagaaactcacaagccccaccccaggcactgtatccaggtggaaatt

SEQ ID NO: 477761 - DNA, 122 bp, Homo sapiens
agtgcgctggagattttaaatcttctggagtatatttttaaaaaagttttgtggaccaaacgttctgcacagagatgcccattccgctctcctgttggggagttaaaaagcgaacgatctca

SEQ ID NO: 477762 - DNA, 122 bp, Homo sapiens
tgagagctgactgcagggagaagtgacgctagggtatggcatggccccttgtggtcatcccgtcaccctcctcctgctgggctgggctggagagcgggagtgggggacacctttctttcttt

SEQ ID NO: 477763 - DNA, 122 bp, Homo sapiens
aattcaacattaagggaaaaaaaaggactttggaaagcatacagaaaaaaaggtagttaacgttggatcatgtgtaaaacggaacctcagggagtctaaacaaaaatgcaccttcggtcaac

SEQ ID NO: 477764 - DNA, 122 bp, Homo sapiens
ctgccctcctccccccacccggctcctggtagcattgagtggctcagccgctgcgcccatcgcctcaaaatagcaaatgggccgccagcctgtgcttggccaggcggacatgacgagccgcc

SEQ ID NO: 477765 - DNA, 122 bp, Homo sapiens
agagcgtccccgagcttttgcacgaagcggccgcacagttgtagcatttcggtcacagcccgcttcgaggtgcagcgcacccgaaagtcttctcggggagtggcggagaccaaggcctggct

SEQ ID NO: 477766 - DNA, 122 bp, Homo sapiens
actgaccgtgacttcatcccgggcttgacctccaccgtcttgtctgagctggccaccactcggacaaaaacctccccggcttcagggtgattctggcgccgcaaaaatttgttcactcggtc

SEQ ID NO: 477767 - DNA, 122 bp, Homo sapiens
gtcgcctgctgctgctgtgatcaaggaaacgtagtccgcggaacagctgaaatacagacgcgtcagattttgtatggagttggcttgttggtcatttaaaaagaaactgatgtttttactat

SEQ ID NO: 477768 - DNA, 122 bp, Homo sapiens
tcctaccttggcctcggaaagtgttgggattacaggcgtgagccaccatgactgacctgtcgtttaatcttgaggtacataaacctggctcctaaaggctaaatattttgttggagaagggg

SEQ ID NO: 477769 - DNA, 122 bp, Homo sapiens
ggccaataggaaagtgggttcggtctgggcagcagtctgattggctccagccttcgggagcggacccaggggcaaggggaggggagaggggcggtcctgggttttggggtgggaatcggatt

SEQ ID NO: 477770 - DNA, 122 bp, Homo sapiens
atttaaacataattctcttaagagtgctctttcataaccaaagatggtaattgctttcctcggaggcccctgttccttcagaaaagctttgtttcttgctgcttttaaaatttccagctaaa

SEQ ID NO: 477771 - DNA, 122 bp, Homo sapiens
gactgtgcgcggcgcttgcgggccagctgcagttccaggtaggcgtgggcttggcggccccgcactcgaagcagccagcgggccctgcaggccccgggcagtgaggggcttagcacccgggc

SEQ ID NO: 477772 - DNA, 122 bp, Homo sapiens
tcccagagaccactcacattccttggcttgagacctgttcctccatgttcaaagccagcgcggttgcatctgagcattctcctgtagtggcatttccctctgatactctccttctgcctctc

SEQ ID NO: 477773 - DNA, 122 bp, Homo sapiens
aggtgcttggcgatctgtgcccgctgtgcctgcggggctgtggtgggagtcctgtctgcacggtattctgtgtggctgtgcatgtaagtgtgagcgtgtgccgggtcatcgaccccatcttt

SEQ ID NO: 477774 - DNA, 122 bp, Homo sapiens
gcgtgctgggggttgtagtccgcgctctgcctcctacttccattacagaaggcgatgggccgagagctgaggaactacaactcctagagtactccgcgccgccgggacgccgcgcggctgcg

SEQ ID NO: 477775 - DNA, 122 bp, Homo sapiens
tttgtgaagagtaaatctaacagtgccttccgacggctgaagaccatttgtgactctccacggcctgttctcagcccaggcttctgttcccctagcaacaccaaactatcaccttctgagca

SEQ ID NO: 477776 - DNA, 122 bp, Homo sapiens
cagtaaaatgatgattgtccaccattccttctattgcattagttggcctctccagaattacgtagtgttctattgtattattaaggatgcagtttctttccacttttctgttttccttagag

SEQ ID NO: 477777 - DNA, 122 bp, Homo sapiens
acagaacaccaagtctgtgaaaatcctgatggacaggtaagctgagggccctagccctcccgggggcacatcctggggagggcaggggggccaggcccatggcggggaggtagggcgggctc

SEQ ID NO: 477778 - DNA, 122 bp, Homo sapiens
ctacctgactgagatcccaagaaacagggagaaggctggggtcttaagcctggggagtggcgtaggaagcagaaggaggtggatgatactgccttgtggatgataaagcctttccctgaggc

SEQ ID NO: 477779 - DNA, 122 bp, Homo sapiens
gcacggcgggggcggggcgctcatcccaggcggcttctgattggcctcggccgcctcgtgcgtcacagccccgcccctgcccgggagtcccgcagcggtgacttgtcaccgacgcccggcgt

SEQ ID NO: 477780 - DNA, 122 bp, Homo sapiens
gccacagggcaaggcctgggctgggcagggacaggggtgggcaccaggctgggagctccccgggtaccccactggccctctgtgctccactgggttggcaccttgccaccaccccgagccca

SEQ ID NO: 477781 - DNA, 122 bp, Homo sapiens
gttttcttgtttggaagagcaccaaccactgaccctgaggaaagggtgagcctaggttgtcgtgttggtatcagatgaccctgctacaaccatgactgacaggatggtggaggggagggtga

SEQ ID NO: 477782 - DNA, 122 bp, Homo sapiens
tcttgggggcgcggggcgggtggggcgctcggaaatcgaatgccagaagagagtacggcccggcgcgcgcgcgttcgtgaaggctgctccggccaagttcatgggcgctcgggcctgcggag

SEQ ID NO: 477783 - DNA, 122 bp, Homo sapiens
cattccaggatcacaggacactgctaatgggttctcacagtggctgtgttgttttttttacgttctctggctgctctatggcggtgttgatgcccctgatgggaaatgttagggacctgtgt

SEQ ID NO: 477784 - DNA, 122 bp, Homo sapiens
acagcgaggttggaatctgtactgtggagactgtggcatttctgcatcattcctgatgcccgatgctgagattaggaaatcggtctctgaggctgagaggcagtttctcagagtatgagctg

SEQ ID NO: 477785 - DNA, 122 bp, Homo sapiens
agtgtgtgtgatcatgggttccacatgaatacctcacacctgcccatgcaggaatgatggcggattctgcagtttggagggtgtgctggtgctcattaggaaggagtgaggccctggctgac

SEQ ID NO: 477786 - DNA, 122 bp, Homo sapiens
ctccctgaacgtgttccccctggctgacggcacggtacgtgcacagatcgggggcaagctcgtgcctgcgggggaccactggcacctgagtgacctcggccagctgcagtccagctccagct

SEQ ID NO: 477787 - DNA, 122 bp, Homo sapiens
attctgagagtgaaacaggaagtgagtaactcactaaatccacttttcgctttgtgatcacggagttctcaggagacacatgggatctggggaatatgcatttagggaggaattgaatattt

SEQ ID NO: 477788 - DNA, 122 bp, Homo sapiens
ctcggggccttttggacattttttcaggcctgacaatttaatctttggtcagagtggggccggcaataactgggccaggggtcactacacggagggtgcggagctggtggattccctcctgg

SEQ ID NO: 477789 - DNA, 122 bp, Homo sapiens
aaagaacacttggacacagaaaagctataaaggtccccaggaccagaccaggcggggcttcggctgcagagcccaccagccacatgcgagctgggggagcagggccgggaacccacacaagt

SEQ ID NO: 477790 - DNA, 122 bp, Homo sapiens
tctccctcagtgccttcatagccaggccagtgtaaaaggcaccggtggcaaaaacgatcgcggggagggcgcatttggagatgggatgcaaaacgaaaatcccttttggcttctcccaggaa

SEQ ID NO: 477791 - DNA, 122 bp, Homo sapiens
gctggagccggagggaaagggaggggaaaggagagggaggggaggggagggggctgcccgcggggggttgggtcattgtcttttagaatttgggagcctttgaaaagccgtgggccctccca

SEQ ID NO: 477792 - DNA, 122 bp, Homo sapiens
taggtgtacacacaggcggtgatattgatccgaatataatctccaggggttggagtatgacgttactcccaatataacactgggtgtgcatccatccggtgattttgctcctaatattcacg

SEQ ID NO: 477793 - DNA, 122 bp, Homo sapiens
ctctgtgcgcagttcctccagggcgccctgtggcggcgccgcctgcacctgcgcctgcagcgcttccagcgccagcgccaggtggcccacctcgtcccgcagcgcgttccaggcagcacgct

SEQ ID NO: 477794 - DNA, 122 bp, Homo sapiens
ctcttccctctgtcactttcgcacaatcttttggtctctctctctctctcaagaggctttcgctcccggtcttcctggctcccctgtctcttgctctctgcgcccatctctctgctcgtccc

SEQ ID NO: 477795 - DNA, 122 bp, Homo sapiens
gccctcctgtctgggcgcgcgtggctggcgggtggccggcggtcgagaggctgcggcgggcgaacgccgctggagtcgcccagactgcctcggatttcataatgaatctgaggaaggacaaa

SEQ ID NO: 477796 - DNA, 122 bp, Homo sapiens
ttcctttccgtcccagtaaaatggggctgacagcatctccttcatggaattattaccaaacgcagtcacaaacgcggagaagcgctcatgcaggtgcaaggcgttttcgaattgctagcact

SEQ ID NO: 477797 - DNA, 122 bp, Homo sapiens
aaacattttgtacatgacgagagccagatttcatcatgtgagtgaagcgagatgcaaacacgaaaggaagtccttcaaggcagccttgtagtgaaaaaataaaaataaaaatgaaaaaaaga

SEQ ID NO: 477798 - DNA, 122 bp, Homo sapiens
gagtgcctactatatgcttggcagggagatatctgtttaataaatgtctttattcagacacgttcctatctcccgtattccctaactcctttcacttattttaggtgggtaactcaagcgca

SEQ ID NO: 477799 - DNA, 122 bp, Homo sapiens
ttcagtatgaaatggaaaccaaaaaaagtttagcagttttgcacccagaaaaaaagaaaacggagaagggtaagcttgtaacaaacggatgggggtcttttatatgctaaggtatttgccct

SEQ ID NO: 477800 - DNA, 122 bp, Homo sapiens
gcaggttcgttcttggacagttccagagtgtgactcatctctcctaagagggacgcacggcggggcccaaggatgcgtcgtgttggacgtggccggagcgaggtctaggcagctagtctgca

SEQ ID NO: 477801 - DNA, 122 bp, Homo sapiens
agcctcagcctgctgcttccttttttaggcaaagtcgagtgctggccgtccgcacggccccgcggtgtctcacctgcctgaaagggaggaaggaagcctgtggagccccatccgttctcccg

SEQ ID NO: 477802 - DNA, 122 bp, Homo sapiens
tttaacccatctctccaagccacccagcctgaggcctttggtttgttgaataaacgaaaacgtggccacttcagagaagagcaaggcttccagcaccttcccacagcctgaattccattagc

SEQ ID NO: 477803 - DNA, 122 bp, Homo sapiens
ttaacctcccgctgtacggtgccaaaccgctggctgtacattttcgagtccccttcgggacgggggcggcgtccgccgcgtttcccccaaccgtggcgacctgcgggacccgcttccgcgac

SEQ ID NO: 477804 - DNA, 122 bp, Homo sapiens
tccacataggagacttttcctggtaatcgagcacctttgctcagagtcatcagcaagcaccgagctgcttcctgttaagcctttatggaaaacctcggagcttccgggagatccgtcccctg

SEQ ID NO: 477805 - DNA, 122 bp, Homo sapiens
tacctagaagctactggtttgacagaatgttggaatggtctcttaaaggcacagctaaggcgctagcttgggattgtgtgggattgagacaatgtacttcaagatgaggaacatgctttgaa

SEQ ID NO: 477806 - DNA, 122 bp, Homo sapiens
ggctcaggacctgcagcccgccatgcccgagcctccccacaaccgtgggctcctgcccggcgtgagcctccccgacagagtgcaaccctctgctccgcagcgctgggtcccatccaccgccc

SEQ ID NO: 477807 - DNA, 122 bp, Homo sapiens
ttaaaaatgagcaggaagctcatgtatgtttgcatttcagtgagccgggtcctgacctgccgccacccatcacggtcagcgtggtgcatcttaccgaggaggcgcaggcctggattcttttg

SEQ ID NO: 477808 - DNA, 122 bp, Homo sapiens
gcggcggccgcacaatccaacatggcagcgggggcgggcgagaccacaggacggagggcgcgggggagcgcgccggaaacgcgcggctgcggcccgggagaaacccccccactcggcggcgg

SEQ ID NO: 477809 - DNA, 122 bp, Homo sapiens
ccccgttcagccagtccgtcccacacctgaggcaggctcagcaattcccctcagcctcaccgccactcccaagacaggccaggagcctgctctaaacaccatcgtggaagccagacagaaaa

SEQ ID NO: 477810 - DNA, 122 bp, Homo sapiens
gtgggtgtgatagaatgaaaggagtcaaggatgacttgcaggtttttggcctgaacaacccgaaggacagagatactacttatgaagaggaggaaggctgtaggtagggtagactttggagg

SEQ ID NO: 477811 - DNA, 122 bp, Homo sapiens
gccccgggtaaacaggagtttagcagacaacctcgaaactgctaatgcaagccctgtgcccgtccgagcctggcagatttactgtggtgcatgggccccatggaacaccaataccacctgat

SEQ ID NO: 477812 - DNA, 122 bp, Homo sapiens
caatgagaaagcaatgggaaaaatgggcaataaatgggcataggggttagtgcccacaggcgctagtggctgtgaagtgcctttgaggtgcaaagggagctttttatgtatttgcttcaggt

SEQ ID NO: 477813 - DNA, 122 bp, Homo sapiens
catgtttgaaatcaccgaactacagtatatagggcctcagctctcctactcgatgccaagcgtcccagactctgaagtggaaaaacagtctgacttcctttgtagctcttccccaacagaag

SEQ ID NO: 477814 - DNA, 122 bp, Homo sapiens
ccccgcccggcccggtgctgggggtcgcactgtccctggggacggcgggggcctaagccgcgcccttggcccggacgggaaggcccgaacctactctgctggggacctgggcaggcggcctc

SEQ ID NO: 477815 - DNA, 122 bp, Homo sapiens
atggcccgagcgcccaggagtatgagtttgtgactccggtggaggaagcgccgaggggtgcgctggtgcggggcccctatctggtggtgtccctcttcaccgacgatgacaggacgcaccac

SEQ ID NO: 477816 - DNA, 122 bp, Homo sapiens
ctgcgctgccagatactcagacagagaaaacacacgacagtttgtcaaaacagccatcagcgcggcgcgctcgttttttcccgcagcccccggtcctggctgccaatgtacacggccaggtt

SEQ ID NO: 477817 - DNA, 122 bp, Homo sapiens
taggaccctccgagccaggtgcgggatacactctcgtggtgcgctgttttttaagcccgtcggaaaagcgcagtattcgggtgggagtgacccgattttccaggtgccctcagtcacccctt

SEQ ID NO: 477818 - DNA, 122 bp, Homo sapiens
ccgtgcgtccactcccggtctccacggcttaggcagacggagtgggggactccggggacccgcgcgtcctctcctcctcggccctggcgggaggagccgggctggggtttccgcgggccgcg

SEQ ID NO: 477819 - DNA, 122 bp, Homo sapiens
gcagccgtggtcccggggtcaggacgtgggctctgagcccgccctcccctctgtggctctcgtctacagctgtcaaatgacgtctacagacgtcacagtgttttaggatcaagtgagtgaat

SEQ ID NO: 477820 - DNA, 122 bp, Homo sapiens
gggcgtcccgcgtttctctctccgagcgctcgcggtttcccgtcggtctctcccggtgcccgttgctcactcacactcttgggtctggttagtccagacctgcagcttgtctttgacttccc

SEQ ID NO: 477821 - DNA, 122 bp, Homo sapiens
tcggtgaccagagcggtcagtctttccccgccatgaaatgtgagttcgggtggcagccgccgcgcccctgcagtgtcccctgcacatctccggtctcggtctcgcctttctcagctccgcgc

SEQ ID NO: 477822 - DNA, 122 bp, Homo sapiens
ccgcaccgaggtcccctgtgcgcgggcacctgggctgggccgccgccgcccctgggcgcccgggctacccgcagcctcccgggctcccaccctccgttggtatccacagcttccctgttgct

SEQ ID NO: 477823 - DNA, 122 bp, Homo sapiens
tccctccgctagtcatcggccgagcgggcccctcgctcctgggtgtaagttctttctgtgcgtccttctcccatctccgtgcagttcaggagaggaggggagaacttgagttcacctcccgg

SEQ ID NO: 477824 - DNA, 122 bp, Homo sapiens
cagaagtggaacaaaggttcaggtctcccaaatgtcagtccagctcctatgccttcagaacgtgtcctggagggagacaccagctttgatctgacaaaagaggctatgaataaagttaaaag

SEQ ID NO: 477825 - DNA, 122 bp, Homo sapiens
aagtggggaggacaaacggggtgcacatggggactgtggcgatgacacagaagggacagccggttagaatctaggcccacttaggcgatgaagggcaggtgaagaaatcccgttccatcttc

SEQ ID NO: 477826 - DNA, 122 bp, Homo sapiens
gcctgtaggatgaagggataagatgcaaagagaatcacttccttctcttcactattaaaacggaaatgtctttgagtgagtctttagtcaattcagtagtgacgcaaagatgaagacatcct

SEQ ID NO: 477827 - DNA, 122 bp, Homo sapiens
ctctgcagtctcaagcttgctgggttagctgtttctgaataggatttgacccaagttcagcgtcagcttttcaaacagcctaaaaactctggccttgggcattgagaaatcagaaagttttt

SEQ ID NO: 477828 - DNA, 122 bp, Homo sapiens
gtgtagcttgccgggaaactgagtcttcctgatttcgtgtggctgtctccaaggaggaaacgaactacgcatcccaagatgcatcgcgcataggcaatatggtcccgctactggacccattt

SEQ ID NO: 477829 - DNA, 122 bp, Homo sapiens
agcccagctgcaccggctgcggtttgagcgcccagggccggggtgcggggtggaccgcggcggcccttcgaccaaaggtgcttgaagctcgagcccattactttctgtggactctgactcga

SEQ ID NO: 477830 - DNA, 122 bp, Homo sapiens
ggggaaaaagaaaaacgactaattcatcttttcctgatcgtcaggaccctaaagaatggccgagccttgggggaacgagttggcgtccgcagctgccaggggggacctagagcaacttacta

SEQ ID NO: 477831 - DNA, 122 bp, Homo sapiens
agagctgagagatcaaagaagcaaatcaccaaacacgactttcctgtataatcgacattacgtgtctagcgtcctgacatttggaaaagggtctaaccatgaagaggccatttgcagcgagc

SEQ ID NO: 477832 - DNA, 122 bp, Homo sapiens
caggctgttcctccctaggtgtacaacccctaccgctttgacccggacaacccacagcagcgctctccactggcctatgtgcccttctctgcaggacccaggtaacccctctatttccccta

SEQ ID NO: 477833 - DNA, 122 bp, Homo sapiens
ggtgctcaattgtatttcttgaggctaagaaaaggtctccattcactcaatgttaaaagacgggattccttaggaggaacacttcaggctgctaacaattatggcacaattgcctatcagaa

SEQ ID NO: 477834 - DNA, 122 bp, Homo sapiens
ggcgggcggatcacctgagttcaggcatttgagaccagcctggccaacatggtgtaaccccgtctctactaaatatacaaaaattagtccggcatgatggtgtgcatctgtaatcccagcta

SEQ ID NO: 477835 - DNA, 122 bp, Homo sapiens
cagctcccagcccgggtcccaccagcaatgcacaggggcccggcagacacctgcaaagggcgccagccctcaaggagccgcattcctcctgccgccccggcacagccgtcctttgctcctga

SEQ ID NO: 477836 - DNA, 122 bp, Homo sapiens
tcagcgcccagctctccccaatacctctccctctatatccccgcccccgcctctgatccccgcaccgtccggcccccacctcagaaaccgtctctcgaggcgaccctcgccgcaattctcag

SEQ ID NO: 477837 - DNA, 122 bp, Homo sapiens
cggccccggtccggccccgccccttccccgccccggccccgcccctgtcccctcccgccccgcctctgaacggcccggacccaccccggctccctggccccgccccctgacctcccttgccc

SEQ ID NO: 477838 - DNA, 122 bp, Homo sapiens
tgcaatgacctcgaatttctccacagtaaagtggccccagcagaatactgcagacccatgcgtagcccttgtagcggcgccgaccggctcagggaatcaaatcctcttggccggctggtcca

SEQ ID NO: 477839 - DNA, 122 bp, Homo sapiens
tggtgagtatgcggtgaggacgttttttttttaaagatcacgttcattccccgtgcttatcgggagctgcgggagatggagtagcaccccagaatgtctccacgcaaaacttgtcacgcctt

SEQ ID NO: 477840 - DNA, 122 bp, Homo sapiens
cggccgctccgggcatcccgggcccagccctgtgccctgggaccgaaggtgtcgttgccacgcatgcggaactggtcgcggtaggcatcgtattggccctcataggccatttccatctcagg

SEQ ID NO: 477841 - DNA, 122 bp, Homo sapiens
cgcgcttccccgcgtgacagccccgtaggtttttcccggttacccaagtggagaggggaccggagcgctgctgcccacccagcggggcctgacacctcctagccccagactccccgtgcgct

SEQ ID NO: 477842 - DNA, 122 bp, Homo sapiens
gcacagagcgctgggcagggcctcatccgggtcagagccggaacctggggacattctggccgatgctcttggcggccaggagagggcgcgcgcggactcagcggccgcccgactgcctcacc

SEQ ID NO: 477843 - DNA, 122 bp, Homo sapiens
atgcaaacatgtgcatacataaacacatgcaagtacacacgtgcacacatgcacagaatgcgcacacacagacatgggtacacaaacacatgtgcatgaacacacaagcaaacacacatgca

SEQ ID NO: 477844 - DNA, 122 bp, Homo sapiens
cgggtgagtgagagagttggttggtgttgggccggaggaaagcgggaagactcatcggagcgtgtggatttgagccgccgcattttttaaccctagatctcggtaagagaccagcgaaagag

SEQ ID NO: 477845 - DNA, 122 bp, Homo sapiens
tttgatagtccaggtacgtactgcagcacaaaactaggagaaaccaggaaatggaagtaacgagtaagtttggatgcttcgattctaccctagattgagacgggtgagcatagaggcaaaaa

SEQ ID NO: 477846 - DNA, 122 bp, Homo sapiens
gggccaggattctgcattttaacaactcccaggagtgttagtggggctggtttgtggactcgcctttgagtcgttggtctccgctcaatcaatattagataaaatgacagtattgggagaaa

SEQ ID NO: 477847 - DNA, 122 bp, Homo sapiens
ccggggacggcccgggcaggtgtcagcagcaggagtgttttccggggtccctgtggagaacgtctctccgcagcttctcctggaacgttgtctccgaggctcagcagcctcctcacaccccc

SEQ ID NO: 477848 - DNA, 122 bp, Homo sapiens
aggttgcagtgagccaagattgtgccactgcactccaacctgggcgacagagcgagactccgtctccaaaacaaacaaacgaacaaaaggaaagttgattagaagacctattttcaaaatct

SEQ ID NO: 477849 - DNA, 122 bp, Homo sapiens
aaggaacagcaatgattccatggaccagttttctccagggtagagcactgttaatatatccgactacttcaaaaagatgagaactaactaacttccttgcatgggaatacagggccagttgc

SEQ ID NO: 477850 - DNA, 122 bp, Homo sapiens
ttcctcgtcatctcagttctctacctcaggcgggccctgggcccgggagcgcagggcgggcgaagagccagtcccgggccccatgacccccacccaaccgcccccacccctatctctgcccc

SEQ ID NO: 477851 - DNA, 122 bp, Homo sapiens
cagctttttaacaccctggagccctctcccaagcctggaccaaatttgcagggacaaaagcggggcaggggctggggtggggaaatcaaattaatgaccttcttagggtaaagatgtttcag

SEQ ID NO: 477852 - DNA, 122 bp, Homo sapiens
ctcctgtgctcccatgtaaggatgactctgagacccagctgagtgttccaggagagcccccgggtgggcagtggcctgggcctggccaagcagggtgcaccaggctcctgcccccatccctc

SEQ ID NO: 477853 - DNA, 122 bp, Homo sapiens
accacaggtggccgctgtgcttatttcacaagaaaaactaagcagggtcttcaagcaggtcgcagattggctgctccaggctgccctgggctcacagggggctctttgcatttcccttagct

SEQ ID NO: 477854 - DNA, 122 bp, Homo sapiens
aggaggcacggctagctctaaatgggcaatttacttagtaaatttagacccgggtgccgccgccggcccctgccagggccagggcgtggcgcccccgctcccctgtcccgggacgcctcccc

SEQ ID NO: 477855 - DNA, 122 bp, Homo sapiens
actcaaatccgacaggagctactgtcacgaaaagcgggtttgcagccttggcggctttatcgccgccgaggactagggaggcgggccaggacatggggacccgaggacctgaaagactggaa

SEQ ID NO: 477856 - DNA, 122 bp, Homo sapiens
ccctgcagggcaggaaatctggcaccttcagccatgacctctgatgtctgcagggtcttacgctatctaccatgggaccagggggctacagccctactctgcaggggtctctcagcttgagc

SEQ ID NO: 477857 - DNA, 122 bp, Homo sapiens
gtgaaggttttagaaatcagacaatttcatgatgtcagttttatttccagtttatcaaaacgggcaattggttgcacaaagtcaattacatgggactctcccctagtcccatggtcttaatt

SEQ ID NO: 477858 - DNA, 122 bp, Homo sapiens
ttttttttttgaggcagagtctcactgtttcgcccaggctggaatgctgtggtgcaatctcggctcactgtaacctctgcctcctggattcaagcaattctgatgcctcagcctcctgagta

SEQ ID NO: 477859 - DNA, 122 bp, Homo sapiens
caccgaaggctcactcaggagctgtgttcttgttggaaacttttttccttcccagcaccccgctcataacaagggctaaactcttctacccagtggacatgaaacacggcccgtatctctgt

SEQ ID NO: 477860 - DNA, 122 bp, Homo sapiens
cttaacgggagggtgtacgtgtgtgttcccgggttgttaccttgcacacccacttatgcccgcttgcaaaacctttactccccgcctctggccaccgttgccggggccgcacaccttaaact

SEQ ID NO: 477861 - DNA, 122 bp, Homo sapiens
gatctcgtcgggtctccaccgccgccgcctgcagccctcgggccttccccttaaaggggccgctcccgagcctgcagccgcccgcgctaaaccccgcccaccctccgaggtccaggaggaga

SEQ ID NO: 477862 - DNA, 122 bp, Homo sapiens
gctgtagatgcggctttgcagagaagctgggagggtagaggggctggggcggtcgaggggcggggctgcgtgcagccggcccagattcctttccggccagttccttccaggagctgctccca

SEQ ID NO: 477863 - DNA, 122 bp, Homo sapiens
acgtcaacaactgccaccacgcaggtgtttctaaaatcactttataggtaactacaaacccgatcccaacgtttaccctaacacttcccctcccaggtcctcctcggtggtccgcccgcttg

SEQ ID NO: 477864 - DNA, 122 bp, Homo sapiens
aaaggaggaattaggcaacattaagacatcaaaatgggggtgcggggcgctggttgcctacgcttccgcccaatcaaaggggtgcatgagcccgtcgagtgcgcgcttgagagcctcggaaa

SEQ ID NO: 477865 - DNA, 122 bp, Homo sapiens
ggaggctgcagttgtggtacacgtccccggtgctgggttggccgtgactcgggggcggggcgatcgggtctcagcccctgccttccccagtctctgggtcacccgaattttcccacccctgc

SEQ ID NO: 477866 - DNA, 122 bp, Homo sapiens
tccaaagtgcaaagggaaagtcactgctagaggcgccagtaccagcatagcgcccccacgcgccgagtcggggaactgccgcgggggccggccccgcccaccagcgcctgcgcctgcgcaga

SEQ ID NO: 477867 - DNA, 122 bp, Homo sapiens
ctcccctgtagggcagttagctaccagatttctgggtatcttggtcctttgtgattgatccgaccgcttgctgtaactatcttggcatctttccttgtgccctccatgtgtccttccttaac

SEQ ID NO: 477868 - DNA, 122 bp, Homo sapiens
gctgcaaacacccgcatacttttcccagatctctgccccgccctccccatcctgaagccccgcctccaagtgctccccagaccggtcagtgaggcccagctgagctccctcgagtgtcgggc

SEQ ID NO: 477869 - DNA, 122 bp, Homo sapiens
tttttaattcttcccagtacaaactggaactagacatgcagagagccttcctaaaggcaacgcccaaatcccacgtgaggccaaacttctccccagggagactgagagccaatgttcttatc

SEQ ID NO: 477870 - DNA, 122 bp, Homo sapiens
cattgtaaaagcaattttctttttggttactgccatagggattttgtaactgagtcacaccgggccgaggcgggacctcattggctgcgaccgaccacgtgccgcagtcgccccggcggtcg

SEQ ID NO: 477871 - DNA, 122 bp, Homo sapiens
agaaacaacacattgcgttgtaacaatttatttacacatcttggatgtcctaagggagcacgaaggagggaattgttatttccactggaaaaagaagtgtgtgtgtgcatggcagggctgag

SEQ ID NO: 477872 - DNA, 122 bp, Homo sapiens
gctcatcctcagacacaggaaagatctttccagaccaaggtctccctttcccctctgggtcgaaggccacccagctgtactttgttccagaagctttcccatcagtcattctcccttctggc

SEQ ID NO: 477873 - DNA, 122 bp, Homo sapiens
gaattctgaaagaagagaaatacatctgagcaacacagaattgctgcagagttacctgcacgcattcttacagttttccaaggacaagaggagggtatggcattaacccgagcccctgaata

SEQ ID NO: 477874 - DNA, 122 bp, Homo sapiens
tttaagtggattaatgaatgtaaagtcctcagaacagtgtctggcacccagtaagagctacgtaaacatttattattcttcttcgaccatcaaaaagtttcctttccctgactcctgagccc

SEQ ID NO: 477875 - DNA, 122 bp, Homo sapiens
tcgcatcaccgggcattacgcggcagccatttccctcgctaaggccctaccttaggatgacgtcacttccggccccctactgtctagggaaagccggaaatggtaccagccttctttgatgg

SEQ ID NO: 477876 - DNA, 122 bp, Homo sapiens
ctcagcaacatctcaaatgtgaagagttattatacttttgtctttcttctatttgtcatccgtatcatcactgttattgtatttctctagaatattggctttttaaaaaatgaaatcataaa

SEQ ID NO: 477877 - DNA, 122 bp, Homo sapiens
aagagctatcagtcagccacatgcatccaaccttgacatcatcagaagcccactgcaatccgtgtgtgtcttctcagaaatcaaaacatccccgggacttcacacggttattaccaggatca

SEQ ID NO: 477878 - DNA, 122 bp, Homo sapiens
cccaatgttccaccagcttcagcacctggacgaatggacagctcaacccgggccgactgccggcagcactcgcagcagaactgacgctctgagctctaaccaaagctctctcgtgcttgagc

SEQ ID NO: 477879 - DNA, 122 bp, Homo sapiens
gagttcttattttggggggagggaaagggggctagtccccttcttttggccctccgcccccgcaggcttctgtgtgctgctaactgtatttattgtgatgccttggtcagggcccctctacc

SEQ ID NO: 477880 - DNA, 122 bp, Homo sapiens
gggagacccaggccattctccttcccactttggcgctggcagacagatccaaggagctgccgccagggcggcctccaggcccccgagaagaattcctcagagattttgcaaagccagggttt

SEQ ID NO: 477881 - DNA, 122 bp, Homo sapiens
atacagagagcaggggaagcacaaaactagggcatggagttttgggtggaactgaggaggcgtaaaaaaaaagtgctgaagttgtgagctgggaaaggtatcaagtacataatttggcaatt

SEQ ID NO: 477882 - DNA, 122 bp, Homo sapiens
aggttcctgccggcccgccccgtagcctggggttccaggctcccgtgccaccgcggcccgcgctgtgtgaccttgttccagtagcctgccctctctggactggcggccccggatttccaagc

SEQ ID NO: 477883 - DNA, 122 bp, Homo sapiens
acatgctgcagtgcacctttgttagtgcttgataacaatagacaatgcttgctgagcacccgccatgtgccatcagctcaaggaattcttccagctgcctaagatagcactctgttttacaa

SEQ ID NO: 477884 - DNA, 122 bp, Homo sapiens
cgctagttcagcggcgggttacagcccgcccggccgcctgcggccagtcatccgcacatgcgccctcctggaagccccagcagcccctccgcgagttccgattggctccgcgtgagagacgt

SEQ ID NO: 477885 - DNA, 122 bp, Homo sapiens
gctcccactcggcgaaaaaaattacacaacagcagccgcggcgatgacgtggagggctgccgcctccacgtgcgcggcgctcctgattctgctgtgggcgctgacgaccgaaggtagggggc

SEQ ID NO: 477886 - DNA, 122 bp, Homo sapiens
accccaggcctggtgagtggtcccctcctctgctcccacacttcaggatgagatactcaccgtaaaggacaccccactcaatcctcagtgcctctcacgtgccatgctctttctagcctcct

SEQ ID NO: 477887 - DNA, 122 bp, Homo sapiens
aaccaggaaaggaggaggatgctcatcattggctaaagatccatgcctggaaattaacggcgttaaagtgagacttgcttcaggttccaacccggtaaggcaaatggagaggctgtcaggag

SEQ ID NO: 477888 - DNA, 122 bp, Homo sapiens
acgacctcggcggccgccatcttcacccgcacctactcctcttccggccgccaagacccccgcctttttctatagtaggattttaagaggtgaaagaagcacagtgagaacaagattaactc

SEQ ID NO: 477889 - DNA, 122 bp, Homo sapiens
gtggcatggggctcaggccgatggaggtcagtggctgtaacactgttgagacctgaagaccgtttacggtgtatgttttcgggaaaggtctcttaccacgtaccgaagtggaaatgtttgag

SEQ ID NO: 477890 - DNA, 122 bp, Homo sapiens
attagatgaggttaccgaggaagtgactataggtggagaagaagaccaagaactaaaccccggggaaccagagttaagaagtcagggaatagacaaggaaccagaaaatgagacaagaagca

SEQ ID NO: 477891 - DNA, 122 bp, Homo sapiens
gtggggagaagcttgaaaacctaaggaggccattaggaaaggctgtatattttctgattccgtttaaaattttaagttggtgaaaatactatgtgatcgaaggatgaacatattttagtaaa

SEQ ID NO: 477892 - DNA, 122 bp, Homo sapiens
ttggggaaacagatgaaacccttgaacattatgcaaaaatgacccattttatgatcataccgaaacattcaaatgtgaaaatgaaggtgttctaatagaatcttgccagaaaaattactcca

SEQ ID NO: 477893 - DNA, 122 bp, Homo sapiens
cagcaggagcctagtaccaccggcacagtgacactcacacagccccagcaaaacgcactgcgtccacacgccgtcccggtcctgtgcacagggcctcacgcacacactcacacagtcccctc

SEQ ID NO: 477894 - DNA, 122 bp, Homo sapiens
tctcccaattagaggattaggcaattggcagtgcagggcggtaactgggggccagggtggcgccagggctggacagcacagtccctctgagctgcacggagacctcgcaggcccccggaact

SEQ ID NO: 477895 - DNA, 122 bp, Homo sapiens
gagattagattaccagcatttgaagcagtgaggcttcattgtacatttatttttatgttacgtattgcttggtatttgttcctatggcctttcatgtatgtgtgttctgccttccatattaa

SEQ ID NO: 477896 - DNA, 122 bp, Homo sapiens
cttggtgggtaggggtcgcggggaatctctgcgggcccgggactgcggggacttggtccccggctccaccccatcatgtggctagccccggctccgcctctgtcccagttcctgttttggcc

SEQ ID NO: 477897 - DNA, 122 bp, Homo sapiens
gagacacctgaggtcaggcctctgtccaaggtcaccgggtggctgcgttggagccgcctgcgagcttaggcacgtttcaccggaccagactgtggatggggctggagtgggagcggttagag

SEQ ID NO: 477898 - DNA, 122 bp, Homo sapiens
cgcagtaattgccccatgtgctggcctggccagtccccgagggtccccagtacttgaggccggagaaatccacctcctaagaggcgctcagtctcagcagagtcgtgacgtcattggcctca

SEQ ID NO: 477899 - DNA, 122 bp, Homo sapiens
tagctgggcagcagctttctgactgaggactgctctcagcggtgcacctgtgccagctcacggatcctgctgtgtgagcccttcagctgcagagcgggggaggtctgcaccctggggaacca

SEQ ID NO: 477900 - DNA, 122 bp, Homo sapiens
gaatcagatgcttacagaacccctgaaacattcctgccaaatacagtcgcacgaatttgtcgctttggcacatgagtagattcggggtaagggagggaggctgatgggctccggttctcccc

SEQ ID NO: 477901 - DNA, 122 bp, Homo sapiens
tttttaaatgctagtccagtggctaaaatttctgtagagtttagctgttacatcttccctcggcaaattcttgttcaagctttcatgctctcacagaagatgaagatgaagaagttaatctt

SEQ ID NO: 477902 - DNA, 122 bp, Homo sapiens
ttacaacaaaacccagcgagaaaagtttgcctgggccattgaaatcgctgatgaagactacgagttttagccagtctcaagaggcagggttctgtgaaaaggaacagtgtggtttgggaaag

SEQ ID NO: 477903 - DNA, 122 bp, Homo sapiens
gcgccgctggtgtctgtggggcctgcgatagaggaagccacatggtcaagcaggcactcacgggcacacggcgagaggggctggtggtgcttgggcacccccacaccccggcaggaactcca

SEQ ID NO: 477904 - DNA, 122 bp, Homo sapiens
ccccctgctttgtgtgcggcgcgcggattggccgacgcgcgcgggggccgcgtcagcgcccgcgagcccattcatctgtgcacttgggcgttggaccccgcatcttattagcaaccagggag

SEQ ID NO: 477905 - DNA, 122 bp, Homo sapiens
gcgcctggttgtcaggcagttttgtaggagttcgggccaattggaggcgcaggcaccgctcgacccgggcgcagcgcgcaggcggtggcgaagagacgccgagcgggccgagtgcggccgag

SEQ ID NO: 477906 - DNA, 122 bp, Homo sapiens
tgtgttggccgggctggtctccagctcctaaccgcgagtgatccgccagcctcggcctcccgaggtaccgggattgcagaccgagtctggttcactcagtgctcaatggcgcccaggctgga

SEQ ID NO: 477907 - DNA, 122 bp, Homo sapiens
ctgctttttggcatttacagccatgatggctgtttttataacggcggggttcacatttgtcgtgatcaacctcttttttattgcaaggatgcatccagtctcagtacacagtgaaagggccc

SEQ ID NO: 477908 - DNA, 122 bp, Homo sapiens
caggctgccgtcagattctcaagcccctattcctctcggtggcctaaatccccaactgctcggggccacttttcaggccaaaatgggcccaaaatggggagggcaagtgatgaatgtcacta

SEQ ID NO: 477909 - DNA, 122 bp, Homo sapiens
taaaaagacttttcagccagtttgaggttagctgccaggggcagacagttgtaataatgccgacagaattgaggcttgtaagccgggcttcacacttctaaaatgcagttatggattctttc

SEQ ID NO: 477910 - DNA, 122 bp, Homo sapiens
aacgtccgtagaagcagactcctccccgctcctggggaaaaccctgcctaatatttataacgttatgacatactgtaatactcacaaggtggttgtagaagtataaacacgactggagttat

SEQ ID NO: 477911 - DNA, 122 bp, Homo sapiens
tggaggatccacagagtaaagagcctgccggcgaggccgtggctctcgcgctgctggagtcgccgcggccggagggcggggaggagccgccgcgtcccagtcccgaggtgaggagtcgaccc

SEQ ID NO: 477912 - DNA, 122 bp, Homo sapiens
agatatgcaaacaaaattcaaacgtaagccttggcttcctggcctgaaaggatctgtgtgcggtcagcacgtctacaggattctagaatggatgacgtccccaccccggcgctctaagcccc

SEQ ID NO: 477913 - DNA, 122 bp, Homo sapiens
gaaagagacacagagacaaagtatagagaaagaaaaataagaaaaatgggcccaggggaccggcgttcagcataaggaggacccgtattattattgatcattatccagcgtttcccggagag

SEQ ID NO: 477914 - DNA, 122 bp, Homo sapiens
gcagagcgccgcgcgccggcctcgcggtcccgcttctccgacagctctagccccgcgcgccgacgggatgcactcctctaacacctgagccccacttctcgcggccgtcccggggagctctc

SEQ ID NO: 477915 - DNA, 122 bp, Homo sapiens
agggaggcggggggtcggggggactgtttctggaaggtacgatctatgatccttggaatgcggtaagggagaagacagagcgaggcgcacacgcatacacacacacacacatattcacatgc

SEQ ID NO: 477916 - DNA, 122 bp, Homo sapiens
caggaaagcccaagtccctcggcacacccaggtgacagcgatgacggcccacaggcgtggcgcctgggccacatcggacaggccatgtcctggagcactcgaggccccctggacagggcaac

SEQ ID NO: 477917 - DNA, 122 bp, Homo sapiens
catatatattacacatggtccctgcccccaagaacttacagcctaaaagaagacacccatcgacaatttcaatccagagtgttaagtgctgttacagaggagctggggagaggctgcatagt

SEQ ID NO: 477918 - DNA, 122 bp, Homo sapiens
cacacaggaacaaggcgccaggaatggtgccctagcccagtgggcacagagggccagtgccggcttcgcaggcacgctgggactgaggggctccgcagggaggtggtggcacgtgtctctgc

SEQ ID NO: 477919 - DNA, 122 bp, Homo sapiens
gttttttgtacaatttgattctaacacagcaaatcgttgcttttcttttcctgtatcccacgtaagtagctgaaccatgtaaataatgaaagaatggagcctgtgagaaattgcttgtctgc

SEQ ID NO: 477920 - DNA, 122 bp, Homo sapiens
cttccttcccttgcttcccatttggttcagaagacacatgttttgtataattgagagtagcgatagaggggtgtgttctgaaattctggttaatttccctcagggaacaaaggacagcagag

SEQ ID NO: 477921 - DNA, 122 bp, Homo sapiens
ggacccgaacgcccacaccctccctccctggggtcccaaactccactcaggacgccacagcggatcctaactacaaacggtccccggagccctgggctggactcgctcagccccgcccccac

SEQ ID NO: 477922 - DNA, 122 bp, Homo sapiens
ggagaccaaaaatggtccaggaatgaacgtggagaaaagaaacgccaaccaccttctctgcgttgagagtaatggcctattattatcatctatctgccgtccatgtttgctttctgcaggat

SEQ ID NO: 477923 - DNA, 122 bp, Homo sapiens
ggggggctagtgaggacacgggccaccccgaggtgctggtaagcccctcttatacagacacgaatctggcacacaggaagcttgcaccaccgggcctcaacctgcccacccacctcttttcc

SEQ ID NO: 477924 - DNA, 122 bp, Homo sapiens
ggcccgttcccttgatgtgcaagagagctaatgaaagactgaccttgctcaaaaccacgccgcccaggacccagctctggctctggacagttaaactaaaaccattttcaacttcttcccgg

SEQ ID NO: 477925 - DNA, 122 bp, Homo sapiens
ctcctccctcagcagcgagaagcctcacgtgacacccccgccccaaaagcagctgctccccgcctcagccagtctctgcccgggcccaagatccctgctgtgtggaaggaggggccgaactg

SEQ ID NO: 477926 - DNA, 122 bp, Homo sapiens
ccctcccgacctctgacccctgaccttccatcacccaagcgcctacccaagctggttctccgagcctcttgagtctgtttgcaccaggcctgcgctcctctacagacccagcagatcacggg

SEQ ID NO: 477927 - DNA, 122 bp, Homo sapiens
gtaacagtattactggaagacttattcgactgtcctgatgatacttgtaataggaagtgccgtcagaagcgataactgacgacgtctaatgtctatctgaccgcagtcgctgaaacctctac

SEQ ID NO: 477928 - DNA, 122 bp, Homo sapiens
tagaggaaggtgagggataaaaggaataggagcagtgttgaatgagtcacttacagtatccgccacagtatgaacagagggtggcttactacagggcagacaaggctagcgggacttgggat

SEQ ID NO: 477929 - DNA, 122 bp, Homo sapiens
aagtccaaacccctatgcaaagcatgattcatggaatacctagtctgtgggaggccttagcgaacacatggcagctgtgattggtcccatccacctttcctacatcttgccgtatatctaat

SEQ ID NO: 477930 - DNA, 122 bp, Homo sapiens
tcgggcaaagcagccgacgtgtggagcctgggggtgatgctgtacaccatgttggtggggcggtaccctttccatgacattgaacccagctccctcttcagcaagatccggcgtggccagtt

SEQ ID NO: 477931 - DNA, 122 bp, Homo sapiens
cacccgcctcccagggccccacactcactctgcagaagcacaagtttccaaagcaggattcgggatggcagcgccatggcccccgcccagccccaggctttgtcccactcggctctaagtct

SEQ ID NO: 477932 - DNA, 122 bp, Homo sapiens
ttgcgagacagagtgctttggggagcctggcttttaaaaaagacccgagaattgatgagtcggagacaccagggcgcttccctgacagcccagcctggacccaatcacacggtcccatgctg

SEQ ID NO: 477933 - DNA, 122 bp, Homo sapiens
gtcccaccgggagggactggccccgggcgggtcaccgcgggcagaaacgcctttggaagacgtgggaggactagcccatcgtggcagggataaggtttttttcttggggcttgagatgaggg

SEQ ID NO: 477934 - DNA, 122 bp, Homo sapiens
ctcgtggtgcgcctttttttaagcctgtcggaaaagcgcagtattcaggtgggagtgacccgattttccaggtgccgtctgtcacccctttctttgactcagaaagggaactccctgacccc

SEQ ID NO: 477935 - DNA, 122 bp, Homo sapiens
agccagcatttcttctcactggatgggagttggtgcccaaagggaggctcagaggcaggacggagaaaacaagacaaaggggaagcccagtgtcgggatcaagtgacagctgagaatggcca

SEQ ID NO: 477936 - DNA, 122 bp, Homo sapiens
cgtctccccagtagaggtgttgagaggggtcacgaaagggggtccaggagacgaggtcagcgaaacgcgcctggtaaacagttaagggccgcgcagcactacccacaccggctcccgccccg

SEQ ID NO: 477937 - DNA, 122 bp, Homo sapiens
ctcacccgcaccgacttccaccacaagcagcttgagctgcgccggaaaatcagggacgttcgcaaggtagggagcagcggaaaggaaacagggcgcctgctcctctctctgggattcaagga

SEQ ID NO: 477938 - DNA, 122 bp, Homo sapiens
tctgtgctggctgaggagctctgctctgctctgctccttgggagacggcctagtggctgccggtccttggatgctggggcttggctggaggcacagcccccactttccaggggtcccctgca

SEQ ID NO: 477939 - DNA, 122 bp, Homo sapiens
tggctggctttagttctggggaagctcagcttctccacttgaaccagtgacagccgggcacgccgcgtccccctggatgtgctgttccctgatcatcaactcaggacagcagtgagtggcct

SEQ ID NO: 477940 - DNA, 122 bp, Homo sapiens
ccagcccaccttagggcaaattcttccaactccccatctacagcacatagccctgccacacgcatctctttgctcagcccaccgttgagatcgttcactcactatgctttcagtggtcgaat

SEQ ID NO: 477941 - DNA, 122 bp, Homo sapiens
cctcctctcaggccaggactccctggctcctccggcccctccttctaggccctgcccctgcgtcttctccggaagccccaagcccgcagtaacctcagtccgggtttcagcgtgccagtgtg

SEQ ID NO: 477942 - DNA, 122 bp, Homo sapiens
ccctctcattgtggataaagccaatgcgagaggttgtagaatcttccaggttgagaatagcgtttccatagtaacactattagatgaaaagtgccctgcgggtccgccactctaaggacgga

SEQ ID NO: 477943 - DNA, 122 bp, Homo sapiens
gctggcatggtagtcccatctgcagtcccctgggatgaggcacctgtatggtagagggcccgggtggagagaagagaaggatggggatgaacccaggaccacagatggcccagttccatgga

SEQ ID NO: 477944 - DNA, 122 bp, Homo sapiens
atcttttctttacttttcaagtggataaaaatgaagcaggaaaagattggcgaactttgccggcatctcttagctcagccctggatggatgggatttagcccgaccctctcccttctctgct

SEQ ID NO: 477945 - DNA, 122 bp, Homo sapiens
ataccctggcagtcaaggtggacagtaacatctttgctcttgcccagggtttctaggagccgtggctcatgctctggagtgcttttcttggcagaagaatgtgccagccatctggactacaa

SEQ ID NO: 477946 - DNA, 122 bp, Homo sapiens
taattaaactctatctaattacccaaggcagtggtatcacactggctctgaagaggagtacgaaggagtgaaagagacctttccacctaatcttgtatacctttttaaatttgggaccatgt

SEQ ID NO: 477947 - DNA, 122 bp, Homo sapiens
tcacccaggcgggtggcggcaaagctgtgggatgcgcgctgcacactccttccgtcatcccgttcccaccttccacacacacctgcgggaggtcggacatgtcctgattgcgtgttcatcac

SEQ ID NO: 477948 - DNA, 122 bp, Homo sapiens
tcataagaagatagatctcgatataggaggacagccaagatggccgaataggaacagcgccggtctatagctcccagcgtgagcgacgcagaagacgggtgatttctgcattttcatctgag

SEQ ID NO: 477949 - DNA, 122 bp, Homo sapiens
attccctttatggtagctttttggttatgagttttggcaaaactgttaaatcaactttgccgatttcccttgggaatccctggaggccactctaagtggtaatcccaagtttaagaaggaaa

SEQ ID NO: 477950 - DNA, 122 bp, Homo sapiens
ctaccgcttcgtggacgcgcttgttgattggctccgaatgtcgaccaatggtcggcgaagcgggttgcttgccgcacggtcaatggccgcaaaccgggaggaaggcgggaagagaggaggtg

SEQ ID NO: 477951 - DNA, 122 bp, Homo sapiens
gccctgccagctcagcgcccgcgccgcaggccccggagcccagcccgttgtctggccgcccgcgttccctgcacgctgggccgagcacacttgccctctagctccgtggcagccgcgcagcc

SEQ ID NO: 477952 - DNA, 122 bp, Homo sapiens
tggaacgagtgggttggtctcagccagggatcagccaccgccctctgagacgagcactggcggaagtgagatgcaagaggaagctcacggctcaaccacatggttccctctgacccaaagag

SEQ ID NO: 477953 - DNA, 122 bp, Homo sapiens
ggggcccggggcacgcaccgtcactcacccgccctcactcgtccacatatcctgctctcgcgtgcacacaaccacatgcacacctggactcgcacacgcccacgcatggcagtttacacaca

SEQ ID NO: 477954 - DNA, 122 bp, Homo sapiens
gctggactctgcgccgcagctgccaaccaggctggagcgctggcccggccccccgcggctcgctgctccgcccgccgccattggcccgcggccctagcccagccttgttcccattggccaga

SEQ ID NO: 477955 - DNA, 122 bp, Homo sapiens
atcggaaaagggagcaggattacttacagtaagtgaaaaccaagacttgtacaggaagcacggcccgatccattacagggttattctagcccataatgtacctgtgcactttcagacacagc

SEQ ID NO: 477956 - DNA, 122 bp, Homo sapiens
aacagatgctttgggcaagtgtcgaggaacagtctcatacttaagacaaatgtaggcttacgggctgagaattcttggtgtaaaggttgaaaacggaccttaaacctttacgggacattgac

SEQ ID NO: 477957 - DNA, 122 bp, Homo sapiens
cccgctccactacaacgagtcctacagccaaccagtgtacaagccctacctgaccttgtgcgctgggaggcgcatctgcagcacttacaggtgagggatggggagatgggaccccaagaacc

SEQ ID NO: 477958 - DNA, 122 bp, Homo sapiens
cccacagcgacttagaggtggctttgtctgaacagaacattcgggccaggtacagtgcctcgcatctgtaattcaaacactttttgaggccaggagatggaggttacagtgagctatgattg

SEQ ID NO: 477959 - DNA, 122 bp, Homo sapiens
aattctgttttactcttgtaattgtatgcaacttcttataattgtggcaactaaaaagaccgattttatggactatgataacaattttattgtgaacatttcttaagagttaaaatttagtt

SEQ ID NO: 477960 - DNA, 122 bp, Homo sapiens
tcctgggcaggaaggagagaatagagccaagctgatggaattaaaactgcgtgattcagccggtataagactggaaatctttgttactgccatgatggtaataccttgttattagtgcctct

SEQ ID NO: 477961 - DNA, 122 bp, Homo sapiens
atggacgccgaacacaactttgctgcgtgtgctttctatttggctggggagcgtgaaggacgcctgaaacggagctccctgcctctcagcgcagacggccacgcggagccgcgccgggcagc

SEQ ID NO: 477962 - DNA, 122 bp, Homo sapiens
gagtcaccgcttactgaaccccttcggcaagcaggggaaagaccctcccgcctttccgtacgaagacatggcgctgccctatattgggctggcgcctcccggccaagagcagtctcctcctt

SEQ ID NO: 477963 - DNA, 122 bp, Homo sapiens
tttctaggtgacttcttcctccggactctgcagcagtcttactagttctgaaagcacaagcggaccgcacgtctcaacgcgggaaaacagttccatctgcagggatggaggaccgggctaga

SEQ ID NO: 477964 - DNA, 122 bp, Homo sapiens
gtgagcgtcatccagaacctgcccaagaacggtgaggctgcggggactcgcatttggactcgcattcaggacgcctggggtctgactctgaagaaagaatggtcctgatcactgcagttttt

SEQ ID NO: 477965 - DNA, 122 bp, Homo sapiens
acatgaactccaagtgagcctttgtatggaggccttgccttccagcagaggctctgccggcggtttagagagcctggcttccctgtgacacctacacgccccccaccccccaccccccacca

SEQ ID NO: 477966 - DNA, 122 bp, Homo sapiens
tccagcacgagaaggtgaagcagcgcggaggttattgacttgacatgggtcattttgccccggcgtaccccacgggatactgctatcctatatctccggcagggcattctctgggcaaacaa

SEQ ID NO: 477967 - DNA, 122 bp, Homo sapiens
accttaccctcctccccataggttccaggcagagggtggttatgtgctgtaccctcagatcggggaccggctagacctgctctgcccccgggcccggcctcctggccctcactcctctccta

SEQ ID NO: 477968 - DNA, 122 bp, Homo sapiens
aaagaagagcggaacaaatcccccttgcctgggaggccaaacagagcattgttttagttccgtaggagataatgacaatggaataaaacattgtcccgggtaatggtctcccgctggtaggg

SEQ ID NO: 477969 - DNA, 122 bp, Homo sapiens
cccgccgggggctggagccgcgggggcggcccgagcagcgaaggccccgcccgggccaaccgcctgcctggtccgccctctggtcgccgcctgctccaaggccctcctccccccactttccg

SEQ ID NO: 477970 - DNA, 122 bp, Homo sapiens
caatagttgccacgtgaggaggggccgtgggccccagggacgctgctgggacatgacatgcgctggcgccgtgcactgagcgggagccattctggcagcctccagacgctcgtgcccctgac

SEQ ID NO: 477971 - DNA, 122 bp, Homo sapiens
aggagcccgggtcccttcagtctgcgctccctgcggtgggcagtggcttctgtgttttgccgtcgaggtgcaacatgcagctggtgatgccctgtggcatctgcctcctgccctcggacatg

SEQ ID NO: 477972 - DNA, 122 bp, Homo sapiens
atgggccaaatcactcccagagcttcagaggcagagtgaagatccccgggagagcaggaccgccagagcccagagggcacctgcggggaggaaccggtgaacttggaggcctctgggcacag

SEQ ID NO: 477973 - DNA, 122 bp, Homo sapiens
tcactgcacctataaaagaggctgatacctctttttatgtattttttttaaacagggtttcgcctgttgcccagactggagtacagtggtgggatcacagcacactgcagcctggacctcac

SEQ ID NO: 477974 - DNA, 122 bp, Homo sapiens
gggagcaggggcaacgcggggccatccgggagctgcccgcctgcttcgcagttggctttccgggccctcgagcaacgtctgactttgccctttgtttttaaacaccatgcaggatggtttgt

SEQ ID NO: 477975 - DNA, 122 bp, Homo sapiens
aggaccacgaattcggattatccgggagttcttttgccatggcaccgcccccgccacttccgctaggaacccggaagttcctacccgacgccggaagtcccacggccttgcctcctcagatt

SEQ ID NO: 477976 - DNA, 122 bp, Homo sapiens
tccaccgccgccatagcgactctcctgtaccgacaaaaacacaagcacctctgccaccaccggaacccacttcgccaaagctcaacgcgctcggaagcaacttccgccgatccgataggaag

SEQ ID NO: 477977 - DNA, 122 bp, Homo sapiens
attttcctaaagcttccagcaaacgtctcttggaacttctagtcataattggatcatagacgcattcctgatttaatcactggtaaaggggaaggtgctaacagaattgatctaatctgaac

SEQ ID NO: 477978 - DNA, 122 bp, Homo sapiens
attctccttagagagaagtggggtggcttttagcagggcaaggggcttcctgaaacaatgcgtctcacaatatttggaatgactattgaaaagaagaacaaggtacaatcaaagtccttggc

SEQ ID NO: 477979 - DNA, 122 bp, Homo sapiens
aaaaaaaactacatctctttattgcagaatttatacttgtttgaaaaatacaaaatgtagcgttgataagattgaagcatgttgaaaggtaagtacagggaaaggtcctttcagaatgactg

SEQ ID NO: 477980 - DNA, 122 bp, Homo sapiens
cgttgcctcctgggcagtgtcggggcagcaggaactttgttacgtggagttctcctcgtacggctggctctgccaagctacccttctccttaaagtgtaccccataggaaatagggtttcgg

SEQ ID NO: 477981 - DNA, 122 bp, Homo sapiens
acacaggcagcttcttcggcagcctcacggcagcaaccccagccttcccaaagcagcaggcgcctccaggctggggcccaacctagaaggcaggggtcaatctaacaaaaccctaacgttga

SEQ ID NO: 477982 - DNA, 122 bp, Homo sapiens
caccagaccttcctgagcctggatttccttccgtgtggaaagataatcatcaacgacccgcgcctatttcaaggagactcttggcccaaaaatcccgattcctctaattcctcctgattttt

SEQ ID NO: 477983 - DNA, 122 bp, Homo sapiens
tgccccccctgcccccgcgggccccccaccctcctccggcggcagcgggctgctcgtggacgtgttctcagactcggcctctgtggtcgcgcctctcgctcctggctccgaagacaactttg

SEQ ID NO: 477984 - DNA, 122 bp, Homo sapiens
actgtatcaaccggccctccgcagagaactgctagtcctttaccaaaacagtcctccgaccgcagccaccctacggcacatcagttccggcgtcacaaaggttccgccaggggcggcgggat

SEQ ID NO: 477985 - DNA, 122 bp, Homo sapiens
agatggagaaaggctggaaaatgaaatggaagttgaaagtggttgttgtgagtcaggctccgactatggtgacctgtcttgctgtgagaatacacatggaaaccagccttccacagagccaa

SEQ ID NO: 477986 - DNA, 122 bp, Homo sapiens
gaagactacagttcccagcaggcccagggaaagacaggataccctgggtcggctcctccacgtgaccacccactatggcttcctagtgtcagggccagctgtgtagtggctcggtgtgattt

SEQ ID NO: 477987 - DNA, 122 bp, Homo sapiens
ctctccttaatggagggaataaaatccagaatagaagtgaagggcctggagagccgcattcgcagcagaaatgccctgaagacccagcacagctgtcccatcctccagcagctagactcctg

SEQ ID NO: 477988 - DNA, 122 bp, Homo sapiens
ctcctcagctcttgggtggtcgattggactgggcgccttggagcagggggcagcgctcgtcggggaggctcgggccgcacaggagcccacggagcgggggtggggaggctcaggcacggcag

SEQ ID NO: 477989 - DNA, 122 bp, Homo sapiens
gagcaaagaacaggaggacaggggattgatctcccaagggaggtcccccgatccgagtcacggcaccaaatttcactcgagtccatgtgaagagacaaccagacaggctttgtgtgagcaac

SEQ ID NO: 477990 - DNA, 122 bp, Homo sapiens
gccgggatccttctcaggcagcggcagatgatggattgcacgtggacactgcctgggatgcgtgcgacttggcagcctgcccctttcctgccctgggatcagacgccctggcgggtgtcctt

SEQ ID NO: 477991 - DNA, 122 bp, Homo sapiens
ccgcccgtgtgggccccatgtagccgggggagtcaggcaccgtgggcgtcttcacagggacgatgggcggccggatggggatggggccagcgctggacagggcgcggcgcacggtgggcttg

SEQ ID NO: 477992 - DNA, 122 bp, Homo sapiens
gccgccgagcgtttcgtgagcggcgctccgaggatcaggaatggggcttcgggcgctgggcgcgctccgaacccggcgcacgtaagagcctgggagcgcccgagccgcccggctgcccggag

SEQ ID NO: 477993 - DNA, 122 bp, Homo sapiens
agcacaacttgaaatgtagctatatgcagtctttagcctccatttgaaaatatacattcccgcagcttggtctcacagagttttctgaacttgctagtttttagaatcatagtgctaagtat

SEQ ID NO: 477994 - DNA, 122 bp, Homo sapiens
cgcttctgttatcttttaaaagacctgatcagactggagtacggaagtactctgagctctcggatttttttttaagttaacaggtcataaataagttcaaaagttttctgcagaaccctgaa

SEQ ID NO: 477995 - DNA, 122 bp, Homo sapiens
agaccagcgtgaggggctggggcagctgggcccaaagacagattcacagacgccttccatcgccgctgcggtagtcatgccctgcggcgtagcctcctcccaaggctggagcccttccccgg

SEQ ID NO: 477996 - DNA, 122 bp, Homo sapiens
gaggttccccgcggcagtgaggccttggccaaccgggctcgttctgctcctccagggctgcgactcccctcgtctcgggctctcctggtggaatcagggagaccgggcagggacagggggca

SEQ ID NO: 477997 - DNA, 122 bp, Homo sapiens
tccctccctgcttcagtccatggcaaaggaaagctttcgaaagtcaccgttctccagggacgttaagcatttcgagctggtttttaaaacagtattaagtgactttgacaaactggagctat

SEQ ID NO: 477998 - DNA, 122 bp, Homo sapiens
tatttatctaccaactgataatagtcattgaatgaggacattctgcaacttgcagctgcccgcttgtaggcagggtggactccagcagctggcaaaagcccccaagcaaagatacgcaggta

SEQ ID NO: 477999 - DNA, 122 bp, Homo sapiens
cgtccagccatgccagtgcgctccggcagcagtacgcgcagcagtccgcgcagcagtcggcgtccgcctcccagtaccaccagtgccacagcctgcagcccgccgccagccccacgggcagc

SEQ ID NO: 478000 - DNA, 122 bp, Homo sapiens
ttatttattcagcaagtactgagtgctgtcctaggggctggggaaacacaggagaacaaacgagaagtccatgctcttaagcagtttacattctagtggggaaggaagacaaacaaagtaaa

SEQ ID NO: 478001 - DNA, 122 bp, Homo sapiens
gaatccaccccctccgggtgtccccccactaccgccccccacctacttacctccgccggccgctttgggattttgcccactgtgaactccgtcagccctttccgtgtggtagctacggtagc

SEQ ID NO: 478002 - DNA, 122 bp, Homo sapiens
cccccgcgcggggcaccggttgctgtggacgcagtggcggccgttggctggcgggtgcggcgcagcctcggtgtctctgggccggcggtgcagggcaacgtttcatggtgccgggcggcacc

SEQ ID NO: 478003 - DNA, 122 bp, Homo sapiens
cggagtgattgacagtggccatttcaaagcctgagttcaccttctttgcaaccacaatcacgacccagaataaactgcttcctggaagccggctagttgcacctggcctgaagtcagtctcg

SEQ ID NO: 478004 - DNA, 122 bp, Homo sapiens
cttcttcgcagcattcaagatggtccggcttcctcctactttttattggctgcatcgcttcgtcttcaggggaaggcgggacttatatttgatcgacagctacattgatcaatggacaaagg

SEQ ID NO: 478005 - DNA, 122 bp, Homo sapiens
gagctttccgcctattaccgggcagcgattgggtcgctataccgcatgtcacgccaaggacgcactctcattggccaatcgagtttctgccatttgttcattgcctcctgagcgtagtccag

SEQ ID NO: 478006 - DNA, 122 bp, Homo sapiens
acaataggaaaaaacaataaaagctggtcccttgaggcaaaagaataaaaaataaataaacgtccagtcagatgatagaggaagaagaaaacctttgacaacatcccacacccaccatgact

SEQ ID NO: 478007 - DNA, 122 bp, Homo sapiens
ggaagtatttttaaaaaattggggaggtcgtttcccttgcagctccgccaccatctgctgcgtggactgagtcagcgtgaggtaaatttgcagcttcgcgctcctctcggaggcattgtgct

SEQ ID NO: 478008 - DNA, 122 bp, Homo sapiens
ggatcacaggctccttgggggcaattaattattaacaaatggggacagagttcagagtaacggaaacgggaggtgaaccccagtaacagcccccaagaatgctcagcacaacagcctgcact

SEQ ID NO: 478009 - DNA, 122 bp, Homo sapiens
cctgcgaagatggttgtggcacccagggaccagcagcattccaggtaattctaggtgagacggggaaggggagggatgataaaagcagagtcgagcagggctggcattgtgcgtgagggtca

SEQ ID NO: 478010 - DNA, 122 bp, Homo sapiens
cgcgccgggacatgccgcagcgcacagaatgcacaaggtggaaagacggtgctcaggcagcgcgggtggaagacgccggtgagaaccagcagctgcttcagaaaaaccgctgcgtgcagcac

SEQ ID NO: 478011 - DNA, 122 bp, Homo sapiens
ctggtccatgtcgtgggtacactctgtttacccatgtttattacacaaagtcttccaaagcgatcttacccattgctgttcccaccagtaatgcacaaatgctgccattcctgcctgtcctc

SEQ ID NO: 478012 - DNA, 122 bp, Homo sapiens
acacagctgccacgatgaagatgtaggaaataacgatgaggatgaggcagcctgcagccacgatgccaatgctggcaagcatgactagctcattaatggtggtgtctgtacaggcgagcttt

SEQ ID NO: 478013 - DNA, 122 bp, Homo sapiens
ttcaagaagaaaggcaagcggagacttccctttctcagtccctgcttactaatggaaacacgggtccagaacctaaatccagtccctcctccttcataccaccgggagggaggtgcagccca

SEQ ID NO: 478014 - DNA, 122 bp, Homo sapiens
ggggctggtgcaactccaaaatggctgccgcggggagcggcgattagaacgggttccagtcgcttgggggcgttggggggctggagggcaagaggttacgcgccccagctcccaccttgggt

SEQ ID NO: 478015 - DNA, 122 bp, Homo sapiens
tgccagaggatgggccggaccgcgtttcaggtaatcaactcaggagcaactgaaggcttccgagggtaatggaccacgtaatgagtcaatttgtggttgccaggtgcatccctgctcagacc

SEQ ID NO: 478016 - DNA, 122 bp, Homo sapiens
gcctgggaatttgggctccatgtaccttggtgtggataccagagagaattttttttttaacggtggtcatttccatgccccgggctgcacccagattcctatgtggttctttgagatctgag

SEQ ID NO: 478017 - DNA, 122 bp, Homo sapiens
ctcagccagtcgggagctgtgctcacgctgtatgtggacaggcttctgtgcacccctttccgtgtgctggctcgcatggtcgacatccttgcttgtcgccgggtagaaatgcttctggctgc

SEQ ID NO: 478018 - DNA, 122 bp, Homo sapiens
agtgaaagaagccaggcatgatggacagcttcctgtctgaatcccctcatatgaacctgacgggcacaatgaacctactgggctaaactccagacgctggccaccttcatagggtggagatg

SEQ ID NO: 478019 - DNA, 122 bp, Homo sapiens
ggcttttcaaccccagtccgcgagtttctttcttgaaggtgtgggggctagattcattcacgtgcttcgtaatgaaataatccaaaaaataggaccaaagcgcccactggcaggagcgaggg

SEQ ID NO: 478020 - DNA, 122 bp, Homo sapiens
gatatggagccctgatttaactccctccacaaagcagcacacaatggagttctcacaccccggatggcagccaggcctgggaactgggccccggcatgcaagtatgtgccggccactgtgta

SEQ ID NO: 478021 - DNA, 122 bp, Homo sapiens
aagctgtgtcagttatttggggtctgtgggccgtgtttcggtttggaagtccaatggcaccgcggcacttagattccgtgtcacggcccggcttgccgaggatgcctgctcccgccttcacc

SEQ ID NO: 478022 - DNA, 122 bp, Homo sapiens
ttacgtcactcggtggtggcgatgatgcgtgtgtgtggggggcggggcatacgctgggcgcgtcccgggggtcacgtggtgcagagcacgcagagtccttctgtcggttggtcctggagcgg

SEQ ID NO: 478023 - DNA, 122 bp, Homo sapiens
ttcctcccagcagagcctgcggtcgggggccacggaggcaggatgcacaccctcgtgccccggcgttctcacaccgaggctccccaggcaggcagacacagacagaggacaggcaggcgggc

SEQ ID NO: 478024 - DNA, 122 bp, Homo sapiens
aagagagggtggagcccgaggcggtgccatggcaacctaggccacccagagcccaactcccggctgaaggattgtctcactaccggtctgaaggctgaactccagtctcactaccggtcttt

SEQ ID NO: 478025 - DNA, 122 bp, Homo sapiens
taatttgttaaaggattgtgtgcaaggttaaggtggaaagaaaactctttgttggtttcgcgtcttaatcgccaggtttcacgagtaataataaaatgaaaggaaaccgcagggcgggccgt

SEQ ID NO: 478026 - DNA, 122 bp, Homo sapiens
ggagctgctcagaaaggtaggtgcagcccatcctccatcccagccggtggcagggcctctcggggatggcagcagagcatgagcccttcccctgcccatgcagaacgcggacacagccaagc

SEQ ID NO: 478027 - DNA, 122 bp, Homo sapiens
tccctgtcctcactcctgtggccctagtcccgggcagcctcgggttacttggggttttcccggtggcgagaggctctctacccccgccctttcgcagcagggctgaggcacgcgcttgcgcg

SEQ ID NO: 478028 - DNA, 122 bp, Homo sapiens
cggccacgccccccgcggccccgcccccagcccgcagaccccggccccgccccagccccgcgccccccgcagccccgcccccggcccgcagaccccgccccagccccgcgccccgccctgcc

SEQ ID NO: 478029 - DNA, 122 bp, Homo sapiens
atcaaaggtgtttcctagacatggtcaagctacatggaaggatttgctgatagacagagacgacatgtggtgaggtcatcttggctgagggatctgagattcagaaagtccctctttcccat

SEQ ID NO: 478030 - DNA, 122 bp, Homo sapiens
ggggcttggcccaggggcggcgggtggcatctgaagaccccgcaggccctgctttccttccgggagcatctcaggacggccgctttgtctgtctgcccccgccccttgctgaaacgtcaaca

SEQ ID NO: 478031 - DNA, 122 bp, Homo sapiens
ccacccacctgcatgcctgtggcacgagtgggcacacgtgttcccgtcgcatgtggagcccgcacctgtgggaggagagccagcccgggctgccgccgcggcggctgaatcaggacagcaaa

SEQ ID NO: 478032 - DNA, 122 bp, Homo sapiens
gctcgggtgttagtgagcgtaatctgaccgcagaaaagctgatgggaaacctgggcttcgcgccgcgtcccgcttttcctactttcccattccattcccatctcccttccctttccttccct

SEQ ID NO: 478033 - DNA, 122 bp, Homo sapiens
tgagcagagcagactaagacacaggatttagtcttaaatttatttttcaatactgatcgacgacaagttaaaaattcacattttagggatcaggtgttggatccatgtaatcaccagaatgc

SEQ ID NO: 478034 - DNA, 122 bp, Homo sapiens
ggtataaactgttactccattctctattacatatctgattaaatgtttctgccctgtcttcgtgatctgtgcatataaatccatgtcagtgtctttattaagaatatgtttatggcagggac

SEQ ID NO: 478035 - DNA, 122 bp, Homo sapiens
ggtcagctcttgcggctgcctacgttccttcacctgccaggaccgggaagttactaggctcgcccgcgggagtcgctgtccgagcttggcagtgctgaaaccgccggcgtgagctagggagc

SEQ ID NO: 478036 - DNA, 122 bp, Homo sapiens
atagttgggttaaaagagtctctgtgtttggccaagtctgacagtgaacaatgagatgatcgtggtgggaaaagcaggcgatgggaactgctggaaagtccacacaaggccaacagacagca

SEQ ID NO: 478037 - DNA, 122 bp, Homo sapiens
aaaatcctatttgtccttcagtattcaaatgccacctcttcagtgaggtccacccaatcacgccagcagtgaactgtgttcccttctttgcccccaaagcactttgtgcagatccctactct

SEQ ID NO: 478038 - DNA, 122 bp, Homo sapiens
gtgagtgacacgtttctgaggctctggagtccggcattgcatagtcctttgtgactgacacgtggttccaacgctcatcggtgctgcagcacgcataggtgcctccctgtttttcatggcta

SEQ ID NO: 478039 - DNA, 122 bp, Homo sapiens
gatcactcctcctcccaagaccttggtctctagggtcctgcagcagggatgaggccactgcgcctgcagccccactcaaaaccctctgggacaccacgcccctggcttccgctcctgccctt

SEQ ID NO: 478040 - DNA, 122 bp, Homo sapiens
cgggcgctgggcagcccccgccggccgccgtcggagcctttgtgcccacgccgggggcgtcgctgcaggtttaggagaagacccgtgcctccgagcagccgctcctaaaaattaaataaatc

SEQ ID NO: 478041 - DNA, 122 bp, Homo sapiens
agtgacttttaaacacactcccggcatcccacggacggagtgcctcatccactcaagtgccgccccaagttcaggaggaggctcgggatcccagggcgccacactcgcaagaggtgagaaca

SEQ ID NO: 478042 - DNA, 122 bp, Homo sapiens
tgttctcccctgtgatctgtgaagtagcatttcatgatttgaaatgagtgcccagggtgtcggtgctccagctgttcagtgagagttggctggggctgtactgaaggcctccagctggcccc

SEQ ID NO: 478043 - DNA, 122 bp, Homo sapiens
cttgtctctgtccactttactgtggctgtcttcaaacctttgaccacctccaagccactccgtattctggctggggaccactgccttcttcctgcagcttcctgctctcagcaaacaaccaa

SEQ ID NO: 478044 - DNA, 122 bp, Homo sapiens
gcccctaatacggccatcaaaaccgatacaatagcgtctccctggcacccccaccaggcccggctgccacagtccccgggcttcccaagagaacctccacttggctttcgcaacttcccgca

SEQ ID NO: 478045 - DNA, 122 bp, Homo sapiens
gtctagcagccctctccccgctgccctgtcctggccgaggcaaaggccgcgtgcgctccgcgtctgccaggctttagggctgcgcggacactgggtgggtggtgggccgaggcgaccggaag

SEQ ID NO: 478046 - DNA, 122 bp, Homo sapiens
agaggtatataaaggcagggagaactaccattgatataaggcctcttccggaccgaaacgcgcagccgcacctctctgttccgtcaggtggaataggcccccgacccgggatctctacccaa

SEQ ID NO: 478047 - DNA, 122 bp, Homo sapiens
gggaaagggagggaagaaggtgagggacaaaaagctacaatttgggtgcagtgtgtactgcgtgggtgatgggtgcacatttgctccttttaaaatgatactattattattttgctgttgtt

SEQ ID NO: 478048 - DNA, 122 bp, Homo sapiens
tctcggaagtgctgctgtggggaggaggaagaggcactctccacccagctgctgggctggcgtcccgtgaatgactgtctctgcagctctgcctgtcgccataactgtcagtaccttccata

SEQ ID NO: 478049 - DNA, 122 bp, Homo sapiens
gaggtagaggcggggcggctccgcgggccccgcccacaagcccagcctcctccctccccgcggaccctgggcctcgtaggagggcgtaccctactccagggacctttaggagctttcaggaa

SEQ ID NO: 478050 - DNA, 122 bp, Homo sapiens
gagggttccgagggcggaaggagggcacccacagcaggttcgatggcagaggcctctactcgttaggcctccctgggcctcacagcacagccccaattacggtttcgtgtgtcatgctattt

SEQ ID NO: 478051 - DNA, 122 bp, Homo sapiens
ccttccagcgctgctgcccgcgggagctggccctccacctttggggggtcttttcaggcgcgcggtggggagcagagcccggaaggcagtgatctgtgttgtgacaagcacccatttttcaa

SEQ ID NO: 478052 - DNA, 122 bp, Homo sapiens
tgcccgccttccggcccgcctggtccccgctttaggcttaggcacattgtgcccgccctccggcctgcctggtccccggggggaatccgcggccctcccactgttgctctgtgctctgctga

SEQ ID NO: 478053 - DNA, 122 bp, Homo sapiens
atggcctggggttccagctctggaaggttccgaatctcagtattcacgagcggcgctgtccggagcagccagggttgtcccttggtggtctcgggcaggttctccgcgatgcgcttgctggg

SEQ ID NO: 478054 - DNA, 122 bp, Homo sapiens
ggattacaggtgtgagccattgcacttggccagtaccacattttcaatctcaaccatgatcgtaattatttcatggagactaatttgtaagtacatcctggtgtgtgatcagttgcactgcc

SEQ ID NO: 478055 - DNA, 122 bp, Homo sapiens
ggaacctctgggttctggagcaggctcggatctatggagggtttgcctttggagcttccccgggacgtccagtgggctctgggctgccccgggctgctctgcccaaaaggaggctcccacac

SEQ ID NO: 478056 - DNA, 122 bp, Homo sapiens
acctcaagtgatgcgcccgccttggcctcccaaagtgctgagattacaggcgtgagccaccgcacatggccaacaatggttattctttaagtaatgagatcacaattttatttgtattttac

SEQ ID NO: 478057 - DNA, 122 bp, Homo sapiens
tgcacctcttaggggacttaatgctttctcatactaattcttattagttactctccaacacgagaacaagctacttatagacaggttctgtgtttacctttttactgcccataactgatcac

SEQ ID NO: 478058 - DNA, 122 bp, Homo sapiens
tttgccagtttcacaattcaatcggttattaacacagcctaaacaactgaagattttaaacgtggcctgctagagaaaaccctggataaggagtctggcaatattattttctagttctcttt

SEQ ID NO: 478059 - DNA, 122 bp, Homo sapiens
acctccggaggctccagggaggctttgtttcctgccctttgctgcccacattcctgggctcgggcccatcctgcctccagccgcagagcctgtccccatcattctctctgcctccacccatg

SEQ ID NO: 478060 - DNA, 122 bp, Homo sapiens
gcgcctcggaggctgtgacctccagggaggtccggctgggtgcagcgtgacacgccggggcggttgccaaggacctgcccaatctgcgggtccagttgctagggcctccatcttgggggcca

SEQ ID NO: 478061 - DNA, 122 bp, Homo sapiens
ggctctgatgcaaatgcactggcttcaagccaggcctccagtgcgaggttgcgcctaccccggcaacaagcacaccaggactgctagtaacagggcatctcaagcagccgagtggagcccca

SEQ ID NO: 478062 - DNA, 122 bp, Homo sapiens
acgaggagcatacctacctgaccgcatgcacccctgccccggacccccactcaaggcattcggggtctgcacgacgagcatgcctacctgaccgcgtgcacccctgccccggacccccactc

SEQ ID NO: 478063 - DNA, 122 bp, Homo sapiens
gccgccaggcctacggaagcccaggcaacgctgctgaaggaagcatgtggaaggccccagcggagaaggccacggagaagacgcccagcgccccgctgagcccccgctgacgcagcccacaa

SEQ ID NO: 478064 - DNA, 122 bp, Homo sapiens
cagaagatgttctgcatgtcatccagcttcttccaggagcccttgcgatccaacagccctcgaagcttcattcccaaggacctgatgggagaggaaaagatgagggtgaggtctgggggcta

SEQ ID NO: 478065 - DNA, 122 bp, Homo sapiens
cggtcatgctgggagccaacagcaccggctcctgacgtggggacttgccctgtgccatgacgtggggactcgccctgtgccctgcgccccggttcctgctggttctgtgccttctggactca

SEQ ID NO: 478066 - DNA, 122 bp, Homo sapiens
atttcagatgggggatcatccttgtcaaatgctccacaataggccaggtgcagtggctcacgcctgtaatcccaacactttgggaggctgaggcggggggatcacctgaggtcaggagtttg

SEQ ID NO: 478067 - DNA, 122 bp, Homo sapiens
agttctttctttccctctgggctaacaggaggggcctcccctcccaggtctgggtcttggcgggctggcagctcccctgcccccacccagctgcctgggcgccactgcgcagctgtcccagt

SEQ ID NO: 478068 - DNA, 122 bp, Homo sapiens
gcattagagatgattcccaggcagggtgactgggcagccaagggaaagcgctggcctgtgcgggatgaggcagttgggttctggagagcacaagcaatcattcggtgctgcccatcagacaa

SEQ ID NO: 478069 - DNA, 122 bp, Homo sapiens
atcttaaaatcaaataaatgttttcctgcaaaatgaaggcttctaagcccatctgccatgcgttcctgaagaagcgttgctatttcagagacgtgtctgataaccatgactggaaaaactgc

SEQ ID NO: 478070 - DNA, 122 bp, Homo sapiens
cgggctcggcggggacaagagccacttcaagtggtctccgccttatctggagtgcgagaacgggagttacaagcccgggtggctggttactctttcctctgccatctacgggttgcagccta

SEQ ID NO: 478071 - DNA, 122 bp, Homo sapiens
gactgcacaaaaggtgccctaacacatttaatgccctagttaaatgcattgcacaagttccgttttctggagctggataaacagaacatctttctttttctattctaagcttctatcgcccc

SEQ ID NO: 478072 - DNA, 122 bp, Homo sapiens
tgggggtgtctgcctcctgtttcggttcagggtctccagccgcccgggggagggaataggcggctttcccgcggggaatcccgctgccttgcctcccacagttccgttcccagacccacgcc

SEQ ID NO: 478073 - DNA, 122 bp, Homo sapiens
ccggctgggtgacgttatcgccgggtcctggggctgcacgtgtggtgaggcctacagaagcggccttcagctggaccttggtctccccgccggacttcgagggtgtcatcgccgcccctgtt

SEQ ID NO: 478074 - DNA, 122 bp, Homo sapiens
ctgacagtacactgtgaggacggggcggcgtgagctcagccacctgcctgccgggaggcccgcccctccccaaggccacagaaccatgatgccctggatgagcctccccggccgctcctggg

SEQ ID NO: 478075 - DNA, 122 bp, Homo sapiens
atagtggccttctcacctaacgccaccaacatggtgttcaggcgcttcgtggaggttggccgggtggcctatgtctcctttggacctcatgccggaaaattggtcgcgattgtagatgttat

SEQ ID NO: 478076 - DNA, 122 bp, Homo sapiens
acaccaaagagaaggcggctgtggcggcagcggcagccccagccatgctgtgttatgtgacgaggccggacgcggtgctgatggaggtggaggtggaggcgaaagccaacggcgaggactgc

SEQ ID NO: 478077 - DNA, 122 bp, Homo sapiens
cactagggcgcagcagatagctcaggggagactgacgtcatctacttactcatcatctgccggaaatcacaaacatcatggttccctgcgtgctcatctcaggcttggtgctgctagcctac

SEQ ID NO: 478078 - DNA, 122 bp, Homo sapiens
ccaaccgacatccttcaccctcagttagtgcgcaggagggaccgggacgccagccgactgcgctccagaactattcccattgggccagagaatgagtgacgcactaggccccgccccggccc

SEQ ID NO: 478079 - DNA, 122 bp, Homo sapiens
gccagccaagcaggcacagatgctctgctatgaaatgccacgcaggcagagactgacaagcggtaggaactgagctttccccttggactgctgcttcctgctgtgttcaggggagggggtca

SEQ ID NO: 478080 - DNA, 122 bp, Homo sapiens
aacgctgaagagccgctcaggcgcccgcagcccggcaggaagtgacgggggaggggcaggcgcccgcccccggcccccgcccgcctccaggcccggccccggccccacccccacccacggtc

SEQ ID NO: 478081 - DNA, 122 bp, Homo sapiens
aggttccaaataattgatgcaataggacctagcttggaaaactactttgtctagcatagccgtgctgaggccgagggggctcacagcctggcagccacacaacccccttggtatgcattgga

SEQ ID NO: 478082 - DNA, 122 bp, Homo sapiens
cgggacactgcctggggaaggcgggtggggagcggtggaacccgacccttggagcgaaggcggacaagtaggtaggcaaagatgctgagtagtccctccccaaagtcccctgggcacaagac

SEQ ID NO: 478083 - DNA, 122 bp, Homo sapiens
ccggagcatgtgggcgaggacctgacccgagccctcggtgactacgccagggtggagcagcgcctgggacagttggggcccgcggggggcctggccccgagacccctgcgggagcagctggg

SEQ ID NO: 478084 - DNA, 122 bp, Homo sapiens
gcgcacgcgtttcgcactactcctctgggaatggggaacgtctcccgagaactgtgtgttcgcactgggacagatgggcaaactgagcgtcatgcgggttggtaaccggctccctcagcggc

SEQ ID NO: 478085 - DNA, 122 bp, Homo sapiens
tgatactccttcccaaagtgagttaaccaaacaattcaaaatcagtgaaaagggggtggtcgattgcaaatgaggttaagtccattttgtcacaaggacaggaagctgatggctgcctccaa

SEQ ID NO: 478086 - DNA, 122 bp, Homo sapiens
aactccagccagcagcgttcgtcccttgatttagagggctatgatttctacaaagtggcccgactggcccgcgaacacgcagcagagacgcggcctccacaaggtcagaactaagatgtcct

SEQ ID NO: 478087 - DNA, 122 bp, Homo sapiens
gaagcacgggcacgagtcacaaagcaggtcactgagacagcggcaccaggcccgccagtccgatctgctgaccccagccagggcccagcactcccatgccctgcactgcacgaggctgcccg

SEQ ID NO: 478088 - DNA, 122 bp, Homo sapiens
caagcacccccggggcgtcgtccgcagacccgccgtcgggggcgcgccccgagctccccgcgactcaccccgcacgctacagtcgcctcgggctcccgggtccgcactcgggcggcggctcc

SEQ ID NO: 478089 - DNA, 122 bp, Homo sapiens
cgggcgcgcatctccattttccaaaatatccgatatacatatttaaagtcacctgtgttgcgctgctcctggcccacaagcgctaagggaccccagcacttaccttactcgtccacgccgcc

SEQ ID NO: 478090 - DNA, 122 bp, Homo sapiens
cggggccttgctgactagtggtcgaagccacaggaccaggtgcgggtggccagcgtaacccgggcagccccgctgcttcccctcggccgcgccaggacgctcggcacgcggcgacgacggcc

SEQ ID NO: 478091 - DNA, 122 bp, Homo sapiens
gggcactgggaaagcctgtggctcctcccgccctctctttccatttcctgccccctcaggcgccctgccaagctagaaatcctgaaatgcaggctgcagcctcttgtgggtgctggcctggc

SEQ ID NO: 478092 - DNA, 122 bp, Homo sapiens
ccagcattagcaagttttccgtgtgggagtggggtgggggtggggactggagggagcaggcgctgaaccaggaaaggaggaggatgctcatcattggctaaagatccatgcctggaaattaa

SEQ ID NO: 478093 - DNA, 122 bp, Homo sapiens
cgtgagaacagactaatacacacacatacacttctctcccactccatatttgaggtggaacggaaatgagatgccaaggccctcaatctgtttccagtactccataagcacacctcaacctt

SEQ ID NO: 478094 - DNA, 122 bp, Homo sapiens
agaaggatacattcacctactagtcctggtccccttttaactttttctccatggcagccacgcctgtatattacagaagaatccagatattttccagaagtgtaatgcctgctggctgcaaa

SEQ ID NO: 478095 - DNA, 122 bp, Homo sapiens
atttgtttcatttgcaaatggaagcagagagtttcgaatttcctgcaaggctttatgatgcgtcccaaatttgggtggatttctgacttgtcgaggatcttcggttgacattttactcatgt

SEQ ID NO: 478096 - DNA, 122 bp, Homo sapiens
acccacggggtgacaggcaccgaagtcaaacaccttcattttccaggcatgactctatggcgccgctccttgagatgtcatccagatcatgactaacaagtaaaaatgaaacatattacata

SEQ ID NO: 478097 - DNA, 122 bp, Homo sapiens
cgctcaggtcagcctcaccctttcccggggcctccatgcggcagaagggctctgttagtgcgcctctaagatggcgacgcctttggcggtaaattcgggtaagtgtggccagacagaaagac

SEQ ID NO: 478098 - DNA, 122 bp, Homo sapiens
tgtctggatactaaggacaactgagtggaaatattcactcatggctgggcatgggtctcacggcctggaaagagagctgggctggagagagggacctggagtaatcctctgccaatcaagac

SEQ ID NO: 478099 - DNA, 122 bp, Homo sapiens
gcccaggggagcagtaaactttctctgcaaagactagatccttttttacgctttgcagaccgcatagtcactgtctcaactactcagctctcctgctgcagcatgaaggcagccacagacaa

SEQ ID NO: 478100 - DNA, 122 bp, Homo sapiens
agacagggcccagagcatgacacacacgaccgctgacaggtgtaggggcgggggcggcagcgctaccagatgggccacaggacgtacaggcagcgctcggtgctcatggcgcttagaaagct

SEQ ID NO: 478101 - DNA, 122 bp, Homo sapiens
tatctgcaggagactgtaggtgtcccaggcatatgtggcccccattgcgcatcacctcctcgagcacttttgagtccttaacaccaagaatgtcaacaagcccaccctctacactgctcgac

SEQ ID NO: 478102 - DNA, 122 bp, Homo sapiens
cctgaaaaccgataaggcacaaagcccactccttcccttctaagcggttagcgtggggcccgttgtaccgctcaggtttatctcagcataacactagctcactcaccaaagaggctgagcac

SEQ ID NO: 478103 - DNA, 122 bp, Homo sapiens
ctgtccagccctccctcaaaagccggggtcgaggccatttgggggtcttcagagaggtctcgctgtatgctctggacaaactgcatgccgcacacagcaggtatagtcggttctgccaaaac

SEQ ID NO: 478104 - DNA, 122 bp, Homo sapiens
gtgtccccagatagaccagagggctccatcgccattgctctgttctctccgcttctgttacgagccattccagagcgagatcctgctggatgctgatagtgaaccacacacagtactgaatc

SEQ ID NO: 478105 - DNA, 122 bp, Homo sapiens
ggccttggggaaagtgcccaggcttcaggccctaaagggactgggtggaaaaggacttgacgatgttgtttctcaggttcagaggttttctgtgagatgattcagttgacctctgaggggac

SEQ ID NO: 478106 - DNA, 122 bp, Homo sapiens
cagtcagcgacaagcaggaagctcacagagcacaggggcctgtttcccacgcacggtccccgactcggggcccagggccacagccctccaagcactccaaggcgcttgtgaggtaagacccc

SEQ ID NO: 478107 - DNA, 122 bp, Homo sapiens
tttggtattgtacaattggaaagaacccgtttctgttcccaccagatgcagatgtcaggtcgaaacagaaggctgagagatgcttaaaccaccctagcagaaaagccatctctgatgcagaa

SEQ ID NO: 478108 - DNA, 122 bp, Homo sapiens
cggcaggttcatctctggggcagcctcccacagtgggtggggctttgccagcagtgcccacgggggtcatggggccaggcgcgctccggcgcctgcagaactgatcggggatagtctcagga

SEQ ID NO: 478109 - DNA, 122 bp, Homo sapiens
ttagccgtcctctgtgcctttgggccataccatttcccgggaatctttggagccctcaggcgtattgaaaagggggcatccccatttcccgagtgcgcggggagattttttttttttttttt

SEQ ID NO: 478110 - DNA, 122 bp, Homo sapiens
gctttcagagtgcaccctgtttttgttcctccatcctgttgtctggatccccttctaaaacgtaagttccaggatggcaggaactttgtctatttggttcacactcgacacagttagtgctc

SEQ ID NO: 478111 - DNA, 122 bp, Homo sapiens
gttacaactaaactggagaacatggccaaggatgggaactcagcctgagcagggctgagccgagcagggctaagccaagtagggctgagccagaacacttcctccttttttctgaacaatct

SEQ ID NO: 478112 - DNA, 122 bp, Homo sapiens
tgcctcggcagccccgcgcgcctctggccgcggcacccgaccaggagacggcggcagcggcgggagaacaagaggcagccctcgcctcaccccgcgccgggacccttccgcccctcaccccg

SEQ ID NO: 478113 - DNA, 122 bp, Homo sapiens
gccattgaattacagaccggtttgtatttaatactgaatatgacttgtgtgcacagtcagcgagtattggcataaaggagaggggcaaaaagtgcttttgcagagcctatcacccctcggct

SEQ ID NO: 478114 - DNA, 122 bp, Homo sapiens
actgctgacggcttgcccaaagattgagggaaacactcccaactaccaaaaaactccagtcgctgtaggaacctgcactgtgcttaaccgttgatgcattcctcaaccttcctttctcagtt

SEQ ID NO: 478115 - DNA, 122 bp, Homo sapiens
gattcgtagagtaaattcggtaccgaggggcggggtcggggatttgaatcggtcggcgggcggaggaggcgggtggaggaggctgccgggcagagcgcaggccaggatcagcgcaggctgtg

SEQ ID NO: 478116 - DNA, 122 bp, Homo sapiens
ggccatagaaagagagccatgtttatttcagaaacatgagtctgaaataagtagacagcccggaacctaggtggttaagtagttaatgttatgtgaccaatatagaaaacttgagactatca

SEQ ID NO: 478117 - DNA, 122 bp, Homo sapiens
ggctctgaaggatgcccggcacaggggtgaggagcccgcgccgccctctacagatgggtgcgccacgatggcaacgggcaatgcaaagccacacacgccggccacatgtggacagacatcgt

SEQ ID NO: 478118 - DNA, 122 bp, Homo sapiens
cctctgcctccagggtccaagcagttcttcctcagccccctgagtaactgggattacaggcgcttggcgaccacgcccagctaatttttgtattttgtagagacagagttttgccatgttgc

SEQ ID NO: 478119 - DNA, 122 bp, Homo sapiens
cacaccggactccgcgtcttgtcccaatacaaatacatgaaaatgcggttcctcaggtggcgagaacagtgagcacttctgaagcaagcccattaggaacattgaagtaaatctgaagccta

SEQ ID NO: 478120 - DNA, 122 bp, Homo sapiens
caccatggcatattggccgtagtgttcacgcagtcatggtgaatcaccatggcgtattggcggtagtgttcatatagtcatggtgaatcagcatggtgtattggcgcttgtgttcatatagt

SEQ ID NO: 478121 - DNA, 122 bp, Homo sapiens
aagcttctgtacagtgtctccccagacccgccgaagtctctccaaaagtgcctcttcctacgtaactgctgagacggcagaaaccctacacgtagattgctggtgtgactgcactgcccgtt

SEQ ID NO: 478122 - DNA, 122 bp, Homo sapiens
tgctggctgacgagtccgaagaagccccctcctcactccgggccctcggtgtcaggcggccgccttgctctgggccgcccagccctgctccatctatgcataggccggggtcctcacccagg

SEQ ID NO: 478123 - DNA, 122 bp, Homo sapiens
catcgacagagtgtctcaggaagaaacaagtgcatggattcataaaaaggccagatgggacggtgggctgctatgaaatattatagcacacctgtggaatacggtagtgtagctgggaggga

SEQ ID NO: 478124 - DNA, 122 bp, Homo sapiens
cgcctgggctaactctgaccgtgtcttgctcgctccccgcacgcaccccaccctcggcctcgagtggcgacgggcttttccattaacctcggacgcttctccattgacctctgacccgcggt

SEQ ID NO: 478125 - DNA, 122 bp, Homo sapiens
tctatgggcaaacacatttatcaaaccacctccatcctctaacatttgttttttctcagacgtgagatcctatttgtaggactataacaacaaggaactttattaatatgatgtctagagaa

SEQ ID NO: 478126 - DNA, 122 bp, Homo sapiens
cccggtttctggcccgagtcagagtccaggaggagtcaccgctgtgcaccgagctgcctgcgtctgatgccacgtgcccctgtgtggccgtgtgacctgaggggtctctccgttcctggact

SEQ ID NO: 478127 - DNA, 122 bp, Homo sapiens
gatgttgaactgaaaggtaccaggagctcacacatcccctccccttcccgggttatcttacgtgatatggggcacagatttgctttaaataatttacttctgagcgcccaccactctggaga

SEQ ID NO: 478128 - DNA, 122 bp, Homo sapiens
catatgtgtcataactgttgtctgaacatacggagagcacatcggagacctctacaccatcgctgatctctgctgggccagagggagacagaatgtgagtcggggaggaggcagtcgtgagg

SEQ ID NO: 478129 - DNA, 122 bp, Homo sapiens
gctgccgagtgtctagggagtctgaggaccccgggacaaggtgcatttatcccaggctcgcggtgcctgtggttcatgcatggtgccttatgggggtctctgcacggtggagccctgttggt

SEQ ID NO: 478130 - DNA, 122 bp, Homo sapiens
ggatcagagcgctcggagaagcggacgctaagcgaggatcagaccgctccgagaagcggacgctaagcgaggatcagagcgctcggagaagcggacgctaagcgaggatcagagcgctcgga

SEQ ID NO: 478131 - DNA, 122 bp, Homo sapiens
atgtagcccttcctgccacggagaaggtggccaaggtctagaggaggccagcaggccaggcgaagcaacgctcccgcgctgcagggggcggggaggcagcggggaacctggggcgcaggaac

SEQ ID NO: 478132 - DNA, 122 bp, Homo sapiens
ttgggaaaacagaggccacttcttgtaccctcagtcagggtagtgtcgtagggaagaaggcgtgtgtttgtccctgggaggtaagtgatcttgatatttcacaatatcatctcctcacacac

SEQ ID NO: 478133 - DNA, 122 bp, Homo sapiens
gtccattgattcaaatgccaatctcttctggaaacaccccagagtcatacccagaattaacgcatcaccagctatctgataaacttaaccagtcaaggtgacacctaaaattaaccatcaca

SEQ ID NO: 478134 - DNA, 122 bp, Homo sapiens
gtttatccaaataaacatttactttatagtatcgaactaagataaaagaggtcagcctcccggcctctttctgcagtgtgctgaatgctggtagacagacaggccactgagactctgagccc

SEQ ID NO: 478135 - DNA, 122 bp, Homo sapiens
caagggcggggattcgcgctgccaatgaggccccggtgtgggccgagcaaggcggggggacgggccggagcggaggctttgctgtggcagctgctggagcggcggccgcctcgggagccgga

SEQ ID NO: 478136 - DNA, 122 bp, Homo sapiens
gcaccccccagtggtggcagctcactccccggcagcctatgcagctggggctccccacagcgggtcctggaggcatgccacctgctcacccccttgaccacatggggcctcgcttcggctct

SEQ ID NO: 478137 - DNA, 122 bp, Homo sapiens
acaggtggagccaccgcgcccggcatcgataatctgaatctctaacgagctcccgggcgacgttgatgcagctggtaccgggaccactcttcgaaaatcatcggtttagaggttttaattct

SEQ ID NO: 478138 - DNA, 122 bp, Homo sapiens
tgggggctcggcggccctctgaagcgggtggattggctggggtgcttcgctcagccaatccggacgcgcccgggcgtcgcggccccgcctcctccccggcgctctgggcccgtagcgctccg

SEQ ID NO: 478139 - DNA, 122 bp, Homo sapiens
gcttcagctgctggaaagcaaagccagatagaagccagggtctgccgaaggcctggggagcgcccgcacttgcaagcatttgggtagacactcacacaaattagctacacaatcattatttt

SEQ ID NO: 478140 - DNA, 122 bp, Homo sapiens
ccagacggcacgggcacgccctcacacctgccagcctgtggggtgagggacgcggcaatgcggcggtctgtcggcactgctggttcccagtctctcgcccaggctgccagtgacactgcgac

SEQ ID NO: 478141 - DNA, 122 bp, Homo sapiens
cgactataacaaggtggccatcaaggtgggcgggcgctacctgaagggcgaccacgcaggcgtcctgaaggcctcggcggaaaccgtggaccccgcctcgctctgggagtactagggccggc

SEQ ID NO: 478142 - DNA, 122 bp, Homo sapiens
ggagaaagggaaaagattcagagagactttctgctggacacttatatgtgggacagaaaacgtgtcccttcccagccatctcatacagttcatttgaactggataccaatctttctcagctg

SEQ ID NO: 478143 - DNA, 122 bp, Homo sapiens
cgtttttgtataggttataattcacatggctcaaatattcagtgaaagctctccctccaccgccatcccctgctacccagtgaccctgttgccctcttcagagacaaattagtttctctttt

SEQ ID NO: 478144 - DNA, 122 bp, Homo sapiens
ggacaccctgtgagagtaggtgctgttactacacccattttatagctgaggaactccaaccgggttccacaggcgagtccgctccccgtgggccttgtcaagggggtcgccctcccccatct

SEQ ID NO: 478145 - DNA, 122 bp, Homo sapiens
gggccccggcggttgccatggtgacgcagggtcggcggctcagcgccgtagagacaaagccgcccgcccgccagcccgctagctcctcgcgcgagctcctcctccacgggaacctccctccc

SEQ ID NO: 478146 - DNA, 122 bp, Homo sapiens
ttggatcagaggcggtggcagcggcggcggcggcgtccagccagagccctgtggaagcggcggcgacacttgggctgggcagtgtctctgatgcctcccagcgccagcgactgctcttattc

SEQ ID NO: 478147 - DNA, 122 bp, Homo sapiens
aggcagggagaccctgttcttgggactactgtctgcagagggtctccagaggcaggaccccggtagggacactgatgcaggaggcgctctgcagtgcctccccccaatctgtgggccggggt

SEQ ID NO: 478148 - DNA, 122 bp, Homo sapiens
cctcctgtacacaggttgtgtcgggggtttcctaacctgggggcggaggagttcggtgttcggtgcatgcgcgttacaacttcatcacgtgtctccttccagcagcccagctcaggggccgc

SEQ ID NO: 478149 - DNA, 122 bp, Homo sapiens
gaaaccaagactaggggcgcgccgtcaccagagaccgggcctcaggctggtgcggggcagcggagacccaggctgcggtcccagttttggcctgggctctacctcaaagcttaaggaccggc

SEQ ID NO: 478150 - DNA, 122 bp, Homo sapiens
ttcagagccggaactccggacttctgcaaggccagacgtgaggcgacactgaattgctcccgagacgcgggaagggcgaaggcaatcgaagcgaagagctttaactcatcttctccaggatt

SEQ ID NO: 478151 - DNA, 122 bp, Homo sapiens
agcaggtgtcagatgccatagtttcttcgcaaccaacaacaccctggggctttttagttccgcattcaagacaaggaagaagggggatggcgactaaccccaggtgattaggtacctgaatc

SEQ ID NO: 478152 - DNA, 122 bp, Homo sapiens
aacgaattaactcagtctctgagggagggacctatgcatcagtgtttttaaagctccttacgttattccagtgggtagccaaggttgacagccactggtctagggccttccaaaatcactcc

SEQ ID NO: 478153 - DNA, 122 bp, Homo sapiens
tctcggtgcttaagagttttcctttaacaatctttacctgtgggaatgcagagacccccccgccctgcgagaggccggcagccagggattccccgctccgcgccctcatcaccccccggaaa

SEQ ID NO: 478154 - DNA, 122 bp, Homo sapiens
tgcgccccgccccgctccgcctgcctggcgcgcggggctagtccgtgccgtccaccagctcgcacagcatgttctccagagccgtgatgcgctgctcctgggcctgcacccgctcgcggagg

SEQ ID NO: 478155 - DNA, 122 bp, Homo sapiens
ggggcgaggaggcagccccagccgacaagggtcgcaaacatgagtgcagcaaggaggctccggcagagcccggcggggaggcccaggagcactgggtgcatgaggcctgtgccgtgtggacc

SEQ ID NO: 478156 - DNA, 122 bp, Homo sapiens
tgcaggatataatctccaggtgcgccgttttttttaaacctgtcggaaaagcgcagtattcgggtgggagtgacccgattttccaggtgccgtctgtcactcctttctttgactgggaaaga

SEQ ID NO: 478157 - DNA, 122 bp, Homo sapiens
agaccaggcacaggacacacccatgctgccagcacaggcaggactcagtagcccttacaacggggctcaggaacagaaaggcaaagggacttaggctggacaagccaaacgggtctcaagag

SEQ ID NO: 478158 - DNA, 122 bp, Homo sapiens
ggaaatcaggcaccgggcggggcgggttcctggctgcgctcgcgcgctctgcccgcgccgcggtgtgcctccgcttacccgcagctccgaccactggctcgcgctacccaggtctccgcacg

SEQ ID NO: 478159 - DNA, 122 bp, Homo sapiens
ctggtcgggctgtggggcgggaaactcggtcccggccgccgagtggggaaggcgggagctcgggatgcagagtgcactctccctaggccaggccttcgaggcctaactgttcctcagaccat

SEQ ID NO: 478160 - DNA, 122 bp, Homo sapiens
ccagcacccaagcttggaggataagcaggacaccttcacctcttttaaaatccttaaaagcgttagactaggcactggtctttgctttgatagaggttacttgggctcctgcctgacttttt

SEQ ID NO: 478161 - DNA, 122 bp, Homo sapiens
ccccccaggaggctgtctcctccagagcccatggctactctcagccctatgtccttgtcccgagcactttgtcctgctgctctgagctcacagtgaagagggaaggaggggcggggtgggcc

SEQ ID NO: 478162 - DNA, 122 bp, Homo sapiens
ctacccgcctcaactcacgggttgttattactcattgtaagtaacaagctgctgaggagccgcacgttggagtgcagccccgcggccgccatgtcccgcacgtggtctatcacattcatcct

SEQ ID NO: 478163 - DNA, 122 bp, Homo sapiens
cagacggatttccggttcccggggctacgaggcggaagcgaaggcagacgcagtctccgtcgttgacgttagtcgcagtcttcgctgctaacggtaataactcttaggttgcctgttttccc

SEQ ID NO: 478164 - DNA, 122 bp, Homo sapiens
tacgaactgagcaatgtgcttcctctcatcacatgcctgtaactttctggctggagagatcgaaccgatgttggagacaaattaaaaaaaaaaagagcggagaaaaaaggtatagacactca

SEQ ID NO: 478165 - DNA, 122 bp, Homo sapiens
gggcgcgggtcgttaccttgaggatgtcctgcagctgcttcaacacagcgtgcacctcgtcgtgcagcagccagcggaactcctcctcctgcgggacagacccggcggtcgcgcccggcccc

SEQ ID NO: 478166 - DNA, 122 bp, Homo sapiens
ctgggcatcagcagagcagacgtccagttcgggggtccacgccagtatgcggcagtggcgcggggccgaggctgctcacaggctgggtgccgacagcccagctctcctttgaaataagccgt

SEQ ID NO: 478167 - DNA, 122 bp, Homo sapiens
atgcgcttatgtgctcagaaacggtcccattggttgggactaccttccccgatgcccatccgcccagaatcttccttctgggatgccgactttttcaacacgtgccaggagcccttcctcgg

SEQ ID NO: 478168 - DNA, 122 bp, Homo sapiens
agctcaggaagagccctcggtcggcccccggagcagggccctgccgggggctaggcgctacgctcagttaacttatttgtaaaactaacgtgcactattgaacttgaggatagttaagacct

SEQ ID NO: 478169 - DNA, 122 bp, Homo sapiens
ggctgcctaaccatgcgccgcgcttacacatgctccagagggtccggctgcctaaccatgcgccgcgcttacagatgcacctaaccttatattgttcaagtctcatgtcctgcctatcaggg

SEQ ID NO: 478170 - DNA, 122 bp, Homo sapiens
gctaacgggacggctcccgcctgccattggctgtgagttctgccagtcttccagagaccccgcccctcgccgaacggcttccccgcccgcccccgccccttcaggagcccctccgctggctc

SEQ ID NO: 478171 - DNA, 122 bp, Homo sapiens
cagaagtcaactaggtgcagccagtaaagtgcgtatgtactgcagggtaataaccggagacgactcatgtcattgcaaacggaaatggtagtaggtacaaatgactataaagaaaattaagt

SEQ ID NO: 478172 - DNA, 122 bp, Homo sapiens
cctcggtgactggtcccaccacgcacccacgggagggtaaaactggctctgcggacatcccgacatcccgacatccccacatcccgagaggggcagggggagctctcaggccctaaaatagc

SEQ ID NO: 478173 - DNA, 122 bp, Homo sapiens
agcaggtggtttcattgccctccatttacagacaagtaaactgagcttcagggtggctaccgcttgtctcccaagccacccagccatttagccacggaagaggtcatgactttttacacccc

SEQ ID NO: 478174 - DNA, 122 bp, Homo sapiens
tgtcagggtacagaattctaggttggtgggttttttctcatcactttatttcactcccctcgtcttgcttgtctggtttctgagaagtcagatatattgtaattcttatcgtctatagagaa

SEQ ID NO: 478175 - DNA, 122 bp, Homo sapiens
ggcattcccaatccacacttcgccagaaaggcattgaagggtgcctactgtgagtgtgaccgtgtggggctggctggctggctggccaaagctttgtttgtctgggtctctgcacagtggtg

SEQ ID NO: 478176 - DNA, 122 bp, Homo sapiens
taaaaagtgggaaacactgttctccggattgtgtgggtgatcgccggtcgcctagcttgccgttcttcaggtatctcctgctgctccagaatctacatctgaatgtcaaggcatagcttttc

SEQ ID NO: 478177 - DNA, 122 bp, Homo sapiens
ggccagctgggaatgccgctgctgcctctttcaggaggccagcccccagcgctgcctccacgggccagtagggcagggacgctgatgagtgcccgttcttgcttctcaagctcttaaggcaa

SEQ ID NO: 478178 - DNA, 122 bp, Homo sapiens
gccccacagcacctaagggtacgaatgtccccaaagagtagacgattctctccctactcacgtctccactagtgcaaggctggctttcttacccttagaggaatacagaaatgacatcgtct

SEQ ID NO: 478179 - DNA, 122 bp, Homo sapiens
ggccgacattttccctagcaggaattttacgtttccaagatctgaatggatgttaacggtcgggctaaatgccaggcaggtcttcattgtggaattaaacagcggtgggagcaagcggaata

SEQ ID NO: 478180 - DNA, 122 bp, Homo sapiens
atctgcgaggaaagttccctgatggctgtcaacaaagtgccacgtctctatggctgtgaacgctgagcacacgattttatcgcgcctatcatatcttggtgcataaacgcacctcacctcgg

SEQ ID NO: 478181 - DNA, 122 bp, Homo sapiens
acaacaggtgagcattctgcattctgtccctgcacagctcctgcacctgcctggctctcccgtgcaggctgaatggcctttgatgacattgacaggcttgaggtgttccaaagcttggtcca

SEQ ID NO: 478182 - DNA, 122 bp, Homo sapiens
atccgcgccccgcccgacggaggcgtccagtggggaggtgtgcagggattggttgggaagcgctcaagccccgcccacagagtgacgtcaggtggcggtattgctacttaaggcgtcgtggc

SEQ ID NO: 478183 - DNA, 122 bp, Homo sapiens
atgaccagtggcagatgggaacccaggaggcctagagatcttgggtgatagggaagctcccgcagctccctcctcactagtccaggcaccggagcctgcggtgggagccctgtcatctcagc

SEQ ID NO: 478184 - DNA, 122 bp, Homo sapiens
ctcatcagcctgtgatctacccaaaggcaggatctgagtgttgtatctccatttccccagcggccagcatagttcgggtacttcaaagccagatcggcccctaggggccctctccatggaga

SEQ ID NO: 478185 - DNA, 122 bp, Homo sapiens
cagtgggatccttggaattcacaatctgggccgattctgtgtctttgctgctgtgaatggcgcggtgatgaacgtgtgagtgcgtgtgtctttatggcagaaggacgtatgttcctttgggc

SEQ ID NO: 478186 - DNA, 122 bp, Homo sapiens
gaagtgtttgtacttgtggttactgacttctttaaatcatacttctgttcgcagtcacatcgggcacagtgacacaccttttcaacctattccattttaattagcaaacgtctaatttcact

SEQ ID NO: 478187 - DNA, 122 bp, Homo sapiens
tgacaatattggccggaccgagccccaatcggggagctcacggccagctgaattcgctgacgtgtaggagaggaaaggaccccgagaacccggaagcctagattcctgccggagctgcaagt

SEQ ID NO: 478188 - DNA, 122 bp, Homo sapiens
ggtcccccagccgaagggccaggaagacagaccgagagacacgctgggagtaaggaaccacgtttactgcgccgcaaggttggcaggggcaggcttgggccaagcccaggaggctggtttca

SEQ ID NO: 478189 - DNA, 122 bp, Homo sapiens
acaggctccgacagcagctgtgactccagcccggcccgcagagcaggccacggtgggggccgggcgccccctgctggcccgactgctcccctcaggctcagaccacagacccagcatatcca

SEQ ID NO: 478190 - DNA, 122 bp, Homo sapiens
ctcccgccgatctccgtctccctgcagggccgactcttcagcgaccgtccctagagccagcggacggaaccattccaaacagcctagtctcgtgctgagagcctctccggtttcacgctgag

SEQ ID NO: 478191 - DNA, 122 bp, Homo sapiens
tgccttatgtcattcaaaattggtgaaatactgcactattacatgcctagaggttgctctcgccctcccccacacctccacctgtaccaattttcaaccctttgtagcttgatgcatgctat

SEQ ID NO: 478192 - DNA, 122 bp, Homo sapiens
aaaattgaaggccatgtcgcgaaagcaggagaccaagtaggttactcctgcgacgcgcagcgcgctccccttctcagtccggccgggaaaccgccagtcagatcaccgagttccgcctcctt

SEQ ID NO: 478193 - DNA, 122 bp, Homo sapiens
ttacggagtcaggccgtgaacattcaagggtcgggaaccacccatggccctgaatgggaccgaccctgttgagcaatggccatcctggtggtggcaccttgagcctggtgggggtggcgctg

SEQ ID NO: 478194 - DNA, 122 bp, Homo sapiens
aaattattgtcctgatgctcaactcgcctaatccccatctgtctcctctctggtcccccgcgctgccgagcgctcgcatctaaaggtcttgaacgcgttccaggtttctaatttcgtttgct

SEQ ID NO: 478195 - DNA, 122 bp, Homo sapiens
tgtttgttttagtccagaattgtccaagtagcaacactatctggaaaaatactgtgtgatcgccagtagtcagctgttcttgccaaagaatagaaatggctagcttccaagtcttctggctt

SEQ ID NO: 478196 - DNA, 122 bp, Homo sapiens
cttttaactctagaagatatttgccttcacctgatttacagtcaggttcgtttctcgcatcgtaaatggactcttctcggttgtcctcacaaattattcattgctctcatttcatgtatgat

SEQ ID NO: 478197 - DNA, 122 bp, Homo sapiens
acagttaccgtgtttggttcatgacaaggcccagcaaacagctgcgcgcccaacagcccccgccagccctggcagacaaacagctccacgcagacggacggacagccggccagcaccggggc

SEQ ID NO: 478198 - DNA, 122 bp, Homo sapiens
tagttgtgcctcttctgaaaaatccaagatacagaaaggggaggtactgctaacacggagcgagtacagttcttggagccaagacacctgagttcttggagtcaagataatctgccacttac

SEQ ID NO: 478199 - DNA, 122 bp, Homo sapiens
agcttctccttacctatcatttcataaattaataatttcttaaaatcataatccaaagaacgtatctattatacgaaaagttcaagtttaaaaaagcaaataaattagttaagccttgtaaa

SEQ ID NO: 478200 - DNA, 122 bp, Homo sapiens
aaatggcataaagactgcttattattagctttacacaccctgatttggtcaacaattttacggatctggggttcaaaccccatatcaagcattctgtcagcttcgtccaatacaaggtaagt

SEQ ID NO: 478201 - DNA, 122 bp, Homo sapiens
tttgtcggcctcagggttactgcctttccagttttcgtgactcctcagaacaggagccggcgtgggtgccaaataggtagatttcagccactgttactgctctgacctcatgccatctgttt

SEQ ID NO: 478202 - DNA, 122 bp, Homo sapiens
gcacaggtgtagcctggctggcagggagggccccagcgctccctggggacggaagcgggacggcatcatccctgctccccgcccgccccgccccacctgccacacccggtggctgccgccca

SEQ ID NO: 478203 - DNA, 122 bp, Homo sapiens
tttccgccctctgcgattggttagcggtgcgatcacgtttaggttggtcacatggttccgcggactcttaagtgggcagcatgggcagtgttattttcaatggaaagtaggagactccacag

SEQ ID NO: 478204 - DNA, 122 bp, Homo sapiens
tgcctgtaatcccagctactcaggaagttgaggagggaggatcacttgaacccaggagttcgagaccagcctgggcagaatagtgagcacccccgtcccaaaaagaaaaaaaagcaactggg

SEQ ID NO: 478205 - DNA, 122 bp, Homo sapiens
gaactgtgcgcggccataaatcagcggcacatgcgctgtgtacagtgcatgaatcacggccgggactccgtccgactgcacacactgtgtttaacaagctttataaggagccatcgggcttt

SEQ ID NO: 478206 - DNA, 122 bp, Homo sapiens
gaaccgtggaacccagtgactactgttcagctcgattaggacgaacgcagcacttagcagcgcaggaacattggcaagcctttagcccgatcaggagcggcaatgggcacctcgctggatca

SEQ ID NO: 478207 - DNA, 122 bp, Homo sapiens
tttatcaaattgaaagggtataacctaggagcctcggttaggtgtactggctccctttctcgtttgattagaatgacatacacgctaattgatctctttccggctcagtcatctccatgcag

SEQ ID NO: 478208 - DNA, 122 bp, Homo sapiens
aaaagttcctaagtgcctgggctttctttgatgttttctctgttccatagcctgtgctctcgtggcaaggtgagtaggaaagcactgttatgtttctgaggaacaaagtgcttcttattcct

SEQ ID NO: 478209 - DNA, 122 bp, Homo sapiens
agacctgacctcccctcgggcataaaaagcgccctgcgggagatccaggccgggagggcgcggagctcagcgagcagccccaggctttcccaaccgcgtggtccacccccagcctcagtccc

SEQ ID NO: 478210 - DNA, 122 bp, Homo sapiens
ccaatcaaatccattctcgaggaagacgcaccgcccccacacgccccgaccaatcgctcgcgctctggttgcgctggcgccttaggggctccagtgccaccattgcttttgctgcttttctg

SEQ ID NO: 478211 - DNA, 122 bp, Homo sapiens
cattggcaccagctgccaaggagccatgctcccgtccatcaccaacgtcatcaacctggccgatagccacgaccgtgccgccttcgccatggtcacacatgtcaagcaggagccccgggagc

SEQ ID NO: 478212 - DNA, 122 bp, Homo sapiens
gcgccccctctggatgcagcgggcaccggccggccgccccgctcacccgctcgcaccccacgtttgttcaccagtatttcagtttacggtcagaaaatgaacacagacacttcgtgatactc

SEQ ID NO: 478213 - DNA, 122 bp, Homo sapiens
gccccccgcccgccgggccatggctgtgcccgggccgcggcttcgttcgggcgcgcttcccggccgctgggctccggggctgccttcgatccttttaaatccgcgcccctgggggcggagcc

SEQ ID NO: 478214 - DNA, 122 bp, Homo sapiens
ggtaccagatggagaggttgcgggaacagagcatgactgtcagaccacagagtgaaacatcgcaccataaagacagatggcgagaggggtgcccccctccgtggcagctcactgccttttga

SEQ ID NO: 478215 - DNA, 122 bp, Homo sapiens
cccggaatacctttcctacaacagattggccatcgcggtggttggcctcgccccacaaagcgaggcgctggagaagacttgaagatcattggtggaagtggatgtccctcaaaggtctgcgc

SEQ ID NO: 478216 - DNA, 122 bp, Homo sapiens
aggcggctgcggctgctgtgcgtgccactgacggacaaccccctgcggccccgcccacgccgcatgacgaaggcaggccccgcccacccgtccgcaagccccgcccatgccccgcccgagcc

SEQ ID NO: 478217 - DNA, 122 bp, Homo sapiens
ctgcggatctgagggtcccgcccagcccccgcgggcgccaccgcagcctcccgcccctggcgctgcagggggctgtggctgccccgcttattaaaaggcagctgcactgcggggtcggcgca

SEQ ID NO: 478218 - DNA, 122 bp, Homo sapiens
ttaatccatgttcctctaacttccttactctttctctcaagaggaggcaagtggctgtggcggccgcagcagtggctgatcatcactgaaaataccaaagaaaagaactgagctgcctcctt

SEQ ID NO: 478219 - DNA, 122 bp, Homo sapiens
aaagactatatacattcacattaacgtacacgctcagcttcaggcctctggcgggctgttcgtggctggttcagtagctgggtcactcccgtattgcactgagttcctagaactcctgatag

SEQ ID NO: 478220 - DNA, 122 bp, Homo sapiens
gaaacgcgccgggctgaccccattatcacccgccagccagagaagggcgtggggggcccgcgtttcggacttaataaagagaagggggcgcttcctttaacgccctgccaaagcacaaggaa

SEQ ID NO: 478221 - DNA, 122 bp, Homo sapiens
taaagtttggaaaaggtaatatatgcacgtggtaaaatattcagaaggcacactgagccacgaatctcattccctccccagctgcacagccacccggctccccaggagttgccagtgatgtc

SEQ ID NO: 478222 - DNA, 122 bp, Homo sapiens
tgcatttacagaagcaatgcacacagaagaacgtcctagagctatctggtctcgcacacacgcttgggactcacgggcggggcctgggcctcggccagccctagttatcggtgcccagcttg

SEQ ID NO: 478223 - DNA, 122 bp, Homo sapiens
tcaactcatcttcatttgccttcttcattttattgagtaggtccacgtctatctgccagtcgagggatttgcacaaggcttcatagtaaggagccatgtctaacatgcaaaaagagggatgt

SEQ ID NO: 478224 - DNA, 122 bp, Homo sapiens
cggcgggggccactcaccttctccagcttctcgaagtgctcccggaggaacttcatggggcgttcgggcttggagatgcagaggtggacgatacagtctttgaggacctgctggatcccgtg

SEQ ID NO: 478225 - DNA, 122 bp, Homo sapiens
gaaatatgaggacttaaatataattatcataaaagcaaagttccccacatcaagatgtatcgcaaatatagaagcattgcctcatttatttaaaattatatgaaaccagaatttaatatact

SEQ ID NO: 478226 - DNA, 122 bp, Homo sapiens
ggtaaggacgacccttttctcttcaaaccccatggtttcttttctccccggggtctggggcgggatgttaatccgctagctgttgtcttatgccttccagtatttcagtcctgaaggctcct

SEQ ID NO: 478227 - DNA, 122 bp, Homo sapiens
caggaggccttcctgggaccccaagtgtgccgccccccgggaggggcctggagacgcccgcgcggcccccctgcaaagttttaccggccctgggcgcccccggccctggcacccacgcgggg

SEQ ID NO: 478228 - DNA, 122 bp, Homo sapiens
aataaaaaatattccacacaaaaaattgaagactgccatggattgttctccaggaccagtcgctgcccatccactccctatatagtacataatttatatttctctatatttaaatattcact

SEQ ID NO: 478229 - DNA, 122 bp, Homo sapiens
aggcactatgatgagcagtggggatcctaaggaggggttcatctgtgcctagacacctggcgttgctgctggaagactataaacatgctttcggtggcagtgagaacaaatgggaccgtgca

SEQ ID NO: 478230 - DNA, 122 bp, Homo sapiens
agcggcctttgccccatgtgtagaggtccccggctgctgtgacacaggcgctgtgggctccgccagcagcaacatcgaccacttcaattcctctcagagactcgatgacacgagggcggtca

SEQ ID NO: 478231 - DNA, 122 bp, Homo sapiens
ccggagccgagccggggtcgggcagcagcagggaccccccagaggcggggcctgtgggaccgctatgggcgtggagatcgagaccatctcccccggagacggtaccgggctccctccggagc

SEQ ID NO: 478232 - DNA, 122 bp, Homo sapiens
gtaatcatctttggcaaagaggcaggccatgcatttcatctagatagctcaaacttacaccgatggatgtgcaaacctattttttatatcattttatgtaaatttttgaaaactatattaaa

SEQ ID NO: 478233 - DNA, 122 bp, Homo sapiens
ccctggaccccttctccttcctctccgaagccctccctggaaggagccccgcatgctgaccgcagctgccgctagggggcagagccgtctacaccaaaagccacaccgctccagcgtgcgcg

SEQ ID NO: 478234 - DNA, 122 bp, Homo sapiens
caccccagcggcgggactctgagtgccagaccaagggatcaatccacaaggagagtcagtcggaggaggagaaccgagggtccttcgtgggccccgccccctatcaccccacaccccactcc

SEQ ID NO: 478235 - DNA, 122 bp, Homo sapiens
tgacccctgactcattccctccccagatcagcacacctgcccctcggaccgattcaagtgcgagaacaaccggtgcatccccaaccgctggctctgcgacggggacaatgactgtgggaaca

SEQ ID NO: 478236 - DNA, 122 bp, Homo sapiens
tcggggtgtctggagatagcacccataagagcggtcttgcaggcgccgggggcttgtgggcgcgtggattagggcggaggtatcagggatggcaggacaggtgccccgagaactggttgatc

SEQ ID NO: 478237 - DNA, 122 bp, Homo sapiens
atggatgtgaaaacgtttgcaagtggagagcgtggagaaccctgcgggccgatgctggcgcgcgccttcactctcgtggacacacatctttcattttccactgagcactggtccgagatgcc

SEQ ID NO: 478238 - DNA, 122 bp, Homo sapiens
catggcggaccctgcaagtcacagtccccggataccagtcttggaaaacaagaagagccgcgagttacctgggagatttcaacacgaagactccaggatggagtgcagcccagcccccgacc

SEQ ID NO: 478239 - DNA, 122 bp, Homo sapiens
cacagcctcttttatttgtttttccttagggccgagctttgattgttttccttacacaaccgggaatattggagtaacactgtatttttctcttttcctggagttgccagatgaaatacagg

SEQ ID NO: 478240 - DNA, 122 bp, Homo sapiens
cttgggtggtcgatgggactaggtgccgtggagcacggggtggcactcgtcggggaggctcgggcctcacaggagcccatggagtgggtgggaggctcaggcatggcgggctgcagtcccga

SEQ ID NO: 478241 - DNA, 122 bp, Homo sapiens
taaatcatggcggggagttcaggccaccgccggagtccagtgggtagggctctctacggccggaggtggctgtgggggagacgggcgggaggcccagaccggcagggagctttctgcaggga

SEQ ID NO: 478242 - DNA, 122 bp, Homo sapiens
gatcaagttgtattcattcctccattcagtctctttccccttccacatgtattaatggggcgtcggcaggctgtgtgccttgcggggcggaggaaaccagttcctctgtcgtctccgacttc

SEQ ID NO: 478243 - DNA, 122 bp, Homo sapiens
tccatcctcaggttcttgttggccggagtctgacagctcggctacagctgggggctctggcgagctgctggccttgggcaccccgttgggcagtgcctgggccttctccagcagggcatggg

SEQ ID NO: 478244 - DNA, 122 bp, Homo sapiens
tgctctttcagggaaagaggagacaggcctagtcagctctggcagccgccaggcagggggcggacccccgacccagggggccttcttgaaactgctttattttaccccctgtttccagagcc

SEQ ID NO: 478245 - DNA, 122 bp, Homo sapiens
gccagggttttccctctcgcccaccctgcagttaaggaaatctaagaggtggaagtggggcgggctggagggccacagacagccgctgacccagacgccccatctcccgccccagggcgagg

SEQ ID NO: 478246 - DNA, 122 bp, Homo sapiens
ggctgagggagaaggaagaacagcaaaggaaaatagtaaatggattaggaaaagccactgcgtgctgcgggcacacactggtttcccgggaccctgtctaatcccccggcccagggtgctct

SEQ ID NO: 478247 - DNA, 122 bp, Homo sapiens
ccctaccagcacgttcctctgattgttctcagttcatgtgagtccacagaggacataaaccgagtgagctggtaacagatgtaatgaaagtactccaggcctcagtaagaagagtcagaggg

SEQ ID NO: 478248 - DNA, 122 bp, Homo sapiens
ttctcacctgggttattgaacaaacatcatttctcacctgggttattgatagcatcctaacgggtcttcctgtttcttggttcccctatattagcaacacagcagtcagaggagtcctttta

SEQ ID NO: 478249 - DNA, 122 bp, Homo sapiens
aggcggcgtggagagacgggacgcgcgggagcaaaaggcggcgtggagagacgggacgcgcgggaggaaaaggctcccaaggaagatctctggaagaaaagggactccgtgcaatacacgat

SEQ ID NO: 478250 - DNA, 122 bp, Homo sapiens
cccgcggcggggccgcctcccgtccggcgggctcaggctccgcgccaggcccgggcgccgcgctctcggcctgccgtcccccctggagttggccgcgccctctctcgtccccaacgcctccg

SEQ ID NO: 478251 - DNA, 122 bp, Homo sapiens
ttgtaattagcaccccgggtgtcagccagaaaccaacaaacagccaaatccctgcagccccgcccagcctatccaccggcgggggaccgattaaccattaacccccacccctccccggcaga

SEQ ID NO: 478252 - DNA, 122 bp, Homo sapiens
ggtttgcttcgcccagtctctgatagtgaggggcacagccgggctagcaaagtgggcaggcgtgggagcggttgccgcgggggcagagggcgggtcagtagggccccacgaccaccgcctcc

SEQ ID NO: 478253 - DNA, 122 bp, Homo sapiens
gacccaatcacaagcccggctccactcctcgggcctcgcccccttccgcacccaccccaccgcgctccgcctcacgataacgcactcaccgcagcgttctggaactttcaagctcgcccccg

SEQ ID NO: 478254 - DNA, 122 bp, Homo sapiens
gggcccttacctctgcctgagtgaagttcaccagggcctcccctgtgctgtcctgctgggcgtggaacagccggcctagctgggggccccgcaccacacggtagagcaggagctgggggtca

SEQ ID NO: 478255 - DNA, 122 bp, Homo sapiens
cactggaacaggaacagaggcgctcctaccagcagcagtgcaaggtccacgtgctggccccgagtgtaaagacatgaggagctatgcaatcaatcctgagaggttcagagaggagtctgagg

SEQ ID NO: 478256 - DNA, 122 bp, Homo sapiens
tcacctttgggtaaaaagacaaaactccttgaggctgggggttcatcataggaggacctacgtatatcaaagggactggtggaacatagggtatgggaaagttcaaatatacgtctaatgac

SEQ ID NO: 478257 - DNA, 122 bp, Homo sapiens
aggcgccgcagctgagaccggcggccgacggccagccctcagggggcggtcacaagtcagcgcccaagcaagtcaagcgacagcgctcgtcttcgcccgaactgatgcgctgcaaacgccgg

SEQ ID NO: 478258 - DNA, 122 bp, Homo sapiens
ccggtgccagggaggtcgctggggcggccggggccggtgggggggctcgaggggctgcgtcgtcctcggaaatggtgcagaaacacagctgctgccgctgccacctcctgccctgcccactg

SEQ ID NO: 478259 - DNA, 122 bp, Homo sapiens
acacctggctcgaggccattttagttctgaggttgagcagctcaggagccggctccagcacggtgctgtgtttgtgaaacagagaaaggggacccccgaggaccccagacagggccttagga

SEQ ID NO: 478260 - DNA, 122 bp, Homo sapiens
aatgcagtgatgatttgatgacgctttttcatttggaaatagtggccctccactcgtgaacgcccttaaagatcaccattctagcccgggaggatttgctagaccggtatttattgagagaa

SEQ ID NO: 478261 - DNA, 122 bp, Homo sapiens
cgtcccatccgcggcaccaccatctcgttcacggcaccaacgtcccgtccacggcaccctcgtcccatccatggcaccactgctggcctggccaggatgcatccctgcgggggggctgcccc

SEQ ID NO: 478262 - DNA, 122 bp, Homo sapiens
agccagaacatatgtaaatgttaccttatgcggcctgtgggaatgaagcacaacaggacacgtgggcgcggtagtgagcagggccggctctactgaggaggtcggtgagcagagtccgcagc

SEQ ID NO: 478263 - DNA, 122 bp, Homo sapiens
ggccagcaccccttggcaggggcagaactccctggaacccgatccttgtctccatggcgacgcgtcacaaagcagcccgcggctcccgcaagcgctgagatagctggagccagggccccgcg

SEQ ID NO: 478264 - DNA, 122 bp, Homo sapiens
tgagaagcagctctgtccctgtaagccagcattccctggtttggcatgcacacgtgcacacgctggctagcctgctacttaagacgcccatgaagttgtatgttctcggggcctagtgttgt

SEQ ID NO: 478265 - DNA, 122 bp, Homo sapiens
ctcgatctcctgacctcgtgatccgcccgcctcggcttcccaaagtgctaggattacaggcgtgagccaccgcgcccatccttttaaattttttgtagagacgggaactcaccatgttgccc

SEQ ID NO: 478266 - DNA, 122 bp, Homo sapiens
tacctgagtgaaaggggctgggagtgaggccaggaccttgtcatcctgtgtgtaagctgtcggcccaggctgccgggtggtcttggttaagatatcatggatctggggtggctgaggcttag

SEQ ID NO: 478267 - DNA, 122 bp, Homo sapiens
agccgcagcttctcggacgtcgcacaccccgatgtgggcagagcggaatgttctcctcggcgctccttcactgtgctgcagtctacaccgaaccacggcagctccattcgctgctgtaacaa

SEQ ID NO: 478268 - DNA, 122 bp, Homo sapiens
ttgagagctgaggggaggtatgtgcttagtagcattcagtcttggcaggagggcagccaccgcagagatgggatgcaatctaataagaacatgtgttcttacagtatgcctcatggccaggc

SEQ ID NO: 478269 - DNA, 122 bp, Homo sapiens
tatcaaggctgctgaattatttagcagctttattgtggaatcggggtatttgataagaagcgttttcgagttgggcacacgatgtggattcgattcttctaacaacgtggttgtggcgcagt

SEQ ID NO: 478270 - DNA, 122 bp, Homo sapiens
tggtctctagggcagctagataaacggaaagtctcctgggaggaataaaggacgcttagccggcccttatattccagatttggaacttcgaaaagagtacgtactgattttccaaagggttt

SEQ ID NO: 478271 - DNA, 122 bp, Homo sapiens
gggcacacaattttgaggaccactggattagtgtggtatgtgcaagaaaaacccacctaacgagatcataaggcaaaaaataatgtgctctagaagtttggtgatagtggagctcagttggg

SEQ ID NO: 478272 - DNA, 122 bp, Homo sapiens
gaaggaacaaactccggacatatcacctttaagaactgtaacactcaccgcgagggtccgcgacttcattcttgaagtcggtgagaccaagaaccccaattctggccatattttggtgacca

SEQ ID NO: 478273 - DNA, 122 bp, Homo sapiens
ggctctctactaacagtaaaatgtgctgagcccaaattttctgctctaacatgggtcccacggacctatcagtctgctctggggtgctgacctgctgggtcctgagcagggtctttccctaa

SEQ ID NO: 478274 - DNA, 122 bp, Homo sapiens
gcctggcggcgggaagtagccctctttcaactcacgatctcattttgcctcttagagtcccggagcctctgaccacggcaaggcccagtgaaaacagaactgcacctgctctggtgggaatg

SEQ ID NO: 478275 - DNA, 122 bp, Homo sapiens
tatgaccttagaagacaaagcctgtttgtcatggctgccgtaaaccgagctcttacagtgcgtggaccatgttttaataatccaaaataattccagtgccgaaccctgaatttaacatatgg

SEQ ID NO: 478276 - DNA, 122 bp, Homo sapiens
attgtccggggaggaaaggaattcgggcaaatttgtgggtaggggcccagacccaagacccgtgtttctcctgcgtgggttggagtctgtctcaggtcgctccagggacatcaagagcccgc

SEQ ID NO: 478277 - DNA, 122 bp, Homo sapiens
tcccagttcttcaactgccttctaatacaatcttactgggaaacgagcatccggacatgccgctgcagcggcatcagaagcaatagtcaccggcctctacacatcctcattgcctaaaagca

SEQ ID NO: 478278 - DNA, 122 bp, Homo sapiens
tggtttggaggcttccctggagaaagaagagcagccgtctcctggagagggaagagcagccgtctcctggagcaggaatcttaagcaccagaaaagcccataacacagagtcgacgaggctg

SEQ ID NO: 478279 - DNA, 122 bp, Homo sapiens
ttaataaacacagatacaaacacagccagccatgtgcccgccccacatggatgagaatcccgcccggcttcctggggccgaggagcggggtctggaaatgggggggccgtcggggggctccc

SEQ ID NO: 478280 - DNA, 122 bp, Homo sapiens
atacacgtactagaataaatattttctctccctccccaaaaaacacctcggtgagcccagcgcggtcctcagtgacggccgaaagcatctctaatcactttcaagacgccatccccatcccc

SEQ ID NO: 478281 - DNA, 122 bp, Homo sapiens
gcggggcccccccaccccgggacaccccgcccaccgcctgagcctgaccttctcctgcctcgacgactcagggtatttccccaacgagctgcgaaacatcttccgggagcaggtgcacctca

SEQ ID NO: 478282 - DNA, 122 bp, Homo sapiens
ttaccttgtatccttagcagcatttttaattttttgccatataatcaaactttacctttacgtagaactaaaagaagcattccatgctactttccaacaacgtgtaacattttaaaacaagt

SEQ ID NO: 478283 - DNA, 122 bp, Homo sapiens
attagcatgccgggctgcgcgcgcctcatgaatatacaacgacgacgcctcgctcccgcccgcctgccccacttccgcccggacccgcagcccctaccaatgggggaagggagaggggcgga

SEQ ID NO: 478284 - DNA, 122 bp, Homo sapiens
gagggctctgccagggacggcttcagcccaacaaagggcatgtgtggcgaggccccaagacgggcaccaaggtgacacaggcagaaaaccccagggaaggaagccctcccacggccgaaccg

SEQ ID NO: 478285 - DNA, 122 bp, Homo sapiens
acggcggccaagggggggcggggctaggtggtctctgagaaccgagcttgactccgacgccgcgaaccgacctggagcccgaggggaaagatgctcgactctcttgggggcaccggagcggg

SEQ ID NO: 478286 - DNA, 122 bp, Homo sapiens
tgagaagactgccatttgagctgtcagtaatgacttcaaagccacacagcagagccacaccgcttagggagctgctgcctctcctgtgaccaggaactgcactgccactcccacagtctgaa

SEQ ID NO: 478287 - DNA, 122 bp, Homo sapiens
acgccttacacccacagtcctccaggtgttggcgtagggcaatccattcccttggcgcaccggactgccgtggggtgtcccagcaaaagctcatcaacctagcggagcaacgcgcagcctag

SEQ ID NO: 478288 - DNA, 122 bp, Homo sapiens
gggactgagctcaagcattgtgggagtgagctcaagcatgtgaattaagacacaaaatgacggagtatgaccttcctattgacacttcaccagaaaagtgaagaaagcctcaggcgggaatc

SEQ ID NO: 478289 - DNA, 122 bp, Homo sapiens
tcacccctacgccttcccagatggcgagggcctttcctgcgcctctgaacaatttggaaacgctgcacaatgcgcacccacccgccagctgctggttccattcaacagaattggggtgggaa

SEQ ID NO: 478290 - DNA, 122 bp, Homo sapiens
gaggcggaagtaaggcggaagtactgcccttaactcccggcactctggattggaagacggcgcacagagcctgtgtcaagtgcctatgaaggggactgcccatgaagtgaaagtcaagtgtg

SEQ ID NO: 478291 - DNA, 122 bp, Homo sapiens
ccggtctgggcggcacggagactgcggcgctcggctttgcgcagccggtactgcaggatgcggcaggtcttgctggcctggtccagctgctgtcgcagctcctgcagctgatacacgtcctc

SEQ ID NO: 478292 - DNA, 122 bp, Homo sapiens
aaaggggtgacggacagcacctggaaatcgggtcactccaaccggaatactgcgcttttccgacgggcttaaaaaacggcgcaccacgagattataacccccacctggctcggagggtccta

SEQ ID NO: 478293 - DNA, 122 bp, Homo sapiens
ctttgacgcccccctacagtttcccttcaaacacgtaggtctcagctggtaccctggctgcgctactggctttggcctcctggggccttatggttgaaaacagcaggaaatgaagctggaaa

SEQ ID NO: 478294 - DNA, 122 bp, Homo sapiens
gcaacctcggagtgccacattgtcaccaaccccactgcttcctccccctcagctcctgtacgaagagtgggcacgctatggagttttctataagtaccagcccatcgacctggtcaggtaag

SEQ ID NO: 478295 - DNA, 122 bp, Homo sapiens
ttctatcatattctttcttaatttatccagattccaagtggtggactcacggaaatctgccgaaagcccgtctctcctgggtgcatttcgtctgtgtcagattggctcatttccatcggtct

SEQ ID NO: 478296 - DNA, 122 bp, Homo sapiens
ctaacagtgatgctgcaggctttctggacgggacgggacctcagacacaataatccattccgccgtcgccacgcagtgcctttcgaccattcagtttcagcgctgggaggaaggagaggcgt

SEQ ID NO: 478297 - DNA, 122 bp, Homo sapiens
aagtatccccaaaccacgaacacacttcccaccaggctaggaagtcccagcagccaccggcgtactcctgccagagcggggcattttcccggccggcgcctgcaaaaggagcctgtagcagg

SEQ ID NO: 478298 - DNA, 122 bp, Homo sapiens
gaaactctggagttaccacacaacccataccactatcaatgagaggccaccttctaactgcgaatggtggaccacaggaaaggcccagtagagcagaggagagtatatgacctcatgcagcc

SEQ ID NO: 478299 - DNA, 122 bp, Homo sapiens
aataaactcatttaattaatctcaaataacatatctgaaatgcttgatatatgtgaaaaacggtgccatgtcaaaatcaggatgaattaagctatattctaatctccagagattcacaatcg

SEQ ID NO: 478300 - DNA, 122 bp, Homo sapiens
tggggatttgaatgtctaccaagtggtcaggtgatactgaagctgctggttcgagaacctcgctttgaaaactgtgggtggagggaaagtgattcccgtggctgaccttgtttctctcctat

SEQ ID NO: 478301 - DNA, 122 bp, Homo sapiens
tgtaacatagaggagacttttccagaggtcctgttttcacaacactcagaagttctccagcgtactcagcctgcctcccgcctgccctcaattcctttttgacatgtcacacaaagaaagct

SEQ ID NO: 478302 - DNA, 122 bp, Homo sapiens
ttagtggggcggaccgtaataagggggcttttattactaatctgcactccttgacctaaccgtaacccactcgcaactctgcaatcttcatgcaatccacaaggcagggagaggggagcgtt

SEQ ID NO: 478303 - DNA, 122 bp, Homo sapiens
tggagggagccggcactcacctagggggctgtaggatgaggctgcagagcccagtgtgcccggctctgaacgcaggggtggcggctgctggggaggcgtcatggctgaggagcccaccggcc

SEQ ID NO: 478304 - DNA, 122 bp, Homo sapiens
ttggaatttaacaaagacatttagtgataaattactatttttttttgttctttggctcaacgtaatccattgtttgttttgtgcctgttatgtgtgagaccctgtgctaggttttaggtgta

SEQ ID NO: 478305 - DNA, 122 bp, Homo sapiens
accaagtcggccccccggagcagccccctcggcctgaatggggggcccagagctggggcccgggggtctcattattactgctatcatctccgaactcattttgggaggagcatctcctccga

SEQ ID NO: 478306 - DNA, 122 bp, Homo sapiens
ggacaccaatcgcgagctctgtaggaggtggccaatcggagtgcaatgaggggcagtgggcgggaggctcagagtgactgacagctctcagaggcaatagctgcgagctgcccgtgctgggc

SEQ ID NO: 478307 - DNA, 122 bp, Homo sapiens
aggaggaccagggcctgaccaaggactacggcaactcacccctgcaccgcttcaagaagccgggctccaagaacttccagaacatattcccgccctcggccacgctgcacctctccaacatc

SEQ ID NO: 478308 - DNA, 122 bp, Homo sapiens
ctgattatgcctttagcaaggctgtgttcacttaatctctaatcccatatcataaaagtccgctagtcactcctgacctccaggaacccacctaaccagggtggacactataagaaaacatg

SEQ ID NO: 478309 - DNA, 122 bp, Homo sapiens
gcactcgcagaacgaggggggaggcgaggcgagaacgagcgggagtttttttcccgactacgattggctggtgtaattgtcatcacttgaaaaggcagccaatgagaggcgcggtcgcctcg

SEQ ID NO: 478310 - DNA, 122 bp, Homo sapiens
agattgtagcaaatggctctgaagttgaggaagctgtcacagcttggcacctccagtttacgatcaaatgcagatcataccattgcaggggaaagtggggggtgtggagagactcattgagg

SEQ ID NO: 478311 - DNA, 122 bp, Homo sapiens
atagttgctaaacatagaacattgagtgtgaatcagtactgtgactaaagtttcttgtgtcgtagcaggtttggagaagataattaataaacgtcatcggagtgacatcaaagggtgttctt

SEQ ID NO: 478312 - DNA, 122 bp, Homo sapiens
cctgcagctgccacggatgctgacggacctgcactcaccacaggaggtccggctggagggcgggtctgggcaggggccaccgggtctgtcctgcccgggggactgcctggccctgcctggtt

SEQ ID NO: 478313 - DNA, 122 bp, Homo sapiens
ccaatcaggggcaccggggaggagctctgcgatcggtccaatcaggcgcgccgtcggggacgcagctgcagacgttcaaccttctcgcgggattttcatttctcgcgtctgccgtacttggt

SEQ ID NO: 478314 - DNA, 122 bp, Homo sapiens
caatgatcaggttaggtgtttagaacagtatgatgtcagtcgggcttgtgatgaaagagtcgctgacagacagtgcaagccaacaccatgagaacagctcaggctatgaggtcattcagtcc

SEQ ID NO: 478315 - DNA, 122 bp, Homo sapiens
gagagcggggaccggcctgggctccgagttcagctccggccggggggaggggaggggctgcggctcacactgagcgcagcagcgagcaccggcctagggagacacagcccgggcggacccgg

SEQ ID NO: 478316 - DNA, 122 bp, Homo sapiens
gatgaggctgtaaaacctagataatcaactcctgcacagagggagtgctttctgggtaatcgccaaacttcacatacatatgatgagtcccagtaaaaagagtgggtcttaatgagcacttt

SEQ ID NO: 478317 - DNA, 122 bp, Homo sapiens
tgactcgcagaaggaggtagagctccgcagctggatctagggactcaccggcctctccatcggcccagtgagtcccgacttccagaagggcctgaaggacgggattatcttatgcacactca

SEQ ID NO: 478318 - DNA, 122 bp, Homo sapiens
tcctctgcatcctctacgtgttgtcttgcctgtgccccagcacggaaagccactgagctccgcacgtgtgtgacaggtggttggactggctgagaggggcaggagacggctctcccccaccc

SEQ ID NO: 478319 - DNA, 122 bp, Homo sapiens
aggtctgattagggaaccccagatgctgaaggaggcagatgaacaaggtcagctttggtccgggaggcaggatgtcccatccaagaaaaacggaagaagactaaccccactgacaaaagctg

SEQ ID NO: 478320 - DNA, 122 bp, Homo sapiens
ctcccaggttcaagcgagtctcctgcctcagcttcctgagtagctgggattacaggcacgcgccaccacgcctggtgtgtattttgtattttgtattttgtatttttagtagagacagagtt

SEQ ID NO: 478321 - DNA, 122 bp, Homo sapiens
tctgcgcgtcccccacccgcccacccccgcaccgcctgtaccccaatttcggcccgcacccgaccaaattttaaaaattgggagggttttggggactgcaatggaaaatcagctggccccgg

SEQ ID NO: 478322 - DNA, 122 bp, Homo sapiens
gcgcctctcagcccttgggtggttgatgggactgggcgctgtggagcagggggcggcgctcgtcggggaggcttgggcggcacaggagcccacggagagggtgggaggctcaggcatggcgg

SEQ ID NO: 478323 - DNA, 122 bp, Homo sapiens
cgggccggggggaaaggtcggatttgctcggcggaagaaacacagatggcggcggcgcagcgccattccgggccgggagcaggcagccagcagccctgtcctcaccgcggtccgcccgccgc

SEQ ID NO: 478324 - DNA, 122 bp, Homo sapiens
ctccggcttctgctccacttcggggtgggcgggatccgggcagtagcggtgcagcctcgtcgtccggagcgcggtgagtcggggtctcctgcgggctcagcctcccctcggaacagccccca

SEQ ID NO: 478325 - DNA, 122 bp, Homo sapiens
cccatggctcccccacacacccgtggcttcccggcccaggaggccactgctgtctgagaacgttctgcctccatccccatgctctgtccacctggagccaggatgtgcattgtctgatcatg

SEQ ID NO: 478326 - DNA, 122 bp, Homo sapiens
cccaggcccgctcgcctcgggtgctggctggagggctgtggcgcgggatggtaggactagcgctgagcaggtgggattaagctctccaatgaaacatggccccaccacactttggtttggag

SEQ ID NO: 478327 - DNA, 122 bp, Homo sapiens
ggcacgagtggagtgtggcaggggaatttctagccccttccaatgtgtccctcccagggacggcgatactgggggaggggagtcagctggaagctgctggacttaggcgtcgcggggagcct

SEQ ID NO: 478328 - DNA, 122 bp, Homo sapiens
cctcagtagctaccttattctccactccccacccccatcttatccatttgcagctttcagcgctggcggaataaagcacaactttctaggcatctgtgagtagctcatggagaaaagaaagg

SEQ ID NO: 478329 - DNA, 122 bp, Homo sapiens
aacaaaggggggatgtgtgtggccaagagtccggaaatggggcgccggtgggggccggggcggcgcagctctgcctcctggagcctattgtttgccgggtgcacatgcacacgcgcttaaca

SEQ ID NO: 478330 - DNA, 122 bp, Homo sapiens
aatgggtcagaagccagcagccgctcgctgaatctgtgttcctctttggaaaacgagaaccgtgaagcctgctggcatggtcagagccaaagagcattgtcacttgtgagatcagcgcagaa

SEQ ID NO: 478331 - DNA, 122 bp, Homo sapiens
ctctccttaacatacctgtgctgtagcagtgtggctgacaggtcttgggaaaccagttctcgagggtagctgcgtttacttgcctttgtctatatgagcactgaattcaggagaagtgtctt

SEQ ID NO: 478332 - DNA, 122 bp, Homo sapiens
gagggcggggcctgtccagagctaggcctgagggcggcttcctctcacctccaggggcagcgactccgccatcgcatccctgccgcctccgcccccactgcgcaaggctttctgggaaatgt

SEQ ID NO: 478333 - DNA, 122 bp, Homo sapiens
tgccccatgtggtgctcaccttccggcgcctgggctgcgccttggcgtcctgccggctggcgcctgcgagacacagaggaagtggtcttctgcacacagccccagtggcccgctcggacagg

SEQ ID NO: 478334 - DNA, 122 bp, Homo sapiens
ggcaccaaggcacagcttagagtagacccgagtcctgctctgcggagttcgtcttcccagcgaaggtacagaggcggatgaactgctgagacttggtaagtagtttagtggattaggggtag

SEQ ID NO: 478335 - DNA, 122 bp, Homo sapiens
gcccggcagcggtccggacctgcgctctcggacgcggctgagtggcggggttattaatagcgtgcctggctcgggcagtggctccagggcgcccgctacctgcacgcccctcctgcagagag

SEQ ID NO: 478336 - DNA, 122 bp, Homo sapiens
gagacgcaggtcaggctgtgctggacacatgctgggaacagtggaccccatcgatccatccgcccaggcactgctgttacggtcccaacagagagtgggggcattaggccatcccctctcag

SEQ ID NO: 478337 - DNA, 122 bp, Homo sapiens
gcacgtgtggtgggaagagccaggaacagcagctggattcagtccctcatggggaagcaacggaaagggttcaaatgccaaatgaggagtcctgggttctaatcttagttctgtttccaccc

SEQ ID NO: 478338 - DNA, 122 bp, Homo sapiens
acacaatctttttgggaatggtaggagccaccttcttttcagaaatgcttcgagcaaaatcgaaaatctctaacctaacaacttgaaaaagacattatacagaaattacttcatcaactgcc

SEQ ID NO: 478339 - DNA, 122 bp, Homo sapiens
aaaaaaaaaaaaaaaaagaattccagtggcatcagaagtagtgatgttgggtctccacaccgtccaggaggacactggtcctgagaaattcccaacctctcttggggaggtgatgcaggggc

SEQ ID NO: 478340 - DNA, 122 bp, Homo sapiens
agtgcatggggaggggcggccctcaaacgggtcattgccattaatagagacctcaaacaccgcctgctaaaaatacccgactggaggagcataaaagcgcagccgagcccagcgccccgcac

SEQ ID NO: 478341 - DNA, 122 bp, Homo sapiens
ctggcttacagcaaacatggtatcctagagttctagaatttgcaagtctgatgtgggtctcgctgggctaacaccaaggtgttggcggggctggttccttctggaagctccaggggagagcg

SEQ ID NO: 478342 - DNA, 122 bp, Homo sapiens
gggagcagccctgctcagggacctgtgccgatgcatgcacaggtgtgcagagagacagcccgcgttgaggacaggcagccagcccatgttccttcctcagtgcgtactgaacagtgaccatg

SEQ ID NO: 478343 - DNA, 122 bp, Homo sapiens
cggctggctgggctcggttcgcacggcgcctgtccccgtcctcttcgtagccggcgccgccgccgcagctgcacatcctccggcttagctcgccattgcaacaggagcccctcacgtcacgc

SEQ ID NO: 478344 - DNA, 122 bp, Homo sapiens
agaagaggcagagaggtcgtcgtcgtcgcccagcagcaagggctgcaaaatagtagaactcgtggttgctttggacaggtgtgatttgtgcaagccaggttcaacccttgcctcaagaaatc

SEQ ID NO: 478345 - DNA, 122 bp, Homo sapiens
gatggctattcacggcgcccggcctgggaaatcttatttccaggaaatattctccagttgcgctctcctggaaagcagcacaatgggcctcccggctccgtgggcgcgcagtcccacccgcc

SEQ ID NO: 478346 - DNA, 122 bp, Homo sapiens
tcagaaaattgcacagaaaggaaggggtgttttgtccccgaaagaaaggcaagacgaacgcgaaccttcagtcgttctcatgtggagtattcatcgttcagcgccaggaagtatcctgagct

SEQ ID NO: 478347 - DNA, 122 bp, Homo sapiens
gagaaggggctgggaagccacctctgactcctggggttctgttgttgggtgtgtcctctgcgcattccacaggcaccaggaacagaatgttcaggcctgagggcaggctggggcaggcagaa

SEQ ID NO: 478348 - DNA, 122 bp, Homo sapiens
gaggaagctcaagccccaaagccagcataaagcaagcgttggggcagctccggtttcagccggacttgcctgtgtgtaatcctggggctgggtaatctgatgccccaaactcagagccggtt

SEQ ID NO: 478349 - DNA, 122 bp, Homo sapiens
aatcctccaggcctccccgcccccgcgcccggccctaggaatgcgcacgcgcggagggcgcggcccagggcctgctgggagtcgtagttctaacgcgtagtttctcctcacgcctcctgccc

SEQ ID NO: 478350 - DNA, 122 bp, Homo sapiens
ggctgcccggggacccctgctgttcatttaaataggtatgtcaaatctgcctccaaacgccgccggtttgatctgtggtaatatttgtgaaggttccatatggacttgagccccctgcagtg

SEQ ID NO: 478351 - DNA, 122 bp, Homo sapiens
actccaaccgactcagacctgacagcaacatccggcgcctgtcctctttctatcctctcccgttgggaagccacttccggtaaagttggcgcttgcgcagaagagactcccgggctcttaac

SEQ ID NO: 478352 - DNA, 122 bp, Homo sapiens
cgctgggacgcctccccgcgctgtgccgcggcccggggtgccgaggagctgggctgggggcggggacccctgccgggaacccgacttagcccggagacgctcaagagcaagaagccgagcgg

SEQ ID NO: 478353 - DNA, 122 bp, Homo sapiens
attatcttaactttttactttcatcatctttggccatgtgcatatgactttttgtacatgcgatacactgacttgaggtatcaggtttttataagtacaaagaacttgtgaatcttttgaaa

SEQ ID NO: 478354 - DNA, 122 bp, Homo sapiens
tattaaacttcccgctccttaaaaccaccccacttgtatccatgtcgtttatctaatcagcgggagacaaaggatcatggtgtttctccagtcatcagatggggtcacctcattagcataac

SEQ ID NO: 478355 - DNA, 122 bp, Homo sapiens
tggggacccgcgcacctgcagcgcccgctgctcggccctgcatcctgcctgggcatcctgcgcccggccatgacggcgcactcattcgccctcccggtcatcatcttcaccacgttctgggg

SEQ ID NO: 478356 - DNA, 122 bp, Homo sapiens
atcttggggaggggggctcccgagatagtggctgggcggggaactccttcctcagcctctcgtcagcgccgcttctcctggtttctcttgcagatgctgctgctaggggtggtgggagcagc

SEQ ID NO: 478357 - DNA, 122 bp, Homo sapiens
ggtaaaacaaacaaacaaacaaaaactcccagaggggaattacctcaacttgataaagggcgtctacaaaaaaaatctacaaataacatcatacttaaggtgaaagactgaagactttccac

SEQ ID NO: 478358 - DNA, 122 bp, Homo sapiens
gtgcctccgaccctctgtgaacccgcaggtttcgggaggcccaggggcgatgccagaccccgcggcgcacctgcccttcttctacggcagcatctcgcgtgccgaggccgaggagcacctga

SEQ ID NO: 478359 - DNA, 122 bp, Homo sapiens
aacattatacttttatgtaaatacatcctccccaggagcctgtcaatatcctgaacaacacgcatctcagagattcacacgcaaatgttaagagctgcgctgctgagcgtatgcagacattt

SEQ ID NO: 478360 - DNA, 122 bp, Homo sapiens
tgcaagactcatacacatttgctccaggcgagcgagcgagttcgaaggtccccggcgcgccgcgctgaaaactacaaagtccaccgggactgcgcgctaccccgcggcccagcctgcaccgc

SEQ ID NO: 478361 - DNA, 122 bp, Homo sapiens
agtgagcaagccggccgagggaggggtgagtggttattaataaacaagtgtattgtgtggcgttccattcacggcactctcagaggacgtggtgggcttgagataataaagccctgtttatg

SEQ ID NO: 478362 - DNA, 122 bp, Homo sapiens
cagtcctggttcctgttctgatagatgctcaacatcagttgatattcagactgggattgtcgcccattcattcattcattcattcacccacacacatgcacagagtcactgcttccaccacc

SEQ ID NO: 478363 - DNA, 122 bp, Homo sapiens
gtcagcagcagccaatcgcttttctctgtcgtgcagtcggctcctgggattggccagggacgggacaggcgcggaaccactgcgcgcacaggcggagcgcggagacttgtccgtcacgtgcg

SEQ ID NO: 478364 - DNA, 122 bp, Homo sapiens
cctccgtgtctccccagattgtacgggggccactagagggtcatgggggaaatcctgcctcgagtatggggttcgtgtgagaggagctgtaggctgtggggtccccagttccctctttctca

SEQ ID NO: 478365 - DNA, 122 bp, Homo sapiens
tgctaaaagaagagggaaggaggggctgctgggggaggagcccagagccgagtttacatccggatcccgcaaggcctcccctgccctgaggtcttgttttgtgatgtgcttgtgtccatcct

SEQ ID NO: 478366 - DNA, 122 bp, Homo sapiens
aacttgctagactggtaatcaaattcaagaaccggaggcgtcttgacccgaatgagactgcgggcgccgcctagtaggtgggattaagaattgacgaaccttttcccaattctaatcctaaa

SEQ ID NO: 478367 - DNA, 122 bp, Homo sapiens
cctgcccaagctggctctcgaggaggtgtgggccccgggaaagtcggccagggccactgtcgccgtcgccgccggagcagagccagtggcgagctcgtcagggcggaccgggcgcctccgtc

SEQ ID NO: 478368 - DNA, 122 bp, Homo sapiens
ctgagacctcggggctcaggagctggaccctgccttcccttacagctgtgactccctgttcgcagtgcccaaggcccgtctctcagccaccttcggcttcaacccctgcgtgaacacgggct

SEQ ID NO: 478369 - DNA, 122 bp, Homo sapiens
ctaccgcggagcgcggcggctcccggctcccagcagcctcgcctagggctgtggccagggcggtcagtctcaggcccaggccgctgctgccaggaaaagcaggaacaatcgccagtcacgcc

SEQ ID NO: 478370 - DNA, 122 bp, Homo sapiens
acgggaagctccatcctggggcgcggggactcctcttcgtcatttttgcacccactggaacgctgggcgtgcagatgcctccccagcgctacagcctaccaggactcggcaggcgggggcgg

SEQ ID NO: 478371 - DNA, 122 bp, Homo sapiens
tgtgctgactattaacagagaggcctttcctgcacacaaggtcgtcctggctgcctgcagcgactacttcaggtaagtgctggccccaggcagctggaaggggcggctgcctgttgggacag

SEQ ID NO: 478372 - DNA, 122 bp, Homo sapiens
aggttgggggtgtggtaggtgtaaaagttgagaggttgttactcggcctggtgtcggaggcggtgtgttccgaggtcctatgtcccctgtcaggctgtgtcggtggacacgcccgagtgccc

SEQ ID NO: 478373 - DNA, 122 bp, Homo sapiens
atgtgatatggagagatacccgcagcgtccccctcctcgccctctaccccgttctgcacccgccgtggtgtggccgggcagctagtcgctcactcaccagtccctggccactcgtgtgccga

SEQ ID NO: 478374 - DNA, 122 bp, Homo sapiens
aaatgaaacaagtctagtcttctggttttctagcccctctggattcccttttgactcttccgtgcatcccagataatggagaatgtatcagccagccttccccaccaagtctaaaaagacct

SEQ ID NO: 478375 - DNA, 122 bp, Homo sapiens
ggaggaggggggaccgcaatctcctgggtttccctccttcccccgccccaaagtttgcggcggattctagggtctgatcccccaacctggtccttgaggctgaggtttttactgacctagaa

SEQ ID NO: 478376 - DNA, 122 bp, Homo sapiens
tccaactgctgtgatggtggtgctcatcatggtgtgggatggcatccctcttccaatggccgaccggctatacacagagctcacagagaatctaaagtcatacaatgggcaccctaccgaca

SEQ ID NO: 478377 - DNA, 122 bp, Homo sapiens
agattatcagaacctgccctctcctccagtggaaagagagcatgtgttggaagctggaaacgaggccctcaagtccatgggcagaacagctctcatcaacctcctggtagagacccaggcag

SEQ ID NO: 478378 - DNA, 122 bp, Homo sapiens
gaccccagactcccttgtccttgcgatgttcatgccagggtaatgcaagttgaatcaaatcgtggtgccacaacgccccctggagtagtttgtgcccgaagcggctgtctgactcttccgcg

SEQ ID NO: 478379 - DNA, 122 bp, Homo sapiens
atctcccagcacaacgaagccgtcacaaggacatttttcctccaccgtggtacttagggccgtctgtgtggctgacccagagctgccgtgagtaattttaaaaaggcttatcattatcctga

SEQ ID NO: 478380 - DNA, 122 bp, Homo sapiens
cgtggatgtgggtcgccgctggaggtgtggccctgggtggtccatccggccgcagaggcccgtcccccgttcacccaggccggtaccctatggagcacctattacgtgcagtgctattctgg

SEQ ID NO: 478381 - DNA, 122 bp, Homo sapiens
tccgggcgctccccggtgctgattggcggagcccgtgactccagggggcggagtttcccccgcctccccggggaaacagacctctgattggctggaccgccgggcttttgtgtccccgccct

SEQ ID NO: 478382 - DNA, 122 bp, Homo sapiens
cgcccccctcagccccttcctccccagggagcaaagccataaggggcaggggccaccccacggcatctccccagaagtacaggcctcaggaggaggtggaactgatgtagggggtggcactc

SEQ ID NO: 478383 - DNA, 122 bp, Homo sapiens
gtgggcagggcgagtgagctcagtgactgggacctaatggtcacactgcggtgcaaagcacgcctcggggctcccgcggagaacacccattcgagggtactggagcctggaaagggtctgcg

SEQ ID NO: 478384 - DNA, 122 bp, Homo sapiens
gagaataaaaggcaaaataaacaatgcctattcaccctccactggaaaaaagcactgccccgttgtggccctttcagcccttatgtagattttgtttttttaaacatagttcagagcttact

SEQ ID NO: 478385 - DNA, 122 bp, Homo sapiens
gcagcgggcacttggtacagcccggcaggctgacgctgccgccgagggcgccccggctaccgccaaaccgtgacaacctcggtgtgcccggggcccccatctggaaccggccctccccggga

SEQ ID NO: 478386 - DNA, 122 bp, Homo sapiens
ggccgagccgtgccgggaaggcgcgcggccccgcgcgggcacctggccgaggccgccccgcgctgccattgaaatgtgacactgatgaacgagctaggcccgcggctttctttgggagagtt

SEQ ID NO: 478387 - DNA, 122 bp, Homo sapiens
ttattgagaactgaaagcgggagcgaggataaggaggcgttgctgcctcactttttgctccgcccctcgaggggcagtgacctaaggactgcgagggagaacacaatagtttcactttttaa

SEQ ID NO: 478388 - DNA, 122 bp, Homo sapiens
ccgcccacctcggcctcccaaagtgctgggattacaggcatgagccaccgtgcctggccgcgggttggacatttgtatctaactaatatgcagctgtatgaaataggataaggtcctttgtc

SEQ ID NO: 478389 - DNA, 122 bp, Homo sapiens
atccagctaacaggcgctacgaggtgcccttggagaccccgcatgtccacagccgggcaccgtccccactctacagcgtggagttctccgaggagcccttcggggtgatcgtgcgccggcag

SEQ ID NO: 478390 - DNA, 122 bp, Homo sapiens
ggaaagcccgagacgcggcccgggcccggggtctcggaggctcggggactccggcgcgggcgtgtctctgccccacgccgcccacagcagccgacccggccccgggggtagatgatccgcgg

SEQ ID NO: 478391 - DNA, 122 bp, Homo sapiens
gtgcttgactccgggggtggcagccagagaccacagctccaggggcttccaggcctcctgcgtgtctcccccactggcctgccaagatcagaaaatttccatcgttagtctccttgacataa

SEQ ID NO: 478392 - DNA, 122 bp, Homo sapiens
tcagacggaagtttggagacagaagtggttgaacacaggtcagacgaatcatacgcccttcgcccttcgccctccctacctcagaggtcggatgtggtgatcggggctttccacatgtctga

SEQ ID NO: 478393 - DNA, 122 bp, Homo sapiens
gccagcaccacgcatctgccctctctgcctggccctgcctgatctggaggctctagacaccggcaccccaaggcgatgcgttgttttctggtttattttcacgggaacggttgttgatgtgg

SEQ ID NO: 478394 - DNA, 122 bp, Homo sapiens
cagtccgagggtgcggtgaagaggtgacggagggctggctatggacggccggcccgggtgcgggacgagcgccgggttccgtccaagcactgttgaagcaggaaaccccgacgactctccgc

SEQ ID NO: 478395 - DNA, 122 bp, Homo sapiens
aaagtcaatgcctgtcacttaagccgcccagtctgtggtattttgctgtggtggctgagccgacggagacagttccataggtcttgattgtcctggtggccctgaaccccagtttttgtctc

SEQ ID NO: 478396 - DNA, 122 bp, Homo sapiens
agaggtgctcacacaggcgcatctgcataccacggcagacctgtcacacgcctgcccacacgcaggcctggctcctgcatacatgattaaaatgcacaagtacacagaccccaccgcactcc

SEQ ID NO: 478397 - DNA, 122 bp, Homo sapiens
attttgtaagcctccagcaatttgaagaccttggtaaaagtgaaacattccacgggggttcgggctgtgagaaacattctgcctaaccacctgaacacaaggtggacaaagggccaactaaa

SEQ ID NO: 478398 - DNA, 122 bp, Homo sapiens
ggttccaggagaggaggtaagtttttcaagatcatacagctggctgggcacggtgcctcacgcctgtaatcccagcactttgggaggccaaggcgggtggatcatctgaggtcagaagttcg

SEQ ID NO: 478399 - DNA, 122 bp, Homo sapiens
acttacaaaatgcagaggtgtcaggccctgcacaggtcagaatggcagaggaatccaagccgacaggcgcagtcccggaggcgcaccaaacaagcgcgtggttcatcttcacaacagaacag

SEQ ID NO: 478400 - DNA, 122 bp, Homo sapiens
aatgattaaaaccacgtggggcttgtttcctcacacgtgacctcccgacaaagtgcagagcggggagccaaggaaaggtgaacccaggggtctgtaggcccagggaagagtaggacccacga

SEQ ID NO: 478401 - DNA, 122 bp, Homo sapiens
agtgactcggcagctatccggagctctctgcctgcaggtggggccattctcctatggagccgacccgacccgctcaaagctgccccgggaaccgcaggtttggttcgcgcacgccgggactt

SEQ ID NO: 478402 - DNA, 122 bp, Homo sapiens
ggcccccttcctggtgcctgctgtcctgtggggctgtgagtggctagcacaggcttgtcacgtggctgccttggcaggaggagcctggtaagggagcggggcaggggatggacagcctgtca

SEQ ID NO: 478403 - DNA, 122 bp, Homo sapiens
tttctacaataaataatccgctgggaggcacacctgcggggtttgaggtgggcgggacgacgggagcggggacacacccaccggcggtcacgggcagcggagtgtttttggtgatctgcaag

SEQ ID NO: 478404 - DNA, 122 bp, Homo sapiens
acccctcagcccccacgcaggggtcagttcctcaccattgtcactcaagacacagcagtccggaaatgagcattttaatgcagaaagaaaaccatgataatttacaaatgaatcactttctg

SEQ ID NO: 478405 - DNA, 122 bp, Homo sapiens
catgctggtgagttgagtgctagtctgagaccagtgtgctcctggtctcctggcctgtggcgtgaccgcagaaggtcacttacagacacaagggcaagtaatttaatgagcatttcctgcct

SEQ ID NO: 478406 - DNA, 122 bp, Homo sapiens
cccatccatgtaggaaagaataacacggactacacgtaaacaattctaagtctgtgtctgcggggacgtcgcaagtgggataaaatggtttaaaggaagaaatggcttttaggagttagggt

SEQ ID NO: 478407 - DNA, 122 bp, Homo sapiens
ttgggagatttccaggttgagggtcttactgagggggatagctgggtaacttaggagtctcggagaagaggaggctccaaggttgccttggccttgagagacaaaggtaatcctcctcttac

SEQ ID NO: 478408 - DNA, 122 bp, Homo sapiens
tctgcagcacagggatggtaactgaggcctgggagctcatggtctccccagtgtgtgtagcgggggtaggggtgttgaggggagagcacagaaagaaggagacacgcccccaacacacaaag

SEQ ID NO: 478409 - DNA, 122 bp, Homo sapiens
tgacttcttcccttcgcggggcaggctggggcatgtagttctccgtaggcgggaggcgcacggtgctgtcgggaaagttggtctcggaaaactacagccgccctcagcgcgccttccgcccg

SEQ ID NO: 478410 - DNA, 122 bp, Homo sapiens
ccagatgcctattgccctttaaggattaactttctgaggatgaatgccgtccgtcctgtgcggagttatctccctaataagaagctgatcagttacacctctgcttaaaacctcggctggct

SEQ ID NO: 478411 - DNA, 122 bp, Homo sapiens
agaagagacatgctgttcctaataaaggacctgggacttggtgacttggagtttaccttacgcgatgtggcaaggagtaggcaagtaggcacagcacaaaaaaacagctgtgcaaatagcat

SEQ ID NO: 478412 - DNA, 122 bp, Homo sapiens
acaggagaggcctgcagggtggggatgtgggagccaacagacaccccagacaagcacggtcgctgctgccagggcagggctgggcacagcagggctgcaaggctgcactcagggctgggctg

SEQ ID NO: 478413 - DNA, 122 bp, Homo sapiens
ggaagaagagggagtcgagcttcttccacctcctctaactgcttaaaacatcagcattgccgagcgcggtgactcacgcctgtaatcccagcactttaggaggccgaggcgggaggatcacg

SEQ ID NO: 478414 - DNA, 122 bp, Homo sapiens
aatttttcattgacccatgcaaaagaaaaaagtgtctgtgtggggatagatataaatccacgagtggggtaattttaacacagctcctctctggataggaagaactctcctttaagtctgac

SEQ ID NO: 478415 - DNA, 122 bp, Homo sapiens
tgatgggcgtgcccctcccaggcccagcgccgcgccgagcgggggcggagccgggagcggcgcagacacttccagccgggatatctttgctcgcgcgctcgctggtctctccaggtctccct

SEQ ID NO: 478416 - DNA, 122 bp, Homo sapiens
cagaggagatttcctttcgggaagtgtagtctggcagcggtgccccggtggtggcggcggcggtgctgctgttgctggtgatcgtgtggtggtgttagcggcgatagtgctttccactgggc

SEQ ID NO: 478417 - DNA, 122 bp, Homo sapiens
catgcacacagacaagttggctgccttctaccagctcccggtggtcccacagagcagatgcgccacaggctgtgtcctgtacaccctggccctgggagcgcaggctcagtttgcacagcatt

SEQ ID NO: 478418 - DNA, 122 bp, Homo sapiens
gttgaccttctctgacaggttatgatgcagcaagaaagcccttgccagaagccagggccacgctcttgaatgtcccagcctacagatccatgagacaattcaacctcttttcttataaattc

SEQ ID NO: 478419 - DNA, 122 bp, Homo sapiens
gcggtgacattctcatcatcgctagagatgggcggcttctcagaagcgtgtcctcaccctcgggggagcagcgggcttctgattgttaaagaaccctgggctccgcatcagatctgagtgag

SEQ ID NO: 478420 - DNA, 122 bp, Homo sapiens
tggtggagcctcagcttctgatgctgcgcaagagttactaacacatggagcagaagtcaccgatgtctccgggaccctcgcacggagcagaagtcaccgactgtctccgggaccctcgcacg

SEQ ID NO: 478421 - DNA, 122 bp, Homo sapiens
gtatcagaaactaccaggtgcttcatggttggactgaaattccgctttcccgtcttccagcgaggcctcgccccctggagagcacacgggaatctggggacgaagaaactttgacctggcgg

SEQ ID NO: 478422 - DNA, 122 bp, Homo sapiens
cctagacctgtgcgcctttggttcctgtcttgtggcctctgtctccccatttaggaaccacgcctgtggctcactcggcctcgtgctataccagtaaccccctccccaccccactgagcaca

SEQ ID NO: 478423 - DNA, 122 bp, Homo sapiens
gccgcgtggagatgggaacatcctcaagacagagcagacttcctggaggctcagccggaacgtctccagctctgtagcacgttttaattccatacaagaagttactcccaaagaagtaaatt

SEQ ID NO: 478424 - DNA, 122 bp, Homo sapiens
tccgcacggaaaaccaggagctccaagactgccgcacactcaacatccaactcgcggggccgcggggacggccacagaagccaatcggctcctgctacatcacagaccccgccctcaaacct

SEQ ID NO: 478425 - DNA, 122 bp, Homo sapiens
agaagtctgcgggagtttgacggcggcggcgcagggtagcgcagtctattccagagatatcgataggcttgcaacacttccccctccttaaaactttccgaccgctcggcggcgggcggagc

SEQ ID NO: 478426 - DNA, 122 bp, Homo sapiens
ccatccctctcaatcttccctgcccaggactggccatactgccaccgacacgtgcacacacgccaacaggcatctgccatgctggcatctctataagggctccagtccagagaccctgggcc

SEQ ID NO: 478427 - DNA, 122 bp, Homo sapiens
cagtccccaaagtgatcaatccagctagtgaaatcactgtatcacacggagacaagacaacggcggccttcaggaggagaccatcgcttctcctggcggcaaggctcggccccaagccctca

SEQ ID NO: 478428 - DNA, 122 bp, Homo sapiens
gatcgcctagcctgggcaacatagcgacagcttgtctctacaacaaatacaaaagttagccgggagtggtggtcctagcttcttgagggggtgtgccgaggcaggaggaacacttgagccca

SEQ ID NO: 478429 - DNA, 122 bp, Homo sapiens
acttgtaagagtttctctatcatctgtgactctttggcaagaacaaagcccagggctgaccggagaagatctggaatagacattttccaggtcttggaaagataaagacacttgaactttat

SEQ ID NO: 478430 - DNA, 122 bp, Homo sapiens
gatgtccactcatggctcatgccaagaattttgtgcatatccactagaatatgtgtcctgcgagggtaaggtttctccctgagttgcctactggtgtatctctggtgtctctatctatgcct

SEQ ID NO: 478431 - DNA, 122 bp, Homo sapiens
cacccgatctctcactctgcccctcccagcccccacccgtgagaaccggccggcgcgaaacgtcacgcagcctggtgacgtcacagtactcctggccaggtggcctcaacctgaaacaactg

SEQ ID NO: 478432 - DNA, 122 bp, Homo sapiens
aaccagggcccacggcgcccctcctgtgctgtgacgtgtgtgtcgtggctggccccgcggcgcctaccgccctggccgtgtctgtctggtgtgtgctgtgaacccctgcacccaaccccaca

SEQ ID NO: 478433 - DNA, 122 bp, Homo sapiens
ggctgggattacaggcacacgctgccacgcacagctaattttttgtatttccgtggagaccgggtttcactgtgttgcccaggctggtctcgagctcctgagctcaggcaatccacccgcct

SEQ ID NO: 478434 - DNA, 122 bp, Homo sapiens
cggtggccgggcttccgcggggcacgtcgggagctgtagtccagataccgcggggcacgtcggaagctgataaactacaactcccaggagcacgcgcgcctcctgttaaaggaccagcagtc

SEQ ID NO: 478435 - DNA, 122 bp, Homo sapiens
gggacggggtgaggctcccaacgctgagcgattccttctcgttcccgctggcgtggaagacgaggcttgtcttgacttcgaatcgtattaatatttcagacacttaacaggcaacctctcgt

SEQ ID NO: 478436 - DNA, 122 bp, Homo sapiens
acctccatcctgcgttctgctttccatcacgagctacagcaggagcaaggtggccgtgaccgagaaccccttggaaccccagtttcgttgtctgagaggaagataactgcatctctcgcagg

SEQ ID NO: 478437 - DNA, 122 bp, Homo sapiens
gaacacgcgtgtaaaagctgcgcccagacccgcagatcccacagcagcagcctttggtctcgcgccaagacctgccccaccagatcccacccgccccaccggcctgccccaccagatcaaac

SEQ ID NO: 478438 - DNA, 122 bp, Homo sapiens
aaaggggataacaggagacaggtgaggaggtggaattttatctctttattttgcacctagcgcagtacctgcttgttcaacattaagttggagagaaggaattgtgaccgtggtgagtcact

SEQ ID NO: 478439 - DNA, 122 bp, Homo sapiens
tctgtctggagttgttcgttctttctgtctggagttgtctgtccctcccggtgggttcctcgtctcgctggcttcaggagtgaagctgcagactttcgcagtgagggttacagctcataaag

SEQ ID NO: 478440 - DNA, 122 bp, Homo sapiens
ttgggaatggaattgctagatcttaaggtctgtgcattttaaacttgactaggtgctgcccgctgatatgattataccatttcccccactcattaggagaatgctacaagttttctttgccc

SEQ ID NO: 478441 - DNA, 122 bp, Homo sapiens
gggggtcccaccctcaggtgtgcggcctggagcacggagggctgcagaaagccttgggagcgacagagccgggggaaggtcggcggccgggtcggcaggcgggagggcggagtcagcggacg

SEQ ID NO: 478442 - DNA, 122 bp, Homo sapiens
caaggacaggaatccactggtagccggttggaggggatcccatgaaaacaagatgaaacgcgccattagtactggacccaagatcaggagatgaaaaactgcactgtcctaagggatgaaag

SEQ ID NO: 478443 - DNA, 122 bp, Homo sapiens
tacacaaaacgtacttctatgaggatatctgctcagcaattgtctgtctaacctcagactcgagccacccttgttattatagattcttgtagccaaggataatttcaaaacaattatgtaat

SEQ ID NO: 478444 - DNA, 122 bp, Homo sapiens
cccaggacatcaagtttgtcccatctattcttgactttctttagccgcctgagccagcatcgtcttatctctcctcttgtacacagtgccccttctttgtccagtgacaaggtttacactct

SEQ ID NO: 478445 - DNA, 122 bp, Homo sapiens
ttttccttttcttcgtggccaatgccataatccacctcttctgcttcagttgaggtgacacgtctcagccttagccctgtgccccctgaaacagctgccaccatcactcgcaagagaatccc

SEQ ID NO: 478446 - DNA, 122 bp, Homo sapiens
gggcggtgttggcgtagccgcagggaggtgactgaagcgagcctggcctcttgcatcctccgcctgtgtacctccctcccctttttttccgccttctgccagcagaagcagcagccgcagca

SEQ ID NO: 478447 - DNA, 122 bp, Homo sapiens
gccgctcatgctgaggagagcggaccgggacacagcagcggacccgaaagagcgcagactcgggacgaaccggccgctctgccccggacacagcgacctcgggccctccccgcaaacactcc

SEQ ID NO: 478448 - DNA, 122 bp, Homo sapiens
acatgaacttgggaagaggttccactgggcatggtcctgggaagtgctcacacccagacacggatggagatggggtgtgggccttgtggtgtcagtgctgttgggcagcagggattgttcag

SEQ ID NO: 478449 - DNA, 122 bp, Homo sapiens
gcgggcgggggtcctgggagcggcccccgagagtggggtctgtggggagcagggcggccccggggacagaggaagccgcggtggaggcctagggcagacgcgggcggacgcgaggagcgtag

SEQ ID NO: 478450 - DNA, 122 bp, Homo sapiens
ggacacggggccaggagacccaggggtccagggctggcccaggagagcaagagctcgccacgctgggagtagggaggagggaggggaggagaaaggagccggaggggatgaggaggaggcaa

SEQ ID NO: 478451 - DNA, 122 bp, Homo sapiens
agcaaggctggcacacagtgaatgaccaggcgggtgcaggtgaactggtcaaagggttggcggtgtggggagagggagtgctagatcatgactggtagggagggtgacgtgtcttttttatt

SEQ ID NO: 478452 - DNA, 122 bp, Homo sapiens
gaaactgacacgaaacggacaagacaagctgccgcgcttcagccacaggcacgcgagtgacgggatttcctggatcattgacccgcggcccagccctggtccggcaggtcgcgggctctcag

SEQ ID NO: 478453 - DNA, 122 bp, Homo sapiens
agctgagcttgggatcaaatactgacctccagtctccagggctgtgtgtgtccaggggtccgggaggagtgtcatatggccccttcgagctcttggttctcagctccggcgacaagccgagg

SEQ ID NO: 478454 - DNA, 122 bp, Homo sapiens
ccacgcagggagagtcccatgcagggaaagaaggtcccacgcagggaaaggagagtcccacgcagggattgctgttccactctgcatagccgctgggctttctgctgcacggatgccatcta

SEQ ID NO: 478455 - DNA, 122 bp, Homo sapiens
ttgcagctaaggattggtggtcacatggcctctgccccttcccaagcagaggcaacatggcggccttagcaagctatagctgcgagatttgaattactccactcgtagctattgcattcctg

SEQ ID NO: 478456 - DNA, 122 bp, Homo sapiens
ctgtctcctgggttcacacgattctcctgcctcagcctcccgagtagctggtattataggcgcccaccaccacacccggctaatttgtgtctttttagtagagacggggtttcaccatgttg

SEQ ID NO: 478457 - DNA, 122 bp, Homo sapiens
ccccacgccgggcgccggggccgcgctgccgctaccgcagctcagcagcagcccgagcggcgagggctccgcctcgcccccggtgcagaatttggttttcatgcccgacaggcggccgagga

SEQ ID NO: 478458 - DNA, 122 bp, Homo sapiens
aagtcctctcttagctgataaatggtacctatcaacaggatttgggggctgtttgagccacgagtttattccagaaaatggttactctttttgcaagtgtttctgtagtgtgaaccagattt

SEQ ID NO: 478459 - DNA, 122 bp, Homo sapiens
tgggaaactatagttcccacaaaaggaccaaagcacccaagcaggcccgcaaggagaggccggctgacatggacaaggcctggtggaaatcgttcctcaaccacctcactcggaagaagccg

SEQ ID NO: 478460 - DNA, 122 bp, Homo sapiens
acgcccactgcagacgggctgtggcggctcctcactgcagtgctgcggggcgcggagaagcggtggggagcggaacgtgccgcagacgagctgggcccttgtccgtcttccactcttcctgt

SEQ ID NO: 478461 - DNA, 122 bp, Homo sapiens
gtactgagagactgaggaaagagaaagaggatggaaagaactgggtggggagggagacagcgagagatccagctgaacatctgacagaaaacaatctggctgacgagcggaggcggacaatc

SEQ ID NO: 478462 - DNA, 122 bp, Homo sapiens
atggggccaggcgcaggtgaaggggcagagcagggccaggtggggcccgggaggggcccccggacacccacctcacaggtgctgatctccatcagcgggaagctgtccccttcgggctccac

SEQ ID NO: 478463 - DNA, 122 bp, Homo sapiens
tgcgccccaggggagcggacaacggtccactttacgaggcacaacttcgcccagccgttccgccaccgcactcgaacacacaccccatccccgcagcggtcgggtctggtcccgatcagccc

SEQ ID NO: 478464 - DNA, 122 bp, Homo sapiens
gtccaggaagagagagtgtgcattgtgtgctcttaatgagcacttgtgcactcagccatgcgcagcagaggacgaaggttttccttttaaaatcaagcatccattaaaagagacaacaacaa

SEQ ID NO: 478465 - DNA, 122 bp, Homo sapiens
gttcttctgcaccctcggtctggttggggctgtcaagccggaccaaaaaggctgtttccccgtggtttccagagagtgactgctccagcggggctgtggctagaaagagtgcgaagggaagc

SEQ ID NO: 478466 - DNA, 122 bp, Homo sapiens
gttgtcacctggccgtggtcgccacatcggggagaggactaaagcttccgcagccacctccggctccgcctggggcaggacacagcctccaagcccaacctcttcccgggtctcctttccca

SEQ ID NO: 478467 - DNA, 122 bp, Homo sapiens
tcttgtcattccttctacatggaatgcccttttctcagacctcttctatgggaatctgatcggtcatccaagatatatctcaaatgtcacttcctccaagaagcctatccttttaccccagt

SEQ ID NO: 478468 - DNA, 122 bp, Homo sapiens
ccagtttctctggggggcaggagcaccttgccaacctctgatggctccagcgcctgcactcgcctcacaccacatggtgacttcaacggggaccagggaagccctcgcccctcccacccctc

SEQ ID NO: 478469 - DNA, 122 bp, Homo sapiens
tccttcagagggcccacctgggatctggcctgcccagccctgcatgcggcaggagtcaggcggccgctcctaatgcactgggatgactattaagaggctctgagccgccactcagctgggct

SEQ ID NO: 478470 - DNA, 122 bp, Homo sapiens
ccattgcgggccggacgaaggatgctttcttcctagaggctccgagctgagctgcgaactcgccccccgcccttgggacaagaagacccagtcacatcactgcacccgtcctgtgtcctcac

SEQ ID NO: 478471 - DNA, 122 bp, Homo sapiens
gcccacctgactgcgatggcgccgcgtccgccaggcccggctcatcaccgtggccgcccccggccgctccggttttgcccgcctccagctccggctccggctccagctccggccctggcccc

SEQ ID NO: 478472 - DNA, 122 bp, Homo sapiens
agggctgactcggggatctgggttgccctggtccatgttctggctcccagtgccctggggcgatggaagctggcggggtcagggcgtggggaggggcggggagcggctggtcggggctgcgc

SEQ ID NO: 478473 - DNA, 122 bp, Homo sapiens
aagacatagagctttcgcaacaagaagcggaagaatcgctcatggaaaggagtatttcgccggcgttcaatctcctggagcctttgttggcgtctaagaaaggtctgaaccagaggtgttgg

SEQ ID NO: 478474 - DNA, 122 bp, Homo sapiens
agtggaagggcttctcgcccctgtggctgtaaatgtgctccaccagtgtggagcgccaggcgaagctcttcccgcacacgtagcagccgtgacgctggtcagctcgggggacaggggggtgg

SEQ ID NO: 478475 - DNA, 122 bp, Homo sapiens
ttaggtaagtagtccgaggacacagactggtgagcgtctgagacaggtgcacagacccaccggtccaggcccggagcctgtgcccctccactgtgctgcctcccaagctggcgttaaggagg

SEQ ID NO: 478476 - DNA, 122 bp, Homo sapiens
gcaaaaacttagttccataaagaagagacaaggacccaggatgaagtggatcattctaggcggagggaacagcaggagcagagatgctggaacttggcaaagcatgatgtagttttagggga

SEQ ID NO: 478477 - DNA, 122 bp, Homo sapiens
aaacagctaccatttattatttcctctgtgccagatactgtgctgagtatttcacataatcgcaaaatcatcacagccaacaaatagctgtgatggagctgcaaatgatggagcactgctta

SEQ ID NO: 478478 - DNA, 122 bp, Homo sapiens
cgggcgcccggcgggaccggtgggcgcaccctccctgcgcggagctcgccggctctcgaccgggtccgctcagccttcgactaatttccggtggtcggagctgcaaaattaaaggccgcgcg

SEQ ID NO: 478479 - DNA, 122 bp, Homo sapiens
cttcaagttttatcatttgaactcaagtacttttgctgctgaggaatggaatcaaaagaacgtagtctcctggtgaccacctcagatctctattattaggctagatgtatagcctctactcc

SEQ ID NO: 478480 - DNA, 122 bp, Homo sapiens
aggctcgtcggctgccctgctgtttggatactctacagagccgggatttatgtcccttcccggctcccacgcctcttgctggggagggtggctcatttttcacgggtgccgcgtgactttcc

SEQ ID NO: 478481 - DNA, 122 bp, Homo sapiens
ctctcggcggaggagccagggccgggtctccaggccgggagggggcggccgcggtgcgcccgggcagcgctccctgcgcaagtagttcttctatgtctttacacgcacttccaaaaaaactt

SEQ ID NO: 478482 - DNA, 122 bp, Homo sapiens
cttcccgctcgaccctcggttctggacaacggagatcgtccccagtcaaggtgattatatcgcagatctcacttgggagcttctcttaacctgtgaccatcgcctgagttagctggccgact

SEQ ID NO: 478483 - DNA, 122 bp, Homo sapiens
gagggaggtgggggggtcagccccctgcccggccagccgccctgtccgggaggtgaggggcgcctctgcctagccgcccctacggggaagtgaggagcccctctgcccggccagccgcccca

SEQ ID NO: 478484 - DNA, 122 bp, Homo sapiens
aggtgcaggaggggctgggccctgccccccaactgccagcgcctccccgctggaccacctcgatggatccagagacctcacaggagcgacctcacctcctgcatagcccagctcaccgccag

SEQ ID NO: 478485 - DNA, 122 bp, Homo sapiens
tcagttaaatagatatcagaagcttttgtatctttcacccttttgccccccaagcatactcgctgagtatgtggaacattcctgagggtgacagtggaggcgcaaagctgatgagggaggta

SEQ ID NO: 478486 - DNA, 122 bp, Homo sapiens
ttggctaaacacttgccaatatcctttactgtgtaatttaggtaacacaggcagaaaaggcgtttgaaaagcagaaatcaagtggcaaatatcagatctgagggacgcaatgagggtggagt

SEQ ID NO: 478487 - DNA, 122 bp, Homo sapiens
catctgcctgatgtctccaaaatctaagggctttgcctgaacctcctctacccctagccccgtcctttgggagtcatggattcctaggccagtgtcacactccaaagccatgttcttgtgac

SEQ ID NO: 478488 - DNA, 122 bp, Homo sapiens
cctcggcaggtttggcagcccgcttgtctctgcccccctacgggcccggggcgcctcgggcgcctcggtgctgcctgcagcccccgcgcgctgcccccagcccagcttgcgctgtacggagc

SEQ ID NO: 478489 - DNA, 122 bp, Homo sapiens
cggggagttctctccgaccccacccgttccaaggacgcagccctgtgattggccatgacgcgtgccagagctgcccagtcgcggaagagcagctgttttggcgtctgtttgctgcggtagga

SEQ ID NO: 478490 - DNA, 122 bp, Homo sapiens
taggcgaggtcgtttcccaggacccaccaccctgcgccactccctgctgtcccaggcgggcgctggccacccccagccgtagcactgtgtccacactgcccctggccccaccgtcgcacccc

SEQ ID NO: 478491 - DNA, 122 bp, Homo sapiens
aggctggcactgggtggtggctgctccactagatcctccacctgctctttagtgcaccagcgcctccctcctttctccatgaccacaacctctgcctccctcctgtatgtttcctgccgagc

SEQ ID NO: 478492 - DNA, 122 bp, Homo sapiens
ggcacaagagccggtgggacttccatggaatctgcttttcctctgctgggcttcaaataccggctgcatctttgggcatcctttgtgagaaattcagggggtcctctctcctctggctagaa

SEQ ID NO: 478493 - DNA, 122 bp, Homo sapiens
gcttctcttccaaaggcaagagtctatcccaaaagtaaatgccccttccaagagcaagagcgagaggttcttaaaggatagcatcttctgtggcagtgtgggtggtgagagggaaccgtcta

SEQ ID NO: 478494 - DNA, 122 bp, Homo sapiens
acatccctccatagactgatctgttcgcggcctctgctggaacctcagtgtcaccttggacgccaccctcgcccaccctacccacgccagtcagtgcacccaggcctgtgcaagtggcctgt

SEQ ID NO: 478495 - DNA, 122 bp, Homo sapiens
agccatcctcccacctcagcctcccgagtagctgggatcacaggcatgcaccaccacgcccggctttttgtatttttggtagagaacgggtttcgccatgttgccccggttggtctcagact

SEQ ID NO: 478496 - DNA, 122 bp, Homo sapiens
ggcctgcaacaatgagatctgtcgccttggctaggactggcgccgagaggcgataggtctcgggagagcctggcgcagggtgtgggagattaggaatcccaggtccaccggagatggcaggg

SEQ ID NO: 478497 - DNA, 122 bp, Homo sapiens
ttcaccagcccacgtgcgcgcaggctccgcccccagtccctgaggtcccgagtccaggtccgccgagatcccactatgcaccgtgtcgcaagtctcttccgcagccacagtgacttttcact

SEQ ID NO: 478498 - DNA, 122 bp, Homo sapiens
catgaaaagtgtttactcttgggactgagtctctgcaccccaagatccacctaacacgtccgtggaccaaggacagtcgagggccacagtagacctcttggggaaaatacaggctctctgaa

SEQ ID NO: 478499 - DNA, 122 bp, Homo sapiens
ttgctctccgtgctgctagcctcccatactaacacatgtgttgaatgcatcagggcataccggaggaggcagtcgggagagtgataaaagatcaggttacttggtctgtaaaaaaaaaattc

SEQ ID NO: 478500 - DNA, 122 bp, Homo sapiens
catcaccccatcatccttttcctgtgctccctgtgttagtcaactgcaggattaactccccgccccccaaccccagtcgctcaagcctgaacattcctcaacaacgcccacaccccctcaaa

SEQ ID NO: 478501 - DNA, 122 bp, Homo sapiens
gggggtccgggggatccggcgggcggcggacggcgcacactcgcgactcggtccgggagtcgctgctccttccagcttggtccccgcctccacgactcaggggcggctgcgcgctgtcttct

SEQ ID NO: 478502 - DNA, 122 bp, Homo sapiens
tgggaggtggggggcgcctctgcccggccgccccatctgggaagtgaggagaccctctgccgggccgccaccctgtctgggatgtgtacccaacagctcattgagaacgggccatgatgacg

SEQ ID NO: 478503 - DNA, 122 bp, Homo sapiens
cacagccacctagcacctacggcgactcagagaggacatgctttctttgtgcagcgcttgcgcgctgcaagtatatcctattttcttcctcttctcttgtccagggtttgattaggccgcag

SEQ ID NO: 478504 - DNA, 122 bp, Homo sapiens
gggggagggggctgagacagcaagtaaggcctttgcacgcatgcatgggggcctacaggccgccgccctggtcccagcgcgtgcggtgcccgcagaggccagcgagtggacgtcctggttca

SEQ ID NO: 478505 - DNA, 122 bp, Homo sapiens
aggtaagatgcacctgtctccagtcctcccctcagggcactccctagtcttttaggacgccgggaaataaagcaaaagaagaaagcccacatggggcaatcttactgggctgagcagccaaa

SEQ ID NO: 478506 - DNA, 122 bp, Homo sapiens
cccacatataccctgaaatatactctgtggtccagaaacggaactctaaaacaacagcaacgaacttgacaggcgcttcccgggaagttcgaattccccacactctgtccccaccagccatg

SEQ ID NO: 478507 - DNA, 122 bp, Homo sapiens
ccgccgagtcgctggagcttccggaccccaggcccgccccgccgccgagcatgctcagtgcgagccgccgccgaaagttttctggaacaaacacccgcatctggggcttggcgggccaggag

SEQ ID NO: 478508 - DNA, 122 bp, Homo sapiens
taagcctcccaagtagctgggactacaggtgccaccacacccagctgaattttttaaacacgtagcttaacatatatagagaaactcctgcaaacttgctttgacttttcacttttttagaa

SEQ ID NO: 478509 - DNA, 122 bp, Homo sapiens
gaacgtctaagaacagcccccggtgtgagagagtacgtgggaactcctgccgcgcaggcacggggatgggtcccagcaaacgcacggtgtatttccaggtgtaaatcgcccacactctgacc

SEQ ID NO: 478510 - DNA, 122 bp, Homo sapiens
gaccgaccccttgcctgtcgtgtccaggaatgtcagtgctggtgagtgggaacgggtgctcgaggcggagcagagggaatcagaatgtggcggatggggtggacatatcttgtcatctgaaa

SEQ ID NO: 478511 - DNA, 122 bp, Homo sapiens
gggagaacaccactccactccatctctgccagcggatcctggctccctacctgaagaaagcgcctcgccagcaaggtgcatgatcgtccaccagggcaccattctggataatgttaagaacc

SEQ ID NO: 478512 - DNA, 122 bp, Homo sapiens
gcctccggagtagccggggccacaggcagggcatttgtcattaatggggtcttttgagaccgcgggtgacagacaacaggagccaggccacgcgcggcgcctctgcgcgaacgctagggagg

SEQ ID NO: 478513 - DNA, 122 bp, Homo sapiens
gacttcgttgtatgttttatggtctctgaggtggttctgtacacgatagtagttgataaacgtaggtggctaattctgtgcttgacaaaagcaagtctgatctagggatgcttttcttttct

SEQ ID NO: 478514 - DNA, 122 bp, Homo sapiens
tgtcttcaaaacaagttagaggtggtggcttctgctttggagccccctcgcttcttttcccggctctcccgtcttcgacttccaaattaggagcttagggagggcagggggcgtggtggggg

SEQ ID NO: 478515 - DNA, 122 bp, Homo sapiens
cagcactgccccgcttgggaaggcacccacaaccagtctagggactaggggtaaggccggcggggagcccgcgaatgacctgggctgacatctcttcccctccttacacagaacagaggctt

SEQ ID NO: 478516 - DNA, 122 bp, Homo sapiens
ttgttttcaatgtaaatggaccagcccggactccgtacggcactagcaggggactgaaagcgtcttcaggtactgctggtgggcggtgatgcgctacaggccgatcagacagttttgtgtct

SEQ ID NO: 478517 - DNA, 122 bp, Homo sapiens
gaagcggctgcctgctgtctcccttcccacccgccgcccggagagccccccaggtggggacggccccttgcactgcagacgaggaagccccagctgaggggccgcaggacaagcctcacggc

SEQ ID NO: 478518 - DNA, 122 bp, Homo sapiens
ggttcctcggccgctcccctttgggtctccccttggggtctctagaggacttagggtctccggagtcatatctcttgatctctccctgaccatcactccatgtgggtgctgccacagtcccg

SEQ ID NO: 478519 - DNA, 122 bp, Homo sapiens
cagtcacaggaaaccaccatcatagaaagggcatgcaagaaatgccatctgtggcagagacggagacacaaaactgccactggagaaggatgggaggaccagaagacttaactctgatctca

SEQ ID NO: 478520 - DNA, 122 bp, Homo sapiens
tggaatgtggggtgggcgtggctaaaggcaaagggcggggcgcgcgcgtcgggaagatggcgctacgtctgctgcggagggcggcgcgcggagctgcggcggcggcgctgctgaggctgtga

SEQ ID NO: 478521 - DNA, 122 bp, Homo sapiens
gccgctgcgcagggtggccaggcaggcccggcaatggcggctaagggcggggccacagcccgccggccccgcccccggcagcagctgcgccgtctggctccacgcaggccccgcctccagac

SEQ ID NO: 478522 - DNA, 122 bp, Homo sapiens
cgggcgcgctgcggggcggagagccgggacccaccagcgcacgccgctcctccgcgggcccgagccctgccacgtggttgtccatggctgtcacttcgtccagggccagcgactcgctgctg

SEQ ID NO: 478523 - DNA, 122 bp, Homo sapiens
tatataaggctcacagtctgcgctcctggtacacgcgcttcaacttcggttggtgtgtgtcgaagaaacctgactgcgccctgaggagaacagcggagaaggtccaccgagcctggcgaaag

SEQ ID NO: 478524 - DNA, 122 bp, Homo sapiens
agtagtgatctttctcttgtttttcaaacattcctttctttctttaggaaaaacatagaacggaaagcccagcccatccttgttggctgtcatacacgagtgctgtctccaagggagtcaca

SEQ ID NO: 478525 - DNA, 122 bp, Homo sapiens
ggggtcctaacgagaagagataattacaatcaggctaccagaggaagcctttggtcctaacgagaagagataattacaatcaggctaccaaaggaagcactaactttggtgctttcaagttg

SEQ ID NO: 478526 - DNA, 122 bp, Homo sapiens
ttaagagctgtaacactcactgcgaaggtctgcaccttcactcttgagccagcaagaccacgaacccaccaggagaaaactccgaacacaactgaacatcagaaggaacaaactccagacgc

SEQ ID NO: 478527 - DNA, 122 bp, Homo sapiens
tgcttactcatcgtctccttgttggggaagacaagctgctttactcgatagctcaggacccgatttggggggatggtcacttccctttggccctagaaaaaggagctcacattgacggatcc

SEQ ID NO: 478528 - DNA, 122 bp, Homo sapiens
aaaatgtaggcgagccaaccttgtttctaaacaatcccaacaggacttttaggagcacggcgatgctgaatgcccgtggacggctgggtgcgcgccgttagctggcgcggtgacatctgctt

SEQ ID NO: 478529 - DNA, 122 bp, Homo sapiens
aatcaatagtgttttgcggttaaactccaccatcttaacacagaagtgacagcacatccacgaagttcatatagattcccacaatcagacaaaattaaggaaaaaaaatagaaaatcaactt

SEQ ID NO: 478530 - DNA, 122 bp, Homo sapiens
gctctgtgctacccctaggtagcaagagagaggctgggaaaagtgtggacgtggccagagcgagagagtagcggaggaaaggagcaatccatgcacactctgtacagttgtttttctacggt

SEQ ID NO: 478531 - DNA, 122 bp, Homo sapiens
acgcacacatggcccacccagacccgagtcaaccctcacttaggacagtcccgagattcacgtcccccggaagcttgtgaagttctgcgccacggtgtggcaagaggacagccagtcagacc

SEQ ID NO: 478532 - DNA, 122 bp, Homo sapiens
gtgagggcaggagcgtgggtggagtcagcaggtccccatgatggccctcactgagagcttcgcccttgtctcctacaagctctgactccattcccagtgggcacccagcacctccaacccct

SEQ ID NO: 478533 - DNA, 122 bp, Homo sapiens
ttttttttttgagttggagtctcgctctgtcgcccaggctggagtgcagtggcgtggtctcggctcagtgcaaactccgagaacgggacgttcttatagctgtgttttcttcttcttgtcct

SEQ ID NO: 478534 - DNA, 122 bp, Homo sapiens
ccaaggctggcctctaaggcagggagcggccgcaacgggagacgcctggagtatccgaagcgagcagtgtggacgagtcaccagcaccgtctggccacgcagggtcctcccaggagtggctg

SEQ ID NO: 478535 - DNA, 122 bp, Homo sapiens
cccggggcccctgagtggcggctgcggtgactctgatactcaccctcggccatggtcgggcgggggcggtggctccttccactggcggcgagaccctccaagtgcgaccactggcggctggc

SEQ ID NO: 478536 - DNA, 122 bp, Homo sapiens
atttctggtccttccactcaaaggatagatcctgtagctgcaagcttggcttctctggaccgaggagtcctggcgctccgctggggaggattgcctggagagagcagacccagcagcaggac

SEQ ID NO: 478537 - DNA, 122 bp, Homo sapiens
ggtctcatgagtgttgtggaaacacttcaaagcagtttttatattgtacagtaaagacatcggaccccatggctgctcaaacaagtgaatctacagaggtgattaagttctaatttaggttt

SEQ ID NO: 478538 - DNA, 122 bp, Homo sapiens
actggtcactcacccggctctcttccagctctcttgctccatctagtggtaaaagctgaacgcgggcgccctaaacctagcctgcctccgacttaatgcgctcccggaagcctgtctcactt

SEQ ID NO: 478539 - DNA, 122 bp, Homo sapiens
ctgtaggagggagagcacagcaactgtgggactttgcatggaactcagtgctgccaacaccgggcagaactcagccagcgcccactgagggagcatgtagaccagccctagccagaggagaa

SEQ ID NO: 478540 - DNA, 122 bp, Homo sapiens
gcggcaggtggagggagtggcacgaggcatgcggagggagctgcaccgacatcacataaacgcactgggcagctcgcaggcgccattcgctcttcagacgccggagacgtaggagtgggtct

SEQ ID NO: 478541 - DNA, 122 bp, Homo sapiens
caaggttgaggtcgctcacctcatccagggctgggagtagaaggacacagggacatccaacgagggggctgtgaaagaggaccctccaagcactaatggctgaggccaggttggagtgaccc

SEQ ID NO: 478542 - DNA, 122 bp, Homo sapiens
tcttatgaggatattgttgccaagtatcataggctgccctaaaaccttgtccccatatggcgggctttctgcttccttttttgggaaacattttcttggcctttgcttttcctctgctttta

SEQ ID NO: 478543 - DNA, 122 bp, Homo sapiens
ccaagcgggagggcgagcgagtgatggcggcggctgtggctgtggcgtggcggagggcggcgtgcagtgcgggcacgaggggcatgcacaaagtccccgagtgtgcgtgcgtgcgtggggcg

SEQ ID NO: 478544 - DNA, 122 bp, Homo sapiens
atactttctgcgatcctgacacagagaaggggaaagaagttcctgtctcgcctggcaactcgctcattagcattggccagctcctccccgcaggctggcgattcacacggggaggggcgggg

SEQ ID NO: 478545 - DNA, 122 bp, Homo sapiens
ggggtgccgaggggcgcggcgtcaagtgcgtgctggtcggcgacggcgcggtgggcaagacgagcctggtggtgagctacaccaccaacggctaccccaccgagtacatccctactgccttc

SEQ ID NO: 478546 - DNA, 122 bp, Homo sapiens
ctatgacaccttcaaaggagatgactacaatgaggagaatcctactgaacccggcagcgacggcaccatgtcagacaaggaaattactcatgatgtcaaaggtaaccccatgtagagccatg

SEQ ID NO: 478547 - DNA, 122 bp, Homo sapiens
gtttcctcagccgcaaattcttccatgtggggcgacctcacagagacgggatgtatgggacggcggagtgcaaagaaaggtatgatcgctcttgggggcccagtggcatcctctccacgagg

SEQ ID NO: 478548 - DNA, 122 bp, Homo sapiens
tgccacacgatgagccttgagaacatttagttaaagcagccccagggcctgtatatcgttcgatttcacttaagcgagccgtccggaggagctagttcacggagagcggacggggctgccgg

SEQ ID NO: 478549 - DNA, 122 bp, Homo sapiens
atcagccagcgggagctgcgcatcgagaccatcgctgcctcctccacccccacacccatccgaaagcagtccaagcggcgctccaacatcttcacggtacgtgactgccctcctcccccgcc

SEQ ID NO: 478550 - DNA, 122 bp, Homo sapiens
atccctgctgggggtgagggggtatttttctgtctcttcaataaaccagaagcggccgggcgcggtggcttctgcctgtaatcctagcactctgggaggcagaggcgggtggatcacctgag

SEQ ID NO: 478551 - DNA, 122 bp, Homo sapiens
cacgccttggccccatgcccacggccacggaggctgagaccagggcaggggctttagtcccgatgggagcgggggcagggccttgtttattgtttttaatcgcggcaaaaacccacaacatt

SEQ ID NO: 478552 - DNA, 122 bp, Homo sapiens
gaacgccgagccagtggcggctggtatcccgcggcggctctggaagctggacgcggaccacggcccgggagctagaaactgaacgcccgcataataaagactggaaccctcgttctcagctc

SEQ ID NO: 478553 - DNA, 122 bp, Homo sapiens
caagaactcagcacgcactcagcacgtgttgccagtcaggggtggtgagggcggagttttcgtattcgacacagtgtgtctgaagtttggggtggtacctgcagatagtcccctcactggtc

SEQ ID NO: 478554 - DNA, 122 bp, Homo sapiens
catcctggctaacacggtgaaaccccgtctctactaaatgtactaaaaaaattagctgggcgtggtggcgggcacctgtagtcccagctactcaggaggctgaggcaggagagtggcgtgaa

SEQ ID NO: 478555 - DNA, 122 bp, Homo sapiens
catggcggagctgacggtggaggttcgcggctctaacggggctttctacaaggtactgaccgttttgccactttgtcgagtgttctgggtgctggagcgcgtttgagggagggttggtggtc

SEQ ID NO: 478556 - DNA, 122 bp, Homo sapiens
ctgtgctctcgctgcctgctgtgccggcagaagggcagtgccagctccatagctctcttccggcctttcccacccttgtccaatgctctctccctcaactgaggccagacccacctggctct

SEQ ID NO: 478557 - DNA, 122 bp, Homo sapiens
gctcgtgccaaagaaggccgcccttctggcggcgtgatgacagctttaccacatcggcaacgttggcataggcatgaaaaaataaagagcacgaagcagttgagctttcagcctgtgacgat

SEQ ID NO: 478558 - DNA, 122 bp, Homo sapiens
ttttatcctggggcacttgtagtcagggttcgtgggcccgcacttcataatggagggctgcgggcctcgtctgaaccgtccagccagtgtgtcctcagtcgtcttggttgggtttttgaaga

SEQ ID NO: 478559 - DNA, 122 bp, Homo sapiens
aagcctggatctccgacatctccagagcgcctgaccaagcgtgagaaggcgggatgtagccggggtgtgtgtgtcggggggtggcaggatgctccccagaggcggagagcggcgcgtggggg

SEQ ID NO: 478560 - DNA, 122 bp, Homo sapiens
gtaacagggagagaaaggatacggggagttgagaaaccaacgacaaacctccacatcgcccgcagccacctctcttgttcggaaatgaattttggcaagagattagttcctaatctgatcta

SEQ ID NO: 478561 - DNA, 122 bp, Homo sapiens
gaagaatgtgcatgcaagggctcgcgctggcatacagtagggcttgctattgacgatgagcgcacccacggctccggcaactacaaggcggtgctcacggacagcacggccctcggcgtgga

SEQ ID NO: 478562 - DNA, 122 bp, Homo sapiens
ctggaatgaggtgagcaatactcacagtcatttctatcagcctctgcaagaatatgaatacggaattaagcagggctgggggctgcttgggggtggatagagaattcaaatcgctggaccgt

SEQ ID NO: 478563 - DNA, 122 bp, Homo sapiens
tggctcctacacacgtgaacacacatgcatacacaggcacatgtgtacacacacatgctccggcacacgcgtgctggtacgtgctcccgcacacgtatgcacacgtgtgcacccttgctggg

SEQ ID NO: 478564 - DNA, 122 bp, Homo sapiens
taaacggtgactttagtttacatagcagtaggtatgttgtggagaattactcaatctgtacgcagcctcctgctgggttaagtgtgagctaagttattattttgcttacatctgcacccttg

SEQ ID NO: 478565 - DNA, 122 bp, Homo sapiens
aaccggctcccaaaccccgtgcctcactgtccctggtgtagtgacaaggtgtcagagatgcgcgatcatttcagacgttttctatggggaggaagctgggttttctgagcagtcatgggggg

SEQ ID NO: 478566 - DNA, 122 bp, Homo sapiens
acgtgggcgacgcacggagggggcgggtcagaaacaaccgggcggaggcgcaccccagggcgcatgcgtgctgtgcggcgcggtctcagggaaggtggggctatggcagctgctagggaccc

SEQ ID NO: 478567 - DNA, 122 bp, Homo sapiens
gctccgagcgggacagagagcgccggcggccgcagcgcgagtgagctgggtgtgcgaggccgccgccgcccactgctgcgcggcccagcagctcccgccccactccgtcccaggatcagcgc

SEQ ID NO: 478568 - DNA, 122 bp, Homo sapiens
tgccattaaggtcatctcccaatgatgtgggacaagatcggggctatttctggcagcactcgggcccaggccgctgacttcatcaatgccgctggaaaatcaatctccagcattcagtgagt

SEQ ID NO: 478569 - DNA, 122 bp, Homo sapiens
gaaggggatgggcagagggcctgttctcgcggagatgacagggcagctatcttctggggccgatagggaaggggaggacggtcccccaagctaaagggacagagtggcccaaaggaggaacc

SEQ ID NO: 478570 - DNA, 122 bp, Homo sapiens
gctgccctgtttgctgactctcccctctccagacgcccctgctcgagtccttgctacacacgccctgggattgttgcctcttggggaagtgctagcctgactagttgtcaggggccccgtat

SEQ ID NO: 478571 - DNA, 122 bp, Homo sapiens
cagctgcctccaggacccggggcctgaaggaggcagaagccggcggtggaaaagggcgcacgtctctcccagcgtcgctcccgctgcccgctgcccactgcagcctatttacctgttcctcc

SEQ ID NO: 478572 - DNA, 122 bp, Homo sapiens
tcagtacctgcccctccctccatctctgaaatgtggagaattaaaagctatgcctgtgaacgggcgttcagtttttagccgggaaggtgctagaccacttaactctgatagaaataagctgc

SEQ ID NO: 478573 - DNA, 122 bp, Homo sapiens
tatcttcgtatgacggatcactcggtaccatgttataatatggcaattggtagtcttccacgatccctcctgtgatacaacgacgagccatctcccaaatgattaggccgaagctgtagata

SEQ ID NO: 478574 - DNA, 122 bp, Homo sapiens
gatggacatttgggttgtttccaccttttagctaaagggagtagtgctgccatgaacacgcgtgtacttgtatttgtctgaacacctgttccctattcttgtgagtgtaagcctaggggtgg

SEQ ID NO: 478575 - DNA, 122 bp, Homo sapiens
cccaaaacctcggtcaagttaaagcgaacgtcttacgtcttcagacaagttgcgtcccgtcgccttgggcttctgaagaaaaccccaatgcccacggtcccctgttaggcactgggggcctc

SEQ ID NO: 478576 - DNA, 122 bp, Homo sapiens
cctggcgggcctaataggacaaactttgggcaggcagcgttaaactgacaccatcacttccgggttatccccacggctgccccctccttagcaaccgcgtggggttgctaagcggaagtgcc

SEQ ID NO: 478577 - DNA, 122 bp, Homo sapiens
ggctgtgggtgttagggcgatgatgagagggccgggctgctggctgcgggtctggctgagcgggccgggggcctctcacctttgcgggccttgtctcccgggatgttctgggcccgcagccg

SEQ ID NO: 478578 - DNA, 122 bp, Homo sapiens
acaaaagacctttccttgacacttactggacttgggtaatatcaatgcaaacaaattagccggactttggcaaaatcttgcaaatttcccaccaaaaccatacatatggcaaaatagacatc

SEQ ID NO: 478579 - DNA, 122 bp, Homo sapiens
agcctcccttgcgtttgtcattcactctaccaggctctccttctgcctccgcatgcccaacgatccggagaaaaacacggaccatgacatcaaaaggccttggcaaaggaatcgtgattatt

SEQ ID NO: 478580 - DNA, 122 bp, Homo sapiens
acagtggacctaacttactcagaatgcatgagacacactctgggtgatcccagaaatgctcgctaattggaggggaactttgcagttgggtgctgtgattgcagtcgggggaaactagtgaa

SEQ ID NO: 478581 - DNA, 122 bp, Homo sapiens
aagcagaagttaccagtcccgggtgacatggacttcagagggtttcagtccctccagagacggggagggccgtcttgcctctaagaacctcaggctccagtgttctctgctccaagctcctc

SEQ ID NO: 478582 - DNA, 122 bp, Homo sapiens
tccagggtggcagccgagtgctgataaggtccagagcaccacttcttaaacttgtctgcccgttggcgttgcttgggaagcattaaaaaaataccgatgccctagttccacccccgcccccc

SEQ ID NO: 478583 - DNA, 122 bp, Homo sapiens
tttcctggagtaaaggaacaagcaggttcttatccaaatacccaacctgtgaagatgagacggcccttgggaagaggtattagccaagttttcagtatgatgcccggcagaaagaatttgtt

SEQ ID NO: 478584 - DNA, 122 bp, Homo sapiens
tgatcttcaggaaaagagcataatatgctacatttttgtacaccaaaggggaggtaggtacgaatatgcatacatattgcttttttctagaagccgcctaggagtgaaaccaaaattcttca

SEQ ID NO: 478585 - DNA, 122 bp, Homo sapiens
gggggatcctggaagagacgcagctcagatgtagatgggcctggcctggaggcctcactccgtcagctggactgggcctcctcccatgcctgcactgtctcaccctctggctgtctcactca

SEQ ID NO: 478586 - DNA, 122 bp, Homo sapiens
cacgtttccaagcaccctaccccaggccttaaacgcggctccagctgcctgttccccacgcgctgctctggacacaggatcaagtcagagaccaggggccgacgcccccacggacccagacg

SEQ ID NO: 478587 - DNA, 122 bp, Homo sapiens
atttttttgtatgtgagcctttgtgtcagtggctcctccatgtgactctgtggctgtgtgcgtgctgagtgcacacatgaagtggtgtaaatagaaatgcctttgcgtgtatttgtgcacat

SEQ ID NO: 478588 - DNA, 122 bp, Homo sapiens
cagaagggaaaagctgttgaaccataatggaggagcaaaataccagatgaagcagcgatacggtaatgaaatctacaaaacacattgagtgtcaggtacaggcagaacattagattatttct

SEQ ID NO: 478589 - DNA, 122 bp, Homo sapiens
gcccaactgccctgcttgctgctggacctctcagaacccatataacatacacctgggtggcgtctcagatctgagttcagtatcagaacaaagccaggttcccgcattaccatagataggat

SEQ ID NO: 478590 - DNA, 122 bp, Homo sapiens
aagctcgggggcaccccgaccctccccacgcgcctggccccggcgcggccctcacccgagcgggggtcgaaggtgaccacgaacacggccaccacctggtcctcctccacgtcgcccagctc

SEQ ID NO: 478591 - DNA, 122 bp, Homo sapiens
ccaggttttccatcccgaatccgactccgccccaacctatacgaaggtgggccctcgggacgtctctgcaggaacgcagctactggggtatattgggtatataaagagtgggtaccctccct

SEQ ID NO: 478592 - DNA, 122 bp, Homo sapiens
tcaatttctccacatccttgccaacattcgtcattgtcttgctgattaaagccatcctagcgggtatgaagtggtatctcattacagttttgtatttgcatttccaagaccatggctaataa

SEQ ID NO: 478593 - DNA, 122 bp, Homo sapiens
ctgggattacaggcgtgagccactgcgcctggcctttgcaaggttttgaggaaagtgaagcgttctgttgaagcagggcttgagttctgttgtaagtgtttcatgaagccctggagacctct

SEQ ID NO: 478594 - DNA, 122 bp, Homo sapiens
ttcctgaagtctgtgccttccacagaatctaccagatctgcgggatgtttataggtgaaacgttggtcaaatgaatttggggattgcaaggtaaaacaatgttaagcagtttttataggctt

SEQ ID NO: 478595 - DNA, 122 bp, Homo sapiens
acaaatatcccaccatccccttcattatattttgggatctgctaaaaaaaaactatgtttcggcaaaagctattttataagaggaagcagcttcagaaagggccaaggccatgaggagcggg

SEQ ID NO: 478596 - DNA, 122 bp, Homo sapiens
tgttggggggaaagtgtcccaggtgggataataaatatccgatcacccctacacacagcccgccgtctgtctcccagcaaggtccagggcgggagagggcaccgtggattcagatggatcag

SEQ ID NO: 478597 - DNA, 122 bp, Homo sapiens
ttggacagctcggcgccctgcttggtcccggccttcatgcaggtggccatgtcgtcgtagcgctcggccaacttggccttctggatcagctccgtcttctccatggcgggcgcggggcccgg

SEQ ID NO: 478598 - DNA, 122 bp, Homo sapiens
ggtcggctccctgctctggccagcgtgttaggaacctgaccctgtggaaccgcactcctgcgccatctctgtcctcccgcctctcctgcccagcacctttgccctctggctcctacgctgtg

SEQ ID NO: 478599 - DNA, 122 bp, Homo sapiens
ggctttcgaagcatccgcgattctctttattgaatcttgagtgacacctagtggcccatccgcctcaccgtcacggcgatgctggtttcactgggcttttcagaaggcgtgctggcctgccc

SEQ ID NO: 478600 - DNA, 122 bp, Homo sapiens
cctgggaagtgaaggttgaatcactcgggaaatgtatgtcacctgttctgtaagtccacgcgctgcggcctattctttgacaagctgtgccccctgctggtctcttcgcagagttgtaacga

SEQ ID NO: 478601 - DNA, 122 bp, Homo sapiens
aagtgatggtgacgcttgtccccacagcattgacttgggcaaggcaaatgagcccaaccacgtggagctgggacgtaaggatgacgcaaaagttcacaagatgttccttgaccatactggta

SEQ ID NO: 478602 - DNA, 122 bp, Homo sapiens
ccctgttgctgaagcctggaggtttgttttctgcaaagcacaggtctctgatctgagggacgccaagcacatctcagagtgaaccttccaaagtgaaaattttctctctacatatggaagtt

SEQ ID NO: 478603 - DNA, 122 bp, Homo sapiens
gtatctccataaatgaaacagatgaatgaaaaacagatgagtagaccagatctgcatttacgaggaaatgaccttcaaaactggcagggagctgttaacaatgttcttcacaggggagcaat

SEQ ID NO: 478604 - DNA, 122 bp, Homo sapiens
aggtaaaggcaaagggatgaattcctacttcactaacccttccttatcctgccacctcgccgggggccaggacgtcctccccaacgtcgccctcaattccaccgcctatgatccagtgaggc

SEQ ID NO: 478605 - DNA, 122 bp, Homo sapiens
cagggtctccacgtaactgtgtctgccctgcaggagaggtgcggatgccctcggggaagacggcacggcccaacatcaccgacaacaaggacggcaccatcacggtgaggtatgcacccact

SEQ ID NO: 478606 - DNA, 122 bp, Homo sapiens
gtgctgagattacggatgtgagccaccgtgcccggccagcattccacttttgaaagcccccgtgaccctggtccagaaggactttgattcctggccctggtcttcaagctctttgcagaggc

SEQ ID NO: 478607 - DNA, 122 bp, Homo sapiens
aagtaacaggaacttttaataaagagtagctgtccaattctgtacttctgaggtcagcatcgcttaggggtactgcaggagagctgggggttgaagccctgacctagggttgaattctggtt

SEQ ID NO: 478608 - DNA, 122 bp, Homo sapiens
gctcaatgctccccagttttgcttcagtgtttatactgcccagggccaggaggtgagtcccgcatggtcggagccactcctgacagtcctgttcctgctctgcctgcctccctggcaactac

SEQ ID NO: 478609 - DNA, 122 bp, Homo sapiens
tgaacttccggctgtcaagctcccggccgggctgactcaagcggaggcgcgcggaacagtcgccgaggcgattcccgcccaggtagttcagcgccccagtccagctcccggtaccgttcccc

SEQ ID NO: 478610 - DNA, 122 bp, Homo sapiens
gagccaacctgtggtaatatgcacccctatcggaccttcgtttcccaccacatccctccacggaccttgttttaggcaatgcactgacccatgctccgatttttagaaatttctaaaagcct

SEQ ID NO: 478611 - DNA, 122 bp, Homo sapiens
gtttgcgaacggagcagctgctgcaggtgaggcgcggcgcctgggcttttggggtcaaagcgtgtcatcccgggggaccaaggcgaatccatactgagcgcaaaatcgttccctttctgccc

SEQ ID NO: 478612 - DNA, 122 bp, Homo sapiens
gatccatgccatctgagtacagattagtcgggactgggactggcgaagattgccgaaaggcggcggggaggaggaggaggatgtcatcgctacagtgagcaagcagatctcgcaggagaaaa

SEQ ID NO: 478613 - DNA, 122 bp, Homo sapiens
cagcgcggcagctccaccagtcacagcaagcaagaggctcagcctaacccggaggcgaatcgctgaggcccggaagtgacgcaatcgcggagccggtcccgggaaggggcgtggttccggtt

SEQ ID NO: 478614 - DNA, 122 bp, Homo sapiens
aggtggctgctactcaccagtggtgccatcggccgtgagggggccataccgcttcttgttcgcaattccaaacagagtgaatctgtacttgtggtcagggtccagtgaggagacaacaaatg

SEQ ID NO: 478615 - DNA, 122 bp, Homo sapiens
gccatgggcagaggcgcctttcagccgggacagccacaagaggcttcgctcagggacaggcgaggtgagtgcggcataggctgctcccctggggcccggggcggccagagcccactactcac

SEQ ID NO: 478616 - DNA, 122 bp, Homo sapiens
gtgaggccgggcgcggtagctcacgcctgtaatcccaacactttgggaggccgaggcgggcggatcacttgaggtcagaggttcgagacgaccaggctggctaacatggtgaaaccccgtct

SEQ ID NO: 478617 - DNA, 122 bp, Homo sapiens
tcctcttctttgtgagaaaaggatgaatctttcctgatttactgttgcctcttaaacacccgtggcaggaatctttctcacaccaggggcttctgtgtcatgctgatatgcctggaactagc

SEQ ID NO: 478618 - DNA, 122 bp, Homo sapiens
gtttgctggtgagctccccgcaggtagcggcggccgggcagagcgctcctcctcctcggtcgttctctcttaaatgcaaagcgtccccaaaagttgcgtcgcggagactcctcgaagttgag

SEQ ID NO: 478619 - DNA, 122 bp, Homo sapiens
accaacctagttacactgggatgggatggtggtaaaaatggagcagagggagggaggggacggagaaaagatcttatctacatgcaaagtgatgccgggagaggtgattagtgaggggcaga

SEQ ID NO: 478620 - DNA, 122 bp, Homo sapiens
gaggttgccccgaagctggcaggaccagtcgcggggcacctgactgagtgtccagggctgcggctccgcggcgcggagcaagcacacaagcagcttctaggggaccctccctccggcccctc

SEQ ID NO: 478621 - DNA, 122 bp, Homo sapiens
aaggtgtgtttgcgccacccacgtcccaccggagtccgcggtggggctggagccccaggtcgccagggcagcgtgggaaaccgaagaccgggcacctccacctctgtaatccttgcactttg

SEQ ID NO: 478622 - DNA, 122 bp, Homo sapiens
cggcgtgctgagagcgcatgcgctaagtcctgccgcgagaagggcaggctgggtggtcggcggcttccgcctgtgagagccgggggagagccgggtggactaggcttctcctgggcgggcta

SEQ ID NO: 478623 - DNA, 122 bp, Homo sapiens
tgatggtttaagcatcaaaaattagaataaaacaagtgaattttagggatgatatttcaacgataaaatagcaactgatgacaacctgaatgtggtatgagagaagcaaagtcaattggttc

SEQ ID NO: 478624 - DNA, 122 bp, Homo sapiens
ggcttttgagagggggctggtgcgtgagcgcccgggaggaacccctgtcttcttccccgccggctgcaccggcagacccagaactcatgtatttgctcctggttcccagtctcggggaccct

SEQ ID NO: 478625 - DNA, 122 bp, Homo sapiens
ggtgccccctctgcagctgctggcccaggtgctaagcccctcactgcctggggtgggcagcgcctgccagccactacgagtgccagcctgccgagcccacgcccacctggaactcgcgctgg

SEQ ID NO: 478626 - DNA, 122 bp, Homo sapiens
gagagaggctaatgtagacaaaataaatatggaataagatggctaacactggggttaacacgtacatcttaacactggatttaacgcatacatcctgaggagactgaggtcatgggtgatgg

SEQ ID NO: 478627 - DNA, 122 bp, Homo sapiens
tccatgggtcactcgcaggtttgattgatgctcgttgacttacggacgtttctgcctgagcgctgtctcaggcctcctggggctcgctctccaccagcgattcctccctcagtttccacgtt

SEQ ID NO: 478628 - DNA, 122 bp, Homo sapiens
cctccagtctttcctcccttcaatcttgcttctacattcctggtagaattctttttaaaacggaatggtgacctcattgcctcacttgttaaaacccttcaggggttccttactgtcccttt

SEQ ID NO: 478629 - DNA, 122 bp, Homo sapiens
taggtcaaggctggcatttgcaccttttcatggtctttccctgcacagtcacttcagcggcggcgtcgctggggctgaggccgggtgactgcggctaggcatgcggatttagttccccgcct

SEQ ID NO: 478630 - DNA, 122 bp, Homo sapiens
ttgcattcctattaaaggacaagacaaattctactatcaactattactgatattaaatgtcgtattagtgcaattaaataagagaaaaaagcataaaaggagtaggcttttttggcagatac

SEQ ID NO: 478631 - DNA, 122 bp, Homo sapiens
ctgactctactcccacttttccgcacgcctgcgctccacaacgcatgggctggtttccaccgcggaaggacattgccttcgtcagccaccaagaaaaccgtccctgtgcacttggattttca

SEQ ID NO: 478632 - DNA, 122 bp, Homo sapiens
agggtgagtaagaggccagagctgagggtgaggtgggcagctgcaagttgggggtctgtgcgtgggctgggattggcctgctatttatgtagctagacactttcacttcccttaacttatcc

SEQ ID NO: 478633 - DNA, 122 bp, Homo sapiens
tttttactctagatgtttaaaaaaaaaaaaagaagaagaagaagaaggtggtaggggcaccgcagaatctgtgatattgtaaagtggtccaggtgggcagaaaatcacagtggcagctacaa

SEQ ID NO: 478634 - DNA, 122 bp, Homo sapiens
acgtaaaccgcccccgcccgcccagctgcggcccaggccggagcggagcctgccgtcctccgcctgcctgctgctcgcctccctagacctgcgcgtcgcttcccggcccgccgaggaggtgg

SEQ ID NO: 478635 - DNA, 122 bp, Homo sapiens
tgaatcatactgcgtttcaggttccttagaaaaatttggatgtgtaaaaagaactcttaacggcgatgcaggtcttccacagctaaggtaggtgcagttttaagacgtgtctttcgcatatt

SEQ ID NO: 478636 - DNA, 122 bp, Homo sapiens
atgacagaaagtccatctttgaggattcaactcttaaatggagcttcagtgaccttctgccgcctcaaaagtgttttcttgtgaaggctttcattctcaccctctcccccagtactggtaaa

SEQ ID NO: 478637 - DNA, 122 bp, Homo sapiens
gaccactgcaggcacgagtgtggcagacgcgctcccacgcggctcgcgtgattgtagccacgtggctgctgtccggactactcatggtgccctaccccgtgtacactgtcgtgcaaccagtg

SEQ ID NO: 478638 - DNA, 122 bp, Homo sapiens
actgtggttaccgacaggatgcaatactccacagccaagaaaaggcacctcttaataagccggtgttctaaaggagtaaaaaaattcccacctattagataaactctaaactacactctcag

SEQ ID NO: 478639 - DNA, 122 bp, Homo sapiens
acaagaagctggtccagagagagaaggtgaggtgggaggaggaagatgcaggggtgttggcgccccctgccggggaacatcctccatgactgttttaaatctcaaagagatgttcactccag

SEQ ID NO: 478640 - DNA, 122 bp, Homo sapiens
atgggatgcagtcaactgaaatatggtctcccagattctcttctcttcctagagccatggcgatcctgctgcaacatcagaccatgtcacttccctgtttaaatcccgctaatggctcccca

SEQ ID NO: 478641 - DNA, 122 bp, Homo sapiens
tgcaataagtgaggagacagtagctattaatataagatgagttcacgggctcacagcttccgcaggctggaaaacaggctcccggggctgggggctgcggcaaggctcggctgtcagattcc

SEQ ID NO: 478642 - DNA, 122 bp, Homo sapiens
tggcccaagaatccacgttgcttctgaggctagatctagccacagcgattagggtttcttcgccatggccttggtggtggctggccctaaactggtcacagtctgaagacccaccctgaaag

SEQ ID NO: 478643 - DNA, 122 bp, Homo sapiens
acctcctgctccagtcagagtaggtttctattatatgctcttatgattcctgtcttggtccgttcatgctgctctgatgaattaccatagactgagttgcttgtagacagcagaaatttaat

SEQ ID NO: 478644 - DNA, 122 bp, Homo sapiens
ggaacgcggggcggggccgaggctaggagcatggcgcggaggtggggcagggacccggggcggcctggagcgctgtcaggaggagctgcctgggccgggcgcgcgcctggcgctaggtgtgg

SEQ ID NO: 478645 - DNA, 122 bp, Homo sapiens
agtcatccacctgccttggcctctcaaactgttgagactacaggcgtgagccatttcatccggccctcaaatttttaataagtgtttatgaactaatctgatctgtgagttaggaaggatct

SEQ ID NO: 478646 - DNA, 122 bp, Homo sapiens
cggtagtgagctatgattaaacctgtgaatagccactgcactccatcctgggcactcccacgacccctgccccaacccctggaaagccattgttgattagaacatccattttgtataaattc

SEQ ID NO: 478647 - DNA, 122 bp, Homo sapiens
ccagcccacactccccagtgcggcccccgctctccgcccgctcgccgggagcacggaagtcgccgcacccagcggcccgcgggaccttgccctgtgaccctgcccactggccgccggctctc

SEQ ID NO: 478648 - DNA, 122 bp, Homo sapiens
accttgccaatttgctgacctttgtagtgtcctcgaactacctggacctcgtcgtccttgcggatgggcatggagcggacattgtacttctgccgcagctccttggagagcggggatgacat

SEQ ID NO: 478649 - DNA, 122 bp, Homo sapiens
gggccctgccttaatttgttcttccttttccatttctcctttggacaacttgctgctcggcgacgtttccttcccctgcagagaccaaaaggtcaaggaaacaaaggtaagtcccgctccgc

SEQ ID NO: 478650 - DNA, 122 bp, Homo sapiens
attcatgttatcccattgcttctcattgtgaaaagcccccgggagatagtttgggggtgacgggtcattggctgtcccttaaatcccatcatgttggcaatccccttccccagtaacgtatg

SEQ ID NO: 478651 - DNA, 122 bp, Homo sapiens
aaaactggggaccagaatatggcccagtacattacacacccgaattacgggcaccttttccgtttacgctatggcagcaacccctggcctatcatgtgccattaatggatgtgaaaagcaga

SEQ ID NO: 478652 - DNA, 122 bp, Homo sapiens
gacaagtctggttgcctccgtagccctcagctttctcatgtgcaaatgacagatgaagtgcgcatatcttggaatcttggaagtgatgggggtgtttgatgggacctatcttgtcaatgccc

SEQ ID NO: 478653 - DNA, 122 bp, Homo sapiens
ccgcctcccgcgttcaagcaattctcctgcctcagcttctccagtagctgggattacaggcgcccctgctacgtatcagctttgatttctcagcagtttagagcaggtgaacatgatgggta

SEQ ID NO: 478654 - DNA, 122 bp, Homo sapiens
gagccgaaccactcgcggccctggactggtgtgggggacattccggcgggagaggcgaggcgctgcgtttcccttcaggagacagttggctagaagaagaaaagaagtgttcgttcaaatta

SEQ ID NO: 478655 - DNA, 122 bp, Homo sapiens
gcaggggtggtggcttgagcatggcgggctgcaggtctggagccctgccccataggtaggcggcggaggccccgcgagaattccagcgtattgtgggcgggcccacactgcgggagagaccc

SEQ ID NO: 478656 - DNA, 122 bp, Homo sapiens
attcaatagcatagattttaacatgaaacacgttaaaacacatgaaacacgaaggactcccgtaagcatattactgtgctaggctgcttaagcccttgccttataccttgttttctcttgct

SEQ ID NO: 478657 - DNA, 122 bp, Homo sapiens
ttttttcaagtaagaggagccccgcgcttgcacagcctggggtgcgggaggcagtttgcacgggaaggctctgtgttcccgggccggcttcgccccagggccccgctcagtggccttcgcct

SEQ ID NO: 478658 - DNA, 122 bp, Homo sapiens
ggcacgttttggcctctttggtcacgatcagccttttggctgcaaccaaagagcgcgcctcgtttctatagcaaccaccccaggtccacgcctagacggcgagtggcaagggtcaaaataga

SEQ ID NO: 478659 - DNA, 122 bp, Homo sapiens
cctgcgccagcagctacaccggtgtttgcatctcggagcagccacatggctgacacggaccggggttcgcatctcggagcagccacacgggcgacacgcaccggtgtttgcatcttggagca

SEQ ID NO: 478660 - DNA, 122 bp, Homo sapiens
aagtcatatccaaacaatgctgacagcaccgcacactgtagggtatcagttgtttaacttcgtgaccgtgtggctgactgagagctgtgaatcactgacattgcccggcattgtcagagact

SEQ ID NO: 478661 - DNA, 122 bp, Homo sapiens
ttcagccagatgcctttccagtcaggccatgtggatgtgtgagtgtgttcaagagatcagcggcatagatttcagtgagaacaggggctacggtttggttgaaggggtaggagtttggggtt

SEQ ID NO: 478662 - DNA, 122 bp, Homo sapiens
caagcctccaggttcacaaatggctggaggtgctcggggttagctcccgagggcggcaagcgccgaccggtcctcgctcgctaggcaggcgcctccggattccgttcatgcctctcggagct

SEQ ID NO: 478663 - DNA, 122 bp, Homo sapiens
cagccacggggccttcccggggtgcggccgagtcaggcggagaccccctggggtgggtggcgggagcggggccgcagcaacagggcggcgtggagggggagaaacaccttacccagccggcg

SEQ ID NO: 478664 - DNA, 122 bp, Homo sapiens
gttccaaaaagcaccgaacaaccttttgggaagaaaacatacatagtgtgtaggtgctaccgatttgtatcctctatgaccttgccatagaaaggcaaatcagacgggcgctcccattgcct

SEQ ID NO: 478665 - DNA, 122 bp, Homo sapiens
ctggacttccgcttccggggtgcccaggctcccagaaatcctcgcggcaaaggttaaacacgtgactactccctagtgggtgtggccgcagcgacaggcttgggtggcgggagtttcaagtt

SEQ ID NO: 478666 - DNA, 122 bp, Homo sapiens
ttcccaccagtccaactgcgaggagtgcgacgtgagtctgagtctgatccctccgaaaaccgtacttccggcgctgtctcggaggcctcccgtcccctcccttgtccgtcttctaactcttc

SEQ ID NO: 478667 - DNA, 122 bp, Homo sapiens
gcaccagaactagcaacaaaatctacgggaagtgtgcgatccctcagcaacaacgctgcacgctgtgtagcctcccttacagctttataggaaccacggcgagcacaccctgtgggggcgat

SEQ ID NO: 478668 - DNA, 122 bp, Homo sapiens
gactgtaaggggtcatggctgcggaatccagcaggggcattggggttgacgtgcactcagcgccgagcttcttcgtagttcctcacccccttggctactatgggctggtccggaaggtcagg

SEQ ID NO: 478669 - DNA, 122 bp, Homo sapiens
ttgctcacctgtggactggcagcgggcacctcctctctggggaatcagggcttctcttggcggctgtggctcaggtctcctaggccatgcagtctccctgtggccagacttgccctggtctc

SEQ ID NO: 478670 - DNA, 122 bp, Homo sapiens
ctgaccgccccagccaaactctgcgtcattctgtgggtggaagtcctgcaggtgtgccggcgtgctctcctcgggtcctctcaatgtcgagctgcacgagtcttcttccgccgatgtgttcc

SEQ ID NO: 478671 - DNA, 122 bp, Homo sapiens
ccaaccctctctgtatgcagctccccaaattcagcgctgcgctcaggcatggcagccacccgttacgtggggccgttcgcatttgcatttattgaggtcaaataaaatgctggaaattggtg

SEQ ID NO: 478672 - DNA, 122 bp, Homo sapiens
gttgtcgtggttgctcggaggcacgtgtgcagtcccggaagcggcgaggggaaactgctccgcgcgcgccgcgggaggaggaaccgcccggtcctttagggtccgggcccggccgggccatg

SEQ ID NO: 478673 - DNA, 122 bp, Homo sapiens
cgcgcggccggctaggctcggcgctgcgctctcggcctgcgcggtcgccatggagaccggcgcggggccacctagttgcagggtctcgggccaggaagcccctattcctgtcccctgagcgc

SEQ ID NO: 478674 - DNA, 122 bp, Homo sapiens
cggccagttgtcggccggggttcctcgcccgtggttgtccttgaccgtcggccccctccccgtcgcctcccgctccccagaggcttggggagctccgaggcctcccccacggccacggtgcg

SEQ ID NO: 478675 - DNA, 122 bp, Homo sapiens
tgctggccatccttggcattccttggattagaggtgcatcacttcaggctctgcctctgccgtcacgtgaccttctgtgtgtgtgtttccgtttcttaccaggacatcagtcatggaattag

SEQ ID NO: 478676 - DNA, 122 bp, Homo sapiens
cgcatgtaatcccagcactttggtaggccgaggtgggctgaccacttgaagttacaggttcgagaccaggctggccaacacagtgaaaccctttctctactaaaaataccaaaaacttagct

SEQ ID NO: 478677 - DNA, 122 bp, Homo sapiens
cggtcacgcgttcacaaggatccaggatagagggccgagaatgccactttcccatgttgccgtgagccccatcctggcgggggagcctttcagacggtgctgctggaggctgtcgtccacca

SEQ ID NO: 478678 - DNA, 122 bp, Homo sapiens
cccagccaggcaggtccatgggttaccctaagagcttagagtttatcggagaggaaatggcgtgtcccctgagatctaaagcaggcagccgggcaaggacactgtcacatttggtctccaca

SEQ ID NO: 478679 - DNA, 122 bp, Homo sapiens
tgtgagcgtttttctcacgtgacggaggcgcctgcacgtggaccaatggggaggcgggggcggggccggcaggggcggtgcgcgggaagggaccccggacccggaggtcgcggagagctggg

SEQ ID NO: 478680 - DNA, 122 bp, Homo sapiens
ttttccttttcattggctgcagaattccatttcttattaccgttcatctttgaatgaaaacgatctgctcataactagctatgacctcaagaatttggaggaaagcaacctagagggtgagc

SEQ ID NO: 478681 - DNA, 122 bp, Homo sapiens
atcttaccttatgcttttaaatttgataacatctttatctggaacactttcacgctcttacgtcttgtcagctcatcattcaaaacctgagttagatttcacctacttagggaaattgtcct

SEQ ID NO: 478682 - DNA, 122 bp, Homo sapiens
gaagccgatggggcccaaaacgaactctccgggaagccccgcctccatctggctaagaaccgcccctcgctgaagactgcaagtcctgccgcttgtctagaccggtgatgtgcaatcaatgc

SEQ ID NO: 478683 - DNA, 122 bp, Homo sapiens
aaagcaatcccaggcccaccgcgcccgcccacgctggcttcccccagacacccccggctgcgattcccctaccagacttggcagttccccagggtgttcgcattagcgccaaggggaaacat

SEQ ID NO: 478684 - DNA, 122 bp, Homo sapiens
cccatctctgctggtagatgacgctcaaacagaggctgggtcaccattggtcaggtctctcgtggaggagactcatgctgggggacctcaggaaggccatgagctgaagtgacaagaccact

SEQ ID NO: 478685 - DNA, 122 bp, Homo sapiens
aagctcagacttggtatagtgggagagcctgactgaggtggctctagccagtctaattgccgttcctttagctagtggcatcttgattcctgctgtgtcttaactgaccattgtcttaaatt

SEQ ID NO: 478686 - DNA, 122 bp, Homo sapiens
cctcatagatggcgctttctcactgagtcctcacacaaggcccgccttcctcatagatggcgctttctcactgagtcctcacacgaggcccaccttcctcacagatggcactttctcactga

SEQ ID NO: 478687 - DNA, 122 bp, Homo sapiens
tgcactttatttttattattattacacgataatatataatgaaataattatacaactcatcgtagtgtatgatcagtgggtgccctaagcttgttttcctgtgactagatgatcccatctgg

SEQ ID NO: 478688 - DNA, 122 bp, Homo sapiens
ggatgtgtaggaaccccgggagccacgaataacagggccaccactatggtcaaaagtagacgccaaagccaccacacttctgccatatttgcttacttctttgtgttataccactgttgcaa

SEQ ID NO: 478689 - DNA, 122 bp, Homo sapiens
acctccagggaatggggcctgggtgctgcgctgctcaaactctgtgggcacgctagagggcgctcctgagatagctttcaaatctctcctggctcctgcttgcaatttgaaatttgctttcc

SEQ ID NO: 478690 - DNA, 122 bp, Homo sapiens
cgcctcccgcccagcagcccggaacccaaggtgtccgacccttgctttcctccgggtacacggccgaactggaaggccgcaaagcattgtgggagttgcagtttcttagtgcgcaggctgtc

SEQ ID NO: 478691 - DNA, 122 bp, Homo sapiens
gaaccagcaacttcctgggcagaggccaacctggctgccgaacaacttcgtgctttcaagcgcgctgaagaccgcactgcacctgtgagctagagagattgagagccactcagagagtgctc

SEQ ID NO: 478692 - DNA, 122 bp, Homo sapiens
cagcggcgcgagacaggggcagaacgatgaggcgccggagttagctcgccggtgcgggtgcgggtgcgcggcgcgtcgcggcccctcctccgcgacgcgccgggtggtcacgtgacggccgc

SEQ ID NO: 478693 - DNA, 122 bp, Homo sapiens
accgtgttcttcagcttgttcatggcactgtgggccgtgctgctgctggagtactggaagcggaagagcgccacgctggcctaccgctgggactgctctgactacgaggacactgaggtgag

SEQ ID NO: 478694 - DNA, 122 bp, Homo sapiens
ggaaccggctcccaaaccccgcgcctcactgtccctggtgtagtgacgaggtgtcagagacgcgcgatcatttcagacgttttctatggggaggaagctgggttttctgagcagtcatgggg

SEQ ID NO: 478695 - DNA, 122 bp, Homo sapiens
aagcccccagagtcccgcccctcggccgccctcccggttcaggccccgcccctgaccacccgctacctggcttgtcccagcccacctcggccaggtcccacccacaacctgcaagccccgcc

SEQ ID NO: 478696 - DNA, 122 bp, Homo sapiens
gccccctccccgcccccgccccgcccggcgccggcagcaccacggacagcgccgcgtgcccgccaggctgcctggagcccagcccctgcgctcacagcagctggctgggagcccggccgggg

SEQ ID NO: 478697 - DNA, 122 bp, Homo sapiens
agtaacccaacctcttggtgtgtatcagtaagagccagtttaagggacatatgacttggccgagcacggtggctcactcctgtgatcctaacactctgggagactgaggtgggaggattgct

SEQ ID NO: 478698 - DNA, 122 bp, Homo sapiens
aagacagcaggattggatactctacctttgaagcctttgtccataatgtatgtgttctgacgtctatccattccacaagcacctgtgtaaaaataacatgtaaggaaagaaaatatgggggt

SEQ ID NO: 478699 - DNA, 122 bp, Homo sapiens
taaaagatctaaaagttgaatggcacggggcaggggagcgcatgaggacctgaacgctcacggggcaggagtccgttgctgagacccctcaggctgccccccgggctgtgcattctaggcta

SEQ ID NO: 478700 - DNA, 122 bp, Homo sapiens
ggtcctccccaccactgcagcctggctccgctctggatccggtcaccagtgctgcaatgtcgtgtctgagccttgtcaaccacgccctccccctcctctgggtaactttccagtcctttagc

SEQ ID NO: 478701 - DNA, 122 bp, Homo sapiens
ggacatgaagatcaagtccctggaggagatctgtctcttctctctgcccattaaggaatccgagatcattgactttctcctgggggcctctctcaaggaggaggttttgaagattatgccgg

SEQ ID NO: 478702 - DNA, 122 bp, Homo sapiens
gatggggcgcttggacctctggaacctcaacaatgacaccgaggtgagcggcggctcaggcgcccgggccggagggctgggaggggggcgcagtcggccactcgcagtctctccctctttct

SEQ ID NO: 478703 - DNA, 122 bp, Homo sapiens
ggagttgggtcgggggaggcaacattttaagaaaatatgcgaggggctgatacgctggagcggccgaagtacaatacacagttgttcttgtgggtctaatgcaggtggttgcgattatttcg

SEQ ID NO: 478704 - DNA, 122 bp, Homo sapiens
tttccggcaaatgaatttcctgcaagtgagtttcctgcaaatgagttgcccacagaagcacgtggcgaacagaatccttctcaaagctcctttgcaagttttaaaggaacaggagatagggc

SEQ ID NO: 478705 - DNA, 122 bp, Homo sapiens
caccctaaggcgtcttccttagagggcagaggtgggtccccctggcctcttgccagtccccgccatcaagacccagggccaggtgtgacacggaatattgccgtccccacagcacccatttc

SEQ ID NO: 478706 - DNA, 122 bp, Homo sapiens
cccgggaggggcggaggctggggccagacgcctcgccgcctccgcctcggcgaatagcagcgcgctgcccgcccggattggagcagcagcatcacgctgacctctgcctgggatgtaaaccg

SEQ ID NO: 478707 - DNA, 122 bp, Homo sapiens
aaccccctaacaacgggacaaacagtatgaaatcaaaaccgtttaccctcctcccaccagcggtttgcgtagggccttgggtgcactagcaaaacaaacttattttgaacactcagctccta

SEQ ID NO: 478708 - DNA, 122 bp, Homo sapiens
ccgggtacaccatagagagcgtaaaccgagaccagagaggcggctgcctctctatggtaacgccccgcgcaggcgctggcctggccgtgttaggcttcgctggcgtaaagtccccgggagct

SEQ ID NO: 478709 - DNA, 122 bp, Homo sapiens
ggggggtctcagcaggagccccccccccccccccccgcccgctccagtcctaactccccacggctccagggcgcagggcccatccttgacagcctgagcgctgacttctatggcagccgcaa

SEQ ID NO: 478710 - DNA, 122 bp, Homo sapiens
tgaatagaagaaacaatatcacaggaggatgtacaccccctgccatattgggagtcctatcgttttctccccctctggatattcggaacaatatcacggtgggtgtgtacaccccctgcgat

SEQ ID NO: 478711 - DNA, 122 bp, Homo sapiens
cacgcgggcagtggatggcatgggggcttcggggctgggctgggggcgcgattcacctgccgctccgcaacaaagccccggcagccgggcgtggggctaaacttaccttgaacttgcagtat

SEQ ID NO: 478712 - DNA, 122 bp, Homo sapiens
ctgcgcgcccgggcgtgtgctgggcccatggactctgcgttcagctctttgaggagccgccggctgtttgcagtggccgcatcacacacgctcccgccagcgacgcggagggtctgattccc

SEQ ID NO: 478713 - DNA, 122 bp, Homo sapiens
aggtggtatatacacacaacatagtagtatttagccttaaaatggaaagaaaattgtacacgtgctacagagtagaaccttggagatgttatgctaagttaaatcagtcacaaaagcagaaa

SEQ ID NO: 478714 - DNA, 122 bp, Homo sapiens
ggtctccctccctctttctcctctaggctgtccagtcgcctcgcagcagcgagccgcgagcgcccttctccagtcccggcttggaactgaactgtgtgagcacgggtcctggaacccgggcc

SEQ ID NO: 478715 - DNA, 122 bp, Homo sapiens
tcgcagccccggtccaagcccagcctctccaggcagggattagtgcaagcgtccgttggccggaacgagcgaggacagcctctccacctccctgcctccctacctccctgccttcagcaccc

SEQ ID NO: 478716 - DNA, 122 bp, Homo sapiens
gtgtgccaagcgctatgctaaataatggtcatacagagatgaacaacatgatgtggtccccgccctcgtgcagcttacatgcttgtgagagagacagatagtagagacataaatacccaaat

SEQ ID NO: 478717 - DNA, 122 bp, Homo sapiens
cctgcgcacagcaggagaaagtgcgtgggggcagctgcccccggcagaggctcgggctagcggggcccctgacgcgtccggcgttgaccacggctggtgggcgcggggagggcgaccaaggg

SEQ ID NO: 478718 - DNA, 122 bp, Homo sapiens
caggccctggaccccgggccacagccacaggttggggcaccccggtgcgcggcgcccccgcggagctggcgagagccggagagctgaaacccaacatctgtgtgtacaatgcgctctccgag

SEQ ID NO: 478719 - DNA, 122 bp, Homo sapiens
gccctaagattccactcccgggcactcagccaggactcaaccccaggtagatgctggttgcgcagaccccacagtcttggcaccggcgagtggcggccctactgggccctgtctcctccccg

SEQ ID NO: 478720 - DNA, 122 bp, Homo sapiens
agtgccctttcttattctgatgccaccccagctcagtcctcaccaggaaagggcaggctgcgctagactgcactgctgctctgcaaagtgaatggaaacatcacacagagataaagaagaac

SEQ ID NO: 478721 - DNA, 122 bp, Homo sapiens
cccagggtttgaaagtgtccccccttctagcatggagattgcagcttgctaactagatggcgcactgttatttggtgttctctgctgcgtagcgcaggagtataaactgagcatgtagctgc

SEQ ID NO: 478722 - DNA, 122 bp, Homo sapiens
cagcatccactccactcaacatctgttttctgggtgtttgcgatatgtcaggagctctgacgcacatgagccagtgtatcaggacacaatggggtgatactcccagggggcggggatgccac

SEQ ID NO: 478723 - DNA, 122 bp, Homo sapiens
ttacagctcttaagatggcgcggctggagttgttcgttcctccccgtgggctcgtggtctcgctggctcaggagtgaagctgcagaccttcacggtgagcgttacagctcataaaagcagcg

SEQ ID NO: 478724 - DNA, 122 bp, Homo sapiens
agaatttcctccctgtgtttcctcagaaagacattaatccagtgccacttaatatttcaacggtgagtgtgatttctcctgacttgttgacttgtttacccacaggcatcttctaccctcac

SEQ ID NO: 478725 - DNA, 122 bp, Homo sapiens
tcgcgagcccacccggcccttcattccgtctcccgaacctgctcgggttcccgcgccccacgcttgctgcagaggcaccgcctcctacgcccgagccgcgggccctttaagtgctgacggcc

SEQ ID NO: 478726 - DNA, 122 bp, Homo sapiens
tggagaagacctggctcctcgtcactggctatcggagagcgctggggtgttaggagaacacggtgagcatgaggccggggatcggggctggggttgctgaaactcttagcgccacatgaggc

SEQ ID NO: 478727 - DNA, 122 bp, Homo sapiens
ggtgattccagaggctccgccggctccgctcggctcggctcggctcggcgcgacccgcggcgctaggccgggtgtctgccactcactgtcacccgcagccaggctggccaataagcacgggg

SEQ ID NO: 478728 - DNA, 122 bp, Homo sapiens
ttgcgttaggccctttggccccggaccagtgtctgccagccacgtgctcagcctcccgtgcgctaaagctcaggtccttcctgtcatcctggtatcctgcactgaggtgtggtgagtccatc

SEQ ID NO: 478729 - DNA, 122 bp, Homo sapiens
ggattagtggcatgagccaccgcgccaggcctacaaatcttgtatcttcttaaccacttccggcttcctgcaaacctcgctctagggagccagaagcgcggaaaaggtttgcggggtctgcg

SEQ ID NO: 478730 - DNA, 122 bp, Homo sapiens
taaggggacaggagttccagaagaacctttcaagatgatcaggaacaccaggacgagggccgtctcacctcactcggaccacatggagacctcccttcaaaatgggagccatgtcctgcccc

SEQ ID NO: 478731 - DNA, 122 bp, Homo sapiens
ccaagattaggactagacttatgtgctcctttgggacaggaaatggcatatgtactgaaacgcgagatagttaaaggacacccccccaaaaaaaattaaacatgaggaaaaacatgtgttcc

SEQ ID NO: 478732 - DNA, 122 bp, Homo sapiens
gaacggactagttcttcctgcgtgaccacggatgcttctgtttgagaaaatgcatacccacgtgggacatttagatcaagaaagctgttgatgaagacattgttgaagggcaacttgggtga

SEQ ID NO: 478733 - DNA, 122 bp, Homo sapiens
gccggacctaaggggagacaaaacaggagacaggtcaggtcgaggcctctggagtcgggtcgttccccagtgactccagggcagcgcaccccgcgaatgcccacttcggcgatactcaccac

SEQ ID NO: 478734 - DNA, 122 bp, Homo sapiens
agtgattttactgataaggctgaaaacaggcaggaagggagggtaacttacagtgctctccggatgttacagtatttgcatttccacagtctatgtgtctgaaaaaaactgggtttagtcta

SEQ ID NO: 478735 - DNA, 122 bp, Homo sapiens
gcagaaggtgtctgctgtggtggctttgcctggagtaatttgtaattgacacagttttcacgaccttctctgggtttcctctcatttattttttttttcggttaacagaatagtgatgagta

SEQ ID NO: 478736 - DNA, 122 bp, Homo sapiens
tcgcttcttcccctgccttcctgagtgtcccacccggctcccctcttaggaggacccaagcgccccatgagcctgtgactaaatatggccggcccttcccatcgtcgaggagttcttggcca

SEQ ID NO: 478737 - DNA, 122 bp, Homo sapiens
gcttgtccacacctggctctgcccaccgcccccggctgctcctctgggctcaggtcgccgcggtcaggagctgccaagtttgcctatcaaactttatcttcgtgcagagaactgcagcctgg

SEQ ID NO: 478738 - DNA, 122 bp, Homo sapiens
tgccctgctattctctgcagactgagagagggggaccgtggaccctgtaaattcactcggcgcccagcattactggctaaatcaagaccgctcttcagtctgcaagaagagacagagcaagt

SEQ ID NO: 478739 - DNA, 122 bp, Homo sapiens
ggcggtggcgggagctggagctgaaagtgaggagcatcgcggacgagcgccgccgcctcgcgagccgccgaggggttcccgcccccagggtaaccaacgctccctcttaaaggcgccggccc

SEQ ID NO: 478740 - DNA, 122 bp, Homo sapiens
ttcttaagcatgtactaagtcccagatagtgtttcgttgctgaagacacagccctgacctcgacaaaggaggtccttgctctcaggaagcgttctgcctttccctcttttaatatatttttt

SEQ ID NO: 478741 - DNA, 122 bp, Homo sapiens
gacagcaaagcagggatcacgttttacaaacgcggcaggaccaggacgtcgtgcccacgacgggccagcaaccacaggctggatgctcaccctgtgccagcctgcagacggagagcacccac

SEQ ID NO: 478742 - DNA, 122 bp, Homo sapiens
aaaatggcctcgttaagctttagtctgaactatgaaattttttattactgggaataaacacgtgttgagcacctgttacatgccagtcatgaacgagacacagcttccgactcaataagctc

SEQ ID NO: 478743 - DNA, 122 bp, Homo sapiens
gggccaatgatcaagggccatgtgtactacacagagggtttgccttcatcctgtaggaagcgaggggccaggggagggtttcaggcggtaaacagagagggcccctgtctccaggaggctgt

SEQ ID NO: 478744 - DNA, 122 bp, Homo sapiens
gacttggcaatgccaaggtgtttgctgaggctgtggactctccagcccgggagaggtcgccggacctttgaggggcattggaatcctgggctcctcctctgctgggtggagccgcgaaccct

SEQ ID NO: 478745 - DNA, 122 bp, Homo sapiens
tcaggggcagcatttggatccaggttcgtgagttcagaagttcacgagcatcctcccctgcgatgctgcctctagaggagaaagagggaagaggctttgaataaatcagagcagaagagaaa

SEQ ID NO: 478746 - DNA, 122 bp, Homo sapiens
ggtgcacggagccggctcctcgggaaccctgagagtggccgtcccccggagatgaagggacgagggcgcagcgacatccccacttatcccgctccgcgaatactcgctcctcacccgcctgc

SEQ ID NO: 478747 - DNA, 122 bp, Homo sapiens
tgggcacacaaaagagcaggcgcgacctcggaccagctccgaggcaaaattcactcagcgcgggacagcgacagggaatccggccgcacctgtgcctgcagtctcattgctcggaacggcgc

SEQ ID NO: 478748 - DNA, 122 bp, Homo sapiens
cagcccctggcgtcttacgtcccacaggccccaccccggcgccttccgtcccgcaggctccgcctttggcgctgggctctgacgtcaccacctgcgccgctcacagtagaaacaggaagtgg

SEQ ID NO: 478749 - DNA, 122 bp, Homo sapiens
atacggacgtcccaaggccaatgagactggtgtcattccagaaaagggccactctgtgggcgggtcggtgggagggtacctgaaggtggggtcaagggaggccccaaaacagtctacacagc

SEQ ID NO: 478750 - DNA, 122 bp, Homo sapiens
aaacaaagtaaatgaacagggctgttcttctcatcacacatacacaaccccgtaggaccacgcggttttcttgaaaaaacagagaaacacagccttggtgtgatgaagcattttgcaaaaac

SEQ ID NO: 478751 - DNA, 122 bp, Homo sapiens
ttagtatcaggagagcccttcgagtattctctccgctccacaccgctcggctgcacccagcggccgccgcggcccgaatgtcgtccagggtccccgcccatatgacaaacactttccgccgg

SEQ ID NO: 478752 - DNA, 122 bp, Homo sapiens
ccggactcaccgtgcggagctcctgggttcggtccttcatgctcccgggagtggcagcggcgccggctgcagccgtgtgagccccgcatgcgcgacggccgccccgcggctgcgcagcgcca

SEQ ID NO: 478753 - DNA, 122 bp, Homo sapiens
taccctgcgcagttttgccccctccccgggttggggcatttattggaccaacagtcatttcgtaaatagctgttgggtatttaactgtgagcgttccggtgctggggaccccgcagtgagcg

SEQ ID NO: 478754 - DNA, 122 bp, Homo sapiens
ggacgacgtagacacacggatgactcatccacagatgactcagatgcacggacacccagacgacgcggacgcacagacgacgcggacgcacagatgacgtggacgcacagatgacgtggacg

SEQ ID NO: 478755 - DNA, 122 bp, Homo sapiens
gttagccaaccatgctgaagaaaactcttcagtgcttggaggggatccatctcagccagtcgggagctgtgctcacgctgtatgtggacaggcttctgtgcacccctttccgtgtgctggct

SEQ ID NO: 478756 - DNA, 122 bp, Homo sapiens
agtgcagggctggctacgtggtcaaccagtgctccccatctgtcctcttggggtttaaaacggactcaacaacaagcagatgttgcacaaattaatatatagtaattaattgtaacaaaagc

SEQ ID NO: 478757 - DNA, 122 bp, Homo sapiens
gccaaaggaatggtgtgcccctaggctctactagctttgagatgggagggtggggaggtacggtttgtttccaagcagggtaccagccaggtgcgcggagttgctttttttccttgttattt

SEQ ID NO: 478758 - DNA, 122 bp, Homo sapiens
ttggggtttcatcgatggcactgaggtctcctatactacctccatcggtcagaggaagctcgagcccactgttggaatagttgctgatgggggactgttggctgctgcatgaagactgacca

SEQ ID NO: 478759 - DNA, 122 bp, Homo sapiens
acagaaaaccacctgagtgaataatcttactgaatcaaaaagacaagaatggaagccccccgtggtctctgaactctcacacggggtctgaagcatccagccactcttctgctctgtctctg

SEQ ID NO: 478760 - DNA, 122 bp, Homo sapiens
tggcggagaagcgccctaagactccaaaggagacaacaggagtttgtgctggagctcccccgctgcccatcggccgttccggatcccctaaggcccaagtcggacagagacggaggaaagga

SEQ ID NO: 478761 - DNA, 122 bp, Homo sapiens
ctgccaggggtcgccatgccgacgtttatcccaaagccttttctaaggagggagcacgggcgggaatctgcagctggagcagtcacagggtttccaaccacgacaaacacgcctgcaccccg

SEQ ID NO: 478762 - DNA, 122 bp, Homo sapiens
gcatcgcggcctctgagctcatgcggaacataaaagctcgcaaggcgtagaactttttcacgttttcatttgtttcccgtaggggccccgagaacgtgcatgacaccatgatttccccccca

SEQ ID NO: 478763 - DNA, 122 bp, Homo sapiens
cttccacatcacccagcctttgtgtgtgctgtgtcttctgcctagagcaccctcccttcccgtagtctgtcaggcaagctcacagccatttctcgggatccattcaaatgtcacctcgcttg

SEQ ID NO: 478764 - DNA, 122 bp, Homo sapiens
cgccccctcttccgacctgcacggccggaaccaatcgtgacacaggagctggagatttcgcgccaaacctgaccaatgaacggcgcctctccaagagccccagcccacggaaagggatttcg

SEQ ID NO: 478765 - DNA, 122 bp, Homo sapiens
ctgggctggcagagggacagagaaaacacagcaggctcctggcctttggcagggccccctcggccacacggtgactcggagccctagccatcccaaacacgcagagctgggggtgagaaccc

SEQ ID NO: 478766 - DNA, 122 bp, Homo sapiens
agagccccttgtgctcagagctctcacggaacacagagcaagcctgtctacgagttcagccggtgaggggcaggggctggtgaaggcggcggcgcctctgggtgtgcccaggggcagggtcg

SEQ ID NO: 478767 - DNA, 122 bp, Homo sapiens
tgcaggagaagcccacgatacgcaggagaagcccatgatacacaggagaagcccacgatacgcagcagcaacgtgagcaggtgagaagccaccatgagcaagagacagaaagcacagccaac

SEQ ID NO: 478768 - DNA, 122 bp, Homo sapiens
gcctgggcctgtcaagccctgactggacatcctcaacagagaatgtttatggagtcagcacgaagccatgagaaggggcagcccaggggccagccaccctcacaggtcctccagggaggggc

SEQ ID NO: 478769 - DNA, 122 bp, Homo sapiens
gttaagtaaaagacaatgaaaacgcagaggaatgatctgcctcaggctctgtttgcctggcggcggggacatcaacccttccttactggagaaggcactagcaggcaacagagaaatctggg

SEQ ID NO: 478770 - DNA, 122 bp, Homo sapiens
gaccctattggcttgtgtacatctatatgctaaaatgacttccccacattgacatttgtgcgccacctttaatcactctggggcaactctcacatcttgctgcatgtacatgtatacggcta

SEQ ID NO: 478771 - DNA, 122 bp, Homo sapiens
gggcggggttcaggttccagctgggctttgagttccggttcaggcttccatctgtggttccggttccaatttgaggtggagtttgggattaaagtttagacgaggcctctcgttcagggttt

SEQ ID NO: 478772 - DNA, 122 bp, Homo sapiens
tctggtggggacgtggagaacctttgtgtctagctcagggattgtaaacgcaccaatcagcgccctatcaaaacagactgctcggctctaccaatcagcaggatgtgggtggggccagataa

SEQ ID NO: 478773 - DNA, 122 bp, Homo sapiens
atttaagcccctaatcacagaagtcttttgatgaacttttcccactttaaatacatcaaacgaagcaaagagagtagagaaagccattagaaaatcattataataaataccaacattgatct

SEQ ID NO: 478774 - DNA, 122 bp, Homo sapiens
ggggaagcgaatggtcccttccaggcgggtggccatgttgctctaataaagcgggaggggcggcggcgtggggggagcagatgccgctggctgccagcgggacgccggcgagcagagcgcag

SEQ ID NO: 478775 - DNA, 122 bp, Homo sapiens
ttgcaactcaaggcgggctgtcagatcggttgcataatagatattggggagctcactggccgggagccttaagaggagagcagctatctcagtctttctcacttaatcttggcttcacgtca

SEQ ID NO: 478776 - DNA, 122 bp, Homo sapiens
atggtctgtctcctctagcctcctgctcatgctgcacgggcctcccctccaccctggacccgctctgtttctgcctggtcatcctgagcccctcctggcctcagggccattccacagtgctc

SEQ ID NO: 478777 - DNA, 122 bp, Homo sapiens
atctcgctcttgttgcctaatcctgttagttggtggcaaaacaaggagaaacgcgtgtttcggcagcagtgattctaacaggcgttttatgttaaattacagcagaacccagaacaaaagca

SEQ ID NO: 478778 - DNA, 122 bp, Homo sapiens
aagggtctgtgtggtcaccgaaaaccagagatgcttgggaaggaaggagtctggaaaagccgttcccacgctgtctgatcaatgttcgctgggctcctgctctgcaccacgctgtggggagg

SEQ ID NO: 478779 - DNA, 122 bp, Homo sapiens
ggtgtctcccacaagtcatttctctcagaaggatcattacctaaaatagcagaaaacatacgatcgaggttgctcaatttcaatatgctgggatcctatctctgagtgcccacctcccccaa

SEQ ID NO: 478780 - DNA, 122 bp, Homo sapiens
tgagaggatgaaatgaaaatataattcatgaagtgaggtcttagaggtggaattcaagtgcgtgctgcatctgagttggatataaccatttaggaatgaagcgaattagaccagcactgctc

SEQ ID NO: 478781 - DNA, 122 bp, Homo sapiens
aaaggaaacgctcagcctcaaaagtgtgctgtgaggcattagcttggcctacacagcactcggacgcaggagctaggcctgcagagggtgacttcacgacgattttggcctgcagaagcctt

SEQ ID NO: 478782 - DNA, 122 bp, Homo sapiens
actgggtttagagaggctaaataattgacccatgattaatactggtgatgatgatgtttacgactgaatacttattgtatgcccagccctgtactgagtcctttatatacatgatctccatt

SEQ ID NO: 478783 - DNA, 122 bp, Homo sapiens
ctctgccccagtgtttattcctagtagcccatttagttctccccacaagctgatgaggtgcgtatgctgtcatcctcctttttcagacaaagcacagagcggtgaggtctcttgcctaaggt

SEQ ID NO: 478784 - DNA, 122 bp, Homo sapiens
ccacctttggggtgttaactcggggctctaccactagctggttctgttacttaacctctccgagtttcagtttctttttctttaaaatgggaatggcaatgcttagcttatgagggtcatta

SEQ ID NO: 478785 - DNA, 122 bp, Homo sapiens
gagggcggcggccaggaccgatgaggaagcagctgcagggactccagctcgagcccagggcggcctggacctggggggcagtgggggtctgagaagtcaggtcaggctgtgcatcaaaggca

SEQ ID NO: 478786 - DNA, 122 bp, Homo sapiens
gagaagcgccggcctcggggctgtctacagcggcccgggagaggctgtggtggccccgagcgcgagtgtgtaggtgacaggacagcggccaggcccgcccctcccctcggtgagtacccgga

SEQ ID NO: 478787 - DNA, 122 bp, Homo sapiens
ccgaagacagggtgaattagagacccctgttaataaaaggcaaagatgcttgactgacctcggattagaggaccaacttaaaaggtttagagttccttctaagatttagggggttagagggc

SEQ ID NO: 478788 - DNA, 122 bp, Homo sapiens
ccacgtccaggtagtcaaccagcctctctatgagggtgcgaacgtactggaactcaggcccggcactttgggacccatcgatgagaaagaccacgtccctcttgccaccaacacctgcgaaa

SEQ ID NO: 478789 - DNA, 122 bp, Homo sapiens
cgaaagtttaaaaatcgggagaaagtgtgagactcagccggctactttcccatcacacagcgcccccactgcagcccccactcctttggctaggcgagcgttggggtcttaaagggaccgca

SEQ ID NO: 478790 - DNA, 122 bp, Homo sapiens
agcgggccaccccagccagcagagtcagcctactcagatttcctatccgtgatgtgggagcgttgattttttgcgtttttttttgctcttcaggaatgagtctcgctgttgctcattctgtg

SEQ ID NO: 478791 - DNA, 122 bp, Homo sapiens
tgcagcaattcactttttcattgactgcactattatatactcgccacatgggggcaccggcgtactccacacccacatgaaattcctgttttcctaatctgagatacagtggggcgctaatc

SEQ ID NO: 478792 - DNA, 122 bp, Homo sapiens
aacgggtgcggagggtgggtctgtcacgtgacgggaggggcggggcaccggccgggggcgcgtgtgcggggcggggcccggcggtgagagggtgcggcgcctggctggcccgaggcggggcg

SEQ ID NO: 478793 - DNA, 122 bp, Homo sapiens
tcactgggatacacagattatattatgtctctatccacgattatagatcggcacctccaacgtctgacccagcattgctcaggataattctttgcttttctcctattgaccctcagttatcg

SEQ ID NO: 478794 - DNA, 122 bp, Homo sapiens
ctcccgcaacccggtgtgtttgtgtatccccgcggtgcaggccgactgcgcggtgctcttcgtggcaggcggctgggcggaggccggcatcttcaagaacccgcagacccacgagctcgcgc

SEQ ID NO: 478795 - DNA, 122 bp, Homo sapiens
tgcaccctgagaggaggggcgagcgagccaacttggggcagggatcaccgtgtccacaggcgcccactggtgtggcgtcctgagagtgcgtgcgtgagcgagcgagcggcttatcctagact

SEQ ID NO: 478796 - DNA, 122 bp, Homo sapiens
ccactctagccacaggcttatccctttgtttactgaatcttgagttctagctgttgtcttcggaaaatctgatcaggtcatttcatagtcttaggaaaaatgctcattgagaaatcaaacaa

SEQ ID NO: 478797 - DNA, 122 bp, Homo sapiens
caggagacttgcctccaaagcctgtgttctttgctccccgtcacacagcttccacgggcgcgagtctggcccacttgaggcccaaggaagtgcatgcgtattccctagctgtgccttcagcc

SEQ ID NO: 478798 - DNA, 122 bp, Homo sapiens
ttggagggggcgctcaggcagggcgtgggtttccctcagattcaatgatcctgctgggctcggtggagcggtcggaactgcaggccctcctgcagcgccacctgtgtcctgagcgcaggctg

SEQ ID NO: 478799 - DNA, 122 bp, Homo sapiens
cccgtgcgcgatgacgacaaggccgaggcgcgaagggtgggaccgcaggagccgtgcagccgcggaccaatgagcgggcgccggacgacctgtggcccaatggcggcggcgcgcgggcacgc

SEQ ID NO: 478800 - DNA, 122 bp, Homo sapiens
ccgtcaagtagcctgggggacaggccggcgcggctgggagcgggtgggcggccgggaggccggagcagcacggccgcaggacctggagctccggctgcgtcttcccgcagcgctacccgcca

SEQ ID NO: 478801 - DNA, 122 bp, Homo sapiens
ctggagacagacatgaattttcagattcacagtacacacggcgctgggcagaaaaaccgccgcctgctgaactctgaggtccgggggcctttgtcactcattctctcacctttgcttttctg

SEQ ID NO: 478802 - DNA, 122 bp, Homo sapiens
gctgcaggctccagggacacaggctggtgggggggcctggggctcatggctgagccaggtcgcaggacagacaagttggcctggatcaacctgaccaatctcagctggagcagtgagttctt

SEQ ID NO: 478803 - DNA, 122 bp, Homo sapiens
aatgagcgccgcccggccgggcgtgcccccgcgccccaagcataaaccctggcgcgctcgcggcccggcactcttctggtccccacagactcagagagaacccaccatggtgctgtctcctg

SEQ ID NO: 478804 - DNA, 122 bp, Homo sapiens
ttcctttctgtggacttgtgaaactagagacaagtctgctcccaacactccatcacacaacggtgggactgacatagaataacagttacagacataccaatacaaaaatggcgaaagggaat

SEQ ID NO: 478805 - DNA, 122 bp, Homo sapiens
ccattcttactcacagacattccagtgtgctttcttgagatagaggtaaaggagatagggcggtccagcaaatgcaccacaatttgcccataagctgcatgaatccatataccagtccatag

SEQ ID NO: 478806 - DNA, 122 bp, Homo sapiens
atggggaatgcacgacccatgctgctgcccaggcaggagagcagcagctcccggcacacacggcgactcccacagacacagaagggcacacgccatgggagccacggtcctaaagctgggat

SEQ ID NO: 478807 - DNA, 122 bp, Homo sapiens
agattacaaaagaagcaaagtttaaatctaccctgtaggagtgcgggtcaccaaagcactcggtgactaaatgagaaagactcgaagaaaatgtctgtgagaagagctactggtaaggaaga

SEQ ID NO: 478808 - DNA, 122 bp, Homo sapiens
gactggatcagcaactgtattttgttcgcccccttaaaactttacagaaaccctgcggcccgtgcacacggggccggacccgtcgccagcgccagtgcgccggccgtgattagggccacctg

SEQ ID NO: 478809 - DNA, 122 bp, Homo sapiens
tccacctggccacacagcaggcactgaggctgggagacagcccccagacagatgagtgtccgcgcctctctgagaggtgaatgagcccggacggtccctacctaccaagtcctgaggagcag

SEQ ID NO: 478810 - DNA, 122 bp, Homo sapiens
acaccaaggaagttgggctttgagaattccatcccactggcactgaggagaatatttctccgtcttgcttacccatctcccagttttttggaattttctctagctgttactccagaggatta

SEQ ID NO: 478811 - DNA, 122 bp, Homo sapiens
cctgggccccggccctccccatggtgtttacggggaggcgaacggggagcccagaggctgcgagcctggcctggacccaggagccaggggtatcccacaagtcctggaggctctgaacgcgg

SEQ ID NO: 478812 - DNA, 122 bp, Homo sapiens
aataacatttttgtggacagcgctgggcatttaaaagaggcacaagacaaatgggttttccgaacaataaaataatagtagtaatggctgtgaatactatgggaggtttcatcacagatgct

SEQ ID NO: 478813 - DNA, 122 bp, Homo sapiens
ccgcggccagcggatcgctgcgagtggccttgaaggcagctgctgcaggtgaagagtaggcggcggggcagagagcggcctccgagggtaaggtggccggccttgcgaaggcgtgcggggct

SEQ ID NO: 478814 - DNA, 122 bp, Homo sapiens
gagcggttagaggtgggagttggcgctgcgggccgggcgggggccgcggaagctgcgatgcggacagggcagcggcggtgacccgagctgccgcccgacatgaactcgctggagcaggcgga

SEQ ID NO: 478815 - DNA, 122 bp, Homo sapiens
cggccagggactgaccaaaccttgggggagcctgggagccggaactggtacaagggaggacgcccgcccctcttccgtccttgtcccctcgcagccccctcctctccctgtactcggcgtcc

SEQ ID NO: 478816 - DNA, 122 bp, Homo sapiens
caggtgacatgccggtgctctccaggccccggccctggcgggggaacacgctgaagcgcacggccgtgctcctggccctcgcggcctatggagcccacaaagtctaccccttggtgcgccag

SEQ ID NO: 478817 - DNA, 122 bp, Homo sapiens
cctcactccttcaaaattgttaagaaatgttagtggtgggtctgatctgactgcagccatcggtaaataaaagtttttgatcctgttgaacccgcctgagacggtgctgtgcaggggaaagc

SEQ ID NO: 478818 - DNA, 122 bp, Homo sapiens
catgtgaaaccagtcgcccgcagaagcagcagcagcggcagcagcttggctcctgcgccccgctccatcctgtagcgtctgtgaatcaggcctcctaagcagatttatatcagtttggcctc

SEQ ID NO: 478819 - DNA, 122 bp, Homo sapiens
tgagaggcaggtgagacggttcacccaatcacacgggaaggggcgcgcgctgcccaaccgcgctctccgcctacctccgctgctcgggaagctgctggcctggccctcctggtctctcttcc

SEQ ID NO: 478820 - DNA, 122 bp, Homo sapiens
ataagtattcctgagtaccagaccctttgatatataatcttgcagtatcctcccatcacacgaagactgactacctttcccctgaacttgaagttcaatcatttaacttactttgatgaaca

SEQ ID NO: 478821 - DNA, 122 bp, Homo sapiens
ccaagagaccgaggccttcccgctgtccggactgacacctccaccttcgcccgcagccagcggcagcggatcaacaccattctggggcggtgaagtagttttcgattccgggtgatttttgt

SEQ ID NO: 478822 - DNA, 122 bp, Homo sapiens
gtttcctgcccaacctcagtggctcaggctgagtcatccttttccctgcctgggtcaaggcgtggcttctccaatcccttacaaaatgcttccgccccaaaatgctcaggccagcctgttaa

SEQ ID NO: 478823 - DNA, 122 bp, Homo sapiens
ccggccccgccccacccgcggcgacgcaggaggcctcggggggcgcccctgccggcgccccgtggatctggaccctgccgggcgcccactcccagcccacaaaggccagcgcggggcggcgg

SEQ ID NO: 478824 - DNA, 122 bp, Homo sapiens
tatgatgacggtggcaccccccgtggtccagccttcactgggactgatggccttgatgcacggagtggctgctcacacaagacagagaaggcagaccttagagccccgtcctcctccgacgc

SEQ ID NO: 478825 - DNA, 122 bp, Homo sapiens
aggggtcccagcagtgagcggggccctacgggaactgctggaggcctgtcgcaatggggacgtgtcccgggtaaagaggctggtggacgcggcaaacgtaaatgcaaaggacatggccggcc

SEQ ID NO: 478826 - DNA, 122 bp, Homo sapiens
ctgtctccagacgcaaagccctccctgcttcccaatcctgtcttctgactcactcctatgcgtgaggctctgctcaggtgtcacacctcctaaaggcttccctgctaactcgaggccaggtt

SEQ ID NO: 478827 - DNA, 122 bp, Homo sapiens
accccggcacagggaggggcgaggcggcgctgcgggcgacacaggccctctcaagggtcacgcggcggccgacgactccagcccacccagggtcctcagagctcgtgtctcccccgggggct

SEQ ID NO: 478828 - DNA, 122 bp, Homo sapiens
gacctgcttccccatgcgccccagctccctctccaccatgcagtcgcctcctgggcctggcgaccacagttcggggcctgctctaaggcccagagttctcagtcaggcgatgcccagctgaa

SEQ ID NO: 478829 - DNA, 122 bp, Homo sapiens
tgcccagattttagaaaggtaattcagacatatttcacatgttaatagcatttcttccgtcgtatgggacagcatcccataatcaaacacattattatttctgcaatgaaacatatggatgt

SEQ ID NO: 478830 - DNA, 122 bp, Homo sapiens
gcagtccacacacgcattcagctctggtatacgatagatgtgtagtgtagcagcacctggcgtttgcctgtagacgacacacagtagttgttgaatttgtgggacccttgataatcagcccc

SEQ ID NO: 478831 - DNA, 122 bp, Homo sapiens
gaggacccgggagcagcgaatatttgatcatcgttccagggactttctggaatgaatgaacgttggcctctcttggtctttttatcaaagagttcaggatttggattccggggaaggtcatc

SEQ ID NO: 478832 - DNA, 122 bp, Homo sapiens
acaccagaaatttgctacttaattatttaaaccaatcacttattcaatctgaaaaataagcgtaagaatatcactattgactttacatggaagtacaaagacaaagcacaaaaagtgcttcc

SEQ ID NO: 478833 - DNA, 122 bp, Homo sapiens
cccaaggccaggggctcttgattgcttctttaaatgaattttcttttccaagggcccatccgctcacatcaagtacacgagtaacatagcctatcattttcatttaattccagaatgtcttt

SEQ ID NO: 478834 - DNA, 122 bp, Homo sapiens
ccttacagtctatttaaacgccctaggaaaacaaataccatcgccttggcaggcggtccccgcacagacagacctagctccagccacatacagatgtgtctggtgggctgaagtaaacaaat

SEQ ID NO: 478835 - DNA, 122 bp, Homo sapiens
ctactaggatgcagagcccatgggatggatgatgcatgctgtcttcccaccccgctagatcggagggccctagtctgcggcttggcagtccaccccgtacccacatggtgccaggcatccga

SEQ ID NO: 478836 - DNA, 122 bp, Homo sapiens
gctgcgggcgggagggggtgcccaagacgctgaaagccaggaaggcacgggtggtggcagcggctgaggctggaaaagctcattttgctggtaatttactctcctgcttttgggctgctccg

SEQ ID NO: 478837 - DNA, 122 bp, Homo sapiens
gtcaaggcgcccttccttgtctcgggctacgcttctgactgcagccaggcagctgtgggccggggccttggcggctggaggaggggcgtgagctggtctcgcccacgcacctggcgcgcgta

SEQ ID NO: 478838 - DNA, 122 bp, Homo sapiens
gcagatccacggaggtcagggccgcggagagctgtagttccccggaaccggaagtgatggcggacctccggaaaccgtagattccgggcggtcggagccgccgggagctgtagttctcccgc

SEQ ID NO: 478839 - DNA, 122 bp, Homo sapiens
tgttccctggggcctgcagttttagcaaagttccctgcccacgctaggaatcagtcagttcgcactcccaccctacacccctaatcttgcccattgtgtctctccctgggtctccggcacga

SEQ ID NO: 478840 - DNA, 122 bp, Homo sapiens
tgtcccgctgagcagtgggtcgtccgcgtctgggctgcgggcttccaggcgggcgcctgccgaggccctgtccccggatcccgagtccctggctggcccgcagtcttcttccactgcaccgg

SEQ ID NO: 478841 - DNA, 122 bp, Homo sapiens
ataagaagcaatattctcaccaggctgttgatactgtttgagaaatttacatcaaaacagcgtcagcggtggtgctaacaagcgcagtgtcaacgagatccgccaggtctgtcagttgatgt

SEQ ID NO: 478842 - DNA, 122 bp, Homo sapiens
cttctgtgtcccctgagtctgctgtttacctcattgggcctgtgatgttaacatttcgtgcgactgctttttcttcaaaggagttcagttctcaccatggagtgagtggcctttagcgtcat

SEQ ID NO: 478843 - DNA, 122 bp, Homo sapiens
aggtcgcagcccacgcccagctgcgggagggcctgtcgagtccccgatcaggaaggcccacgtccagatgccttggagatgccccgggttttcatcttggaggcatctcagatgtaaaatgg

SEQ ID NO: 478844 - DNA, 122 bp, Homo sapiens
ttcccttgccccttaagagccaatcggagaatcataggatctgacatcctgtggctcagccgggtctaagagctcatgagtcaccctgtgtgctttgctgatgaggaaaccgaggcccagag

SEQ ID NO: 478845 - DNA, 122 bp, Homo sapiens
ataaaagccagtcaagcaacaagagttcatctgggcagtacagaatcatgaaactgggcccgtggctgtagccaggctggtgtggggtgagacacatcctggaagcaggtgtgatatgtcag

SEQ ID NO: 478846 - DNA, 122 bp, Homo sapiens
ttgtccactcatgccgccagtgatggtgctgactaagcaagtttgcagctgtggagccagcgcttcgcataccaatctcgtcttccaggctctagggcatagacaactggaggtggacaggt

SEQ ID NO: 478847 - DNA, 122 bp, Homo sapiens
gcatagagtcatgtgagggagctgtggcaaggagggccaagggttccccacattcatgatcgttactgtttacatggatcccatctcttgagtccatggagggacagcatgtgtgagccagc

SEQ ID NO: 478848 - DNA, 122 bp, Homo sapiens
tgccggccccggctcagctgtggcagaagtcagtcacctgtggagttatggaagtccaggcggccaccccaggccggggcctcattccgttaagtagggccaggtgtctgtcctctcacgcg

SEQ ID NO: 478849 - DNA, 122 bp, Homo sapiens
aaactgtcttaaccaagtagaagattggtagttacagtggaatcgtcagggagtacagggcggccaccactggagggagctgaggccctggaaaaggagtctgattctctgcaattctctct

SEQ ID NO: 478850 - DNA, 122 bp, Homo sapiens
attcagctggcgggcggggtcaggcccgagcctggggccccgagagccgcagtggctaggcggcaggagtaagtgggaccatctgctccactcctcggaggtcagcgctttgtgtcagactc

SEQ ID NO: 478851 - DNA, 122 bp, Homo sapiens
cacttgtccgcatgccagctccacccgggcggacccacacatggtaggaacgtgagggggcgggcctgttccggcgcctctgggccaatcgccaggtggaaggcactcagccaatggcagag

SEQ ID NO: 478852 - DNA, 122 bp, Homo sapiens
gcggacagacggggtgcagctcacaagcgacgcctgggagctcctcgtgtccggatgtcgcgtcccacctggagccccctgcctcggacgctcagtagccaggtccaagaatggccgggatg

SEQ ID NO: 478853 - DNA, 122 bp, Homo sapiens
cacacacaaggcccatatcatcagaaacctaagctcctcctcacctcgtgcccaggtacacgtggcccctctgcaactcctcaagtctccagcctcaggcactaagtatgaaaggaatgacc

SEQ ID NO: 478854 - DNA, 122 bp, Homo sapiens
tggtttgcaagaatgtgtatgagtttcatcttagctttcaagcattcaactgagttcatacgtggaggttcaaatcactaggcacacaatgtttgccactcattgtgtcctgaaaggtttgg

SEQ ID NO: 478855 - DNA, 122 bp, Homo sapiens
gtggtgtgggcagaggtgagacagtctcttggagactcaggtggtggaatttccaggactcggtgcccgcaggctaaggagttgcagagggagaaaggaaggagggcccccagccagcagag

SEQ ID NO: 478856 - DNA, 122 bp, Homo sapiens
tcactcctgtgtcagtcacaggcaattagggctaatggctcaacatgtctttatgtagggcgtgtgtgagggttactgttctcggggattgggcacttcctgtttccaggcagctggaaaac

SEQ ID NO: 478857 - DNA, 122 bp, Homo sapiens
cttcccgtccgggcccgccccggctcgccccgccccggtctcggccacgccctcaggacacgccccctcggggctcgccccgcccctgcccttaaaggtacagctcccggggagcttcgtag

SEQ ID NO: 478858 - DNA, 122 bp, Homo sapiens
gatgtgttgttttaattctaacaaccctatatgtaattccacttttcaggtgagaaaaaccgtagcctcagagagatcacggtaccctgccagaggttgtagaacttgttggaaacttggat

SEQ ID NO: 478859 - DNA, 122 bp, Homo sapiens
tcctagtccatttgattttgttttgcttttaagatcacgaagctggtgtacacttccgtgcgagcttagagtggtaatgaactccacaatacactgaaaagagcttgaggagacagcagatg

SEQ ID NO: 478860 - DNA, 122 bp, Homo sapiens
tcccagacggggcggccggacagaggcgcccacttcccaggcggggcggctgggcagagacgcccctcacctcccagatggggtggcagccggacagaggcactcctcacttcccagatggg

SEQ ID NO: 478861 - DNA, 122 bp, Homo sapiens
gggtgctgccccgcctggccgtcgtcaccgagcgtgtcagtcacccgctctcgatttcgccgcagaattacctgctcaaagagccaccccaagaagccctcagctccgaggtcttcccgccc

SEQ ID NO: 478862 - DNA, 122 bp, Homo sapiens
ctgcccctcctcaccgatcaccatcccggagcttcctgaactgggtaccgatgatgcaggcgaggagtgggcccacgcggcctttgcgcttcagaggctcggacacgccgcccatccagatg

SEQ ID NO: 478863 - DNA, 122 bp, Homo sapiens
gtcagagcagggactgctagaccgggctgcggaggggctggcaggtgacagagtcagctccgtgaggggtgagcaggctgaaggggctggcagcacggctggcctctccccggtctccactg

SEQ ID NO: 478864 - DNA, 122 bp, Homo sapiens
ggctggctcctgagccgctccagcaggtcgatagcaaaacaaacgcactattgaccgccgcgcgcactaaatcctcccggcagacaagatgatgtgagcccgaatcgaatcgactgctgaac

SEQ ID NO: 478865 - DNA, 122 bp, Homo sapiens
gcctttataattctcacaaacacacaaataatccaacagcaaattctgatgtatgtgtgacgcaggagggaaaattcatagtaggagcaaagaattatctttagtccttgctggtacaacca

SEQ ID NO: 478866 - DNA, 122 bp, Homo sapiens
gaccatcctggccaacatggcgaaaccccatctctactaaaaatacaaaaattagctgggcgtggtggcacgcaccagctattcataaggctgaggcagagaatccaggagaatcacttgaa

SEQ ID NO: 478867 - DNA, 122 bp, Homo sapiens
gggagggaaaaacgttcaggggagatgctggcagcggtgattgaagcgggtggtaatgagcggctgcacatgaactgcagggaagtgaaataatccataagcacgtttttaaccgaggacgg

SEQ ID NO: 478868 - DNA, 122 bp, Homo sapiens
aggaggaactgccaacccagggcccagcctggcttctcccctgtgcccaactcttcccttcgctattcacagagtagggaggggatgacagctctcttggagactcagagccagatttctgg

SEQ ID NO: 478869 - DNA, 122 bp, Homo sapiens
aattcaaatggccagtagggggcgcactcggaagtggccgccccgcatgaggcagttcagcggccccgagagtccggggagggaggtttattctccgcctgcacgagactgtgaaatccgca

SEQ ID NO: 478870 - DNA, 122 bp, Homo sapiens
cgtcggaagagggcgtgagcataattggctcctgtaggcggagcctggctgggtgagaaacgaggctattttattatcgtgtactccgtcattatttatcttttttttttttttttgaaaca

SEQ ID NO: 478871 - DNA, 122 bp, Homo sapiens
ttttttcaggacccattggatcctcaaaactccccgaattttgatactttcccagccgggcgctgattcgtcacggcgaagagggccgaggaggcccgacctaacacagaataggcctgggt

SEQ ID NO: 478872 - DNA, 122 bp, Homo sapiens
actggctgtctgaatgcatctgatagttttaagttaggtgttagtgaggtggagagttttcgtgttccaattttgaccactttctggtggagcatgaaaatgtggtgagtaaacaagtatag

SEQ ID NO: 478873 - DNA, 122 bp, Homo sapiens
ggacactgcactcactgcctctcctctgtctctttctgtccagtcgtgccaagcggacctcgtgaaggacaacggccacaagtacttcctgtcggtcctggcggacccctacatgccagtaa

SEQ ID NO: 478874 - DNA, 122 bp, Homo sapiens
acattccagttaaaaatatacttgtaaaaattgttcaggatgcacttaaatttcattgaccggtgcaataggttgttggaatgattaggccgcttttaccagctctataaaacaagtgctac

SEQ ID NO: 478875 - DNA, 122 bp, Homo sapiens
cacccttccttagagctagccagggagattccgccttccagggacaaggaccgatcggagcgggcccagcatctccatggcgactctgcaaacctggcgttcaaggccgcgcgcgctggtcc

SEQ ID NO: 478876 - DNA, 122 bp, Homo sapiens
ccaactcccagttttcaggaacacccagaaaacctcctgccgccttccccgggactgggacgcgacccctccagcgtagccctcgccacccccaagaccaaccgactcgaaacatccctaaa

SEQ ID NO: 478877 - DNA, 122 bp, Homo sapiens
tcctgctccgctgactagaaacagtaggacgacactctcccgactggaggagagcgcttgcgctcgcactcagttggcgcccgccctcctgctttttctctagccgccctttcctctttctt

SEQ ID NO: 478878 - DNA, 122 bp, Homo sapiens
gacgacgcgaataccaacagactggacgagtcggtgactacagtttgcattaagaggcggcgccttttgggtttcggagggttccactggaacccacgagggtcaggaacaccgacgcgcgg

SEQ ID NO: 478879 - DNA, 122 bp, Homo sapiens
ctgcgagacgaggacacgccagctacgatccctcgggaagtagagatggaaatcattaggcgcattaacccagacctgaccgtggaaaatgtcatgcggcacaccgcgctcatgaagaaact

SEQ ID NO: 478880 - DNA, 122 bp, Homo sapiens
cctaggggctgaatttaatgggccctgtgatgcaagagattataagtactggctgtttaccgccctccttcagcctggaggatggtcctcctggtagagagcctctcccaggtgggtgctga

SEQ ID NO: 478881 - DNA, 122 bp, Homo sapiens
aagtggaccgtggcaactgggggctgaatgagagccaatcttgtggatacaggtcacacacgcatgagtgtgtgtcgctttatttttgtaaggtccagtgaggccagaaaaagttttatacc

SEQ ID NO: 478882 - DNA, 122 bp, Homo sapiens
gtgccaagtgaaaactacatttcccacggggcagcgggtcacgtcacagaggaacgactacgcatgcgtgcaaggtcctccgcgcgcgactacgctcataaaaggaaaaaaaagcgtgtgcg

SEQ ID NO: 478883 - DNA, 122 bp, Homo sapiens
ttaggaggccctattctaagtgcttgctaagattatctcatttaatcctcacaacacttccgctatgtagcaggtgctgttattatctccgtgatggggaaactgaagcacagagagggtta

SEQ ID NO: 478884 - DNA, 122 bp, Homo sapiens
ttgcccactgcacttcctgcctcgaggctatggctggggtgggattctggcccttgtaggcggcctgggtccagtctccgccatgcactcactaactccattactgctaatgggatgtcatc

SEQ ID NO: 478885 - DNA, 122 bp, Homo sapiens
cggagacgggacgtttgctttgttggccgaactcttcggctgctggggatttccttcaaacgccattaacttctcacactcagcagccactcgggagttgggaaacaatctcctggggtttg

SEQ ID NO: 478886 - DNA, 122 bp, Homo sapiens
cccccgagctgtccctggaccgccctctagaccgcctcccgccccctgcatcctgggaatcgtagtcccaatcctgctctggaactagcagtgcggcctgctcgggccagctccgcctctat

SEQ ID NO: 478887 - DNA, 122 bp, Homo sapiens
aaacaaggtaatgaggagtccataatagccagagaaaagtgctggaaaagtgacccaagacggcttcctggacagggaggcaattgaacagaaccagaattcaggactaagtaaagccgttg

SEQ ID NO: 478888 - DNA, 122 bp, Homo sapiens
ttacttgacaattgcttgaaagagttaggctttgtctaaaacacgtgaagtcagtggaaacgaatgcttgagttaagataagggtgtctgctacctgtcatgcaatgccatacctgagtcag

SEQ ID NO: 478889 - DNA, 122 bp, Homo sapiens
cgtgtcacagccgaaggggcagggcggcagcagcaggcgtctaagtaacttcagcgcctgcgcagaggctccccagcgtcgccctaggctgggactctagtaggtcttcggctcagttttgg

SEQ ID NO: 478890 - DNA, 122 bp, Homo sapiens
agtcaggaggagtaccagaagagggaataccagaagagttttcctgcttctggggaaatccggttgtcacaatgaagctaatgcctataggggggagaggaggaaaaaagctatctgaggga

SEQ ID NO: 478891 - DNA, 122 bp, Homo sapiens
ggcgcagtctgggcgggggcggtctaggagacgggggcggtacgggaggcggggctgcgccgggttccgtgtgtctatgtcaatgtgtctgtccttcactcctccattgtctgccgccactg

SEQ ID NO: 478892 - DNA, 122 bp, Homo sapiens
cgagtatcagaaaatcgtggtttcatacttggtattaatgcccctcttggcttcttggcccggctccacaatccacggtagattggccagagtcttttgctcagatgggtcgatctgcttta

SEQ ID NO: 478893 - DNA, 122 bp, Homo sapiens
agtagtataaactcttttggggagctctcattttcccaattcatgatgactcacttatttcgcactcctaaaaaaatgtaagataggaaagcaatcaatgtttgtttattgaatactcttac

SEQ ID NO: 478894 - DNA, 122 bp, Homo sapiens
ttgtctgcgactcgtcctgctacattaccaaatgcccaggtgattcagatgcagggactccgactacattctgagaaaccatgttccagaatccaggccatgtctgtaaccctgcacccagc

SEQ ID NO: 478895 - DNA, 122 bp, Homo sapiens
gagggttgcagagccccttggtgtacccagcagaggaacgcctcagactttgttgggaaacgaatggctctgaaagttagctgaagccgctggaatagccccccagccccgaggcggggcag

SEQ ID NO: 478896 - DNA, 122 bp, Homo sapiens
cggttcgcctggggtcgcgcacgttgtcggagtcccagcggataccgcctgccggggccgcgccccgctctgcccacgccccgcgctggacaggatggatttccgctcgatgcagggagggg

SEQ ID NO: 478897 - DNA, 122 bp, Homo sapiens
tcttagggggctgcagccgtctgtggatgatgttggagacctttcccttgtccctaatcccgtattttgaaggtctgtgacacgggtgaattgggtggttgatgtaaacacagaacaaggcc

SEQ ID NO: 478898 - DNA, 122 bp, Homo sapiens
cagtagcttcaaccccgggtagcctgcggaggccgggccgccacactcctgccactggagcgcggggccaatggggagccttcaagagccacaaccgaggccctcagccaatcagcgccgag

SEQ ID NO: 478899 - DNA, 122 bp, Homo sapiens
tcccccactccaggtgattcttaggatctgtaagtttgggaaacagcccaagccctgaggcgacgcagcctctccctgggcctttcatggccagccggcgctgtccccagagcccctggggt

SEQ ID NO: 478900 - DNA, 122 bp, Homo sapiens
gctggtgctggggtcggtgttcatgatcctgctgatcatcgtgtactgggacagcgcaggcgccgcgcacttctacttgcacacgtccttctctaggccgcacacggggccgccgctgccca

SEQ ID NO: 478901 - DNA, 122 bp, Homo sapiens
aaaggcctctgatctgaaggtctgagttggttgagacgacaccagaaggtgaggaggagacgtaagaggtggtccgcaggcaggagaccctgaacgaagcctctcgtgatggtgccctggag

SEQ ID NO: 478902 - DNA, 122 bp, Homo sapiens
agcccccagccagggcgttggggagggcggtggccatggccagtcacgtggacctgctgacggagctgcagctgctggagaaggtgcccacgctggagcggctgcgggctgcccagaagcgc

SEQ ID NO: 478903 - DNA, 122 bp, Homo sapiens
ccaggaaatgagcagagacccagctccagtgattcagagtgaaacggcgctgaggactgacgatgtggggccgggtcctcttcccccgagcctgaggggctgcagctggggatagggggccc

SEQ ID NO: 478904 - DNA, 122 bp, Homo sapiens
gctgtccctcaaaccaacggttcctggtggcgtcgtagaagtacagatcgttgaagaactcgcccgacaggctctcctcctcttcctcgtcacagacacccccgaagaacagtgtctggtga

SEQ ID NO: 478905 - DNA, 122 bp, Homo sapiens
gcgtcagctgaaaatgaagcctgtgctgtgcggagcgtcgcctgcccctcacaagcatggcgtctgcagaaggtgctgtgcggccgctgcggggcggccagctgcccttcacaaacatggcg

SEQ ID NO: 478906 - DNA, 122 bp, Homo sapiens
caccctgcactctgctgactgtaccggacgccacacgtggctggcggcgacaaggcgccccgatccctacctgagggaaaccccggccactgcagctgcacttgagcagggtccctccactc

SEQ ID NO: 478907 - DNA, 122 bp, Homo sapiens
aggatgattgctcatcaacctggtcgtaccctgacttccagggtccttgggtgcaacatccggagctagtccagagtaccgccaatggccttgtcacacatacacagcaaatgtgcaaagac

SEQ ID NO: 478908 - DNA, 122 bp, Homo sapiens
ctgttaagaagaggtttcctccacatggaacaggcttggcccgcatgctggaatcagctgcgccgggcgtgagggtttccaggcttcccaggctgttccagtcaattctacttccacccttg

SEQ ID NO: 478909 - DNA, 122 bp, Homo sapiens
aaataggtataattagaaacaacagcatcccaccaccagttaataaagtggtcatgtctacggaaaaaaaaaaaaccttaggtttttaataaagtggttattatcaatcattttaattaaag

SEQ ID NO: 478910 - DNA, 122 bp, Homo sapiens
tctacagtggttgcacaaatggggtgtggatgctgaagttctgccagagtctagcagggccggggtcatcatgatgacctggatgttgcagtaaggaagataaatcctggcaagaaaccgca

SEQ ID NO: 478911 - DNA, 122 bp, Homo sapiens
cccacccgccgggcccctgctcaccgatgttgtagatggcggctgagggggaacctgaaccgttggggaagtcctcggcggccggcacgtcccaggccaggctgtggtcccacttgatgagt

SEQ ID NO: 478912 - DNA, 122 bp, Homo sapiens
ctgtagccactgggcagctgcgagaggtagttttcctccttttctctaagcaaccatttccgcttccgctggcggggtctcctccgtgagctccgggcctgtttgcctgctgaagtagagtc

SEQ ID NO: 478913 - DNA, 122 bp, Homo sapiens
cggcgctgccgggggccttgctgaaggcaggggcagggtcagagtcctgggcctccacctcgcccgcgccaccacagacggcctccacctccattctcgcgcctcctcttcccgccacccga

SEQ ID NO: 478914 - DNA, 122 bp, Homo sapiens
ccctggcgctgggcagggccttgggggctctgtgctgtgctgggcattagccctggatggcggagaggccagaggttcccagtcctgccacgaggctggttggggcagcaggtgtgagcctt

SEQ ID NO: 478915 - DNA, 122 bp, Homo sapiens
actgcatgttttatgacatgctaacagagtcaccttcaactcaaaacacagcatcctctgcgtgtctcctgtctgctgggtactggagcaggcgtgggggatctgagcttgctcagctcctg

SEQ ID NO: 478916 - DNA, 122 bp, Homo sapiens
caaaagaagcttcgtccccttctcccttgcccttaaaattccaactgatgccataggaagcgtagcctgtctcaagagtttcgcgaatgctagcgaacgggaaatgcacgaatttccagagc

SEQ ID NO: 478917 - DNA, 122 bp, Homo sapiens
cgtgggggcaccggaggcccagaggaggagtattggatgcctgacggtgtttacaccccacgtcctgctccaaccagcagtttggggagaggttgttgttcatgtccattccggccccactg

SEQ ID NO: 478918 - DNA, 122 bp, Homo sapiens
agatagctaactagatgagtgatagacccttctagtcctctgggaagggagccgtgtgtccgtggggagccggctgggctcgcagcacatggctctggaacctgagccgtgattccttcgac

SEQ ID NO: 478919 - DNA, 122 bp, Homo sapiens
cctgtgccgggcaggggcaccctcacgcgtttccttcccgaaccagattgtgaatgggtccggggctaggcactggatcttggtctcgtgtgtcctggctgtggcctggcccgaggaggcat

SEQ ID NO: 478920 - DNA, 122 bp, Homo sapiens
tttgctgcattctggggtcacgtgatgcagccgggcgctgtggatggccttttcttccctcgcccactgactcactgcatgcttgcttgcaatcacatgggctccctgggcctcagctcccc

SEQ ID NO: 478921 - DNA, 122 bp, Homo sapiens
agggtgcctttttgaataaacattgaattccaaccctagtgccctgggttgtgtagtttgcgttttgaaatcaagaatgtctgtgaactgagggaaaaataccaacacactattagcagaaa

SEQ ID NO: 478922 - DNA, 122 bp, Homo sapiens
agccgtgcgcgctggatggggactcagaatctgcagcatgttgacagcaggattacccttcggagccgcgagcgctggatggggactcagaatccgcagcatgttgacagcaggattaccct

SEQ ID NO: 478923 - DNA, 122 bp, Homo sapiens
aggctaggaaaggctgggccacaagaggacaaccccagggacagccagctcttgggacagcggctcccactaccaggagaggggaacttcctcaggtcttgcagagctgagattcccggggc

SEQ ID NO: 478924 - DNA, 122 bp, Homo sapiens
ttgatatttttctgacctgcgggagactctttgtgactcagtttgtttgactcataaacccgcaggccactggtttgaaacctaagccactaccagagctgattacaacctctgggagagcc

SEQ ID NO: 478925 - DNA, 122 bp, Homo sapiens
tcataagcctcacgtgacctgccgcgtagggagggcacgaacagaaaggtgctgcgcatgcgtattgaaaaacctcacctactctcgcgggtcctcagcgttctcctgcggaacctttgaac

SEQ ID NO: 478926 - DNA, 122 bp, Homo sapiens
aaccggtggagaaaagctggctgaagcccactaagcccgttcaagtcccctgacagaggccgaagcgcatcttcgcggacaagaaccgttcaacacagaaaccccagaatcgcttcctcctc

SEQ ID NO: 478927 - DNA, 122 bp, Homo sapiens
tttctgtgacactcaacccagacactttggtaatgctgttccctctccacaccacaaaagcgcaaagagcccttgctgagcaccaggaggcagtggtgttctctgtgtgcacacatattctg

SEQ ID NO: 478928 - DNA, 122 bp, Homo sapiens
tccaccgtcattggtccggggccccgcagtaaccaggggaactgcaaacagtgtagaggccgcttccggttcgagctcccggaaccgccgcctctagggatggacggtgagtgtctgtgggc

SEQ ID NO: 478929 - DNA, 122 bp, Homo sapiens
cgcaagggcggggtcgccgacggctatccgagggaggagcaccgcctctcctcttggttccgtcccttcgtacgtaaaccccgcccctcagaaggactccggcgtgtcataggcgaaggcct

SEQ ID NO: 478930 - DNA, 122 bp, Homo sapiens
gcctcccctgtggggcggggccatccccttgagggaggggcccgcggcacggaaggtgggcggaaggacaagcctttcagcctcgtctgaaacagcagcctcaggtggatgcggggacctca

SEQ ID NO: 478931 - DNA, 122 bp, Homo sapiens
aagtcatctgcgttgtgctcagctgccgccgccacacaacagcaccagaagagctcccgccgggtgtgctcacaccacacgctctcactgcacacatgctgggttggtgccccgtccgctga

SEQ ID NO: 478932 - DNA, 122 bp, Homo sapiens
tgtgactgtccctatcttaaggggaagttgaaagtgggggcgggggtgctcaatgagaaacgttgccttgtgtgtagttgtttggagcacactgcaaattatattggcatctctttccaaaa

SEQ ID NO: 478933 - DNA, 122 bp, Homo sapiens
caactagcagtgacggacacaaactcgatatataactgggaatcctgatgggcttcaaaccgcctggtttccaccacccccttcccttagggaagcctcctgggccacaccctaggccaccc

SEQ ID NO: 478934 - DNA, 122 bp, Homo sapiens
cttagtgtctttcattaaccaaggcgcttggcggagttgagcccaagtcccattgcctcccggttcccctgtaaggaaagcaggaaaacctgcccaagccggtggggctgcgaggtggccgc

SEQ ID NO: 478935 - DNA, 122 bp, Homo sapiens
gaggagttgggggaacgaggaggggccgtgtcgggggggagccagcgagtcgtgcgctgccgtctctaagtcgccggtgccagccgggtgtgcagcgccgcgctcccgcgggaggacggccc

SEQ ID NO: 478936 - DNA, 122 bp, Homo sapiens
acacagagtaattatttccatctaaggacagatgcacagaccatgggattctgaacctggcgtggttgctgctctgcctcctgagaagtccagggttaccttacctcacctcttagaccttc

SEQ ID NO: 478937 - DNA, 122 bp, Homo sapiens
cccaccccacggcccatcaactgctggtggacaaacaccctgaggtcgaccacgcgtaggcgcagagtggacggaagccctgaccggcccggcccggggaccctggaaaacctggtgctcgg

SEQ ID NO: 478938 - DNA, 122 bp, Homo sapiens
actaggtaaatgacagtcacagcggattccaggggttgtgtccacgatcccggggggcgtcggctttgagcagcctcaaggggagggttttgtctggctccttgcttcctctcgcgccgagc

SEQ ID NO: 478939 - DNA, 122 bp, Homo sapiens
cacctgagcagttcatcagagagaagagaccagacgcagagcgcctcacagaatgccccgcggctccactgcttccatgaaatctgttcaaaatattgcttgtggctttccacaaactaatt

SEQ ID NO: 478940 - DNA, 122 bp, Homo sapiens
gccttgaaactccacgtagggaggaggcagtggcctgtttgaatctggccggcacagtcccgctccagggaccctgcggacccagcccattccatcagccaccaccagtaggagcgctccgc

SEQ ID NO: 478941 - DNA, 122 bp, Homo sapiens
cagcgcctgagctcctcgggctggagtctgaatgggcgccctatggctgggcgctgcggccgagctgcgcctgggaaggagcccagacaagattccctttcagcccgggtgggccgccgccc

SEQ ID NO: 478942 - DNA, 122 bp, Homo sapiens
gcacgcccgtgggcgtcacgaagatgcccgagctcatgatggcgaccacgatgacggccacgcccttgagtagcgtgatgttcccctgcagggtcacgccctcgccctcgcctgccggcgcc

SEQ ID NO: 478943 - DNA, 122 bp, Homo sapiens
ctgcgccgcaaggcactgtggggtatgtaggccagagtcatttctcctgaggcgactctccgcgtcgggactacaattcccaggacgcaccgcgcgacaactcttcgcgcgcgcctgagagg

SEQ ID NO: 478944 - DNA, 122 bp, Homo sapiens
aatcgccacaggcaaaggttatttcaatgcacaaatctcccaaagtgtggatcaagtcgccgaaataattaatttaattctggctattagcttctttagccggctgggatccccactggtat

SEQ ID NO: 478945 - DNA, 122 bp, Homo sapiens
gggtcccagggagacccagtttcagttatccttgatgatgctgagaggcattcagcaccacgaacatgttgttcaaacataaatgagaaaataaagtatctgaacaatcttcatgaggtttt

SEQ ID NO: 478946 - DNA, 122 bp, Homo sapiens
ggtgtgacccactgcacatagcctacactactttcttagacaaattctgttaaatcccaacgacctcctggagaaaggctcataggtttggaagcattactctggattagatgctgggaatg

SEQ ID NO: 478947 - DNA, 122 bp, Homo sapiens
ttccaggcaaaggaacaattagtgcaaaaacccagagggagagacaagcttcacttctcccgagaacagagagaggcttgcgtgtctggagggtatatattgagagtatctttttccaccgc

SEQ ID NO: 478948 - DNA, 122 bp, Homo sapiens
gaggccatcgtggtccctctgaataaacgatgcttcacagaagtctcccctttcaaaacacgtacagcgaatgactcgggcttcagagccaccctggggtgccgtcggctggtgggtgatgg

SEQ ID NO: 478949 - DNA, 122 bp, Homo sapiens
gtgtcagatgccaacggcctgtgtcacacacatacacgtgtgtatacgtgggcctttgcacgcctcgccaggtggtgtacatgcaggccttggcacgcctcgcccagtgcccgccccaggcc

SEQ ID NO: 478950 - DNA, 122 bp, Homo sapiens
acctgcctggttcttcttcccagcccttcccctccagcacccggcaaggcccagtcaacacgagcaaactcggaaatcctggctgaacccacgaccgctgcatatttccattttagaaaaac

SEQ ID NO: 478951 - DNA, 122 bp, Homo sapiens
ctcggaggagggtggaaggccaagatccctaggtcctggagcagggagccgggcccacgccgccgaggtatcttttccgtccgggccaccgtcgcgggggctcactggcagcggcttctgcg

SEQ ID NO: 478952 - DNA, 122 bp, Homo sapiens
gcccggaagccgccctccatacaggccctcagggggcctgccttctgcgcctcagtcccccgtgcatccctgggcctgggtatcacatgctctccaggaaagggacggaatcaatcctgtga

SEQ ID NO: 478953 - DNA, 122 bp, Homo sapiens
tcgcctcttcccagcggcctctgcgggagcggtgggtgttgtacacaatcatcatggcggcggccggggccccggatggtgagtgcggcgggggtggcgggcgccgggccggggctgaggtt

SEQ ID NO: 478954 - DNA, 122 bp, Homo sapiens
aagtgtttaacttgaccttgggaaaatcaggtcgattctctaggctaatatgtggtagagcgtgcatttgaaccaaggttcgtaaataccaaagtgcctggtttttccactacattagtgat

SEQ ID NO: 478955 - DNA, 122 bp, Homo sapiens
actcttgtgttacagaggctcgaatgaagcctggcttctacagtaccgcacccagcacctcgctgcgatgcagcctcctgtaccctttccgtccggcagctggagttagggcagagtgccgg

SEQ ID NO: 478956 - DNA, 122 bp, Homo sapiens
tggatccttcagacgtggaaaagggggtgattgctctgaaagttccagtttgggtgctagcgaccggcctccaggcatctaggaagtcggacagcacagtgctggggaccttccatagaaac

SEQ ID NO: 478957 - DNA, 122 bp, Homo sapiens
gatctctgctgaccagcgtgcagggctgtttttctgagaacatcctttccccctaatgaccgaggccagcaaatcatcctcatgggatgctccagaatttgtagctcccttaggaaaacacc

SEQ ID NO: 478958 - DNA, 122 bp, Homo sapiens
ttattctaagtgcagttttaaaaaatagattttgttaatgaaaattaagtctatcctttgcggagttccagaggcacttccagaaacctctgttggaaagcattgtttacccaagctcgcat

SEQ ID NO: 478959 - DNA, 122 bp, Homo sapiens
ctgctttcagagtggaggttatgatctcaattctgttggccctgccaaacatcacattcacgtcatcatgcttggactgtttgtcttctcattgatattcggccagttcctgcagagcagtg

SEQ ID NO: 478960 - DNA, 122 bp, Homo sapiens
ccgaggtgagcaggccggccagggctccctgacctctaacaatttccatcctgaggcaggcggagcgtgggtcccggacgactggcagagggagtgacagccatcgccaggactgttagcca

SEQ ID NO: 478961 - DNA, 122 bp, Homo sapiens
agcccattcaaacgcgcagccccccgcccccggctcgccccccactccccgccggccgcccgcatctgggcgcgcagaggaacagatttcgcgtttcacacagcgcacaatggccgccctca

SEQ ID NO: 478962 - DNA, 122 bp, Homo sapiens
aacatggatggcctcacatggagctgccttcgctcagatcccagtgccatccctgctccacggtggaagcttggacaacctcacttggccctagcatccttacctgtgaagcaagaggcacg

SEQ ID NO: 478963 - DNA, 122 bp, Homo sapiens
caggaatagaaaaggacagagaagcctccaaaagtctaagcttgcatggcagccgcggctcgctcgccctccccccaccccccaccccccaaacaaaaatataccaccacttaaagaggtcc

SEQ ID NO: 478964 - DNA, 122 bp, Homo sapiens
gtagccctggttaagaagcaatggtttaagccgggtgcggtttccagcactttgagaggccgaggcaggcagatcactagaactcagaagtttgagaccaggctgtgcaacacagggagacc

SEQ ID NO: 478965 - DNA, 122 bp, Homo sapiens
tccgacggaacaaaactgacattccagttttgtgttggactcgaaagccaactattttcacgccattcattccctcacagtgtctatgggggccaggtcctacagggcgctggagacacgaa

SEQ ID NO: 478966 - DNA, 122 bp, Homo sapiens
gagtggaaattagggacccgagctcactggtgacgtagatctcatgtgaccaggagtcgacgtgtgcagaagtcctggtaatctggtccttgttcccgtctggataccagcttccttcagca

SEQ ID NO: 478967 - DNA, 122 bp, Homo sapiens
cctaacaaatcttaagagtctgatgagtccattcctttcccttggaacgtctggcccttgcgttgacccctcggcttccatggtcacaactagctctggttctcctggccccttcctatccc

SEQ ID NO: 478968 - DNA, 122 bp, Homo sapiens
catttctttgcggagcattctgccactgaccacgtggtaacgccaactacgccagagaaacgctcgccctacccaagttgtgcccagccttgcctggccattttggccgaagaacgaaggac

SEQ ID NO: 478969 - DNA, 122 bp, Homo sapiens
gtgaagggatgtgcgggggggcaggcggccgagcggggtgggggcggctctgcccttcctcgcccccttccaggtgcctagacttgggaaggagagggatgccgccaagctcgggtcctgca

SEQ ID NO: 478970 - DNA, 122 bp, Homo sapiens
ggctgcggcctcgggagacatggggacacttggggccgcgtccacagtgagacagggagacgctgctgcagcttcgggacacctggggccgcccaggcgaagatgaggaaaaagcttcctgt

SEQ ID NO: 478971 - DNA, 122 bp, Homo sapiens
atggggcgattgcgcgcccaaatagctggcccagggtgctttggccgccggagcgggttgcgagtacacttgaggcctggtgccttccagtttttaagttttaaatgtttataatcgaaaat

SEQ ID NO: 478972 - DNA, 122 bp, Homo sapiens
atcaatcaatacacataagctgtacattggttacgcctagaaaggcggaaccaccggaagcggggatgcttccaggtcataggtggattcgaagattttctgattggccgttggttgaaaga

SEQ ID NO: 478973 - DNA, 122 bp, Homo sapiens
ccaagactgggagcgggcgcccagccttgcagggacacgcaggcggactcgaggagcaaacggccagtgagaacgattcaagggactcacccactcctcgccgtagcttgaccgtgagtctc

SEQ ID NO: 478974 - DNA, 122 bp, Homo sapiens
agtgattccatccgaagactacacaagacgacagaaagccccagcgagtgagccagccgccggacaacagcaatgtccttcctgactatcgcggagctggcggtcagcagccccttagctcc

SEQ ID NO: 478975 - DNA, 122 bp, Homo sapiens
tgcaaacacggccaggtggttctgttcaaagacataaacaccgtgagcgcgcaccccctgcgtggaggaggcagcgccacgtcggcaccctgcagaaagcaccgcgggacggcggccaactt

SEQ ID NO: 478976 - DNA, 122 bp, Homo sapiens
ccatttccggtactagcaaatcctcctgtatgtccccactggaagagtccggtgggaaaccgtgccaccgcaaggaaggagccggcggtagcttggttcctgagcggatgctggggctgtaa

SEQ ID NO: 478977 - DNA, 122 bp, Homo sapiens
ttttacctaactggctggaggcccgccagaggccacaagaaccctccagccctaagtctgcgaagttgctgatgtcacgtcctttcccaaactgagaccaatcagtgaggaagccttggagt

SEQ ID NO: 478978 - DNA, 122 bp, Homo sapiens
cagcagtgaagatttgatggccaccatccaccatttacatttgtctatttccagtatactcgtgtggtggtttcatcacccagttgtttttcatctctcttgcttctgcctgtttcccccgg

SEQ ID NO: 478979 - DNA, 122 bp, Homo sapiens
agcagaggatactaaaatctgccttttccctttcttggagtggtccttgaagagggctatcgggaagttcaaatttcttctgttttcctgcagagcgttcatttgaagtttgctttctacct

SEQ ID NO: 478980 - DNA, 122 bp, Homo sapiens
agtctgaaatgtgaaccttgccaggttaagtagggctccttgggaagaaagagtgaggcacgccaggagcagggctgtgtgctctgcatagcaaaggttatatatctctgtgtggagatagt

SEQ ID NO: 478981 - DNA, 122 bp, Homo sapiens
ggcagctcaccgctcgcgggacagtccggtagctaactccagtttggtcggtttcatcggcgccgggtccctacgcagaccagcggcggttgctgggcgaccagacgcgctgtccaagcgcc

SEQ ID NO: 478982 - DNA, 122 bp, Homo sapiens
cagctcttccctccaggcggtcgcttgactagaaagaggaacccgcatgtctacgggaagcgctgtgagaagccggtgctcccgctgccaacccagcccagctttgaggagggcggtgaccc

SEQ ID NO: 478983 - DNA, 122 bp, Homo sapiens
aaaagcatagtttctggaaccagactacttggatttgccctctggtctgtttcctacccacgtgtcttttttttttttttttttttttttttgagatggaggagtctcgctctgtcgcccag

SEQ ID NO: 478984 - DNA, 122 bp, Homo sapiens
gtaactactgcacaatattatatgccatgattcattgactatttttagacttccccaccccgcagtttcaagggaggaggacaagacacatgaaaagagaaaaaagcatagctgagggccag

SEQ ID NO: 478985 - DNA, 122 bp, Homo sapiens
aattcaggtgctggctcaggaaaccagaaaagatgttcccagctacggagcaagcagggccgctggtgggggtcccttttcccaagtaagggcttttgtttcatttcagccaatgcatgctt

SEQ ID NO: 478986 - DNA, 122 bp, Homo sapiens
aagaaagaactgagatttcagatgtgagtccttgaaatgaacttctgggctgatgccccgcgcccagtcgcccctgcgaggtaggccctctgtgacctaaggattcccagcagacacgtggg

SEQ ID NO: 478987 - DNA, 122 bp, Homo sapiens
ggatcctgttgtctgcagctaagaacatcctggctactgccgacaaagcaaagacaacagcgggcagggaaaagagatgtggagaagtggtaggagaggcagaaagagattcgggaagttgg

SEQ ID NO: 478988 - DNA, 122 bp, Homo sapiens
atgccccgttttaaaaagtaaattggcctctgattgctcttccataccaagtatccaagccggacatttttcttttttaaatctcttttgaaaaatttttataccatttatttattattatt

SEQ ID NO: 478989 - DNA, 122 bp, Homo sapiens
attctgattgcctccaaacataaggcaacaaaattgcactgagccataccagctgtttgtcgaaggggctctgccacagtctcccaactcccaacttttcttgtctgtcccaagaaagcctg

SEQ ID NO: 478990 - DNA, 122 bp, Homo sapiens
ctttatttaaaaagcacgccgagcccactgggaccgcggtgctgaagaggccgccgggcccgggagagactgcattctgagaaccagcccgcaagccccgaagtcggagatcgcaaggtcct

SEQ ID NO: 478991 - DNA, 122 bp, Homo sapiens
ggcacaggaaaccccgcatgtgctgcaagaggctattttgctccatggcaaatccccacccgggccagaacccagcccttgaagtttcaatgtctcacttccaatcccaaccccgggctgaa

SEQ ID NO: 478992 - DNA, 122 bp, Homo sapiens
ggccacgggtgctcccgcctagaggaggacgttcagccggtgtgggctcagagcgggggccgtgcagcagccgtgggagggtcggacgtgggctgatggcagagcaagggaatgtcggcctt

SEQ ID NO: 478993 - DNA, 122 bp, Homo sapiens
tgcaccttccacagagccgacactccccgtctctctcagctcacactcctcacccctcctcgggctgctaccctccaggaaggtgcttcccgcacctgtaggaagcttcctcccccagggag

SEQ ID NO: 478994 - DNA, 122 bp, Homo sapiens
gactgctctggtccttgctatatactcatccctaatccttaccacgtactgacctctacccgtgacctcggcataaatcctgactgtggtcaccagtgaagccctcatcataaacatagact

SEQ ID NO: 478995 - DNA, 122 bp, Homo sapiens
atgcgccgtgagacagtgctcccggcgcccccgtcccgcggacgccctccaagccggccacgtggcctccgtcgccccgcctctctgcgctcgccccaagtgccgcacttggcccacggccc

SEQ ID NO: 478996 - DNA, 122 bp, Homo sapiens
ccgccacaaatcccgacttttcctagccacgcccctgccctagtcccgcctcgcaagcttcgtctctccagtagccccgccccagagccgcttagccccgccccagagccgcttagccccgc

SEQ ID NO: 478997 - DNA, 122 bp, Homo sapiens
cactggctgggctctaacttgcagaccaagggacctggacctggacaaacgccctgggctcgcttgctgcctggaagtgaattcccatgagtttgagggcagctgtttcctccccaagcacc

SEQ ID NO: 478998 - DNA, 122 bp, Homo sapiens
tccggccctccctgatacagcaaggttgagcattcgggcactggcttcccgaactcacttcgactcaggcacagcaggcaaagattcaatgggtagggccggaccgactgcccgaccttcgc

SEQ ID NO: 478999 - DNA, 122 bp, Homo sapiens
cttagttgtggtgaattgcattcatttattttacgatcttcatgggatgaaagagtttgtcgagctgagtcttcattcagaaattcgcaaaatatagcatttgacagtgccacttaattttc

SEQ ID NO: 479000 - DNA, 122 bp, Homo sapiens
gaggctgtggttattcacctttgccactgtcttccggtgtgcccagtcacaggagctgcacggcaatgcatctgagaccatgcggtgtcaccttcacagaagtgctctggcacagagactcc

SEQ ID NO: 479001 - DNA, 122 bp, Homo sapiens
ggtttcaggatgacaggtgtgagccattgcgcccagcccctgatagatatttagactggtcgcaacccttttgcttttacaaaaatgaattaatgaatatatcctttgtgctcaggtttcag

SEQ ID NO: 479002 - DNA, 122 bp, Homo sapiens
tgtcagtgtgtccttcacaaaaccctcccaagaccactcccggggctttctagggcacctcgcagctgccaagggactcttcatccttgcagctggctgtgtgccaggcagcccgggcaggc

SEQ ID NO: 479003 - DNA, 122 bp, Homo sapiens
aagaactacttgagattacccagctggcacatggccaggcgaagattggaacaaagcctgcggagctcagaacctgtgcagttgactgtcacattatatcactcttacctcccagcgatcta

SEQ ID NO: 479004 - DNA, 122 bp, Homo sapiens
acgcctgctggagtctccaggctgttcccacggcactcagtcaccttctactcacgggtgcgctggagacacacaagtgtctcttaagttcatttaaacaaaacaatgaattgtttggagaa

SEQ ID NO: 479005 - DNA, 122 bp, Homo sapiens
gccttccccctgagtccctccttcctgcgtctggtcattcattcattcactggctcagtccggtccttcttccttcacttctcattcactcagacggctgccttattttctcggcagttagg

SEQ ID NO: 479006 - DNA, 122 bp, Homo sapiens
agatggtcagtgagcttcgcacacagcagggtggagctttcagacacagattgccctgcacgcgagccccggggccgtctccacggcagcacaagcctagacacgcgctacagcgcgagcgc

SEQ ID NO: 479007 - DNA, 122 bp, Homo sapiens
gctgtcgcagcaatcaaggtgggctccctggtggaggtggacagcagctgctggagagcccggagggcagccaggaccgtgtcagacggcaggagtcgggcggggccactccaggcaccggc

SEQ ID NO: 479008 - DNA, 122 bp, Homo sapiens
ggggctagggggcgcagtggggtgccagtgacctggaggagtgggcctctgagatgcacacgcatgaccctgaagcaactcgagaggcctgcgcgggtgggagggatgcccgggacagagga

SEQ ID NO: 479009 - DNA, 122 bp, Homo sapiens
gtcctcaagattgctccaccttcccagctcagttccaggctgtggaaacaccatcaacaccggctttgacttgagagacctggaaggtcattctgccctaaaattttgctgagccaaactca

SEQ ID NO: 479010 - DNA, 122 bp, Homo sapiens
aagaaagttacatattgattgctgttgctcgcggcatgttcgtaccagcgcgggcagaaacgggctcacgagcgccctcgaattcacacacactcaccgaaatacacatctcagcccgtgga

SEQ ID NO: 479011 - DNA, 122 bp, Homo sapiens
ggctgagctgctgctgctcctcactgaatgcctcaccagtgatgaccaggatgaggttgtcggtgtcaggagcgggagcgatgattggatggataatttttgtattttgcaaggatggccta

SEQ ID NO: 479012 - DNA, 122 bp, Homo sapiens
ctgcgcccagcctctccccagcatgtaaagtcttctgtctctcctcggagttggcggaggcggcaactttccattctcgccgccgggggccgggcagcagcgggcgcgcgggtcagcgctca

SEQ ID NO: 479013 - DNA, 122 bp, Homo sapiens
caaagagcagcgactaaggcggcagaggagcggcggcggtggcggcgctgcagcagcgggcgggactggtatggtggttccacagggcagaccccgctgcactcacagggaggaggaggcgg

SEQ ID NO: 479014 - DNA, 122 bp, Homo sapiens
ggagctcagcggacccctgaagcctggctcgccctaccggcccccagtgccacgggcccccgaccctgcctacatctatgatgagttcctgcagcagcgccggaggctggtcagcaagctgg

SEQ ID NO: 479015 - DNA, 122 bp, Homo sapiens
gccaggaacgagcaggctgccagcgggaggagtccgggagctgagcctgcccaagggacacgcgcaccgcccagatctgggagcgcggcacggggacgtgtaaacctccgtccccagggagc

SEQ ID NO: 479016 - DNA, 122 bp, Homo sapiens
tctgtatctattaaactcattaaatgccttgtgttttcctgcctgaatatcttggccatgcgatttcctatatctggacagcctttctctctctcttcactatctcctcctacacatcttcc

SEQ ID NO: 479017 - DNA, 122 bp, Homo sapiens
aaaaagcaaaaggaacacaagaacagaatgaagaaagtcaggggaattgcaaatgcctaccgagcagtgagctggagattggataacagcagagggagtaaagatctgcaatgactttatct

SEQ ID NO: 479018 - DNA, 122 bp, Homo sapiens
tcatttttcccaagaaagtgcgatgagcaacgtgcacgtggctggtggagctggggctggcgtgcaggtcttctggctccagacgtggttcagaaccccaagatcagcctggctcctcagcc

SEQ ID NO: 479019 - DNA, 122 bp, Homo sapiens
ctccagcagcagcgccgacacctcgagctgcgcgcgcgggtagcggcccaggcgcacagccggctccagcgcctcctgcagcgccagcgccagctcacgctcctcgcagccgcccgggggag

SEQ ID NO: 479020 - DNA, 122 bp, Homo sapiens
aagccttgatagagagagtgctggccagaaaagacaattattcctatgcaggtcctggggcggctgtggcaaccaggcagttagaaaaaaaaaaatcgtgaagcattcccatgagcaaacac

SEQ ID NO: 479021 - DNA, 122 bp, Homo sapiens
agagggaagggaggcagccagctttgcaggaatccggaggctcactccagctggagagaacggcacaggcagaggtcctgagacagcgggctgcctgggcatgcaaggcatagcaaggaggc

SEQ ID NO: 479022 - DNA, 122 bp, Homo sapiens
tgcattcacttaaacatttactgagggcccacagtgtgctccgcggttgctgagcaaacacgcagtttcaatgcaggatagtgagtccaaaagttcgtaacagggaaaaaacaggggcctat

SEQ ID NO: 479023 - DNA, 122 bp, Homo sapiens
gctgcctagagcgcccggaaatgccctcggcatggggcggggcttgcgggggcggggccgcgctgccgactcgggctgggcttggctcactgggcctaggcagtgcctcaagcgtgggatac

SEQ ID NO: 479024 - DNA, 122 bp, Homo sapiens
caccgcccccataagtggtggtacaaggaaaggtcagggccaccaaacctatcgcacaaccgctgaagtcagccaccctggcggccggggagcgaatgggaagcacttgacaacacctgtct

SEQ ID NO: 479025 - DNA, 122 bp, Homo sapiens
tgtgggtggttcagcctgccgcccccacctttgcagggccatggaggccggaggagtggacgataggaaaccgaccagggggcccaggatgctcgaggcccgagtgccggacagggctgagc

SEQ ID NO: 479026 - DNA, 122 bp, Homo sapiens
cctgggtgggctgtagctactgatgcacaatgaccttcccagccccaccccagcgccccccgccccagaaccaaagcccggtggtggccagcagacacaggcggcacctcggggtctggggg

SEQ ID NO: 479027 - DNA, 122 bp, Homo sapiens
gtacagccaaatcggaagggacgagcctgccctttgaaagggttttttttcttgctcctgcggagggcgccccagccatggccctcaggagctccctagaccccgcagggactgccctccat

SEQ ID NO: 479028 - DNA, 122 bp, Homo sapiens
tgtcgctgcaagaaagccgagtgacaagtttcccaaccaacgctgcctgcgaggggctctcgggcctgcatatgaacccgctcaagctggcgtggggctgagtgactgcctgggacctgcgg

SEQ ID NO: 479029 - DNA, 122 bp, Homo sapiens
ctccgctcctcactcccatggaccaacagagtagggaaaacgaaggcacgttggaaactacggatcacgggctgttttgggtgtgggaaatccacccacccacactcacggccagctctgac

SEQ ID NO: 479030 - DNA, 122 bp, Homo sapiens
agtctcccaccgcgtcctgcgctcctggttttctcctcttctagtgtcttccccacctggcgtcgcccggccgcaaccctggccctcctggggaagaggttcggaccctactctttatttga

SEQ ID NO: 479031 - DNA, 122 bp, Homo sapiens
ccctctgtttcctgatcaaggaaccttagaattatttatgggtgcaggtagtccgctgcccggaaagaggatatgagcaaggccattttaactattttgaccacctgagcgctggtacgctc

SEQ ID NO: 479032 - DNA, 122 bp, Homo sapiens
gcagaggccgggctgtggggacccaggccagcaccactcagggagcagcttggtgggccccgttcccgggtgtgagggcaggaaaactggctgaggagtcggcactagaagccttgacaggg

SEQ ID NO: 479033 - DNA, 122 bp, Homo sapiens
tcagcaatggaccttcccgccttgggagcctcttaggtattaggctatgaatcagcgccacgtgcaaaggcttgggagccaagccatgtggtcttgcaccccaggcaagaaaagtcagctgg

SEQ ID NO: 479034 - DNA, 122 bp, Homo sapiens
gggcagcctgggaagcctgggaggacggtggcttgccggtctgtcgtgaggcagtgcggacggggaccctctgggattctgctggatctgccccgggggttacctttgggggctgggacccc

SEQ ID NO: 479035 - DNA, 122 bp, Homo sapiens
gggtgagtgcgggctgggcacaagtttcgcccttgttgcccaggctggagtgcaatggcgcgatctggactcaaaacaatttttttgttcggaggggagggcatcaggttctgttcacaggg

SEQ ID NO: 479036 - DNA, 122 bp, Homo sapiens
cggcggggggtgccgggctcctgctcttgccccgggggctgctgccaggctgctgaggggcgtcgctctccggctgcaggttttgcggtggcggtggggctgggggagctggcttggtggga

SEQ ID NO: 479037 - DNA, 122 bp, Homo sapiens
cgtatcagagcgaaaggccaggtacacgaagacggggctgggatctgtctccgagttccccgcagtttccatgggagggagctcgggtaaagctgtgcaatctgcagttcttcagactgcgt

SEQ ID NO: 479038 - DNA, 122 bp, Homo sapiens
ctgagagtccaacggtggtggagagtggtgctccccggccgcctctccctcgggcatgaccggtcccagcctgggctgcagctcctgctacctcctgggccggaaccaaaaggcgctccttc

SEQ ID NO: 479039 - DNA, 122 bp, Homo sapiens
ggctgcgcagcgccagcccggccccgccccggcccccgggaccccggccccgccccaccccgcccgggccccgcccagaccccgcccagaccccgccccaccccgcacgagcagccccgtgg

SEQ ID NO: 479040 - DNA, 122 bp, Homo sapiens
acagcccgtgacccgatgactcacgtgtggctcactgtctgtctccctccctggtgggaccgtggttcctggacagctcctggatacagtcagctgggctttgttccctgggccacccagct

SEQ ID NO: 479041 - DNA, 122 bp, Homo sapiens
caagacgtccctggacctgcggcgggagatcatcgatgtgggcgggatccagaacctcatcgagctgcggaagaaacgcaagcagaagaagcgggacgctctggccgcctcgcatgagccgc

SEQ ID NO: 479042 - DNA, 122 bp, Homo sapiens
tgcctgcaaggctgactgtgactgggccgggggactcagggcatcttagcggccgcctctcgctcctgtccgtgaccttgcagatgcaggtgacagcctgcccttccgtttttgtctttcca

SEQ ID NO: 479043 - DNA, 122 bp, Homo sapiens
tgagtcccaacatgtcctgcatcatctcctgtgcccattgccaaaggaaggcgaccagagcgtgggtttcagcacagctctgattggatgataagcaaggagagtaatgtgctgctaggagg

SEQ ID NO: 479044 - DNA, 122 bp, Homo sapiens
tattcattctcactatggcaccttttctcaaatgtgcccctgaataaaatgacctttctccggagtctctgtgtattcaaattcaggacctaatcaagtcccacctccttcataattcctta

SEQ ID NO: 479045 - DNA, 122 bp, Homo sapiens
aagtcccgagaggagctcttccgtgaagtcctggaagacattcagaactcgctgctgaaccgctcccaggaatcagccccctccccggctcgcccagccaggacacagggacccggacgcgg

SEQ ID NO: 479046 - DNA, 122 bp, Homo sapiens
ggctacatcccgggctatgatactccgggctatgtgcctggctaccatggccccgggtaccgcctgcccgactacccccggcctggtcggcctgtgcccggttaccgtgggcctgtctacaa

SEQ ID NO: 479047 - DNA, 122 bp, Homo sapiens
ctcaattccgactttggccgagggcatgtttgacactgggtgtgaaatctagacagttcccgcggtcatagagatggggcagcagcattcaggcagggctcagaactgtccgggtcccatca

SEQ ID NO: 479048 - DNA, 122 bp, Homo sapiens
agcaccgcccgggccgccatggcgggcgcggcctcccgcggcggcgccgggggccggcggcggcgacgccccctcagcttgctgccgctgctcccaagccagtcaggcggcgtcggcccttc

SEQ ID NO: 479049 - DNA, 122 bp, Homo sapiens
ctcgcaccctccccggcgcgctcgctctccccgccgcgctcgggatgccgcttgctcgcccgctctccgccgccgctcgctcctcgcgcacacaatgaagctgctggcagggaagtagtgcc

SEQ ID NO: 479050 - DNA, 122 bp, Homo sapiens
gagcccaacaactatcattgctcattgccccagctgaagattcctgccctcctgggtgaacggtgcacagcacagccaccctgctatgcctgaacattgcagctgtggcctggagcccttcg

SEQ ID NO: 479051 - DNA, 122 bp, Homo sapiens
tccgcaaagtaggggccccatcccgcggtgccctgtcgcccagtggctcggccaaggaggcggccaatgaactgcagagcatccagagactggtgagtgggctggagagccagcgagccctc

SEQ ID NO: 479052 - DNA, 122 bp, Homo sapiens
caccgagcgctcggtgctggagctggtgcgccaggcgcccttcctggtcacgctgcactacgctttccagacggatgccaagctgcacctcatcctgggtgagcgcacaccacatcccaacg

SEQ ID NO: 479053 - DNA, 122 bp, Homo sapiens
agacgcacttcttcatgtcacacacatgttgtggaaaatgactgcgggggcagtgagctgcgaatgttcatgtgggagttagagccgcctggatcgtgaggtcccaggcaagaaggtggagg

SEQ ID NO: 479054 - DNA, 122 bp, Homo sapiens
tcaccacccttgggccacgccgtctagtccacacctgaggagttggtcaggtagaaggggcggatgaccgtgcggaagccgttgaagtgccctgccgggcaggggaaggaggaggtgctctt

SEQ ID NO: 479055 - DNA, 122 bp, Homo sapiens
accccactaaagacagaagaaccgcggctcgatcgggtccgcggcggaagcgcggccaaacgaatgagtaagtcaggcgcgggcacggcaccttgtttaccccactcggcggcgcgcccctg

SEQ ID NO: 479056 - DNA, 122 bp, Homo sapiens
tcggagctgcacgccccgcggggaggaggtggagcagaggagaccgagcgcagagcctggcgtcggactgggcgctctgagccacacagcagccagcgcctgagtttttatctagggagtta

SEQ ID NO: 479057 - DNA, 122 bp, Homo sapiens
atcagcaaggacatggctcctgactcctgtgcggaacgtgagtgactgagcggcaaagcccgagtgagcgagcggtgggctgccgggccgggcggggggcgccggggcgggctcggggggct

SEQ ID NO: 479058 - DNA, 122 bp, Homo sapiens
gtggggacgctccttatcgtgaagaactacactggggatcggctcaacttcggcctggcccgggagcaggcccgggctgaaggcatcccggtggagatggtggtgattggggacgacagcgc

SEQ ID NO: 479059 - DNA, 122 bp, Homo sapiens
cgcccccgcctccaccctgggatctgagcccgggccgtctccccgcggcgccgcgcctgacggtcactctctctgacctcctgggcccagtcctggggccaagagccgcatccccggggacc

SEQ ID NO: 479060 - DNA, 122 bp, Homo sapiens
ccgtggcccctgatttttaaccctgtgggcgccacgggggagcggcagctgtcagcagagcgcctccccacccggcttcttttcacccggtagcccgttattgagccgttccctctctgggc

SEQ ID NO: 479061 - DNA, 122 bp, Homo sapiens
atctgagaggacggtgagtgtcgccatcagaataggattagagtagacccacataggaggcgggatcttcagctggccccaccacacctacccctcaccaccctgtcctcccctgcagtgcc

SEQ ID NO: 479062 - DNA, 122 bp, Homo sapiens
acacatacacacattctctaagggaggggccttatgagctgaatggagtctttctgcagacgggtgagtgacccaggattgagttcacttttagcagacactgagagaagcagcccacacag

SEQ ID NO: 479063 - DNA, 122 bp, Homo sapiens
acaagaagatgaaaccatttccttcctcttttctaagcttgtctcttaaaacccactggacgttggcacagtgctgggatgactatggagacccaaatgtctcagaatgtatgtcccagaaa

SEQ ID NO: 479064 - DNA, 122 bp, Homo sapiens
attgaaattaactataaaaagtgtgccggtttgttgaggccacaaagtcaatcttttcctcgttcataacctgtacaaacaagtggcaaaatataaaggagcaatgaccgctttctttactc

SEQ ID NO: 479065 - DNA, 122 bp, Homo sapiens
ggagccatcagccgaaggatcgttgtgggctcatagaggatcatggaggacccagatcctcgccatatactaatcctctcttccttatctgggagcatctaagaacatgtcccatgcatggc

SEQ ID NO: 479066 - DNA, 122 bp, Homo sapiens
ataaatgaaaaccaggactagcaacaatccctgtttctcactaagcaatttttagctttccgtttttatatgtctccggtgtattttctttactgcatttccaattatgtactcatacctgt

SEQ ID NO: 479067 - DNA, 122 bp, Homo sapiens
gaactatgattgtgccagggatggggtcttcaggttgtgcatgagagtctggggtccatgcgtggagagggagtggtgtcagagggtcagagcccatgggcggttctgggacatggaagctg

SEQ ID NO: 479068 - DNA, 122 bp, Homo sapiens
cgacggtggccgctgagagacaaactaggcccggccgttgggcggggctccaagcgggggcggggcttccggcgggggcggggccaaagcaggcggcggaagagacgagaagcggggcgtgc

SEQ ID NO: 479069 - DNA, 122 bp, Homo sapiens
aggacaaggtgttggggtactagggtgggtgggggcctgaggggtggcttggagccctggcggtggctgcctgacgtcaccggcctctctggcaataggctgcgagctcagctccctgaagc

SEQ ID NO: 479070 - DNA, 122 bp, Homo sapiens
ctacccaggtttgttggctgctccttgacagctgcccaagctcaccctcccaggtgttgacgccccttctctctgcatttccttgtccctgtgctctgcctgcctctgtatctgcattggtc

SEQ ID NO: 479071 - DNA, 122 bp, Homo sapiens
gcactccagcccaggtgacagagtaagatcctatctctaaaaaccaaacagcaggccaggcgcagtggctcacgcctgtaatcccaacactttgggaggccgaggcaggcagatcacttgag

SEQ ID NO: 479072 - DNA, 122 bp, Homo sapiens
gggagtttaaaagaaaaataacctcttgctgtttgactaaggccagatttccctcatgtacgtgttttgtttttgatttatcaaatatccatcttgaaaatacttgaagtctatttgtgtgt

SEQ ID NO: 479073 - DNA, 122 bp, Homo sapiens
ggacagggagagcagggcccgggggagaaggagcaggtgatctccaacagaaacgccagccgggatgtcctgtggtaaacaccctcagtggtagggtcttcagagtgtggtaaatggggcgg

SEQ ID NO: 479074 - DNA, 122 bp, Homo sapiens
gcgaaggacgtttactgatttttttttttttaagtaaagaaagaagggcgtgtgtgaatgcgtatatgtgcacgcacgttttaaattttcctccgcaagaacagggacaggagagcgagaag

SEQ ID NO: 479075 - DNA, 122 bp, Homo sapiens
cgcaggaagcggaagtgccgatcggtggggcggaaccatgcaggaaggcggaagtggcttcgctagggagcctcccggcgtggagatggcgggagctggtcgcggagcagcggtgtccaggg

SEQ ID NO: 479076 - DNA, 122 bp, Homo sapiens
catggcccagacttaccttattgtccttgacttgggaggaggaggtctctgtttgatgagcgtcgtttgcatctgaaagtttcacagggattcagtaagaacaaggatttataatagcacac

SEQ ID NO: 479077 - DNA, 122 bp, Homo sapiens
tgtccccagtggcctaagcctgtgggactggccacagagcgggcgcccattcctaccaggcgctgcgcagcatgccagcctacctccccagttctccatgctgaagagcttgctgaagttgt

SEQ ID NO: 479078 - DNA, 122 bp, Homo sapiens
ggggccccaagatctgaggacagggagccaggttgcacacaggagccgtgcaggccaggacggcggccccatggacctgcccccgcagctctccttcggcctctatgtggccgcctttgcgc

SEQ ID NO: 479079 - DNA, 122 bp, Homo sapiens
gagcctatctccccttacctacccgaataaaatattaagagccatcccaggggagttcctcggatttttctccctgcccccactgggtaatagcaatcttaagctttacaattggaattgat

SEQ ID NO: 479080 - DNA, 122 bp, Homo sapiens
ggctgggcctagcgggaggcaaaggaggcatctagggtctaaaatgtaaaaagactctcacgcttgggctcctgggtttacaggactctgatggtgaacttaaattttgcattgctcactgg

SEQ ID NO: 479081 - DNA, 122 bp, Homo sapiens
aagtcccgccccttcctcccggtgcactctaaatgaattgttttgttgctgagttgccatcgtcactctggacccatagctactccatcccgagtagccatgggcttaccatagaaggaaca

SEQ ID NO: 479082 - DNA, 122 bp, Homo sapiens
acatcgcacgctggtgtgacacatgaaccatggttaccgctctgctgcgagcagatggcacgccagttagccctggagacaagactggaagccaaaccagaagtttttctaacttttttttg

SEQ ID NO: 479083 - DNA, 122 bp, Homo sapiens
gctctagatttagtgacccagaccaagaacgttcgtctacacagacggggtcctttcattcgaggctgggctgaggcggatgcagatacggcccctttgggaagacacgttccacttttgat

SEQ ID NO: 479084 - DNA, 122 bp, Homo sapiens
cactagcgctcgctcatgacacctgtccactgtgcctaggtccgcacagctacaccctcacgttctcccaggagacacgggacttgctaaaaatcacgcggctgcaatgcatccagccagga

SEQ ID NO: 479085 - DNA, 122 bp, Homo sapiens
aggagatgcagaaagtatcacccccagctgagtaaaattgtgttaagtagcccttctaaacgttttatctaggaattatgctttcatatctttgacagagattagtcacgtggccacagtta

SEQ ID NO: 479086 - DNA, 122 bp, Homo sapiens
cggagccgggaagtcgtcgctactctggtggaactcagagttggttctggaggcggcggacgcggaggtgagcagtgggagcccgcggcctgggagagacccgggaggcgtcgttggggccc

SEQ ID NO: 479087 - DNA, 122 bp, Homo sapiens
tgatgaggacagtcatagtgttgacaattactcaatgaatacttagagatttgaatgtatcgctagatttctgggaaatgaaaagaccaatgtaagctagttgaatgagaaaaccagaggtg

SEQ ID NO: 479088 - DNA, 122 bp, Homo sapiens
gcgcgggacgcggagcccccgacggcgcggccagcgggcgcgcccgcgctccccgcaccccgcctggccctgccggccacccccgcgcgcagcctagtcccccagcgccctgctccgccagc

SEQ ID NO: 479089 - DNA, 122 bp, Homo sapiens
tcctgcagcacggagatgcaccacaccctctccgatgctttcctgggctctgaggacggacgaggaagtggtgtccccgttgccccttttctattcccttccctcgcacgcactgcagttgc

SEQ ID NO: 479090 - DNA, 122 bp, Homo sapiens
tttattcaatgaacattttcttgggttaaagttatgtgccagcattataaaattgaatagcgcatgggccttgccttcatagattttatagtttagttttatatatgatgttccattctgaa

SEQ ID NO: 479091 - DNA, 122 bp, Homo sapiens
gccgttgccactgctgctgctgcgcttccagtcagggtgggccgctggcctcccactgggcgtcagtttggctcccaggccctgggcagtgccagcctctgggcccgtctgctgcgctgcgt

SEQ ID NO: 479092 - DNA, 122 bp, Homo sapiens
acatgcatttttaaaatttagatgaagtctaacattcatgcaataacacagctgaaatgacgagtaataacaataataataacccagaaatgtttgacatttgaagttccttttgagtttga

SEQ ID NO: 479093 - DNA, 122 bp, Homo sapiens
acccctttgcctcaggcacctcagtctcctcggggcttgggggcattttcagaagccacccgcagaaccagcgtcccgggcggcggctggttttcccctctttcccgggggcccccctctgt

SEQ ID NO: 479094 - DNA, 122 bp, Homo sapiens
gcaccgagcgtgcccgcgggaggcgggggggggcgctgctcggtggctctgctgcgtagccggtgaacacttggcaccgatgcccgccttctgggcaaggtgccctgagcccagcccctcgc

SEQ ID NO: 479095 - DNA, 122 bp, Homo sapiens
caggcttgcaggggggcgtctcggaggctgatgaggcagctgggacagaggtgggggcggcggcccccggatgtgtgcagccccctgccgcccacccccccagcagcgcgctggctgctgcc

SEQ ID NO: 479096 - DNA, 122 bp, Homo sapiens
ttaatccggatgatctggcacgacagggctctccaatgggaagagcccccggtgggggagcgcctggtgacattccttaaaaacatgaggtgtttgttaggttgagccagggtggacttgtt

SEQ ID NO: 479097 - DNA, 122 bp, Homo sapiens
aaggcgggggggagctgcggagctgggcaggagacagggctgtgtttgggaaaaggaaaccgcacttcgaggcggctccgcagagcagagctgcagagtcttccgccctcccagccgccttc

SEQ ID NO: 479098 - DNA, 122 bp, Homo sapiens
ctcggaagggatagcgtctttctgcaacctgcggttccagcagacaaaccttgtgatcctcgttccagtcgacatggaggacgactcactctacttgagaggtgagtggcagttcaaccact

SEQ ID NO: 479099 - DNA, 122 bp, Homo sapiens
tcatgctgtaagttataataacagttctgacaaacacgcaccggggatgagattttcaagcgtttgatttcagattgaaagcgactgcacctaaaggaaaggaaaagtcaattaattatagg

SEQ ID NO: 479100 - DNA, 122 bp, Homo sapiens
cagcaatgatcttttccagttcacggttctccttctccaacagccgggacttctcctcctcgttgttgttggtcgatgaccctgtcttcatggtgtcctgcgcctccgactgccattcccct

SEQ ID NO: 479101 - DNA, 122 bp, Homo sapiens
aaaaatcagagttcctgtgtagtgtctctttatgatctctgtagtaaaaatattatttaacgtagcttagtgagaagtttaagaggagtataccttttactttagggtgcccatgccacttt

SEQ ID NO: 479102 - DNA, 122 bp, Homo sapiens
gagggatggatcagaggctgagtcaggcctgtgtcacacattccattcctgagtagaagacggaatccactcagtacatttcactggagtgtactattaccagtaaaagggggtaaaaaatt

SEQ ID NO: 479103 - DNA, 122 bp, Homo sapiens
gaaaatattaactgtggagtgctacactttctgaccttgtgaacgtttgattttctttaccggaaacactgaaatatactgaatatcaggtacctctccagagcatgcatgtggttctacag

SEQ ID NO: 479104 - DNA, 122 bp, Homo sapiens
gtactccagcttgggcaacagagcaagattctgtctcagaaaaaaaaggcaggcagagtacgggggagaaggtcaagtattcacaaactaaactaagctatgtaactacaattctgtttcca

SEQ ID NO: 479105 - DNA, 122 bp, Homo sapiens
agtaattaggtttttaaatatccttcctgacccagagccttcctatgcaacagaaagattcgtttattccagaaaggactcttcagattgaaaccacctcccaaactaaaaacaaacaaaca

SEQ ID NO: 479106 - DNA, 122 bp, Homo sapiens
agcctcccgcaccgcccccctccaggcacgcactctgcagccccagcccgagcgtgagcgcgagagggaaccccgaggtggccccacaacaaaggctgcgcggcctctctgacaacctacaa

SEQ ID NO: 479107 - DNA, 122 bp, Homo sapiens
tcagagagcccggaatcctccagaatggaagagtctgactctggcattccacagaggtgccgataccaggccaaggcctcacagcagggtagtggcctggccgcaggtctcctggccccaag

SEQ ID NO: 479108 - DNA, 122 bp, Homo sapiens
cagttctctcaccagaaagccgcgttcagccccaggcaccacagagcgctcctagctggccgctcccacaccagggctgcctgcacccgactcagcagaggctcgtaaggccccagcacctc

SEQ ID NO: 479109 - DNA, 122 bp, Homo sapiens
gtttacaaactacacacatcggcacatccccaagaacaataaatgcagccacaatccctacgagcactgaggaatcatcagtcacaaaagtcagtcaatgtactggtcgccccgtttgcatc

SEQ ID NO: 479110 - DNA, 122 bp, Homo sapiens
cgccttcgcccgggtggggcgctgcgctgtcagcggccttgctgtgtgaggcagaacctgcgggggcaggggcgggctggttccctggccagccattggcagagtccgcaggctagggctgt

SEQ ID NO: 479111 - DNA, 122 bp, Homo sapiens
ctggggcggactaaggggcctgcggggtctggcggaaccatccaggtgagggcgtggtggcgggagagccaagaacagcagctaggtgtactgcttacctgagaagggggggtggccgcgaa

SEQ ID NO: 479112 - DNA, 122 bp, Homo sapiens
gcggaccgagctggtcagcgccgggccgcggcggccggggcggggaccggggaggctgcgcggggcccgccccctaccttggtcatgccattgcccatgatcccgggggcggcggtccgggt

SEQ ID NO: 479113 - DNA, 122 bp, Homo sapiens
aagtggacctcagacatggctcagccataggacctgccacacaagcagccgtggacacaacgcccactaccacctcccacatggaaatgtatcctcaaaccgtttaatcaataaagcctctt

SEQ ID NO: 479114 - DNA, 122 bp, Homo sapiens
cacagggatgcgaaggagcgggacaccatgaaggaggacggcggcgcggagttctcggctcgctccaggaagaggaaggcaaacgtgaccgttgtgagtacaaaagagacaggttggggagc

SEQ ID NO: 479115 - DNA, 122 bp, Homo sapiens
gctcatttctcgggcgcggaaactcgagcccactttccccggctgccggctctgggaccgcgggctcggccacgcagtcccgcccggacccaaagagccccagtccctgcgaacaccaggtc

SEQ ID NO: 479116 - DNA, 122 bp, Homo sapiens
gaagatggctatagacagaggctactgctaccttggcctctgggctttcatttttcaacccgcagaaataataatagaataacaatttatcctccgctgagttcctactatgtgctaagcac

SEQ ID NO: 479117 - DNA, 122 bp, Homo sapiens
gggggtggatggaagatgtgggggaagagattgaatcgggggaagcagccctgctcccgccggatgctgtctcacccatgtccttcgcacctgacccagggcaggaggaaggaggcacagcc

SEQ ID NO: 479118 - DNA, 122 bp, Homo sapiens
tgtgggtcctcgaggtggcgtcgtagaagactacctctccgccctagtaatccaagcggacgcccactttgttcggacagatcgggagatcctcccgggaaccgctctcgatgagcgcctgg

SEQ ID NO: 479119 - DNA, 122 bp, Homo sapiens
ctgaggtgagagactgacctgagaccagaatatcaaggctgcagtgagcagggattgtgccgctgcactccagcctaggcattgaagtgaaaccctgtctcaaaaaaaaaaaaaaaaaaaac

SEQ ID NO: 479120 - DNA, 122 bp, Homo sapiens
attacaattgtctgaacagcacgaaccttactcgtttgttccatcctcctaagtcctgcccgtaaagctgccgcttcccatattttttcctctattatgtagataggaaatgataattcaac

SEQ ID NO: 479121 - DNA, 122 bp, Homo sapiens
acgcgcgtttcctcttggtgcctgttttctctccctctgttttaaaagcagtgacagcatcggggaagtatccggggccgggccggggagggcggcagccgcctctgcctggggagggagct

SEQ ID NO: 479122 - DNA, 122 bp, Homo sapiens
ctgacacatatcagaataaaggaaagtatgaagtgatcatgggcacatacaaaaatgcagcggagatggttgacctgtatgtggatctgatcaacaagtacccttcaattattgccttaatt

SEQ ID NO: 479123 - DNA, 122 bp, Homo sapiens
tcatgacactgaacagaagcagtaacctgtgcttacttcaacccagattcagagggacagcgaactggtatgaggggctaggagacctttaggcatgagcacattactacctggagacccgt

SEQ ID NO: 479124 - DNA, 122 bp, Homo sapiens
agctctttcgtgcttctcctgcagaaggaatgcaggccccccgtgctggctacagacttgcgatactggggtcttccgtgaaccccgtccttcatggggctgggcatgggaacccactgccc

SEQ ID NO: 479125 - DNA, 122 bp, Homo sapiens
cagtaagattcagaaacccaaggtggaagctcccaagcttaaggtccaacacaaatttgtcgaggagatcatagaggaaaccaaagtggaggatgagaagtcagaaatggaagaggccctga

SEQ ID NO: 479126 - DNA, 122 bp, Homo sapiens
tacttgggaggctgaggcgggagaatcacttgaacctgggaggcggaggttgcagtgagccgagatcgcgtgactgcaacagagaaattctgtctcaaaagaaaaatataacttcataaaaa

SEQ ID NO: 479127 - DNA, 122 bp, Homo sapiens
ggttttactatctcagcacttcattcctcctttactttctgggtacccctttgtggacatcgcctagtggatcacttcttctgtgaagttccagcacttctgcgtttatcatgtgttgacac

SEQ ID NO: 479128 - DNA, 122 bp, Homo sapiens
gcggcgccggggcgggcggcccgaagccctcgtggccgtagcagcgcagcgccgcctcctcgtaggcctccaggatagtctggcgctcctcaggcgtgaagtccatggagaaggggtgcacc

SEQ ID NO: 479129 - DNA, 122 bp, Homo sapiens
gccctgcttggggagttgaaagaggcctttccttgaaacgcgcagccgtgtggcagggcccgggaagacgtgggtaatgtattcacagacatgactcccagaccccgagtgtcttgaaccct

SEQ ID NO: 479130 - DNA, 122 bp, Homo sapiens
gggtcagtgaggaagggtcagggggactggtgagaactccagccataaggaagcagtgcccgaggacactttggcgacgctagtcggtgatcagctgacccgggcagggagaggagggtgcc

SEQ ID NO: 479131 - DNA, 122 bp, Homo sapiens
aagcatttgtgaatatatggaatatagtgggggggctgagtacccttggatactttggctcgaagcagaaataaaaatgtccagtataggatctgctgctgtctgtgcttttctaggttctt

SEQ ID NO: 479132 - DNA, 122 bp, Homo sapiens
cagtaggggagacctcgatgggcaggacccagaaacgttccatctccaggaacaaacccccgcaacctcaaaccaggaaacatcaggtctcaaacagcagcccagagaaaagcactcaggtt

SEQ ID NO: 479133 - DNA, 122 bp, Homo sapiens
aacagtctttttagaagtagttctgatgggtgctgggctgcgggagtcggccctggacctcgggaagttgtggaacggggcgcaaaactgtgcttgtcatctcaggtaacacgtcagtattc

SEQ ID NO: 479134 - DNA, 122 bp, Homo sapiens
gtacagcagaggactcctgtgatgactgaagcacaagtataaaaatcctcatactctgctcggctccaagtaagttctcaaatgctcttgtcctagctcttccccttggagtcctgtttgac

SEQ ID NO: 479135 - DNA, 122 bp, Homo sapiens
cggccgcccgcccgtggatgcggcgcccagggatcctggagacaactttgccgtgtgacgcgccgggaggactgcagggcccgcggccgagggctcggcgccgcctgtgagcgggcccgcgc

SEQ ID NO: 479136 - DNA, 122 bp, Homo sapiens
aaaggggaggggggccagtgggaggggtcaccacatttcaattcaaaaaggcactaatttcgtacccattatgtgtcaccttgagcaagttacttatcctttctgtggcttaatttctctcc

SEQ ID NO: 479137 - DNA, 122 bp, Homo sapiens
agtttcaggggactcttgcatttgtgaagatgatcagtcacaggcaatgacttgaagccacgaggcttgaatattaaaatctgatgagcagatgttacacgtagaataattacataatagtt

SEQ ID NO: 479138 - DNA, 122 bp, Homo sapiens
ttgtcatttttcgtcttgtctttttgaggtacactctaaaatattctctgcatttgctcccggaggccgggggagggctgctgaaacaagactggtaatcagtgataactgccatgcctggg

SEQ ID NO: 479139 - DNA, 122 bp, Homo sapiens
gggtgggtggagctaagatggctgaacaggaacagctcccagcgtgagcgacgcagaagacgggtgatttctgcatttccatctgaggtatcgcgttcatctcactagagagtgccagacag

SEQ ID NO: 479140 - DNA, 122 bp, Homo sapiens
tgtttgttttctaacatccccacctcacttccaccaggcgtttttcatcgagtcggtgtgcgacgaccctacagttgtggcctccaatatcatggtaagacagccgggagccccgtgcttct

SEQ ID NO: 479141 - DNA, 122 bp, Homo sapiens
gcgggtccggggagggggctggcccggggctgccccagcttggccgggcgaggagcggggcgcatggcgccgggcgcactgcgcggggactgcgaacaaagggcccccggcggcggcgcgag

SEQ ID NO: 479142 - DNA, 122 bp, Homo sapiens
cacgggattgtgctgcggcaaggaccgaggccccgcccacaggcctggagtcccgacagccggtctgccaggcacccgcctccgcttcctactgctgcttgcattccgccggctggctgggt

SEQ ID NO: 479143 - DNA, 122 bp, Homo sapiens
gcgccccaggccctggagcggcggtggctgcacttggggttccggtgtccggtcgactggcgtcggtgtcgtgcgcacctcgaggggtgcgtgggagcccctgcgctccgtaacgggccggc

SEQ ID NO: 479144 - DNA, 122 bp, Homo sapiens
gcaggcactaacagtaggcatcgggataagactggcaggactaagatgccagccaggctccgccccggaggcttggaagtgcgggacaccgagagcagggatgccgggacagccggcccgat

SEQ ID NO: 479145 - DNA, 122 bp, Homo sapiens
ttttaagtcctctcagggaaggctgtcgccgctgccgctgcattaaatagttatgtacatcgcagagagtcccaggccatgggcaggtgggggaggggcgtcatttcaccaggggccgagtt

SEQ ID NO: 479146 - DNA, 122 bp, Homo sapiens
ataccactccagacaggctctccactcaagacaaatgccagggctggccccttgggtgggcgacctgtgcaggctcatggggccctgccatcagaaacctgcatttggttttatactttgct

SEQ ID NO: 479147 - DNA, 122 bp, Homo sapiens
cgccccgcctgcagatgcaccacgtggcccaggtgctgcgggagctgctgggggacttcacgcagccgctttatccccggccccggcacaacgaccggctgcggctcctgctgcccgttccc

SEQ ID NO: 479148 - DNA, 122 bp, Homo sapiens
cccaggtagctcgtctcttagccatgtacgcctctgcattccggtcactgggagcggggccgtgggggctgcacatgcgcactgcgagtcctcgcctactcccagaaaccacccgggcgcat

SEQ ID NO: 479149 - DNA, 122 bp, Homo sapiens
cccggatcttcatctgcggcggcccctgccccacccccactgcccctagccatgggagcccgaataatccttgcgaagagaggataattaattcaaaaaggccacatcctggggcctcggcc

SEQ ID NO: 479150 - DNA, 122 bp, Homo sapiens
agacacatggcagccaaactctatctctagtaaaaaaaatatatgtatggctaaaaataacggcagtaaaacagagaacatactgtccggaaggcgcagacatgacagcacaggacaaaaaa

SEQ ID NO: 479151 - DNA, 122 bp, Homo sapiens
caggtgcgctctgcctgcaccattttcctctgcttaggtaggctgacagcactgacaacccggcgcccaagactgcttcacgaatgcgaatgcgtcagtctctaggcaccaggcgccagtgg

SEQ ID NO: 479152 - DNA, 122 bp, Homo sapiens
cgcccttacagcagagcgcctaaaaccgctacggtggctctgctggggacaaattattcacgtcccactgttctgcaaacccaatccgggaggtatgacctggctgggacagtttaggaaga

SEQ ID NO: 479153 - DNA, 122 bp, Homo sapiens
ttacgtgttccaaggggacagtagcccctgctcggccttcgagttccactgcctaagtggcgagtgcatccactccagctggcgctgtgatggtggccccgactgcaaggacaaatctgacg

SEQ ID NO: 479154 - DNA, 122 bp, Homo sapiens
ccgctcctcttcgccaagcacgctcaagcggtttcgtgaactgggaagaaccctgaagaacgacgtccagttccccctcattttacagacaagagctccgcgacccagagagggagaggacg

SEQ ID NO: 479155 - DNA, 122 bp, Homo sapiens
tcactacagtgcctacacactacatacattcatgcgtttagagagacctgcatctccctgcgtaagtagtcatcttttaaatgtactttctagcatataaagagtttgcttcccaataaatt

SEQ ID NO: 479156 - DNA, 122 bp, Homo sapiens
ccctcacagaaggtttggtggtgagctctctgagacctgggggagcagacacacagcagacgcttgcccggggaacctaggccagcctgagcctgtcaccctgcacctccagagccccacac

SEQ ID NO: 479157 - DNA, 122 bp, Homo sapiens
gcgcacaggaggccgagcgggatgagcagccggaaaggcatagagctcgtgtcctctcagcgcccccgcagcagcagcagccactgcaaccagttcatcctgggagctgctgcgggttcttc

SEQ ID NO: 479158 - DNA, 122 bp, Homo sapiens
tctgcgcggcaggtgctgctggtgctggtgctgctcgctggcggggacaaacccatgtttcgaaggccctcccgggcccgggaagtggaggccaggtcctggggcgagcggccagggtaggg

SEQ ID NO: 479159 - DNA, 122 bp, Homo sapiens
cgcgcacgggggaggggcgtgcatagttgagacagaaacccggaagacccaactgtggcgcggcactgcttgaccgaggggctccggagcccagctgcaccggctgcggtttgagcgcccag

SEQ ID NO: 479160 - DNA, 122 bp, Homo sapiens
aaacaagaagacaagcaggaataaagaacagatggaaacggaagcgatcgctgggaagtccggagtgacacggaatggtgtgctggcactactttgaggaaaggagttacccagcgagggag

SEQ ID NO: 479161 - DNA, 122 bp, Homo sapiens
aggttgttttgcagggactggagattcagcaatgattcagactaaaatcccctgccctgtcgaggctaaataactgctccttacagtggcctgtggatcatattggtataaggcagagcaaa

SEQ ID NO: 479162 - DNA, 122 bp, Homo sapiens
gcaggccccacgcggggcaggcgttctccctgcgcgcctccgccgcggctgttcacgtcccgggtactggcgcgttctcacgcctccctgagtaaccgctggatcagtcctgcccggacccg

SEQ ID NO: 479163 - DNA, 122 bp, Homo sapiens
agcccggggccccgcagcgggcggcgtgcgccctaagagatactcacatcgaaagcgacccggggcttccagttcagcttctgtttcgctttggtgcagtcgccctgcagaaagtcctaggg

SEQ ID NO: 479164 - DNA, 122 bp, Homo sapiens
agctccagctggtgacgtttggggccggcccaggcctagggtgtggaggagccttgccatcgggcttcctgtctctcttcatttaagcacgactctgcagaaggaacaaagcaccctcccca

SEQ ID NO: 479165 - DNA, 122 bp, Homo sapiens
agaaatgatacctccttcaaagatacgtgttcctaacaagaaggaaaaaacaaatgcaagcgaacagtggcggtagaaccagttagtattgtgcgaacagtactttctgttttctcctaagt

SEQ ID NO: 479166 - DNA, 122 bp, Homo sapiens
ggaaggaggcgcggcgccggaggggagacgcgaccaatgggaaatcacagcgcgtccttgcggcagccaataggagagcagtaaagagggggctgctggccactgctctggggaccggaagt

SEQ ID NO: 479167 - DNA, 122 bp, Homo sapiens
agccgccgggagctgcccgcaggccctgggccggctgtctcgctgcgatgctctgctggtcgcggacggaccctgcctccccagcttatcccaggccagaggctgcatgccactgtccccgg

SEQ ID NO: 479168 - DNA, 122 bp, Homo sapiens
gcccacgggctccagtgggcgggaccagaggagtcccgcgttcggggagtatgtcaaggccgtgacccgtgtattattgtccgagtggccggaacgggagccaacatggcagcggggttcgg

SEQ ID NO: 479169 - DNA, 122 bp, Homo sapiens
gggaggtgagcgagtgagcagttggctgaaagaaggaaaggtgctcaggaaggctgagagcgtgctgtggctgcctccaaccccagagacctttatatgcagctggggaaggcggggccctc

SEQ ID NO: 479170 - DNA, 122 bp, Homo sapiens
tcctcccgcgccgccgcccccgagccgagcgcgagcagctggccccggcccgcgtgcgcccgtcctccgcccctgcccgcgccagccccgcgcagccgcctcctgcctcctccccaccccgg

SEQ ID NO: 479171 - DNA, 122 bp, Homo sapiens
ctttgttttaggttcaagggtacacatgcaggtttgttatataggtaaattgtgtgtcatcgggatttggcgtaaaaatttatttcatcacccaggtaataagtatagtatctgataggtag

SEQ ID NO: 479172 - DNA, 122 bp, Homo sapiens
tggcagctgtgaacatgtggatcccttgtgcctgaggttctgctggtagctcctgcagcccgccagactccaggctcaaggcttaggggtgtttcttcccacagtcttctggagagtgtacc

SEQ ID NO: 479173 - DNA, 122 bp, Homo sapiens
cagcgggccttccgcccaccgtccgtgcctggccatgagggcgcccgccctggggccagacgcaggctgtgtctcagaagagcatttcagccgctgctgcagccagggcccatccatgcggt

SEQ ID NO: 479174 - DNA, 122 bp, Homo sapiens
tagaggactaagggcacagtggtaaaatgccgctcatcacaccgagtcaagggtacgtgccgaccccactgaccgctgtgcatgtgccctgatcgccggccagaggagcgctggccgggcgg

SEQ ID NO: 479175 - DNA, 122 bp, Homo sapiens
accaatgaaaggccatttggggctccatattaatcacaaacaagaaaacccactttgcttcgttaattattagcagttcttactacgaataattagaagggaaaccagatgcccttctctta

SEQ ID NO: 479176 - DNA, 122 bp, Homo sapiens
ccgggacgcctgggtggtttgcggggagacccacgtgcggctgccgttgcggggtgggtgcgcggggcgcggcgagctccggagaaacccaggttgggcgtgagcgctgggcaaatcagcaa

SEQ ID NO: 479177 - DNA, 122 bp, Homo sapiens
cctaggggctgtaattcttcttcttggagatgactcatcagagagaatgatgccaatattcggagacatagaaatgagaagtgaagaggtaactccagggagttccagtccttggctccagg

SEQ ID NO: 479178 - DNA, 122 bp, Homo sapiens
ccaatcgactggcgatttctgcttgtattctcttttcatttctcctgcttgcagtggtctcgcggggcacagtggggtctcccctcaaggaggccaatgggactgaccatggtgtggtgcgt

SEQ ID NO: 479179 - DNA, 122 bp, Homo sapiens
tcaggacctagtgtttggctaaacctctggagaactacaacttccagggtgcaccactttcgccccgcccatgacgttgcagctcccgtttctcgccaggctcccggcccgaactacaaatc

SEQ ID NO: 479180 - DNA, 122 bp, Homo sapiens
agcgcgcacactagacggcacgtgctctccacgctctttctccagcgccccttgctcacccgccccccgttggagtggcccatcctctccgcttagacacctgcagtcactgtcactagctg

SEQ ID NO: 479181 - DNA, 122 bp, Homo sapiens
cactatgcaaatctgagctgctgatcgatgacgcgccatcaccccacgcaccgcttcgctcgcccattggctgagatgagcctggtcccattgacaacaaacaggggggcgcgcggcctgga

SEQ ID NO: 479182 - DNA, 122 bp, Homo sapiens
ccccgcccccaagacaccctcgccgctcattggctggggcggagggcaggataccaatcgcgtgggtcccgtcctccgccccgccctccggccgcgcatcaaggatctttgctcctcccgcg

SEQ ID NO: 479183 - DNA, 122 bp, Homo sapiens
gggaccaccagctttcagccggggcaggtgtggtggtgcctaccagatgccagatgtccccggctattcctttgcctttgaatcagaaggccaggtgcctactcggccctgcccaggtcagg

SEQ ID NO: 479184 - DNA, 122 bp, Homo sapiens
tcgtgacccaccccgtgagcagcccaaaccgaccaccgtcctcccccagctcccaccaatcggatcgcagggactcgagccccacactgctgagtccgctgacactgcgtccggggccagac

SEQ ID NO: 479185 - DNA, 122 bp, Homo sapiens
ctttcctggctcctgggacagtctaggaataacgggcacctgcgacccgctgtaaggttgcgaggtcactccaggcttgcccgagcctctgctcaggtttcaactacgcgagttgggataag

SEQ ID NO: 479186 - DNA, 122 bp, Homo sapiens
tctgggggctcgcgacagcgtctagaggagccgagaactacaagtcccagtgtgtttcgccgcagagcctgccggttccgctgcagctacgtagcagtatccccttggatccggcctcccgc

SEQ ID NO: 479187 - DNA, 122 bp, Homo sapiens
gctctgccctgtaaaggataccttcagtccttatgtgactcaaagctggcctgtccccatcgctgcccctctgcgagggcaggggcgggaaggaggcctagattgccacagcagtgctacaa

SEQ ID NO: 479188 - DNA, 122 bp, Homo sapiens
tcttgtctgactctttagctgcatatgtaaagagcacagactttgaaacctgagctcccgcgttcgaatccccactgtaccactatctaaacatggcatcttgggcaagtgattcaagcatg

SEQ ID NO: 479189 - DNA, 122 bp, Homo sapiens
tgatctgttgctatcacacgtgaccgcttgacattgctctgaggagcagaggtgtggctacgcggcgggcacgtgactggctgccacaacccccgctgcagggggggagcggtgagggggac

SEQ ID NO: 479190 - DNA, 122 bp, Homo sapiens
gccgccctggctgggctgggcctctgccgccctctgtgcgggttgtcctgaggagcagcccgcagcccgtgggtggggccggcggggcgggtgagaccgcccgggtgggtgcgaggagtggc

SEQ ID NO: 479191 - DNA, 122 bp, Homo sapiens
aggggaggccgctggggtgctgggccagccgcaggtacggcggcggtcagggctggtgatcgagttgctgtgtcgcctctaatgaggcccagccagggaacactcggcttcggcccaagccc

SEQ ID NO: 479192 - DNA, 122 bp, Homo sapiens
taagtgttcattgatgctgtttaatattacagcatttctgtcacgcaggctggagtgcagcggcatgatctcagctcaccactgcctccacctcccagggtggagcaattctcgtgcctcag

SEQ ID NO: 479193 - DNA, 122 bp, Homo sapiens
atacagaattgatctcacctttttcaacattatctaatatgcctgaaatgtgagtaaatgcgggagaatcgtgatcaactaaattagaggatttgggaagattacgctaaagaagattttta

SEQ ID NO: 479194 - DNA, 122 bp, Homo sapiens
tgtgtccggaagtcgcctgctccaccccggcccagccgtgtctccgggggacacagcaaccgctgaatgaagtctcgagcctcctcagggaccccttcgtccaccagcggcagagagaggtg

SEQ ID NO: 479195 - DNA, 122 bp, Homo sapiens
agaatttcaagctttacataggctgatgagatatgagtattcacttacaatgctgcatgccgaagctacccaaataattgtgatggagaagtgagaaagtctctgtattaagtcaggccact

SEQ ID NO: 479196 - DNA, 122 bp, Homo sapiens
tctctgagagccaggcccagggtcgggttccctgagaccagcctggaccctagatggccacgcctccgagcgctattggcgccggaggcgcgactctttttcctattcccaggagggtaaaa

SEQ ID NO: 479197 - DNA, 122 bp, Homo sapiens
ggccggagctagcacaatctttgactggattatagcaattgactccaaatgaccctactgcgtttgcttttttgcctcccattaatgcttgcactcagtccagcggccagaatgttccttta

SEQ ID NO: 479198 - DNA, 122 bp, Homo sapiens
gcgccagacccagagcctggggagaggcggcgggcggcggcatctctcggggaagggggccggagtgattgatggatgattttttaggctttctgaggaaaatcagtttctgccacggcgga

SEQ ID NO: 479199 - DNA, 122 bp, Homo sapiens
cctccaaagagtctagtacactctgagccctcagcctgaaatgctcttccctcctctgtccgcctggtcacatctccttggggaagccctccccgacctccttaaagggccagatcaccctg

SEQ ID NO: 479200 - DNA, 122 bp, Homo sapiens
aacagccagtgtagaactactcagaagttcatcacatttccatagcccatggaaatgtatcgaatattaagggccatgctaggaaacaaactctttagttcattacctaatacttgctttcc

SEQ ID NO: 479201 - DNA, 122 bp, Homo sapiens
ccccggatggagccgcagtccggccgcgacctactcacagcttaaagttcagcaccgccccggcattcatcagcaacgtcctgcagagggagaattacagttactaggggcgcccccgcgtc

SEQ ID NO: 479202 - DNA, 122 bp, Homo sapiens
gcaagaggaaaaacacgcagcttcctttccaagtgttcttcctttcagagataaaagcgccgaccctaaggacatctgttcaacgaatgtttttccctaatgacccccggaaagttggaaag

SEQ ID NO: 479203 - DNA, 122 bp, Homo sapiens
aacattctcttctgttagtcaaaagcctgtgtcataaaaaccttgcttacagatgttcaacgtaatttcttacagctccaatcagggcaattaaataagcagaccgtctaggggtttcacat

SEQ ID NO: 479204 - DNA, 122 bp, Homo sapiens
ggagacaatttgttaaggttcacccccttcatataatatggcaaattttcagcggccctccgcaagccttggggcagaacaaagtagcccctgctgcatgtgtggtccacattgttggccct

SEQ ID NO: 479205 - DNA, 122 bp, Homo sapiens
acctcagcctcgcgaggtccctattcattactccctggccggcggccatctccatggcaacgctggcgcctttccagtgcgcagctccggggctcagcctgtctctaagccggtctcggagt

SEQ ID NO: 479206 - DNA, 122 bp, Homo sapiens
cacgccgcggcgcgtgagtttccctttgtgtaaattaatctgcgcttcccaactcccccgcgcttctgtacccgggatctgaggggccacacagaccttgaaatcctcgcaccgctccctct

SEQ ID NO: 479207 - DNA, 122 bp, Homo sapiens
ctgtccttagagaaggtaccattgtgcatagccttttatttataacttggtaagtgccagcgaactcgcctcctttacacccccgagtgccagccccgcgctctgcactgcgctttattcgc

SEQ ID NO: 479208 - DNA, 122 bp, Homo sapiens
gtcacttgggaggatgtgggatttcatccccagatgtgggtttaactcacaatggtccaacgttattcctattattagtaccataatcacatacatacatacacacaaaaatccaagatcag

SEQ ID NO: 479209 - DNA, 122 bp, Homo sapiens
cacattgtccaaatggggcaaccatcatcctgagaagaataaagtgacttcaactgcaaacgaagggaataaagttagctacagggaagaaaatctcctttggtggagataattcttttaca

SEQ ID NO: 479210 - DNA, 122 bp, Homo sapiens
ttttacattttatttttaacagctttactgggatacaaattatatactaatcctagaggccggcggatagctttgagtccaggaggctgagactgcagtgaacggtgtgattacaccactgc

SEQ ID NO: 479211 - DNA, 122 bp, Homo sapiens
atcattgtccttgagaacttaagtcttttcaatgaaagaaatgaaatatgaagtatttcccgagacagtgttctctaactttggggtgcatcaaatgcctggaggtcttgtgaacacagctt

SEQ ID NO: 479212 - DNA, 122 bp, Homo sapiens
cgcctgcgcagtgaagctgggcgccttcggggcttgagcttctgagggtcgggtccagcgcgtgggctgctggatggcggaaccccaggcggagtcggagcccctgctgggcggggcccgcg

SEQ ID NO: 479213 - DNA, 122 bp, Homo sapiens
ccgctgttgtgtcgggagagccaggagcgacagactcaaactcagaaacccaaccacctccgctccctccgcgatgcgtgtaacgtgcgttgcgcggcgtcgccctttaataacgacgggcg

SEQ ID NO: 479214 - DNA, 122 bp, Homo sapiens
cgcggcgccaaacttgcttcccgtcagcccccgcccgtcccgcgggagcgcgcacgctcgcgcacccggatcccggctcctgcatccagtcgccattcgggaggccgctgcgctgcagggcc

SEQ ID NO: 479215 - DNA, 122 bp, Homo sapiens
ggtcccgcctttccccgttcttccggcttggtcgcccagccctccccacccccggcgccccgaggggaactgcttcgcacttggcaataaacacacaccactgctgccgagtcggacacaca

SEQ ID NO: 479216 - DNA, 122 bp, Homo sapiens
tgtactaagaaaggttcaaagcatcttactcaaagtgttcactgaagcttcgaaagagcccgtgaggtaggcactgtgatgacctgcgcttgttacgagggagacaccacggccggcccaga

SEQ ID NO: 479217 - DNA, 122 bp, Homo sapiens
cagggggcagacagggatggggtaagaggcggaccccggcagtgaagtcaggttccgaggcgaaggagccatcccgaaattacccagatgagaaatcttgtttccgaagcgcctctgcgttc

SEQ ID NO: 479218 - DNA, 122 bp, Homo sapiens
actctccgtgttcctgtgtgtgcacgcgtgtttaagtacacaccactttcttaccatgcacgcgtgtttaggtccacagcactttatcaccgtgcacatgtgtttaggtccacagcacatta

SEQ ID NO: 479219 - DNA, 122 bp, Homo sapiens
cagcagctcgtatcacaggaaactattgctaaggtaaaatccccgcaaagggctgcgcctcggttcacccctccacttgcacttgcccgcccaccctcactcggcctccgcatcgtctccca

SEQ ID NO: 479220 - DNA, 122 bp, Homo sapiens
gatcactagcaaattcgttgaaaaacacaattcatcaactattggttgataatactgatacgcatcttctgtgtgccagggccttgaggccctgctccaggcagaaactcggcagtggttgg

SEQ ID NO: 479221 - DNA, 122 bp, Homo sapiens
gagctctgcctgtttgtctgtgtgacactccagtggaaggaagccaagagcctataatagcgatcctggggaaaatttcagcagctggggccatgtaatttaaaacctctgaaaagtgtgct

SEQ ID NO: 479222 - DNA, 122 bp, Homo sapiens
ggcttattcaccgatttcattccgctcttggttttagtttacctggaaggtcctctcctgcgctggctctgggggtgcttggaaccagagccccttagtcgaagcgcgtcctgctgccagct

SEQ ID NO: 479223 - DNA, 122 bp, Homo sapiens
gagaaccccatttaaaacttgaaaacaagtcactaaggccagggtgcaaactgaagaaaccgacctttacaaataatttatagacacctaacaagaagacgtttccccacagatagtagact

SEQ ID NO: 479224 - DNA, 122 bp, Homo sapiens
cgtggtatctacatgtaagtgattggtactgctcgaaggttgccagaatgagtattgtaccgaagcccttatggttatatgactcagttataatggttcagtctctttgataccggatggct

SEQ ID NO: 479225 - DNA, 122 bp, Homo sapiens
caaaatgtctcaagaagccttgagaggcgggattttggaacccgggcgctgacgagcttccgccattggtgtgatcgcggacctagaaacttggtccgtcccatacaggtgtagaagtcgga

SEQ ID NO: 479226 - DNA, 122 bp, Homo sapiens
agcgtcgtgcacatggcccgagggcaggacaaggatgctggtggaggggcgggcccaggccggcgcctccacccccttctcttccaccagctttcccccatatggttctcataaggtctggg

SEQ ID NO: 479227 - DNA, 122 bp, Homo sapiens
gccacgcgccagctgactggctcagacgccgtcacgtgatcccattttctccccctcccccgactacacaagccgtttccgccttcggccttgaggaataaccgcctcccccaataggcgcc

SEQ ID NO: 479228 - DNA, 122 bp, Homo sapiens
atgtctgtgccaggggagaggggctggaatcgggggcgtcaggctgccagctcctgacaccgtcctgcccatcccacccgggcaacctgtaccttggcagaggcgtgtggccagcagctggt

SEQ ID NO: 479229 - DNA, 122 bp, Homo sapiens
tctctctctctctctctctctctctctctctcgcctgtcttcatgtcgtggattgatgaacgcgaatcgcgtgtaagcgccgccaccgccgggagtctgaggaattcgcctgggctgttaga

SEQ ID NO: 479230 - DNA, 122 bp, Homo sapiens
tccacctccatttgggtcattgtgagaagtaaataaaataatgcaggtaaaacacctacccggagcctgttagatagtaagtactcacatgtaagatatgattattacaattttcaccatcc

SEQ ID NO: 479231 - DNA, 122 bp, Homo sapiens
aaaacaaattccacattattggcagttccagtattcccatgtcaggagtagtgagtagcacgtttaaaccccatgcaccttcctagctgcaggaactgatcaggactcttggtggcctctag

SEQ ID NO: 479232 - DNA, 122 bp, Homo sapiens
tcctgtgggttggagctgcctcctcccagcctccatggggttggtgggtgaggccttgcccggaggcggtggtcagcctgggggaccttgggcggccatcccagtatcaacggccacacagc

SEQ ID NO: 479233 - DNA, 122 bp, Homo sapiens
cccgctgttctgcctgggatgtgaattatccctttgtctggcatatccgcactctggatacgacccgctcgccacttaggagttgtctgggttattagatccaaaaaaaatgtagcgggcca

SEQ ID NO: 479234 - DNA, 122 bp, Homo sapiens
ggcaaacccgcccaaggatcggctcatcgccccccgttgggctggaggatcttgcgcaggcgcgagaaaaccccgagagagaccagtgcctctgcgcatgcgtcagtggcgagcgcaccgct

SEQ ID NO: 479235 - DNA, 122 bp, Homo sapiens
tgcgcgttgcagattagttgaaaacgctcagggtttgtgaggggcggggtcacgtatgcgcgtcattggacgggtcggtgggagggagggtggagatgggtagggtgtgtgcgcttgcgcag

SEQ ID NO: 479236 - DNA, 122 bp, Homo sapiens
agaagatgatttttgagataatcagggaaatttgcttaaggactggctatgagatgaagccgaaggactgctgctgcctctgttaggtgtgatatcgtggtatctacccaaagtgttcacag

SEQ ID NO: 479237 - DNA, 122 bp, Homo sapiens
cagcctgcaggtccagcgccggggacaggccccaccaggacacggagccgaagccgctgccggagccggcaggtgtggtcatcaccctgcggaaaagacattctgggaatcgcacacattgc

SEQ ID NO: 479238 - DNA, 122 bp, Homo sapiens
aactctccctgtgcgtcactggctcctgggcgcgatgtttcaggtaactcgggcaaagcacgcatgctgctgtggctctgtggtcagcccatgacgagagcctcgtccacgttccgtgaaat

SEQ ID NO: 479239 - DNA, 122 bp, Homo sapiens
gatatcccatgtccccactgacacccgcccaccaccccagacagagacccaggacgcagccgccccctgctcacccagctacagggtgggagctgttctaggtgggatctcagaaaccccag

SEQ ID NO: 479240 - DNA, 122 bp, Homo sapiens
gtttcagctggacctggaatacattcggtattcacttttcagaagcgacgcaccagcctacggtcccagctcacgtctgggggggtaggcaccattatttctgcgctgtaaatggaaaggct

SEQ ID NO: 479241 - DNA, 122 bp, Homo sapiens
agccacagagcgcctcgagctgggcagtcaatcctggggaagccctggtggtcttcgcctcgccgggttcggaacagcaggctgggatcagcaaccatcgagacgcatccgccgagacctcc

SEQ ID NO: 479242 - DNA, 122 bp, Homo sapiens
cgcaccctgccgaagcttgcctggcagagaagtgctctgaggtctaacttttccgtctcccgctatcctcactgaatctctctcagggttggggttttttccctcatcatggaaaaaatatc

SEQ ID NO: 479243 - DNA, 122 bp, Homo sapiens
ggcctctgggacgacctccagcagtttcagcctccttgtctacccccagtacagaggccacggtgactcggtccccccacccaccacagaatcctgtcctcgggcctcacgctggggaacac

SEQ ID NO: 479244 - DNA, 122 bp, Homo sapiens
tactacctttgtaaggctaacaaattagctacaagattagaaattatggtttaggggtcacgcaggccggaggctacaagattctgaacctcccaaaactgctcctggggataagatcactg

SEQ ID NO: 479245 - DNA, 122 bp, Homo sapiens
gcaattctgtccaaagtggagtgggactaggggaggcagcaaaggaaaaaaaccggtggccggggggtgcatggggggcaaaccattgaaaataaaacgctctgctgacaaaataaaatgct

SEQ ID NO: 479246 - DNA, 122 bp, Homo sapiens
cctctgcctcctaaaatgctggcattacagccctgagccaccgcgcccggcccagcgccccgtctcaaaacaagatattacttccgctccaaacaaagatgggccagctaacgagcgcgggg

SEQ ID NO: 479247 - DNA, 122 bp, Homo sapiens
agttctgggtacttctgcaaaacccttccccggatctaggcggtcgtcaccgacaggaagcgatgtgtgcatcaatataaataagccggtggggcaactagattgcgtgcatccttccagtt

SEQ ID NO: 479248 - DNA, 122 bp, Homo sapiens
gtgtcaccttctgctcaggcatgtcaccttcccgaggtgcccagagctggtctgtgtgcccgctcaggcgtgtcaccttctgctcaggcatgtcaccttcccgggctgtctagagctggtcc

SEQ ID NO: 479249 - DNA, 122 bp, Homo sapiens
aatcattgtggaaatatagagaccgaggggtagaaagcggatgcctcctaaacctgcgtgcgatcttctgaggataggaggacaccaggcccagcccctgcagcccggtgggctccgcggcg

SEQ ID NO: 479250 - DNA, 122 bp, Homo sapiens
gcgacaggtgaagcaagcctctctgtgaggatggccctttgctctgctcaaggaaggaagcggtgcctgagcagggaaccttccccatcagctgtgcatgcaaggactgtcctcaagacccg

SEQ ID NO: 479251 - DNA, 122 bp, Homo sapiens
ctgggacctagttgttcctagactattccgtgaccccatgagcacttactatgtagttctcgtggattcagcagcaggtcgccttgtgtttccccttctcttcgttggtgtgtgcatatgtc

SEQ ID NO: 479252 - DNA, 122 bp, Homo sapiens
ccgtccctgtcctgtccccttcccccagaacccgtgcgagagccttcggggccaccctgccgggatgacatacgctgccaacatcctacctcaccatccggcccgaggcacgttcgaggact

SEQ ID NO: 479253 - DNA, 122 bp, Homo sapiens
taccttgctgcttcctctaatctgtgtttcctgctgaccacagaaatggtctgctacctccgaataggagagaacatctttgctctgccattttctttctctgaaaaaaatgataagtgtcc

SEQ ID NO: 479254 - DNA, 122 bp, Homo sapiens
gcctttgtgggacctccgggggctcctcctagtccctggccccctcccctagggaaggcccgctgcctgcacctctttcggatactgctggagtcctgcctcttaccgctcccgcccctccc

SEQ ID NO: 479255 - DNA, 122 bp, Homo sapiens
ttactgatagcctgctagaagtaggcactcccttaagagataaaatgaagtacctgttttcgtggctcttatattctaatgtggagagacatatgtgaaataaacataaaatatcagctagt

SEQ ID NO: 479256 - DNA, 122 bp, Homo sapiens
ggacccaaggagaggaacagccaggcgacagcgaacgttcgctttattacacggacacggcgctaacccgactattgcatctcacagcatctacaggccaaacccatagtacgtcagacgga

SEQ ID NO: 479257 - DNA, 122 bp, Homo sapiens
ggccagcggctgcgtgcagcagggggctgcatgctggcaggagggacgggcgggagcgggcgggacgctggtcgagacacatctaccttgttccaccagccccatggtggtgccggaggccg

SEQ ID NO: 479258 - DNA, 122 bp, Homo sapiens
gcctggcgctggggctgggaaggcacggagccgcggaaccaggatcaggcgctaggtcgccgtggggtccaggacccaggcccttgggttccacggggctgagctgctacgtgcggcctgtg

SEQ ID NO: 479259 - DNA, 122 bp, Homo sapiens
gcctttcatttgtttgaggtcgaatgctgagtccctcaccttcagaacatgtgagtgctacggactgctcatcatttcacgcatgtgcacatgcactgtctctcacacacgcacgctttcgc

SEQ ID NO: 479260 - DNA, 122 bp, Homo sapiens
ggaagccctgacagtgctgtctgctctgtcccagcatttttaccagggctctggcttccccgcctgaggctgaaggaattgtaattttaaattccaaagccacttgagtggacagactggtt

SEQ ID NO: 479261 - DNA, 122 bp, Homo sapiens
gaagccttctttcctgatgggattctttagcgaggacactaccgaggcgcgacttcctgacgcgcatccgatccgggaaggcgcacttccgctccccagttgccgcgggatggcaagccggc

SEQ ID NO: 479262 - DNA, 122 bp, Homo sapiens
ctccgtaccgccacacagcccacataccccgttccccaggagacgcccgcaggtgggcagcgtcactcccacccgccgagcacacgctgtccccgtctcgtgtcccgaggagccggaagcag

SEQ ID NO: 479263 - DNA, 122 bp, Homo sapiens
gcagccaccatgtaagaataacttttgcctcctaccgtgattctgaggcctccccaatcacgtggaactctaagtccaattaaacctcttttacttcctaatctcaggtatgtctttatcag

SEQ ID NO: 479264 - DNA, 122 bp, Homo sapiens
aagttaaaaacttttggaccactaaaattcattctgaatctaaaattctgtctgtccttgcgggtctgtatcattgagataggagtaataaataaaatgtaatatccaggtgttaagcctga

SEQ ID NO: 479265 - DNA, 122 bp, Homo sapiens
agacacagaagatgatgaatgggaaaaaaaacatagagatcacaccgcaaagaagcaaagcgtaataattactatagtaggataaggtagaaattgttctgattgtaattagttttgtattt

SEQ ID NO: 479266 - DNA, 122 bp, Homo sapiens
atattctgccctttgtccctccctgaaatctccataactcccttctcttcctgagccagacgaggggccccttccattggaaagctctctcatctggactgttccaagagttatgccaatag

SEQ ID NO: 479267 - DNA, 122 bp, Homo sapiens
gttttgaccttcacgggctcccgtctgcacccggctgagcgaggaacttcaccaggagagcgcctggactccgaagcccgttctgtcctgagcctctatcgcgaggcagtgcccagcatgga

SEQ ID NO: 479268 - DNA, 122 bp, Homo sapiens
gcaagcacacaggagaggtctgtcttcccaagggacagctggtgttaggtggccacatcccggatggtgcctgtgtgtgaccatcacacgcgctctgagcccccagggtgcagcgggcaggc

SEQ ID NO: 479269 - DNA, 122 bp, Homo sapiens
gcagaactgtagggaagagacccgtccgtggtcgctaaaggtttgagtgtagagggtgaccggagaggcatcccgagggggtgtgggtgtggaagctgctctgtctggcgcggtggtggcgg

SEQ ID NO: 479270 - DNA, 122 bp, Homo sapiens
ctctcgcaaataatctttttatgatgtttgttctgctgaatccaccggacgcctcagacacgggccctgacggcatcgccggcctgggggaggcgtggagagaggggaggaaggcgggaggg

SEQ ID NO: 479271 - DNA, 122 bp, Homo sapiens
gtcctccacctgccttacccacacacatgcgcccgatgatgcggcagccggcgatagacgcgtgcaccacggggatggtatcggagagctcgccctcgaacacactgtagggacatggactc

SEQ ID NO: 479272 - DNA, 122 bp, Homo sapiens
aacgctttgcttgtcaatgaacggtggcatcacatagtcatgataaattaaatgctaaaccgggaatagaactgaaacttcctgacacaaggttctggcccctatgctgtcttcaattccat

SEQ ID NO: 479273 - DNA, 122 bp, Homo sapiens
cccaagggaaggcgactcatagctaatgtctgagggtgatctgagcactcttcaccaccccgtcagcccttagctttcgtctcatctccttgccaacagcacataagtgtgagtgactcctt

SEQ ID NO: 479274 - DNA, 122 bp, Homo sapiens
gaccactagagattagctttgctgttttgtgggggctcagaggctcaccgagataagccccgaaactgatccctgtcagttcctaatataaaatctcctgatcacctagatgaataaaaata

SEQ ID NO: 479275 - DNA, 122 bp, Homo sapiens
cggagggggtggcagcgcgcacactacggacaccgcctcatccacggcggcagcgggcggcggcggcttccgcaacgtctacgcggaggtgctgcacttccagtccatgtgctcgtgcctgt

SEQ ID NO: 479276 - DNA, 122 bp, Homo sapiens
taaagcttaacatggagcagcacggaccccgtgactcgacgaagtggcgtggaccttacccgtggaccaagtgtgcgaacacagcacagcaagcgccccgtgcaaacacaggagcatcctga

SEQ ID NO: 479277 - DNA, 122 bp, Homo sapiens
acagtgttcttagttaggactctgaccctaacttccgggaaagtaaaccaacattcaggacgtaccggccatcggaccgcaacattcaggacgtaccggccatcagcgggtgcctgttttgc

SEQ ID NO: 479278 - DNA, 122 bp, Homo sapiens
cgggcggctctggacgcggctgttcccttgcgcacgttcgttccgcgcccgcgcaggagccgccccgctgcacccgggtggccccgactgcggcccccacgcctgtccctggcggaggggac

SEQ ID NO: 479279 - DNA, 122 bp, Homo sapiens
aaaaaaatcgcaacgactaaacaacaacaaaagcccagccccaaacagagcaacgtgatacggtattctgcacggtgcacagcccgacggctgaccagctgcagtcaataccagctatccgc

SEQ ID NO: 479280 - DNA, 122 bp, Homo sapiens
ggccggagggaagggagctccaggtgccgggaagtctactcctgggacgcgggcgtgggtcgcttctccctggctgggcccaaggaggaacccaagtcgctgcttccatccctccgctttgg

SEQ ID NO: 479281 - DNA, 122 bp, Homo sapiens
attcaaatgagatcatacagtatttgtctttctgtgcctggcatatttcccttagcataacgttctctggttccatccctgttgttgcaaatgaatttccttcgttaaggctgtatactatt

SEQ ID NO: 479282 - DNA, 122 bp, Homo sapiens
taacttggcaagaactatccaaacaagataccgtagagctagaatgctcacagacagccacgcattttgcttatctcccactcaatggattgctttagccgggtgtaacaaagacagggaaa

SEQ ID NO: 479283 - DNA, 122 bp, Homo sapiens
ggcttggatgatcctcctgtcttggcctcccagtgttaggattacaggtgcgagccaccgcgtctggctgatgtcttctcatgatgagattccggttgtgccttcctggctggaatgccaca

SEQ ID NO: 479284 - DNA, 122 bp, Homo sapiens
aataatggccaccacgtgccacttgactgtcgtgcgcagggcacaggggctttacatcaccgggtcttccccacagctctggagagtgtcttcattatttggggaagcgcttcagacccaaa

SEQ ID NO: 479285 - DNA, 122 bp, Homo sapiens
tgaaaaggctgcatctgactgtaaggtgcacccttttcctccttgcccttagctgatgtccgctgccccagagaggggcacccacccattgctcgagctccgtacaagggaatttaacacct

SEQ ID NO: 479286 - DNA, 122 bp, Homo sapiens
ggtgattggcttcggttgtcatctgtgccatctgtccatggttcgagaagctgctgttcacgttttggggaggatcatggtttgagggctcccgtggtagaatttggggagctctcataggc

SEQ ID NO: 479287 - DNA, 122 bp, Homo sapiens
gccatgtagcggaaggcgtcctccacctgggccccatggaacaccgtgcacttgaggggccgtaccaccccatcccggatgccggcctgcacaagcgcccacacctcccgccagtcagcact

SEQ ID NO: 479288 - DNA, 122 bp, Homo sapiens
aattaactcatttaaacctgtaccagtgctgaggaagcaggcatcgctttgcgggagaaacggaggtattgagaggcctgggaactgggccagggccacacagctggtgcattgtggccggg

SEQ ID NO: 479289 - DNA, 122 bp, Homo sapiens
cctagaggacacgaagccgaggccaggactgtggaccgcagctggagacccctcttgacccgcgggggctggtgtgctaaggtgcaaagggaggaaagagcaacatgcagggtgacacctgc

SEQ ID NO: 479290 - DNA, 122 bp, Homo sapiens
tgccccaatttgcgcgccccctcacccggaatacacacacggtattcaatacaaccgcctcgaacatcccagacgtctagaaggataccatctgtgcagaaagctgcgtgagtcacacggaa

SEQ ID NO: 479291 - DNA, 122 bp, Homo sapiens
ggtatcgccagtgctcaggggcgagcggaatggagaggaggcggggctggggcgcacagccggcaggggatccctgccggagtctgcttttcacgggttcccgtctagaccagagttggggc

SEQ ID NO: 479292 - DNA, 122 bp, Homo sapiens
tgaaagagagatctgcacgcagcactgttcacgctagcgaggagatggcaacagggcaagcgtccagcaatgggtaagcggtggggtcggtgcacgcaggcgtccagcaatgggtaagcggt

SEQ ID NO: 479293 - DNA, 122 bp, Homo sapiens
ggagtaaagatggcgtccttgccaactcttgggagcgtaacaggcccctttccagggacccgcggccacggcttcttcatctgaagcagggaagtcgacgaagcgccccccacccaggccac

SEQ ID NO: 479294 - DNA, 122 bp, Homo sapiens
tctgaagacccctttccaccaactcagtaaacaagggagactctgagttgttttcttaaccgatcattgttttctggggggcaaagtggagcgtcgggggagagatttttcccctcaaaaca

SEQ ID NO: 479295 - DNA, 122 bp, Homo sapiens
tcaagctagacgtgtcttctattgcctttatgaacatttagtaccaaatgacaatgttcccgcccacagtcggcacgcctagaaagacactgaggagacagtaatgtacagacgacatattc

SEQ ID NO: 479296 - DNA, 122 bp, Homo sapiens
ttgttgtgcaacaaatctctagaactctttcatcttgtaagactgaaactctatattcatcgaacaacaaacaactttgtgtttcctcctcctccagcccctggaaccacaattctactgtt

SEQ ID NO: 479297 - DNA, 122 bp, Homo sapiens
cttcactatttctgccaattttagttacgtggtcttcctacagaaagtgttctgctgctgcgcttttctagttgactgtgcttataggtatctgtcactaattaatagacagcacagacaca

SEQ ID NO: 479298 - DNA, 122 bp, Homo sapiens
tttgtggagctgctacaatcttccacctctgcagagtatacccgtttcttccagtcaccacgaaaggtcatgcaaaaagagattcttcagttctggcactacatatttaatatcaaatcttt

SEQ ID NO: 479299 - DNA, 122 bp, Homo sapiens
cagctgcagggcagggcagggttaaaaggcagggattgagcaagtccctctgcaggaaagcgtgtgcccatgtaatgtgtctagcagatgtaacttctcgtctgtctgggatggagattatg

SEQ ID NO: 479300 - DNA, 122 bp, Homo sapiens
cctccactggctgtgagactctaggcctcagctattccatctgggacgcagcctaactcacggagccttcttctcaagcccaaatggcagaatggggaaacgacttacgaacagggacacca

SEQ ID NO: 479301 - DNA, 122 bp, Homo sapiens
ccttcgcggagccagaaggaatccgtcgagaagcgggacctcaagctcgcggcccaaaagcgcggccccgccacgacgcctgctagctggccccacttcggcgcgcgccgcttacatcatag

SEQ ID NO: 479302 - DNA, 122 bp, Homo sapiens
agataacagcattaggaggaaggggagagtctcggaagactctcccaggagctggttcttcgattaaatttgctctgccactccggtgccgctgaacaagtgggaagaaagccggcaagcct

SEQ ID NO: 479303 - DNA, 122 bp, Homo sapiens
ccgagaacgcgagcgatccgagcagggtttgtctgggcaccgtcggggtaggatccggaacgcattcggaaggctttttgcaagcatttacttggaaggagaacttgggatctttctgggaa

SEQ ID NO: 479304 - DNA, 122 bp, Homo sapiens
gcctgggaacagaggcgggagggctcacctgaacacactgctggtagcgcttgaagaggtcggtgcacgggtccccggagctgtcccccttgagaaatttctcggcgaaccagcgattgaag

SEQ ID NO: 479305 - DNA, 122 bp, Homo sapiens
acacacgagcctacccagcctggggccctgtgtgccagcacctactctttttttttgagacggagtcttggctctgtcacccaggctggagtgcaatggcgtggtttcagctcactgcaacc

SEQ ID NO: 479306 - DNA, 122 bp, Homo sapiens
agtatgcttggtaaaagtcatcgccattctccattctcaataaaccacgggcacaaacaccgcagaaagccgcagggacatctgccctgaaaagccgagtattgtccaaggtttctccctat

SEQ ID NO: 479307 - DNA, 122 bp, Homo sapiens
gtgttggaaaaaaatggacacaaaggaataagaaattatttgttagagacatccccctgacgtacataggggtgaaataacaatttctagggtttcttttaaaaaccttcgaggcagggaga

SEQ ID NO: 479308 - DNA, 122 bp, Homo sapiens
agcgagcaggcggggagggcggggagggtccgcgcgttggtggtgctcgcctcgcagctgcgcccgccggcttcagcaccttccgctgtccgccgctgcagccgcctcctcctccaggtaag

SEQ ID NO: 479309 - DNA, 122 bp, Homo sapiens
aagtacatttctgcttcattgaggtctcaggaaaatgtaagctttcaggacacttgaggtcgctgcctcagtgcagctgtattttaatttgtgtgagtccttatacctcatttaggtttaaa

SEQ ID NO: 479310 - DNA, 122 bp, Homo sapiens
aggccgggactggtcactcggagaggggcgcggacatccgggtgccttggctcacgtagccgctgggcgccaagctgcgggggtcccgggaagggacgcacgtggaccaggcctcaccgccc

SEQ ID NO: 479311 - DNA, 122 bp, Homo sapiens
aagaataatgtattcatttttctagacctcttgtagtagcacataactattgacaaactacggcccagtagatattattctaacgatctgaaaaagctacagacttcattccccatgggtag

SEQ ID NO: 479312 - DNA, 122 bp, Homo sapiens
agcaggaaggaggactcttttgccgcggactcaagccggaagccgccttcctagtggagacgcgagtgggggaggagcagtccgaggggaacgtgggttgaacgttgcaactagggtggaga

SEQ ID NO: 479313 - DNA, 122 bp, Homo sapiens
aggtacaaaaattagctgggggcggtgcacacctggcctgatttttgtatttttttgtagcgatgggggtcttgctgtgttgcccagggcggtctcaaactgctgggttactgatattctca

SEQ ID NO: 479314 - DNA, 122 bp, Homo sapiens
aaggccaggtcccgcacagtgaggccctcctttgtcctccactgaaagcttttcactgttcggtctgcaaagaaagaggttcgcctgcccctgctccactcgccagggtggaagtggtggag

SEQ ID NO: 479315 - DNA, 122 bp, Homo sapiens
aagagagcttcaaattagggctggccttactgactttttttcttctccagctcagccagacgtccaggatcccaccccttgcaaaagaccaggccgtggaagccatgttcccaccagccagg

SEQ ID NO: 479316 - DNA, 122 bp, Homo sapiens
gttcccgggagggacacgcaggagctgcctgcctgggctggggcggtcacctcgcagtgccgtctgtacaccagctgcagggccttgacgtcgtgcagtgtgacgccgtcctgcagcaggaa

SEQ ID NO: 479317 - DNA, 122 bp, Homo sapiens
ggaagtgacgtagcccaacaaagcctagcactggcgaggcggttcgtggcatctcctatccgctccgggcgctgccgccggaagggccagcgacggagggtctcagatggcggggcttgagg

SEQ ID NO: 479318 - DNA, 122 bp, Homo sapiens
aatggtttatacgtctttttgtgttgtttatttgtaatgtcttttttcattcatctaccccgtgaacttcagttaccatctttgactcttcccctgtgtccttcaaacatagttagggtctt

SEQ ID NO: 479319 - DNA, 122 bp, Homo sapiens
ctccctccgctcggaaggtctctgcgaggctcctgggccttaaggcccgaaggaagtttacggggactcgagagagcgggcaggaggcgggttgggagggcgcggagccccgggttcggggg

SEQ ID NO: 479320 - DNA, 122 bp, Homo sapiens
actaggacctgcctcagagtgtcccctttccacctgccgggcctcctccagcccgtttcccgaagctgtggggctgcagccaccccttccacaccaccctggataacagcggagacgtaaga

SEQ ID NO: 479321 - DNA, 122 bp, Homo sapiens
cgctcgccccgcacagcccggccggcccgccgctgcccgcgcccgccccggctcccggctcgcgctcgctcagacaactgagcccgggccgcggctgcacaagaactcatgcaaatcccgga

SEQ ID NO: 479322 - DNA, 122 bp, Homo sapiens
ctcccccacctgctgtgcatccgcaccttcgtcacagcctgtgtcataaatgggtagacgcggctcagtgtgtccctgagttctgtgagccgctccagcaagtcatcagacccaaggagagg

SEQ ID NO: 479323 - DNA, 122 bp, Homo sapiens
cctagagaggagaggacaaggacagtagttggattcattctctggggttgtagctgtctccgtctctttgctccagaccatcccaatctggcaaaacaagccacatggggctgctcgaagtg

SEQ ID NO: 479324 - DNA, 122 bp, Homo sapiens
ccgtctacaaacggggtttaaaatgagctagcgccatctactgggcgaatgccgtaaggtcggttgtgaggtcccggaatctgcaaaggaatgaatgaattacaaatctgtggctttatggg

SEQ ID NO: 479325 - DNA, 122 bp, Homo sapiens
aagaagggggagactttggtccctgcctaatctggttgggtttgtgccgcgatgggcatgcgctaatctgaatgctttccccttagtgttacctggtccctgtgctgaggagatgccaggac

SEQ ID NO: 479326 - DNA, 122 bp, Homo sapiens
gcaccagcacgaagaagagggtcagcccgaagtagacgtagtcccccttgcggtagtagtcgagggccagccacaggtcggtgcccacgtccccgaagaacaccagcagcgccagcacgatc

SEQ ID NO: 479327 - DNA, 122 bp, Homo sapiens
cgtggggatggagctacggggagggtgcggtggtgactgctccactgcagagccaggtatcgccaggggcgccaggtgagacccagcagagacacaggtggaaaggagtgagtcctccaggg

SEQ ID NO: 479328 - DNA, 122 bp, Homo sapiens
cagcctcgcagccgccctggtccagtgccaacggcaggagcaccacaggaagggaccgcgcgggtgcgccccacccttccagcgtcgcctcggggactcgcacccctttccctggccgcaca

SEQ ID NO: 479329 - DNA, 122 bp, Homo sapiens
tgagagctagcttcccagtgtccagccagaggaattggggctcactcaccttccagcactcggacccccaccatgccatccaggttgatttcaggcagcctctgttctaggaagacggtggc

SEQ ID NO: 479330 - DNA, 122 bp, Homo sapiens
ttttgagtaattagggaaagaatgtgggtttctttattaaaacacaaattagacagcagccgccggaacctccatcattcttgtgggtaaccacttgctacaacaaatgaccatgacctacc

SEQ ID NO: 479331 - DNA, 122 bp, Homo sapiens
ccaaacgttcttactttcttaactttagagagatgtactttacgaatatctttctcttcacggaattgatgattcagttccacacataaattgcaactcgtgcaaggaaatgatttttaggg

SEQ ID NO: 479332 - DNA, 122 bp, Homo sapiens
ctccgtgctccaggcttgttttcctctggacctgggaaccactggcttactttcactcaccgcctgtccttcctgacacctcaccatgtgtacgggaaaatgtgcccgctgtgtggggctct

SEQ ID NO: 479333 - DNA, 122 bp, Homo sapiens
tgtgcgcgcggccggagtctgtggagctggaaattcaccggtccaggaagacgtctttcccgcgtcccagcaccggtccagaaagacgtctttcccgcgtcccagcacctcgggccacgctc

SEQ ID NO: 479334 - DNA, 122 bp, Homo sapiens
cgtcaggcccaagtcctaggtgagaatgcaggtctgcgagcccctaggaccggaccataacgaccttaacagccataacggccgtaactgccataacggccggctgcgcgaggcccttccag

SEQ ID NO: 479335 - DNA, 122 bp, Homo sapiens
ccggcctgctccgggctctgaggggcgaggacgcttcacgtggtggcctggggcccaccccgcctaggaaaggcggatcctttacgtctgaccctctagcaacccctgggccggtctgggaa

SEQ ID NO: 479336 - DNA, 122 bp, Homo sapiens
cccacccttggtcagccccggttctcatctttaggatgttttgtctcgcctatcaagcatcgctgggagtcccccgaagggttgggattacagacaggataccccatacccaggggctgcgg

SEQ ID NO: 479337 - DNA, 122 bp, Homo sapiens
cgggtaggaggtgtggggctgcgggggagagtaccgggtcaggccgggacacgccccctccgccgctctacatccagccacccaggaccccccagcagaggccccacccccccacaccccca

SEQ ID NO: 479338 - DNA, 122 bp, Homo sapiens
aggtgctagggagataaatacctcaattctttgaaactttcaaaaatctaaaaatacgtacggatgtgctaaaatgaaaaacagaagagaaagcttctgcagcaaatggaaacactaaaaag

SEQ ID NO: 479339 - DNA, 122 bp, Homo sapiens
tcaggagctcatgaaggcaagggcaagtcttatttacctttatctccccgaacctagaagcgaggtcaaacagaagcgctcggggtagcaagaaggctttgtagatattgaaatgtgaatgc

SEQ ID NO: 479340 - DNA, 122 bp, Homo sapiens
atagcaggtggcagcaaagggcggcctctcccctccccctccttgtctgctgcttggccccggtcagcttcagtctccagccgtggggggtcccctgctaaggccagccctgtcaatgagtg

SEQ ID NO: 479341 - DNA, 122 bp, Homo sapiens
gtttttagtcatgaaataattttcactcctttagtcttgcttgttggaacttatctagagcgttctgtgaccctctttatctagagttgagggcacaatcactgctggtataatggggagag

SEQ ID NO: 479342 - DNA, 122 bp, Homo sapiens
atcggagcggggggtgcacactcagtctctgggtaacctggttcaaattccatggctgtgcgacctcaggtaagttttgtctgccgccttgtctgccaattgcaaagcaaaatggccccggg

SEQ ID NO: 479343 - DNA, 122 bp, Homo sapiens
gaccctctctgctgcagagccacagaccgcagtgggctgtccagggagtgctggggcatccgtctttactcgatgacactgggggaacgcgtttctggcctccgtcactcccctgtgcttta

SEQ ID NO: 479344 - DNA, 122 bp, Homo sapiens
gagaggtgtagaataagtgggaggcccccggcgccccactgtccccgggagggggcggggcggggtctgcccgccttgagggctgccggtgtaataccactactctgatcgtttttttttca

SEQ ID NO: 479345 - DNA, 122 bp, Homo sapiens
tgacctcgtgatccgcccgtctcggcctcccatagtgctgggattacaggcatgaaccaccgtgcctggccaaccctggtaacttttaacaaggaagggatcagagatgcagaggtttgata

SEQ ID NO: 479346 - DNA, 122 bp, Homo sapiens
agggacgaggtggagccagtggcagcactctggtgccgtcatagcaacgaggggccgcttcggccaatcactgctcgggaagcgagggggcggggactgggcagggcctgagcgggttctgt

SEQ ID NO: 479347 - DNA, 122 bp, Homo sapiens
ggtcagataagaagtggcagttcagtaacaaggactgtaacacagcccagggtgtggcaccgtgctttgagatcctctggatgacctcacaggaaaggcggagaaaccaagccttgcatata

SEQ ID NO: 479348 - DNA, 122 bp, Homo sapiens
tttggactaccatgacttggcttctaaatgaactgcggcaatggataagttacatcacctcgttaagcctccgtttccccatttgtaaaatggatgtcatgtgcaccaggctacagggagcc

SEQ ID NO: 479349 - DNA, 122 bp, Homo sapiens
tctccctctctccacaaactgcccaggagtgagtagctgctttcggtccgccggacacaccggacagatagacgtgcggacggcccaccaccccagcccgccaactagtcagcctgcgcctg

SEQ ID NO: 479350 - DNA, 122 bp, Homo sapiens
tcatgcccaggctggcctttgagtcctcaccgatccatttcatgatgaggaattccaccacgctcccgcagatcagaagacgggaaggggcttagtgccaatgtagggggagggaaggaaac

SEQ ID NO: 479351 - DNA, 122 bp, Homo sapiens
ctgggtctccccatggccacagtggagctaaacagcagccaagcgtcccccgcactcactcgggggacctgccctctgtggcctcagcactgagcaggcaaggggttctttcgtttccttcc

SEQ ID NO: 479352 - DNA, 122 bp, Homo sapiens
cactcttccggcaggaagtctgtgcgtcaggaggccggccaggactcagctccagccccgcgctcgcgtgtagccctacgtaaagcgtgaggggtttcgcgacaacccaggccccgcccctt

SEQ ID NO: 479353 - DNA, 122 bp, Homo sapiens
tgtgtggagtagcaaggtgcgcgacgcaggaacctttctcttgtgggtgcgtttctggcccgagtgctttcctgctgctctccgaatccggaagctgctggagaagtcggagcatcccggaa

SEQ ID NO: 479354 - DNA, 122 bp, Homo sapiens
tacaagaatttagcacttagaacactttctagtctgtagtaagtgcttaacaagtgttagcggttgttgcagtagcagctgctgctgctgttgttgtgtgtaagtatctgagtaagcaggta

SEQ ID NO: 479355 - DNA, 122 bp, Homo sapiens
agcgctccacccctcatagaaatttcactcctcccagccttcatttcaacagcaatgcttcgcccattttatagatgcagttggggctcagaccaaagcctcgtatccagttaggagcagga

SEQ ID NO: 479356 - DNA, 122 bp, Homo sapiens
atattaagactgtgatggttaattatatatccataattattgactgggttaagtgatgtccggatagctataaaaccttctcagagtaactgtgagggtgtgtctggaagagatgagcattt

SEQ ID NO: 479357 - DNA, 122 bp, Homo sapiens
cggggccccgcggcccccgccccgcgcgctccgcctccgcctcctgccccccgccgccgccgctgcgccacctgcctcccgcccggcgcccatggcgctcagctccgccccggggcgccggc

SEQ ID NO: 479358 - DNA, 122 bp, Homo sapiens
ctggagtttttgggacgcttttgtgggggcaccgctgagtccggatagtgggacccaagtcgtcctgctcggcccctggggaataatcgtgtggggcgcaaggtctgtgggaagggacttgg

SEQ ID NO: 479359 - DNA, 122 bp, Homo sapiens
taagagcagagcagagaaaatcaacagcagcacacgccgcctgcatcccatgcgcacctccggccacggccattgctcacctctgaagacaatgctgcatttatgttggattcaataacaca

SEQ ID NO: 479360 - DNA, 122 bp, Homo sapiens
taggctagatggatggatggacaacagataaaaatatttttttcttctgtttttgacaaccgtgataaaattataacattctagggtagaaatggaaccctatttgatgcaccctttaattc

SEQ ID NO: 479361 - DNA, 122 bp, Homo sapiens
atcgcagccttaaatttctccatcccaggaggcagctcctcttccccaacagctgcggagcgtcctggcctttgtctcctcctcagcccgcctgacttttatagtggtcactgtgtcactgt

SEQ ID NO: 479362 - DNA, 122 bp, Homo sapiens
agcatctagtccagcctcctggatctccctcctcccacccacactccttggggtcctgagcgcacgccctgtcacctggatggaccatgatcaagatgagcaacagcatccaggccatgtcg

SEQ ID NO: 479363 - DNA, 122 bp, Homo sapiens
cttctaccaacgcgaggacaattttccattccattggtttcgtcttctagtccgtgtgaacgttcttttcccattggatccccttactagtttctctgtgagagaaacttccactccattgg

SEQ ID NO: 479364 - DNA, 122 bp, Homo sapiens
taatcgtatttaaaagtggattacaagagtcggaaaaacaagcggcgtgatttgttgtggcggcaaccagggaagaggcaggagaaaggcaaccgacgagttcaaaccacggagccccagtc

SEQ ID NO: 479365 - DNA, 122 bp, Homo sapiens
ccgcccacccgacccatttcgaggccacggactcgaaagttattcgaacagaacagccggcgtgagcctggcaggcctttggtgcattttctttatttcattttattttttctcttttgaga

SEQ ID NO: 479366 - DNA, 122 bp, Homo sapiens
caaccaggcgatggtgcactggacgggcgagaacagcagcgtaagtgacctccacgcgctcgccgcggcccctacccgggacaccgcgggacacccgggcgggaccgccacggcccccaccc

SEQ ID NO: 479367 - DNA, 122 bp, Homo sapiens
ccataaactccgacagagaggcaagacaagccaggcttcccacgctcctgtcccctccaccggccctgccaagggtaaccacgtgctgggagatttgcagcacaacgcaaaggagaaggatt

SEQ ID NO: 479368 - DNA, 122 bp, Homo sapiens
aaatagaaatgtctggtagcacacaaacaagcatgtcctggcagcttgccagaaaagacacgttatccatcaaccaagactgaattgaagagaagtgttctcagtgcattcaccacctttaa

SEQ ID NO: 479369 - DNA, 122 bp, Homo sapiens
cggcagcatggaccgggctggggcagacatgtgggccagcaccttcaccctggccatggccgagaggaagccccaggacgtctgggttctgctacctgagcacagcctggtcccgggatgcc

SEQ ID NO: 479370 - DNA, 122 bp, Homo sapiens
gcggtacctggagacggcagactacgccatccgcgaggagatcgtgagtgctgtggggtgcgggctggactcttgggtctgaggcaggaggtggctgggggcctggattcctaagtctaagg

SEQ ID NO: 479371 - DNA, 122 bp, Homo sapiens
ggccctgcattgatgcgatccccctgtgtaattgcccatgcaaatttgagcaatctgtaacggacacaggaacccagcatttgtccgcagactctcctacctccagaaaaacttcgataatt

SEQ ID NO: 479372 - DNA, 122 bp, Homo sapiens
aggagcggactttgcggggtggagccctgaagccctctcccaatcgcacaagtgtaggggcggggcattctttggggggcccaatgaggaacgcggccgaagctggcctgtcaagagaaggg

SEQ ID NO: 479373 - DNA, 122 bp, Homo sapiens
gtgttgactcctctgtggagcctgagtctctctgagccccaaggtcaaggctttgcaaatcggggctatgatccggaaaatgtagtgctcatatggttctgggcgtcagaacatgattacat

SEQ ID NO: 479374 - DNA, 122 bp, Homo sapiens
cagctctgtgggtgggctgatttacaaacccaaatgctgggagtcctctccttctgaaaacgaaggggaaagaaaaaagaggcattcatccaggaaacccacctggttacatcctgaaatat

SEQ ID NO: 479375 - DNA, 122 bp, Homo sapiens
cttctcgccgtacgcgttatatagatctgtttcacaaataaagaacccgaggctcagtttcgtattccaagtggcaccaaccccatgacccgctccagtcgagactatttccagagatgcga

SEQ ID NO: 479376 - DNA, 122 bp, Homo sapiens
gccgtgatttacccaaagcccttctggaaaacaactgacgtcagacactgagcttccggccggggacctgcggctccctgctgcccgaggggcactgccccttctccccagggtggccggct

SEQ ID NO: 479377 - DNA, 122 bp, Homo sapiens
acaaatttctgacacattgcttttccgcaggaggttgcgggaagacgtacaaggaagggtcgggatggtgcttgaggtggtcagagccacacccagggctgcattctcatcagagacacctc

SEQ ID NO: 479378 - DNA, 122 bp, Homo sapiens
gctgcatccatgttgtttcaaaggacatgattttgttatttttatggctgcatagtattccgtggtgtatgaaatggtttggaaggtggcccctataaatctcatgatgaaatgtaatcctc

SEQ ID NO: 479379 - DNA, 122 bp, Homo sapiens
cgccccttgcctccaccctcattgatatgacagcttggggtccatactttcagctgaccacgcacctaccaaaagtacttaatggacgtttacctgaccacgcccctggttggctccgcctc

SEQ ID NO: 479380 - DNA, 122 bp, Homo sapiens
ggttcaataaaagaaaaaaatactactgactttcttaagaaacctttcaaaaacttctgacgctcagtgaaatataaatttgaaaaatcttttctcaaaatacaccattctgcttcaccaca

SEQ ID NO: 479381 - DNA, 122 bp, Homo sapiens
tcctctcatccccttaaatgccgctgtcatgcaaggcttagtcttcgagccacaggaaagcgccccgcatgccttaatccctccgtactcagccctctttttgcaggtactattttctaaaa

SEQ ID NO: 479382 - DNA, 122 bp, Homo sapiens
tgggggttttcctgtggctgcgtgccctgacacggtggaggccttcggctccggtcccgccgtgtgcctggtgccccgtgacgtcccttagcctctgacagaccccctgttttctagtgatc

SEQ ID NO: 479383 - DNA, 122 bp, Homo sapiens
gggtttcaccgccgcacatgtgtcagcgtgcggtgagctgaggcccctggaggctctgggcgccgaatctcacccgctgccatggccaaagccggggggtgattttcaaccaatgccgggtg

SEQ ID NO: 479384 - DNA, 122 bp, Homo sapiens
ggagggggcgttgtctgaatctttctctacttcccttcccccagcccaaccagagcccagcgcttcccgaaaacttttgtctgccgcgagcggctgcaggacccagcccctcccctctttct

SEQ ID NO: 479385 - DNA, 122 bp, Homo sapiens
aaacgtgaacacaaatgtgaaataatacacctgtaaacacatctctggatagatagcccacgattgaattctctaccccacctcctttactggttgacctgtgaacacaggcaggcagtgga

SEQ ID NO: 479386 - DNA, 122 bp, Homo sapiens
tggggcggggtgtgtgtgtgtgttgggaggcgggggtccctctcctttggcttggggctccggagttgccactgccgccggcgctggtaaggtaggaactgcggggtgcgttgacgttttgc

SEQ ID NO: 479387 - DNA, 122 bp, Homo sapiens
tgcgcctccgcggctgcgctacgaaaacgagtcccggagcggccccgcgcccgccgcacccggccctcgcccgcccgaagacaggcgccaagctgccccgccgtctccccagctagcgcccg

SEQ ID NO: 479388 - DNA, 122 bp, Homo sapiens
agcataaaaaagacatcactttggagattttaagaattttaggagttgtatgccaaaaaacgaggttgaacatatacttcacaatatcacagtgaccttggagaaatgaagctgaaaacagc

SEQ ID NO: 479389 - DNA, 122 bp, Homo sapiens
acctagatgggcagagggtgccaacttgtaatctgaaaggggccttcaaggacaggaaatcgcagatctgaatgttgtctgtttccatcccattttaccgcaatctgatttccctgagaatt

SEQ ID NO: 479390 - DNA, 122 bp, Homo sapiens
cctgcgggagcggagtggagtccgcggtgcctgcgtggccggggcagggcccacagggtccggctcagagccccgccccgctgcctgcggctgccgagcctttccaagctcgagggggccgg

SEQ ID NO: 479391 - DNA, 122 bp, Homo sapiens
aaaagccatttcgggaggaatctggtctcggctggggtccggccggcaccgtgaacaccacgtgaacaccacgtcggaaatctgctgggcagggagatttcctcaaggcctcccagggagga

SEQ ID NO: 479392 - DNA, 122 bp, Homo sapiens
gcattgtcaacagaagtgtagaggccatgattctaaacttgtgttctctacgcctaactacgaaccttgtgcctttccaaaaccaaaggtcacacttctggaaagttccttcctccctcaca

SEQ ID NO: 479393 - DNA, 122 bp, Homo sapiens
tacaggttcagtagtgttaagtacagtcaccctgttgagcaaccttttcatcttacaaaacggaaactctacacccactaaacagcaaccatcttcccctgcccaccagctcctggcaacca

SEQ ID NO: 479394 - DNA, 122 bp, Homo sapiens
aagtgctttgcaagttcattttcgttgtcaggagcgctggtggtttaggttctccacagacgcaggaaaacatcagtcacgaggcgaatgtcccagtcagtgtgcatgctgcacagacctgt

SEQ ID NO: 479395 - DNA, 122 bp, Homo sapiens
gggccatccactccctgcttcagggctatcccccgtctactggggggaccatttgtctaacggggcagcatcacccactgcaggaatcacccctgtctactggggagaccgtcccccgttca

SEQ ID NO: 479396 - DNA, 122 bp, Homo sapiens
caccctttacctgctcctctgcttccgccatggcgccacgggagagtcacctgacagacccggaaataagaggaaaccacacacttggcccagggccttctgggaaatgtagttttagcttc

SEQ ID NO: 479397 - DNA, 122 bp, Homo sapiens
ctccttgatctggattttgactttgtatgaccctttccattttctttgggggatccggaccgagacctgcttcgatatttctcatactcatccttagatctgcttcgagaatgtgaatggga

SEQ ID NO: 479398 - DNA, 122 bp, Homo sapiens
tggggggactcgaggggacctggatgggccagaggcctggcttggggaagggccccttcccggttccccaaggtcccggtgtgccgctgccgtagggaagcaggaaggcacggccgcgccag

SEQ ID NO: 479399 - DNA, 122 bp, Homo sapiens
gctgcaggctgcgagcagaaaccacatcccggacccacgctgatcccgactcagcctcgccgaagcaggcgacaaaggaccgctctcagctccccgggcctcccaaagccgcggccgggtca

SEQ ID NO: 479400 - DNA, 122 bp, Homo sapiens
atgccctcccttctccctcggtcatttcttcctttccagtgagcaggtcacaagggcaggcgcaggagatgtgattgagctgtgctgggaaatgcctcggccccaccccactcctactaccc

SEQ ID NO: 479401 - DNA, 122 bp, Homo sapiens
aagttaatgtcatgccacaatcaaccctgtatgtcagggcccttgagagcagagtagtgtcgggagagtgggtggtatggttgacacaaagacccacaggtatttttatgggttcacttaat

SEQ ID NO: 479402 - DNA, 122 bp, Homo sapiens
gtatgcatagcatcatttcaaaactttatcattacagttactggccttgcttttctgcctcgatttgtctgtttttcttgattctctccacattggcttctctgatgcttccacttgccttc

SEQ ID NO: 479403 - DNA, 122 bp, Homo sapiens
aaaagatgtgtttgtgtagcggggacgcagcttgacacccatttcctttggctcgcatcgcggtcgcagagcccaatcgcggggaaacgggccccccagaaaaacaggcaacgacccccagc

SEQ ID NO: 479404 - DNA, 122 bp, Homo sapiens
gacataaggtctaaatattttggggcctccttgcccactatcatgctaatgtctcaaccacgtgttttccttacctttctcattcagattagttcttttgccttttggcctttgttttgtca

SEQ ID NO: 479405 - DNA, 122 bp, Homo sapiens
ggggcgtggcctgctgctctgtgggcggggccaaacttaggtttcattcacttggggacccggaataggttgaggccagtaaagttctcgcctggaaaacaaaatttacagggacgccaaaa

SEQ ID NO: 479406 - DNA, 122 bp, Homo sapiens
ccaagggcccggatttaagaagagtgtgcctacaaggcggttgtcacggcaacgagagggcgggattgttcgagcgctgcggccccctcacgtgatcgattcggaggcggggcgtccgccca

SEQ ID NO: 479407 - DNA, 122 bp, Homo sapiens
ttaggaactacaacgtgagcctttattttgcctcgtctgcaactccatccttagcctttgcgttgtcagcctgccttcctttgccacacttgagtcttcctaaccttaccccttaatagcaa

SEQ ID NO: 479408 - DNA, 122 bp, Homo sapiens
cccccctgccacctccaagcctggaattgtgcataacccggatcttgtatctttgtataacggatgttatttgtacgaagggcagttcgtaaacagcacttgttcttttaataaaagaatgt

SEQ ID NO: 479409 - DNA, 122 bp, Homo sapiens
cctccagcgaagtggcgcgcggatctgggccagaactctccagagctgcgccgcagacggcgaaaaccagaggtggttacagtcaagtttagggactgcaggagcgaattcccgaaggcttg

SEQ ID NO: 479410 - DNA, 122 bp, Homo sapiens
gagtttcagaagcggaagcgttcagggattggttaacctttagctactgaggcgtgattacgccaatggagctgtcattgattggctgtccctctgaagcagtctcactgcagtgaggcagt

SEQ ID NO: 479411 - DNA, 122 bp, Homo sapiens
aaggagtccgtggcggagtctgtgcttctcattccagcaggcgctgggcgggggcccacccggccccaccaccgccacccaccagccacggcaggcacggggcgggcacaggctggggcggt

SEQ ID NO: 479412 - DNA, 122 bp, Homo sapiens
cccgtctgtcctctcccagcaactgtgccctggagggctccacatggcccccgtgtctctcgggcaccacccatatagcagtcccagagggcccatctgtaaagatcgagcttgtgtgtggt

SEQ ID NO: 479413 - DNA, 122 bp, Homo sapiens
tttaaaaaaaaaaaaaaaaaaaaaaagaactagaagccacatatgtagcgggcccagtctcgcattggactcacagaagctgcagtctcagtcagaaccaggaacagaaaaaggacttgaaa

SEQ ID NO: 479414 - DNA, 122 bp, Homo sapiens
aatggaccaattttttagcattacggagatttggccaatttggcgaccttgacagaaaggcgcacagagaaccgttgcctgggggcggggcgggtgtggaagccagggtgggagaggaggag

SEQ ID NO: 479415 - DNA, 122 bp, Homo sapiens
ccagtaggtgacaggcgatcctaagcggcgggaacacgccaacgcaccctcgcctcccggcgccccgcatcgcctcgaccctcgggctacagaacctgtttccacgccggagaaaaccaagg

SEQ ID NO: 479416 - DNA, 122 bp, Homo sapiens
ctgtgacagggcagcactgagttccaatgcaaggccctgcaatcactgccctgtcccttccgcaagcacactgattctctatgccatgtggccactgctgggggatgtggaaggggtggtgt

SEQ ID NO: 479417 - DNA, 122 bp, Homo sapiens
cggggccagcgggattggccggccactctgagtgtggggcccgcggagcccatgcccacccggaactcggctggcccgcaagtgccctgggcagcctggttcccacccacgcctctccctcc

SEQ ID NO: 479418 - DNA, 122 bp, Homo sapiens
tcccaggtcctcccacttggagggccactacccttgcccctccaggtgtgggtgtaggagcgggatacccgtcccgtgggcgttgatgtagggtgttgcccactcccgtcccttaaactccg

SEQ ID NO: 479419 - DNA, 122 bp, Homo sapiens
acccggctgaaagcgcacacgtgtcctgccgcgctgagccgccagcaggactggtaccaccgccctccctcggggctagggtcaccctgccgtgacacgcagggacaagccaaacactcccg

SEQ ID NO: 479420 - DNA, 122 bp, Homo sapiens
ctctggattccaggcctctgcccctgcaggtggacacacagaccgtaacgcagaggctcacgtgtcccacactatgcattaccatttgtgtacgcactcgttcacatttagcaggattgtaa

SEQ ID NO: 479421 - DNA, 122 bp, Homo sapiens
actcccctcgggaaattcccctttttccctcagtgccaggcctgtgtggcctaataacgacggccctggtcttcttcccactcccctacccttaggtaggcccttagactccggcctttgag

SEQ ID NO: 479422 - DNA, 122 bp, Homo sapiens
tttaaagatagagaaacggtgtgtaaagggatgatttgtatcctggacagctgggtaatgcgaattggaggaaaagatcacactaacccagcttcacctgatttatgaattgttctgttttc

SEQ ID NO: 479423 - DNA, 122 bp, Homo sapiens
gacgtgccattcccggcttccccgggaacctcccgcttccaccaacaactccgcgacgcgcgcccagcctcacctctccgggcaggtccaggcagcccatggtggggatgcgcccccctcgg

SEQ ID NO: 479424 - DNA, 122 bp, Homo sapiens
atcttattcaaaggggtggtggaatggggtggggggagagcatctgctattatctccggtcgagtgctagaggcttgagcccacatctggggtctgagagaggatcctgcactaggaactgg

SEQ ID NO: 479425 - DNA, 122 bp, Homo sapiens
agcgtcgcggccctggggacccaaaggggcctcttagggggcctggatgctccccttgctcgcaaggggtcgtcagtccctccgcgcaccacccccactgtgtgtgtgttgtatgtgtgcgt

SEQ ID NO: 479426 - DNA, 122 bp, Homo sapiens
ctgggaccgcgtccgttggcggttggggtgaagggcaccccctggcccccgcccccgacgcggtcgctggtgtccccacccagcgtttcttaccggcgcttttgcgccctgctgactccggc

SEQ ID NO: 479427 - DNA, 122 bp, Homo sapiens
ctgaccccccgcgccctccccggagccccccgcgcgtgccgcggccatggcggccgtgcgcggggcgcccctgctcagctgcctcctggcgttgctggccctgtgccctggagggcgcccgc

SEQ ID NO: 479428 - DNA, 122 bp, Homo sapiens
cccatctgccctagatccacccctcccgtcccggctcacgcgcgccgccgtctggctgagcgggcagatgctgatgtttagctgttggcaaaaggtgaagtgatctttgaagcctctgagcc

SEQ ID NO: 479429 - DNA, 122 bp, Homo sapiens
tcaggttctggaaccaagacaagtccagggacaaccccaaagctggcctgggctcccgcgcggacagcttttataccctgtacggaaccgcccctgcccaggattgaagtggccccgcctcc

SEQ ID NO: 479430 - DNA, 122 bp, Homo sapiens
tgggcgaaagagccagactccggggcccctcatccgcctccgccccgcgtttcctccccccgatctcccaggggtcctcttttgagggcaccccagcccctcgacggtcccgggatatcctg

SEQ ID NO: 479431 - DNA, 122 bp, Homo sapiens
gcgccgggcctgcacagaaggttctcccgaggactcctgcgggagggtgggagtggggaccgctagggcacaggagccgctgaaggcacagctgtttcacatggcccccggccgctgtgttt

SEQ ID NO: 479432 - DNA, 122 bp, Homo sapiens
aatcacttgcggccaggagtttgagaccagcctagccaacatggcaaaacctcgtctctacgaaaaacacaagaattagatgggcgtggtggcaagtgcctgcaatcccaactactcaggag

SEQ ID NO: 479433 - DNA, 122 bp, Homo sapiens
cggtgccttgcagagtggaaaagtcctcagggtgagaagattctgggaagcccgtaccgccgggaagagcgggagtttccacacagggcaggtggtggaggggttagaggtgccctgagcgc

SEQ ID NO: 479434 - DNA, 122 bp, Homo sapiens
tattttaaaggtctcagcacaggccgagaatccagccggaagtagcgggtggtgctgcgccgcagaagggcaaggtgaaggcgaagcgggctcggaagactagggctcctcaggtagtagaa

SEQ ID NO: 479435 - DNA, 122 bp, Homo sapiens
gaaagggaaacaacatgtccctctcctaggtatgtgtggagtccctgccagggcacaccacggctgaccaggagctccactcctcccctacgcccctcccctccccaacacccctcctttcc

SEQ ID NO: 479436 - DNA, 122 bp, Homo sapiens
ctcccgggcgccgcgtcccgcgctcctgctgccagcccagccggcctggggcgccctagccgctggtcctggcccaacaagtagccaccgacccctcccatgtggcctaggacgggaggagc

SEQ ID NO: 479437 - DNA, 122 bp, Homo sapiens
caagcctaggaaagtgcctcaggctggacggtcccctgaccgccagatagcacttacccgcggctccgaaccacaccagcagctgtccccagcagcccatccctgttgggtccacccggcaa

SEQ ID NO: 479438 - DNA, 122 bp, Homo sapiens
acccatgcggtcactcgggccacttgccgtggcccatcggctccctccctcgccgccctgcgtccctgcccttcaccccacacactgtgggccacgcgccaggccctgccagtggggtgtgg

SEQ ID NO: 479439 - DNA, 122 bp, Homo sapiens
tgagctttctcaggcaggcattttaagggatctgggtttgtcatcctgggaacacagcctcgagcttacagaaactatactagtgtttgcccatgtctcttagttgggagggcaggaggagt

SEQ ID NO: 479440 - DNA, 122 bp, Homo sapiens
ttgctgcgagccgcctgcagccaggggcacagacggatgcgcagcatccccagtcctcggcggacagccgggtagcccaacttacccaggggtttgattgtgttctccgtcgcctccttctc

SEQ ID NO: 479441 - DNA, 122 bp, Homo sapiens
acccatcagtcctgctggaccatctgtgagactggttctgactccagtgacctccgtctccgggggcagtttgatttccagtggtctccaccacaggctggatagggttgaggtggcttcct

SEQ ID NO: 479442 - DNA, 122 bp, Homo sapiens
cccggctgctccatggcgctgtgcgaggccgcgggctgcgggagtgccctgctctggcctcgcttgttgctcttcggggactccatcacccaggtacggccgccccgacgctcggcctcccg

SEQ ID NO: 479443 - DNA, 122 bp, Homo sapiens
cctctggggcgggatgccctcccgcgccctccctccccatcccacccccctccttcccctcgatccagccctcatgaccctgaccctggccgcggctgcaggcggctcgcccaggcgcgcag

SEQ ID NO: 479444 - DNA, 122 bp, Homo sapiens
attaggtgtccaagtagaaagatcaaatcttccgacggcaggtaccttacatgggatttacgatccgacgggtccgaacgcagctcgggaacagaaagaaagcaggttatttgcaatctacc

SEQ ID NO: 479445 - DNA, 122 bp, Homo sapiens
gaagatttcccctactgccacccacacacacagtcaactcatcatacacgtacacaaccacgtagagttgtgcaatccataatgtttgtcatgcagggcaagttcttcactcaggagagaat

SEQ ID NO: 479446 - DNA, 122 bp, Homo sapiens
tgagagtgtcttggtcatcctcactgccaaactcccaccggcaccatgacagtttacaaacgccatggaaacctcagtaagttaccctgtatggtctaaaaaggggagacatgaagaatcca

SEQ ID NO: 479447 - DNA, 122 bp, Homo sapiens
caatgggtcccccagtaagacccaaaggcaggacgtgcagtgcagcccgggtatcccctccgtgtggctggtgtctgtctgcaccaaaaggcagttgggttaccttagccctggcttttctc

SEQ ID NO: 479448 - DNA, 122 bp, Homo sapiens
cgggcgcagggaggagagctggtcagccaagattccaagacaggtgtccacctcctccaacgaagcggaacacgtgacaccaccctatccacttccggcttggagggcatgccctcccgtca

SEQ ID NO: 479449 - DNA, 122 bp, Homo sapiens
acacagtttggattagtcatttggtaattaatgtcaggaagaggttctcatctctggctgcgtatcagagtcacctctgggactttttataaaataaagatcccaggcacagccccagagca

SEQ ID NO: 479450 - DNA, 122 bp, Homo sapiens
tacgtcactcaggccttagggggcggggtatgtcaccctatccaatcaggggcgctggggcggggccctgccaactgtccattcagatgggcccgggagaggagggcagggcctgcgcctcc

SEQ ID NO: 479451 - DNA, 122 bp, Homo sapiens
cccagcgccgcgctgcggggcctgctgggacttgtagttcgcaggttcggggtgcgcaggcgcagtgccgagtttacctctgcgcgcgtcggggttggtggcggcggctgcggcgagttcct

SEQ ID NO: 479452 - DNA, 122 bp, Homo sapiens
aggctttgtcttcctgcagggtggaactctggcattgtagggattaaaatgaaggatgtacggtacaaatgtgcaaagcttcagagaggatggaaggggcctgggcttctccattatcttga

SEQ ID NO: 479453 - DNA, 122 bp, Homo sapiens
agcaactctgaattcataggaatggccttcggtaagaccagttaccctgagccgcagatccgttaatgttttcttgttgcacttggtccatctaacgccttccttatctcgtttttcaagaa

SEQ ID NO: 479454 - DNA, 122 bp, Homo sapiens
tcccgcctccttgaggcgggcccgggcggggcggttgtatatcagggccgcgctgagctgcgccagctgaggtgtgagcagctgccgaagtcagttccttgtggagccggagctgggcgcgg

SEQ ID NO: 479455 - DNA, 122 bp, Homo sapiens
ccccagccgcaaagcccagagagccccttttgggaggacggggcgaggcccagcaatccgcgttgggagtggtcccgcgcgccgttctgatctgggcagccctgggctagcggagaccacgg

SEQ ID NO: 479456 - DNA, 122 bp, Homo sapiens
gaaggaacaggaggattctgctaattctaataactttcccagctggtagcagggaagcatcgtatgtcctttgtgtttctcaaatctgcccaattgttctctgctttcggggaagctttact

SEQ ID NO: 479457 - DNA, 122 bp, Homo sapiens
gaaaggggttgtcaggagggtagaatttgcactattaaatcttcatagagtgctatttcccgtcactacagcacacttgtcaccaactataaagaattaggtcagggaatttctttggttgc

SEQ ID NO: 479458 - DNA, 122 bp, Homo sapiens
cgggaggggaactccaggggcctggaaaagcaggcgtgcggccccagatggaggaatgtgcgcagggaacctgagatggtgcccgggcgggcaccgccccacccagccccggccgaatgccg

SEQ ID NO: 479459 - DNA, 122 bp, Homo sapiens
taaagaaaaaagggaaattctgtctttacaacaacattcatgaacctgcaggacattatgcgaagtgaaagaagccagacacagaaggacaaataccacatgatctcactcttatgtggaat

SEQ ID NO: 479460 - DNA, 122 bp, Homo sapiens
accccgccccagccttctctgctaagctgcgtgaaacattttccactgtggcttcccaaacgtgtctccttaggagactacacagcccgaggcaggtgaattttcccgaatgacaagaggat

SEQ ID NO: 479461 - DNA, 122 bp, Homo sapiens
ttcgtgggttttgtttaagcagccgcgacctgtgcctgccgccggctacctccgctgtggcgggcgagcacctagggtcctcacctacctgggtcacagtcaggtccagggcaagccggcta

SEQ ID NO: 479462 - DNA, 122 bp, Homo sapiens
ccatttaaagggacagcgcacccagtggaaaggaaaataaataaatgacagaggtctgcacgcatataccacttgccaatccgtacttgggaagacgcgcgaggtgtggatgcattctttct

SEQ ID NO: 479463 - DNA, 122 bp, Homo sapiens
gggtgaagggctggaaacaggtcatgagggcgcaaacaggtcgtgagggcgcaaacaggtcgtgagggcgcaaacaggtcgtgagggcgcaaacaggtcgtgagggcgcaaacaggtcgtga

SEQ ID NO: 479464 - DNA, 122 bp, Homo sapiens
ggttagtacatgggctggggcctgcgagctggggtttcctaagatttcccaaactcaggtcgtttctttgggcacctcaccttgattctctttgcatgctgccccctctcaccccactcccc

SEQ ID NO: 479465 - DNA, 122 bp, Homo sapiens
ctctttccattacaactcctggtggagccccacttcaccattcataaaagcaaagagatccgtgggcaagtgcggattataggttgtttcaatatgacttttaatggcatatccttattaaa

SEQ ID NO: 479466 - DNA, 122 bp, Homo sapiens
ggccggccgcgctctcgggctcgcaggcgctgggtctcggctccggctccggctccgcgccgctggctctgcgtcgctcgcactccaggtacgggtgactcacacagtcactcgcgcccgcc

SEQ ID NO: 479467 - DNA, 122 bp, Homo sapiens
ttcctcccctcatttccacttttcctaagcaatgtgagacccttctgtgatgggaaatctcgtcatccctctagggaagggcaaggcaggcaggggtgagagtgggcagaggattccatccc

SEQ ID NO: 479468 - DNA, 122 bp, Homo sapiens
tcttttattccttaactgcaggtggtttctgtagtgacactgtcttccattgctgggatgcgcaatgtgtgtcttctctcttcttgagagattatgatcagagtattataggcttatcagtt

SEQ ID NO: 479469 - DNA, 122 bp, Homo sapiens
ttccgctgtgcccagtgcggcaggagcttcagcttgaaaatcagcctcctgctccaccagcggggtcatgcacaagagcgccctttctcctgccctcagtgtggcattgacttcaacggcca

SEQ ID NO: 479470 - DNA, 122 bp, Homo sapiens
gtaagaattccggagccggcgagctggctgcagcctcagggctaggaaggcctagggccccgatggcagattgcagatctggcggccacggtatttttatgggcatgcctgttgcccagtga

SEQ ID NO: 479471 - DNA, 122 bp, Homo sapiens
ctcagctaatttactttgcattgtgggctatcttatgagcaagtagtgtttaaagaattacgatttattttgagatggtatatttatttgaggtgggattgttgactatagtgggcttacta

SEQ ID NO: 479472 - DNA, 122 bp, Homo sapiens
ctccctgaccccttgcgcttcccaggtgaggcaatgcctcgccctgcttcggctcgcgcacgttgcgcacacccactggcctgcgcccacagtctggcactccctagtgagatgaacccggt

SEQ ID NO: 479473 - DNA, 122 bp, Homo sapiens
acacaggcactgaatggaccaacactttatgcatatagagcagagacaaagcaagatcagcgtcaacaatgaatgttggtgcccacagccagcaggacttgccctgcatcagggagatggtc

SEQ ID NO: 479474 - DNA, 122 bp, Homo sapiens
ttttcatgcagcataaacatgcatcaggcacacatccctgagactctttccggcaccttccgcgctgggcgtctgctgccttcggagctggtttgcaggcggggcccttgggatgtgggtac

SEQ ID NO: 479475 - DNA, 122 bp, Homo sapiens
tcctcttcatgatgctctacttcttcagcatggccagctccatctggtgggtgatcctgtcgctcacctggttcctggcggctggcatgaagtggggccacgaggccatcgaagccaactca

SEQ ID NO: 479476 - DNA, 122 bp, Homo sapiens
aggctgcctctttttgctgggctgctcttcctgtgcctgtctggcctggcactgccaccccggctggactgaggctgttcctgctggctgccggggctgcctttccccaaccccacccaaca

SEQ ID NO: 479477 - DNA, 122 bp, Homo sapiens
agcacgtgctgtatagttgtgatgcccgcggtcggagccccacgggagcattgtagcacgcgctgtatggttgtgcgttgtagcgtgcgctgtatagttgtgatgcccacaggcttccttgc

SEQ ID NO: 479478 - DNA, 122 bp, Homo sapiens
aagatttgcattccttcccctgcccgccccgcccccgcacttgtgagttgtgcctgtgtacgcagttcctgtagcactcggctgggcagaaatcatctttcagcactaagggaacatagtta

SEQ ID NO: 479479 - DNA, 122 bp, Homo sapiens
caaactggtgccagagtgtctacttccccttccattggaagcctccaggagaaccgaaggcggggctggactgctgcactgccacctgattaccgagcagatcacaactggtttgctcactt

SEQ ID NO: 479480 - DNA, 122 bp, Homo sapiens
ctccggtcgcagaagccccgcgggtgcgcgctgataggtctgccagtttctctcctcgagcgcctttcccagtgaataacttaggggccgcaatgaatttggtcctgcagcctccccaatgc

SEQ ID NO: 479481 - DNA, 122 bp, Homo sapiens
gtcttggaaccggtagccagaggcccaggaagggacagggcccaaaagggttgcatgtcccggccacaaagccctccctgtgtgccctgagccagcccagcaagcgcctcccagccaggcgc

SEQ ID NO: 479482 - DNA, 122 bp, Homo sapiens
tctcggtctccccatctgtaggatgggtgtgcctttccatgtggaggcacccacacgttccgtttcctcttcccaccctacagagcacggctccggcaattccacagctcaggcttacattt

SEQ ID NO: 479483 - DNA, 122 bp, Homo sapiens
tttccacttcatgcgccggttctggaaccagatcttgatctggcgctcggagaggcagagcgcgtgggcgatctccaccctccggcgccgtgtcaggtagcggttgtagtgaaattccttct

SEQ ID NO: 479484 - DNA, 122 bp, Homo sapiens
aggagagcacggcctggctgggacagaagcggtgggaccctgggaggcctccgctgtgcccgtgccgcgctcctcgggaccagcgcgtcgcacacaaaggggctgccgagccagagccacca

SEQ ID NO: 479485 - DNA, 122 bp, Homo sapiens
cgtaatccttctgagccccgtctacgctgtcccacgcaccaacagctcgcccctcattgccgggcaggaccccaccacgtggccgcaccccaatgtgctcatcgcccactgggtgtccaggt

SEQ ID NO: 479486 - DNA, 122 bp, Homo sapiens
cccaggactcggcaagcctggcagtggccctgaggagcaagagacgtgctgctacccagccgctgcaaaagtttcctcgcagctacctgggcgctgggcgagggcgggaaccgcttggcggc

SEQ ID NO: 479487 - DNA, 122 bp, Homo sapiens
ggcagggaagggggtgggggcctggcgggggcatccggcggagctggggtccccgggctccgtccggaggaagcgacgctgcgctcgctgggcagtcggaggggacgggacgcaccggaggg

SEQ ID NO: 479488 - DNA, 122 bp, Homo sapiens
gggtgagagctctatggggacccagaggcagtgtagtgtaatgggctacaccaccagtggcggggatgggagaggtatccttgcttaccacttaccaagtgttacccaacttctaatgttct

SEQ ID NO: 479489 - DNA, 122 bp, Homo sapiens
tggtttatctgcggttcacttgcaccttcttcagaagtggccgacagcccacagcgaaggcggccccgtgccagactcttctctggggatgaggctccggggaggagactccggggatgcgc

SEQ ID NO: 479490 - DNA, 122 bp, Homo sapiens
ctttccgggtccccttccaccacgtggaagctttattttcgctttaataagtcttgctaccgcacactcattgggtctgtgcgtttctctaatcaagctgtaacactcgccgctgcggtcca

SEQ ID NO: 479491 - DNA, 122 bp, Homo sapiens
ttcctgtttttgagatacgcccaggtcactgcatcaatagtctgtttcttttaattcctgcgtagtccaaggtatgaatttaccaaaacgtatgaatatcccacaatgtataaatatgttgc

SEQ ID NO: 479492 - DNA, 122 bp, Homo sapiens
acgcaggagcaaacgggtgggtgtgctggtggcgaggtgggtaggggttggtacagggtccgggacaataaattaagcatttgggccacaatgggccaaggtgaggcaccacaggtgggagg

SEQ ID NO: 479493 - DNA, 122 bp, Homo sapiens
gggacgcgcgggacaaccgcgcaggcggctctgcaggggtgggcgcgccatcacccctctcggtccctgcctgcttggcgctttccgagccccagccgcgctcaggctgcctcgggcattga

SEQ ID NO: 479494 - DNA, 122 bp, Homo sapiens
tgataccggccgtcggagtgaggtaccggacctgcgccgcacgtccaccgctcacctgcgcgtgggccaccaccaggctcttattgccctctccgtggtacccccattcattctcgtccatc

SEQ ID NO: 479495 - DNA, 122 bp, Homo sapiens
gtggagcggctggtgaaggaggtccccgaggagtattccgagcgcttttccccgcaggcccgctcactttgctcacaggtacggcagctcacagaagcctggccagccagggctggggtgga

SEQ ID NO: 479496 - DNA, 122 bp, Homo sapiens
ccgatgccgtggtccggctgagcgcctactcgctgggcgggttcgcagcggagtggctgtcgcaggagtactttcacagacagaggcacaactcctttgcagatttccttcaggcacacctg

SEQ ID NO: 479497 - DNA, 122 bp, Homo sapiens
ctcagctctaggagttacaacctacatcctaggccaagctacttcaacttctctggtcctcggtttccttgtctacgataatgatagtacctgccacattggttttttgtgtgtatgctagg

SEQ ID NO: 479498 - DNA, 122 bp, Homo sapiens
tggtccgaagccgagtgcggttgggggcggtggtgggtcagcctgagccccaaacagtgccgtgaaattctccatcgtaccctccgccccggcgctgtctccgtgtctgccgttggtaattt

SEQ ID NO: 479499 - DNA, 122 bp, Homo sapiens
gtaagtgatggtactcaatcaatagagtggagaccagaaccctgcgccttttgcagcctccgatttgcaattggccccctggccctcactctttatgcactcttaacctgtctcttctcatt

SEQ ID NO: 479500 - DNA, 122 bp, Homo sapiens
ttccagatgggacatttccccagcacccgtcggaccacttaaaggagtggtttaggctgccgggggcccaagcactggcacctaaccccagcgcccctcctcagataggaattctccacgtc

SEQ ID NO: 479501 - DNA, 122 bp, Homo sapiens
ggcccttgttactgggcctcatgccaaacaactcgttacaaaaacagctagagtcccagacggtgccaaagcttcatgaaacctcctcgtctgtgcacgaacaggtggccgactctggagcc

SEQ ID NO: 479502 - DNA, 122 bp, Homo sapiens
ggcacctctggaaggtgggtgtagccgtggctagggctgacggggccacttgggcttggccgcatgcccctgtgccccaccagccatcctgaacccaacctagatcctccacctccacaggg

SEQ ID NO: 479503 - DNA, 122 bp, Homo sapiens
cggagccgactctgggacacccccgcctgcatttgcggttctggttatctggaaccctgacgcagcgagagcaattggcaccactgcactctctctccaccctccctccgaaggacgggcgg

SEQ ID NO: 479504 - DNA, 122 bp, Homo sapiens
tctagatactattttttccaggtcttcggagaccttacttctctgactttcacattctaacgttctgaggctaatactgcgatctcagtatttgccctccacccccaacgacccacactcga

SEQ ID NO: 479505 - DNA, 122 bp, Homo sapiens
ccagcctgcgatccacagacgaggaggatgaggatgaactgatcctttgaccccctcccacgacctcctcataaagaccgtggagaggcccagcctgagggtgaacttgtgtggggcagggt

SEQ ID NO: 479506 - DNA, 122 bp, Homo sapiens
cggcggagactcctcgggcggaaagcggcccagctccccgcgcagcaagcgcagctggcgcgtagccaccacgaaaacccgcgcgtagacgaagagcatcacgagaagaggaaggtagaagg

SEQ ID NO: 479507 - DNA, 122 bp, Homo sapiens
ttaaaatcctgtgggttttctctggaggcaggctgaagttcaggaaacatgcatttggaccgagagtctcttccacagtctgatggcacgcgcctcagtggcatgtcatcttcatttctttc

SEQ ID NO: 479508 - DNA, 122 bp, Homo sapiens
cgcacttctgtcacaaggaggcgggtagactttggaccagggccgaggcccgggacgtcacggtggggggtggggtctcgggaggcacgtgatgcgccgtgatgacgtcagtgggagcggag

SEQ ID NO: 479509 - DNA, 122 bp, Homo sapiens
ccagacccacagtagaaccaatcgagcggaggaaaccgcggcgttagcgtgacccggatgcgcatcgctaggaaccggaagtaagcggccagagtcacctcacaatccacacctcgttccac

SEQ ID NO: 479510 - DNA, 122 bp, Homo sapiens
ctctctctacttcctacttttctttcctcctttgtctctccaagggaactcaggtagttccgtcagtcaaaaggggatgcattgtgccactgtacttggacctccctctggagatatccaat

SEQ ID NO: 479511 - DNA, 122 bp, Homo sapiens
ggaggctggagctctccaaggccggggagcctcccgaagcgcgctgccccctctgttctccgcgtgctttcactagggccccatgctgcttagtggccgatttgcagggaatctgggcacaa

SEQ ID NO: 479512 - DNA, 122 bp, Homo sapiens
ttgagcaatgcaaactccacagtgagtgccactcagaagatgaatgaaggccagtccctgcgccaacacattgggtccctccacctgtttccaggcatcacctcttctcacaagtgacagga

SEQ ID NO: 479513 - DNA, 122 bp, Homo sapiens
gagccagcaagagactagagactcgggctgatgagggtggccaggggaggctttgcatgacgtcagattatgtgatggaatgagctctgcagagatctggagcggggagtgttttcagaagt

SEQ ID NO: 479514 - DNA, 122 bp, Homo sapiens
aacaaccccggagggtgagactaacagagactcgggtagggagacaccgcgagcagagcccgcgcccactcacgtcctggaagagcgtgtgtccggcgggccccgggtcgggcgcgagctgg

SEQ ID NO: 479515 - DNA, 122 bp, Homo sapiens
ccactagccacaggtttgcactcccagtacggggcttgccaggcttagcctgctgcctcacggctttctgctctcgtggccgccaacagaggccctgaatgcggaggctgtagagcggactt

SEQ ID NO: 479516 - DNA, 122 bp, Homo sapiens
ggaggcggaggttggagcgagccgagatctcaccactgcacaccagcccgggcgacagtgcgagactccgtctcgggaaaaaaagaggacatgcattttaacccagcaattcctcctcctcg

SEQ ID NO: 479517 - DNA, 122 bp, Homo sapiens
gtgtggggagaccaggggagcctccacgctgggcgcccgggcagggagcgtgggggcgggcgggctcactgcttgctcccgggaacatcctgcggggcaggtctgcctgaccggccacccca

SEQ ID NO: 479518 - DNA, 122 bp, Homo sapiens
catcttgtttgaattgagatctagcagaacccacaatgcgcctgggtgatgggcctctcacgtgaccaggacctctcaggctcctgggaggaagcttaggtccaggcaggcggagagagtgg

SEQ ID NO: 479519 - DNA, 122 bp, Homo sapiens
ccaaccggcgccggcacatctaggccctctctccctgtctggcgcggcggggaaacgcgccgcctcggggctcaccactcgagtcatctttgggagctctcgcagcgctgcccgcgcggttt

SEQ ID NO: 479520 - DNA, 122 bp, Homo sapiens
gctgaataggagtccggctttgaaactgtgaagtcgcagcgccccctgcctgtgcgtggccgccatagctaggaagccttcccaagtcgggaggaccctccccaaggagctccggaggctcc

SEQ ID NO: 479521 - DNA, 122 bp, Homo sapiens
ggaagggagtaggagaggaaaccaagacccttctctgtaccgtcccagctggggtgggggcgtcaaggcaccaggtctggttaggttggggggacacctgggctctgggggcggctttgcac

SEQ ID NO: 479522 - DNA, 122 bp, Homo sapiens
ccgccggctgactgaagcggcttcctgatacaaccacctgagtgctgagaacgcgcgcaacgtggccaccctcctgtgtcaattcagatttagagccaccgtgaagaagtctggcagctctg

SEQ ID NO: 479523 - DNA, 122 bp, Homo sapiens
cagtgaatgtccagccagtgttcagtgactcagacccaaaaagcccacaaagagcatccacgcagcaaataaaggcagcaggagaggagggccagctcccggcagtgagtggaatgcaaatg

SEQ ID NO: 479524 - DNA, 122 bp, Homo sapiens
tcgtaagcagcttcatctgacacgggcatccctggcttgcttttagctacaagcaagcagcgtggctggaagctgatgggaaacgacccggcacgggcatcctgtgtgcggcccgcatggag

SEQ ID NO: 479525 - DNA, 122 bp, Homo sapiens
tcatagctgcgccctgtccactctcgggctgtcacacaagcctggagcccagccatttctcggccttgtcttcatcttgggctaaccggtcgtctcctgcaaacagacagcacggagaagga

SEQ ID NO: 479526 - DNA, 122 bp, Homo sapiens
gggccgccgtcggttcccacggcaaccgactcaacagtaaggccccgcgggcgtcctggccgccatgtgcaccgtagtggaccctcgcattgtccggagatacctactcaggcggcagctcg

SEQ ID NO: 479527 - DNA, 122 bp, Homo sapiens
ttaaaggtaaggagctcccccaaccctagtgggctgagaccctgatttccggccagaactcgcttctgcaccttgagtcccaaagacctcccagatcagcctcccagctctgtggcctctac

SEQ ID NO: 479528 - DNA, 122 bp, Homo sapiens
gaaaggtggactgaggtcacacaggtcatctagagatggattgaggtcacatggaggtcacggggaggtgaactgaggtcacagagaggtcacgtagaagtggattgaggtcacacagaggt

SEQ ID NO: 479529 - DNA, 122 bp, Homo sapiens
catatagatgaaaccctttttcttggggttctaggacgacttggcctgcaggacagagcccggcacgcagggcctttgcgtcttttcccacaagaagcgtggaccatttcgcccatcccagc

SEQ ID NO: 479530 - DNA, 122 bp, Homo sapiens
tgggcaccgtggagcagggggtggcgctcatctgggaggctcgggccgcataggagcccacggagtgggtgggaggctcaggcatggtgggctgcaggtcctgagccctgccccgcgggaag

SEQ ID NO: 479531 - DNA, 122 bp, Homo sapiens
gtatatagataaatagctctttgaggaagacgcggtcgtaggtgttgcggatcgctgatccgcacgctcctgctactgactcaccgctgttcgccctcgccgaggaaccagtcgctcaggaa

SEQ ID NO: 479532 - DNA, 122 bp, Homo sapiens
tccctccctccctccctccgggggcgcgggacccctcgccccagtgccagcacgggcaggcggccgtctgcccccaccagccctggcccaggcgccccccagcccccttcaccccgcccgcc

SEQ ID NO: 479533 - DNA, 122 bp, Homo sapiens
gcagcatcactccccacacagcgatggcctcctctgggcaaatgggtggggcaggctggacgtgccagggagtcagggcctctgggagcagcccacaaactctgaatgaggcaaattggagc

SEQ ID NO: 479534 - DNA, 122 bp, Homo sapiens
gagagaggaagaggacagggcatcgaaatctcgcgaatattggtcaatgcgtcggcctcgcgagatttctttcagcgcagtcttccctttgatctgagctgtctcaggcctcgcgccgctgg

SEQ ID NO: 479535 - DNA, 122 bp, Homo sapiens
cccaacacccctacacccacatctccacgaacccacacacatcagaagagtatgcagcttcgcctgggctccaccctgacagctgcctttgtcctgggctctggggacctgccctcaagcct

SEQ ID NO: 479536 - DNA, 122 bp, Homo sapiens
ctttattgctcaggctggagcgcagtggtatggtcacggatcagtgcagcctcgaactcccgggctcgagatcctcctgtcttggcctcccaaaatgctgggattacaagcatgagccctgt

SEQ ID NO: 479537 - DNA, 122 bp, Homo sapiens
gctgcactggcctccacgcggccttgcctctacttcctgaaaggctgtgggagttggaggcggataattgtagctcctagctgtagataggtggaaatgttcaagaaggcgcctcccagctt

SEQ ID NO: 479538 - DNA, 122 bp, Homo sapiens
gcggaaggcctcgggcgcgtagacgcactcctcggagaagtagtcgaggcggcggaagtgcgcgtacagcaccacctccttctgcgaggcgaactgcagcgggcggcagcgcggcagggcgc

SEQ ID NO: 479539 - DNA, 122 bp, Homo sapiens
acctattccttaagggcttccttcaagaagatacaacaataataattggaagaacatgagcgctaaagttaaatgaaccaaggttcatttaacaattatgccattaatgaaagtgtcatatc

SEQ ID NO: 479540 - DNA, 122 bp, Homo sapiens
gagagtgtgaccatgtaactttatgtagcactgtgtctgcggttggaaagtgcgtgtaatcgtgccggggtgatatgtgtgtcctagtggtcattgtgttattttgaatgtgtgattgtgtg

SEQ ID NO: 479541 - DNA, 122 bp, Homo sapiens
ctcacccagcaggtcttcgatgccaagaacatgatggctgcctgtgacccccgccacggccgatacctcaccgtggctgctgtcttccgtggtcggatgtccatgaaggaggtcgatgagca

SEQ ID NO: 479542 - DNA, 122 bp, Homo sapiens
accgtaatctcaacaacacaatccccacctccaacctcagccgccctggagcctctctcccgccagtccgcccactggaacacgggttccatgtgccatccagggtcaacgccgctctgggg

SEQ ID NO: 479543 - DNA, 122 bp, Homo sapiens
acccgcctccggcgctccctgttgccgggccctgagcaagtggcttcatgaaccccgtgacgttggccatggagataagaccactgggtgatggtttaaggaagataacgtgtaaagggcta

SEQ ID NO: 479544 - DNA, 122 bp, Homo sapiens
actttctgggctcaagtgatcctcctttcttagcctcctaagtagctgggaccacaggcacgtaccaccacacctggctaatttgtaaaattttttgtggatacgtgatcttaataggttgc

SEQ ID NO: 479545 - DNA, 122 bp, Homo sapiens
tgctcgcgctgtgaccccggcttgaggtaacagcgcgagctgaggctggggcccttggcgcggaggctgagggacccgccgcggcgctgtcgccggagagggagggcaccgctgtcgtcggt

SEQ ID NO: 479546 - DNA, 122 bp, Homo sapiens
tcgctgcctggcccctgctgccgcttcaggtgcatatttgttactttctattttgctttccgccttgtcacaaggcctttttgtttaacaggttcagcaacttccctaaggtgcctcagaga

SEQ ID NO: 479547 - DNA, 122 bp, Homo sapiens
tgttcggtcagagaccggacgcgggagctgcgggtgggccaggtgtccagccttgggagccgtaggagccgccagagccgccagagccgccggcgccccgccccgcctcctccggccgctct

SEQ ID NO: 479548 - DNA, 122 bp, Homo sapiens
ctccagtggggccacctccctccgcttccctctagttcttgggcgatgagtcgcggggttcgctcacccaaagccacagcgaggagcagagacagggacttcatggcgctgcgacctcctca

SEQ ID NO: 479549 - DNA, 122 bp, Homo sapiens
actctgtggtgtcctgcagcagctgtaacttttggccacattctggagagaagtccttcccggcacagatggtcacctttttattaggatattggcagcatgagggtctaagccttgacttc

SEQ ID NO: 479550 - DNA, 122 bp, Homo sapiens
gggccgtatattaactctgtgtttaacttactgaggaactgccaaactcttcctcagcagcggcatcatttgccgttcccaccagcagtgtccaaggattccagtatctgcatcctcaccat

SEQ ID NO: 479551 - DNA, 122 bp, Homo sapiens
agagagagacccgccgggaggtgcggccgcgctatggacccctgaccccgtggggtcgctcggactcttaacgtgtggactgaccgctactgactgcaccgccaatccccccgtctctgccg

SEQ ID NO: 479552 - DNA, 122 bp, Homo sapiens
gagaaggggcccttgtggggcggagatgtcagtcaagtgcttaaccaatggtggggagtccgggagggggattcttggggttcaggaaagaatcctgagagtgggaagatttgtccttcaaa

SEQ ID NO: 479553 - DNA, 122 bp, Homo sapiens
tcagcaagcgctcaacacagacgcatgagataccctggctggaaggccctgaaaggtagtcgtccattcaacacgtgcttagcgcgctgctgatctgtgccaggcactgggccagggccccg

SEQ ID NO: 479554 - DNA, 122 bp, Homo sapiens
tgttgttgggcccgtgataattcttggtgtgtctccccattgtctagcatggggtttgggcggcacaaatctagccaggtgttctgtaaatatgtgtggagttgaactaccaactttgtaaa

SEQ ID NO: 479555 - DNA, 122 bp, Homo sapiens
taaaaaacagtgtggatgatgatatgcttttgtgagcaagcaaaagcagaaacgtgaagccgtgatacaaattggtgaacaaaaaatgcccaaggcttctcatgtctttattctgaagagct

SEQ ID NO: 479556 - DNA, 122 bp, Homo sapiens
ggaggtatccgagttcttcaggaggcacgaggtaagcggcggctgcccgggtgcccgggccgcgagggctagggcgggaacccggcaagggcgtctctgggcagggccgcggcctgacggtg

SEQ ID NO: 479557 - DNA, 122 bp, Homo sapiens
ttggcagaacaagcctgtggatactgccctgacctccggtaggaatgttcacagaagtggcgtcagtaccatggacttgtccttgtcccaacctcagatgtagaacagtggagccaggttcc

SEQ ID NO: 479558 - DNA, 122 bp, Homo sapiens
ggcgcgggcagtcgagcgaatcccccggcgcctgggcgcgagtctgggaaagggcacggccgccttcccacgctcccgcagccggcagcctcctcggcccaggcgtcgccccttggccggcc

SEQ ID NO: 479559 - DNA, 122 bp, Homo sapiens
agtagggggcaaaagtgaagcaggagcacagttggggaagccaccgaaaatgcaggtgagcgatgagagtggcagcagcagaggtggtgagaaccggcccaatgttggacatgttttgaagg

SEQ ID NO: 479560 - DNA, 122 bp, Homo sapiens
gcgcgagtgcttctggcgtgtggtgcgcagcgccagcagcacacacgcgttcccgctcagcgccaggagcaggatgagacacagcaccgccacctccacgcgcgccagggcctcgttgcgcc

SEQ ID NO: 479561 - DNA, 122 bp, Homo sapiens
ccaaaatatgctgtggagaaattctagcacaaacaacagcataagaagacttaaaacagtcgctgcctggttgtctggagtacgtaatgccaagtatcttgtcagtggggagatagaagagt

SEQ ID NO: 479562 - DNA, 122 bp, Homo sapiens
tgcttctcgactccccggccgccgcctccggccgccccggggattccgccaccaaacgcacgcgtcccaggtgggcacccgcctcggtccgtctttgagtctgaccctagcgcaagagtccc

SEQ ID NO: 479563 - DNA, 122 bp, Homo sapiens
cgggggaagggtatgggacgccagggttgaaagggatagttgaggcagtccggggaaaaacgtggcaggctggggtcgtcccatggacgacagtgccttcccagcagcccctgcgtcaggcc

SEQ ID NO: 479564 - DNA, 122 bp, Homo sapiens
ccccgggtggcgtgcgggcctcgaatttcgggtgggctagggcagagcgcgcaaaaggggcgctgcatcccggcgccgacagcacccgcgggggcgaggtcgtggcgtcgaggtgaaaccaa

SEQ ID NO: 479565 - DNA, 122 bp, Homo sapiens
caaggaccccccatgtcacggcagcttcacagacgcggctcgcgcccaccggggtcctggcgggtgggacccgcagcctccacgcggcccaggccagcctgccaccctctgggcctcctacc

SEQ ID NO: 479566 - DNA, 122 bp, Homo sapiens
ctgttccacctggcagggaagcaaggcttatggatgaggggccttgtgggagctgaagaacgcaacagatggtggcagccccctccagcaggagagtcctgggaacagccatgtctgtgagc

SEQ ID NO: 479567 - DNA, 122 bp, Homo sapiens
gtccacagcccccagaagctctgggtgaccatggaggccggggatgcctgagggcctggccgcctctgccctccaatgggcagcccgggctggcagagacttgctctgcactgtgcccgggt

SEQ ID NO: 479568 - DNA, 122 bp, Homo sapiens
tcttggggcgccttgttgggagtcctcatggtgggggaccctgggctcccgccttcaggacgcggggccggcttcaagtctgagccccctcggccctccggtagctcacaccgcgccttctc

SEQ ID NO: 479569 - DNA, 122 bp, Homo sapiens
agcccctcttcaccccctggctcttaggacagccatcgcagtggggggaggcacccccagcgaggcagggactgacagccagcaactcttccgccccgggctcttgggacccccatcgcagg

SEQ ID NO: 479570 - DNA, 122 bp, Homo sapiens
tcccccaggagatttccatgagagcggcagcagccgaagctttgggtgtcggtgtcagtgcgctgctgacctcattcttccggcctttcatccagcggctaaactcaccacacagcctcatc

SEQ ID NO: 479571 - DNA, 122 bp, Homo sapiens
aattggttagtaaggatgagatccacctgtagatctaagaacaattccaaatcacagcaacgaagaatttgaaaagtcctaagccaggtgctagctgggcctgattttcatgacttttcttt

SEQ ID NO: 479572 - DNA, 122 bp, Homo sapiens
ctgcctctcccgccgcttggagctcccaagaaggcaaggacgtgctagggaccctactgccgccccgacggcctggacagccagccgtgttcccctggccacgtctcagcccggcctctgcc

SEQ ID NO: 479573 - DNA, 122 bp, Homo sapiens
tgggggcggggtctggagcagcaggcgccgcgtttgcgagctaaggtcggagttctgcaccggcgggggcggggctctgcgtggccggggcgggctcgggatccgcggggcgactcccggtc

SEQ ID NO: 479574 - DNA, 122 bp, Homo sapiens
ggggaaaaacgtggggcgagaaccagaacccacccaccttccgcggtgggaattgcagggcgcggctgggtttctgtgcggtgaaggttgctcaaaggtctgggagcctggggggccccaga

SEQ ID NO: 479575 - DNA, 122 bp, Homo sapiens
caaagtgactttggttcttactcatttggctgaaagacttctcaggtagacacatggcaacgaatgcaatgtatgactgaaccagatctttttgctataaaaaacataattgggcagttggt

SEQ ID NO: 479576 - DNA, 122 bp, Homo sapiens
ttctatcctttaacaccttaacatttcaatttagcataaaaaaaaaacagtttagggtgtcgagaatggcaaagcctcaaaaagagcccaggtgatgtctcacctctacacatttaaggctc

SEQ ID NO: 479577 - DNA, 122 bp, Homo sapiens
gtggtctcgtgatttcagagctggaccctagccccccaggaccagaacagaaacctgaagcgtgaggcaacttgcctgaagggtcctgccagcgtcacggtggcgtaggggtcacattgccc

SEQ ID NO: 479578 - DNA, 122 bp, Homo sapiens
aagccaggtagcagtgctaagggaagtggttgggctgggcaccggcacttgctgaatgcccgggcagcaaaggtgcaggtagcagcccttcacctctgcccacgccctgtgccaaggtctgg

SEQ ID NO: 479579 - DNA, 122 bp, Homo sapiens
ttacttctgctccgggcggggcctgttaggtgatgtgaaggatgtggcttcacagggacacgaagtccaccctccctctcctagcctctgtgtcagtccttgcgtgattagtaacaaacaac

SEQ ID NO: 479580 - DNA, 122 bp, Homo sapiens
agcccctgacccagcaggagtgctgacctttcactcggggatgggggaactttgtctcctcgccccttttcatttggcttctcctccccgttcttgcagcctctctctccctttcttcccgt

SEQ ID NO: 479581 - DNA, 122 bp, Homo sapiens
gtcctgattccagcgctcatcaagcaggggacccaggggagggtgtgtgtgtgtgtgtgtcggggggacacaaaaccttccagcctagcagatctcacggataccggaatggggaggacact

SEQ ID NO: 479582 - DNA, 122 bp, Homo sapiens
cgtggcgaggaggacagcacctgcatcgagctctccgcctcccccacccgccagcccaggcggccccagcagcagtgaccagaagagcccctgcagcaacgcaacggccaggtggacacctc

SEQ ID NO: 479583 - DNA, 122 bp, Homo sapiens
gcccaggttgggacatttgtgtggtgcagaacgcccaacagctatctaggaagggtctgccgtctgcaaggccataggccgtgagcagcctcaccacccactcaggagccctggagcctggg

SEQ ID NO: 479584 - DNA, 122 bp, Homo sapiens
gctggcaaactggagcgcgcggcccctcggcagaggaccggggctcaggaggcggggacgcgcctgaaaacagggcgggagcctttccaacccccgcgggctgcgatgcagcagaaaactcg

SEQ ID NO: 479585 - DNA, 122 bp, Homo sapiens
cacctgaatggaggcacaggctcccccaagttgacctgagtgggttgctggggcagctggcgcttcaccttagaagggcagtctccattgtctcctctcactttcctgagttcccagtaccc

SEQ ID NO: 479586 - DNA, 122 bp, Homo sapiens
cggggcccaggcttcgcctctgctcctcgcctttgctttccctcagagctgaacccaagtcgtccttcccagctgctctctcatggtagggatcccactcagcagggcgccgtgccggctta

SEQ ID NO: 479587 - DNA, 122 bp, Homo sapiens
aactacacttcccagcaggcctcgcgtaggaatccggccttcctagtctcccgagatggacgacgggagccttctgaccggtcgtggcaatcccccctaggagccaggttgagcacgttttc

SEQ ID NO: 479588 - DNA, 122 bp, Homo sapiens
ttgatatgtgaagaggaaggagacttaaggggaccacggctggaatgtggtcaaacaggacggaccacatatgcaccataaaggctgatattcctagtctgaggaattgcctattcaaggaa

SEQ ID NO: 479589 - DNA, 122 bp, Homo sapiens
aaaagcaagaacaaggggcacgaagtccaggaggtctgtggtcctggctgctggagcccgcgcctggctctcggtgctcagcgctgagtttccatgaggctccccaggtgaggacctgccag

SEQ ID NO: 479590 - DNA, 122 bp, Homo sapiens
ggcggctgggcgatgcgcttgcgcactgagaactcacaccatatgtgtcctgttccagtgcgcgggtctgtggagagccgggtgcgagcggcggcagcacgaggggaaaagagctgagcgga

SEQ ID NO: 479591 - DNA, 122 bp, Homo sapiens
tatttctttcactaacgtgtataaatacttcattccttttttattgccaaataatatgcacggacataggacattttatttataaagtcatcggtgctgggtaaggtgtcagagccccgcgt

SEQ ID NO: 479592 - DNA, 122 bp, Homo sapiens
gacagtgtggccagtaggagcaaggactctggagtctgggcatgactctatggtgagactcgcacaaatcacttctctgtgtttcagaaatcccagctgcaaaatcgagccaataataccta

SEQ ID NO: 479593 - DNA, 122 bp, Homo sapiens
tctccttttaagttacctgagcctctcaataggtactatcttgttctcagcccgggagagcgggaggggcatgctgccttgtcccaccttctgtttctgtttcttttgatgcaaagaggcca

SEQ ID NO: 479594 - DNA, 122 bp, Homo sapiens
tacccctgggagagaaagcgctaaattcccccaacactcccgtgatgggggcacagggagcgccgtgggacacctgaggaaactgaggcccaagtgttaattaacttgccctgatcacctag

SEQ ID NO: 479595 - DNA, 122 bp, Homo sapiens
taaccttttgctgtacctggccttttacatcatcatgaaggtaagagcgggtgccgggagcggctacctcgggccctcgggcaggcgaaggcggggtcgcgtgaggccgcatctgcttctcc

SEQ ID NO: 479596 - DNA, 122 bp, Homo sapiens
tctggagtctagtcctgcctcctacctcatattcaccttgttaagtacattatcttcttacggaaatgcattatccttccatttcttttgattttttttcttttggaatatcagtaaatttc

SEQ ID NO: 479597 - DNA, 122 bp, Homo sapiens
cgcgcctcgtgggactccagctgctggctgggcgcgcagtgcccaggagcgggagggcctcggcggaggcgccgggccggggctgttgcccaccgcgcaggccggggcggggagaggaaggg

SEQ ID NO: 479598 - DNA, 122 bp, Homo sapiens
agatgctgatagtgcactggcttattttctaaggagagggagcttgatttgtgcaggatgcgccttcaccagatacctccaggggcaagagtccactgaggttacagcgccccccgcccccc

SEQ ID NO: 479599 - DNA, 122 bp, Homo sapiens
tctgacgctaatgagggtggcacactcggcctgagctggagaaggggtggggcagggtatcgctgactcagcagcttccaggttgctctgatgatatattaaggctcctgaatcctaagaga

SEQ ID NO: 479600 - DNA, 122 bp, Homo sapiens
atgtggacatctttcattgaatgatgtccagaaggacaatcccttaatgaaagttgtccacgttgctaatgttatcttactggtgtcttggaaccatttggttatgaaaagaggggtaacac

SEQ ID NO: 479601 - DNA, 122 bp, Homo sapiens
tcagaagttgtgctgggtgggtatctagaagtatagaaatacactctgtagaaatgctgccgtcctcaggaaaagtaggtcagcatagaggaacacctcaacttaaccaaaaacctctttag

SEQ ID NO: 479602 - DNA, 122 bp, Homo sapiens
gtgaccctagacgagcagggcaggtccaggtgacgggaggcgtgccacgtttctccatcccgaagttcttcttggtttttatcctaagtactgatgtcaggatgactcggcagctttgacga

SEQ ID NO: 479603 - DNA, 122 bp, Homo sapiens
acctcgtgatccgcccgcctcggcctcccaaagtgctgagattacaggcgtgagccaccgcgcccagcctgaacacactttaagtcctttcaccttggagagttgctaaagtgatagaaccc

SEQ ID NO: 479604 - DNA, 122 bp, Homo sapiens
ctgcttatccaagttcatattgaatatggcagcgctggaattccaaactatataatttgacgctcgtgtccatgcctttgactgctctcctgcagtatttctctgtgtgacccaaatcaatc

SEQ ID NO: 479605 - DNA, 122 bp, Homo sapiens
aaacttgttttactaagatcatcaacagattgtcagtttcccaagcacctgacactgaggcgcttagatgggaatccgcgttaaggttttatttagcatccttcctcatcagaattttagcg

SEQ ID NO: 479606 - DNA, 122 bp, Homo sapiens
catgcccgtgtgatgcccccgcccgtcgtctcaccggggcgcaccgcgctggtcctcctccgccagtctcccgagctccggccattcatccccagcgcagagcagcgctggcagccggcgcc

SEQ ID NO: 479607 - DNA, 122 bp, Homo sapiens
atcaaacttgggggtggcacagtaggtgacagcagcagctgcaggtggtggctggggacccgcgagggggcgcccctctgggtagggtctggctgagcgggcttgcaagcccgggaggcggc

SEQ ID NO: 479608 - DNA, 122 bp, Homo sapiens
atcaacaccttttgcttcctcttgatgggaagatgggctaaatccacatgtggagtagggcgtggcagctgccccagagggtatatgtgggatctatggtaatttctgtgaggcataaacca

SEQ ID NO: 479609 - DNA, 122 bp, Homo sapiens
ctgccttgccaatgacccgtttgttatgatcaacgttggatactcggcctactgttgctacgcacgtttccagcacctgacagagaaaacagatggagattctgtacaatgggggggaaaga

SEQ ID NO: 479610 - DNA, 122 bp, Homo sapiens
agggggaggggttcatgaactcggagaggtccatggtgcactcccgctcgtcctgggacacgtggatggactggatgggtgggaagcgcgggtaggcgtctcggaagtccttcagcctcagg

SEQ ID NO: 479611 - DNA, 122 bp, Homo sapiens
gagcaatgggtagagccggcctgcagctgccatagccctgggcaggccaggaggggccatcggagcctcggggcagataggctgccgggcgcaaaactatgcggaggagcagccgagcgcgt

SEQ ID NO: 479612 - DNA, 122 bp, Homo sapiens
gagaggtggcggggcctaggggtagggtcaggaggagcgtcctgggggcgggcgctagggcggggccaagatgagcttaggagggtggggcctggggtggggccaggatgagcgtcatgaga

SEQ ID NO: 479613 - DNA, 122 bp, Homo sapiens
acagatgcacgaatacctatatacatgcctcacatgtgccaattcgtggatgaatgttcacgcatgtgcacacagcacccacaggtatacctgcacacatacacgcacccacgtgtgtatgc

SEQ ID NO: 479614 - DNA, 122 bp, Homo sapiens
tctctctggcttcccctcagcggcgccaaggcgaggggagcgcagaaccccggctcaggacggacagacagacggccagccgcgcccaggctcgtctgcagaacccttgcactccctacccc

SEQ ID NO: 479615 - DNA, 122 bp, Homo sapiens
aaagtcgtaagcctttaaacaggccaagaatttcttttttggggagctcagctcttaagacgcaagtctgccgatgctcccggccgaataaacctctttcttctttaatccggtgtctgagg

SEQ ID NO: 479616 - DNA, 122 bp, Homo sapiens
cccccatcaattacccctctctcgtttttcaatactgggtctcttgcagagttgcagtggcggccacctggtcagtgaaatcagcgaattgaaaaaccactgacttcattaacatgtctaaa

SEQ ID NO: 479617 - DNA, 122 bp, Homo sapiens
acttagtttagtttaaagggaagagacatggagaaatctttagccttgtgtaggagggtacgccctgaacactaacgctttttcatttggaaaaggtgcacgtctagagataagttacatca

SEQ ID NO: 479618 - DNA, 122 bp, Homo sapiens
gagcctttgtacagattttccaaacaacacaagcatttagccttgtgattgtcagtcaatcgcgaagtgaaagagagtgaaaggggagctgagctgtcatacaacttaatcctttcgcaagt

SEQ ID NO: 479619 - DNA, 122 bp, Homo sapiens
cgaaagcagagaagtacccagagcagggacccggcagcccggcagtacgctgggcacagtcgcagccccgcctcttccttctccgtcttgttccctccttcggtcccaggagaaagacgctc

SEQ ID NO: 479620 - DNA, 122 bp, Homo sapiens
ttagcctggggagccttgccgcctctccaccttctctcctggtctcctcgggcgctctcgcgctggcaccttcagctctgtcagagtctgaggggaaaccaaaggaggccaggcggtgtctg

SEQ ID NO: 479621 - DNA, 122 bp, Homo sapiens
cccgctgtgggaggggctctggagcgccgggactgtgagatggccaatgacggtctgacccgttgggccgggccaggtcgcggacaacgtcgaccgtttgtttaagaagcgtggactcttgt

SEQ ID NO: 479622 - DNA, 122 bp, Homo sapiens
tgcgcgccgccgccttcacgctgttcctgttcacggccacgtgggccttcggggcgctggcggtgtcacagggccacttcctggacatggtcttcagctgcctgtacggcgccttctgcgtg

SEQ ID NO: 479623 - DNA, 122 bp, Homo sapiens
tagcgtcccgaacaccgcgcgcccctgctggggtaacctgaacagctggacccctcaactcgatctttattatcagcattggggctccagattccgtacacatctctagctctattcattct

SEQ ID NO: 479624 - DNA, 122 bp, Homo sapiens
ccatggaggggctgtcccgggtctgagcaggaggctgggagctggtggcgatggcacagccgggagcagtggtaggtagtccctcaggtgcccacgactcagctggcagcgaggaagcctcg

SEQ ID NO: 479625 - DNA, 122 bp, Homo sapiens
gccataggcgggcccttttgttagggccttgacctgggcttccgctacagggcccggtcacgaggccaacgtagctccacctctacggcggccagtgatgacgccaccacgtcggaactgtt

SEQ ID NO: 479626 - DNA, 122 bp, Homo sapiens
agttttctgtggctctcgggtacactgtggtctggagaaagatgacagcgtctgtctgaacggagagtcttgagccctagaacagaagtttgataaggaagcagatcacatttttttttttt

SEQ ID NO: 479627 - DNA, 122 bp, Homo sapiens
cagcagctccggctgggcgaggccctgcttctcccttctgctcccgaagaccccccggggcgcagacctggaagcctcgaagctcccgcggccgtccagtccgcccccttctgagcaaccag

SEQ ID NO: 479628 - DNA, 122 bp, Homo sapiens
tgctgcagtaaagaggcagctccgagtgaggaccatctacgagagcaaaatgattgaatacgatcctgaaagaagattaggtgagtcattaggcctgtgagtgggtatgaacacattcttca

SEQ ID NO: 479629 - DNA, 122 bp, Homo sapiens
ggagccaggagcggcagatactgcctccccttcaaggccctcaacggcggaaagagcaatcgctgcatactgatgacagggaacagccacctcttccacaacccagggctctgtggtctccc

SEQ ID NO: 479630 - DNA, 122 bp, Homo sapiens
ctggagctgcgggaagcggaagtgctcgttgggggtgcacaaggcgcgttcgagcagcggcgaccgacgcggcgaaggagcgcgccatggagcatgtgacagagggctcctgggagtcgctg

SEQ ID NO: 479631 - DNA, 122 bp, Homo sapiens
ttcatttgatgattcagtattaatgtagtgcctctgtgaatgccagggcagggttgggagcgcaaggccgaggtcctgccatttggagtaagattttccagacagggcagggctgggctgtg

SEQ ID NO: 479632 - DNA, 122 bp, Homo sapiens
caccttccctgacgtcaaacctccatcagggttgcaacgccacgttgccttggatgcctgcgtgagtggagtcgcgactcggggcccgcgtcctgagagacgcgctcccgcgccgcttctcg

SEQ ID NO: 479633 - DNA, 122 bp, Homo sapiens
ggcgggtggatcacctgaggtcgggagttcgccaccagcctgaccaaaatggagaaacgccgtctctactaaaaatacaaaattagccgggcgtcgtggcgcaggcctgtaatcccagctac

SEQ ID NO: 479634 - DNA, 122 bp, Homo sapiens
ttgcgggtcggaccatttgtggagacgcaggaggggtggctgcgaggcgtgaggcagcgccggctaagtgtggagagcgcggccccagacgcgcgcttcgcctgtcctcccctcgcacttgg

SEQ ID NO: 479635 - DNA, 122 bp, Homo sapiens
tggattctgtggttctatttgttctccatcgctccttgtaactggaggagtgacttcttccgagagtcacttggcaccacttcacagcagaggaacaccagtatcttcactggcctaaaatc

SEQ ID NO: 479636 - DNA, 122 bp, Homo sapiens
gcttgtgaggacccagccgctgccttcactttgcccccagacgtggccacaagcaccctacggtccatctccaacaaccgcagtgttgtcagcgaccgcgatcagaaattcgcagagcggga

SEQ ID NO: 479637 - DNA, 122 bp, Homo sapiens
cccttttgttcccatattacatttccatgtggaaggcagatcttaaagggattttccgagcggatgagtgtaagtctacatctaattgtggatttgtatgcatagtctgctatttaaattct

SEQ ID NO: 479638 - DNA, 122 bp, Homo sapiens
tgctcccacaacccactagtgggtcctgaaatcaattagtcgccggcttgaataaagagacgatactgcggtgtagggtaaatattcttggcaaactctggctttggtgtgacacacgtgtg

SEQ ID NO: 479639 - DNA, 122 bp, Homo sapiens
aaaatgatataatcatacagggccactgtcatgtatctggtctttcgctgaccaaaatgtcgttatgcagtgcatgactgtaattatcatcaatatctgtttttttaattctattttgattt

SEQ ID NO: 479640 - DNA, 122 bp, Homo sapiens
tctctgtttcaaagcttggctctgagactatgagcactgccaaaattttacaacagtttgcgtatgtcatggtctgcaaaagctgtggatggcactgtggtggcagcctcaatagaaggctg

SEQ ID NO: 479641 - DNA, 122 bp, Homo sapiens
ggcggcggcggcgcggagctgcagctggctcaggcactcctggcagaaggtgtgcaagcacgccagcagcttgggcgcgcgccggtccgcgtcgaagtagttgtagcagattttgcactcgt

SEQ ID NO: 479642 - DNA, 122 bp, Homo sapiens
ttggtttcgtattttctatcatgtctatgcatacctttatcaaaataaaattgtttaggccggggcagtgacacatctgtaatcccagcattttgggaggttgtgatgggtggatcgcctga

SEQ ID NO: 479643 - DNA, 122 bp, Homo sapiens
agcagcggtcccagcggcaatgactcctcaggtggcagttctagcagctgtagccccagtcgttgcctcagtttacctcccagcaccccgtgctccctttgagctttggccagatccagagc

SEQ ID NO: 479644 - DNA, 122 bp, Homo sapiens
ggctgtcgcctgcaaggtcaagcctttcttccactataagcgctggatgggttctttctgcgcgctacgcaaataaagaccacggtattgcagttaaaaaaaaagtttaataaacactaggc

SEQ ID NO: 479645 - DNA, 122 bp, Homo sapiens
gagaaaccttatgaatgcaaagcatgtggaatggcctttagcagtggttcggctcttactcggcatcagagaattcataccggtgagaaaccatatatatgtaatgaatgtggtaaggcctt

SEQ ID NO: 479646 - DNA, 122 bp, Homo sapiens
cagtgagcagctaaaaagtcctctgctaggcttcacgtctgtacttcctgctttcgctttcgcctttacccttcctcaaaggcccgtggcggttttctgcatcttgtctttcacttttggct

SEQ ID NO: 479647 - DNA, 122 bp, Homo sapiens
ttgttttaaacacgggttgatagatggacagaacatgatacagcaagtataggaaaatggcgatggtagacacgtgggtgtttactgtagaattctttcaacttttctgtatgtttgaaaat

SEQ ID NO: 479648 - DNA, 122 bp, Homo sapiens
agaatgaaatctgcaattttttattaaggactgcagggcccgacataatctggctcttgtcgctctggccctacctcctgctctgcctccttctttctagcctggctggctgttttgcacct

SEQ ID NO: 479649 - DNA, 122 bp, Homo sapiens
ctgttcttggggaagggccccttctcccgcaccccctgccagggaatgttgggtagtggacgccctctggcggctttcagaagtggaagcagcaggaagaggccattcttttccttcctaac

SEQ ID NO: 479650 - DNA, 122 bp, Homo sapiens
gcctaagccagagcagggtccccagcaaagctcatgcccagccccctgggggcggagggccggcccatggcccaggtggtgtccctgccccgccccgttccgcagggatagggaagggaggg

SEQ ID NO: 479651 - DNA, 122 bp, Homo sapiens
gaaatccctcagccccttttgtcttgggtctcacagctccagaagtgagccgggccagaacgaagccatcctagagtccccaaggacagccctcccgtggaccccggctagggcccccagag

SEQ ID NO: 479652 - DNA, 122 bp, Homo sapiens
cctctctttgcctcagttcttcacctacaaaacaggaagaatactcctcacctcacagggcgtagtaaggattgcaaagggcagaagagtttgtcagagcactttgtaccgtgcccagtgtt

SEQ ID NO: 479653 - DNA, 122 bp, Homo sapiens
ggtgagcggcagccgccagcggaggttggtgttccaggccatgctgcaggggtgcctggccgggctggcagcgggcggttcggacgctcggaggccggcggggcttttgagacccgggcagg

SEQ ID NO: 479654 - DNA, 122 bp, Homo sapiens
cctaagccatcctgaccaagcctttgggcttcctgtgtctgcatctacagggccacccgccggctctccaaactgaggctttcttccccacatctgcagttctgattgctcaactcttggct

SEQ ID NO: 479655 - DNA, 122 bp, Homo sapiens
gcatccgcatatgcagagagtacttccgactacagataccagagagccgcgtgcagcctccgccagccgaactacaagtctcagaggcctcagtttcattttttaattcctgggaatttaac

SEQ ID NO: 479656 - DNA, 122 bp, Homo sapiens
ctggctggatcacctcattctttctgtattcttattgacctttgtggttggaatctgctccgtggcatgctgaaaataaccctgagaaataacttttgttttcacagtcatgttaactcatt

SEQ ID NO: 479657 - DNA, 122 bp, Homo sapiens
cgacgacgtgcgtgcgccgcgcggcgggcgggcggcgaggggctgggagcgctcggggaacggcatgcatgtgacgcagcttttaaaaaaggagacggaggcagagaccccagagagggagg

SEQ ID NO: 479658 - DNA, 122 bp, Homo sapiens
gggcacgtctacacacacccgctgagcaggggacctgtgtgctggccacagaggtggcaccggaaggggattttctctcgctgcatttcctggcattgagcagcgccttttgaggtagtctc

SEQ ID NO: 479659 - DNA, 122 bp, Homo sapiens
tcagaacttcagttttaccagcaatttcattttccccgctatacgtagttaatctggtcacgtgtgataagtctgagcttccaacttgtaagctgttactttgtttgtaccacaggctttcc

SEQ ID NO: 479660 - DNA, 122 bp, Homo sapiens
aagacttcgaggttcagagaggggtagacacccggacgcgatcacacagcgagccgaggtcggcggcagagctatcaccaggtcccctgggtctcagcccaggctcccaccctacctcgccc

SEQ ID NO: 479661 - DNA, 122 bp, Homo sapiens
gggggtgttggggatgaaggccgagtggagcggagggtggcacggtgcagtgccccgggccgggtcctcccttgcggtgcccacctctctccctgtgctgggctcgcactcggggcgcctct

SEQ ID NO: 479662 - DNA, 122 bp, Homo sapiens
ttagtggaaagacctaaaggaaacgaacagcggcctctgcttctttgagcttggaagagccgctactcgaatgagctcaggcttcctgtggcaaagagagcgaagcggctgtgctcagccca

SEQ ID NO: 479663 - DNA, 122 bp, Homo sapiens
tcatttttcgggacagccaatcatatgagtcaattcaccttaggcaactcacggctcctgcgcgagcctccaatcgatctcgaagggcactcgtagagaaaactacacctcccaggaagccg

SEQ ID NO: 479664 - DNA, 122 bp, Homo sapiens
gaaaccagcggccaccagggtggatacagaacccttctagaacgatgctctcactacagacgagggatgtgagcggcaggtggcagcgtggcgtggcaggcaccgtgcaggtggcatggccg

SEQ ID NO: 479665 - DNA, 122 bp, Homo sapiens
ttgaagagcccttcagcctgctgctgcactgtgggagcccgttcctgggctggcagaggccggagccggctccctcagcttgcagggaggtgtggagggaaaggcgtggtcgggaactgggt

SEQ ID NO: 479666 - DNA, 122 bp, Homo sapiens
gtgtgcaatcttcatagcactcagacactgaacagaaaggcaatcatcactgccaaacagcgcccaaatgccacacatggtgcaatgaagctataagctttctatggagagaaaagcagaca

SEQ ID NO: 479667 - DNA, 122 bp, Homo sapiens
ctgcgccgaaggatggcccagaaggcaccacagagcaaggtcggggtctcgtggacggcacgtggcagtgtggctccggcccaggtttcggagcaggtggtcttcccactagatgagggttc

SEQ ID NO: 479668 - DNA, 122 bp, Homo sapiens
caatcggcttcctaggatgggatggggggtaggggattgcatttctttaacccagatccacgtgcctccccacctgccccggcgctgggcggttaatattgtgcgagttcctgagctgtact

SEQ ID NO: 479669 - DNA, 122 bp, Homo sapiens
ttgcgaagtgtgttgactttctcctaagcccttgaacagggtggccaactctggaaaacacgacaagacttcaattagcttaatcggagtaacattcagaaaaagttgaagttggatagaaa

SEQ ID NO: 479670 - DNA, 122 bp, Homo sapiens
tcatcatgagaaacataagtatttgagccctaaactactaagcccagtgaggaattggagcgttaactgtatggcaatagctagatcatagttaccatttttcccaccatcaaagacagatt

SEQ ID NO: 479671 - DNA, 122 bp, Homo sapiens
ccgaagatgctgtctctggaaactctcaaagctgccgattctggaggtgccagatggcgtcgggtgttgggggttctggccaggtggggagaagagacctcatccccaactccacacgttgt

SEQ ID NO: 479672 - DNA, 122 bp, Homo sapiens
gagtgagacagaagccatgcccaggacctgggctggaagacacctctccttttccaagtacgtttgggaaaaccacacagggtttgtctgctcgagttttcaattttgattgtccttgaaag

SEQ ID NO: 479673 - DNA, 122 bp, Homo sapiens
catcttcccccgtaccccccagctgagaacagatggaaacgtgaagacgggtagctggggcggccagggaacccaagtccgctggccgaagccaaagcccggcaccacccccaattcttgct

SEQ ID NO: 479674 - DNA, 122 bp, Homo sapiens
cagagttaaactgaggaatcttggtaggtttgttttctttgctccgattggcgtggagcgcgccgaactggtgcacgaagggttaaaaaaagtgtctcaaaactagcctctccggaaggcgc

SEQ ID NO: 479675 - DNA, 122 bp, Homo sapiens
gcattttccttcacagggccttcccggcgttgctggggctcccggcctccctggaccccgcggtattcctggccctgttggtgctgccggtgctactggtgccagaggacttgttgtaagtg

SEQ ID NO: 479676 - DNA, 122 bp, Homo sapiens
ctcattgtgccacaagcacaggccgctggtctccagtccttcccagaacttctccagtgccgtgaggctgaggaagcccctcgggccttccacatcaccgcagggaagtggggagtcagcgc

SEQ ID NO: 479677 - DNA, 122 bp, Homo sapiens
aacaataaataaaagagcagcccaggcatcacttcctgcctcccctccactccacggtcccgcttctgtccacaggagtgtcattgggttttggggtggtttgctatactgcaagagataac

SEQ ID NO: 479678 - DNA, 122 bp, Homo sapiens
ctggtggaaggtggtggtgagtcttttgcaaacaggaagcaccagggctaattctgctgacgctgcaggatgagaaaggtgaacaggcagtcactgtttttaagctgacagctggaaataaa

SEQ ID NO: 479679 - DNA, 122 bp, Homo sapiens
acagttcctgaggacagcaacacgtcaccagtcagattagtatagcggatccccagctgtcgggcagcttcggtccatctgtccttctctcccccaagaccactgatcagtttctctgccct

SEQ ID NO: 479680 - DNA, 122 bp, Homo sapiens
tggccggtgcccatctatcccatatgattgtaaactcgtccaggaagtgtgtgatgtggccggtgcccatccatcctgtatgacggtgaactcgtccaggagcgagatgtggctggtgccca

SEQ ID NO: 479681 - DNA, 122 bp, Homo sapiens
agaactgaaagagcagattcaggcgtggatgagagagaaacagaacagcgatcactaaaccgttccgccgcccaccctctgctagacacagccaaggccaacgaggcaagcagaagcagcgg

SEQ ID NO: 479682 - DNA, 122 bp, Homo sapiens
tgtcgcaggcgcctttggcgaggtcactgcagagcccggggatgttttggtcgtaggaggcgcagggcaggttgccgtaggcgtcggcgcccaggccgtagccggacgcaaaggggctctga

SEQ ID NO: 479683 - DNA, 122 bp, Homo sapiens
ttctgctggactctgcagatccctggcaggatgaactgatagaacacttgccccccaggccgctgatgtgggatggcagaagatggctggacaggctcacttgagctgttaaatgcctgcgg

SEQ ID NO: 479684 - DNA, 122 bp, Homo sapiens
ttatcctgtccacaggtcagttttgttacagaggccaattagcagtgctaccttcgcctgcggcaaaaagccaagtaatgaccgggcaagccctgcggaggggtgatgaataactccggaga

SEQ ID NO: 479685 - DNA, 122 bp, Homo sapiens
tgccccttgcagatgatgtgccttttgagaggcaccaggtgactgctcacagtatgcaagcgcattatctaaaagcactccctcatttggaaacacttcaatgaaaaagtgaaattttgttc

SEQ ID NO: 479686 - DNA, 122 bp, Homo sapiens
cgatcctgcttcgcacgcaagccaggaagtgtgtgtctgaactcccatctgtgagcgtgtcgtcgaggtgtgcacctccagcgacttcgtgctcggcagcgcggacgcacctgcccgtcctc

SEQ ID NO: 479687 - DNA, 122 bp, Homo sapiens
tgtcggagcggcgccccgggccccccgagcgcccagccatcccggggcgagcctgggctgcgttaccttgcaggttctgcactcggatgtcgctaatctgcccgatgagctcctcgcgttgg

SEQ ID NO: 479688 - DNA, 122 bp, Homo sapiens
gagtggtgtcagcttgcctgagggtcctcagctagttaggcacaacccggggccccaagccgagctgggaattttagctcttggagctctgcctccgccacaccgtgcaccctgcacggaaa

SEQ ID NO: 479689 - DNA, 122 bp, Homo sapiens
cgcctggccgggccaagcctcagggtcacatctgaagggggcccggctggccctgttgtccgaagcccctggtgcgctcagccccgaggccccacgtgccttcttggcttcctgtgctccgt

SEQ ID NO: 479690 - DNA, 122 bp, Homo sapiens
gtcctgtgcctgccacgctgctgcagtgcctggtttgcagagctccgtggcagcctggtccgggctgtggctgactggagcctcggaggcacactcggtcgtcttggcctgcttctctcgca

SEQ ID NO: 479691 - DNA, 122 bp, Homo sapiens
tctgcccagtgcagttaggtcttacttagtttgccttgtaaggtcatttcagattttaatcgctctccccataggaagtttttcctgctgttctgcctgagttgccttctgcttagttttag

SEQ ID NO: 479692 - DNA, 122 bp, Homo sapiens
gatgttccaatttcctgacttgttgattgccagtttggctagttttctttgacctatagtcgtaagatggtgatgacgttgacgatgacggtggaaaagcttatgaaaatgttggctatcaa

SEQ ID NO: 479693 - DNA, 122 bp, Homo sapiens
tcaaagtcattctctgtccagttttgttctgttgctggtgaggagctgtgatcctttggacgagaagaagtgcttaggtttttggaattttcatcttttctgctctggtttctccccatctt

SEQ ID NO: 479694 - DNA, 122 bp, Homo sapiens
gttagaatgatttaacaatgatttgttaagtcattctaacaaatcttatgtatctgaccgcggcaccatggccttccccactgtactggtctgagtcctgaagagaacagaattcgccacag

SEQ ID NO: 479695 - DNA, 122 bp, Homo sapiens
tcttgttagccctactttaacatttcttttgaagtggttgtctgcttgaagagggaaacacgtcatgaaactgtaatgcatgaacagaactcaggagttgtctggccagcttagtggtaaga

SEQ ID NO: 479696 - DNA, 122 bp, Homo sapiens
ggcaggcaggggcagcttgggaaagcccccaccagtctgccttggccctgggctggacaccgatccctgcagtccagtgtgctgaggcagccaccagaccagaggtggtggggccagccctg

SEQ ID NO: 479697 - DNA, 122 bp, Homo sapiens
cccaaacgtcacactacccgtccctggaggagcgggttgcagcccagctgcgtcgccccgcgcagagctccaggcagaagaaaactacatttcccagagacctctgcgcggtcgggagcacc

SEQ ID NO: 479698 - DNA, 122 bp, Homo sapiens
aacaagaaaaccaaaaacttgttatgccagtataccaccactctacttctattactctgtcgtgttgcaatacaacacaactttattttagagccacactccagaatgtgaaaaggagagaa

SEQ ID NO: 479699 - DNA, 122 bp, Homo sapiens
caaaggtgcagggtgacctgctgcacacgtccagagggtttcccgaagcaaaaagcgagccggagccttaatttaggtgccctggtgccatgaagggaagtctgtgagttccatgcagtcga

SEQ ID NO: 479700 - DNA, 122 bp, Homo sapiens
ctcatgcttgtgcgcacccagcccatatgcttcattctcttttcaacaggaacctcctagcgttgctgctttaaccaggttaaacccaaccagactgtgacatcctcaagggcaggatccat

SEQ ID NO: 479701 - DNA, 122 bp, Homo sapiens
aatgattactgataaacaggacactgatcacaatcacaaactctcacacatttgcacacccgaacatcccctgaggcccacagtaaacatgaaaggagggatgaaatgagattccaaggaga

SEQ ID NO: 479702 - DNA, 122 bp, Homo sapiens
aatgggaggaggcgtggcaaccaatgggcgcatgagttagctggatgcggccaatggaagcgtgcaaagcgctcctatgtgggggcggggctagactgcacaccaatgacagggaggtggtg

SEQ ID NO: 479703 - DNA, 122 bp, Homo sapiens
cttaggggaatggcattggaagcgatcttccagctggctcaccagagctggtgagtgcagcgtgtgcctctctgggctgattgtgcctcctgagcttcccacgtggccgtctgaaatgtgct

SEQ ID NO: 479704 - DNA, 122 bp, Homo sapiens
actgcagccggcggctgcagggtgatctctgacatctctgcctgctgcaggaggcccgggcgaggccgggcacgggcggcgagctcaggggagccggtgcgggagctgagggggctttgggt

SEQ ID NO: 479705 - DNA, 122 bp, Homo sapiens
aatcttcacaccattgggaataggcaaagatgacttaaaccggacacacacaaaaaaacacggataaatgagactaaaaatgatttgcttacttcttccggatgaaaggtaggaggcaaggt

SEQ ID NO: 479706 - DNA, 122 bp, Homo sapiens
atgggcagatgcaaacgagccgtctgctgaggagaaagtcgaatgtgctcggggtgggtgcgcgtctgcctgaagcacgtgtccctgaggcctcctgctgtctccccagccggctgacgggc

SEQ ID NO: 479707 - DNA, 122 bp, Homo sapiens
tacctagaggaagaaagccgggaagggtacacatctggcccagctctaaaacctccttcacgtccccacagtgttcccatgctcaccggaggtactgtcggctactagagcacttgcagagg

SEQ ID NO: 479708 - DNA, 122 bp, Homo sapiens
tcaaagagaggttgaccaggaaaagcagtatggagagggctttgagagagaaaagaacagcgtgtcaagctgtgaacttcttgagatcagaagtcatgtcttctttatgcatccttatctct

SEQ ID NO: 479709 - DNA, 122 bp, Homo sapiens
ctagcggtccgcctgtccgtctgtctggctgccgggtccctggagggcgcgtgggagggccgggcccgtgcgccctcttcgatcctggggtgctccggtccctcctccccgccacttcctcc

SEQ ID NO: 479710 - DNA, 122 bp, Homo sapiens
atgctgtgctgtggggcacgtccagcaggccactcctacacccagatttgactgtgtgtgcgctcagccactgtgcgtctctcccacccacatgcacccacgccaaggaccctgagcctcgg

SEQ ID NO: 479711 - DNA, 122 bp, Homo sapiens
actaatcaaaatcttatgaatttttttttacaaagcagaaattccatacgttttgacccacgaaggggagagcttcagcacatgaaacagattcgtctggagtaataggaagtatgtccaaa

SEQ ID NO: 479712 - DNA, 122 bp, Homo sapiens
gaaacctctcacgaaccacaaaaatgtggccgagggagcctcaaaaagcagtaccccaagcggggacggtaaagtcagaaaagacaaggctgggggtaatcacagagaaatctaaaaacccg

SEQ ID NO: 479713 - DNA, 122 bp, Homo sapiens
ccctggcgctccggccacaacttgggcggctctgtgcggcggccctcgcctgcgcctttgcgcgccacccaaaactttgcgcacactgcagccgccgccttcccgctcttcgcggtgagacg

SEQ ID NO: 479714 - DNA, 122 bp, Homo sapiens
gcttggaggggcaacgatctgggacaccgggggccagacggggagtgtggggaccccggacgagtccactttgtgtcaggcctcacggggtccgtccctcggtcggtgcgtcccgagcgccg

SEQ ID NO: 479715 - DNA, 122 bp, Homo sapiens
tgcgccctatttaggtctccgggtttcggtgtggaaacaccactccacaagcagcctccacgctccccacttcattccaaaaacgatttcacctggctttctctcaaaggggttttcctctc

SEQ ID NO: 479716 - DNA, 122 bp, Homo sapiens
agaaagagcgagtcccttctatatagaggaatgctgcttctcagcctaggcagtttcagtcgcaggcaggggctgcccgccgagaagggcctgtccagcacaaacccgcagcacacacttac

SEQ ID NO: 479717 - DNA, 122 bp, Homo sapiens
gagtttttggtggaggtggtggtctgtaaagaagtcaaagaggtgagtgccgaggagaaacgctgccccagtgctgaagagttgtctgttctgtccacggaggcttgtggcagcacttacaa

SEQ ID NO: 479718 - DNA, 122 bp, Homo sapiens
tcccctggtgaccccacgctccggcctcggggggagtggcggtcggcgcgccgagaccctcgggagccccgcccagacgcctgctccgcttccaggccacccgggctctccagccgcgctcg

SEQ ID NO: 479719 - DNA, 122 bp, Homo sapiens
ctggggaggctgaggcgggaggatctcttgagcccaagggttcaaggctgcagtgagccacgatcgcgccactccactccagcctaggtgacagaccaagatcgtgtctctaaaaaagaaaa

SEQ ID NO: 479720 - DNA, 122 bp, Homo sapiens
tgccagggacgaataaacgagaaaaggggctgacccggtgtcacccagcggccgagcagccgccccttggaagctcagcaccaaaggcaggcggccagggtcctggcccctctctggacccc

SEQ ID NO: 479721 - DNA, 122 bp, Homo sapiens
tggcctttttgagagagattagaaaaattgtggcttagttcaacaaagattgagttaactcgtgtgccaggttactagaattatggatccagcatctaccttcaagactcttacagtctagt

SEQ ID NO: 479722 - DNA, 122 bp, Homo sapiens
cggtatatcccaggctgcggtcagtgcctggcacatagtagatgctcaatagatatttatcgattggaggaacacagccccactcaaccccaggttcctaccgggatactcacgtctaccac

SEQ ID NO: 479723 - DNA, 122 bp, Homo sapiens
ccactaaattgctcatttttgtcaacatccaacctagacactgctcacaccaagtaagaacggttcactccccacagtgactcctcgggaggcgtttcccaccgtgggattcttccccatct

SEQ ID NO: 479724 - DNA, 122 bp, Homo sapiens
tctgcgagtccgcgctgcgggagcgggtggcttgcacctgctccccgcgcgccggctctgcgacccctaggcaagacgcagcccaggaggctccctcccgagtcgcgccccggaccacgccg

SEQ ID NO: 479725 - DNA, 122 bp, Homo sapiens
ggcggatccctttaggacccgaggcaggctctgggcccgccgggtccgttaatctcaccgcgccgcaaggggccacgttttaccacttgatttagcaaccctaagcggtttggaatctgctt

SEQ ID NO: 479726 - DNA, 122 bp, Homo sapiens
cggagcagctgtacctgcgcccacatgggctgagagacagggacggttatagccatctcgcgtccatctggaacgccccacgtggacttcccctgaaatagctactgtcttcctctccccta

SEQ ID NO: 479727 - DNA, 122 bp, Homo sapiens
gcgccatttccacgcacgctcttccgctcctagctttcgttcagaagttgacgtcagcttcggagacagaaattacacactctacggcgaggggtcgggttcaaacttagtgaaaagccgcg

SEQ ID NO: 479728 - DNA, 122 bp, Homo sapiens
tcctgccagatgagggagccccggcggaggccaggagggcttgcgttgcacaatctggagcggatccccgggggcggctgagggcctgggaccccagtctccctcgaggtcttcactcaccc

SEQ ID NO: 479729 - DNA, 122 bp, Homo sapiens
gacactttttttcttgtcccctgaaccatttgaaagatgcagacatcctgacactaagaacgaggatggctttctgtatcaccacattaccgtcaaattgctcaagaaatggaacatcagtt

SEQ ID NO: 479730 - DNA, 122 bp, Homo sapiens
ttggcttcaccttcctctttctcccactctcaactttgctgagaaccaaagtcttggtggcgagttcagacattcaacagagtaagctctatctattatgtactgagcctatatatttattt

SEQ ID NO: 479731 - DNA, 122 bp, Homo sapiens
gggcgcccggggggcggggcgcccccgctgcggggagaggtgcgggggcggggtgaggaccggagggcgcccccactcccgcccccgctgcctattaggtcctctgccggggaggaaggggc

SEQ ID NO: 479732 - DNA, 122 bp, Homo sapiens
agccgggagtccgaggccgcgcgcacgccgaaccgagcgtaccaactccgcgcccggacgcgtggcgcccccccaacccgcagtcaccgcgggctacgccactcccacccggcacacgcgac

SEQ ID NO: 479733 - DNA, 122 bp, Homo sapiens
ccggaaccggcccccgcatggtcgccgctccggcccgggcgggcgcagcgctggcagccccgttttccgccagccgggctgccggagagttagacctcccagcctcacggggctgctgtgcg

SEQ ID NO: 479734 - DNA, 122 bp, Homo sapiens
cgtgcgaggcagcctgcgcagaagcgcatagcctgccacttcgttcttggtggtgagggacgtggctggctggaggcctcggcccgggcagagggagggggaggctgcttcctagcccctca

SEQ ID NO: 479735 - DNA, 122 bp, Homo sapiens
gtgtctctgtgtctgcgtgtctgtgtgtccaagcacgccaaacgtggcatctccagtgcccgggactttggacagtaaacagaggtggaaatggattggaacttaggggagtgtgggggtgg

SEQ ID NO: 479736 - DNA, 122 bp, Homo sapiens
gggtgcccctagcccaatggccgggctatttgctactgcaataataggtttcttataaaccgtcagcctcctgagtagctggcaccacagggacaccacaggctattttttaaaaaaattta

SEQ ID NO: 479737 - DNA, 122 bp, Homo sapiens
ttagggacataacaaagcagtagtcattaaaacagtgtgacacttgcgtgagaacggatacgtgagtaatggaacatgctggagccccccagcagggccctacattatacggtagccttaag

SEQ ID NO: 479738 - DNA, 122 bp, Homo sapiens
ttcaacctgagggatgactacccaatacaaaatagtaatggcggtcactgctagatataacggactcctgggtagcctcaaacctcaaagtacttgtattgctttaggcctgcatggcaggt

SEQ ID NO: 479739 - DNA, 122 bp, Homo sapiens
ttcaaatagcagatgatgtctggttgcccactcgtatttgagaacaagcaacaggaagcccgaccgaaggagatctacatttgagggccgaccgaaggggatctacatttgagggccgaccg

SEQ ID NO: 479740 - DNA, 122 bp, Homo sapiens
accagacactctgggttcgaatacaagcgccgccacttcctgtgtccggggcaacttgctcgcctccaagcctcagtgtcctcatctgcaaaatggacacactcgcgactgcctcgcggaac

SEQ ID NO: 479741 - DNA, 122 bp, Homo sapiens
gccgtggccgggcagaggcagccagttcgggcccggctgccctcgcccgccccccacccccgccccggccctttgtacagcaattgcaacaagtgggagcagagggtgagaggagccggggc

SEQ ID NO: 479742 - DNA, 122 bp, Homo sapiens
gaaacgcttaggaaactccaggctctggactgaggttcgggagggctggacttaaatcttcgctccgcaatggctgaaatcagcgttggtgcattgagacttggtttctcatcatttcaaaa

SEQ ID NO: 479743 - DNA, 122 bp, Homo sapiens
tcatttcctttccagggtccgcaaccgcttccgacacaatcactattttggctgcggccacggcttcattcgcttcagctgcgagcttttctcagcgcagagagcacagggaagctgggagg

SEQ ID NO: 479744 - DNA, 122 bp, Homo sapiens
aaatcacacgaagcaattctgcttccgaagagctatgtggattaggcctttgctgatgctcggatactagaaaaaaaattgaaattaagcatgcataaagatacagcattagatatatcctc

SEQ ID NO: 479745 - DNA, 122 bp, Homo sapiens
cttgtcctgagaagtggcatcttcatatggcattcaggcttcttcacattctggtgtgaacgcctgccttcccccttttccaccactcccctttacagacctcaagtatcaaaacaacacta

SEQ ID NO: 479746 - DNA, 122 bp, Homo sapiens
cacagtctgcgagggagagctgtttccagcttccctgctcagccctcaggcacccagggacgcctgtcctatctgcagagcagtggcatgtcactggcagcgaggaggagacaggagcagag

SEQ ID NO: 479747 - DNA, 122 bp, Homo sapiens
ccaaagtcatttattgctgatagcaaagaaaaacagcggctgcctggcatttgcaaattgcgttaatccccttaatatggactagatggatttgggcatttagagatgataccatcatatta

SEQ ID NO: 479748 - DNA, 122 bp, Homo sapiens
ccttgagtgcaggagggcttaatgctgagatgattggagtcctgcacaagttacttaagtcgggtagcgtgagcagaaactgaaccacaagtgtgtttggggatttgtggtgtcaggaaaca

SEQ ID NO: 479749 - DNA, 122 bp, Homo sapiens
cttctctggccctcgtgaagctgatgagaggtgcttcttgctgcccacttccgaagcatccggaaacatgacctggacagagatatccatggcagtggcttgagggctggcattgagtaccc

SEQ ID NO: 479750 - DNA, 122 bp, Homo sapiens
gctccgccccccctcacctgaggccacctgggccggcgtggctggggctctctgcgcctgcgcgtctcgcctacccgtcagactccaaccgactcagacctgacagcaacatccggcgcctg

SEQ ID NO: 479751 - DNA, 122 bp, Homo sapiens
ggtgcaattggaagaagagccaaccaatcacaccagagcttccaccgacagcagaggggacgtaacacaccttctttcccctccggctttccttccccttctctcccgccttctccttattc

SEQ ID NO: 479752 - DNA, 122 bp, Homo sapiens
ctggcccctgcgcgtgtggcagctccgcaaacaccaacacacaagggccgctttgagagacgaagggtgagtgagacagagacacagagactcacagagaccccaggccaaggagacctcgg

SEQ ID NO: 479753 - DNA, 122 bp, Homo sapiens
atcattcagaggtgcctattttataaaaagcctttatcccttttgaaatggaaaaaggtgcgtgcattgtggaggtactagagctctttagagcccacacagagctgcaaactaggcagaca

SEQ ID NO: 479754 - DNA, 122 bp, Homo sapiens
agagcatgcacgacctggtactccaggtcatgggcttgcagctgcagctggataacatctcgtccttcctggatgaccacgaagagaacatgcatgatcttcagtaccatacccactacgcc

SEQ ID NO: 479755 - DNA, 122 bp, Homo sapiens
gaaatttaagatgaaatactcggaagagaaaatctgcagacaatggcgaatgccacatggcgcctcttggagtggcttcccagagctctagactttggaatcagttctcaccattgttgatg

SEQ ID NO: 479756 - DNA, 122 bp, Homo sapiens
agaaacgcttgcattgcctgactctgaaaccagaagggcggccgaatggccttcaccctccgttaaccctcgcctgcttcagaagccagtgcctctggaaatgcctggatctgcgaccccag

SEQ ID NO: 479757 - DNA, 122 bp, Homo sapiens
attttagctctgccattcccaaataaagcctcagtataggtcaagtttcagttcaaagtgcgtaaagtactaatggggaagaagttcccattttaccatctttaaaataaagataatgattc

SEQ ID NO: 479758 - DNA, 122 bp, Homo sapiens
agtgattcgcctgcctcgggctcccaaagtgttgggattacaggcgttagccaccgtgcccgccccatagtaggtatttagtaagcatttgctgagtaagcaaagattactcacttccaaag

SEQ ID NO: 479759 - DNA, 122 bp, Homo sapiens
gaatgcaggctttttgtttacatagagttggcaggcatgcgttatccagcaaggccggaacggaagacactctcagcctcagctgcaaccacatctgggtatgcagaaaccttctaagatcc

SEQ ID NO: 479760 - DNA, 122 bp, Homo sapiens
cagggactaactatactccttgctcccacaggacagaacattctctaggtttttcattcccgactcagtagcactcaaagcttttcttaaggtaaattaaagttatggagaaaggcatcact

SEQ ID NO: 479761 - DNA, 122 bp, Homo sapiens
gtcccacagtagatgtgcttggatactcatatttcacaaagtttactaacagcatcctttcgctatgcaatagatgtatatatgagatttttctctttttattttctccaagatgtacatca

SEQ ID NO: 479762 - DNA, 122 bp, Homo sapiens
aagaaaaaaaagaaatcaatgactaaattattgggcttacaagatagcagatcagcctcccgagtagctgggactacatgcatgcaccacatctggctaatttttgtatttttagtagagat

SEQ ID NO: 479763 - DNA, 122 bp, Homo sapiens
gttatttttagccccagccccgcctgctgctaccacgggccttttctccgcagagagaggcgggtgaggcctgagggcctcacccagggcagccagttccccaaccacgaagggaggcagga

SEQ ID NO: 479764 - DNA, 122 bp, Homo sapiens
ccaggagactctgcccgttggtagtaaaagaaccaattagactgggaaaaaaagaagcaacgccccaggtttcaccccggcttgacagacgcaattgaggccatccttgagtccctccgccc

SEQ ID NO: 479765 - DNA, 122 bp, Homo sapiens
aaacgatgcctgcctccttattgcatgtggtgagcttcctgggatgcaggccgaccattccggtggttttcagagagaagcaggtgctgcctaagccaagctccttcccggcgcacctcgca

SEQ ID NO: 479766 - DNA, 122 bp, Homo sapiens
tttaagtcagatagaaagaaatcaatctttaggaatgtatagtgctcaaaatgagatctacgaggcagtgagaatttcaaaccaaagcagcaaatggtaagagacagtggtccttgatgatc

SEQ ID NO: 479767 - DNA, 122 bp, Homo sapiens
ggaagatgggagggagaccaatgcgcagtgacagtgatcctggggacacgtgaggaataacgcagcagtgatgcagcttcacggcacaggggcgccgccgggggaagatgggagggagacgc

SEQ ID NO: 479768 - DNA, 122 bp, Homo sapiens
gcctgctggatgggacggaactcagcccagtcaaaggtcttggagaggccctctcgcctccgctcccacgtgcggctcctcttctgctcagggtccggctcccccggctctgcctcttgctt

SEQ ID NO: 479769 - DNA, 122 bp, Homo sapiens
tcagcaaagaacatccctgagaaagagaatgcgtccctaaggggaggcctctgaaatggccgctttggggacggctgtcttttacagtcgtagataagggaagaaataagccctgggctcgc

SEQ ID NO: 479770 - DNA, 122 bp, Homo sapiens
ggttgtgcttgttgggggacttggagaggcagagcacgttcgactcttcactgaccgtctcgcggtacgagacgaccgggtcagatttctgcaaaaagaggttaagtcccactcttgcctgg

SEQ ID NO: 479771 - DNA, 122 bp, Homo sapiens
ccagctcctatccaaattaatataaagcctcatattaaaagcctagttactggctgggtgcggtggctcatgcctgtaatcccagcactttgagaggctgaggtgggcggatcactgacacc

SEQ ID NO: 479772 - DNA, 122 bp, Homo sapiens
agggctgtggagctccggaaggagccttaggagtttgttgtcgtggtagacagactcccccgggagctttctctgactccgaaccctgccttgctctgacttcctgttggagatgatcgatt

SEQ ID NO: 479773 - DNA, 122 bp, Homo sapiens
gtgtctcttggaggacacgcagggaagcactgggcatagatgctgagctaaatcagcacccgcctgccctctcacccatgcttcccactccctcccagtctgctcctctgacaaacgaattg

SEQ ID NO: 479774 - DNA, 122 bp, Homo sapiens
ggctccatctcgagcgccctacgacccaccacgccccacccatcgtactctcccccgccccgtctacagcagggaccctgaggcctgtacctttaagagcagcagaatgttctgcactatgc

SEQ ID NO: 479775 - DNA, 122 bp, Homo sapiens
ttgccaacaggcccagagagtttgaagcctggggtactgtcaccaacaggccagtagcctcgcagctgggccctgccctagagtcttcctgcagcagggcgcttctccggaggagctgtgaa

SEQ ID NO: 479776 - DNA, 122 bp, Homo sapiens
tgagaaggcagcctcttcagtcgatgggagaattaacctataaaccaagggccttattaccggatacagcttgcagcctcgtgagtcaacccccaaccctctccttttatcttgttatttaa

SEQ ID NO: 479777 - DNA, 122 bp, Homo sapiens
ggggaggggtccgatttggggcatctcgcagctcgctcctgggggactgctgggaggaggcggctaggggaggcacggagaggctgggtcaggccgagggtgaggggcgggtggcccaggcg

SEQ ID NO: 479778 - DNA, 122 bp, Homo sapiens
aggtagtaggagtgtctatccttgggcgctcatggtagaaagaaaagcagaaccccaccgcggaaatgagaataatccctcactaggtggctctctttgccgtgagtgggcggcgcgtcggg

SEQ ID NO: 479779 - DNA, 122 bp, Homo sapiens
tgtgctggggcagttatgggagatgtggttacctagcaacaggctgcctggttctgtggccggcacgtggagtccaggcgctgccctctgccccctgccccctgcccccattggtcctcccc

SEQ ID NO: 479780 - DNA, 122 bp, Homo sapiens
tcggaccctaaaaggcccatcggtttagcaacgagctgggatttctcgagctgcgttcggcggcgcccggaaaatcagtcctgctggatgcgcccgagcgggcgcgggagacgccgattccg

SEQ ID NO: 479781 - DNA, 122 bp, Homo sapiens
gcggtcctggaatgtgcgaggggcgtgatgacagcggccagcctctttgcgcaacaccttcgccatatatacccggggcgctgcgctccacctggccgccgcctccagcccagcacctgcgg

SEQ ID NO: 479782 - DNA, 122 bp, Homo sapiens
tattctggtaagggtttacaagacaacgtaaatatatgtataaagagtatcttcaggagacgtaataatgtaaaaatcatgctcaatagaattaagctgaggctcaaaatagtgccaatcct

SEQ ID NO: 479783 - DNA, 122 bp, Homo sapiens
cacctcctccacgaacagcagccacggcccatggcaggagtgctgcacctccacccacagcggccacagcccacggcgggagtgctgcacctccactgcccacagcggccacggcccacggc

SEQ ID NO: 479784 - DNA, 122 bp, Homo sapiens
ggccactgggcagccaggagggggcagtgaggaactggtggaggcagcaagtagggagggcggctcccgaggaatgtgtgagggctgcctgcgattatgggttcctgaaatcatgtgctggt

SEQ ID NO: 479785 - DNA, 122 bp, Homo sapiens
gaacgcatccaacaatagtgtttctgcctgccgtgcccaccattgcctcagaagtgacaacggtccacaagcacgtggccaggggtccctggtctgaggctgagagaggaggctccccctgc

SEQ ID NO: 479786 - DNA, 122 bp, Homo sapiens
tgtacgcacacccggccgggttgcaaagcgcccggacttgaccaaaactttgctcagtcccggagcagacactgggagtctggagaagccacgcatctggagcaggcacttctgagcctgca

SEQ ID NO: 479787 - DNA, 122 bp, Homo sapiens
tgcagggggcacacccgcggcctcactgcttcgatgggtccgctcgtgcttcctcaggctcgacgacaccacaaaggatttcccacatgcgttacagtggaaggggcgctcccccgagtgca

SEQ ID NO: 479788 - DNA, 122 bp, Homo sapiens
gtttcctcctccctgacacgggaactgaactgcaggccgcggcgagccagccagggaaaccgccttctccctgggctcggagctgctgccggttctggagggagagaccccagcaaggaggt

SEQ ID NO: 479789 - DNA, 122 bp, Homo sapiens
cccgccaggtccgggtggcagcgcaggatgccctcctggcctgcggagaagcacagacaccggcgggagcgcgtcaaccgcgcccgtcccgcaccgcgcactcgagggggcgcgtaggccgc

SEQ ID NO: 479790 - DNA, 122 bp, Homo sapiens
agccatttcgctcctggagcagcgcggcaggaaaggggccacaggtcccaaacttgcgcacgccgtagaacgcccacctcccccacaccacgcccagggggtcgttcaaaatgcagatgtcc

SEQ ID NO: 479791 - DNA, 122 bp, Homo sapiens
cgctgggtctctgttcttcccccccaccccccatccctcttcctcagtcctgacccagagcgaccccgcgctccctgcccctgccgatggtttcctggcgtcttcagcggttggcgccgtgg

SEQ ID NO: 479792 - DNA, 122 bp, Homo sapiens
ggggcagacaccgcaggacggccagagcgcccacggggaccccatgtgtggtcagtgcagcgtatggggtctcaaaacaacgtgacttaaagatccaacagtgagacgatggttaagtgaca

SEQ ID NO: 479793 - DNA, 122 bp, Homo sapiens
tgggtccaaagctgggggcgggacggggcggggccgaaatagctgtggtagttcgacgaccgctgggcccttccttactgacccggtcgcggaatagatgtgaggttgacgtttggtgaaag

SEQ ID NO: 479794 - DNA, 122 bp, Homo sapiens
atatggtcagaagtccttcaagactcctggaaaagaaatcacaactacttttaaatcaaacgtctgactaattttggaacagtgagaacaggggctggttttagtcatctttggatcaggtg

SEQ ID NO: 479795 - DNA, 122 bp, Homo sapiens
tgaatggagagcgacccgcgcgccggaacagcggctcctggcggccgtcggggagcgtcgcggccctggggacccaaaggggcctcttagggggcctggatgctccccttgctcgcaagggg

SEQ ID NO: 479796 - DNA, 122 bp, Homo sapiens
aggtggaaatactttcgggcgatggtgggggcctggtgcttcttggactcggaagatgaccgcttggcattctggtacagcaccaccaggcaggccaaggtggccagcagagaccaataggc

SEQ ID NO: 479797 - DNA, 122 bp, Homo sapiens
gggcttcacgatcttggcgctcgaactgaacatggccttctcctgggagaactcgccgagcgccggcttaggaagaggtcttctttaactagaactgaaagtagttttatggttatttgggt

SEQ ID NO: 479798 - DNA, 122 bp, Homo sapiens
gggcggggcggcggcactgcggtgaaagccgaggcagcgggcagacgagcagggggcgggcggacatcttgggatccggagagtggccgggccggcagagcagggggccgaggacaccaggt

SEQ ID NO: 479799 - DNA, 122 bp, Homo sapiens
ttgcgcactgggggttagagacaagcgagcttctgcgtctgactcgcagcttgagactggcggagggaagcccgcccaggctctataaggagacaaggtgagatgctgagggaggactcagg

SEQ ID NO: 479800 - DNA, 122 bp, Homo sapiens
cggccgaggggagtgggtgtcccagcacacacatcaagtggcaactttatctcaaggctccggtaaacttaaaagggtacatgtcgtagttttctctgtgcagtttcagggacatgatgtag

SEQ ID NO: 479801 - DNA, 122 bp, Homo sapiens
atgtgcgccctcagggcttccagcaggattgagtcaccctgacgatgaccggggagaagccgtgtgctcttcattattttcagctggaggacagagctcagtgcctgactgcctagggtctc

SEQ ID NO: 479802 - DNA, 122 bp, Homo sapiens
taaagtcacaggccccctagcgcgaaatcccacgcccccctggacggctgcggccgcactcgccaccagggggcagaggccagagaaagggctatttcccggacccgcccccttcagcttgg

SEQ ID NO: 479803 - DNA, 122 bp, Homo sapiens
cggcctcagcaggctgagcaggtaggacgcgcgggagaacttaaaccctgaaaccgaatccgatgaagactgtcaccaggggtcaccagggatgaggaccgtcaccaggggtcagcagggat

SEQ ID NO: 479804 - DNA, 122 bp, Homo sapiens
ttaggcctcagcccgccagcacccaggctctcattaaaacagcatgttgctccacactgtcgtgttgtctgttggcgcgctctcgaggttcaaaccgatacaagaaacttacaataccatct

SEQ ID NO: 479805 - DNA, 122 bp, Homo sapiens
aatggggctaatgagagcacctgccttgtagggttgctgtaatgagataatgcaggtaaacggctcagtgcaagacctgataagtggtagctgctattaatataatcaagaccccattggtt

SEQ ID NO: 479806 - DNA, 122 bp, Homo sapiens
tgaggaagaagctgacggacaaagcaaaccctctttaaaaaaaaaaaaaagaaaattccacgtgtgtggaatacagccggtgaaaaataatcactgtagttagaatcacatacagaaaaaaa

SEQ ID NO: 479807 - DNA, 122 bp, Homo sapiens
tccagcctggggtacagagtgagaacctgtctcaaaaaaaaaaaaaaaaaagctggggagcggggcaaggcggtggagaatctgatccttaccaaagtttgacactactgcgttagcgttaa

SEQ ID NO: 479808 - DNA, 122 bp, Homo sapiens
gtcgctgctgctctgctcagatcagctttgattcccggctcctatttttcatacatgtagcgtttcctccctaactgccttagggtgcctttttgaataaacattgaattccaaccctagtg

SEQ ID NO: 479809 - DNA, 122 bp, Homo sapiens
aaccctggaaaggcccttccattgaacttcttgtgatggaggaaaagaaaccctcagtttcgtcatcgcaaggcggaagagtttaaataccatacctcaagatctccctccagccctgacac

SEQ ID NO: 479810 - DNA, 122 bp, Homo sapiens
gagtccctcagtgcctcttgtggtgtacagctcctctcacctcctcttctcttatccgttcggctcttccagctgtcgcgccccgcagagagatgggacagccccgtattaacatggcctta

SEQ ID NO: 479811 - DNA, 122 bp, Homo sapiens
ttacatcccagtcattaccatggcttacaaggctccacacagtctgatccctgcctacagcgttggtctcacttcctacaattctctccctcgcttgctccacttactcatctcagccacat

SEQ ID NO: 479812 - DNA, 122 bp, Homo sapiens
tactgaaagttcagcactgggacatttgttggtacagtggttggagagtccccagaaccacgtggaagggaatcttacatgttggtaccttcgacaatacttgttgagcacatacctcgtgc

SEQ ID NO: 479813 - DNA, 122 bp, Homo sapiens
gagctttgaggagctggggaagcagtccaggaaggcagccaatgtgctggggggtgcatgcggcctgcagcctggggacagaatgatgctggtactcccacggctcccggagtggtggctgg

SEQ ID NO: 479814 - DNA, 122 bp, Homo sapiens
tcataatgaaccagacagccatatggaagagagtggatcatcaagttggagtgacaagcacggacttcatcatcaaagatccacctaggcctttgctcagtgctctatcaaaatgtaggatt

SEQ ID NO: 479815 - DNA, 122 bp, Homo sapiens
aggacacaggctggaagtgctcaggggttatcttgtgcatttcctgcctgtgccccacagcgcacccacaatacaagcagtgccttccttgtattcgttgatcagataaaccaagaagaacc

SEQ ID NO: 479816 - DNA, 122 bp, Homo sapiens
gggggctgccggggcgggagggcggcgcggctgggccgaccccaggacaggggttggaggcgggagcccggcagctgcaggcccacggccctcccttaccggcgccgccgccgccgccgccc

SEQ ID NO: 479817 - DNA, 122 bp, Homo sapiens
aacaggtactgatatctggtcacaaccgtggctaccattcattgagcagttgctacagaccgggcctaatgctaagctcctgccaaattggttttctcagaatctccagaacagatcttagt

SEQ ID NO: 479818 - DNA, 122 bp, Homo sapiens
cgttagcttcgattcccggcctgggagagcgctatcggccactcctggctgcattgcagtcgcggctttctccagagctccgccgggaacgggaagcgctgaaacgtcgcgaccagtcagta

SEQ ID NO: 479819 - DNA, 122 bp, Homo sapiens
cgctgcccagcgccggccctggcagggagcctggtggggtggcggagggggagactgtgccgtggagggcctcgccatgtcctgctgcccggtaagaaccccatccccgtcctccgtctcct

SEQ ID NO: 479820 - DNA, 122 bp, Homo sapiens
ggccgcccacttcctctgaggaacctagcacctccgtgccgcccaccgcctctgaggtaccgagcacctccctgccgcccacccctggtgagggaacgagcacctccgtgccgcccacagcc

SEQ ID NO: 479821 - DNA, 122 bp, Homo sapiens
cccccaggatcgcttcagtaaggcgcttccccactccaggcccgacccccggcgcctgagcgccaacttcgccaagaacgctcctaactccaggccatcctgcagcgcagagggggcgctgc

SEQ ID NO: 479822 - DNA, 122 bp, Homo sapiens
aaccagaatggagactattgcaatattccaggcaagagagattctgggattagatcagagcgataatggtgcaagtgccagagttaggaaaaatcaaacatgggatatgagagaaagagagg

SEQ ID NO: 479823 - DNA, 122 bp, Homo sapiens
agccaagagaacttccactcaccatggcggagagaggagacagccacgctcctctcagcccggctgctgccacaggaaaaggaagtgcttaccactcccgctgtatatgtcaccttcccctt

SEQ ID NO: 479824 - DNA, 122 bp, Homo sapiens
ccgcctcggcctcccaaagtgctgggattacaggcgtgagccaccgcgcctggccgaaagcgactctttaatccagtcttccgcaagcacccaagccacgccagcagcccgtgggaaaccaa

SEQ ID NO: 479825 - DNA, 122 bp, Homo sapiens
ccacaagttcccttcctgaaggaagtattcagtccggagaaaccaagacccacctcacagcgaggaccagagagacaccttggtaagaggccctggaaacgaaacacaaagcgaggaaggac

SEQ ID NO: 479826 - DNA, 122 bp, Homo sapiens
tgagctggccaagggaggaatgacaggctataagagaataaaaaactgagttcctaactgcggacatcagcactaggtagagattagaaagacaggaagatagatacctctctgtctcccaa

SEQ ID NO: 479827 - DNA, 122 bp, Homo sapiens
gcccaggcggtatacaggcggaagcacttccctgcagccacccgacctgccctgccagctcgctgattggctgaggcctggaaagaaaggggaacaggctggctgacaatttggtcagggaa

SEQ ID NO: 479828 - DNA, 122 bp, Homo sapiens
tacagcccccgcccccaccgcacacatccccgagcattgcaggatatatttgacttctgtcgcctcctgcagcactggtgggaagatgctgcagtcacaggtggggtctgtcaccaggagga

SEQ ID NO: 479829 - DNA, 122 bp, Homo sapiens
gtcttcacattttatgtagatgccttttttcgtaacatttagttctacttttgtctcttacgtaaccacttctagtagaccaaagtaccactaaggcactttcatatacacttgtgagtttc

SEQ ID NO: 479830 - DNA, 122 bp, Homo sapiens
gggcttgaaatttatcttaagaaatatttgcaaagggcataacaaagtgctccaaactggcgcaggcaaatggattagttcctttaccaggaacccctgaccctgttgtcagcaccctggca

SEQ ID NO: 479831 - DNA, 122 bp, Homo sapiens
gaagaaggacacactgtggggggtgatgtggggggctcagaggggaaggaaacactgtctcgaatgtcaaggagttgattataatgtagcagagcaatcagagattcgctgaggagactgtg

SEQ ID NO: 479832 - DNA, 122 bp, Homo sapiens
cttccggcgtagggcgaagccgagcagatcggaacaaggccgagtctggccgagtgctgccgaatacagccgagtagagccgagcctggccgagtggagccaagggtcgccgaatagagacg

SEQ ID NO: 479833 - DNA, 122 bp, Homo sapiens
ctggtgttttgtaaatgatttaaaagttccacccccaacatccagtagggtccctagctccgctgcgttcccaattaatttatttcgttatatccctccgttcctgctttccgaaaggacag

SEQ ID NO: 479834 - DNA, 122 bp, Homo sapiens
aaagtctcaggacaaggcagactgcagacccaggggacgtgcgcggaccggggcttgtttcggtcctgggtgttctcagccttgatgtggacactagcggctctggtgcacttgctcggagg

SEQ ID NO: 479835 - DNA, 122 bp, Homo sapiens
tccagcacctcacacgtggtctgctcatcagccttcgggcccagtagcaggtcctgcaggcggcccagcagctgccgctgcttctgttgcctctgcagggaggaaggggctctcaggggtgc

SEQ ID NO: 479836 - DNA, 122 bp, Homo sapiens
acataactcttgctgttttagatgtgattcagattgagtgcagcagctctgtaaaaaccccgtaatttccaggaacaatgggaggtgtcccatttgtccagtgtcctttcttaccctttcca

SEQ ID NO: 479837 - DNA, 122 bp, Homo sapiens
agccttgccttccaaacgttccaattggacattgctgggcagcgtggaagcagaagcgaacgtcacccaggccggcagggggcggcacaccccacacttcgctgcgcgccctcgcctccttg

SEQ ID NO: 479838 - DNA, 122 bp, Homo sapiens
cccccaacggcccaactctccctcagcacttactgccagaaggggccctccaggcagcagcgacccccgccccggctgccaggcgtcaaagaaagcacttggaggctgcccgcagccgtcag

SEQ ID NO: 479839 - DNA, 122 bp, Homo sapiens
ctaacactggttacctgctcaggaccccttccactctgtggaagctttgtactgtcactccgctcaataaagcctacagctgtttttctctcggtccgatctgtgtctctctctcaccgcgg

SEQ ID NO: 479840 - DNA, 122 bp, Homo sapiens
aaacagaccagtcaggagccctggttcaggctctgcccaggagcctctaaaggtctgtgacgtgaagacatttgtcgttgtgccgaggcactggttggattcgggggtgcgtgtctccctca

SEQ ID NO: 479841 - DNA, 122 bp, Homo sapiens
cagagcgtcaagaagtgtcggagaactgggaggcgtggaggaccccggcccttgctcctgcgacattgtggggtcagccgaggaatcaaccctcattctgccgcgctgcacccccgcttccg

SEQ ID NO: 479842 - DNA, 122 bp, Homo sapiens
gtcccctccccgggcgtgacagcgttccctgatcaaatggagggttgggctgcttattctcgaggcccaataatgcgatgcagatgaactgggaaaggagggagtgtttgtttccgtaactg

SEQ ID NO: 479843 - DNA, 122 bp, Homo sapiens
ttagtttgcatgtaacctcttgaggaccccacgtgtgcattcctaaggggtgcggcctcccgtttccgtatgaatgggaagcgttcccacctgctgtattcttggaaagagtctgtgaagga

SEQ ID NO: 479844 - DNA, 122 bp, Homo sapiens
tgttggtttgtgtttagcctgtgtgtgtttgcccgaaaacagcagtgttgttccctcccccgaccatgtttgccctattaagtgggcacagaacggggccctcttactacttatctgtgtat

SEQ ID NO: 479845 - DNA, 122 bp, Homo sapiens
aggaatagggccgtctggacacgttgagaggtgggtggttccagctcaaacttcagggggcgcaccgcgggtcggggtgaaaatggcacttctatctctagagttcccccagtggccaaaag

SEQ ID NO: 479846 - DNA, 122 bp, Homo sapiens
gtcccaggactctgtttactttgtctgctttgctaaagaaggccggtgaaccaggaccaccgcacacacaggcccaccaggggcaatgctcattccaagaccttaacttttaagagcccttt

SEQ ID NO: 479847 - DNA, 122 bp, Homo sapiens
gagtgacagaagatgtgatcagatgctctgctgaatgaagactaacaacgtaagttgcagcgttttcagacagggctccctccctgagctaagccaggcccacccaacagggtatttgcctt

SEQ ID NO: 479848 - DNA, 122 bp, Homo sapiens
gcagctgctgttcaggagttctgcaccccgccctgggtgtcctgccaaagccaaggtggccgtgcggtcagaggcagcgtcctctgccctccctgtctccctgcctgtgtgtgcccctcctt

SEQ ID NO: 479849 - DNA, 122 bp, Homo sapiens
tttttcctcctctcaagatgctttcaaacaatgttactgctatactttctcaaaagaatgcgattgtaaacaaactggggaagacattaaataccagatgaaggaatttaaaaattgggctc

SEQ ID NO: 479850 - DNA, 122 bp, Homo sapiens
aaagcaccttcgtgaaataagccacgagttaaaaagtaaaattgggattcctggaagagacgcctccgtgttagaggccgtcagagcacgggctttgaacaaaacttccggaacgtatgtga

SEQ ID NO: 479851 - DNA, 122 bp, Homo sapiens
cccggccgatgtttcaatttttggtagagatgaggcctccctctgtcgccaggctgactgcgcccggccagagtgcggtgctcctgctgagcagttttgcgcccactcccctctcatcccct

SEQ ID NO: 479852 - DNA, 122 bp, Homo sapiens
aatcagcttcctcttgcttttcgtggactcccactgtggaaacctgctggtgttttgctgcggtttcatttccctctgcggaggagccagggcaaccttggccagacaggcacctagctgtg

SEQ ID NO: 479853 - DNA, 122 bp, Homo sapiens
gaaggcccacgcgagattttgacaatagataaatgagctgaggaaatagggtctggccagcgaagggaaacacacagtagccctgggtgcctttctggaatgcccacgcaggggtccgcgtg

SEQ ID NO: 479854 - DNA, 122 bp, Homo sapiens
tgaagtgcctaggtgctgggcaacagttctctaaagctccagcagcaaaggaagaatgttcgttcttccctgactgagacccaggattggaggaagaagagcagcaacagccggaaagagga

SEQ ID NO: 479855 - DNA, 122 bp, Homo sapiens
accaatcagggagggcgtacgcgacccacgtgcgtaaacggcctcgctattggccggcgccgccagaggcctgccccccccggagcccgaacccacgtgcagctactgcgccttcattgatc

SEQ ID NO: 479856 - DNA, 122 bp, Homo sapiens
ttaaagtgtctttacaaagtattaagcatgcacagagaaaatgcaaatgtgaattctcttcgttctccccgttaggagtgtatgcctgatagataaatgttccagagcattcatgtaataca

SEQ ID NO: 479857 - DNA, 122 bp, Homo sapiens
cgctcaggcagctgccgcaacttgtgcaagaaattcaccaggtactcgcacatgggcgagcgcagcaggcggtacacaaatctgccgtcctccagctgggcccgttccgtctgaaccaaggg

SEQ ID NO: 479858 - DNA, 122 bp, Homo sapiens
actgaggatcgtcgagggccaatcaaaaagaaaacatggaagggaaagagccgagagactcgatctcattcactagaatttggtcctcctgcgcctgccaagattgtctgagtattgatcga

SEQ ID NO: 479859 - DNA, 122 bp, Homo sapiens
tatttatcttatgattaagttatcctatctggtcctagggaaccttaacattctttagggcggccgcgggggacaaagggcgggcggatccgcggggagggggcggggcgcggccaggccag

SEQ ID NO: 479860 - DNA, 122 bp, Homo sapiens
ctgtgcattgtggtgtcacgtccatttgtcccctagtgccatgtctccccgtggtgtgtacgtgacactgcgcctgtgtccacgagtctggcccggccgtggctggaggtccatctggcctg

SEQ ID NO: 479861 - DNA, 122 bp, Homo sapiens
cagcctgagtgttcactttccttgacttcagaccagttgactacactttggcctgccaggcgtgcactgagccctcctcagttcccccctgagaagaaaccaccacaaatattgctttcctt

SEQ ID NO: 479862 - DNA, 122 bp, Homo sapiens
cacctctatcctttccaccttgagatgcaagtgtttccctaaaacgtcactattagagcccggagggtattttacagacaaatcccagaaattttctaaaccctacatatttttcaaagaac

SEQ ID NO: 479863 - DNA, 122 bp, Homo sapiens
gagatacaggccggtgccccgcccgcgggacctgcgggaccctcgggacaccgctccagccgcgccccgactccagaggttctccagcccactgcagacgacagaatcgcccgcgggtcccc

SEQ ID NO: 479864 - DNA, 122 bp, Homo sapiens
agtgacatggccatggttgtgtctccagactcgtggtgggagcacccctggaggtggtggcggccaaccagacgggacggctgtatgactgcgcagctgccaccggcatgtgccagcccatc

SEQ ID NO: 479865 - DNA, 122 bp, Homo sapiens
tatattaataccaaagctttgaaaccaccgtggttaatgactctaccagctgctttttgtcgtctttaatagtgacctctttttaggaataactgccacctaataccttcctctcaaagact

SEQ ID NO: 479866 - DNA, 122 bp, Homo sapiens
tgctgtccctgtgtaggtacactttcctttttcccagacaatttccctctgctcctttcccgtgacccctttccccaagaaagagaaaattacttctcatctcttagatcggggcttaggca

SEQ ID NO: 479867 - DNA, 122 bp, Homo sapiens
gtatgccaccgcacccagccaatttattttttttgagatagtcttgctctgtcacccaggcgggtgtgcggtgacatgatcttggctcactacaggctccgcctcctgggttcaagcgattc

SEQ ID NO: 479868 - DNA, 122 bp, Homo sapiens
gcctctctgataaagaccggctttattgtgtctgttccacacagcgtgggccaaatcaatcggaatcaaaatactgcagtgtttaaaagaaaaccagtcacagttagactccttcataatta

SEQ ID NO: 479869 - DNA, 122 bp, Homo sapiens
tgacaacccagccggagctcagtgcgtcctgagctgtgagaggggctctaggcggaccaccggtggcaattagttgacaattcacaagtggggggagggagcgagtgttctttacattccct

SEQ ID NO: 479870 - DNA, 122 bp, Homo sapiens
gcctgtcctgcaggagatgtgggaccctcaccctctgagaacttctgggagctgagtgagcgccaagcttccagagccctgtgtgacatcattgctgacctagtccagtggggtgggccacg

SEQ ID NO: 479871 - DNA, 122 bp, Homo sapiens
tgtggagaggagctgggctccaggaacgctcttgtcagagctgctgtgactgtcggctgtcggggctgctgaccttcctccttctgtgctgagcctcctcccgggcagaagcacttcccagg

SEQ ID NO: 479872 - DNA, 122 bp, Homo sapiens
tgtccgcgcgcagcccaccccgcccacgggccccttgagcctccatcacagttcccaacacgcacctaccccacaaatcctgcccaaggtgagggctggtcccgggtcctccagctgccgca

SEQ ID NO: 479873 - DNA, 122 bp, Homo sapiens
aagagtgatgttatctatagaagcaattgcggaagtcacaactcctgttaccttttgccacgccactcctgagcagtaaaaggcattattgaaaatatgcctacctcatagcagaactcagg

SEQ ID NO: 479874 - DNA, 122 bp, Homo sapiens
cagcgtggagaggccgctcagaacagcagcagcggaggggaagtcagcgcaggtcacagacggtttcactctcagagacttggcctagaacttggaggcccgctgctacagcacgctcgcct

SEQ ID NO: 479875 - DNA, 122 bp, Homo sapiens
tcatcattgagttcctcttcctctacctgctgcacactctctggcatggcttcaatatgccgcgcctggtgcagtgtgccaacgtggccccctgccccaacatcgtggactgctacattgcc

SEQ ID NO: 479876 - DNA, 122 bp, Homo sapiens
atcctccctgcctctgggagctgccaggcctggcacagggcttggcccagagagggccaccggcttcttccaggaatccaagcctgttgggcagggccagggcaggcaccacccaggtctct

SEQ ID NO: 479877 - DNA, 122 bp, Homo sapiens
tggatttgctgctgaagtgcttttaactcacctgtgcggagagcggacttcaagagagggcgtgccggtgctccggacaaaacctggggaatactgaaagccaccaccaccaccgtcattcc

SEQ ID NO: 479878 - DNA, 122 bp, Homo sapiens
cccatgctttttgcatggggaaaaaaggagcctggaccctctgccccataaactccataacgaactaaatatatgcacagttgtgctttgtgagttcaattagaattttggacaaggtttta

SEQ ID NO: 479879 - DNA, 122 bp, Homo sapiens
cccttcccttcctttccctgcttctattcttttatagatatgctcttgaaaacatatcaacggaaaaaaatcacagacctctgttaaaagattattttacatgttacatgtttttgatctat

SEQ ID NO: 479880 - DNA, 122 bp, Homo sapiens
atggcacagggctgccgtctgactcggtggcactgctgggcagctctcggtccgactcgccgtcggagcagtcagagctgatgcgcaggccccccaggcccagcactgaggtgggtggcgag

SEQ ID NO: 479881 - DNA, 122 bp, Homo sapiens
agcctgggcggcagagtgagttcttgtctcaaaacaaaacaaaaatagtttccagccaggcgcggtggttcacgcctgaaatctcaacactttgggagtccaaggtggcgcatcatctgagg

SEQ ID NO: 479882 - DNA, 122 bp, Homo sapiens
gccccgcttccccgcagcccccctccccgtgtgtgctcccacacagctgtcctgattgagcggttccagatcccaggcagcttttgtggccccgtttcctgcctgtggaaggtgacaaaaaa

SEQ ID NO: 479883 - DNA, 122 bp, Homo sapiens
ctcaggagagtagggcagaagctctagctgggtataaattgcacataaccatctccccaacgtagctacataaagagaccagccttctgtcctgaaaatggccgatttaagatcctcacctg

SEQ ID NO: 479884 - DNA, 122 bp, Homo sapiens
gggatgggttccatccggctcaggatccggggctgctcctgctgagtcctgcccaccagccgggcccgctgccccaagagctgaagagggtccacttcaatgtccaccctcatcctccactt

SEQ ID NO: 479885 - DNA, 122 bp, Homo sapiens
cccggcccgccggcaggaggcagctccacgccgccgcctcctcctcggccagcccgctcgcgcccctcccgcacactttccacaggaaatgattaactcgggccgcggcgcgttcccatggc

SEQ ID NO: 479886 - DNA, 122 bp, Homo sapiens
cgatttgggacaacttaacgttcgtaagctgggttcagtcttctcaattgggttaatgtccgtgaggggctctcgtaagggcggctggcctgccggtaacttaagaagcatgtaaagagcac

SEQ ID NO: 479887 - DNA, 122 bp, Homo sapiens
caaccccacacctatgcggcaaaccgcagccgccccgatcaaagatggcacccaggtgggcggggcttgaacagaccgtcccgcccatgccacctgcagccacttcagccttgccccgccgc

SEQ ID NO: 479888 - DNA, 122 bp, Homo sapiens
gcacagatgctgtttcggctgctgactctgcgaatggatctgttggtgctgctactgccccggctggattgccctcaaacccgctagccttcaaccctttcctcctgtccacaatggccccg

SEQ ID NO: 479889 - DNA, 122 bp, Homo sapiens
agggctccctccgggtcccagggggatggactacggtttttagcgccggaacttacaacccgaagttctgctgcttgtgactgcctgccggagagactggcatggtggcgaccagctgggga

SEQ ID NO: 479890 - DNA, 122 bp, Homo sapiens
tggcagaggctcgcggtggactgcctgaccctcgcccggccccagcacgcccccggcgaacgcccacccctgtcccggcccgcagcgccccgacttacttctgaggccgaaacgcggccgct

SEQ ID NO: 479891 - DNA, 122 bp, Homo sapiens
ccagctcttgagcctgtgcggtggaagtgctaacggcaggctgccggctgcctgtcccatcgcgccgaaatcattcacagtgggcgcgttgacaccacagaagtcggcaaccacgacagacg

SEQ ID NO: 479892 - DNA, 122 bp, Homo sapiens
ggggcatctcgtcatccagaatgtctgtctcccgatccttcagagcagcgtctccattcacgtgaacctgggctggcaccacgtggcgggtcccactgtacttgcttcgagcatcagtcatt

SEQ ID NO: 479893 - DNA, 122 bp, Homo sapiens
ttaaccagcaacagtgagaaacaatgagagagagagagagtagaggtaagccagaggaaacgaatgtctgcgtggcaaggtttccttaggcagtttgtcaggcactgctgaaggcagcctgg

SEQ ID NO: 479894 - DNA, 122 bp, Homo sapiens
cccatgcacacactgacacgcagacacacacactgacacacagtctcagggaggctgagccgggtgctgggttagctcacagacttgcttccaccatggcttctgacacatgggggtggcca

SEQ ID NO: 479895 - DNA, 122 bp, Homo sapiens
caaaaagattgctatttgaggtttcaagttgtttttcaccatctataagcaacattactccgtccactggaacagtaaatgaactaataacaattattggacatggctttagtaatctccca

SEQ ID NO: 479896 - DNA, 122 bp, Homo sapiens
cacgggggtgccgcggagagccccgcaccccagcggcccaggctgttcccgttcctggatcgctgggcgccttgggccgtgcacctccctcagcggatatatacagtttcctcgcctataga

SEQ ID NO: 479897 - DNA, 122 bp, Homo sapiens
cctaaggcgccaggccctcggacttggaggttgcctggaatgggtcagtcacctgggagccggttcctctgcctcgggcttcggacgcacacggtccgcaccaagggcaccagcttctgctt

SEQ ID NO: 479898 - DNA, 122 bp, Homo sapiens
tggctcggttaactctctctccccagaaatttcactactgaaaagattattatttgggggcggggaaggggatgtagaggtctttaggacccagcaggcggcggcaggcggcagttgtgtag

SEQ ID NO: 479899 - DNA, 122 bp, Homo sapiens
ccattctaagagctgcagccccaacaaagaccccaccaaacaccgaacaaccaagaattccgggccctggaaagcaaactttaagcatccaaacttacagagggggaaaaaaagtgcactcc

SEQ ID NO: 479900 - DNA, 122 bp, Homo sapiens
actgctgctcagaaacgtgacagtgactaatggtttattacacacctgccacctctcatccggcaggcgggcgggcgctgtctcccgggcccagctgtgcactgccagctgggcggcggggc

SEQ ID NO: 479901 - DNA, 122 bp, Homo sapiens
tgctacagcgccccctatctctgtggaggacaggccggctccagagatcgctgcagttggcggagcgcctgcaggagtccggtcgttcattaggcacccaagagcaggcgacgctgcgcttc

SEQ ID NO: 479902 - DNA, 122 bp, Homo sapiens
ccttgatcttctgggctccctgtggcctcagccttctgggctcatgtaatccttccatctcggtctcccaaatagctgaggccacaggtgtgtgtcaccacacttggctaatttttttattt

SEQ ID NO: 479903 - DNA, 122 bp, Homo sapiens
cccggccctcgcgcaactgtcaggcgaaacgggccggcggatattggctcggcgacacgccgaggctcctccccgagtctggatctttatattttgggagaatttctttgaactcagttacc

SEQ ID NO: 479904 - DNA, 122 bp, Homo sapiens
gacaaaagtagttacatctgacgtaaggggatttaattatctttttctgggcttgcgtcccggaacgctgctgcattatgtaatctgtagtaatatacccacgagcagtttggagggttctg

SEQ ID NO: 479905 - DNA, 122 bp, Homo sapiens
tctcctctttctgtgggcggcagcgaccccctgcggctccagcctccactacgggatctgcgggaagacacggggaagacgaactccgcacactgcatttgattaatgatttattttgatta

SEQ ID NO: 479906 - DNA, 122 bp, Homo sapiens
ttcttttaaatcctgaggcccctgatgctgcgtctgcctctaaacggacacagacatgaccgtggtttctcggcatctgtggctcttttagggaagggtgtcgctgaccccgcggtctgccc

SEQ ID NO: 479907 - DNA, 122 bp, Homo sapiens
cacacggtgcccacctgcagcggctttctctgtaaggaaagataaggccggaaccctcagcgaagtgcgggaggtactgaaggctgtaaaagggagaggtcattctactcagagggctccta

SEQ ID NO: 479908 - DNA, 122 bp, Homo sapiens
cacccaccctgcctacccgtgcttcagaggcgatcacctcagctgttggactctgaggcccgagtgccttcgcaccgtgtcgagagcgccatggacctccacctctgtgggttttgtggtcc

SEQ ID NO: 479909 - DNA, 122 bp, Homo sapiens
gacacagagcccgacccgcggccgggcggttccgccccagtcccacactgccccgcgcggcgtcccggccctcttggcccgcctggtcccaccccggagctcagagcaacttccggtgcgct

SEQ ID NO: 479910 - DNA, 122 bp, Homo sapiens
gggccatggcggagagttgctgcccctccctacccagcaattaagccgaggctgtgacagcgacgtgggccgggtgctgtctggggtttccttcccgggccggttgtgtgtccaggcccccg

SEQ ID NO: 479911 - DNA, 122 bp, Homo sapiens
tttgtgtcaaatttgtttaactttcctcttagtgtttttatctcaacaacaacaacttgccgttcaacaagctttcatttttaaaagttcataatcttccttccaaaagtgtctgctttttc

SEQ ID NO: 479912 - DNA, 122 bp, Homo sapiens
atcttggctcattgcagcctccgcctcccgtattcaagcgattctcctgcctcagcctcccgaggagctgagattacaggcatgccacgcctggctaattttttttgtacttttagtagaga

SEQ ID NO: 479913 - DNA, 122 bp, Homo sapiens
tcaccctcgtgtttaaatattgaatttatatttaaaattgatagaaaatgaagacatttacgttggtcatcttaatagcttaagattcctacaaattttaaagagttaaatgttttttctgg

SEQ ID NO: 479914 - DNA, 122 bp, Homo sapiens
caccttctgtatcctacaaaagggagaaaagaaaggagcgggaggaaggcacagtgggggcgggggacagtcgtcggacactagttaacaatgatgcctccggtgtttaaatcatagctcag

SEQ ID NO: 479915 - DNA, 122 bp, Homo sapiens
aggctcctgatgacagatgggtgaatggcagagtagatgagtgagggaggtggggagccccggtggggcctggctggtcaaagtccaagcaatctgatcccagcaggacattcctttgaagg

SEQ ID NO: 479916 - DNA, 122 bp, Homo sapiens
cgacaccatgcctggcacatattatatttttcatttcagtgtccacctgttcattgttagcgtatagaaatgtaattgatatttccaatctatgtcttgtacactgagaccttgctgaactc

SEQ ID NO: 479917 - DNA, 122 bp, Homo sapiens
caggaaccaaattctcatccaagttctctccttgatgttcttccctgacacgattattgtcggcaatattaagagacattctgcatgttggacaggaggtgtcttgttctagccaggaacga

SEQ ID NO: 479918 - DNA, 122 bp, Homo sapiens
gctgttcatcagttgtgccctaactggctggaatgttaggttcagagactgcctggctcccgcttccctccagggctcatcccttgcttgctttttaacacccgaatgtccctgcacgctgt

SEQ ID NO: 479919 - DNA, 122 bp, Homo sapiens
tcattctctgaggtgggagagaggagcagacggggaaggcagtgagttcagccctgtacccgacatgtggggcagagctcctgctttctgggggttctgtggccttctctgagtgacgccca

SEQ ID NO: 479920 - DNA, 122 bp, Homo sapiens
tgatgaggatggagggaggtcacgaggggaaagcgtccagtgtggcgtcgcgtgcaccatcgctgcccgggagatgcctttagctgggcccagggaaggagcaggtgtgtggggcaggagct

SEQ ID NO: 479921 - DNA, 122 bp, Homo sapiens
ccaaactggatttggggactgcaaaggcgagcagcgctcgttcagtttatctcctgggaacgcaccaggagttgggcacacgcgggagctgggtcggtgctcctggcaggtaacggcttgtt

SEQ ID NO: 479922 - DNA, 122 bp, Homo sapiens
cctggattccaccaggggcatcttagtccccagcggggcatttaaagacttaatgtgggccgggcgcggtggctcaggcctgtcatcccagcactttgggaggacgaggcgggcggatcacc

SEQ ID NO: 479923 - DNA, 122 bp, Homo sapiens
gtgggggtgcagaccagacgggggcgtgcctttgcccggattggctgcaggagcctgacgcgaggccccgggggttggcttggggagtgggagcggggtggggtgggtgctgggtgccggag

SEQ ID NO: 479924 - DNA, 122 bp, Homo sapiens
gaagcagacagaggcgcacttgttccttgcagttttgttttgatgtgctgattaaagtagcgcagagggcatgatcagcagggctccagtaagacgctcccacgggaggagcaagaacacag

SEQ ID NO: 479925 - DNA, 122 bp, Homo sapiens
gacaggtgtgatgatccccatcccacaatatcccctctattcagctgtcatctctgagctcgacgccatccaggtgaattactacctggacgaggagaactgctgggcgctgaatgtgaatg

SEQ ID NO: 479926 - DNA, 122 bp, Homo sapiens
agaagattcccagggtcgtccacgttgccttagatgtcacaggctgtgtgaagtgcttagcgcggtctctgacgcagactaaatgtcagggtcagtttggttaagtatattgtgttaaagtt

SEQ ID NO: 479927 - DNA, 122 bp, Homo sapiens
ggtatttcattcactcattcagcaggcatttgttaagcacccactgtgtacagaagcagtcgtgaatggaggccagttaagagcagggagttttactttgacgtggtcagtgctctgcactt

SEQ ID NO: 479928 - DNA, 122 bp, Homo sapiens
cctcggccccgcgtccagcgggctgccaccccgcggggaggaggggccggtggagcctggcgggcggggccaccccaagcgccaccaaattccttgtaagggctgcggagccccccgcgggg

SEQ ID NO: 479929 - DNA, 122 bp, Homo sapiens
gttaggtgtcttgaaaaagatcacacaattatggttgaacaggaattcaaaccaaatctacgtctgtctgatacaacttcccacatttcaaccagagcagagggtccctggtacgatgccgc

SEQ ID NO: 479930 - DNA, 122 bp, Homo sapiens
agaatacacaggattttcccccgtggagaaggagtcaggcgtagtcagaaccctgcagggcgtgactaactgccccaatactcctgccactggggccctctgggtaaggactccacaattat

SEQ ID NO: 479931 - DNA, 122 bp, Homo sapiens
tgcactacaggttcctttttctctccctgtccgtgcatccatctgtttctgcactctcttcggtgcatcctctgaaccaccagaattaggttcctccacaccaaatgtgatcatttcatttc

SEQ ID NO: 479932 - DNA, 122 bp, Homo sapiens
tctcagctgtctagcaccgcagcgctggggggcgcgtgggagtgaggcggtacctgtgagcgcgcgggagagcggaaaagggagccgcgcgccgccggaaaccagggtgagggctgagccgg

SEQ ID NO: 479933 - DNA, 122 bp, Homo sapiens
ctggctctgccagactctctatctccctgggcgccagcctccccacccacccctggagggcggggcttggctgcacccacgtgtggtggagttaaatgctcctagccggcagaggagctagg

SEQ ID NO: 479934 - DNA, 122 bp, Homo sapiens
cctggatgcatgccataatatatttcctgaggcttaggaagcgagtctaactattttcaccgtacgaggagcaagggcataatcaagacctaagtgcacaaggcccaccgtgaaattccatt

SEQ ID NO: 479935 - DNA, 122 bp, Homo sapiens
ttattactccccccaagcccggggagtgcacgggcatttgcaaccttttgcgggtggaatcgcacacacgggaatttccatggagagaaggtggcggcagcgctgcatggtcgctgccgtcc

SEQ ID NO: 479936 - DNA, 122 bp, Homo sapiens
agctttctcttgttagcattttgattaacgaatgtgggcacgaacagccagctgaccgaccgcgcgcgcagtcgagcgtcggttcctcgccttgggagggaccactggaggccccgccccct

SEQ ID NO: 479937 - DNA, 122 bp, Homo sapiens
tattggttttatcaaacaaaccttaagctcttcgccttttcaaaacttagagaataggaccgtttatatttcgtgtgaacctcgccttcctaaacacaaaggccaatctcagaagcctgaaa

SEQ ID NO: 479938 - DNA, 122 bp, Homo sapiens
gagaaaaacaaacctggagccacaccgcgcacatgcgcagaaagcccaaagcggctcccgcgaccggggccaaaaagtgcacactacatttcccacaagtcctcgcgccgctcccttagaaa

SEQ ID NO: 479939 - DNA, 122 bp, Homo sapiens
ggtgggaggtagacaagaatggcctgctccctgaaggtgtggactcaacgtcagatgtcccgtgtgtgccacaggtacctttgacaggagcgtgaccctgctggaggtgtgcgggagctggc

SEQ ID NO: 479940 - DNA, 122 bp, Homo sapiens
gccgggggcccccagcccggaatcctgggggctgtaacaggtcctcggaagggaggctcccgccggaatgcctggggaaatcagtcatatgcagaactcatcagccaggccattgaaagcgc

SEQ ID NO: 479941 - DNA, 122 bp, Homo sapiens
aaattccccctcgttttctaaaggggcttatctgtcctgaatgggcagccgcaccaccagcgtgagcggacgtcccagcacctttgggacaggctgggggagcggcggccatcggggaaggg

SEQ ID NO: 479942 - DNA, 122 bp, Homo sapiens
gttacccgggaaatcccgcccactcccccgaccccgccccgcagagggaagactcagcttcgttccaatacaggacgcaatacccgcccgtcaaagactcagccaaccaccgaggcctgtct

SEQ ID NO: 479943 - DNA, 122 bp, Homo sapiens
ccgccactacctggtacctctgcaggagttcagagcctcatgctgagccaggaggagctccgggtgacgcatacggcaggatcgggattgagaggctgaaaaagtgagtttaacagtagaga

SEQ ID NO: 479944 - DNA, 122 bp, Homo sapiens
ccttgcgccaacggctgcgggcccggcgcgccctcggacgccgaggtgctgcacctctgccgcagcctcgaggtgggcaccgtcatgactttgttctactccaagaagtcgcagcgacccga

SEQ ID NO: 479945 - DNA, 122 bp, Homo sapiens
ccgccgcagccgcaaccgcagccgcagccgcagccaacgcggccgcggagcgacgcagtccgcagcctcgaatttccagaaattccagcactggcagcagcacgtctagttcgaacgcttcc

SEQ ID NO: 479946 - DNA, 122 bp, Homo sapiens
tgaatctttaatctccttttcagtgttaagtcttgttttcagaacatggagatctgcaagcggagggttcacatgtatgatacagtgagtcagatcaagagtcccttcactacacatgttgc

SEQ ID NO: 479947 - DNA, 122 bp, Homo sapiens
catccatccgccaggacatgcatgagccattaacttggtaaacagtcactcctggcattccgtggctgagaacattcaggaagagccacatggtgcagcagggcctgtggccagtctcagga

SEQ ID NO: 479948 - DNA, 122 bp, Homo sapiens
ggtgacatgcatcaatcaggcatctcggggcagcatgccctccagtgccagcattccgttcggggcagcacccggccctgcccagcctgctcaacattcccacggaggtccatggaattttc

SEQ ID NO: 479949 - DNA, 122 bp, Homo sapiens
acttgtcactcactctgtcggtctcactgttagctcgtgctttccgcaaagtggtgcgaacgtcctggcaacccgaccaaagtttcctcagctctaaactccataaaacacgatgtgcgatg

SEQ ID NO: 479950 - DNA, 122 bp, Homo sapiens
agcaccccagctcagcaacccggctcagcgacccggctcagcaccccaactcagcacccccgtttggtgccccagctcaggatccccggctggtgctgacgtctcctttttgctttgttccc

SEQ ID NO: 479951 - DNA, 122 bp, Homo sapiens
tacaggtctcgggtgaattcacacaaactcttcggtatgggctgggggcatttccacttccgagcgtacacgtcaaagcctacaacaggaaagaagacccttttcctgcaaaagggcggtgt

SEQ ID NO: 479952 - DNA, 122 bp, Homo sapiens
ggacggggaagtggacaaacccgacagatatagacacactcaggggcacagacacacacccgggcacagagtcggacacacctggggctcaggtagacacacctcacatacccagggaacaa

SEQ ID NO: 479953 - DNA, 122 bp, Homo sapiens
tagatccaagtctcctgccggcagggtgatttagcgcagttgtcaataatctgtacaacacgtaacaataaagttattgatgttgaggaaaagacttccggtaggggcatttctatttccat

SEQ ID NO: 479954 - DNA, 122 bp, Homo sapiens
ctgcctcccgggttcaagcgatcctcctgccttagcctcccaagtagctgggactacaggcgtgcgccaccatgcctgcctaattttgtgtgtgtgtgtatttttagtggagacggcatttg

SEQ ID NO: 479955 - DNA, 122 bp, Homo sapiens
ggcgacagagcgagactccgtctcaaaaaaaaaaaaaaaaaaaaaagtggatccactatacggctgaaacacattttgcacaagattatctaaatgctggagtttaaatcgagtcaatgaca

SEQ ID NO: 479956 - DNA, 122 bp, Homo sapiens
tctctgtgcagcagggtgtgtgtgaatcagtcttgggagctggcacggccctgggcctcgcgtggagtccaggccaggctctgacacactgaggagagttgaaacgagagtgggtgtttgct

SEQ ID NO: 479957 - DNA, 122 bp, Homo sapiens
cgtggggtgtagcgggtcggggggtggccctgttttgccccgggctggcactagaggcggcggcctgatctcggttgagagggcctgagagaaacccagacacaccccaccgccaccaggag

SEQ ID NO: 479958 - DNA, 122 bp, Homo sapiens
aacagacaaactacaggacgtgaaacagataaacttcaagttgtgtttttcatctttgttcgtggcttttcctatgccatgtttctcagcaacaagagcacactaaaaatgtctgttaactt

SEQ ID NO: 479959 - DNA, 122 bp, Homo sapiens
caaaaactgcaggtgaccgcctcgttccccaagcagcccctcccttgacccgtctcccgacgtccctcagccccagccctcaggatgcttgcctgtccgtgacagcctgtaggcaaccctcc

SEQ ID NO: 479960 - DNA, 122 bp, Homo sapiens
ctggggactctccccagtgactggctcctttaagatgggctgagtgacacctgtgacacacgtcctaagacacaaagactcgcctcctgccctgagaagtagggtcacactggcacagcctc

SEQ ID NO: 479961 - DNA, 122 bp, Homo sapiens
cgatcacaggagagacacggaggcccggagtggggctggggtgcgggcagccgctggggccgcgcgaggaggaggcggaaccgagctaggccgcatgaaatccccgggctagattttccccg

SEQ ID NO: 479962 - DNA, 122 bp, Homo sapiens
gaacagaaaggtgctgcgcatgcgtattgaaaaacctcacctactctcgcgggtcctcagcgttctcctgcggaacctttgaacggggtactcgagcccacaggggaagagcagcggaaggg

SEQ ID NO: 479963 - DNA, 122 bp, Homo sapiens
cctcgtgtcctccacccgcctcccggagccggtgcatggtgtggccttcaacccctgggacgccggcgagctcacctgtgtgggccagggcactgtcaccttctggctccttcagcagcgtg

SEQ ID NO: 479964 - DNA, 122 bp, Homo sapiens
cgagcctgggtccttgccttccctccccgcttctgcccacgaaggcccccaccaggctcccgcttacctgcagtggaagtgcgtggtcttctgtccgtagaactggcagtcggctgtgccac

SEQ ID NO: 479965 - DNA, 122 bp, Homo sapiens
ctggagcagtaggggatgaagctgcaacacagaacagagtgagcctgtcacagcgcctgccgcccggcagcctccagaaaggacccccagaacaggaccctcagaaaagaccatcccaggac

SEQ ID NO: 479966 - DNA, 122 bp, Homo sapiens
tatttggcaacactgataatgtgatctatgtttaggaggaagtggatgcatcattccatgcgggcataggttttctgaaagtgattgttctttttacaagaaaaagttagataagtcattga

SEQ ID NO: 479967 - DNA, 122 bp, Homo sapiens
gctgtcagcaaagcctggaggggttgagcgcccgaggcccctccacccctccctggcccccgcctcccggactcctgaccaaatgaccccccccggcaggtgtttcgcccgtgccgggttca

SEQ ID NO: 479968 - DNA, 122 bp, Homo sapiens
gagaacctgagagccgtgattgtcaatgccacagtatctgcaaacaaacctatgggtgcacgccacttccctctcatcccggtggaatcttcccaggttctatgggttattacagttcaaga

SEQ ID NO: 479969 - DNA, 122 bp, Homo sapiens
caccacctctgctccagccatgggtacgtccctgagcgggagccgggaacgggggcgcggcgcggacacccccggatgggccagtctgcagacgagagttcatttcattaacccgtgagccc

SEQ ID NO: 479970 - DNA, 122 bp, Homo sapiens
cttcactctccgagccatggcttcctcattgctgagtgggcacctgcctctcgtggctgtcgcgagggaggcactgggtgggagtcccctcagctcagggcctggcgcacctgacccggggc

SEQ ID NO: 479971 - DNA, 122 bp, Homo sapiens
gcttgagagggagcgcggggcgcgggacccgagggaactttgggcgggcctgggctagggcgggtgccgcgcgggcctggggacaggccggggttcccaaggcctggaagagccgcccgctc

SEQ ID NO: 479972 - DNA, 122 bp, Homo sapiens
cctcaaggagtactccttccgttccgtgcgggaggagactggcatgggggacattcctgacgtcaagaatgacttcgccttcatgctgcacctcatcgatcagtacgactccctctactcca

SEQ ID NO: 479973 - DNA, 122 bp, Homo sapiens
cacaaactcatctggatgttgacttgtctatatgcaacagcaatcatttcctcctctccccgctgccttcctaaagaacagcaggattgggaaaggagacgggaatcttgagaccgcgggcc

SEQ ID NO: 479974 - DNA, 122 bp, Homo sapiens
cgaacttggaccaagtaggtcgccccagatgggcaggaggacaccggcccaggtgcccagcgttgaacggcagcctccgcaccgcagaccttgcctgcctactgcccaggcctgcaccatgt

SEQ ID NO: 479975 - DNA, 122 bp, Homo sapiens
gcccagaagcggggagaagttggtgaggttggctaggggaaggttgccagaaattgaggacggactcccgccctggtcgactgagctcccacaggagcgcctctgctgcgtctcggggctga

SEQ ID NO: 479976 - DNA, 122 bp, Homo sapiens
gctgccgcctctcctcgtcccagctccccaccacgttccagtccactaccgcttgcctcgcgagactggggagcccttttccatgcacgtggagaaagaacccagagggtgacggagctgca

SEQ ID NO: 479977 - DNA, 122 bp, Homo sapiens
acactttttattacacatgatggggtaaccgtctgtttataaacaagggtcactattccacgagaggccttacaacattatgccaagcccctggtacctggaggacatcagaccctcctgtt

SEQ ID NO: 479978 - DNA, 122 bp, Homo sapiens
atgtacaggcccagcctctgcctcacagcagactctccacacccagctcttccctgtctgcggcctctccagtccaaagctgctgctgccttttggcagcttgtacaggctcagctcctccc

SEQ ID NO: 479979 - DNA, 122 bp, Homo sapiens
gccgcgcagttccgtgcagaggggcggccggcgcgccagctgctcgggctcaagtagcgccgcctggcaatcctgtgcctcaggcgggcccagggtgtccaggggctcccagtcggccagcg

SEQ ID NO: 479980 - DNA, 122 bp, Homo sapiens
gggggtggcctgcctgcctgctgccgccaggaaagagggaatttggagagatttccgctgcggatgtgccagataatacagcagagaggcagcgtcaacagggcatgtgcctgcctgacgag

SEQ ID NO: 479981 - DNA, 122 bp, Homo sapiens
ttttgttgggaaagcaggcgggactgactttggctcttcagtgtttgcgcatgcgcgtaacgtcctgaggcggtgggtggtatattaggcgaagaggcggggtcgcccaagctgccgcgctg

SEQ ID NO: 479982 - DNA, 122 bp, Homo sapiens
acgatatcttcgagcgcatcgccggcgaggcttcccgcctggctcattacaacaagcgttcgaccatcacctccagggagatccagacagccgtgcgcctgctgctgcctggggaactggcc

SEQ ID NO: 479983 - DNA, 122 bp, Homo sapiens
cctggcttatagctcatttttacaatgcttttttttctgtttgtttttccctctaggatacgacattgctgtgtgattcctctttcccttgaattgcctctgagtttcagtactttatttta

SEQ ID NO: 479984 - DNA, 122 bp, Homo sapiens
tagccacgaacacttcaagtctgcacttcacatgcttgcttgcctgtgcatggttacgcacgctcagcaacttagttccacgttttgggatgagttgagttccctgacgtagaattgctggg

SEQ ID NO: 479985 - DNA, 122 bp, Homo sapiens
tgatgcccatcatctccctgagtttctgagccctatctctcatgtgtcagtggtcaccgccgaatccagacactccggccctgttccggaagagccctgatatccgtggctccatggcgctg

SEQ ID NO: 479986 - DNA, 122 bp, Homo sapiens
cactgggaagccttttcctagcccttagccagcacctgtggccacatacacgtgtgccctcgggagtagaaatgccctcccgtcttgtcccacagcactaggcagggatgccacccacattc

SEQ ID NO: 479987 - DNA, 122 bp, Homo sapiens
agaatccataccggagagaaaccctacgaatgtaagcagtgtggcaaagccttcacagggcgctcaggcctcactaaacacatgcggacacacaccggggagaagccctatgaatgtaagga

SEQ ID NO: 479988 - DNA, 122 bp, Homo sapiens
tctctcctcccctccctattcttaatctctcattgcaaacagaagtcaaatagcaaacagcgtcacagcaactgaacttactacgaactgtttttatgaggatttatcaacagagttattta

SEQ ID NO: 479989 - DNA, 122 bp, Homo sapiens
gaccgcttgtcaggaccttgcctgcacttggaaatgcgatgctgatgagtgaagaggcagcgcttactgtattcgctcacgtaggaaaggagctgtgtcctagatagtagaggtgaattatc

SEQ ID NO: 479990 - DNA, 122 bp, Homo sapiens
cgaataagacaaagttactcctctccaacccatcctggaagagtccccagtggaggtgtccgaagtccaaaataacatcttcattactctccttcaatcaagtgtttcagtttgtttgatac

SEQ ID NO: 479991 - DNA, 122 bp, Homo sapiens
cccggcgatagaagccgagcggcaacgacgaagtgattataaagcctccgccccgcgcgccgctgccctgcgcaggcgcttcgctcaaacacctcacaacccttgcgccccggtctaggagt

SEQ ID NO: 479992 - DNA, 122 bp, Homo sapiens
ttatggagaccggaagaggagctggtgtccgtgggtggtggagtcaaaccggcactcccccgcagacctcaaccaggtcgctagccccgcaccagtgttctctgtcccttctccctggtctt

SEQ ID NO: 479993 - DNA, 122 bp, Homo sapiens
agaagacagatgacaggtcactgggtctgaaacccttccgataccaataaagggaacctgcgagtgcactccagcctgctggggaggaatctcagggcccgaggctgtacaaaatgaatgat

SEQ ID NO: 479994 - DNA, 122 bp, Homo sapiens
gggctcgccgaggcgggagccggctccctcagcttgcggggaggtgtggacggagaggcacgggcgggaaccgaggctgcccatggcgcttgcgggccagcacgagttccgggtgggagtgg

SEQ ID NO: 479995 - DNA, 122 bp, Homo sapiens
ttcagcctctctctgcctcagtttcctttcttacaaatgatggtagtcgtattatctacccggtggcattgtggtaagagttaaatgagaagcatgccaggtatgtgatgcataggtataga

SEQ ID NO: 479996 - DNA, 122 bp, Homo sapiens
aacattgcatcaggatttgctcatgggtctcatgtctcttcctcctcccccagcaaatgacggctgctcggaaacttttataaaggaagcggttgctttgtggctgatagatctgaaggtga

SEQ ID NO: 479997 - DNA, 122 bp, Homo sapiens
ctggcaggagagagaaagaacggacttcaatctttggttggcagggcctgactaggcagtcgggcacagaaccctagggctttcccacccctttgctttctcacttgtaaaacgaataaagg

SEQ ID NO: 479998 - DNA, 122 bp, Homo sapiens
ctcctcctaatcccggccgtgccctcccagggttggtgacggtgctgtgggtttggtggccgcgcgtccacccacccgattgcctgcgcgcataggtgcgggtttgggcgtcattactctag

SEQ ID NO: 479999 - DNA, 122 bp, Homo sapiens
ttcagagcagcaggcccaccctgagagaatgctaagggataagggaaaaaaaggacagggcgggtgaaaagcatctaagtctaatttattcactgtcattgacttctcttcaagtcctaatt

SEQ ID NO: 480000 - DNA, 122 bp, Homo sapiens
tgaaaagggaaatttttagacttctcatctgtgctgaaagccccgggctgtttcagaacccggtcagggtaaccgtcaggcctgcggtcaccgcgctgcaatcccaggaggccttgcgtcag

SEQ ID NO: 480001 - DNA, 122 bp, Homo sapiens
agtgttgagttagaagatgttgacccacaagtgtgccaggcagacgtggaccctgctgtgcgatgcccacagccagcagaggggaacagggtgagatgaaaggtactgtccagagcaggagc

SEQ ID NO: 480002 - DNA, 122 bp, Homo sapiens
tgcatcacgtggggactgcgcctccctatgtcatgaagccagggaatatgtgtggccggccgcttggggtagcacttgttgctagagataccgcctggaggccactgatctgtaaaagggat

SEQ ID NO: 480003 - DNA, 122 bp, Homo sapiens
agaacaaagaggcgggagcaccccgccaggggaccgggaagggtcgaggaaaactgctgccgcgccccactgggttttaacaacgcccgggatgggggaagggctcccacttgcgccccaag

SEQ ID NO: 480004 - DNA, 122 bp, Homo sapiens
ttacaggtgtgagccaccttgcccagcctctgtatttcctaatttaaaaataataatttacgctgacccctttcagcataaactatcaaatataggagacacagatgattcaaatataggag

SEQ ID NO: 480005 - DNA, 122 bp, Homo sapiens
cacccacaacaggggcagtgcaggtctgtggtcactcctgctctcacctgtggcgtctcccgtagagggattgtcagttctggttccctgtgggcaggaatggtttcctcataggtcactgg

SEQ ID NO: 480006 - DNA, 122 bp, Homo sapiens
agtgatgatggtgtacgtcactgagagaacaaggtctttttctattgaactttctgacttcggcttgaggtaggcaatggaggcacagccacagtggacaataaccacagtgaggtgggaga

SEQ ID NO: 480007 - DNA, 122 bp, Homo sapiens
tcagcccagcatctgttcgcatcttctgtcactcagggcctgagaaggtggggttttaaacgttatccaatcagcgacgctaggctgggaaccgtccaatcaggcacgcagctggagcggac

SEQ ID NO: 480008 - DNA, 122 bp, Homo sapiens
gttcagtttgtggagactcctgttaaggtgtgtacctcagtttattgctatactccttctcgtggccataatagtctccctgatgtgttgttgtcccctcgagagtcttcaatgtctctatg

SEQ ID NO: 480009 - DNA, 122 bp, Homo sapiens
tgcattagaaaggggattggtctggcccgcgctttgtagtagtaatgagggcgcgaatcgcgctaggctctgcgcgcgcgaggctccgccgagcaggaggactggggctgcacatcctcccg

SEQ ID NO: 480010 - DNA, 122 bp, Homo sapiens
aatcagacaattcagcaagtcggggggctggtgacacgaaagacccatgcacctgctccccgcaccctcacccggccgtgcactctgccgccctcttagaaactaaatgcctgtaatgcggc

SEQ ID NO: 480011 - DNA, 122 bp, Homo sapiens
tagaaacgaagccagcgcagctgctgaaacagagaaggacttagcagacttgcagctccgcgtgtctccgtcacggccactgcgggaagcctcctcactgctgggagggcctgtgggtctcg

SEQ ID NO: 480012 - DNA, 122 bp, Homo sapiens
ggcagggccctggctcccgcgcgccctctcccaggcttcccaacaaaaccatcagcggcccgcttatcccgcctgcctctcccaggctaggcaatacctccgaggcgcatggcgctgccagg

SEQ ID NO: 480013 - DNA, 122 bp, Homo sapiens
caggagatgacatggagcacaaagcagaggagcggcacccaggtggcccatggctcagcccgagcctcccacaacacagggcctttgggtatgggctcccagtaccgcatcaccagctgtgg

SEQ ID NO: 480014 - DNA, 122 bp, Homo sapiens
cctggggaaagtggcgtggctaagcccttccggaagtgacgtcggcttgggggcggtgctcggcggtggcggagcgcggcctgggctcgcgctgggctccgcgcgccccccgcccccctcta

SEQ ID NO: 480015 - DNA, 122 bp, Homo sapiens
gaagaggaaggctgacgagaggacaggctggagcagatgacctgctgggctcagctcagtcggctgctgcttcatcggctgagccgcccggcatggggcttcctattaatacccgggcagaa

SEQ ID NO: 480016 - DNA, 122 bp, Homo sapiens
ctggtcactgagcaaaccgggctgggccactccctgcctggggcggccgcatcccagccccgtcccagcccatcttccgttgctgaaacctcctaggctagactttgcttgatcatttattt

SEQ ID NO: 480017 - DNA, 122 bp, Homo sapiens
agatgcagtgaggctgctgaggaggcagcgtgtgagcagtgagcagcttcaagccaggtacgaactaaattgtgaagaggtgatacaaaattacatgaagcagtaagagagaaaaaggtctg

SEQ ID NO: 480018 - DNA, 122 bp, Homo sapiens
cttggaagctcatgcccaggggctgtctcccagtgcctgtcctttttgctgtagccaggccgccccctcgctgatcaccactccctagtttcccagcccaagccttctagtttcccatccca

SEQ ID NO: 480019 - DNA, 122 bp, Homo sapiens
ggccgagcgggtggaggagcctccatccttctcacctctgtggtgatgggccgagcgggccgaggaaggagggttcttgctgtcccgggtgtcagttcatctgcgacttttttcaaattgtc

SEQ ID NO: 480020 - DNA, 122 bp, Homo sapiens
cctattaagggtggcagaggggagagatgaaagaacttgcaactgctgatgtcactgagccgctgaatcaacagccgggaagccagccttgcttcctgctttgtgagacgatacacttaata

SEQ ID NO: 480021 - DNA, 122 bp, Homo sapiens
gaaagccatttccaagtacctagggtcatgaatggcttttatgaatcctgtctgtataaacgaggtggatgctaaggtcaaggttagcgccatttttggtgcatccctacagcatcttgtat

SEQ ID NO: 480022 - DNA, 122 bp, Homo sapiens
gttagtatagtggtgagtatccccgcctgtcacgcgggagaccggggttcgattccccgacggggaggaggcttaaacttttttttagaaaagcacacttccggtaaacacagtctctagtc

SEQ ID NO: 480023 - DNA, 122 bp, Homo sapiens
aaaaggtattttagctggctcaagtattttatagacctcattcccctatttccagcttcccgttattataggtgagaagtgtgacactgtctcttttctgtttcttggtaattaatgttttt

SEQ ID NO: 480024 - DNA, 122 bp, Homo sapiens
gggagaggagccgtgtgctcctgatccctggcccaacgctctccttccccgtcgcccactcggcatcggccctacccggggcccggactcccactcacgcactggaaactccctgtcttggg

SEQ ID NO: 480025 - DNA, 122 bp, Homo sapiens
tctaaaaatctagtaacagggacaataacagaagccgaagaaactgaggactgactgagacgcatgaagaagtggagattgtcagaattatccaaatgaaatggtacagcaggtgcactgtt

SEQ ID NO: 480026 - DNA, 122 bp, Homo sapiens
gcgccctcctgcctcctgtgacctcgagatctctcttcggggggtcaagctgagtctgagcggaggagggcccgaggtgggagtgtgggggactggggaccggggactgggggatagggtta

SEQ ID NO: 480027 - DNA, 122 bp, Homo sapiens
cagctcagtgaggcctgctctttgctggggatagcagggccagagttctggaaggaatcccggagcagggcaggaggaagggaagaaagaaggcccactcttaggaatcatggttacaaggg

SEQ ID NO: 480028 - DNA, 122 bp, Homo sapiens
actgtgtaggatgcagatttggggccagggctcctgggactctcccagcaactttgagaacgaccaggctccactccaagggtgaggaagggacggcgtggcatttggggagtgctcactct

SEQ ID NO: 480029 - DNA, 122 bp, Homo sapiens
ccagggacctcctgcggagctcgcaccctagctctgccgccactgccgcctcctcggccccggaccgccgagggttaacaaaaaagccccacgccccctttgacggcttagagcccacctcg

SEQ ID NO: 480030 - DNA, 122 bp, Homo sapiens
tcaccctctcccgaaactacggggtcccaggtcttcaaaggccttagctttccaccccgccgttaccgtggctatgaaatcgcttccgggttcacaccctttgcagcctcgcggttggcggt

SEQ ID NO: 480031 - DNA, 122 bp, Homo sapiens
gcggggcgcggagaggaggtagaaacgcggagctccttcgcaaagagggcggcggcgccgcgtctgccttggactcgccccttcagggacaaagtgactcgcccgtcccgctgtcctgcagc

SEQ ID NO: 480032 - DNA, 122 bp, Homo sapiens
ttgtttttcttttttcttttgttcctttttttttttttttgagacagggtcttgctctgtcgcccagactggagtgcagaaccgcaatatcggctcactgcaacttcgacctccttggctca

SEQ ID NO: 480033 - DNA, 122 bp, Homo sapiens
gaaagtagtggagggaggcgccagggtgagtgaggttttctaggcagcccttaccgcccacggatacccagagcttcatattacaagtgaagggtcctccgcccagagaggcgacggagcta

SEQ ID NO: 480034 - DNA, 122 bp, Homo sapiens
gttttttttccttccaccggtgcctcaatcacccctttcaagacaccctgcctattcgggcggctcctgaggggtccagccactccgggggcaagagccctccaccacagggtccctggaac

SEQ ID NO: 480035 - DNA, 122 bp, Homo sapiens
aacaggcatgtggaggttttgccaattctccatctggaagccatgatataacaggataatcgcaaactgcattctcactggtttaagtccatgaataatgcccagataatctagcatgactt

SEQ ID NO: 480036 - DNA, 122 bp, Homo sapiens
cacatggctccataaaaatataattttaaataagcaataattaaggcacagtttgttgtgcggagagaattgatccatagggagaaactgtggtcctttataaatagccagccacagtgaca

SEQ ID NO: 480037 - DNA, 122 bp, Homo sapiens
gtgggtcttttctgctttgactggttagtgatcgtgaatacttgagtcctggctccctaacgctttgaagcctttattttggtttttgtatagagttttttttctttactgtaaaaatgttt

SEQ ID NO: 480038 - DNA, 122 bp, Homo sapiens
tcttggctgaaatgttttatttaccatagttttatatctgtgtggtgttttgtaccggcacgggatatggaacgaaaactgctttgtaatgcagtttgtgacattaatagtattgtaaagtt

SEQ ID NO: 480039 - DNA, 122 bp, Homo sapiens
cccagtcagctatatctttcaagttttaggcatgtctctcacagaacggttcttgcttctcggacactctctgcaactactactaagattcaaaactgaagatatgaaactagaatctataa

SEQ ID NO: 480040 - DNA, 122 bp, Homo sapiens
ctgctacttccgccagtactgttctgccttccccgacacagacggctactttggctcccgcgggtgagggccaagggctgcccctctacccaggccagggaagaggtcctccagagcacagg

SEQ ID NO: 480041 - DNA, 122 bp, Homo sapiens
tttattcctgtgcccagttcagagtttgtaaataacactttctacactcactacagatgacgccgccgggccgccgtcgccctctaatgctagcgccgcctctcgcttggctgagctccagc

SEQ ID NO: 480042 - DNA, 122 bp, Homo sapiens
tcaagtttgtcgatatcgcagaggcctcatccagaacaccacgaaggtgagggctgtgctcggagctgcccacgtccctgctcccggcacaccctccctgagcactctcccctcccaggtct

SEQ ID NO: 480043 - DNA, 122 bp, Homo sapiens
ccctcaccccttccctacctgaactcttcctcctacacatcacagcagcgaccacagctccgatgaccacaactgctaggacagccaggccagcaacaatgcccacgatggggacggtggac

SEQ ID NO: 480044 - DNA, 122 bp, Homo sapiens
ccagggtccccagggcttcctccacaattgatgagtccactgctgctgcctctggctgatcgactgggatgcagccaggcccctatgcacagggcatggggccagccccgccctgaatgcac

SEQ ID NO: 480045 - DNA, 122 bp, Homo sapiens
gctcgctgagtgacagcatggccggcggccggggagagccgaccaatcagggagggcgtacgcgacccacgtgcgtaaacggcctcgctattggccggcgccgccagaggcctgcccccccc

SEQ ID NO: 480046 - DNA, 122 bp, Homo sapiens
tcattcacctctcaggcctgtgggaacaacaggacgggctgtggctttcgaactggctgtcgctgaaaggccagatcggaggacctgctctgactgaaccacttcgcctttcagtgaacaga

SEQ ID NO: 480047 - DNA, 122 bp, Homo sapiens
ggcaagaggaaatagcagtgggctgggccagccctgaagctgaggacccaaggggggcagcgggattgaaagagctgtaacatgacacaaatggcggaatgggtggggtgtctcctgcaccg

SEQ ID NO: 480048 - DNA, 122 bp, Homo sapiens
tgggagaggtgagtgaaacgacaaaggcttggagggcacaatcccttcttccaaacaaaacgaaaccatattaggccaaacaaataaacaaaaacacgccatgcaaatgggcctctggtgtt

SEQ ID NO: 480049 - DNA, 122 bp, Homo sapiens
caaaggcgtaaggagctttcctggagggacaggtgacagatccctgtagatgaacacagccgagctccgaggcccgagggtgtgggagcagtgctctgggccagggctatgctaggaccagg

SEQ ID NO: 480050 - DNA, 122 bp, Homo sapiens
gcagtgcctggtgcgatgtccgcgtcagcctctctcctccgggagaggcagggagtgtgacgcccattttaccagcgggcaaactgtggcttagggatgctgggtgatttgcccgaggacgc

SEQ ID NO: 480051 - DNA, 122 bp, Homo sapiens
atgaactaatataatagtctttaagtctgtgacgctccagatgttcttgggaatgagtaacgcgggtccacaggccgccccctcgggtccggccagagcatcggcaggaaccgaggagcctc

SEQ ID NO: 480052 - DNA, 122 bp, Homo sapiens
gaggagtcaagggattctttttattcccactgcctgactccagcttcctcttagacactccgtgagccccctcattttaaggccttgtgaacattagagaaacactctggagagaagcagtc

SEQ ID NO: 480053 - DNA, 122 bp, Homo sapiens
ttcggcgggccgcctagggtgattggctgctgcagcccaccccctagccggtttggtgggcggcgaagcctggattggtggagctaagagctggctcagtttcagcgctggctcttcgtgca

SEQ ID NO: 480054 - DNA, 122 bp, Homo sapiens
atgatgctccctgactcttggcctactccctttatcctacagaatagagctcattattcacgtaggtcaaggttgctatgaaacagctatgatgtcaaagatggagttctcaatcacataag

SEQ ID NO: 480055 - DNA, 122 bp, Homo sapiens
cggggagccgacgggcagctgcctgaaaggaatgccaggatggcggggtgggcggcctttcgcccctgcaggggaggaagatggcttggtcgggggcgggggttgggggggctatcaaaggg

SEQ ID NO: 480056 - DNA, 122 bp, Homo sapiens
tgttctgacaatcacgctgcccaaataagcgaccatccaatgtgtcaggccactcagatccgccacctgcctgcacccagtggcaccatgcctggctggccttccgtgaccttcctgccagc

SEQ ID NO: 480057 - DNA, 122 bp, Homo sapiens
acatgatagcggtctcgctggtgtgcgcaccaggagcgttgcggccgcggcttcctcctgcggcgaatctgccgttgcatcacagtggctagtctcagggcccgcaacgtgacgcttgtcga

SEQ ID NO: 480058 - DNA, 122 bp, Homo sapiens
gttagagctcctttcctatgccctgaccgtagtgaagtgcttgcagcaaccagaaccgtccgtacgtgccatcctcctcaagactcttccctaccttcctcttaacccagctcctactcgtt

SEQ ID NO: 480059 - DNA, 122 bp, Homo sapiens
gtactccgtaagtatctcttacattaaaaaacaaatgactaggctgggcgcagtggctcacgcctgtaatcccagctactcaggggtcccattcaggagacccccgcatcctcccctggcct

SEQ ID NO: 480060 - DNA, 122 bp, Homo sapiens
cagacaacccccaatgccgccaccgcccacatcactcctcatcgtagcacttatccctgacgttatcgtacagatttgtttattgtttaacccctcccacgggaacgttagctccaagaagg

SEQ ID NO: 480061 - DNA, 122 bp, Homo sapiens
gggccgagccttccctccattgtgtgtgattggctggcgcgcggcgcgggggcggggcggcgtgtgttgggggatagcctcggtgtcagccatctttcaattgtgttcgcagccgccgccgc

SEQ ID NO: 480062 - DNA, 122 bp, Homo sapiens
agttaatccattgcccctccaccactgacccagcttagtttgggagctaatgttcccactcgtatattatttcaaccccactggacgtgttaactcttttctatcacttggattcttgcttc

SEQ ID NO: 480063 - DNA, 122 bp, Homo sapiens
ctcgtggtgcgcccttttttaagccggtctgaaaagcgcaatattcgggtgggagtgacccgattttccaggtgtgtccgtcacccctttctttgactcagatagggaactccctgccccct

SEQ ID NO: 480064 - DNA, 122 bp, Homo sapiens
agggcggggcataaagtcccgccacgcccccacaatatttacatatttatgaggaaccatcgagatctttgaagaaccagctagcctagaggagccagaacatctcgctcctcgcgcgtttc

SEQ ID NO: 480065 - DNA, 122 bp, Homo sapiens
aatttctctaggacttgttctaatatttgactaagtaaatatggagactccgtaaacccccggggtaagactgtccatcagtattgctgttttcaaccggagtgagggtctttccactcaaa

SEQ ID NO: 480066 - DNA, 122 bp, Homo sapiens
atttccctcaagagacagcccatagctttcagactcccagatagatctgtgtacccagaacgaaggttaagaggcactgctccaaagactttgttctttccactgttgtacttcaactctgg

SEQ ID NO: 480067 - DNA, 122 bp, Homo sapiens
gagaggagaaagatgtgcagtttgtaattacctgctccctgtagtacagtccgtccttcacgcctggatctaacgggacaaactctcagcggctttgctctcccggcattgtttcagcaccc

SEQ ID NO: 480068 - DNA, 122 bp, Homo sapiens
acacacaaacatcagccgcccacggcagggagctgcagggttactgcgcacccgagaccccgacctcacgccacacacaaacaacagccgcccacggcagggaggtgcagggtcactgcaca

SEQ ID NO: 480069 - DNA, 122 bp, Homo sapiens
tcctggcccgggagagggtactggggttccggccatcctttgctgaggctggaagaaatgcgcctttcagccgccgcctgggagccgcactccctgccaagcccgggtgggatagcgctttg

SEQ ID NO: 480070 - DNA, 122 bp, Homo sapiens
tgccagagctggatttggggccggcagggggtgagggcatggtattcctggccgcgggggcgggggggggggtccgggggccgggggagcgtcgcgctgacggcagccagagcctgcgatga

SEQ ID NO: 480071 - DNA, 122 bp, Homo sapiens
tacttcttcaccccctccgcttcatttggcatttgccagcaggcactcgctgtgcctgtacgtttcgcagagcagctatcaagggcagtttcagggatcgttactcttacgaagggtttttt

SEQ ID NO: 480072 - DNA, 122 bp, Homo sapiens
tgtaactctcactgtcctggtgtgcagcttgggtcctcctgacttgcccacttcttgatccgcagcccccataggtagtatctcatccatggaagtgaatgtggacacactggagcaagtag

SEQ ID NO: 480073 - DNA, 122 bp, Homo sapiens
ttccctcagcccctagcccctgcttcgctgaaggggccgggcttgggggcagggcggggccgggggcggggcctcgccggctcgcggccggtcgccttgacgaccgcagcaagatggagacg

SEQ ID NO: 480074 - DNA, 122 bp, Homo sapiens
ccctcagtggagtcctcagtagacaggcaggggctgcatccccgcacacaggctccacagcgctggaggcaatcccggcagcggcggaagcagaaggcagcccggcaccactcccacaccca

SEQ ID NO: 480075 - DNA, 122 bp, Homo sapiens
agtgtccagggaatacaatgttctacaaatgtgctgtccaacagagcttcctggtatgtgcgtgggatggaatgttgtaaatctgcattagtccacagagtagcactagccacatatggcta

SEQ ID NO: 480076 - DNA, 122 bp, Homo sapiens
tgcacaggtggcatcggccatccaggccttgggaacagccagcgacgaatccattctccacggagaatcctgcatgcacactgctttctctgcaggaagaaagcagttccacccactcgtga

SEQ ID NO: 480077 - DNA, 122 bp, Homo sapiens
ttccagttagagacccttggccaagcgtagaagcaggtaaaccctcaggttccgggactgcgcgcttttcagccactgtgggagaggatccgtgtttaaccagctccccggggctcccaagt

SEQ ID NO: 480078 - DNA, 122 bp, Homo sapiens
cttctctctgcaaggtcgggggttctttggggagtaaatcacagcgtttgggtttgcattcgaagcactaccaagtctactccacagggtcactgcacggggagcaagtaaaggaaaacgag

SEQ ID NO: 480079 - DNA, 122 bp, Homo sapiens
tcaaaagcactcccacttcccttcatccatgcttcaggaggttggagaagtgagtggggacgatttggagctcctggtgtgcacaaccccccttaccatcagcttccagagagctgactctg

SEQ ID NO: 480080 - DNA, 122 bp, Homo sapiens
ccgcggaggggagggcggtgggcgggagctgggcggaggcgtggggccggcggaaggcggcggggagctcttcccgggaaaggccagcacctgaggctgcactttctccccgtttcccctca

SEQ ID NO: 480081 - DNA, 122 bp, Homo sapiens
agcggaggcgaggaccagcctgccgagcctcgccgggcccacagtcctccctccagcccgcgcctccgccaggctccgtgaggaaactcccccgcgaccacccccggctcctgccatcactc

SEQ ID NO: 480082 - DNA, 122 bp, Homo sapiens
agacctctggggagatgtgaccacagcaatgggtaggagaatgtccagggctatggaagtcgagtatggggacccccccttaacgaagacagggccatgtagagggccccagggagtgaaag

SEQ ID NO: 480083 - DNA, 122 bp, Homo sapiens
catctcctccactgacctccagtcctggcttccattatggaccctcaggagcaggttccacgagagcccagaagctccatctatggcagtgattagacacaaaaactgccacactaggggag

SEQ ID NO: 480084 - DNA, 122 bp, Homo sapiens
ttacctcctggcaggcctgttccctctccattctggctgtctgcaggtgaggcacagacccgaggtgaccctgtgtgacaggtgagtgaggggccagcagagccacacttagtgggacccct

SEQ ID NO: 480085 - DNA, 122 bp, Homo sapiens
ggactcacccaccctgaaagaccccatcctcaaccctatcaatagctctagttgcatttccggcaaaatctgcaagagctcggttctttgtctaaccctccagggaaacaaacagttcacct

SEQ ID NO: 480086 - DNA, 122 bp, Homo sapiens
ccaggggcgggagcgacgccgcagaagacaactacctgtagccaccgcccctgcggacggcgtggctcagcagcccacctctgagtctcagctttgcttcggggaccctatccccagggccc

SEQ ID NO: 480087 - DNA, 122 bp, Homo sapiens
aatcactgagaacagcccacggtgtgtggtcagtgccatcgtcatcatcgtcatcagcaacggcagctcaagaccagcaaggccgcggttgtgtctgtcatgagcccgttggcatgccgttt

SEQ ID NO: 480088 - DNA, 122 bp, Homo sapiens
aacgggcctgacacttggaacctggagtcctggttttgaatcctggcccttccactcacccgtgggatgaccctgggcacgttaccaagctctttgagtcacgatgtcctcatccataaaat

SEQ ID NO: 480089 - DNA, 122 bp, Homo sapiens
agtgtgtagcctgtgtcatgtgccacttaataaactgggacactggagaagaaagaatttcgatatggagagaaagatcaaggctttggatttggctgtgttgcatctgaaactcctaagaa

SEQ ID NO: 480090 - DNA, 122 bp, Homo sapiens
atgaacgagatccaagaatacaaaacatcccttcccctgcacccacccagctgtctggcccgattcctgcttttcagagtggggctccccatctgcagggtccctgcaagcctggtgggttt

SEQ ID NO: 480091 - DNA, 122 bp, Homo sapiens
ggggaactggattcggaagtggggtcccactcaccgggggtccgtctgagccaggcatgccggggagccctggcttcccttgaggaccctgcaggaagacaaagaggctcagggtcactaga

SEQ ID NO: 480092 - DNA, 122 bp, Homo sapiens
tcccaggagaatgtcagctccatttgggccgggactttatgagttttgttcaccactagtcgccggtgccagatctgtttgtttcttgcacatagtagacacatgataaatgtcattatggg

SEQ ID NO: 480093 - DNA, 122 bp, Homo sapiens
agcgtgactgtcttgatcgaaggtttcactgaactcattggctggtctggtaaaaggtagcggggtgcttccccagctggtcgcaggaatagtgcgttttctttgtcgcgcaaggggcgtgg

SEQ ID NO: 480094 - DNA, 122 bp, Homo sapiens
aaaaaaaaaaaccacacacacccatacacacataccagaaaaagaaagaaaggatggagacggaacatttgcctaattttgtaataaaacactgtcttttcaggattgcttcatggattgga

SEQ ID NO: 480095 - DNA, 122 bp, Homo sapiens
ctgggacttcaaggggacctaggcccctaaagtggttccgggcagacagctgggaccctgcgttctttgcatttccagaccagttggaaacggtgagcacctagttttcccaagttcctaaa

SEQ ID NO: 480096 - DNA, 122 bp, Homo sapiens
gcacagaggacacgtcgccagctgctccagacgctccaccagccccgggcccagctcgggcgcatccatggaaagccaggatctggacgccgccccttccgcgaccaccgtgaccgccttcg

SEQ ID NO: 480097 - DNA, 122 bp, Homo sapiens
accctcgtgcttctgcacaatcgcctcccactagcggtgactgttgggtgtttaccttcccggtgtcccactgagaagcgggctcttccttggcaggggcttcttcattgcctcgctgtgga

SEQ ID NO: 480098 - DNA, 122 bp, Homo sapiens
ctgccagcggtgacatgggtgaagggctgcgcgcgtgagcaggaataaagcgagaaatcacgacagagttggtcacgaggacattaagatgcattacatttgcccgcgtatctacctacaaa

SEQ ID NO: 480099 - DNA, 122 bp, Homo sapiens
ccagcgagtgagccagccgccggacaacagcaatgtccttcctgactatcgcggagctggcggtcagcagccccttagctcccatgcccatcggagtacgtgcgcagcaggcaagggcgacc

SEQ ID NO: 480100 - DNA, 122 bp, Homo sapiens
gccagagaccagagagcctgctcactacgagaactggatcctgaagcctcgagggctgctcgggctctggcaggaagatctgtctgcgatcccgcttgtgatgggccgggtgaatgggggag

SEQ ID NO: 480101 - DNA, 122 bp, Homo sapiens
gcgagtgctggagaggaaccccggacgccaccatttcacatggaagaggcaggcgacatgcgagtgctggagaggaaccccggaagccaccatttcacatggaagaggcaggcgacatgcga

SEQ ID NO: 480102 - DNA, 122 bp, Homo sapiens
tgcattccttcagctggtatctttcttcctctaacatggtgattctcaatttgtgggccacggaccctgagggagccttgaagttgttaaaaaggtttagtaaattcatgcacataccaagc

SEQ ID NO: 480103 - DNA, 122 bp, Homo sapiens
ggcttcctcgcatacctagaaagcaagccagcgtccttaaaatatcccacagccacagaccgcctgccgcttgcagttccagcatcttacatttgctctgctccacccacatgggcttcttc

SEQ ID NO: 480104 - DNA, 122 bp, Homo sapiens
ttcatcgcagggacaaagccgagcagatcccaggcaggtgtcagcctgcaggtgtgtggccgcagttagtacacctccaggtgtgcggtgggatgaaggataaagggagaagggagggcagc

SEQ ID NO: 480105 - DNA, 122 bp, Homo sapiens
ggatcccgtggggcagggggattcgggggcctccgtcctcttcttccttagcctctgtgccggggcgggtcgctgcggaacgggggtcaagaggaggtcgaggaaggaaaggggggcgctga

SEQ ID NO: 480106 - DNA, 122 bp, Homo sapiens
gagtgccttcgaaacctccaaggagacgaggcgggtagccaaagggtgaagacctccaaccggagggtgacaggcccaaggtcaaggccagcctcctggcggtgcccccaggaaggggagtc

SEQ ID NO: 480107 - DNA, 122 bp, Homo sapiens
tttttgcaaggcccgagacggcgggccctgcgcaggccgccctattccgcgccctcagggcgtcagtatcagcctgaggctggatacccccgctgggcccggatgcccccgctgggcccgga

SEQ ID NO: 480108 - DNA, 122 bp, Homo sapiens
cttgcctaatcatactgttatccttagagacctgtgtctgcaaccctagactgggagccccgtggaggctcagagatgtgtggggatatcatcagccagcattttaagtaagtggaagaagt

SEQ ID NO: 480109 - DNA, 122 bp, Homo sapiens
gagtcctggaggcccggcggggagcggggcgatttcgaaaggaaggactgcagcgcccctcggggcttctcggggagcccaggtaacctcacctgaccgccagacccaagcaggcggagggg

SEQ ID NO: 480110 - DNA, 122 bp, Homo sapiens
tcagtcaaatgtgagtagtggtcggggcagggggctggattgtgggaccttcctccttagcgtggcgggcgaggccagggccggacccgtgagaaacctacggcgccgggagacagaaggcg

SEQ ID NO: 480111 - DNA, 122 bp, Homo sapiens
taatttttaaagaaacagccgagctggtttctaaactggcggttcgactttactccccaccgcgatgcacgcacactcccccgtgtcctcacctgcacttggcaaggttggtctttgtaatt

SEQ ID NO: 480112 - DNA, 122 bp, Homo sapiens
ttgctccgcctggtgttcttagcttgtccacctctggcattatctggaaactgcaggttacgttaaaggctttctgaaatcatgtgaagagtctggcgtgtccgctctccacaggtcgcgtt

SEQ ID NO: 480113 - DNA, 122 bp, Homo sapiens
tttgacagtgaacatggtctaaaaaagggaagatattgtagaagatttcacacacacacgcgtgtgtgggagacaactaaaggtattgaaggtactaattaattagatttccaaaattttct

SEQ ID NO: 480114 - DNA, 122 bp, Homo sapiens
gtggtggcaagtcagtccgggactggcccagggcacccgcgcgcgtcggtgagagggacccgggactccaggtgacctccggatccgccctctaagtcagtggcctgcggcgggcgtgggcg

SEQ ID NO: 480115 - DNA, 122 bp, Homo sapiens
ggcccagccctcctgcaggaaggaagaggactgaatggagggcgtggcaggctgaaaggacgtggcctcctcaaacgccttggtaaacggcctctggggccaactggcagggaggggctggc

SEQ ID NO: 480116 - DNA, 122 bp, Homo sapiens
gccccgccagtccattggccgtcttggacaggggcttgtggtgggaaccctggagtttcccggctctccttggccagtaaaaaagatcgctggctccggggactgtcttcacactctgctcc

SEQ ID NO: 480117 - DNA, 122 bp, Homo sapiens
cggtggttaagggcgctcgagaggcctctacccgtttggcgttggctctggcgtctgggtcgttgtgtcctgacaaccgctcaggtaaccgtttcctagacagcgggtgcggctactttagc

SEQ ID NO: 480118 - DNA, 122 bp, Homo sapiens
agtggtaggtaggacaggaaaaatcctttgtaaataacctaaaacccggtcagatattcccgtagagttgggcgcttgagaacctttaagagctcctggttcgtggccattgatttcctgcc

SEQ ID NO: 480119 - DNA, 122 bp, Homo sapiens
aaccaccttcccagcctgagcacaccacagttaaatacacccaaaggagaattaaaaagtcggtcagtatctgtctatcctatcttgatgtgagaattttcataggaaatgggatcaaacag

SEQ ID NO: 480120 - DNA, 122 bp, Homo sapiens
ccgccgccggggctaagtgcacgccgcgccatccgagagcggcagagcagagcaccaaagcggcaaccgcggctccgtaaccaagcccagctgcctctcccggcggcagcggtcgggcaccg

SEQ ID NO: 480121 - DNA, 122 bp, Homo sapiens
taatttttccaatatttttacctcttatttccataagacttatggctatgactagacagtcggaacaacattaaatggagcactgtttcatccctaacagcaatgccctgagtcttttacct

SEQ ID NO: 480122 - DNA, 122 bp, Homo sapiens
agtctaagcaaagagcaggggcacggatgaaaataacagaacagtgacccaggtaggaaccgtgtgccggggaggctgggccaagcatttatagaaactgcccaaagagcagagcagggcgg

SEQ ID NO: 480123 - DNA, 122 bp, Homo sapiens
tgcagtaagaggaaatccaccaagtctcaatataataatattctttattcctggacagctcggttaatgaaaaaatggacacagaaagtaataggagagcaaatcttgctctcccacaggag

SEQ ID NO: 480124 - DNA, 122 bp, Homo sapiens
gtcgtgggggtggggaagtgcaggagtggcgcgcggcgtactacatgtcccgtgagcctccgcggcgggacggggcggggccgcgggacgccaggaggcggaggcggagtggagttaggtaa

SEQ ID NO: 480125 - DNA, 122 bp, Homo sapiens
tgccagggttctgtgcaaccttcctgcaggctattgtcgcgctgtgatggtctgtgtccccgtgagatggtgaggtggagtctctaggtttctccaagcagaagattgtatcatctgcaaac

SEQ ID NO: 480126 - DNA, 122 bp, Homo sapiens
gttcacactcccttgtacacttacacagatgctgtctcaggacactccccctcacacgcacgcaggcgcattcacacccgtcactcatacactcattcactgtcacaaccacctccgttcac

SEQ ID NO: 480127 - DNA, 122 bp, Homo sapiens
acggcctcggcacggcggccccggagcggcgcggggtggatctcaggctctgccggcccgcggcccgcggggtccatgcgcagggcccccagcccaagttcttccatcttccgatgcggccc

SEQ ID NO: 480128 - DNA, 122 bp, Homo sapiens
taactaaacaagtcagaaaaatgtaaatatttcctccaaaatgttgattaccttttaacccgtttgtgtgtgtgtgtgatcacaatcatctttttaattatttaaactctgtggatttctct

SEQ ID NO: 480129 - DNA, 122 bp, Homo sapiens
cttctcatgactatatatagcataccactaagccctctagacatcatattccccatccatcgccccgtccagtggaccagggatgaagcggggatgcgctaggcatcccggtttgtcaccag

SEQ ID NO: 480130 - DNA, 122 bp, Homo sapiens
cctgggctgactgcttctgaggccccgccccactactgcctgcagcgggcttccttactccgcctgctggttcctactggaggagaggccagcatgcttgtcaggcaccagcaggtggaggt

SEQ ID NO: 480131 - DNA, 122 bp, Homo sapiens
gagggcccagagagtctgtaaagtggctggtgaaagattagtgtcccagggccctacatccgggaggtggttcgggataaagagaactagtcttgggaacaatgtaggtgggaacttaaggg

SEQ ID NO: 480132 - DNA, 122 bp, Homo sapiens
ttcagggaagtttaagtggtatgtaacatgcagggaaacaacagggcatgatttagaagtcgtacagctgtactttaaacaggcagtgatgatgatagtcctgggagcgaatgaataaatgg

SEQ ID NO: 480133 - DNA, 122 bp, Homo sapiens
aagagatggggaagagctcattggtggagcagtcagaatacacacaacattgatcaattacgttcgttatcttctctaggtggagttcctgttacccccagaacattgacacacaacagggt

SEQ ID NO: 480134 - DNA, 122 bp, Homo sapiens
cgtggagttctcgcggtctgggtttcgctgtctgctcttggcccggggtcattttgtcggcgtcgggtgccctctcttgcccagctggggcacagcgaggcggccccttctcccgacgacgt

SEQ ID NO: 480135 - DNA, 122 bp, Homo sapiens
aagtaaggcctcctggaagacctgaaccctgagttaagtcttgaacttgaaaatcaggggcgagtcgagcagaaaatgggcaagaaaacaccatatgcaaaggcacaaaggtgttggggaag

SEQ ID NO: 480136 - DNA, 122 bp, Homo sapiens
ttacttttgcaccaacctacaatttcagatgtgtttgatcaaaaaaatcaaccacacccacgttgtctcaatgcagggtggttctggaggtctgtgaggtcaaaactattttcataataata

SEQ ID NO: 480137 - DNA, 122 bp, Homo sapiens
gcttccggtggccagtgggtctcctcccagatggctgtcattcactgcccagaggggttccgactcggccgggtcgggggagccaccagagagggcactgagcagcttgacaagctccactg

SEQ ID NO: 480138 - DNA, 122 bp, Homo sapiens
gtggatgcacacccactatcttgggagtaacgtcatacgccaccccctggagatgatattcggatcaatatcaccgggtgggggtacacctactgcgatattgaacgtcatgtcatgctctc

SEQ ID NO: 480139 - DNA, 122 bp, Homo sapiens
caccgcctctggagccaatgggctctgacgtggcgagcctggaacgccactgggactgcgcgggcgtccacaccacccaccgagcgcggccaccgcgttggcggcatgagcgcgctcgagcc

SEQ ID NO: 480140 - DNA, 122 bp, Homo sapiens
cctgtgatttgccctgggccttcccacaattctagaaacccatgacttgacatcattgcgcggccacctgactcccagctggcttcagcctctccgtttcatctccctctactctcactctg

SEQ ID NO: 480141 - DNA, 122 bp, Homo sapiens
tctggcggatgcctgggtgcagtggctcatgcctgcaattccagcaccttaggaggctgacgcagatggattgctcgagcccaggagttcaagaccagcctggtcaacatggtgagaccctg

SEQ ID NO: 480142 - DNA, 122 bp, Homo sapiens
agcgctgtctcaggcctcctggggctcgctctccaccagcgattcctccctcagtttccacgtttgcttctgtgaccggcctttccttgggtgcgtagaaatagtcacatctcatatgtggt

SEQ ID NO: 480143 - DNA, 122 bp, Homo sapiens
tcagttctatgcgtggaaaagcaatgagcgaccttcaagatctgatgctccattccaaggcgacagagaatcaaccacagatgggcgcgagaacagagtcagatcaccggccaaggtaaaat

SEQ ID NO: 480144 - DNA, 122 bp, Homo sapiens
gccctccctccacctatttggattagaccaggagactgcagcaaacttctcaaggggaggcgaacttggtgttggtatctgagcgattgtctgtttcaattgtttccctctgtcttggaaaa

SEQ ID NO: 480145 - DNA, 122 bp, Homo sapiens
tccatttaaaaggagagtatttctgtgtggagatggtaaagaggttaaagaagaaaacatcgaatgaaacttgctgaagacagtaaggcggacgttactgagaaccttggagatagctacag

SEQ ID NO: 480146 - DNA, 122 bp, Homo sapiens
ggcggactaatcttcaactcctacatacttcccccattattcctagaaccaggcgacctgcgactccttgacgttgacaatcgagtagtactcccggttgaagcccccattcgtataataat

SEQ ID NO: 480147 - DNA, 122 bp, Homo sapiens
ccaacaggaagttctcccctaccagagcccagttccattccagggaatccatctcccctccggaaaaaggaaaattgaagccagatgctctctgggatcgccatttgaggtgggcgtggcta

SEQ ID NO: 480148 - DNA, 122 bp, Homo sapiens
agggcctgcttggactgcaacctgggcctcgtgatcagcgacccagggtgtggctggtggcgggcagcagggctcaccaggaagtgtccccagggactcgggtggtggggggatgggagcca

SEQ ID NO: 480149 - DNA, 122 bp, Homo sapiens
atctgttcattcgagtttgctctgccctggtcccacaggttgggtgcagcgttcctgggacgccctggctcgccccatctactcagcttcccaaatgcccgcaagcccagttcacgcctgga

SEQ ID NO: 480150 - DNA, 122 bp, Homo sapiens
cccccgttcgtacacacatgcccgcacgcccccgttcgtacacacatgcacgcatgcccccgttcgtacacacaggcccgcacgcccccgttcgtacacatctgcgcgcacgcccccgttcg

SEQ ID NO: 480151 - DNA, 122 bp, Homo sapiens
cacctacacgtgagagccaaagccatagcctccaagtttttccacagagcgaaaatgtttcgcggagtttgcctgtcttcctccccagagacgcagcacagccgcgccggaagtgcggcgcc

SEQ ID NO: 480152 - DNA, 122 bp, Homo sapiens
ccggaaccatgacaaggtcctacagcgtctgtgtgagcacctggaccacgccctgctgtacgggtaaggtggaggaagtttccaaagatgacggagcacaacccaggccatgagtagcctcc

SEQ ID NO: 480153 - DNA, 122 bp, Homo sapiens
cgcctccctcacgcccgccctccttgccgcccagccggtccaggcctctggcgaacatggcgcttgtcccctgccaggtgctgcggatggcaatcctgctgtcttactgctctatcctgtgt

SEQ ID NO: 480154 - DNA, 122 bp, Homo sapiens
tggacttgttggggaagaagcctcagccaccctgaagggcggccgtgatggggaagctgccgggtgggtggacgtcctgagacggtgacgcctcacgcctcccgggaggggctgcggcctgt

SEQ ID NO: 480155 - DNA, 122 bp, Homo sapiens
agtgtgtctgagaccatgcctgactgacagttgctaagctaaggtggggaccctgactcccggctggcttggacttgagccatggccacacacagcctttgcacttaccggaaacctggaaa

SEQ ID NO: 480156 - DNA, 122 bp, Homo sapiens
tagaattctcccgaggcactctgggaagggccagcacttccggttttaggtcggctactccgaaccagaggtggggtgggggcccggctgccgcggtgcctggtgggacgcgaggcctgacc

SEQ ID NO: 480157 - DNA, 122 bp, Homo sapiens
ttttgtggtctccccatgtatgagtcctcttgaaaagctgcatgttctgactatcacaatcgtataccattccacactgtacagaattttcagtatttagttgagatgcatgctgttcttcc

SEQ ID NO: 480158 - DNA, 122 bp, Homo sapiens
gttccctttgccctacagggggcagaccctatcatttcctagctgacacatttggcctcacgggctctcttctggaacccttgagttcagaaagggttgaacactgcccatttcctgctgca

SEQ ID NO: 480159 - DNA, 122 bp, Homo sapiens
ctccgccatctctccggcgccgtaaggggcggggcaaagcctgaggggcggggcaatgagcgcgcgcggcgcctgacgggagagtggcggacccagaggcggagtctacaggtgggggcggg

SEQ ID NO: 480160 - DNA, 122 bp, Homo sapiens
ctcccgtcccgagcgctggggtccaggtttgactccgctggctttctcaggcgggcagggcgggggtaggcagctgggaagatgacgtaatgtgctcccagccaggcctggaggcggccagc

SEQ ID NO: 480161 - DNA, 122 bp, Homo sapiens
aaccccctctaagagagaaaatgttagagatagagatgaacttcatttcagcttcctgcccggtatctacccttgatgccaggaaccgctctgtcactgcatcccccaatcccactgcttcc

SEQ ID NO: 480162 - DNA, 122 bp, Homo sapiens
gtaagtggaagctgaggtacagatgcatcttctctttaggcttacacgggaacatcatcccgtagcagtttacactgagaatttacccagactgtttttcttttttttttcccccttgagtc

SEQ ID NO: 480163 - DNA, 122 bp, Homo sapiens
tgggtgcaggaattggggctgtcaccactgcaggaaggtgcaccctgggctgcgggacagcgcttagtggggtgtgttgggggaatgtcatcttggcccatgccttggggatctgtggacag

SEQ ID NO: 480164 - DNA, 122 bp, Homo sapiens
cgccacaggcactgcacccgttcgcggcggacgacacctgccggaccagccagggctccccggctttccagccgcccgagattgccaacggcctggacaccttctccggcttcaaggtggac

SEQ ID NO: 480165 - DNA, 122 bp, Homo sapiens
tgcccctgcagatacagtcccctttccgcggatctcactggggaattgcttgggtgtgcccgcgcccctatagactctgaccccattcagactgcgccctcagggcagcgtgcattcactgt

SEQ ID NO: 480166 - DNA, 122 bp, Homo sapiens
catccccgctttcttggtgtcctgtgagtttaaattcatgaattcactctcaactgccaccgctaacaggacacaggccaattccaacacgaaccccaacggctctcctcagggtcaccttt

SEQ ID NO: 480167 - DNA, 122 bp, Homo sapiens
ttattttccaaatcgttttccctaacatttctgctctaggaaggagtgccacgcctgttccgcggacttctgaccccgcacaccaacccgatggaagtagtgaagacagtagggacgcacag

SEQ ID NO: 480168 - DNA, 122 bp, Homo sapiens
cgggaccaccgtcttgccgggaccgcagccccttcttgtgcccctcacctctgtgagcatcgttggggctctgttccggaccctgcagatccgggccccacagcgcagtctcgggctccatc

SEQ ID NO: 480169 - DNA, 122 bp, Homo sapiens
ctcaatgtcaccgtggtcaccttcttctgccggccacataacatttgcactttcgtccctcgccgcaaggccggcatctgcttcgtaagtaaccgtgcccccaccccgggcaccgggctgcc

SEQ ID NO: 480170 - DNA, 122 bp, Homo sapiens
cctaaggggcgctttggccagagcactgtggcaaggtctgagactggcaaagaatgaccccggggactgagcagtggatgcaggtggaaacagagtgcctctgattttcctctgaccttctt

SEQ ID NO: 480171 - DNA, 122 bp, Homo sapiens
gccttttcattagggtggtgttcagagacagactgtggctgctgcagccccttcagaacccggggcagctgagggagagaagccgcttaatctgatttataggcaaggctcacaagagttgc

SEQ ID NO: 480172 - DNA, 122 bp, Homo sapiens
cgggcgctcggagtgctgcgtcactcgccaccagggacttaggcgggacttccgggcgcgcgtaggcacaacttccggaaggaggcggaagagcttctcggctctaggctctggagtcccgg

SEQ ID NO: 480173 - DNA, 122 bp, Homo sapiens
tgcagggcgagcagggccacgcagcggtggtggcagagttgaggacagagcccgggtaggcgaggcatggcgcgtcaggtgagataaagccaggcaagccaatgggagggaccgcgtgagtg

SEQ ID NO: 480174 - DNA, 122 bp, Homo sapiens
agcaaagtgatgggccctctgtcactactggatgcaagccctggaatagtacctccaagacgtgttccacaacatgtcaacgcattcccttcccaccaggagaccaacgactcactcgacca

SEQ ID NO: 480175 - DNA, 122 bp, Homo sapiens
tcttgtgtctcatatagaaactctaaacaaagcagatgaacagttgtgtctgtactaacacgtgactaaaacctctatagagttccagtgtgctgaaagccaaattaaagttctcttttttt

SEQ ID NO: 480176 - DNA, 122 bp, Homo sapiens
ccccggggcttttgtgtcgggtctggcctggctttctgtccgcaagtttttgccctgctccgcggcgctcctccggggcgggagccgcgaggcccgggcgagctcgggcgggaccggaggct

SEQ ID NO: 480177 - DNA, 122 bp, Homo sapiens
gggtgaaggccggagaggcggaagatcaagcttctgtgttcattcccttctggaatcctgcggtccaacctgagggccccgatgtatcctgacttctcccactcattaccttccgtggaggc

SEQ ID NO: 480178 - DNA, 122 bp, Homo sapiens
ccccggggcggcctccaggctgccgagacctataaaggcgccaggttttctcaatgaagccgggacgcactccggagcgcactgcgtggtcgcaccctacccgggctgccttggaagtcgtc

SEQ ID NO: 480179 - DNA, 122 bp, Homo sapiens
attaactcttctgttcacacatttagaattttagctcccaagatggtagggcagactgaccgtacagtaatttatttgtcgttagtgttaaagattaagcatagtaactgactcttaagtgt

SEQ ID NO: 480180 - DNA, 122 bp, Homo sapiens
ttaacaaaaaaggaaacagagttcagtgtgggaagacaagaaaaactcataattaccaagcggagtgataaatgatataatacacctaagcattaggtgctccatgagcacaagaagtgtct

SEQ ID NO: 480181 - DNA, 122 bp, Homo sapiens
gttcctggaagagcccggctggggagcgggtcacattcttggccagcgctagggctgaggcggacgcacggcaacaaacagcgcggggggcggggccggcgcggggcggagcgggcggcgcg

SEQ ID NO: 480182 - DNA, 122 bp, Homo sapiens
cttttctactctgtttactaagaaactctgagttcttttagtttgattagagtgaaaacccggatcactgcttcctgtgtttcagacctactgccagaattttattttttcaggggcaaaat

SEQ ID NO: 480183 - DNA, 122 bp, Homo sapiens
cagtccgcctgcagctgtgaggcggctacacgagcctcggcgccagcctgcttcgagtcccgctggctgtgcctgcccgggccctgaggcctcactgctaaggcagtgaccgcctactctgt

SEQ ID NO: 480184 - DNA, 122 bp, Homo sapiens
tagcagatggcaggtattgtgctttacttgtattaagtaacttaatcctcacagtagcctcgtgaaggagggatggctattagctcatttacaaaagaggaactgaggcctggaaaggtgaa

SEQ ID NO: 480185 - DNA, 122 bp, Homo sapiens
gcctgtagtcccagctactccggaagctgaggtgggaggatcacctgagcctggggaggtcgcggctgcagtgagccatgattaacccacaactgcactccgcctgggtgacagagtgaggc

SEQ ID NO: 480186 - DNA, 122 bp, Homo sapiens
ttcccggcttcatttctcccgactcagcttcccaccctgggctttccgaggtgctgtcgccgctgtccccaccactgcagccatgatctccttaacggacacgcagagtaagcacctgctcc

SEQ ID NO: 480187 - DNA, 122 bp, Homo sapiens
taatttctaattcctctgttccctccagagcacttgcctttatgtcatttgatgtttatacgtccactcacttctaaaatccagtaagcatattgcatacctaggatgtgaggggtgctata

SEQ ID NO: 480188 - DNA, 122 bp, Homo sapiens
ctctgagactgcaaagggcccactccttctgcccttcagccaggaatgtggcagtccgaacgcccccttccttactgctcttgtgtcctcattgccttgatctgcttttctggtccaagttt

SEQ ID NO: 480189 - DNA, 122 bp, Homo sapiens
gggagattgttgtgtctcagaagatatttcacggtgaagtctcacctgacggcacttcctcgtcctccacagagccgtgtgtctagggcccggggtgcggaacgggcagttcttcaacacag

SEQ ID NO: 480190 - DNA, 122 bp, Homo sapiens
gaatggcaggtccccagggcgaggagaggccacccccttctctgtctcttccatcacaggcgtgacagcctcagagcatgagccgattctgtgcagtgctcaacatacagatgagaatactg

SEQ ID NO: 480191 - DNA, 122 bp, Homo sapiens
agacacccgctttacccttactggcctcaagccagacaccacttacgacatcaaggtccgcgcatggaccagcaaaggctctggcccactcagccccagcatccagtcccggaccatgccgg

SEQ ID NO: 480192 - DNA, 122 bp, Homo sapiens
cttcatttccatttcacacttggttaccgtgtggcctgtgcacacgcaagccgcgcgatccgggaatggaagcctgcagcctaggtgactgtccagcatgggagccattggtggcaggaaag

SEQ ID NO: 480193 - DNA, 122 bp, Homo sapiens
tgggaggccttgggagtgcccagggcagcccttttgttccatccccagacccagggagcccgggaccagtggagcccctgaagctgaaatactctgcttagagtgagccttcctgactggtg

SEQ ID NO: 480194 - DNA, 122 bp, Homo sapiens
agccgtggtggggcaaagcctgggctgggagacgctgcaaggctctggggagcagtgaggcgccgcgccagctcctccgttcccgtcatagcctcacacgggcttcgctggacacgtccagg

SEQ ID NO: 480195 - DNA, 122 bp, Homo sapiens
aaatttccgctctctgtgcccctctgcagcctgggggccggcgggtgcgcggctgcgggacgtaaatgtttatttactgcctgcttcctgattgagaacatacctggtccgtggcttcagat

SEQ ID NO: 480196 - DNA, 122 bp, Homo sapiens
gacctcctctgccctgagagcgcgtccggtgcgggcggagtcggacggactctggcttcacgcctcgcgcgggcacaccttctcccgggcactgaggcccaggtgagtaccgcgcgggcagc

SEQ ID NO: 480197 - DNA, 122 bp, Homo sapiens
tatgggtctgtctgaagatgatcacccttcctgttgaggcacagtagggaataagccaagcggagtcttagcacttttaccctgaattgtgtggcttttgtcaagcaaagtcagaaggacat

SEQ ID NO: 480198 - DNA, 122 bp, Homo sapiens
tattcgtttgagcatactgcaagaatatttattgagcacaagctcaatcaccgcattgaacgccaaatctggcaagcaaaatgcatttcctatctgagggggggagaacgagctgtgaatca

SEQ ID NO: 480199 - DNA, 122 bp, Homo sapiens
gcgtgcagtcaggaatctgcaccaagaatggtctgtccatcagtgagggagagtcctccccgggaggggcttccgtgcctcccattctgggcacttccggactttctgcaggaagtgctgtc

SEQ ID NO: 480200 - DNA, 122 bp, Homo sapiens
tcacaattaaaattgtcattaactaaagttcatgtttattttctgtcccaggatcccatccgggataccacagtacctttagttgccatgtctccttagatccctcttgcttttgatagttt

SEQ ID NO: 480201 - DNA, 122 bp, Homo sapiens
ggaagggagctgttgcggggcttgctgggatcatggcggagaatcactgcgagctcctgtcgccggcccggggcggcatcggggcggggctggggggcggcctgtgccgccgctgcagcgct

SEQ ID NO: 480202 - DNA, 122 bp, Homo sapiens
gcccggacctcagtagccaagtttaccgctgagacttagactctaatgctcgcagccgggcgctcaggccccggtatcccagacgccccgaccccgagtccctatcctgagaccccctttcc

SEQ ID NO: 480203 - DNA, 122 bp, Homo sapiens
cgcgcaacgcggtcctgcgtgaacatcccagggcccaggccggtccctcgcgcccaggttcgagctcacatcactgaaggagaagccaaagctgaggaaacgtgcaggggacgggcctcgaa

SEQ ID NO: 480204 - DNA, 122 bp, Homo sapiens
gcacagcaagctcttggtctatatgggaaggccatggactacaattcccacaagtccgtgcgacctctccgttctgcgcagcttcgcggtatgaggaagagggtcctgtcaggcgcactctt

SEQ ID NO: 480205 - DNA, 122 bp, Homo sapiens
ggggcgctgagaagcagtgagtgcctgtgtgtacctgccggccgggaatataggacttgtcgcatctcagcccttccctcccggagcgggggcgagaggtcgaggcggggaggcgaaggggc

SEQ ID NO: 480206 - DNA, 122 bp, Homo sapiens
tcgcccattggccgcgacttggggcctgcgcgtgcgcaggggcgtggggtgcgtgtggcacgtgcggcgcgtgcgcggggcgggtcctgcggtgggcgaggggcagaggcctgcggtgcgcg

SEQ ID NO: 480207 - DNA, 122 bp, Homo sapiens
tctcctgccttctgggcccattgggcacaccgccacccaatccggggacccccggagactcgccagctctccaggatgggaatttcgtgatgttccctgcctgagcttcggggagggcgggg

SEQ ID NO: 480208 - DNA, 122 bp, Homo sapiens
tgctttaaggttaataaagaatcacctaatttcacactattatgatcatgcaaataggggcgtttgcatcacaaaacaagtatcgagtagggaggagattctctggaacctagaacaaagac

SEQ ID NO: 480209 - DNA, 122 bp, Homo sapiens
aagaaaggaagagacaagactggataagaaccgggtttggtcaaggaaaggaggggtggacgtgcaaagccctcccgtgcgggagccctgggacgggggcaccatcccacagccccccggca

SEQ ID NO: 480210 - DNA, 122 bp, Homo sapiens
agctactcctatcacttcaagtggaatcatggctgcagtcactttaacagactctataaccgttacaacttcaacaaaatcaagtcctacttcaacttaaacttacttgacaactcaaataa

SEQ ID NO: 480211 - DNA, 122 bp, Homo sapiens
ggcatcaagatagatgagaatcttgttagaaatggatggtcggctgggcgccgtggctcacgcctatgatcccagcactttgggaggccgaggagggcagatcacgaggtcaggagattgag

SEQ ID NO: 480212 - DNA, 122 bp, Homo sapiens
aagcttcaggttcctgccgggtgcagacccagaatggtccttgccctctgggagctctcccggtaactgggaccacaagatttgcacctggaagggctaggggtgagcaggggaaggctgta

SEQ ID NO: 480213 - DNA, 122 bp, Homo sapiens
cggcgtcctgtattgttgggggaaggcggggggaggggttcggcccgcacgcgttggtctcggggacaggaagtctgactcccctcgcccggcacccagcaccagttcctcaaacccgagtc

SEQ ID NO: 480214 - DNA, 122 bp, Homo sapiens
gatggagatacctgagtcgcccttctaacaatttaggattaaccttgtttttctgaacaacgtaattgggttcagatattatctcatcttgtttccaaggccgctagccaagagcagaacca

SEQ ID NO: 480215 - DNA, 122 bp, Homo sapiens
tcacagaatgcggagacacggctgcctcgcgtcccttccctgacctgccccaggcggacgcggtgacgtgtgtttgcctcgaggctggaatacatggggatcaaatgcagagaatggagaaa

SEQ ID NO: 480216 - DNA, 122 bp, Homo sapiens
ccaggccgcggcagcacgtggaacttgggtcccgcagtcgcaggctgcgctctaggccgacggaagcagttccgcctgtattcagaaaacagttctcagccccaaagacacaggttggaaag

SEQ ID NO: 480217 - DNA, 122 bp, Homo sapiens
tctaccgatagagaaaccgaggctgggagtggctgcgggaggtgcagtcaggaacagggtcggagtgtggcgccgggccaggccgctcaggtcccttatcatggaatctaccggggcaggtg

SEQ ID NO: 480218 - DNA, 122 bp, Homo sapiens
ctgcccctctacccacagtaacacagacccggcactgacgtggtggctctcacagtggcacggacccggcactgacgtggtggctctcacagtggcacggacccggcactgacgtggtggct

SEQ ID NO: 480219 - DNA, 122 bp, Homo sapiens
agaccggatctccatctgtcacctaggctacagtgcagtggtgcaatcatggctcaatgccgcctcgacctcccaggctccagcaatcctcctgcctcaacctcccgagtagctgggactac

SEQ ID NO: 480220 - DNA, 122 bp, Homo sapiens
ggacatcgcggcctgccgcactgccaccatcacgggcacactgaagcggccgtctctgcccgaggaggagaagctgaagctggcccatgccaaggggccgcccaccaatttcaacagcctgc

SEQ ID NO: 480221 - DNA, 122 bp, Homo sapiens
gccctgggtgggggactgcgtggcctgcggcgctgggccgggggtgcactcagggtccggcgcgggcctccttcagacaccagagggtcgcggaagctgacgcgtggggtgctctgacgacc

SEQ ID NO: 480222 - DNA, 122 bp, Homo sapiens
atcctccagtcttcgtgtatgtgtgaactcggaatttcatagacggccttggctcacgatcggtttggcacttcgcgttcctaggccacaggacgtcgaacctcgggcgacagcagcctccc

SEQ ID NO: 480223 - DNA, 122 bp, Homo sapiens
taagttagtaatgagatataaagatatttaaaatacagctcaattaggatggaaaattaccgtattagggaaagcaggcctttaaacaaagaattcacttggcaggcagagaagctgtatga

SEQ ID NO: 480224 - DNA, 122 bp, Homo sapiens
gatctgtggctcggacgcgtggttggccagccccttgctgctcagaggcacggagtcagccgcggtcccaccgcatcctcatctcagttgtcttttcctggcattgattttctttttgttcc

SEQ ID NO: 480225 - DNA, 122 bp, Homo sapiens
gggcggcggagcagaggcactccccacatctcagacgatgggccaccgggcagagacgctcgtcacttcctagacgggatggcggccggaaagagacgctcctcacctcccagacggggttg

SEQ ID NO: 480226 - DNA, 122 bp, Homo sapiens
aacgtgtttcttctttagggcttttgagtttgctgttgcctctgcctcaaagccttggcccgatctttgctctctgtgcagcccctctggcttgtcctttgggtcttggctgagatgtcacg

SEQ ID NO: 480227 - DNA, 122 bp, Homo sapiens
gccagtttcccaggtgaggctggtcctgcttcaagcgtgggagctccaaccactgctccacgctgcctccactcctgaacctgaaggtggaggagtttcccactgtctcaaataagcaccgg

SEQ ID NO: 480228 - DNA, 122 bp, Homo sapiens
tccaagggctaatgccgtgattctagagcggctgggcgtctagggcctcggtgagggtggcgtgtctgccctttttatttccccgcaaggcccccagtcttctagggaagccagtcagtgaa

SEQ ID NO: 480229 - DNA, 122 bp, Homo sapiens
tggtgtgaagagcgatctttctacacaagtgctggccagcaacgactgcaagcctcagagcgttattttgccgcagcctacgcaggcgcagtcagtctttgcattgtggtggccacgcccca

SEQ ID NO: 480230 - DNA, 122 bp, Homo sapiens
gaggcaggggaagtcaccagctggataggagcgtagtaacaaccccgtttttaaagaggacggccctgtatatgtacttacacttgaatacatttggaaagtcccccggaaaagtacataac

SEQ ID NO: 480231 - DNA, 122 bp, Homo sapiens
gtatgtcatcgttcccgtactctcaaaactacacagagaaaaggagaacctcatctaaaacggtcacaggtatatgcagaaagaaaacagggaccaaacctcacagaagcgaaaccgagaca

SEQ ID NO: 480232 - DNA, 122 bp, Homo sapiens
tgtcctcagggaccgcccaggcagtgccctccagatagacgaagccgcacacagcaccttcggctgccatggcccaaaggtggccggctggctaccccaccatgcactgcgcggggggcgtc

SEQ ID NO: 480233 - DNA, 122 bp, Homo sapiens
acaaagagggagaggtgcaagcactcttagcttccccagctggtatcttaataggtcacacgtcccaccctccaactcaatctactggctttgagcccagctcaataccaggacttgcataa

SEQ ID NO: 480234 - DNA, 122 bp, Homo sapiens
cctggtggcaccccaggggacgcgggctccggagaggggcgcgcgagagagaggccgaggcggaggctctgagacggtgtttattggctccttagaaatcagagtcagtaacaactgtacag

SEQ ID NO: 480235 - DNA, 122 bp, Homo sapiens
aattccctctcgctccacaagtgggttcacaagagacacaaacgcacccaggaagacctccgctccctcagacgcggggcgggccctgcgacttcactctgggagggacatttccgctcacc

SEQ ID NO: 480236 - DNA, 122 bp, Homo sapiens
cggcgagtccctagagactcaccgtgtacactgagatagagctcagggtcgaggtccggccggggcggcggttcccccggtccctggcgcaacagcagtgcaccgggtctcttggccaggcc

SEQ ID NO: 480237 - DNA, 122 bp, Homo sapiens
tgagatggagtttcacttttgttgcccaggctggcatgcaatggtgcgatcttggctcatcgcaatctatgcctcctgggttcaagcaattctcctgcctcagcctctcaagtagctggcct

SEQ ID NO: 480238 - DNA, 122 bp, Homo sapiens
atacacacacggaaagacgtacacttagtcatccttgcacagagagcccctgtttcaaagcgcctttgattttttttctcactctttacaagaagtgcaattaaaaaaaaaatttaaaatta

SEQ ID NO: 480239 - DNA, 122 bp, Homo sapiens
caggcgcaggcggcggaagcgcgtgtctccaggtcgtcgcgtcgggctcctgggatttggcggcaactgtgggaggatggcagagtcctcggataagctctactgagtggagtacaccaaga

SEQ ID NO: 480240 - DNA, 122 bp, Homo sapiens
cccgctccgctgactcacctggcggccttgacacacagaaacaggccccagctgaaggtgcggcgggccggcaccctcctctcaggctgggagctacgggaatcctggctccccccaggctc

SEQ ID NO: 480241 - DNA, 122 bp, Homo sapiens
gactggcctcagcatccttgcccgcagtcccgggcgcctgcccagccgtcagtccgcgctcgccccgcccctcaggccccgcccctcaggccccgcccgatacgacccgccccttctttcgc

SEQ ID NO: 480242 - DNA, 122 bp, Homo sapiens
ctcttacacctctcttgcccttctggtggtaacctgactccttctgattttagtggctgccgggaaatacgaacctcgggcaaagaatcctgtgattgcgttccctgtgactcatttcccga

SEQ ID NO: 480243 - DNA, 122 bp, Homo sapiens
aatcctccacacacaatggtatggacattattccccctctatccccgttaaactgtacatcgagacaatacaaatttactgtcccacccacccccttacaaaaaaataatactctaaaagca

SEQ ID NO: 480244 - DNA, 122 bp, Homo sapiens
gctggacgcagagcgcaggcgtgaactgggtggcgaggctccgcccccatggggcgattgcgcgcccaaatagctggcccagggtgctttggccgccggagcgggttgcgagtacacttgag

SEQ ID NO: 480245 - DNA, 122 bp, Homo sapiens
tttccataaagtcccacgttccggcaggggacccagcagcctccccaaaggccgctccgtcgtggtcaaggactggctaagtggctgcctcccgttgcaagacccccggaagaacctggaaa

SEQ ID NO: 480246 - DNA, 122 bp, Homo sapiens
tggggccaagctagctgagccgcccaaagcagccaaaatatcctgccccacccgcttctccggcaaggaaggtggcactgtgcaacctcgtccgcactgaatcctcgtcccttcccccagcc

SEQ ID NO: 480247 - DNA, 122 bp, Homo sapiens
ttcctctaggagggccctgctcgaggtctcagcctgtgagcagctcctgtgtgaacagggcggcccaaggcagaagctggaggtgagcagaaccggctccagaccagcagccaaacccctgc

SEQ ID NO: 480248 - DNA, 122 bp, Homo sapiens
ttctccagaacttgtgtctccagaggagtacgccgacttcagcagcttcctgctgctagtcgatgcagcagtacaaacggctgccgagctggagctagagaagaagcaagagcctaatccat

SEQ ID NO: 480249 - DNA, 122 bp, Homo sapiens
gaggtcctcaacaagcacgagctgcaagcgcttctactccctgcgccacatcgcctcagacgtgggccggggccgcacctggctgcgctgtgccctcaacgaacactccctggagcgctacc

SEQ ID NO: 480250 - DNA, 122 bp, Homo sapiens
tgtgctgttttccagcccccctacaccggtgggcctttgagaacgcattcctgaggaaggcgcccgcccacgtgggtcccagagcaggccacgcgcatgggagctggctatcatttcctggt

SEQ ID NO: 480251 - DNA, 122 bp, Homo sapiens
cagctttggctcaggacaagccacccatctccaggggctggcgtgtgtgcctctgctgaccgcagctgctgacctgtctcctgtacactctggatgctgtgatgcccagacagcaaaacttc

SEQ ID NO: 480252 - DNA, 122 bp, Homo sapiens
gtgtcaccaacccatgcccacagttccctggaagatcgctatggttaccgagcagaggcacggaggaagccccaagaggccacactgcaatgagcggagatcacaccactgcactccagcct

SEQ ID NO: 480253 - DNA, 122 bp, Homo sapiens
gatcctggattgagggcgctttgtaaatatccattcaggccgtggctttgcagccctgagcgaaagtaacgggaggtcaagggaaagccggccctcggccactgtctctgagcttgactgag

SEQ ID NO: 480254 - DNA, 122 bp, Homo sapiens
ccgttgatgtccacttgcagtgtgttatccctgctgtcacaggagcagtgggcgctaaggcgaaagccctcaatttcccctgtaggagtggcgagagggaagccagtctgagagtgcagctc

SEQ ID NO: 480255 - DNA, 122 bp, Homo sapiens
cagctgtcggcatccctgtctcagggacttctttgctgattcacagaggcagcccagccccggcctcccagcttacagctgccgcctgcttctcagacctgacggaatcagaaggtaggcca

SEQ ID NO: 480256 - DNA, 122 bp, Homo sapiens
gtggtcccagatgagacactgacatgcgagtgaaggcctctcctcctgggccccgggctgcgcaggctcctcactctgggcggtgtttcctgtctcagaattgacacggtgaatgcttagtg

SEQ ID NO: 480257 - DNA, 122 bp, Homo sapiens
tcacaggatgacagcagttaagacgctgcgtggaagtcacgtaacagcagcatttacaggcggcctgcctcatccgcccacactcttatcaatttgactctatcaacgcccaaaacgtcgga

SEQ ID NO: 480258 - DNA, 122 bp, Homo sapiens
cgctctgttcggcgcccgcccctgcgccagtcttttaaaccggctcggaggcggggctggcgacggcgggaggccccgccccctgccggccccgcccccagctccacttttggtttctcttt

SEQ ID NO: 480259 - DNA, 122 bp, Homo sapiens
gcttcccgcgggccaggctcggccccagcacgacctgaacaacgtctgcttcttgcaagccgccacccggcctatgggcgcgaactccacccgctcgccccctccacgtccccgcctggcct

SEQ ID NO: 480260 - DNA, 122 bp, Homo sapiens
aatctcctaccttgctgtgtcacctcctgctcttacactcagccttttgcaaagttctgtcgtcagtgaaattcttcatttccaatctcttctctgaaatacctgttgcttcttgtcaatcc

SEQ ID NO: 480261 - DNA, 122 bp, Homo sapiens
cccaatggagaggccatctgcacgggctcggatgacgcttcctgccgcttgtttgacctgcgggcagaccaggagctgatctgcttctcccacgagagcatcatctgcggcatcacgtccgt

SEQ ID NO: 480262 - DNA, 122 bp, Homo sapiens
ggatcgccccgaccctcactcctggcgtctgagtctctggcgtagcccatgctgagtgggcggctggtcctgggtctggtctccatggctggccgcgtttgtttgtgccagggcagcgcggg

SEQ ID NO: 480263 - DNA, 122 bp, Homo sapiens
tcccaaactcaggaggttcctgtcccaagaagcaatgtaaagtttgaaacgagccgagcgcggtggctcacgcctgtaatcccagcactttgggaggccgaggctggcgaatcatttgaggt

SEQ ID NO: 480264 - DNA, 122 bp, Homo sapiens
tgacctagttgtgtctgtctgggcggtgacgtttggtctgagctgacctttcctcacaatcgtgaatttgggctgtgaggatcaggccttgtcagaacccgagatgagaggagagaggtgcg

SEQ ID NO: 480265 - DNA, 122 bp, Homo sapiens
gccagacgcgggacctgggtgcgacccgggcgggaggcggcagggctcagctgtgctggacgctgcagcagcgcgggaaggggctcccccggctccatggggtgaatcggtgaggggctccg

SEQ ID NO: 480266 - DNA, 122 bp, Homo sapiens
ctggttttaagcttatttctataaaacctcatttaattctcacaagaacatcactgggaacgcactaaccctttacaggcacgaggaaactgagacaaggagagattaagtaacttgcccaa

SEQ ID NO: 480267 - DNA, 122 bp, Homo sapiens
cctccgctgacgggaagcaggaagtggcggcgggcgtcgcgagcggtgacatcacgggggcgacggcggcgaagggcgggggcggaggaggagcgagccgggccggggggcagctgcacagt

SEQ ID NO: 480268 - DNA, 122 bp, Homo sapiens
cttgcgcaccagcctaataattctatagttgagttaaatgaaggaacaattattacttcacggaaaatcaggagtcatatgaggaaggctgggaaatgaattctcttgtaaacatcctgtgg

SEQ ID NO: 480269 - DNA, 122 bp, Homo sapiens
cgtctctaacccagctcctctatggtgcttacctcctgatccctggggcgatcagcaaaccgggtctgccaccttcttttcagagagcttaactagcagaggactcaggagagcatgcccaa

SEQ ID NO: 480270 - DNA, 122 bp, Homo sapiens
aataaaaaggtaacatacatgtgtatgtattgtaacaccattaaaaaacagaaatttaaacgaagaaaagttggcttctagccctttgatctagcaaagctgacagtgtcctcacctaccaa

SEQ ID NO: 480271 - DNA, 122 bp, Homo sapiens
ggaaggagggggtgaggacgcgcgcgcccgcgctgcccctcctcccctcaggcgcgcgcccgcagccctaccggccgcccgcacggccgcgccctcccccgccagcccacctccgcttccgc

SEQ ID NO: 480272 - DNA, 122 bp, Homo sapiens
tgagccactgcactcagccctaatacagtaaatatttaatgctcagtttccatatagcgccggactcccctcagactagaaaccattgctttgtgatctacatttaaatgtataccttcatt

SEQ ID NO: 480273 - DNA, 122 bp, Homo sapiens
actaggcgaggaggtggccggtattctggatcactgcgtgtcttggggagcttgggattccgcagcttggcggccgagagcctttgtttgcctttttgagacagggtttccctctctcgccc

SEQ ID NO: 480274 - DNA, 122 bp, Homo sapiens
attttagtgtgtacctctgaaagacaagtactcttttaaaaacaaaatgccaaacatgaacgataattaatcagttccatccaatatcaaatcagcattcacacatctcctggatgggggaa

SEQ ID NO: 480275 - DNA, 122 bp, Homo sapiens
gcttgcggaggttgttgtaggggtgctcgctgaaggtcatcttcttgactgctgggagctcgctgtagccgggccagattttctcactaggggtccccagatcctgaaagacagaggtgctt

SEQ ID NO: 480276 - DNA, 122 bp, Homo sapiens
ctccgtctgcttggtttgccttcgcattccgggctggagtgggagcttagctctgaagtccggctcacgtgtttggcccctaggccccagcctcgccctcgggtgtccctcctcctgcatac

SEQ ID NO: 480277 - DNA, 122 bp, Homo sapiens
aaacacaaacagcctatcagggccaaatactcacaactccttttagcacaatgtctgtctcggagtcctcagaggggtaaaccacacctggacagtcaatcaggaatatccgacgcatcaaa

SEQ ID NO: 480278 - DNA, 122 bp, Homo sapiens
cctgcactttttactagaataggtttaacctctgtgctgagcctgtgtagacagcaaagccgtcactgcagtcagccagcaggacttggctgcttctcacgtgtggaggagacagaccccat

SEQ ID NO: 480279 - DNA, 122 bp, Homo sapiens
gcgcgcgcggggtgtgtgtgtgtgtgtgtgtgtgtgtgtgtgtgtgtgtgtattcgggcacgaagtgctctcccagctcccgccctgcccggcaacgtgcccttgcacaacctgggtacata

SEQ ID NO: 480280 - DNA, 122 bp, Homo sapiens
ttaagaactgtaacactcaccgcgaaggtctgcagcttcactcctgagccagagagaccacgaacccaccagaaggaagaaactctgaacatcagaacgaacaaactccggacacgccgcct

SEQ ID NO: 480281 - DNA, 122 bp, Homo sapiens
ccactgtccaccattctcccccaaagaaggtcccagaaaaggtgaagttccgtgtcttcacgcaacacgggcataagcagcaattatcgcacgaagtttccctagggtggtcggggatcctc

SEQ ID NO: 480282 - DNA, 122 bp, Homo sapiens
accaccccacagcccagattcggccccagacacacactcacaagggcacgtgatcacgtgcgtggtcacatggaccggcccactcagaacacactcacaaagtcacaccaaccaaggcagcc

SEQ ID NO: 480283 - DNA, 122 bp, Homo sapiens
ggaaattcagcaccaggcgggtgaagtgacttacctgtgcacagctgcactcgcagacttcggagcccccacctaattctaaaatgctgtatgtccatgaacttaataacagaaggtcaggg

SEQ ID NO: 480284 - DNA, 122 bp, Homo sapiens
gaccagcggtcgtggggaggcggacccgacaggccagggtggtcgtggcatcgagtccatcgttggtgcaaatggccgggggccggtggcggtggtggggcggggggcacggcccgcatcag

SEQ ID NO: 480285 - DNA, 122 bp, Homo sapiens
aggcgccgcgctcagaatccggctgcggaggcgcggctgtgggcctggagttcctgtggtcgcgctgtcccgggcctgagctggaaggtcagcctcccctggggcgcagacgctgacccttc

SEQ ID NO: 480286 - DNA, 122 bp, Homo sapiens
gcgaggggcgagctctccccggtgtgtgacagtgggggctattttcgaccatcccattttcgctgttggtttctaaatctctgcatttctgtccctcttagctcgcaaaggatctccttcat

SEQ ID NO: 480287 - DNA, 122 bp, Homo sapiens
gccgccgcgacacgtcccgcggacattcaggagtcccttcagtccctgcgagcgcggacccgggagagagctctcattcaacgctgaggccactggctcacagatctccccgggtcaccctg

SEQ ID NO: 480288 - DNA, 122 bp, Homo sapiens
ggcggtgggagggtcaggatccctcgaagtggaggccggggccgggctgggggcggagtgcgggggcggggggaatctcccagcgcatctcctcttttttgactctccccacggctcgcggc

SEQ ID NO: 480289 - DNA, 122 bp, Homo sapiens
gaggcactctgggccttggactctgtttttgctcacaatgacttcctaagcatgtgaagacgttgaaaaaggaagaaagaatctgagatgaattcttagtgcagacaccaaggggttaaaag

SEQ ID NO: 480290 - DNA, 122 bp, Homo sapiens
cggtttggtgcaaatcagcccgtgcaggtgtggggaagccgcttctgttcttttcagcaccggtggcagcagcagctcaggagtctcttaggttgggcggggcttgaatcaatgatgaggct

SEQ ID NO: 480291 - DNA, 122 bp, Homo sapiens
ccctggcgactgggcggtgaattccggaaacagaggcccccccaacaaccccgcgacgcacgtgctctcagacacagttacacctgagggccacccagagggcttctggcttctgtttattg

SEQ ID NO: 480292 - DNA, 122 bp, Homo sapiens
gtcagcttccggagtgaccagagcagggctgttgtcatctcactggcaccttggttccatcgtaggatcagctgggttgcatggtctaggtcctgttggctggtccacttgtcctgggctgc

SEQ ID NO: 480293 - DNA, 122 bp, Homo sapiens
ggtctagtcttccccgaagggagcttgccaggctctgcgacaggcttggaagttggagcccgggccctgggttctctcagcttccagctcaggaggcggagtgggaggagcgggcctggcgg

SEQ ID NO: 480294 - DNA, 122 bp, Homo sapiens
gagagaattcacactggagagaaaccctatgaatgctttgagtgtggaaaggctttcaggcggacctctcaccttattgtccaccagagaattcatactggagagaaaccccatcaatgtaa

SEQ ID NO: 480295 - DNA, 122 bp, Homo sapiens
ttcactattaggcgagaaagaaatacttcaaatggccctttgtaaccttctatagaaaatcgaggtactctgcatgacaaagcacaattaagctttctattcaggagttctgcagctggtag

SEQ ID NO: 480296 - DNA, 122 bp, Homo sapiens
ctgtgagaaatgtttgagctggctggacacatttcctgaaatcatttctctagtcttttacgaaatgtctgcatttatgctggaatcatagagctgaactatcattgagataaaaattccag

SEQ ID NO: 480297 - DNA, 122 bp, Homo sapiens
tgaccgttacacggaacccacctacccgagagttcctagggttgcgcagctgggggacggcggcacccagcctttttcccgcttcggggcgccggggctgcgactgtggccaagcacttccg

SEQ ID NO: 480298 - DNA, 122 bp, Homo sapiens
ggtggttgctttcctccaagtttaattctctctgggaatgagagaccctcaacccctgcgcgccctggcctactttcaagaggggaagcccagagaagatggatgcacctgtcctgaccgcg

SEQ ID NO: 480299 - DNA, 122 bp, Homo sapiens
agtgggtgtggacgtcaaactcgctgccggccagggggcttgccctgggaaccccactcccgctgaaggccagcagtgagagaggtgggacagcagtttctgcatctgttcgcagcaaggca

SEQ ID NO: 480300 - DNA, 122 bp, Homo sapiens
aatggcccaagggattcctggagtcactcctgggctgccatcagcctcatcaccaggacacgtgctctgcctcccacttggccggtccccaaggagatgattcagcctctctcctcctccct

SEQ ID NO: 480301 - DNA, 122 bp, Homo sapiens
ccctaggggtagaacctcctcgcccgggcagggcacccagtacacagatgtttcagtttacgcctgagacttacagctgtggaaataccacccttcaaaacattatgccttttttgtttcta

SEQ ID NO: 480302 - DNA, 122 bp, Homo sapiens
ccccagctgcctggccaggattgctgggccttgggagcaattgtttgctgagccattcagcgggcagctccctcatgggcacacagccccactgcctgacaggctgtgtgcaaggggacagg

SEQ ID NO: 480303 - DNA, 122 bp, Homo sapiens
tgccctccaggttgcccagaccgctggagcctctgcgactccacgaccggctgcttcctgcgaagtttcacaaacaaggttatttaggaccctcaaggtttctgagggtttaagttttaggg

SEQ ID NO: 480304 - DNA, 122 bp, Homo sapiens
attgtacatccacccagaaatccatggagcactccacacacattctgaggattgtcagaacgagcaacggtcttgcctttgcctggacattctaccttgtggtctggcagcagcagaccatg

SEQ ID NO: 480305 - DNA, 122 bp, Homo sapiens
atgatcaccacataacctttcttctttctcttgatcttcttcccagggtccttcttcagccgcttccgcttctggcttttcccacccctcactctccggtttcggtccagcgagggctctcg

SEQ ID NO: 480306 - DNA, 122 bp, Homo sapiens
gcctgccgggcctggcgtttcccagaaggcccagcgccgggaaggggtttgcagctgctccgtcatcgtgcggcccgacgctatctcgcgctcgtgtgcaggcccggctcggctcctggtcc

SEQ ID NO: 480307 - DNA, 122 bp, Homo sapiens
ccggcgctccctccgcagcggcggactgaggcctaactggatagcgccaccgtgaaccggcggccaatcacaggcctcgatttccttacctgtaaattggggttgagctacccggctttata

SEQ ID NO: 480308 - DNA, 122 bp, Homo sapiens
ttttacgtaggggtatcagggaaggcctcacttgtaagatatggcactgttacagagacacgatgaagtgaggaaactagttagccaggcagactatttggggaattattccaggctgacgg

SEQ ID NO: 480309 - DNA, 122 bp, Homo sapiens
cgtgagccactgtgcccagccacagaaggctctttacttacatcagccgagtgcccccagcgctgcaggcccaccatggagatgggcctaggcttctacccgtaaactgtactttttccccc

SEQ ID NO: 480310 - DNA, 122 bp, Homo sapiens
cgcaacaagcgggccgccccagccacctccgagggccagagcaagcgctgtaaaccctgacggtgggcctggcacacgcctgtattcccacaccaggtcttccgatcagtggtgtctgtgaa

SEQ ID NO: 480311 - DNA, 122 bp, Homo sapiens
tagacagaagagtgccaaggttctttgttcataaaccttagttttcttatctgcagaatacggatttaaaaacctaatcttaatgaggattagattatgtttgtttcagagtgagagcatat

SEQ ID NO: 480312 - DNA, 122 bp, Homo sapiens
cgactaggcggggattacccccggcggggcaggcgggagggtcctgctctccaccccatgcgcctcgggaccgctcgccctggccgaccactgcctcgtctcctggctccccaacaccagcc

SEQ ID NO: 480313 - DNA, 122 bp, Homo sapiens
caaactcctgacctaaggtgatctgcccgcctcggcctcccaaagtgttgagattacaggcgtgagccatcgcgcccagcctctgtgtattatttcttacagctgcttatgaatctagaatt

SEQ ID NO: 480314 - DNA, 122 bp, Homo sapiens
aagaccgcggacagccgaggcctgagcaggcggactggagggacaggggtttggccggggcgctttaggagccagcacccagactttcccaggcggggagggtcccagctagatcccaccgg

SEQ ID NO: 480315 - DNA, 122 bp, Homo sapiens
aaaagaacaaggcttccatagcgtggaagggaaccggagcgcattgcagctgttggctcccgtggcctgctttaattcccttaactagccccagccacatcctactgattggcccattttac

SEQ ID NO: 480316 - DNA, 122 bp, Homo sapiens
agcactcaatgcagagcagcacgcccaggttgatgctggcccagcgggggtccggctggccgcagtcgccgcactggctgttgccggccacactctgcacacgctgcagcacactctcgccc

SEQ ID NO: 480317 - DNA, 122 bp, Homo sapiens
gatcagataacacttagttcatgatgagcagctcaggtcacatggtaacttgatgacccacggttaactgttcagtctctgcttaggcccagcaagccaaacgttgtttctcaagaggacag

SEQ ID NO: 480318 - DNA, 122 bp, Homo sapiens
gcccccaccccgggcccgcgctgacctctagctccccgttctcggcggcgtcgtacagcgcggtcccgccccacaggtcagccgagatctccccgccgtgcagcagcagccagctgagcacc

SEQ ID NO: 480319 - DNA, 122 bp, Homo sapiens
tcagtttgcacacaggcggtgtgttcgctcggagagccagttgttagccatgtagcagcacggcaccagtcggggggcttccgggagcaggcaccagtcggggggctcccgggtccgtgagg

SEQ ID NO: 480320 - DNA, 122 bp, Homo sapiens
gctggctccgaagcaacatttgtggtcgcgcggggcccctcccatgacctctctggaacgcgcctagctgggacgctcggacccagaccacagctcttggccgcgacaggggcgccgggact

SEQ ID NO: 480321 - DNA, 122 bp, Homo sapiens
caaactagtggtaaatttgcttctgtctttttttgcttttgcagctcaagcttttaaaatcgagaccaccccagaatctagatatcttgctcagattggtgactccgtctcattgacttgca

SEQ ID NO: 480322 - DNA, 122 bp, Homo sapiens
gaaccctcgactgggggcagccgcaccagtggacacggcggggtaggattaaagttgaggcgtgctcacagacacttgtctggtgtgagcccttggcatatagatggctgcgagtgaagtgg

SEQ ID NO: 480323 - DNA, 122 bp, Homo sapiens
tgacccgggtcggctgtggtgtcggcgggaggcatgggccaggaccacagctgccctcgccgttgggactccccgcacaggagcccgaaccccacccctgggccgtcccaatctggggatcg

SEQ ID NO: 480324 - DNA, 122 bp, Homo sapiens
cttggagaggagccgctcctggcaaagccagcgccctatttctgaacgccgcctccgttccggactacacttcccaggggctattgcagcggaggacacgcccacttccggaaaggacccaa

SEQ ID NO: 480325 - DNA, 122 bp, Homo sapiens
ccggatagacttccgcgcaggggcggggcggggcgaggaggcggcagcgcgtttaagtgacgtcttggctgtccgcgccggcagaggcgagggttctggggtttctgggactgtctggtgtg

SEQ ID NO: 480326 - DNA, 122 bp, Homo sapiens
aacgttagcgcatgaggacctaaggaaagctggattgctgagttttgttaataaacgagacgttaaagaatgcctgactgtagcggaaatctcccagtttttgaagctaccttctattaaag

SEQ ID NO: 480327 - DNA, 122 bp, Homo sapiens
ccctcacctttcctttactctctatgattggaggagagtcagagctgctccaagagcatgcggggtgttgtagttctaagaagcgaggcttgcccgattctgtgcctgtgcgcatgctgaaa

SEQ ID NO: 480328 - DNA, 122 bp, Homo sapiens
ccgagtcctgtttgggtcagtttgttaaaattagtttgtcctccctggagacacggccaacgcagccttttccgtggcaggagtccaaacacagtctctgctgctctccacgcacggcaatg

SEQ ID NO: 480329 - DNA, 122 bp, Homo sapiens
cccaagtcccacttccctcctcatccttcaggtccaagcagaacgtcaagtttgcagcttcggtgaaatccaaaaaaccaagctcctcctctttaaggaactccagcccgataagaatggcc

SEQ ID NO: 480330 - DNA, 122 bp, Homo sapiens
tctgatttatcagtatgaatgtccatcaaaagaaactgaaccctcaaaggcagccgggcccgtcactccggcagggaagcagctggttaagaataaaggggtaggactcgtgaggacgggat

SEQ ID NO: 480331 - DNA, 122 bp, Homo sapiens
tctgcatattaaggtgacaattcatcttgattctaactgctgcattttaaaattattttccggctttctgaatttcctgccacacaggtctgacagctgtatctccgctccagctcctggct

SEQ ID NO: 480332 - DNA, 122 bp, Homo sapiens
gagcctgggagtgtttgtttaatcagttaccgataaagttttggttaaaaaaaaaaaactcggtttgttccgtttcaataaagctttgctcaaacggggagctccgggagctcatcgcgaga

SEQ ID NO: 480333 - DNA, 122 bp, Homo sapiens
agcacggagatgcctctcacactccgcggcttcaccacccacctggaggggactagaattcgaagtgcccgcgaaagaagcaaggttcatctccgcccggctttaggacccgggggctccgg

SEQ ID NO: 480334 - DNA, 122 bp, Homo sapiens
ctggaccctactagggcagctccggcctcactaactggggctctaactccctctggggcacgtacacctccaaaggacggagcccagagcccccactggggcgttgccagaggccacatcta

SEQ ID NO: 480335 - DNA, 122 bp, Homo sapiens
acccgaactaatcattcgaactgcttccaagtcctttaaaggagaatcctagcgagggtccgtaacacttccccttaccctctgcctgggttcaaacttcaactcccagggttcgcccaagt

SEQ ID NO: 480336 - DNA, 122 bp, Homo sapiens
ctgaaacgatattccaaactagtctcccttcatgcagtatacacagtctcagggttaacccgggagaggaaattttaaatgtacaaagctgtcattatcttagatcataaccagatactctt

SEQ ID NO: 480337 - DNA, 122 bp, Homo sapiens
agccagcaattgaaacgtttccaaaacggtctatttatttgctcccaataaatcgatcggcggtgattaaagaatcgatgtggcctgggtgggcgagtcgcttgaggggagggattgggggc

SEQ ID NO: 480338 - DNA, 122 bp, Homo sapiens
tggtagaagtgaggggaagtccatttgggtggagaaatattcagcacaggcagtcttgtccgctgggccagctggggctaggctttctggggagcagcaatggcctggcaagttgttgagtg

SEQ ID NO: 480339 - DNA, 122 bp, Homo sapiens
atccctaggccgcctgtctcctacccatacttggaggccccgctcagacggtcctgaaaacgtctgaaaggcggttcctgccagagtccctgctacctgttacctccacccctatttagtcc

SEQ ID NO: 480340 - DNA, 122 bp, Homo sapiens
tccgctgtagtgttctgagttcaagttgcctcggaagtcccagttggggatacgctctcgcgcaccaggtacgcctggtgtttctttgtggtttttcggattctttttggggagtgcgggga

SEQ ID NO: 480341 - DNA, 122 bp, Homo sapiens
aggcagaagaatgtcccctggaagtggtctgagctgcttcctgtggtggccccattcctccgggtgggggatcctatttttagagggccaccattgccatgaaggtccagccggctcatcgg

SEQ ID NO: 480342 - DNA, 122 bp, Homo sapiens
ggccccgaaaagacgcctgcgggagatggcacacctagctaggaccccatactgggcaggcgatccttccgagcatgagcacctggcgctagcgaaccacaattcccagcacgccaggcgcc

SEQ ID NO: 480343 - DNA, 122 bp, Homo sapiens
ggctcatggtgatgacaaattcggatgcaaaagtaaacaaataggcccccatcagcccatcggggcagcagccctaggcagtgacagttaaacagttgcaaagacctattttcagaggcatg

SEQ ID NO: 480344 - DNA, 122 bp, Homo sapiens
tggaataaatcagagtcccacttaagaccttagcacatgcacacgttcatccacttgttccgtactcattagcaaagctatgtatatttgtcagaaaactcctttctttggataacactgtt

SEQ ID NO: 480345 - DNA, 122 bp, Homo sapiens
cattagccattagagaaatgggaatacgaggctttcgttgttcttcgcctcccactagggcgggttgagggtctggctccagtagccccgggtgcctctcactccttgggcgcaatgctact

SEQ ID NO: 480346 - DNA, 122 bp, Homo sapiens
atgccctgttgctacatcaacatgatggtaaatgcttcttacaaaacctgtagcttccttcgcatgcatcctgtaactcctgctgacttactgaatttgtgagtcagcataatggtcaagaa

SEQ ID NO: 480347 - DNA, 122 bp, Homo sapiens
agaggccacagtaaggcccatccgaggtcctgaggagatcttttctctctctccccgttacgaaagtcacacgggtgaagccaagtgcaactatgcagagccgagagagtcccggcaagccc

SEQ ID NO: 480348 - DNA, 122 bp, Homo sapiens
tcggcgggcgtgggggtggttcttggcatcacgacgagttgtgggtctctgtgtcctctccgccggggctgtcatccctccctgtcctgccggctcggccccatcccacctgctcccattgg

SEQ ID NO: 480349 - DNA, 122 bp, Homo sapiens
aggcactgcgggaccgaggcaaaaataggcccgagcagatggccccaagagctcctgcctcgccagggccagctgggggccgacgacaggcggtggggacacgtccgcccacccccacccta

SEQ ID NO: 480350 - DNA, 122 bp, Homo sapiens
gtggctgccccgaacccctcaaggcggcctccgcgggctgtggctgaagataattttcggcgggcgcggactaacccggcttccctttgtggagttgtggtgagaaaggtgttttgttgtgc

SEQ ID NO: 480351 - DNA, 122 bp, Homo sapiens
gaaagtcattcccctcccacctgtgagcccgggacaccggttcctttgcccagaggcagccgctgctgctggttgtcgtgtgtctggtccagagacactctaaacatcgtttacacaaatgg

SEQ ID NO: 480352 - DNA, 122 bp, Homo sapiens
agtgactcggctcacaaatgctgagctgaggcgtgttcttgactgtgcaccccaagccctcggccttggcctttcccaggtgggtgcctgttgaggcttctgtgtgccatttggagaagtgg

SEQ ID NO: 480353 - DNA, 122 bp, Homo sapiens
ctgccggcggcgcaacgggcggggcggggcctcaaggggacggggccacaaagggtggggcgggggagaacaggtgggctggagctgggcctcggcgcccaataggcagaaagaaagcctcg

SEQ ID NO: 480354 - DNA, 122 bp, Homo sapiens
tggtctcatttgggggcgttcgggaggtttggggggcatcaaccccccgactgtgctgctcgcgaaggtcccacagccctgagatgggccggcccccttcctggcccctcatggcgggactg

SEQ ID NO: 480355 - DNA, 122 bp, Homo sapiens
atagctcttcttgtttactttgattagagttagcatcgtacattttgttccattcatttacgtttatttgtctttatatttgggttgggcttataaataacagttgtgtcttgttttttgat

SEQ ID NO: 480356 - DNA, 122 bp, Homo sapiens
cttcaaagcttaattttcattttcagggtattgtgacaaatgcaattaaatacagccttccgtttcttcatttaaaaattattgactgtcggccgggcgcggtggctcacgcctgtaatccc

SEQ ID NO: 480357 - DNA, 122 bp, Homo sapiens
atggcttcttctctcccgtcaacatctgggatgtatggatgacaaatgaaatacagactgcgcagttaaatttgaatgtcataaacaatgaatactcttttttagtataaatatgtcccaca

SEQ ID NO: 480358 - DNA, 122 bp, Homo sapiens
aggcatgaaccctttcattcattctggcttttagccagaggtgttctaattggacttgtccgcgcagccctttgacttattcagtcttattggtcccctactattggcacgatcctgatgtt

SEQ ID NO: 480359 - DNA, 122 bp, Homo sapiens
tctcttcctccctttcccatgcaggtggctgctgctggggacagtgaccgtggggttcctcgcccagagcgtcttggcggtaagtcctggctcccgcgcttggacttgcgcgcccgagagtg

SEQ ID NO: 480360 - DNA, 122 bp, Homo sapiens
tcttgcaggcacagaacctcccggggaagatggagggattattgccctgcgatcctgcttcgcacgcaagccaggaagtgtgtgtctgaactcccatctgtgagcgtgtcgtcgaggtgtgc

SEQ ID NO: 480361 - DNA, 122 bp, Homo sapiens
tggggcctggtctgagccccgcctcggtccgcccaccaagtttaaaggggcggagcgaggcggggctctggccatataaacagagggacgcacgcccatgcggctgtagacgccatgatgga

SEQ ID NO: 480362 - DNA, 122 bp, Homo sapiens
cagggaaggaagtgaaggcaggctagtgggacacaggtgtggaacagctccccgtgctgtcggacacactcgtccagggcttacaggtgggagctattgccctggaatggctgtgcactaat

SEQ ID NO: 480363 - DNA, 122 bp, Homo sapiens
tttgtccaaaggaagttgttctgaaaggctatgacctaagtctttaacacaaagttcaggcggtagatgtcacttctctcacccatttaacaacaacaacaaatcaagattcagatcccgcg

SEQ ID NO: 480364 - DNA, 122 bp, Homo sapiens
tcggggtaaatacggtagaacgcggtaaatacggtagaccggggtaaatgcccctccaggcggacaccctttgagcaatgcttgcgactccctgactccacttcctcatcctcacccagccc

SEQ ID NO: 480365 - DNA, 122 bp, Homo sapiens
ctcaaggtgcttactgagctactgaccagggctgacagattgggaatcatctcagacaagcgcaaccagcaactaaagaggagagagagaaaatcaagaatcctggtgagatgcttgcgtga

SEQ ID NO: 480366 - DNA, 122 bp, Homo sapiens
cagggcaggaagccagaatggtccctttgctccacatcatcacctgaaacatgcctttcccgcaaagcaccggtcacaagcattccaagattctgcaaagatgtttccttaatgggctatat

SEQ ID NO: 480367 - DNA, 122 bp, Homo sapiens
gggcccgcctgacctgtctgaactcccctgagtggctcttgaactcgctgaagcgggcctcgtcgctctgcaggaagtccctgatggactggatgagctgaaggttcctctcccggaagttc

SEQ ID NO: 480368 - DNA, 122 bp, Homo sapiens
gcccgaccccacagaacctcgcgggccctacactccccctgccgaggttgaagtccccagcggttggaagatcggccaattgtagtgtatttatcagaaaagtgactcatccttgatcctca

SEQ ID NO: 480369 - DNA, 122 bp, Homo sapiens
gaacggtgagctggagctgctctgtgcaagccaaacaaaagaggactctgaattgggccccgtggtgagccagagcaggactggtgggggcagctgggactggggcctgggcaagggaaaga

SEQ ID NO: 480370 - DNA, 122 bp, Homo sapiens
cgcggttgctctcactgctgcacagccccaggtgcctccgacgggggcccgggaagcccgcggttgctctcactgctgcacagccccaggtgcctctgacaggggcctgggaagcccgcggt

SEQ ID NO: 480371 - DNA, 122 bp, Homo sapiens
aaagggtgattcttcatggaattcgaatcttaacaccggaataaaagggtagcctgctgacgacgatcacagggaggacaaggggtcacccccactttcataacatggcctgacccttttct

SEQ ID NO: 480372 - DNA, 122 bp, Homo sapiens
agtcactgagacaagatcaacttgtagatatgttccccttccttattgagatataacttacgtagagtgaagtgcctaaaatgtaactggctaatctgtatacgtgtatacgtccatgcaac

SEQ ID NO: 480373 - DNA, 122 bp, Homo sapiens
acccaacggggacgcgctaagagccctaaaggccctgctttcatcccaaagaacagcccccgcctgcgtagtttgtagccggctctatgaggtgagaacacattccccgctagcacagaaat

SEQ ID NO: 480374 - DNA, 122 bp, Homo sapiens
cccagggtggggctcagtgaaggccactgtgaggaggctgggtgcacacagcgggggaaccggtacagagggggcctgggtcagagggggcctgggaggagggaagacggggatggggaagg

SEQ ID NO: 480375 - DNA, 122 bp, Homo sapiens
ctcatatccgcctctgcgccaggcagtcctccaggaggcccagctcctatcgatagcaaacggtatttagagaccacgatctaggtgaagggattgcccatcgctcttgggtgttactgctc

SEQ ID NO: 480376 - DNA, 122 bp, Homo sapiens
atctatcatctccaatctccatctccgaagttatgcccacttcctggaagtttggaggcacgggaactacattgcccaaaaggcgcagcgccgcgaggcggcgatccctgaccaatgaaaag

SEQ ID NO: 480377 - DNA, 122 bp, Homo sapiens
tgctacctcctgaccttgacgggcaactcggcgctggtgctgctggcggtgcgcgacccgcgcctgcacacgcccatgtactacttcctctgccacctggccttggtagacgcgggcttcac

SEQ ID NO: 480378 - DNA, 122 bp, Homo sapiens
aagatctgccagaggtcggggtgcaggtgctccgtgtcgtatctggaagtggccaggagccggccaaattcatgctgattgctcagatggaggaagatgccctgtagtggggtgggggtgtc

SEQ ID NO: 480379 - DNA, 122 bp, Homo sapiens
agggacaggcgggcgacttcacaacatcatcactcggcgacctcggttctgcggcgacaccgggtcaatggcagcccccacacaattggggaagccaaaggagagccactctcccagcggcc

SEQ ID NO: 480380 - DNA, 122 bp, Homo sapiens
aatggtcagtccgtagcagaatttctactgcctaggaaatagttacacactctgctatatcgctatcatttacttttcattctttcttagaaattcagtctctctgcctacatttcccatct

SEQ ID NO: 480381 - DNA, 122 bp, Homo sapiens
cattagatgccatctgactctctctgtcctgacaaccagaagtgtctctagctatggccacgtatccccaggttgagaactactgctgtaaagggttagtagttattattatctgaatcacc

SEQ ID NO: 480382 - DNA, 122 bp, Homo sapiens
gtcttttttctttttttagtttactatagcttttctgctaaggcttctatctcttattcacgaagtcaagaacatatctttctttttttgcctccacataaccaacccatagctgagtgcct

SEQ ID NO: 480383 - DNA, 122 bp, Homo sapiens
gcccacaagtgaagctgtaagtcaaccccaccagtccaactccaaatcccatgtctctgacgtgcctgggtgggaggtgggcccttggagatcagaccctgcttctctccaggagaaccggg

SEQ ID NO: 480384 - DNA, 122 bp, Homo sapiens
ccccggcccctctagccccgtggtggtacaacgcgaaggtgtgggaaggccgcgataaaccggaactgcagcccgccggacacctccggcttcacttccgtaagaggagaggagtgtacggc

SEQ ID NO: 480385 - DNA, 122 bp, Homo sapiens
cccgccgtttaaggcactcaggcacggactggctttctcccgtaacagcggctttgccttcgcattcccacccctgcctccggggcagctaaaggctgcgttttcagggactgtcctggatc

SEQ ID NO: 480386 - DNA, 122 bp, Homo sapiens
tttaaccagcaaggctgcccatccaacggttgctccctctgctccctggaagggcctcctcgtgggcgttctgtacctacaggtcttgttccgttctgggaactgccagtggtggcaagagg

SEQ ID NO: 480387 - DNA, 122 bp, Homo sapiens
tgtacaggcaggatgccgcttcataggagaccctgagtggcttcagctgggggtcatagacgctgtccctccactggatgttaataggagactgccgggtgccccctggcacggagaccggg

SEQ ID NO: 480388 - DNA, 122 bp, Homo sapiens
gagactgtgatttccagcaatttattcatttcagaaaaatgctgctgctactcagatgcccggagaagttcattagaacaggattttcctgtaatgcctccaggtcaccaggtcactgcagc

SEQ ID NO: 480389 - DNA, 122 bp, Homo sapiens
gccacggggaaaggagcgcggcgcctttaaagcaagaggcgaggaacccccgccaggaggcgtgtctgtctctgccgccgccgccgccgctgctgctcctcggtcaccgtcttcgccgctgc

SEQ ID NO: 480390 - DNA, 122 bp, Homo sapiens
ggccggggatcgtgcttctcgctcaggtccagattcccggcaaccaggccggcggaatcacgtgccatgctccaggccagcgtagtcccgcccatcttccagctgagcgtaccgggaggctc

SEQ ID NO: 480391 - DNA, 122 bp, Homo sapiens
gttgcagtcttggcccatgccccaccgcagcctctggaatagctgtctgcaggccaggcacggtagctcaggcatgtcgtctcagcactcttggagaccaaagcaggctaatcacctggagt

SEQ ID NO: 480392 - DNA, 122 bp, Homo sapiens
ggggaaggcggagggaacacgtgggcacattgagttgcacgtggacgcggagtgcgcaggcgtgcgctgaggccaggagggcgcactggggattggaggcgagggaagtgcagggcgcatcc

SEQ ID NO: 480393 - DNA, 122 bp, Homo sapiens
agcgactgcagcagcggcggggaccccattgactgtccagccccgagagcggcaggagcgcggtggatcctggctcggaccaaggcctctcccctgcgccgactgcagaccaaccctccacc

SEQ ID NO: 480394 - DNA, 122 bp, Homo sapiens
cggtctttgtacaccttcatggggtcggccataagcccgttcatgttgatgaacttgatgcgctgctggtcagcgtcgtacagcatgggcgggatcacggccagctggcgcatctgcttctc

SEQ ID NO: 480395 - DNA, 122 bp, Homo sapiens
cggaatgatgcctttccctgtgccgagaaggcaggcgctggtctgccgtgtctcccttgccgcagctagtaaacctcacttctttgtgggtggacaggtgtatccctggtggtctgtagcaa

SEQ ID NO: 480396 - DNA, 122 bp, Homo sapiens
cctcccccttctccacaccctccctcccccacgcccccacccccggtgtcccgtctgagccgccagcccccatccaaccggctaccgcgccgtcatccagcagcctctactggaaagacaac

SEQ ID NO: 480397 - DNA, 122 bp, Homo sapiens
acaacatgtgtgtttgaacaatatgaaatcagtgcatcctgaaaaagaacagaataatggcgattttcagggaacaagggaagatagccctaaggtctgactgcctgtggggttgggcagaa

SEQ ID NO: 480398 - DNA, 122 bp, Homo sapiens
cccatcgcccctcgcgggccccctagatctctgcctcagcccccctgtttttgcacccaccgcccgcctgcagctccgctgctgcgctgccacccgggctccctattcccaccccacctcct

SEQ ID NO: 480399 - DNA, 122 bp, Homo sapiens
caaagagatgcagaatgcataagatgaacattgcatgaccggatcattttagtgtctttgcgttaaaaaatcattgcaaaagtattctgaactgtcaagctgcccagtcagatgggctgttg

SEQ ID NO: 480400 - DNA, 122 bp, Homo sapiens
acataagagcccatggatatggagggccaactgtataatgtaaaaaaattccttctcatgcgctagtttccagttttcatcctttgtagataaccaggggcaacagtttgatataggtcttt

SEQ ID NO: 480401 - DNA, 122 bp, Homo sapiens
ctcatcaccatgacaatgcccctcacaggacaagctgttctaggggcccacagagggcaccgtttgccctgtggccttagcagtatcagccttgctcagggccagagccagccagcgggtgc

SEQ ID NO: 480402 - DNA, 122 bp, Homo sapiens
gggaggcggagcttaggacgggcccacgtggggaggggcccagggtccgggaggcggtgccgagtcccggctgggctgcgctcaggaggcgggccctgggaggcggagcttagggaggggcc

SEQ ID NO: 480403 - DNA, 122 bp, Homo sapiens
aggcaaagccctggattccactgtcctgaggtctctctcacctctgctgttagaaggttccggaagctggcttcagggattataatgaaaaagccccccatatttcttcatctggcctcaga

SEQ ID NO: 480404 - DNA, 122 bp, Homo sapiens
ggggctgcggcaacgtggccagagcaggaagaggcggtaaggaggctccgcaagagccttcggaggcagcagggccccggacaccgtgtcttgaacctgtggcctccagcctgtgagaggcg

SEQ ID NO: 480405 - DNA, 122 bp, Homo sapiens
ctgaggtgggagcctggaaagtcgaggctgcgccactgcactctatcctgagctacagagcgagaccatatctaatgtgggggggtggggtaagaggaagggggagcggggagagggagaga

SEQ ID NO: 480406 - DNA, 122 bp, Homo sapiens
gggcacaagggatagcctagagtttgagggaaacacaggcctggtccccacccctctacccgagaactagctaggtgaccttgggcagcgactaaccagtttctacatctgaaaaatgagac

SEQ ID NO: 480407 - DNA, 122 bp, Homo sapiens
ccctaaaccgcaccccaagcaaattgcacacacggctttcccggagtggacaccagagggcgctgagctcggccgctctcagctccggatcaggattcgcgcctgggtccttaggacgacgc

SEQ ID NO: 480408 - DNA, 122 bp, Homo sapiens
cctccagccccaacgctctggccatgcgctctagcccagaaaggagcgtccacttgggttcggcgacttgcctccgctatccccctgaccagtccggctccccgcagatgtacgtgactctc

SEQ ID NO: 480409 - DNA, 122 bp, Homo sapiens
gcctgaagatggtgcgagtcctgggggtgggtgctgttagaggtgtctgagtcccgaaaacgcctggaactctctgagggaggacagtttctggactcttcgttagggatgcgagaagggat

SEQ ID NO: 480410 - DNA, 122 bp, Homo sapiens
agtctcgctctgtcgcccaggctggagtgcaatggcgtgatctcggctcactgcaaactccgcctcccaggttcaagcgattctcgtgcctcgcctccaaagtagctgggattacaggagcc

SEQ ID NO: 480411 - DNA, 122 bp, Homo sapiens
gactggcccactcttcctctgcctcacgcctgctttgaccttagaagacagacggcagctcgcgttgctgggctgagattctccaatggacgtgaatttagatgatgctgttgccttgggtg

SEQ ID NO: 480412 - DNA, 122 bp, Homo sapiens
cacacagtacagcatcatcccttgtctcatgcagcttccagatgtctcattggacattcacgaaggaagggtaatattcaaaatgttttgccactggtactgtaatataaattagtatatgt

SEQ ID NO: 480413 - DNA, 122 bp, Homo sapiens
tcagccttcgtttacatttccttctactgaacacagcaatgcccattggtatctctgaagcgtaatcgcatcttaggtcggtatttctccaaataaagcagctgtttggaattgaacgctcc

SEQ ID NO: 480414 - DNA, 122 bp, Homo sapiens
gccaggtgaggggcggggcgggggtccgtctcccggtggggacttcggggaatcgggggtcgtttcgcctccctgagcccatttccagccctctgtccccgggatccccagaccccttccac

SEQ ID NO: 480415 - DNA, 122 bp, Homo sapiens
aagaggaatgtagaagaaaattacagggccaactctgtatgagtctcctggtgcccgactcgacacgtgagactgagtcatcggtccaggaggaggtggcccgctcaggccatgcggtcact

SEQ ID NO: 480416 - DNA, 122 bp, Homo sapiens
gtctggctttttttttttttttttcaaaaaaatgttggttgcaacctattaaattgatttcgtgacacactagttcataaccctcagtttgaacaactctgacctagacgcctgccaagtct

SEQ ID NO: 480417 - DNA, 122 bp, Homo sapiens
ggaaaggctctgcccaagccttcagggaggcagcagcgcccggtgcacagttcctaagggcgcagaactccgggatgaacaaaggcaaggaaacggctgtgtaaaaatcagctctactgacg

SEQ ID NO: 480418 - DNA, 122 bp, Homo sapiens
cccccactcacctcccccggggggcgtggtgagtcgcggtctgttctcacggacggtccccgtccagcctgcgcttcgccggggccctcatctgctttcccgccaccctatcactcccttgc

SEQ ID NO: 480419 - DNA, 122 bp, Homo sapiens
cgttcctcacttgcagcagtctttgggagtctttctgacagcgcgggctcactaacccggcggttccgcagctgtgtttgggagacttgggggcgcattagcctggacagctccctgatcgg

SEQ ID NO: 480420 - DNA, 122 bp, Homo sapiens
tgtagagagataggtgatgcaggagggaaagctggattggaaaagggagagttttgtagacgggctacactcattgtggctttgaaagagcagagccggcagcctctagtcatcatttggat

SEQ ID NO: 480421 - DNA, 122 bp, Homo sapiens
ctgcgcagaggccccggacccgggtcgcctcctggtgcgccgtctaagctgcctgtggtgcgccgagagcttgctctaccactgcctgtcggacgccgagggcgacttctcggacccgtgcg

SEQ ID NO: 480422 - DNA, 122 bp, Homo sapiens
tggccgcctgagccaaggctgccgcggagccagtacagtcggggccgctggctggaagggcgagcttcctaaggcggggggaagcccggcgccggggccgggtaggaaaggcgggggagggg

SEQ ID NO: 480423 - DNA, 122 bp, Homo sapiens
ctcccacctcatctatgtgatgcatgaaaacagactcaccggcttctgaggtgtgatccccgcgctggaaagctctaactctgcgagccccaaggcacccctccccccagctcaggccagct

SEQ ID NO: 480424 - DNA, 122 bp, Homo sapiens
ttgtccgctcgcctgggggccccggacctgcactggcgggagaccgcgaaggcgcggggacgcagagggcgaagcttggtaccctgcagctactgctcgcgaggagtcccagcttaccctcc

SEQ ID NO: 480425 - DNA, 122 bp, Homo sapiens
ccctgcagggccctgattgacagaagctgtgttcctgcctgggacaggcggcccgaaggacgtgtgtttggctggctcagccctttgcttcagggcttccttgcggtgctggcacgtggccc

SEQ ID NO: 480426 - DNA, 122 bp, Homo sapiens
tagaggccttagaataagcaccaagaagtgaaactggacaatcaagcaggggccagcttacggagggtcatgtgtatattaagtaaggagttttaaacttcatcctatacaaaatcactaaa

SEQ ID NO: 480427 - DNA, 122 bp, Homo sapiens
agccgacccggcgcctgattgctaaagccctctcagagctgctcgggatatccttctgttcgtagtgcgagtgtacttacttttttttttttttttttttttttttttttttttttttgaga

SEQ ID NO: 480428 - DNA, 122 bp, Homo sapiens
cctcaggcgcagggcactgtttgggcattgcctagagatccgacaccccgcccagatcagcgcagggaggcgaaagcgacagccgggcgcgggaggagaccagggcagctgtcccctccgcg

SEQ ID NO: 480429 - DNA, 122 bp, Homo sapiens
agccccgaggggctggttcctcaggaagcagcctgcctctgtttgaaacaggctcaccaccgcctgaggcagtgcgtgtagctccttttaaattctttgtattgagtagaaatgtattcccg

SEQ ID NO: 480430 - DNA, 122 bp, Homo sapiens
ctgttgcgacctacacttgttcttaacaaaaccgaaggaagcctgcataaaacttctccacgtctcattttggcagccttgttactgcctcttccttgtgggccagatgaaatcaagccaag

SEQ ID NO: 480431 - DNA, 122 bp, Homo sapiens
ttaaatacagtgcggcttccaaatgtgccagccggctcttgctcacagcgacagcaccagcggtttgctgccctcaggtcttggttaccatgtgtcaggaacttcaaagagtgtggcagggc

SEQ ID NO: 480432 - DNA, 122 bp, Homo sapiens
ggccccgaggaggtcatggtggggagcgggcccagacagcacccaggatcctgggatctccgctacgcgcctggatcccagctccggaggggagctctggaaagggggcgctcgggctgctg

SEQ ID NO: 480433 - DNA, 122 bp, Homo sapiens
ccattctttactggacctgccaacttcgcgcagggttggtaacctagcaaccaagcaacacgagcagtgacttccggtacccggacttgggttgtccaatcagctcagcgaagccgccgcag

SEQ ID NO: 480434 - DNA, 122 bp, Homo sapiens
tacagaagatggctgaatactaccggccagggcctgcaggaagtgggggctgtggttccacgatagggcccttgccccatgatgtagaggtggcaatccggcagtgggattacaccgagaag

SEQ ID NO: 480435 - DNA, 122 bp, Homo sapiens
gacagaggctgggaggcagcgtctgggtccctccggcccgccccgccccctcccctggggcgcagcccctacggacccgcctcctcccggagccaccgtccccgccgccccgccaccttggg

SEQ ID NO: 480436 - DNA, 122 bp, Homo sapiens
caatcttcttgtgggtggaaagtggctatttctaatccatcattttatcattcattgctccgagcatagaagtgctgtccctcaactttgccgtggcagtttttgttgttgttgtttagaga

SEQ ID NO: 480437 - DNA, 122 bp, Homo sapiens
agcgcttttggaagcggcagaaacatagctcctgagagcgcgggacttggacacggacctcggcgggcgggactgggcggggcggggcatcagaactcaggtgttttttatttacgcgtcag

SEQ ID NO: 480438 - DNA, 122 bp, Homo sapiens
ccatgcccaccatcacaccttggtgcctggggcgccccacgatggatgggaagacggccccggaggcatcgtcgcctgcgaagctggtcttgcacatacaggagcctttgctgactacaagc

SEQ ID NO: 480439 - DNA, 122 bp, Homo sapiens
agcatggtaaatatgctcctaaggactgagtggccccgtggtgaacttgtcccagtgcaacgtgtttcttctgatgaaaatgtacacatgcacacctgcctccaagggctttacaggaggca

SEQ ID NO: 480440 - DNA, 122 bp, Homo sapiens
cctcgcaggcggtgcctccccactcttcgatggggttcccaagagccagggggggtagagcggctggctctcagtccccgcctcgtgaggtgtgcctccccgccctgcgatgggggtcccaa

SEQ ID NO: 480441 - DNA, 122 bp, Homo sapiens
gtggctctctctgcaggtgcccctcctcccttcacgccagaggctcacccccaccccgcccgggctccctgttagagccaggcctggctcttcagccttgcagctcaggaaaccagagcgca

SEQ ID NO: 480442 - DNA, 122 bp, Homo sapiens
ctgggggctgggaccgaggaaagcgctgagtatagctcttgcgcgtccagtcacaaatgacgtcccttctgtaccccgccctgtaggcgggagcatccaatcaacttcgagagcgtaggccc

SEQ ID NO: 480443 - DNA, 122 bp, Homo sapiens
agctggcttggctgaggggctcttggctgatgggctcaaaggtctccatgctgagaaaggcggtgttggctggagcaggaccagcttgagccaccccccacgccttttaaagcccctttgtc

SEQ ID NO: 480444 - DNA, 122 bp, Homo sapiens
ccaggaagtgtgtgtctgaactcccatctgtgagcgtgtcgtcgaggtgtgcacctccagcgacttcgtgctcggcagcgcggacgcacctgcccgtcctccccgccagggactcaacttcc

SEQ ID NO: 480445 - DNA, 122 bp, Homo sapiens
caagcagaacatcacatcccatcatatcacccccaccaggagggccgtgtagccatcacccgagtggccaaccttctgctgtgtatgtatgccaaggagaccgtgggctttggaatgctcaa

SEQ ID NO: 480446 - DNA, 122 bp, Homo sapiens
aagacacatgtatcacttaagtctatgagttcaagaccagcctgagaaacatgcagaaaccgtgtttatacaagaagtacaaatcactagctgggcatggtggtgcacacctgtagtcccag

SEQ ID NO: 480447 - DNA, 122 bp, Homo sapiens
cagtgatctcgttaaaggactgcaggttctccacgatgcgggacttgtgtgcgggctccacgcgggcgaagcagcgggcggtgcggcaggcctggcgctgctgctcggggctgaggtcatca

SEQ ID NO: 480448 - DNA, 122 bp, Homo sapiens
gcgtgagtcaggcgcggagggaagtccctgcggaaggggctttcggagctgcagtcgaatcgcagggaaagagaaagtgttcgaaacgctgctttgacacagtgaccttgtgtgagccctag

SEQ ID NO: 480449 - DNA, 122 bp, Homo sapiens
tgaagcgcaaggctgcggcaaagctgcgcgagatcgagcagagctggaagcacgagaaggcggtgcctggggaggtcgacactctgcgcaagctcagccccgaccgcttccagcgaaagcgg

SEQ ID NO: 480450 - DNA, 122 bp, Homo sapiens
atccttgattaatttgctaattgctattttttgttggtatgtgaattcctgctaggaggccgaggctagtaggcaatgaaaaagacagaacaatggtaaaatgcagccccagtcctctacaa

SEQ ID NO: 480451 - DNA, 122 bp, Homo sapiens
tctccaggaaactgcagcgatgtaggaggaataggacccatcctggggaagtgatgggatcgggggcctgagcaggaccctgtgtgtacccctggatcttacctggtgtgtggggataacag

SEQ ID NO: 480452 - DNA, 122 bp, Homo sapiens
tccaaactcagcgcttcctgcatgcagcatgcttttacatctacccaggccagtgcactgcgttccttcggcttagagggtgccaagctctcctgccagtgcatccttcccagctccttatt

SEQ ID NO: 480453 - DNA, 122 bp, Homo sapiens
gagctaaaaccccaggttggcaaccgtgaggtattggtgctcagcaaatccacccgaggccgcgacactcgcagcgctcccgggggcgaacgcaaggccacactgtccagctcccgctccag

SEQ ID NO: 480454 - DNA, 122 bp, Homo sapiens
ggatccaagtgagaattctgtgcacaccctgcccttgtgtggcatggcgcctgcgcactgcgtttcgtgtgcctgcgttctgcctgctggctattggtggctgtgttgtcttgacagcgtcc

SEQ ID NO: 480455 - DNA, 122 bp, Homo sapiens
ctgcgctgctgccgggacaccccgcttcgcgccagtctgggcatcgcctcacccggggctcgggactccgcagggtccgctccagccacaaacatagacaccagcttgacccggctcagggc

SEQ ID NO: 480456 - DNA, 122 bp, Homo sapiens
cgcccccgcgacagtcgcccgttcccccccccgcgacagtcgcccgttcccccggccccgcgacagtcgcccgttcccccggccccgcgacagtcacccgttcccccgcccccgcgacagtc

SEQ ID NO: 480457 - DNA, 122 bp, Homo sapiens
gtgtgtgtgtgtacaggaatcacagagactcatcttgtaatgtttgtaatgtccatgtatcgtgtatgcacacatttttttctgacctattagaagcaaattacagagctaataccccttta

SEQ ID NO: 480458 - DNA, 122 bp, Homo sapiens
cctagcggcggaaatgcgacagtctctaagggaggaggccggagcgcctccctgtaatcccgaaggaattgaaaactaacaaagaaaaggaaatcacgggctaggtcgcgagtatctcgttg

SEQ ID NO: 480459 - DNA, 122 bp, Homo sapiens
caaatttataaatgcatatatcctttgacacaggaatttcatttctagagatttatcatacggatagattcatacatgtaaaaaatgaagggtttttttgctgcattgttcgtaagagcaaa

SEQ ID NO: 480460 - DNA, 122 bp, Homo sapiens
gcctgacctccatcctgcaccatgcccagcagagtcaaggctgtcagagggattttctcccgcgggtcttcctgtgcaaatcaataacccttcaggcagcagcagggagggaagcatgcact

SEQ ID NO: 480461 - DNA, 122 bp, Homo sapiens
ggtgtattcacacagtggagggctgcttggcaatgagaaagaaaatgggttgcaattatgcgcccaactcagatacatttcccaatcataaagttgagtgaaagagttaaacctgtatattt

SEQ ID NO: 480462 - DNA, 122 bp, Homo sapiens
aagccagccaattaaggaactggctctgggggtaaaggtgcctacatcttcatcctcagccgaggagttattaatggaggctgtgctacaaaagaaaaagaccgtgtggcaagatgggaagg

SEQ ID NO: 480463 - DNA, 122 bp, Homo sapiens
gagagtcccggaacccaggcgcggtgtccctggtgcccactgaggggctggcatttaaggcgcctgccggcccctcgtcctttcctggggcctttcggagaatccgcgcagcgcccgcttcc

SEQ ID NO: 480464 - DNA, 122 bp, Homo sapiens
gtgctgaacgccggagaaaggctcaggggagcaggaggctgcagcaccgagagcatgggacgtgaatatacgagacctgggttccaggcctggctccgtggctctgggccaattactgccct

SEQ ID NO: 480465 - DNA, 122 bp, Homo sapiens
ggctactggtattgtctcttcccacactgaactctggggaattgagtgcagggcacagcccggctcagcctgcccgctggtgggagcccctgggaagctgcggcgctcctttatctgatgtg

SEQ ID NO: 480466 - DNA, 122 bp, Homo sapiens
cgctacttccgcctgctgcgcgagtgacggatgcggccgaggctcaaaagactctgtcagcgtttcccaaggacattttccactggaggacgttgttgaggaggcagggggagtctaggacc

SEQ ID NO: 480467 - DNA, 122 bp, Homo sapiens
ttcgtcggaggtccgcgcagggctcttgtcctgggagttcttggctcagggcatgactgtcgagtggacagggaagggccactcagggactttaggtttacaatggggaaaagtaaacttgt

SEQ ID NO: 480468 - DNA, 122 bp, Homo sapiens
ttggttctaagaggacgaatcattggttctgggtgttgttggaggtcaaagttttttctacggcacatgcccaggctacatgacttgcagttttgggctctgttctacctaaaaggcagctt

SEQ ID NO: 480469 - DNA, 122 bp, Homo sapiens
agaagtcagggcctagagtcagtaagaagctggtctaaaattcagtcatgctgaggagaacgtcaatgccatctcagtcataaagttatggtagatgttgatgtttaaaaagctacacatca

SEQ ID NO: 480470 - DNA, 122 bp, Homo sapiens
gtggggggcggggagggaggacatttgtcccgtgtctccgggaggggagcgcctttaagccgaaaccccgccctctcggtcgtcctggcaacgcctcccccaacccggggctcccacatttc

SEQ ID NO: 480471 - DNA, 122 bp, Homo sapiens
accttcctgtttctagtccccactgggcctgccttctgcttcatggccagctggccagaccgagcactttcctgactttcgaccttggcccctgctgactcttgccgttgaggcctcctgca

SEQ ID NO: 480472 - DNA, 122 bp, Homo sapiens
tctgggccctacaagctcctaccaggctcagtgcagagagggctcgagggcaccccctatcggtgagcagattccatagctgcccacgcctccccctctcttgagtggatgatcaaccccag

SEQ ID NO: 480473 - DNA, 122 bp, Homo sapiens
cgcactcctctgagggggcgccagagcgcgccaaagatcacgcccacgtgcggagatgcgcgcatggaggctggactccaagtgctggagcctggtcctcccggctgctaacgccccaggct

SEQ ID NO: 480474 - DNA, 122 bp, Homo sapiens
gatgggcacctggctgcccacttgtgagcatctagaccccgactgccaacccaccttctgcggacccagagggctgagatctacacaacaaggccgttcatcaccaaatggagagagaggca

SEQ ID NO: 480475 - DNA, 122 bp, Homo sapiens
gagccgctcgggccgcgacgtccactcgccacgctgcatttccacagtcggcagggtccgcgctggcaaggtgggccaagctgggcctgagcacagagccatttgccaaggcggcacttccc

SEQ ID NO: 480476 - DNA, 122 bp, Homo sapiens
tttgttctctttcagagagtgactggaaaaagggggaaaatgtgacttttagagggtagccgtggttagagaaactcttaatcttttaacctgtcaggagaaaagccagaaatagcagtcac

SEQ ID NO: 480477 - DNA, 122 bp, Homo sapiens
acgggaggaaggaaaaatgacgctccgacatcctgctccggaaacaggacagctcagcaacgtcttaaaaaggcttccgtgcacaacgcttcatacgagaaactggttatggtgtttttcat

SEQ ID NO: 480478 - DNA, 122 bp, Homo sapiens
atatcatttcgcattgttttatttggggcactgtgccgcactacctgggcccacagcaggcgcgcaatatttactgacaaatacaacccacgaggtagttcctattattacccttcaatttg

SEQ ID NO: 480479 - DNA, 122 bp, Homo sapiens
tgtccttacccgagcccgactccattgcttgtgcctcgcctcccgcgctgcagggggtgccggtgtaccgcctgcccgccctgccctgtgcaccgcccagcgtgcatctgagtgccgagcca

SEQ ID NO: 480480 - DNA, 122 bp, Homo sapiens
ccaaagggtcctcctgctgagagccccaggctggcattaagcccacaggggcctcgtgctcgggaaagtctggtctgttcaatcaaaggcccaaccctgcagtgctgggcctcctggcacat

SEQ ID NO: 480481 - DNA, 122 bp, Homo sapiens
cccaggcccccaagccctttagacagctgctgccgatgtgacttccgggcaggccctcctcgtgtctcctgcctgaaaccccggcattgtccccgcttccctctgcagagtggggggggttc

SEQ ID NO: 480482 - DNA, 122 bp, Homo sapiens
ctgagaatttggagggctggataggccaaaatgtgagtatcaaagaatcctaaaagatggcggccggatctgagacagggagaaacactgtgagtgatatattcaagtccttaggactcaac

SEQ ID NO: 480483 - DNA, 122 bp, Homo sapiens
cgcaggctcctccctagtgtcgtcgctacagaggagcagaggatgacgtgaggacagagtcgcgaacatctcctcggagcgcagctgggccagcggttcccacagccctggagcccaacgtg

SEQ ID NO: 480484 - DNA, 122 bp, Homo sapiens
atgaggtggtggtggcgcagcagactgcgatcaattctgcatggtcacagtagagatccccgcaactcgcttgtccttgggtcaccctgcattccatagccatgtgcttgtccctgtgctcc

SEQ ID NO: 480485 - DNA, 122 bp, Homo sapiens
ccggacttggggcccaacggccaagtctcttactgcatcatggccagtgacctggagcagcgggagctgtcatcctacgtgtccataagcgcggagagcggggtggtgttcgcgcagcgcgc

SEQ ID NO: 480486 - DNA, 122 bp, Homo sapiens
cggctgcggcgccacttctactggcagatgctgttcgagagcgccgacgtgagcatgctgcgcttgctggagaccttcctgcgcagcgcgccgcagctagtgctgcagctcagcctgctggt

SEQ ID NO: 480487 - DNA, 122 bp, Homo sapiens
gccccgtccagcagaaacgagcttagagaaagtaggcccctgtccctttaagaacacccgcgtccacgccggcccagcccggccggatttgcactcggaagctgccgcggcggggagcgggc

SEQ ID NO: 480488 - DNA, 122 bp, Homo sapiens
gcgcaaagctaatttgttacgccccctgctcatcactcccaataaaccagcttcctatttcgcaaaggtgagtttagggcctatggaaaaatcttcacttattgcttgcttgaaaattatac

SEQ ID NO: 480489 - DNA, 122 bp, Homo sapiens
cccgtgaaacgcttggcagttgcaagaggaactcgggtcctcagtgccgtttaccaaggccgacaaagtccagcggcattatcgtgtcatcgtgacatcggtatttgactgtggaagctgaa

SEQ ID NO: 480490 - DNA, 122 bp, Homo sapiens
tcgccggtggagagggggcttctctagagggactccagggcctggcacctgattggaggccgcatccaggtccggggtagggcttgcctgtttaatggtccagaccgaggaggaggcggagc

SEQ ID NO: 480491 - DNA, 122 bp, Homo sapiens
tctcctccgggtcctccattccccgggcctccaccactcacgttcatagctcgctgtctgcgaaggcttcttctcgtacgccacgtccaggtcagactcgttccaggctttcggaggccgcc

SEQ ID NO: 480492 - DNA, 122 bp, Homo sapiens
ccccctttcccgacgggcactggagtgccctacacacgcccctcgcctctcgcccactgccgggaggccctgtggtctctgctgtactcaggcctgcctcggccagttctttcccgcactat

SEQ ID NO: 480493 - DNA, 122 bp, Homo sapiens
gctacccacgcagtgacccacattcaggtgattacacacactcatacacagatccatacacgatcttgccccccccacctccacacactcaatatgacctccccacgcccaaagctgcacac

SEQ ID NO: 480494 - DNA, 122 bp, Homo sapiens
ccaactgacctgtttcttccttcctccccggcactctgggagtcctgagattgccttgctcggttcgtctcagacttgctagatctgagcagctgctgctcctccaccaagggtgctcacat

SEQ ID NO: 480495 - DNA, 122 bp, Homo sapiens
ccaggtgatttttgtatttttagtagagatggggtttcaccatgttggtcaggctggtctcgaattcctgacctcgtgatctgcccagctcagcctcccaaaatgctgggattataggtgtg

SEQ ID NO: 480496 - DNA, 122 bp, Homo sapiens
tctttgcttactctgtgatgagactaatcttgatgagccccaaacagcaactaatttattcggtctttatatgatattggagtaggggtggatttcagattcaaactccaggtgactagacc

SEQ ID NO: 480497 - DNA, 122 bp, Homo sapiens
tccggttcccctccggccaagacagccggtcgtccccttcccccgcggagcgaccctccgcgtcctgagccccgtccccccagggaatgttggatggccgaagtctttcccggacttccaat

SEQ ID NO: 480498 - DNA, 122 bp, Homo sapiens
tatattggttcttcaatgtcagcggcaggcttttgtaggttttgaatcttctcagtggcccggagctcttgccctccctatgtataccctcctggtgacaaggcaaagccacacccttgagc

SEQ ID NO: 480499 - DNA, 122 bp, Homo sapiens
acgggaggtcagggagcgctggaggaaacctgcactggggtagaaatggctggaggaaggcggaccgcgggctcgctctcatggtgccaaccccggggacctttcttcaggctccctgcggg

SEQ ID NO: 480500 - DNA, 122 bp, Homo sapiens
ttaggtttattactgtgcctcacactacgagacggtcattcattggcagaggtgtatttgcggggggccaggtatagagtaattcaaggcggacaaaggaggaatgtcccagtcttcaggaa

SEQ ID NO: 480501 - DNA, 122 bp, Homo sapiens
acgttcgccccgccagccctcccgcccgcccgccgctccgccaccccgccgccccagcaccggctaggacaactacagcagccgcagctccggcgcccactccggctcccgcctcctctccc

SEQ ID NO: 480502 - DNA, 122 bp, Homo sapiens
attcagcaaaacagctgaggttcctctaatcactgcactcctacgggcttttctgtaggccggagaaacaagcaccggggtgtgcattcgacattgtgagggcaaacaactggccccaagga

SEQ ID NO: 480503 - DNA, 122 bp, Homo sapiens
gttccagccccgcgacccaccggcagagggcggtaccaaggagggtccgtgcgggcttctcggtccctggcaacccgctggtcactgtcttccaggactggtagagggcggccttgggcccc

SEQ ID NO: 480504 - DNA, 122 bp, Homo sapiens
tctgctttcacactgcaagggcagaggttgttgcagagttacatcattgcgaaagagatccgaggggccccaaagcttaaaatagtccctatctagttcttcaccgaaaaggtttgctgatc

SEQ ID NO: 480505 - DNA, 122 bp, Homo sapiens
aggtgtaggtgtcggacatgcggtcgtcgaggcggcgctggcagcagtactcgaggtgcgcgccctccaggccccagtagatcatctcgttgtagaaggagagctcgcacatccgcggcgcg

SEQ ID NO: 480506 - DNA, 122 bp, Homo sapiens
tggtaaacagtggccccaggggagggtcaaacaatcagcaaccaatttgtctgaatggcccgttaatcagtcctagctggatcagacagctgagttctaagaggggccacagtgccatgtag

SEQ ID NO: 480507 - DNA, 122 bp, Homo sapiens
aaggctccgtgcagacgaggcaacccgaaggctccgtgcagacgaggtaaccggaaggctcggtccagacgacgaaacccgaaggctcggtccagacgaggaaacccgatggcctagccagc

SEQ ID NO: 480508 - DNA, 122 bp, Homo sapiens
ccccttctatctcatattctttggagtgcctcatgattaaatgctgccttacagggaacacgggcatttaataattgacaaggcaatcagggcccagctgttctgggagattacaccagaga

SEQ ID NO: 480509 - DNA, 122 bp, Homo sapiens
ccaatttgaggattttttactgaaggcataaaggtcgggggccacagatctgagcgaggccgtccttgttgctttaagggctctcagtccagggctgaatactagaattccatgaataaata

SEQ ID NO: 480510 - DNA, 122 bp, Homo sapiens
caagactaggggagaggagcgtctccactgggaacactcactctatcacatccaaggtgtcgcttttgagttgtgtgctgaatcccactttaagaacctgcaggagctcaggaaaaatcaga

SEQ ID NO: 480511 - DNA, 122 bp, Homo sapiens
aagaccgaaagaggctttggggcttggatttaggacaagctggagcaagaatacagcccgcgcgggccgtgggtgtggactgggatatttttggtcccccggggtagagatcctgcacgcca

SEQ ID NO: 480512 - DNA, 122 bp, Homo sapiens
ttcctctccaggtctttgggctgaaaagaatctagagtcatctccagtgatgaagagtcccgatgattaatgaaaccacctttgcgaagattatgacagcaagaggagtctaacatgaccaa

SEQ ID NO: 480513 - DNA, 122 bp, Homo sapiens
aaggggtgtaagtctgataagcctcctggaggcgctctaaaaacgttcttggtgacttatcgggcctttggacaacttcggtcgtcttagacaagtttatgggtttctgagcggctctttta

SEQ ID NO: 480514 - DNA, 122 bp, Homo sapiens
ggaccacaaagacaggatccgcgctggccagaaagcctccgtgaggaaagcattcacgtgcgtaaaaatggcgattcggccacagcgcgtggcagccaaggccatgaggaggctctgctgga

SEQ ID NO: 480515 - DNA, 122 bp, Homo sapiens
cgcggcgtcagcgtgcacgcggggcaggccgggagcgccgcgccgggccgccacacttcgcgcctgcgcgctcccgtcttacgggatggatttcgctctcaggtcccagtctcgtgcggcgg

SEQ ID NO: 480516 - DNA, 122 bp, Homo sapiens
ggggcggggctgatgggcggggtgaggcggggctcgggctggggcgggccctatcgggggcggggcctgccgggggcggagccggggtgggggcggggcccagcgggggcgggaccggaacg

SEQ ID NO: 480517 - DNA, 122 bp, Homo sapiens
tccaaagctctagctggcccgggctggtcatgaggactcagcccttaccagccccactcccgccatcctgcctctccagggccgcagaggccctggggtggacttctggcatttgtcacctg

SEQ ID NO: 480518 - DNA, 122 bp, Homo sapiens
ggaaacgaccttcctttatcctacgagtcctaagactgaaccccattctaaaggctctaccgtatccttcctcttattttcttctcatctaatgtggcacataatagggccttatactaaag

SEQ ID NO: 480519 - DNA, 122 bp, Homo sapiens
cttgcagaaggacgctcctggcggcggcggagcctttgaatggggctctccggggtggggcggccacgccctccagcctgtggaaccggggtcaagccagggctgcgagcggagccagaggc

SEQ ID NO: 480520 - DNA, 122 bp, Homo sapiens
ggcgcggagctctcctggccctgctcctggagctcttcagagggtgctccctggccacgtcggggctgggctaccaggcatatctggggccttcccaggggccattttgcctgcagggatgc

SEQ ID NO: 480521 - DNA, 122 bp, Homo sapiens
aggaaggaggactggtgactgttgaacgggtgccgtcagctcctgccgtggctcgattcccgccttcgtggagtatgtgggtccgacagcagcagcatctctgccaacagctcttccaatgt

SEQ ID NO: 480522 - DNA, 122 bp, Homo sapiens
ctcccattccgccttgcagggagaccaaggatggggggtagggccataacccggagttgacggacaggaagggaagggctgactgccatcacttccgcgcaactcacctccgctcccgaacc

SEQ ID NO: 480523 - DNA, 122 bp, Homo sapiens
gccctgttgggagcgggagtcggtatactcccagcctcccagactgctggggatgacccgcggtgcctgcaaagccggtgtcatccagcccactgcccagcccacagacactcgccctggag

SEQ ID NO: 480524 - DNA, 122 bp, Homo sapiens
gagcgggaaccctggcgacccgtgtcatgggagcgggtttctgttacgtgggctttagcgcgagctgggcggtcggcccggtcccaccgaactgcatagggccgtgtagccgggggaagtca

SEQ ID NO: 480525 - DNA, 122 bp, Homo sapiens
ctacttgggaggctatggcagaaggattgtttgagcccaggagtttgaggttgtactgcacgtatcacacttatgaatagccactgcactccaacctgggaaacatggtgagaactgtctct

SEQ ID NO: 480526 - DNA, 122 bp, Homo sapiens
gccaaggctgattatcaagaggtcactgggagcctccggagctcggcaagaaggagcctccggagctcagtaaggggaagtgtcagatacactgcgaagagagtgggagctgaggatcagaa

SEQ ID NO: 480527 - DNA, 122 bp, Homo sapiens
ctatttgttgtatgtgagacgacgcaaatactgtattcgaacctcaaactaacaggaaagcgacgctgagaatcccgaggatctctggctgcgttttttaaacccctccttgcacactactt

SEQ ID NO: 480528 - DNA, 122 bp, Homo sapiens
gccaggttagtgggctgtgaggtctcttttcctttccctgaggcgcctggttgcagggagcgaaagtggatagctgacggcctggaagaacgacattgccgtgactcggattcgaaccgagg

SEQ ID NO: 480529 - DNA, 122 bp, Homo sapiens
agtcagaatgacctgagaatcagcttggagttctaccagcctcagcaaagcccacctctgcgacagcactccttgcagacccctgacccggtgacagatgaataaagtacagacacacagat

SEQ ID NO: 480530 - DNA, 122 bp, Homo sapiens
ctaaggcagggatatgtttccctccattgcatccccagtgtcccacaatgcttggcgcaccgtcacggtccagtaaaaaactttgaataaatctatagcaaagcatggagcggtccgtatag

SEQ ID NO: 480531 - DNA, 122 bp, Homo sapiens
gatttactcagtgataggcaatggtctcactgctcggcgattggcgatggtctcaccgctcggcgattgtctcaccgcttggcgataggcgaaggtccctttgtggtcgccaaaatgtgtct

SEQ ID NO: 480532 - DNA, 122 bp, Homo sapiens
tccctgtgatgaaacttgagggctgtttctgcagtaggtgcgacacttgttgacacgacacgctggggaggccctggcaagggggcctggtgaaatgcagccccagggagctgatgaaaccc

SEQ ID NO: 480533 - DNA, 122 bp, Homo sapiens
cccgccggggctccgggcgctatggctttgcgccgcgctgtgcgcttcccggagggccggcggcgccccccagcccggcccggggcccaccgcctgcccggccccctgccactgccaggagg

SEQ ID NO: 480534 - DNA, 122 bp, Homo sapiens
aggccaaaccccgggccttcccgcgttcccgggggtccccgtgctaaggcagacagaaggcgcccacctgtcaacagtgagaaccagaatccacaaaggccaaagtgcggaaggcactgaga

SEQ ID NO: 480535 - DNA, 122 bp, Homo sapiens
ggcactacttcagcggaacaggaaaggatgtgggggcgtggctaccacgccctagtagagcgggaaactacaactcccaggataacgcgggatttcagcagggccaaaagagtgattgagct

SEQ ID NO: 480536 - DNA, 122 bp, Homo sapiens
ggccgcggcagttccaagagacggggcggggccgccacactttccacaccccagcctccccgcccttacccgcccccactcagccctatttccgggataggccccggagcgtcacaggcacc

SEQ ID NO: 480537 - DNA, 122 bp, Homo sapiens
cgggatggcgaggggcggccagggggcggcgcagtgttgagaaaggccgtggtcacaggccgaggttctgtggagggtggaatgcgctcgggggagctaggcctccgcacccgccttcgccg

SEQ ID NO: 480538 - DNA, 122 bp, Homo sapiens
ggcacctggtgggtggtgaatcagcagtttttgaacgaataagtggttatcacattaattcgtgcctcaatgaatgaatgaatggacaaacacaggccgggagcctgacccacttccctctt

SEQ ID NO: 480539 - DNA, 122 bp, Homo sapiens
catggtggtggcacgtggtttgggagagtttctggggccgaattcgggccgtggactgtccgttcagcccagagtggctggggcaggcgggggggcacgcggggtgggccgtttttgtgaac

SEQ ID NO: 480540 - DNA, 122 bp, Homo sapiens
ccacccaacgcacaccccctttaagacgcgaacggtttgcaaaggacgccccccccgggacgcagtggaagcttcaaattcctccgaggtccgggtcaggctggcatcttgcaaaaggagtg

SEQ ID NO: 480541 - DNA, 122 bp, Homo sapiens
acttctcgagccgggcctcgtcccttaattctagaaatagcgatcgcgaaagctaagtgccgagaagtgcgagagagtgcgagggcgtttttggatagcagaaatgttagctcaaaatcgac

SEQ ID NO: 480542 - DNA, 122 bp, Homo sapiens
tgtggtgcgtcctgcggggctgtgctacgtgtagtgaccctgggcctgtggtgcgtgttccggggctgtgctacgcgtagtgaccctgggcctgtggtgcgtgttccggggctgtgctatgc

SEQ ID NO: 480543 - DNA, 122 bp, Homo sapiens
agtgaggaaagcatgttcaaaagcccagacagtctgaaagctaggcttcttgtgccgagccgttagccaaggtgtgtatgcaaaggaaaagttcttgaggaaaattaaaagtgctactctag

SEQ ID NO: 480544 - DNA, 122 bp, Homo sapiens
ctgtgggcggcagcgaccccctgcggctccagcctccactacgggatctgcgggaagacacggggaagacgaactccgcacactgcatttgattaatgatttattttgattaacgccgtcac

SEQ ID NO: 480545 - DNA, 122 bp, Homo sapiens
atgcgtacaccgccgcccgacgcgcatgcgtacaccgccgtccaacgctcctgccagctccgctcctctagtccaagtcctttaggtcctgtctggccacgtcaccacctccccgcaacacc

SEQ ID NO: 480546 - DNA, 122 bp, Homo sapiens
tgggggtggcagcagcagggcaggtgcggccccgggctcagtgcccgatgctgccgcggccgccccggatttgtggctgcgactcctttatctgtggctgcagctgctccttatctcctggc

SEQ ID NO: 480547 - DNA, 122 bp, Homo sapiens
cgcccccagcgccccttccgcgtggtccacctgcacagccgggccccggatctgaaatctcggggccctccctgggcctagggttctttcgctgtgacccaggccttaaccaggaaaaggat

SEQ ID NO: 480548 - DNA, 122 bp, Homo sapiens
ctcacaaagccacgattgaggagctgcggagcagatgtgggtgctgttcgacgtgcggcccgagtgccagcacctcttctaccggggcaagcagtttgaaaatggatatgccttatttgact

SEQ ID NO: 480549 - DNA, 122 bp, Homo sapiens
tgccagtagcagcctggggcaataaacccgggggcggggctggcctgcccagggtgtagccgcacaagccacctcccacccagaaagatcagtgaggaccacgtgctgtaaacagagtagag

SEQ ID NO: 480550 - DNA, 122 bp, Homo sapiens
ctgtcactcagcccgcgcggggcccccgattggcggcctagccccgttacgcactcgcctcgcgttcacatacccggggagggcagtagaaaggtgatcaatcttcatcaggctacatttcc

SEQ ID NO: 480551 - DNA, 122 bp, Homo sapiens
tgctgtcgacaaaattgcaagggactagttgagttgctggggttcataatgctgatagagcggtttccacgtgaatgaaggataaacagcgattaatttcagccaataaataatggtttgag

SEQ ID NO: 480552 - DNA, 122 bp, Homo sapiens
ccgcgttcggtgacggccgggtaggctgtaggcagcgcaatgccaagacagagctgctggcggcggcgggcgaatctccctgcaccatgagcctcggctccggccccgttaggggccgataa

SEQ ID NO: 480553 - DNA, 122 bp, Homo sapiens
cgtaaggccgagcagtaaagagtcaggtgcatgacaccttgaactcccagggaaggaattcgctgaggagctatctctccaatctgcttcatgaaattgatgtgatccacgtgagtgaaacg

SEQ ID NO: 480554 - DNA, 122 bp, Homo sapiens
gcgagcggccgcgtcagcggtaggtggggctgtggttacgctgccgggcgggggtcgcgccggttcggtccccggggctctgcgggcgccgggcagagacctgcggccagggcgtgtcccgt

SEQ ID NO: 480555 - DNA, 122 bp, Homo sapiens
ggtaagtcagtgcaaaagtggccttcgtctacagtgggaaggatgtgggtaatccttggacgtacagggatagtcaactggattcttttttggaaccatgaggcaggcatagaaatatatta

SEQ ID NO: 480556 - DNA, 122 bp, Homo sapiens
tcccctactcctccaactcctaatttccccgtctccagagggcacagttgtaaaccttgacgaaaatccaatcttctgtgcgggaatttccccccaccgcttgccgcccccgcgacagtgag

SEQ ID NO: 480557 - DNA, 122 bp, Homo sapiens
agcgcttggcacagggcaagcgccccataaaatggcagttaggattaaaatcgaggttgccgggggacccccaggcaggagctgagatttgtgtggagcggcgaagtggggcggcggcgcgt

SEQ ID NO: 480558 - DNA, 122 bp, Homo sapiens
agcgggacaagtgtgtgccctcaatgtaggaagcaggggatggtcgggggaggcccctcccggatccccgaccccctacccggctctgctgcgtccatatctgggcccggggatcgctctgc

SEQ ID NO: 480559 - DNA, 122 bp, Homo sapiens
ttggaatggaaggagggtgaggcaagctgagtgggattctcgtgtccccagccccgcccgcgggccgccagcttcccaacctgcacaggcccagcagggcccctccaggtctaggtgagcag

SEQ ID NO: 480560 - DNA, 122 bp, Homo sapiens
gcggccgcggagggaaggggtgggtcggtgggtctgacagcgggtctgcgtaggcggcagcgtctgtccctcccagcctctcgctccgcgccatgggcgggccccgggctctgctggccgca

SEQ ID NO: 480561 - DNA, 122 bp, Homo sapiens
atttgccccgggtaaacgcaaagggcaagtgtattgcatcagggttgaacagggtggcgccggccaaagagggattcctttcaggcccgggcctcgcagtccaaacgtggcccgccctagcc

SEQ ID NO: 480562 - DNA, 122 bp, Homo sapiens
atcagagagtgagggatgtcatctttccccacaactgcacctcacacccctaatcctcagcgtcacctgaggttgcagagctccagcgtcgctgcttaaagtaccactgcccagtcatccca

SEQ ID NO: 480563 - DNA, 122 bp, Homo sapiens
gggtaatgaggcatgggatggactctgcgggcaccaggcctgaccctgagtgcacccaggcgagggcgggggacactcagatctgcccctctctgcaggaacctggtttccccaccctggag

SEQ ID NO: 480564 - DNA, 122 bp, Homo sapiens
cgaaaccatcttggcagcagcaaggccatgaagatggagaagcccacaatgaagatatttcgcccagagtctatgtcagccaggtagaagctggagaatccagcagacaaaaccacagcctg

SEQ ID NO: 480565 - DNA, 122 bp, Homo sapiens
caagtttcctgcttcagttaattcaaggtttgggcaggcaagatttggtgacgcagggtccgagggtggaagagcctggtaagtgtacctcagtgaaatccacttcaccctggaggtaagtg

SEQ ID NO: 480566 - DNA, 122 bp, Homo sapiens
ttcctggggagggagggaaggcgctgtgcatctctccccggcggccagtccagcgtcttccggtatggcagtcctttgccctgtcgggtcaaagccaagccccctcagcctccgggctgtcc

SEQ ID NO: 480567 - DNA, 122 bp, Homo sapiens
cttacgtgcctgagtcggagatttgtatctgtggggttctgagcttacctttcaaacatccgttttggcctcggggaccgtagattaaaggagcagtaacaggagaaatgtaacttgtagtt

SEQ ID NO: 480568 - DNA, 122 bp, Homo sapiens
acgaatcaaggtgacttcattagccgccttcggcacccctcccaggtgagggttttctgtcgtggtgcctcagcctcctctccactccctcgcccccatcatgaatgcaagatgagaagctc

SEQ ID NO: 480569 - DNA, 122 bp, Homo sapiens
ttgtagagcaatgtgaccttctcttagggtattctcacatccactttctactaagggtaccggaccatggcaatatgatcatgcacagcctcttattacatatggacctcccagggaggaaa

SEQ ID NO: 480570 - DNA, 122 bp, Homo sapiens
tttctagcatgcttgatttaggagagaataaagggctatataataataaatccagatttccggataagaatattgcctggttaaaattctgcattgcttaaagacacccatgtttaagattt

SEQ ID NO: 480571 - DNA, 122 bp, Homo sapiens
ccgcaccctccggtctgcagaggtgtggcatgtgacggtctgcgagccggtgtcgcgggacgccggggcggggcgggccgcccaagctgcagcccaggcccccagcccccagccctagcctc

SEQ ID NO: 480572 - DNA, 122 bp, Homo sapiens
aggtggcagcccttgataactaatctcgggcacccagccgcttctgtaagcttaaggagacgacgaggaggggcgggggaagtgcgtcaccaggtggggaaggggctgtgtatttggtgaca

SEQ ID NO: 480573 - DNA, 122 bp, Homo sapiens
aattcatggcaatgtgtttgcttgcataagttcaataagaatctattttattttatactgcgacacagatggatgaactggctattttcccaggtctttgactgaaatggccttgtgagagg

SEQ ID NO: 480574 - DNA, 122 bp, Homo sapiens
ggtctcaggtaaccctggcaatgggtcttcctgccagtagtaaagatggcgctgagagcacgagcgcactttcgcacacccccattacccacaatgcagcgggaataagggaggctcagttt

SEQ ID NO: 480575 - DNA, 122 bp, Homo sapiens
ggggcgagctgcagaggctgcgggaggagctgggccggctcgcggaaagcctggcgaggccgtgcgcgccgggggctcccgcagaggccaggctgaccagtgctctggacgagctgctgcag

SEQ ID NO: 480576 - DNA, 122 bp, Homo sapiens
acgagctgctcccagaacttacccagaggagtggatctgagtggcacaagaggctgtggacgccctgataaacaatccaaatccccctcaagacaggctctgccccagctgctgggaggatt

SEQ ID NO: 480577 - DNA, 122 bp, Homo sapiens
atgaatctgattgaatgcctcccttaactggctgcatgaaagcatggtgtcaactctgaacgctgtcttttgctgggatcgagtttcatctacttaccttatcccagtgactattcttcttc

SEQ ID NO: 480578 - DNA, 122 bp, Homo sapiens
tcatgctgcggcgtgtgagtttccctttgtttagattaaatctgggatgctgagtcccctcgcgcttctgtacccggcatctcaggggtcacacagaccttgaaatccccgcatcgctccct

SEQ ID NO: 480579 - DNA, 122 bp, Homo sapiens
gctccaggggattcttacgcccgcctgcatcagagaacccaggtcttgtgggcgaggcagcgtggagagggagcgcagctctggagacggcccccagggcttgcgggcgggcgggcgaggca

SEQ ID NO: 480580 - DNA, 122 bp, Homo sapiens
tgtcttgcttccctcggcctcccgggacccccccgctacccccaccggggtctccgccaccgggaggctcgccagggcccccaggctccccactcaccaatcccaggcccccccggcccccg

SEQ ID NO: 480581 - DNA, 122 bp, Homo sapiens
ttctggctccaatcaaaagcagggctctttcggacttcgcttacgtttaataaagaaaaccggttggccccttcggctccacctggctcaacagacagccagtggcatgcggcagggaccaa

SEQ ID NO: 480582 - DNA, 122 bp, Homo sapiens
cagagtgcccaagcctgagttccagcaggttcttcaggggccgctgaccagggaacactgcggtgaggagcgaggacttcgtccccaccccggcccagggcaggggcttcgtggtgagccca

SEQ ID NO: 480583 - DNA, 122 bp, Homo sapiens
gacgggctggcattcccccgaagcccagcctggcttccaagaaaacactctaaacatggtcggtaacggcggggaagagcaccgtgcagcctggcgccacctcctttcataaatgggagcag

SEQ ID NO: 480584 - DNA, 122 bp, Homo sapiens
agttgatggaggagacctcagaggagctgccggaagacacccgggcccggatgacctgaacgggagggtacgacggggggtcctgcagggacgcatctccggcgctcgtctgcccgtcacct

SEQ ID NO: 480585 - DNA, 122 bp, Homo sapiens
ggcgctgtttgctccgcgccgcgcggcttgcgctctccccggaacgcccacactctcaatcgctacattgttgacattcggcgctgacgtcacccgctccccattcacaataactttacggg

SEQ ID NO: 480586 - DNA, 122 bp, Homo sapiens
gcctgccttggcctcccaaagtggtgggattatagccatgaatcactgtgcctggcctttcgtaataattttcttgaactaaaatttgggattaggccaggcatggtggctcacacctataa

SEQ ID NO: 480587 - DNA, 122 bp, Homo sapiens
caaaatattacagacacacaggaaatgactcttcaaatccaggctgtaaacctgtcatttcgtgggcttgtctgtgggcctagaaaagcgagacaaagatcacaccgaagacattactgttt

SEQ ID NO: 480588 - DNA, 122 bp, Homo sapiens
gtgtgcctttccaatattgcctaggctacacttaacactcagaaatgacgtgctgctgatcggcgtcagatgcagctcgctgtcctggacttttttttttttttttggtgccctggactttg

SEQ ID NO: 480589 - DNA, 122 bp, Homo sapiens
gtttcttctctattttctctctctgtctgtttatttttgttgtgtgtcactctgcccagccggccgtcctgtctcttccctccatgctccgcttcgcccgctgctggccagaggtgaccagg

SEQ ID NO: 480590 - DNA, 122 bp, Homo sapiens
gaggacattccatgtggcgcctgatgctgcgtggtgtcaggcagctgtggtcattcttgccggctgtccctgcctgctcatctgtgaaatgggagcgttgactgcataggatccagtcaggg

SEQ ID NO: 480591 - DNA, 122 bp, Homo sapiens
agggccgcgagagtgggaggggcatcgggatggggcaggacttcggggcacagggcagggcgccaaatgagacctccagagccagagcctagattcagggctcacgccctgcccctggctgt

SEQ ID NO: 480592 - DNA, 122 bp, Homo sapiens
actctctcctttctttcaccgctgctttaaagggctgccagaaagccacaaagtacaaagcgaggcatttagagaccatagtagatgcaggtggcgagggaagacaggtggagaaacgcaga

SEQ ID NO: 480593 - DNA, 122 bp, Homo sapiens
tccctatatgatatgaagtccgttttctcaggctcacttttatttggttatctttttaggcgcactaaagattgagtttacaataaactgaacagacagcgtacaaaaggcttttagaacta

SEQ ID NO: 480594 - DNA, 122 bp, Homo sapiens
ggtgatctgcctgccttggcctcccaaagtgctgggattataggcgtgagccactatgcccggcccttgggccaattcttaaaggcctgttttattaatgaaagagatgaactaggccaggc

SEQ ID NO: 480595 - DNA, 122 bp, Homo sapiens
aaaaagaaaatcagcaaatgcttactctgattttggaagaatcgaaacaatcagagcgtgcgtactctgtggaaaaatcgagagagagagaaagtcagagcatgcgtactctgaacttaaag

SEQ ID NO: 480596 - DNA, 122 bp, Homo sapiens
ctccccatgttcattatgctcagcctgtctttggaagggatgatgaggcatcctgaaaatcgtatagtgaggaaggcagaccccatggcctgtcactacagcctagggattttaagccccta

SEQ ID NO: 480597 - DNA, 122 bp, Homo sapiens
cgggcgcagagaccgccgccagcactcacctgcccgcttcccctagcgcagcgggaacgacgtactccggcccggaccccgccgtccgcctcaaccaacccccaggcggtggcggcggtggc

SEQ ID NO: 480598 - DNA, 122 bp, Homo sapiens
gtcttgcgcaggagctgagtcctcagggtccacagagagaggaggagggcgtggggtgcgcggaaacgcagcgcctgccttttgccctgaccccacagcaccacctggtgtctcccgggacg

SEQ ID NO: 480599 - DNA, 122 bp, Homo sapiens
gttaggcgcggcggcttgccctgtgtctctgagcccgggacatccatttgtagtggcttccgaccccggtagcggtgctggagatggcagagctcgggatagccatctcagatgaagcaggg

SEQ ID NO: 480600 - DNA, 122 bp, Homo sapiens
caagcatcgtgcattctttatagaaatgagggggaaataagcaatatggaaagcgcctagcgcaatatcaagcacgtagtaggtactcagaacctgtcacccagcgcgaaacgtccgcaaag

SEQ ID NO: 480601 - DNA, 122 bp, Homo sapiens
catcgcagcgctggcggcttggctcttgcgctcagggtccgcggaggtggcggcccagagcgtcaactgggagcgcggggggggagcggcacgagcgtggaggagcggcgggagcgcgaagg

SEQ ID NO: 480602 - DNA, 122 bp, Homo sapiens
gcccttgactttacacttccgccgaagcctacgaacttgccaaccggaaacaaatgggaacgaattttgttcagcaactacaaaaggcagatgtgaaaagtagttgcagaacaattcggtgc

SEQ ID NO: 480603 - DNA, 122 bp, Homo sapiens
cctaagaattggtgcctcttctagggaaaaggaggcctgggctccaaggccttaaagactcgcctaattttccgcacggatgagtagacccaggcccagttcggatccgtctttatcttatc

SEQ ID NO: 480604 - DNA, 122 bp, Homo sapiens
tatcttcgtaggtgcgggcctccggaggtgcaggtccctgtcctccttgtcctgcttcgtcgcagagcagaacgcgtgtgctttaagggcagagacatctgaagatgctttgccttgccctc

SEQ ID NO: 480605 - DNA, 122 bp, Homo sapiens
gtgtgagtgagggcacattgtgcttttgagactgtgggtctaggcttcggtgtatctaagcgtgtgcttgtgtttctgtatgggagactatgccatgtgttgtagtatggagatgcttatct

SEQ ID NO: 480606 - DNA, 122 bp, Homo sapiens
gccctaccagaaactggccacgtgcgatgcggacggaggcatattcgtgtggattcagtacgagggcaggtggtctgtggagctggtcaacgaccgcggggcgcaggtgagtggcaggcgca

SEQ ID NO: 480607 - DNA, 122 bp, Homo sapiens
gtccccggggagacagttcccggagccactgggaggtgggggaacagggctgaggacccgcgatcgggttccctcccgggattccctctggggaggggtcccaaaaggaaggagagatgcgc

SEQ ID NO: 480608 - DNA, 122 bp, Homo sapiens
ctctccgctcccatctttctactaacgtccgacgcacgctccgcctctttctcccacattcgtcgtgtaaattctgcgtcccaaccgcccagccgacctgcaccgcattcccgccccctcaa

SEQ ID NO: 480609 - DNA, 122 bp, Homo sapiens
cccatgtgtcggtgtatgtgccgtttgggtccccaagaagtgggaccctcgagggcactgcgcatgcgccgtgccggagtgcgggtgccacgtgcctccactgggcatgcttaccgcgtgga

SEQ ID NO: 480610 - DNA, 122 bp, Homo sapiens
tacctgcagccctgagaagtaagagatccgcagaacctgggtttcccaagtttattttctcgggtagctctcactgcctaaggaatttcccttgtgctcccgcccagtgatgttggagaaga

SEQ ID NO: 480611 - DNA, 122 bp, Homo sapiens
gactgtgacggctggctcctgttgcgaaaggcaccgggcggcttcatgggcccgcgctggcgccgccgctggtttgtgctcaagggacacacgctctactggtaccgccagccccaggtaag

SEQ ID NO: 480612 - DNA, 122 bp, Homo sapiens
tcctctggcgccctctgctggccgctcgcgcgcaccgtggacaggtagggccctggcctgcgctgcgctcacctgccccggaccaagcagtcgctgtctcctgcctgtggccatgcccgctc

SEQ ID NO: 480613 - DNA, 122 bp, Homo sapiens
ggggcattctgtgtatatatcagaggaagactgattttgatcacctcaaatttgggtccacggctgccagattggctgaaactatacttgggctagggagcccagtgacctgagttgtggct

SEQ ID NO: 480614 - DNA, 122 bp, Homo sapiens
cagctctgggccgagggcagcacagcgcccagggacccctaacccccgctgaccgcaaggcgatctccgactccgaacgaacgcctcgttgcagatcggctcgatcaaccatcaagacttag

SEQ ID NO: 480615 - DNA, 122 bp, Homo sapiens
acgctgaaaagcacgatgtggctgaaagttttgacagcaggctaggtggccttgttcgggcggaagcccaccgtaggcgtgtaatcttccagctgcatcaagaagtccaccaaaggcgtgct

SEQ ID NO: 480616 - DNA, 122 bp, Homo sapiens
ctatacgtcatcatcgcctaccactaagggtctgtgcattctgtttcttctgcctggagccgcacacggctggctgccccggaacctcactttttctctggctaatttccagagaaattctc

SEQ ID NO: 480617 - DNA, 122 bp, Homo sapiens
ttccattttgttctggtcggggagccgagttggttcctgctcgaggcgctgggagcgaggcgggcaggttgggggaccctgtgccgagggacccgaaggaggcaaaaccaaaagtttatgtg

SEQ ID NO: 480618 - DNA, 122 bp, Homo sapiens
ctgggatccacctacaaggagcagaggcgccagacagcagcacgagggtcccgctgcaggcggctgtgcacacggcagccgagaaactcctctcccctcttcagggagtccccagctcttag

SEQ ID NO: 480619 - DNA, 122 bp, Homo sapiens
acctgggaggtcaaggctgcagtcagccgtgatcatgccactgctttccacttgtgacagcgagaccctgtctcaattaaaaaaaaaaccaaaacaaacaaacgaacaaaaaaaagaaatca

SEQ ID NO: 480620 - DNA, 122 bp, Homo sapiens
agccacaccattaatctctttaaggagctgttagtctaactgaatggtattctcaggcaccgtctttgcttttttttttgagattttaaaggatttaaccgtcacatctcaacttcaccttt

SEQ ID NO: 480621 - DNA, 122 bp, Homo sapiens
ggagcaggtgcaagaacagtgcagcagtgcaagcatcaggcagcagtgtttctcctccgccgacaaagtgggtggtgagaacacaactctgggaaaggggtaggcgtggatgtaaaatatag

SEQ ID NO: 480622 - DNA, 122 bp, Homo sapiens
ggcttatagagctagcatggaactcacaccacagcttccctggtccacagaggctctcaccgccattgccaccagtatggtggtatgtactcacaaagattaagaaagaaatgtattctgat

SEQ ID NO: 480623 - DNA, 122 bp, Homo sapiens
tctactaaaaatacaaaaattagctgggtgtgatggcggttgcctgtaatcccagctactcgggagactattattgttattgctgttattattgatattgttattattaataccttgccagg

SEQ ID NO: 480624 - DNA, 122 bp, Homo sapiens
tctttaattcacttaaggatttctagggtgccaggcactcatgatctacaccgctcacttcgcacttacacatttcttctgagagagtattccatgctcccatctaccccttgtaaccataa

SEQ ID NO: 480625 - DNA, 122 bp, Homo sapiens
tgtcccctgtggtctgaaatacagaaagctgggtgcatgccggagggccactgaagcatgcgtagctaagcagttccaggagaggtttgcatgtgccgaacgcagcaggaaccggccacact

SEQ ID NO: 480626 - DNA, 122 bp, Homo sapiens
gatcagtcctcccagactgcactggagagtgaggcctttgcctgttcggatttgctgcctcgtgtgtttcaagctgcccacacttcacaggctgcttcgaagccctccctacccaccccgtg

SEQ ID NO: 480627 - DNA, 122 bp, Homo sapiens
gaaacgtcctgaggtgcgggacgggctgccgcctgcctatctctcagaaattaaccaccccgctacaattctgtggatgccagagcggagacggctactacacaccaggaaagtctggttga

SEQ ID NO: 480628 - DNA, 122 bp, Homo sapiens
caccgggtgattacggccgcagggtgatgctgcccgggtgattacggccgcagggtgatacggccgcagggtgatatggccacccgggtgatacggccgcagggtgatggagcctaggtgat

SEQ ID NO: 480629 - DNA, 122 bp, Homo sapiens
cacatttctccatggaccccttggaaatcaccacgctccaggttagggagcaggttggtccgcgcctggtctgtgtcctgcgccccatttcaccctcccgctgcacccctgcttctcatttt

SEQ ID NO: 480630 - DNA, 122 bp, Homo sapiens
agggggcgcgcggtccggccccaggtgtggccgcggataatgagaccctggggatgggggcgcacctgcgccacggcgccccgcagagggtttcccaggagaccccctcgggctcccgccgc

SEQ ID NO: 480631 - DNA, 122 bp, Homo sapiens
tgttagccaaaaaccgaacagatcctaggcatcaaggggtgtgaatttcgaggtaggctccgttgcccgggctctgagggtcagggttcccggcggttgggcctgggacggcgaagcccccg

SEQ ID NO: 480632 - DNA, 122 bp, Homo sapiens
tgggtcttctccaccctcgtcgcactccttttccccgagacttggtactgggagataggacgggagtctcctacacgcagtcaacacttgccacgagcggctagacttaggacaggcaagtt

SEQ ID NO: 480633 - DNA, 122 bp, Homo sapiens
cacagtccccgcgggcggggatgcggaaggcaccgcggctgggaggggaccggccctccgcgccccaccccgtgcacgcgctcactcctgcggcgcacccggaactgccgccgagcgcggac

SEQ ID NO: 480634 - DNA, 122 bp, Homo sapiens
ttcggagtacaccgatatcattgggcgagcacacgccatggcggagagaggagacagccacgctcctctcagcccggctgctgccacaggaaaagcatgttcttgtcttttcatctgttttg

SEQ ID NO: 480635 - DNA, 122 bp, Homo sapiens
ctgaaactataatcggtggcttaagtcagtcagtgaaattattgaaaccaaaacttcaatcgtcaggacatattatacatctgaaaagcagcaggccacaaatcaaatatactttaaaacaa

SEQ ID NO: 480636 - DNA, 122 bp, Homo sapiens
caccacaaggaaaggtggagaaaagtagctaagatttccccttctcgaaatggcccacaacgccattggaactatcctctgaggacagttatgaaagcagggtgggatattgaaaataaata

SEQ ID NO: 480637 - DNA, 122 bp, Homo sapiens
aagcagagtaaaatgttgagaagccttagttcagcttcccttctgccttctaagccgtctcgctgacttgtgtctacctccaccgcaaattccagctgtcgcaggcccacccggtcaactcc

SEQ ID NO: 480638 - DNA, 122 bp, Homo sapiens
gcagttgccggtacatcggggatttctggctctttcctcttcgccttaaattcggtgagacgcggcgccccgctcaccccgggcggacgctgcgggtcgtggacgccgggcagagggagagg

SEQ ID NO: 480639 - DNA, 122 bp, Homo sapiens
agtcattcacctccctcaatctcctacggcctcccgtgcttcatggcatgtcggcaccgacgtattggcctgctgcgcaccaagtccgcttgctgaggagaagggtgtctcacctggcacaa

SEQ ID NO: 480640 - DNA, 122 bp, Homo sapiens
gagtgcgcaggcgcacttccagttctgccccaccgctgcggccattgtccgaccccggtgcggctgaggcccctttgggcagcccctccgcagatcagaattggagataaccgaggcttcgg

SEQ ID NO: 480641 - DNA, 122 bp, Homo sapiens
gggggacacaggtattccctcacaaggtcagactcccctgctagagcacttcccgcctgccgttcgaatcccaagttccacacaggaaggggaggggccaggctcctcaatgctgcaaacct

SEQ ID NO: 480642 - DNA, 122 bp, Homo sapiens
gcagggacgctgcacgcaggaggccgggcttgcctgagggactgcactttgcagagggcgcgccaggagccgttgtccgggcctgggactccctccatacaggccttcatctcgtggtctga

SEQ ID NO: 480643 - DNA, 122 bp, Homo sapiens
gtaccaggtataaatgtagtgagtgtatgtcataagccattgtgtgatcaccgtgcttcccgtccctccttattttgacattgcaaggtctcgtggaatttcaaatgtgcttttttggatat

SEQ ID NO: 480644 - DNA, 122 bp, Homo sapiens
gggggctccaggagggagggagaaacccgagcacaggcaggccagacaacaggtgcagcccgggcccctgagtcctgcgaccatcctgctggtgccgtccgagcttcttccacataggcagg

SEQ ID NO: 480645 - DNA, 122 bp, Homo sapiens
agggacaacacctggcacgcaagcaggcactcagtaaatattgctgaatcaatgaaagagcgggatcaggaaagcacatacaatttctaaacattctttcttagcatattttaaaatacagg

SEQ ID NO: 480646 - DNA, 122 bp, Homo sapiens
gccctgactgtggccaatgacaagtgaagtctatatacagtaagttctcattcatgtattcgactagcctgcgctctgtgcctagcatgtggcaggcaccgtatgggtgttgagatacaaag

SEQ ID NO: 480647 - DNA, 122 bp, Homo sapiens
gctaggacacggtgagtgactgacaagtgacccaacgggcaaagccaatggccccctccacgttccaccccctgggcatgagcaccctctcccatcttgccccttgatttgttgtgtccttg

SEQ ID NO: 480648 - DNA, 122 bp, Homo sapiens
aggcggccacaacccctgcagaggaacctgggcctctgggtactctcccagctactgcttcgctgagggccatggtctcctctcctgaaatcggaaaatctgagcttggcccttgaaagcac

SEQ ID NO: 480649 - DNA, 122 bp, Homo sapiens
gtaactaatgggtcctaggggtgggaccgtccactgcccaccacgtgggagggtccctagcgtcaccttcttggcgcgcggttccccggggagccccccgctgcgcgcaccccggggcaaag

SEQ ID NO: 480650 - DNA, 122 bp, Homo sapiens
ccacctccaaacactatccccttgacatcagcccatttctattgtgtcttattaggtcctcgggctacgaggacctagtgaaaaacgtggctgccctactactttgctaagaacaagaacca

SEQ ID NO: 480651 - DNA, 122 bp, Homo sapiens
cctggtttataggtcccggcccgagcctccggccgcccgccgggtttgtcccgcgatccccgaccatgcccgccgacctcagcggtacttggaccctgctcagcagcgacaacttcgagggc

SEQ ID NO: 480652 - DNA, 122 bp, Homo sapiens
ctggtgcaagctcccctcctgcaagggttcaagcgccccctccagtctgtcggcttttgacggctctccagtgcttctcacagctgggtttctatattctgtgcagagttcaatttttaact

SEQ ID NO: 480653 - DNA, 122 bp, Homo sapiens
cacaggcatttcctgtcctcctgatggtctggcgatgagccgtgtgtccaccatgcactgcgcttttcacagagcgagggctgagggcacatgagggtgatgctggctcacagcccccactc

SEQ ID NO: 480654 - DNA, 122 bp, Homo sapiens
taatacacatgaaaataaatcatcaggaaaacatttttaaatgcttgtccatgtgcctgacgaggtaaacctatatacaggttgtaaatggaacagcacctcgagggacaagggtcccgaaa

SEQ ID NO: 480655 - DNA, 122 bp, Homo sapiens
caagtctagcagacatacaagtcctgttgtctcccaacactcagcttctctcccaacattcgaggctgggcgcagtggctcacacctgtaatctcagcactttgggaggccgaggtgggtgg

SEQ ID NO: 480656 - DNA, 122 bp, Homo sapiens
gagcacctccagcctgtctaaaacagaacccctgttctctgccttacctactcttcttgccgtctttcccatctcaataaacagcagtattcttccaattgcttggcaaaacctgggcagag

SEQ ID NO: 480657 - DNA, 122 bp, Homo sapiens
ccaagcccaggaaggcattctgcagattatgtcaactgagtctgacgttctatggaaaggcgaaagtcctcgaacagccaacaccgtgaggaagaacagagttggagaacccacatacctaa

SEQ ID NO: 480658 - DNA, 122 bp, Homo sapiens
cccaaccataggtgagcccggggacgaagcagggagcgggagcgccgcggcgggccctcgcggggtctgctcccagttctgccacttttctggagctgaccctgacaccagatacagctatt

SEQ ID NO: 480659 - DNA, 122 bp, Homo sapiens
ccctttccgagtcaaagaaaggggtgacggacgcacctggaaaatcgggtcactcccacccgaatattgagctttcagaccggcttaaaaaacggcgcaccacgggactatatcccacacct

SEQ ID NO: 480660 - DNA, 122 bp, Homo sapiens
ctgggcgcagggagagccgcggaggcggagagcagggctggcgggccggctcctgggcctcgctgaagagcttcccgcgggccaggctcggccccagcacgacctgaacaacgtctgcttct

SEQ ID NO: 480661 - DNA, 122 bp, Homo sapiens
cgtatctgcttcgggcttccacctcatttttttcgctttgcccattctgtttcagccagtcgccaagaatcatgaaagtcgccagtggcagcaccgccaccgccgccgcgggccccagctgc

SEQ ID NO: 480662 - DNA, 122 bp, Homo sapiens
tccaccaccctccaccctgtggccctgagcaaccccaagcggctaacccagccctccccgcgccccctccaccaacagcatggtgtccgatgggacagtggccatcttcatcggcataatta

SEQ ID NO: 480663 - DNA, 122 bp, Homo sapiens
ggacaatgaggctcctcaactgttccagggtagcccttgcaggcaaatccgagaaggctacggcttcagaaggaaaagaaccagggaagaagtcctcacaggaatagaccgggcctcgggcg

SEQ ID NO: 480664 - DNA, 122 bp, Homo sapiens
actccctctattccttagatttcattcccggggtcacctctttggcctaggtgcacacaccgcgggctccgctctaggtggggcacaggccttcgcccgccgcatgcaccctgggctgcgca

SEQ ID NO: 480665 - DNA, 122 bp, Homo sapiens
tttttcatctgtgatctcacacggcccacgacgggtacgcccaacgcagcaggtattcgacggtacacaaacagggcagacacatacacaatgagccaaaacaagggcggccaacatgcaga

SEQ ID NO: 480666 - DNA, 122 bp, Homo sapiens
tcaccacgatccctgctctggtggagcccccgtgcggaacacaggatccgaagatggcagcggaagctccgcagcggccccaaaagcgactgggcagggagggcacaggctccctcactggg

SEQ ID NO: 480667 - DNA, 122 bp, Homo sapiens
aggaaagtgggtcggccaagacctggagctgctgcataacaatatctggcatttacacaacgaggcctctgctccggacactgttctgaggcttgacccgtccttaagaacctaggacaacc

SEQ ID NO: 480668 - DNA, 122 bp, Homo sapiens
tgcatcttgcatcactacaaaagaggcacggcacttggcagctgtcttagtctgtccaggcggctatagcagaatgccatagactgggtgacttataaataaaggcatttatttctcacagt

SEQ ID NO: 480669 - DNA, 122 bp, Homo sapiens
cgtttacacgccagagatggcgttattaaaaatgacatttaaccagagctggaattaccacgcggatggctgcaaacctcggaatcaaagcgggagccgccaggcgggcgcgcctggcaggg

SEQ ID NO: 480670 - DNA, 122 bp, Homo sapiens
gggggggcagcaggctgtgacccaggtgggtgtggacggggcagcccagcgcccgggccccgccgctgcctctgtgcccccaggtcctgcagcgcccttcccgctggtaggtgccctgccac

SEQ ID NO: 480671 - DNA, 122 bp, Homo sapiens
aaagagactcttaaaggtacagactcttatgtctgtccctcctccttaaagggccagagacgctcccgagcccatctccgcccccttcttcccggggaactgtaaaggtattttacatgagt

SEQ ID NO: 480672 - DNA, 122 bp, Homo sapiens
gcgggctcagctctgagacttttggctctacctggctctacagagctcatgtaaccatgccgaaatccctttagcccataagttacaataagtcaccataaaacccctgttttctgtccagt

SEQ ID NO: 480673 - DNA, 122 bp, Homo sapiens
tgggttttgctgctgatgagaaggataactgttttgagcacaatctcactgactctagaccgatggatctcaacccagggtgattttgcccccagggagacatttgacaatgtccggagaca

SEQ ID NO: 480674 - DNA, 122 bp, Homo sapiens
ttggcacttctgcctcagtcaaggtaaggctctctcccctagagctagcaagcaggtaaacgagctttgtacaaacacacacagaccaacacatccggggatggctgtgtgttgctagagca

SEQ ID NO: 480675 - DNA, 122 bp, Homo sapiens
gcttatggaaaaactggaaaatactgctacttcatacatcaaaggtaaccttacattctccgtaagtgaatgttttaactagaattaaggaagaggaaaaaggaaacgggtaaataagcagc

SEQ ID NO: 480676 - DNA, 122 bp, Homo sapiens
ccgcaatgtgagccattcagcctgaaatgaaagattattagacaatagcctgagttcacacgaagaaataaacagcactggtaaaggtgctggtgcggtggctcacgcctgtaatcccagaa

SEQ ID NO: 480677 - DNA, 122 bp, Homo sapiens
cccgccggcccggcctggccccttgttgcctctgcatcggctgggcggtgtttgcgtggacggccagctccgcgtccccagccccttactggggagccctgaatcctctgtcataccctgcc

SEQ ID NO: 480678 - DNA, 122 bp, Homo sapiens
gcggaggggcgttatctggagggccgcgggtgcaggccgcagtgacagggccgctcgccccgctagtcctgcctgtctcccggtgcagctgtgttcgcggcctgcaggcccaacatggcgca

SEQ ID NO: 480679 - DNA, 122 bp, Homo sapiens
caggctccttggagtaagagtgtgagaaactggatgaagacagctgtattcttttggaagcgttcgagattggtctgtctctaccaactaaaaacttctagcttaagtgcagagatttaagg

SEQ ID NO: 480680 - DNA, 122 bp, Homo sapiens
tgggctggtataaacaaaggagccgggaaggagaggaaatatcaaggaagccctgagtgacgcatcagagtagagaagagacgagcctgcggaagtactccaacagacaatcctgctttcaa

SEQ ID NO: 480681 - DNA, 122 bp, Homo sapiens
ctgaccaaggggagaggctggaaggcagttttgccagctccaccgcctgtctttatgtgccgattcacgaagctaccttccttcttgcctttgatgtcagaaatccaaaagcgggtgagtaa

SEQ ID NO: 480682 - DNA, 122 bp, Homo sapiens
ccttccgctccgggaagatgagcctcagaagccgcaggggcgcgccttccccccacaccgcgaatcctccccaggcatggccaaaaaaaagagtgggagagggagttaactcagcaagaata

SEQ ID NO: 480683 - DNA, 122 bp, Homo sapiens
ttcagctcacggcaccgggctgcaaccgaggtctgaatgttgcgaaagcgccccagacgccgccgctgctttccggccgccccctcggctacagccgccatttccacgctccaccaatcaaa

SEQ ID NO: 480684 - DNA, 122 bp, Homo sapiens
ctaaaaatacaaaaaattagctgggtgtgatggctacctgggaggctgcggcaggagaatcgcttgaatctaggaggtggaggttgcagtgagccgagattgcgccattgctctccagcctg

SEQ ID NO: 480685 - DNA, 122 bp, Homo sapiens
tatcacactcagacacactttgagaagtcacacaagaggcatgggcagatccactaatcacgtaaaacccctctgatagacacagttccatactcacaggttaaactcacgcagacactcat

SEQ ID NO: 480686 - DNA, 122 bp, Homo sapiens
caatttcttcctttgtgcatccaaatgggagtcctcgaagccgcacgaagccatcgttggcgctgtcggcactgttgggaccactgtgcttcaacacccaatccatctcggttctgtgggac

SEQ ID NO: 480687 - DNA, 122 bp, Homo sapiens
cttgcccaatttttcacccacccaaacagacactggacggtagtcccctgggaacaaagtcgccccttgcacctttccacctctccaccaacatgccatgcctgctctagactgcacccttc

SEQ ID NO: 480688 - DNA, 122 bp, Homo sapiens
ggtgcccaccacgtgcaccaggcactggccagacagaactaccacccccagcatgccgcgcgcatttgggccgtaccacaacctgtagggtcatctgggtctgaaacgggcaccagcgacgc

SEQ ID NO: 480689 - DNA, 122 bp, Homo sapiens
ggcttcttctctaaatgccaaggcgccatgaagagacacaaatggaaagacaggaatgaccgctaacagggagaccaaatcctgtcccaaggagccaccgaccaatagcagcttaaaccaca

SEQ ID NO: 480690 - DNA, 122 bp, Homo sapiens
tttgtgcccaggctccggcctgctgtggtggcgccccacgtcgcacatggctgtgtcctccgtccccccaccccgcccagcacacagtaggtccccggcactgagtgggcacttgctctgcc

SEQ ID NO: 480691 - DNA, 122 bp, Homo sapiens
ctcggtgtccgtgatggtctaggcggcttccgaggcgatcgggcagtgtcagtcttcagccgctaagccgagaagatctgggaaggagtcagtcagagagccttgggccggagttccagggg

SEQ ID NO: 480692 - DNA, 122 bp, Homo sapiens
ggagggaggggctgggctccggcgggagggaggggctgggctccggcggtggggagggaccgtttcatgggtgcacctgcactggcaccttctgtgcctgtcttccagacagggcctggctg

SEQ ID NO: 480693 - DNA, 122 bp, Homo sapiens
gagcggtgcgggggtgggggtggagctgcagcagcctggagccaggagtgggcaacgcggcgtgagcagcggcccgaggctcccggagcatcgcgctgggagaagacttcgccgctcggggc

SEQ ID NO: 480694 - DNA, 122 bp, Homo sapiens
agcccgctggtgcccaagaagccaaggtagattctgaggaaactgccctaggtccacagacgccctgcccacctgtcccagccccactccccttccatgggcccctgggcactgaaggtgag

SEQ ID NO: 480695 - DNA, 122 bp, Homo sapiens
cctatgtttgttgtacttttctcaaataactgcttctccctcctgctaccaatctttttccgttcacagaggaccttggaatagtatgtttgtactacttaatcaccacccaatcccttctc

SEQ ID NO: 480696 - DNA, 122 bp, Homo sapiens
cagccacctcatccgcgtggaaggcaataatctctcgcagtatgtggatgaccctgtcaccggcaggcagagcgtcgtggtgccctatgagccaccacaggtaggccaggagccaggctgtg

SEQ ID NO: 480697 - DNA, 122 bp, Homo sapiens
tgattcatagagctgaattctgccaaggcagctctttcacttttagccactaaagcaccgcgtggaaccgggttttgtgtttttctaaaataaagagaaggattatcagagaggagagggag

SEQ ID NO: 480698 - DNA, 122 bp, Homo sapiens
cctatatgcacatctgtgaaacgagcacagcaacagtgcccaatacaattgctacagcagcgtctatcggtgcagatgtcaacggcagagctgtgcaggtgagtcttcctgtctctccttgg

SEQ ID NO: 480699 - DNA, 122 bp, Homo sapiens
agctgctgtctttgcgggataaacagaaaagggccagtccccacctcacccccagcccgccgccccgcaagtacctggggctggggagtcagtgaactctcttcagctgttcggctctcccg

SEQ ID NO: 480700 - DNA, 122 bp, Homo sapiens
gactgccgcctcaggacccagagaacgcagcacactttagttgggcccatctatccccggcgaggcttggactacgtttcccaggagaccctgcggtccagtatgtctcccgaggaggggcg

SEQ ID NO: 480701 - DNA, 122 bp, Homo sapiens
cgccggttccagaggggcgggaccggagcgagagcctgggtggggcgggcgggcgctgcgcgtgcgcagaggtgcggccggggaggcgcgcggaggctggagctggaggcgcggcgccggtg

SEQ ID NO: 480702 - DNA, 122 bp, Homo sapiens
gggcgactggaggccggtgaagaatcgcaggcctcccgaagtgtgccagcttgcagggcacggccgacgaggtgtgcggcacggggccgcgccggactgcaaatgtcattatctgttattta

SEQ ID NO: 480703 - DNA, 122 bp, Homo sapiens
gggcagcctggccggtccctgccgcagggtccaccggtccctgccgcagggtccaccgcacgtcacgtggccgaatgccccgggctgctttctgtctgggctgttttctcactgtgaacctc

SEQ ID NO: 480704 - DNA, 122 bp, Homo sapiens
gtcacgtcgctcaggctgtggatgccgtcaggctcatcgtagacattctcccagtaggagcgcaggcccggggtacctgcagggtagttcccgtacaggtaatagtccagctgcccaatgat

SEQ ID NO: 480705 - DNA, 122 bp, Homo sapiens
caagatttcaccctctccatcaccaagccaagggaaacataaccaaaagggttttcttcccgatggcgaaggcatgataggttagtgattcgtggtagaattattgccctccgcgcggaggc

SEQ ID NO: 480706 - DNA, 122 bp, Homo sapiens
gggcgtctgggacttcttcatcttcatcatcgccccttccccatagggtactgcagggggcggggggcggggcttcggcggggcggggctgcagggctcccgcgggctggcggggcggcttc

SEQ ID NO: 480707 - DNA, 122 bp, Homo sapiens
gggggcagtaatgatgccatgtgtgttgtaaagttactgggaggagtaaatgaactaaaacgtgtaaagcatctacaagcaggcccagcacacaggcagcaccaagtgaggatttgctagtg

SEQ ID NO: 480708 - DNA, 122 bp, Homo sapiens
cacccgcagagctgccctgccggccaccgaccaccatggagggagcattcagctggtgcgcgagctgggtactaaactggctctactgtgagccgccctcggcccctccatctcctcttacc

SEQ ID NO: 480709 - DNA, 122 bp, Homo sapiens
cttcagctgtgctctcaggcagttaccggccagacccggaccggaaccttggcgcggtgacgctagtttccggcgggctacttagagcgccgaacagctctgggccaaaggaccatgagagg

SEQ ID NO: 480710 - DNA, 122 bp, Homo sapiens
cgggggctgcggttgggcggccggtccggggggccaagacgccccggagacgttccctcccgctaggacactgcagctatagtccccaaggtgtgcctggccgctgctagtactggctccgg

SEQ ID NO: 480711 - DNA, 122 bp, Homo sapiens
tcgagttggggccttacagggacttcaggatggcttagggagcgccttctacccaagacacgatgtacggaagctgtcttttggagaaagaagcaggcatgtacccgggcactctcatgagc

SEQ ID NO: 480712 - DNA, 122 bp, Homo sapiens
tcacctctgactcgcgccgggatctttgttggaaccgagtgtcaggaatcgcaaataccgcgtgaagaattcccccgtggccaatctgcacgggagaatgcttcacgctgggccatttgcgg

SEQ ID NO: 480713 - DNA, 122 bp, Homo sapiens
gggagaaacccactcccagtccaccctggcggctccgccggtccaagcgctgctcctgctcgtccctgatggataaagagtgtgtctacttctgccacctggacatcatttgggtcaacact

SEQ ID NO: 480714 - DNA, 122 bp, Homo sapiens
ccaacccccctggagaaaggaacaagtccagaagcaccaccttaagagttgtagcactcacggcaaatgtctgcagcttcattcctgagccagcaagaccacgaaccccccagaaagaacaa

SEQ ID NO: 480715 - DNA, 122 bp, Homo sapiens
agccccaggctcgcgtcgccggggtcgtcgcggctccagtcggaaaccgggacccccagccgcccccgcggcgtcagctctgagatcccgcgcaacccaatcgccaaaacctgtggtttgcg

SEQ ID NO: 480716 - DNA, 122 bp, Homo sapiens
gattcctcagagactttttattgactcttctctgaacactgtcgccggagcagcagtgggcgtcccttcctgggccttcgttgcgggtcgggagggtgtccgcttgggctcggggctctgct

SEQ ID NO: 480717 - DNA, 122 bp, Homo sapiens
ggaaaaaacaaacaaacagaaaagcaggcctggcgcggtagctcatgcctgtaatcccagcgctttggaaggctgagacggggttatctcttgggctcacaagttagagacaagcctgggcg

SEQ ID NO: 480718 - DNA, 122 bp, Homo sapiens
tattttttttaatgaattaggtctgaaaagcttaactgtctataacaatcacggattctacgatgctgttcaaacaggaaaagcagaagggagagtcctgtatattttccccttatattttt

SEQ ID NO: 480719 - DNA, 122 bp, Homo sapiens
aaccacacactgacctctattttctccagatacacaagaagggcctcaacgttacacttccgtaaactgctcctacttctggagtcctcgcacgggtttatggtccacctacggcggccgag

SEQ ID NO: 480720 - DNA, 122 bp, Homo sapiens
tggaacgcttggcggttctgaacgcgcatctcgtgctgctcctgtagggcggttaggacgcgctcctctggcgaggaaggtggcagcctccactgtgcacgggtcacaggcgagtgtggtgt

SEQ ID NO: 480721 - DNA, 122 bp, Homo sapiens
agagctttctggataacacggcagccatacatctgtagtgccaatgacaggacgtggcctcgaatccgttctgccaaagccagcttctgttcaagactgccaaactagacataatgtgtggg

SEQ ID NO: 480722 - DNA, 122 bp, Homo sapiens
ctttgcttccttgtattgacagtgttgtatcctcataatatgatgctgtgtttgctggggcggcgggggggtatgtctattccactgaaaatcaagcttgggttcagcatgggcagttcccc

SEQ ID NO: 480723 - DNA, 122 bp, Homo sapiens
cacttggtacagcctgtgccagcccctgagggaccggctgcagcttcactggcaaacaggcgggcaaggggcacagggctgctggccggagctgcctgcactctgcaggtagggttcaggca

SEQ ID NO: 480724 - DNA, 122 bp, Homo sapiens
gccagcctgagcaacctagcgcaacactgattctacaaaaaataaaatacaggctggccgcggtggctcacgcctgtaatctcagcactttcggaggccaaggcgggccgatcacctgaggt

SEQ ID NO: 480725 - DNA, 122 bp, Homo sapiens
aggaggcaagtgttgtgagtctggagggttcctggagaatggggcctgaggcgtgaccaccgccttcctctctggggggactgcctgccgcccccgcagacacccatggttgagtgccctcc

SEQ ID NO: 480726 - DNA, 122 bp, Homo sapiens
ctttgatgaacttgccaagcttctaaaaataaaaaaattgtttgggcatctcagtgagtgcgtgtttagatggcctataaaatgaaaatttctcggccgggcacggtagctcacgcctgtga

SEQ ID NO: 480727 - DNA, 122 bp, Homo sapiens
caggccatctctcgcctctgcgaggacaagtacaaggacctaagaagatccgcgaggaagcgctcagccagtgcagacaacctgactctgccccggtggtccccagccatcatctcttaact

SEQ ID NO: 480728 - DNA, 122 bp, Homo sapiens
cagttccctaaactagtcgctattcctctagccactaatttggaactagtatactgtgtccgacatgccagaatcttaagtagctaactcctatttgttatatgtgtctcaaattcaatcct

SEQ ID NO: 480729 - DNA, 122 bp, Homo sapiens
ccgcgccccacgcctgatgctctgtgcgctcgccttgatggtggcggccggcggctgcgtcgtctccgccttcaacctggatacccgattcctggtagtgaaggaggccgggaacccgggca

SEQ ID NO: 480730 - DNA, 122 bp, Homo sapiens
tgcaggtggaaactcgctgggcccggtggggaaggctggcgcagagcgcagagatggacgcgcagagctgcagccctagcagacgctccgagtgtgtgctgctccgctcctccaggctcatt

SEQ ID NO: 480731 - DNA, 122 bp, Homo sapiens
cctggaagggggcgagaccagcgacatagggacggggccatgcggtgggcgggtggaacacggcgccggtagtgagtggccgagtccgcgctgagagcaaaggggaggagcgggccgggggt

SEQ ID NO: 480732 - DNA, 122 bp, Homo sapiens
ctgaagctcagagcgtggtctgcttggtggccctcttggaactgagctgcccaagctttccgctggtacctcaagcagtgggagggacctggatgggatcatgcatacataattttaaagta

SEQ ID NO: 480733 - DNA, 122 bp, Homo sapiens
cagacgactcatatcccccagccctggcctccttcagcctcttcagactcacgccagctccgccaccagctgggatccctcccacctatggcataggcagcccgcgaggtgccctaacgccc

SEQ ID NO: 480734 - DNA, 122 bp, Homo sapiens
tctcagtttcttcaagattaggctgaggttggaaagcaaacccgaaagcatctccaaccgcgttatttctgggctgtgttgatgcatgaagccacatctggctcaggatggagactcagggt

SEQ ID NO: 480735 - DNA, 122 bp, Homo sapiens
ggcaaccagaagagaccctggcatctccaaagcgctttatctcagtccattggaaccagtcgtgctgaccgattcacacctcggctaacgcacactcgcgggggtgatggccttcccttccc

SEQ ID NO: 480736 - DNA, 122 bp, Homo sapiens
ctcgggaactagatcgagagctgaggtccggactggtgtctgacaaacctggaatgtcatcgatctttgtcggtgtcaccatgaaccgaactgaagccatcttggtggtggtttctggagga

SEQ ID NO: 480737 - DNA, 122 bp, Homo sapiens
tggtgtgggagtccatccacatgagggatgggcacagtgagaggggtcagacgagagctccgtgaggatcccgcaccttcactaacaccggcaccgttctccccgtggggacgccacacctc

SEQ ID NO: 480738 - DNA, 122 bp, Homo sapiens
atggagggaccccagaaggggtggtggtgctggtggtggtcatggcctctgcggccctggcgagagcaccgcgggggtcgagaggccagccacgccgatggaagggatgtgcacctgggcgc

SEQ ID NO: 480739 - DNA, 122 bp, Homo sapiens
atggattccaaggaatggaatcttgagccatgtggtgagtgttagagctctattagaagccgtgggtcacggaagagaacccacagaacccagtgactagtattgagctcgattaggacgca

SEQ ID NO: 480740 - DNA, 122 bp, Homo sapiens
agccgttgatgcacgggacatcgtcataatgaagtgccgtcccgctggggtgggcatagccgttggaggtgccccctagatatgggttagcagatataacacgcctgttcatgaaactgaaa

SEQ ID NO: 480741 - DNA, 122 bp, Homo sapiens
aaaaagtgtttatttgctcggagaacatttcaggaggccttcctgggaccccaagtgtgccgccccccgggaggggcctggagacgcccgcgcggcccccctgcaaagttttaccggccctg

SEQ ID NO: 480742 - DNA, 122 bp, Homo sapiens
gctgccggcgcgcggacgcgtctggggcggttcgccttagccaagtggaaagagactccgcgccgcgggctacttaatagagggctgttcccagctctcagtttactcggttacgaaacgcc

SEQ ID NO: 480743 - DNA, 122 bp, Homo sapiens
gaaataatatttagaaacaacaccagctcacaagggtagtaaaatactaattcttaaaatcgttaaacagattgaaataatgtttgtcaataacaccagctcacaaggatagtaaaatacta

SEQ ID NO: 480744 - DNA, 122 bp, Homo sapiens
ctgggctgtgtgtgccagaccccaaagagcacagaggggtaggctgggacctggaagactcgccgccacgtgtcgcccccacccggcgcccagcccagccctgccggtgcggctctggctac

SEQ ID NO: 480745 - DNA, 122 bp, Homo sapiens
cgctgttccccttttggagtggggtagctccgatccgaggtgctacattctgacccccgacgttaccgtggggcaagggaactcggaccccagggtagcttggccccctaccagggaaaggc

SEQ ID NO: 480746 - DNA, 122 bp, Homo sapiens
ggagaaacaggttccaaaagactaagagcctcactcaaggccaacagatggtgaatgagccgcagaaccaggtggtctggaagccaggcatctcaccgcgctgtggctgcacagagtctgtg

SEQ ID NO: 480747 - DNA, 122 bp, Homo sapiens
tactattggctgatgtttttgatcctgtcttcctgtcctcctgcctgtgacgtctggatccgcagaaggaatggaataatgagaactagccctccatgaaaatgaaatgttactttagattt

SEQ ID NO: 480748 - DNA, 122 bp, Homo sapiens
ccaggctacagatgaggaaactgaggcccaaggattccagagagcctgccccggggtcaccggtgcggtccggatgtctccaaaggctctcccactactctggaattcagaggcagggtctc

SEQ ID NO: 480749 - DNA, 122 bp, Homo sapiens
tattgctgttgcttatcatttgaaaataaaatccagctcaggttgtaacttgttggtactcgtttagtgagttcgttttggaggttctgaaatacctattaattcttaatattacctctctt

SEQ ID NO: 480750 - DNA, 122 bp, Homo sapiens
ggcttttaaaatccctattggtccactccagactttcctcgtcgcacaacctggaagagccggcccagctgtttctctattggcggttcctccattcatgtgactcttctgcacgctcactc

SEQ ID NO: 480751 - DNA, 122 bp, Homo sapiens
gtgctcgggaagggccccagagcttctggcccagctggaggcaggaggcggagcctcctccgcaaagctggatcagtaccggggacgcagggcgcacagctagggctggcgggggcggcccg

SEQ ID NO: 480752 - DNA, 122 bp, Homo sapiens
tctttctgtctcaggtggatcttggtgtggcgcttcctctcatcactccgggcaaactttcggccacagtagtcacaggcgaagggcttctcaccggtgtgggtgcggatatgggtggtgag

SEQ ID NO: 480753 - DNA, 122 bp, Homo sapiens
cagggcggggggaaggggcagcccacagttggcgctacacgactccgcttctgttttccccgtgttgacatagaaatcagactggaaagaaagcaacatgtagaggggcttccccgggtgtg

SEQ ID NO: 480754 - DNA, 122 bp, Homo sapiens
cttcagtggactaaccatccctgccaggctaaccctttcttcgcaaaccatcttccccgacgccttccacataagatgccctcctgcgggccctcaccttttgacactgcctcccaccgcac

SEQ ID NO: 480755 - DNA, 122 bp, Homo sapiens
ggaacagatggctgggaggactcaaagggaaaatcaggcacctttgctgccggatccccacgccagcccctccaaacgtcctgactcgtgagatgcagagatcctgagcctcgtgtctctga

SEQ ID NO: 480756 - DNA, 122 bp, Homo sapiens
cactgtgaaaccccttctctatcaaatatacaaaaattagctgagtatggtggtgtgtgccggtagtcccagctactcagggggctgattttaacctgggagattgtgccactgcactccag

SEQ ID NO: 480757 - DNA, 122 bp, Homo sapiens
gggcggctcccacaccagcctctgctggctgccaaggccttaccttcatcatagtgtctccgggcctcggtgcccggctcagctctgggcacgccctggtacagcccctcgcccacgaaatc

SEQ ID NO: 480758 - DNA, 122 bp, Homo sapiens
gatgtggaggacctgcagcgtgacaaagcccggctgctgcgggagaaagtggagttcctgcgctccctgcgacagatgaagcagaaggtccagagcctgtaccaggaggtgtttgggcggct

SEQ ID NO: 480759 - DNA, 122 bp, Homo sapiens
aggtgctaagcccctcactgccccgggcggcggggccggccggcttctccgagtgctgggcgcccccagcccacgcccacccggaactcacgctggccggcaagcgctgcgcgcagccctgg

SEQ ID NO: 480760 - DNA, 122 bp, Homo sapiens
ctgcaatgagagagggaaatttcctagtcaggtcaaggtccaacaaaacaaacgtccgcacgcaggaattgaaccgtctcgcaggcagaggcggctgaaccaggagcgagcggaagtgacgc

SEQ ID NO: 480761 - DNA, 122 bp, Homo sapiens
agaatgagggagggggcgcaggccatcaggggatctacccagcactgccctgaagcctctcgccccagcattccagcccagccctctgctccccttctctcgggttcctcggcgtctatccc

SEQ ID NO: 480762 - DNA, 122 bp, Homo sapiens
ccacagtatgtgccaccgtccgcagaacaaatgcttctgatgagttctccatcagtcaaacgctgccatgcaaccagtgcacacacagagccgtgtgatgcccagtgagctgcaaggcttac

SEQ ID NO: 480763 - DNA, 122 bp, Homo sapiens
cactgaccttgagaaggctgatgcccgtgtcactggtgggaggtgtgaagtgctcgtcgtcgtcaaagtgaatgtcacctaggcgccaggcgtgtgcaaactcctgcccgctcccatcgaag

SEQ ID NO: 480764 - DNA, 122 bp, Homo sapiens
cggaatctctgaaagactgaccgactgactctgacaggatccggggctgagggaaggaggcggcggccatggagttgggcgagctgctctacaacaagtctgagtacatcgagacggtgcgc

SEQ ID NO: 480765 - DNA, 122 bp, Homo sapiens
cctcacctgctcctcttgaggcagctgctgccactcgctgaggggacaacatggagcctccgccttcaaagcagaagcagcaggggtgcagaggagagggacgggtgcgggcgggaacgaac

SEQ ID NO: 480766 - DNA, 122 bp, Homo sapiens
attgtaaaagttggaaaactgaggttcagagggtaactaagccacccaagatcacatgttcgtattatgtagctgaactggggttggaacccaagaaggtctgaacacaggtcactcactgc

SEQ ID NO: 480767 - DNA, 122 bp, Homo sapiens
tgactccgcacgagactgcggcagattgtggcggcggcttctctccaagacttacgtaaacgagccttgccacagtacttttttaaattagtaaatgagtttgggtgcgattgatcagtgag

SEQ ID NO: 480768 - DNA, 122 bp, Homo sapiens
ctgattgaatgggtaaaagacacttatagcccagatgaacacctctgggccacccttcagcgtgcacggtggatgcctggctctgttcccaaccaccccaagtacgacatctcagacatgac

SEQ ID NO: 480769 - DNA, 122 bp, Homo sapiens
gaccagccgggccaacatggtgtaagctcgtctctaccacaaatacaaaaattagctgggcgtggtggtgcacgtttgtagtctcagctacttaggaggctgaggcaggagaatcgcttgaa

SEQ ID NO: 480770 - DNA, 122 bp, Homo sapiens
actgagcatttattccatttaaggcagtatgctaggcactttggacaaatcaatgcctaacgtacttacttaacaaacataaaacctagcaggaaggtaatacatatatataaataaatgaa

SEQ ID NO: 480771 - DNA, 122 bp, Homo sapiens
ggcgtgcagggaggagaaaaagcattttcactttttttgctcccactctaagaagtctcccggggattttgtatatattttttaacttccgtcagggctcccgcttcatatttccttttctt

SEQ ID NO: 480772 - DNA, 122 bp, Homo sapiens
tttctggtcaattccagttgtttgccggatgctgtaatagttgattctcctaccgtgacccggctgttggtgcccgggttccctcccagcctgtagttgttgtaggcgagatgactgtatgg

SEQ ID NO: 480773 - DNA, 122 bp, Homo sapiens
tagagaggtgacaatcaaaaatatctgttcgtcaataagttaaccgtactcaggttaagccgctgttggtcactcaggttttatgcagagctgaacatcagagtaaaaggtctcaacagaaa

SEQ ID NO: 480774 - DNA, 122 bp, Homo sapiens
cgcacactcacgtgagggagatggtgaagtggaagcgctgtctcaggccccggaaggtgacgaaggactggggcgggaagctcctggtggtcacctcacagtagggcctctcatactcgcca

SEQ ID NO: 480775 - DNA, 122 bp, Homo sapiens
gggcacttcggggctcaggctccccgccctgcgggaccgcgggtggctgcgaccccagcccggttccccgccagcctgtcccctagcaatgcctccccgtacccgggtcccgcagacttacg

SEQ ID NO: 480776 - DNA, 122 bp, Homo sapiens
tttccatccaccaaggccaggacactcgtatgctcccggacgccctctccggcgtcccttcgctgagcccggcctggctagcccgccaccccgcccgctgttacccgactgcccgcaccgac

SEQ ID NO: 480777 - DNA, 122 bp, Homo sapiens
aggaaatcaggcaggggaaagaatctgaaagcgaggagtgagtggctggcaaggctccttcggaaggtggcaataacagtcatagaccggtcacatcaattgggtgtttactgcgggccagt

SEQ ID NO: 480778 - DNA, 122 bp, Homo sapiens
gcgcaatggaaacctgggtgcagggactgtggggcccgaaggcggggctgggcgcgctctcgcagagccccccccgccttgcccttccttccctccttcgtcccctcctcacaccccacccc

SEQ ID NO: 480779 - DNA, 122 bp, Homo sapiens
cgtggatggaggcggtcggcttcagcacgcatgcgggttccggagcgggaggcgggaggacgccgcggctctgactcaatgcgcgtgcgcgcggttggggggttgagggtggggagatgagt

SEQ ID NO: 480780 - DNA, 122 bp, Homo sapiens
ttgttaccgagctgcgggtaaacacaaaaggcatttctgcctggggcgtaaccttctgcgcgcaaacccaactgcttctagaagatgggcgtaaacttgaggtcactacagtttaatccctc

SEQ ID NO: 480781 - DNA, 122 bp, Homo sapiens
caggcccggaggaagcacctgcggttgtccactgggtgggcactgcccgcggggaacgggcgggaccgcaacttcggagcactttggcagcgtggggagggggctcctacccggacgccccc

SEQ ID NO: 480782 - DNA, 122 bp, Homo sapiens
agtgtccctcttgaaaggcccgtcctgctcccacttaccttggagctttttaaagcaggacgagtcagcctcattccaagggctcttttatatggatagctatggaaacaatgcagctgcct

SEQ ID NO: 480783 - DNA, 122 bp, Homo sapiens
ggggggaggctgcacaaaggagcaggtgtgcgcctcccctgccgccccgcgcccacaggacggcacacaggggtctgctcgtgccgctttctcttgacctcggacacctccccatcgtcccc

SEQ ID NO: 480784 - DNA, 122 bp, Homo sapiens
cagctaagaatcaattcttctacactttacatagatacctagatgcaaatttttttcagccgaccacaaaattaggtccactctgagtggtgaaaaacaaaagattctaacattctagcaaa

SEQ ID NO: 480785 - DNA, 122 bp, Homo sapiens
aacaggtggaggatgagcagaagggctggtgtttcctctggcagcagcttggagtgaatgcgtttcagtgggcagatgacccaagtgtctggggacccactggagagactgtctgcagctcg

SEQ ID NO: 480786 - DNA, 122 bp, Homo sapiens
atatcagttattgaaagcactaaattatcctgcaaactcccggctgatgcctaaggaattcgagttccagaagcaagcccccagaggaccccggcccaggcccgctcctctgcgcagcgctg

SEQ ID NO: 480787 - DNA, 122 bp, Homo sapiens
ttttcttagaaatatgtaggtaaggtttatcttgaatcttaattgccttaattttaaggacgtcaaaggctctcgaggcaagctgtcaacgtcttgttgaaaacaaaaatcaagaaagaatt

SEQ ID NO: 480788 - DNA, 122 bp, Homo sapiens
cagatgtttgctcactcattccttccttcagagttcaatttccttcttactgcagtacagcgttcatagtgctttcttcaaaggtctgtgagtagtaagtctttgattaaaatttttaaatt

SEQ ID NO: 480789 - DNA, 122 bp, Homo sapiens
cctgcctcaatgcacagaagaaagtgttctgaaggcgacgcccccagtcttggcgggaaacgccgcggaagacgcttctctcgcagaaatgccaaattttcgggagcgcgggctcgcagcac

SEQ ID NO: 480790 - DNA, 122 bp, Homo sapiens
gctctaaggaacagtgaggtcgccggtggggagcttggctgggacaccaagcaaatgcatcgtatgtccccttggagacgtttttatgcagctgtgtatgttactatccagaaggagtcggg

SEQ ID NO: 480791 - DNA, 122 bp, Homo sapiens
cgcctcgggcgcctgagtgatggcgggagccgctaggggcgcgaggggcgacgctgagcgcgggatcccgcaactaaggtctctgccccccccccagtaccccaagcctgccccccaccgcc

SEQ ID NO: 480792 - DNA, 122 bp, Homo sapiens
ccaggcctaacccctggggcctccatgcaccaagggaaagctcttccagggtggggtcaccgggaggaggggggaggctcaagttacagaacagcctggtaggggctcaaagacgcccatcc

SEQ ID NO: 480793 - DNA, 122 bp, Homo sapiens
cctggtcctctgtagcgtccctccatgtgaggtcctcccattctatctcattgtgcctcacgccctgctgctggcctcctttctgcctctctggcttcctctttccttctaggagggaaaga

SEQ ID NO: 480794 - DNA, 122 bp, Homo sapiens
actttgcttgaatgtttacattttctgctcgctgtcctacatatcacaatatagtgttcacgttttgttaaaactttggggtgtcaggagttgagcttgctcagcaagccagcatggctagg

SEQ ID NO: 480795 - DNA, 122 bp, Homo sapiens
tggagacctccatccccagacggaacgccacagctgtgaccagaacagccctcaggaagacgacagcctcccacctgtgcctccccaggcctggacccgccaggacccacgagccccaagcc

SEQ ID NO: 480796 - DNA, 122 bp, Homo sapiens
acaagagtcccccctgcaaccctgtctctgggtcttactgtgtgagaaggcggggcctggcgttggagcccgcatttcataaagtcaagccacacagaggccagggaactggaaggcaggag

SEQ ID NO: 480797 - DNA, 122 bp, Homo sapiens
gaactcagtgtacggccgccacgcgctgcccagccacaggctccgagtgccggcgcgggccgcctgggtggtgcaggagctgccctcgctggccctgccgctctaccagtacgccagcgagt

SEQ ID NO: 480798 - DNA, 122 bp, Homo sapiens
cttctatttaccgggggctggtcatccttcgggccaggctgactgtctaggggtggccctcggatacctggtccccgcaggtgacccccctccctcccaccgaggaggagggcgcgtcccgc

SEQ ID NO: 480799 - DNA, 122 bp, Homo sapiens
cgcggggaggaaagggttaagctgcccgagcccggggaaggggctgctctcatcctggagcgaggtgcagccaccggcagctgtgatttaggggtcaagtccgagatcacctttctcctgcc

SEQ ID NO: 480800 - DNA, 122 bp, Homo sapiens
ggagcctccgcagggacctttccctgtgcgtttcggcagctgtgatccactcaactctgccgctgcactaggtgttagggtgaagcccttcaccggggacgtcctgaggacattttcacaag

SEQ ID NO: 480801 - DNA, 122 bp, Homo sapiens
gggtgctgtgagttacctttggttatagggaggtggtgacccatggtggctccaagtgcccgtggcctttcgtgaccccgccagcagcgggtgggcctttggggcgctccgaggctcgcccg

SEQ ID NO: 480802 - DNA, 122 bp, Homo sapiens
agtgatcaataaaaatgctcgggggtcagtggctccgttctgacgatgcctggagtgaggcgaggtggagacacaagggcaggaagaaacggcataaaatttctcacctgaagaaaatgggg

SEQ ID NO: 480803 - DNA, 122 bp, Homo sapiens
gagaccaggcctcacccaagaaaagctgaatcgagctctctgccatgtccatgtagctcacgggcttcacaggtgactgtgatacacagccaggttaggaaacaccagcctagcacaatccc

SEQ ID NO: 480804 - DNA, 122 bp, Homo sapiens
tgcagaacatcatcaagaaggtgatcgggcagaagtttgtgtacaagtttgtctctttcccggagatcctgaagatggatcctcacgcggtggagatcagccgggagagccttctgctgcag

SEQ ID NO: 480805 - DNA, 122 bp, Homo sapiens
taaaaatcccacagacggaattttcaaaaagaggagaaacctcccgcgggagggaggcagcgagactccgaacacggtagcaagcactctggacagactcatgtatgaaaaagtacatcatg

SEQ ID NO: 480806 - DNA, 122 bp, Homo sapiens
aaacctcccgggttcacaccattctcctgcttcagcctcccaagtagctgggactacaggcgcccagcttagtttgaacacaacctttacacgcttagtttgaacacaaccacatttgtagt

SEQ ID NO: 480807 - DNA, 122 bp, Homo sapiens
gcagccccgagcttctgtcttcctatttagaaaaacaaacaaaagccggttcgattaccacgggcaggctgtgaagcatccaacacaaaccgaagccgcccgcctggcgtctccaaatgccc

SEQ ID NO: 480808 - DNA, 122 bp, Homo sapiens
ttcacttcatcccactcttcaacttgagcaggggttccatgtttatctgttttactgactcggctttgccttaagattttctttggaaaatgattctatccttcaaacaacaacatcaacaa

SEQ ID NO: 480809 - DNA, 122 bp, Homo sapiens
gtgcaggagaaaaaacttctgcccacagacacggcagctgtacagctcagcgcccaacagcgctagcgaaggccacacggaactgaaggggccacccacgctgtagagacggtggaaaccga

SEQ ID NO: 480810 - DNA, 122 bp, Homo sapiens
ttctgagctggtgtaaacgcgacccgaggctggctcgacggccccgcgagctcgatggcgcgctagtgggcaaggatgggtgattcaccgggacacagccaggagcatgtcccagcgtgcca

SEQ ID NO: 480811 - DNA, 122 bp, Homo sapiens
cttaaggtttggtttctttattttggcccccaaccccctcccaggctcaggacacaatgtcgtctattctgtcagaagtgggaagaagtacacattgttcatattacaatcacttctttgct

SEQ ID NO: 480812 - DNA, 122 bp, Homo sapiens
ggatgcacacagcatccacggcactaaccctcaatatctggtggagaagatctttgaacgcgaatctatgagtccaagttctggaaagaggagtgctttggacttacggctgaacttgcagt

SEQ ID NO: 480813 - DNA, 122 bp, Homo sapiens
acgaggtggcagcgccggttcctgtagctgaggggtgtgagttcgaggtctgattgtcctcgttttctacttccggtcacctcactgccacatggcaggcctccaggggaatacgcttaaga

SEQ ID NO: 480814 - DNA, 122 bp, Homo sapiens
ccggccaatcggcagcaagtgaagagctgcggccaccaatgagctggggcttgtgccagccgcggccgccgaggcccgtgccccgcggggggaacagatgaagcacatctggacagctgtgc

SEQ ID NO: 480815 - DNA, 122 bp, Homo sapiens
tcctggagcttacactctagttcttgtatgtacccaagcaggccgtggttgtatggaagccggtgctgtagttttacagaaaaggaaagatctgtgaaggataaagcattcatgatagcatg

SEQ ID NO: 480816 - DNA, 122 bp, Homo sapiens
gtcatccctgtccaccctccacttcttacttcccatatctgatctatctgcaaatcttgtcggttctaacttcggtacataccttctggtcttctcacccctctcctccagactgctgccag

SEQ ID NO: 480817 - DNA, 122 bp, Homo sapiens
catgcataccacccggcctgtctggggcccagctatccaacccgggccacgcgcaaacggcgccactgggtgagagatgaggttcacccacttgctttgtctctaatgaatatcaccaccac

SEQ ID NO: 480818 - DNA, 122 bp, Homo sapiens
agtgccgcacggcgtggcggcgcaagcagcggggccagagcctggcggtcaagagcttctcgcggagaacgcccaactcgtcctcctactgcccttcaggtaggcctcgtgctgcaggagag

SEQ ID NO: 480819 - DNA, 122 bp, Homo sapiens
tcagtctgagaagaaccaacaagcactactgcaggagtgtggctccgaggctgcagagaacgatcccttccacagacgcaccccaaatacaccagctcctaagctgcccttcacacaaaacc

SEQ ID NO: 480820 - DNA, 122 bp, Homo sapiens
gcagcgcggtccggagcagcacccagtcggcgagaagtagcagtactgtccccagccatgcgagagaagctccggggaggcagcggcacccgcggggagcgggacacctagagctagccatt

SEQ ID NO: 480821 - DNA, 122 bp, Homo sapiens
tatgcaataatggtatatctgctacagcctctgtactgcactgtggggaattctgcccagcgcaaaccacccagtctccctagcactggtgggggaaaaccaccggctagacccgcagtaat

SEQ ID NO: 480822 - DNA, 122 bp, Homo sapiens
ggaaaggactaggggagggaaggataaccagggtggtcacagctccagtacccacaaagacgctctttagaaagtaggggatttcaatccatttgggagaatttcagttaagtttagttaat

SEQ ID NO: 480823 - DNA, 122 bp, Homo sapiens
atagaaagaaacagctgttccccggcacagaaaattcctgctaagaacacacaacgggcacggtgtaggcccattagtgttgctctgggtgctgcatccacaagggagatttgcttcttcag

SEQ ID NO: 480824 - DNA, 122 bp, Homo sapiens
aaatttaaaatttagtctcacacctgtagcccgtcccgccccagccgccgccgccagcaccggacccggagccgccatgcccaagtgccccaagtgcgacaaggaagtttacttcgccgaga

SEQ ID NO: 480825 - DNA, 122 bp, Homo sapiens
gggcagtgggggcagtgctggggttgcaggtccgggccctgggggctgcttccttcctcacgtggccatgcccagcagcaccaaacatccccatccagcctttggaccccgccctgcccgtg

SEQ ID NO: 480826 - DNA, 122 bp, Homo sapiens
ttcaactccccgccgcctcctccggacacgttataacgaggagccgtgggatcggcgctccgggccctgctcccacgctccccccgccgtgtctcacacgcgtctctgccatctcgcagtct

SEQ ID NO: 480827 - DNA, 122 bp, Homo sapiens
cgcgggtctggggccaagagcagaggacaggagaagactgccaagccaccaccggtcctgcgacatattcaccagctgccggcggcgaggtcagaccccagattcgggtttgcccagcaggc

SEQ ID NO: 480828 - DNA, 122 bp, Homo sapiens
aggaggattttgaaagccggcagtttctttgcttcgatttgatttgttcgaggccccggccggcttgccctcgccccgctcgcgcggcctctcgggtagagtagtccggttccccatctggg

SEQ ID NO: 480829 - DNA, 122 bp, Homo sapiens
aggtctgcagcttcactcctgagccagcgagaccacgaacccaccagaaggaagaaactccgaacacagctgaacatcagaagggacagactccagacgcgccacccgaagagctgtaacac

SEQ ID NO: 480830 - DNA, 122 bp, Homo sapiens
ttcacaggtgaggaagcccctcccacagcggccggagtttcggactcggagcgcgagaaacgtcgggatagcgcctgcctcgcagagcttccgcttccggcccttcaggctctgtctctgtg

SEQ ID NO: 480831 - DNA, 122 bp, Homo sapiens
ttagtttgggctgttccacgcttggctcaccattgccgcctgggacttaacctgctcaggcgggccttcgcccagctgcaaatagggatgcgttagagactgttcccaaagcttgttgggct

SEQ ID NO: 480832 - DNA, 122 bp, Homo sapiens
gttaaggaatattgttctctattcatcatttctcaggtgacacagaaagctcaggcatctcgagatttgctttgattttgtagccagggagtaaattgataactgtgactgaacattgattg

SEQ ID NO: 480833 - DNA, 122 bp, Homo sapiens
tccatctaaatattcagccagtttttataatttaattttgcattatgctgaatagccttccggccagatagagctcattgaaaaaaagcaccaataccatcttgacatgcttttatttattt

SEQ ID NO: 480834 - DNA, 122 bp, Homo sapiens
ctcctgtgcggaacgtgagtgactgagcggcaaagcccgagtgagcgagcggtgggctgccgggccgggcggggggcgccggggcgggctcggggggctgtgtgggggggaagcactaatcg

SEQ ID NO: 480835 - DNA, 122 bp, Homo sapiens
gcgggaacccgctgtaggggcacccgggcctccccgcagtcagcctcggggtctgggccccgagtcccaactggtgcagctcggccctcggtcccctccgctgcaagatggcggccaggccg

SEQ ID NO: 480836 - DNA, 122 bp, Homo sapiens
agtccagtgaagggagggcgaggaagaagtccagctgtctccctaatctcgccctccttgcgtaagaggtcaatgaccgagtaacgtcattgaaatgcaattaaaatgggtattttaggctg

SEQ ID NO: 480837 - DNA, 122 bp, Homo sapiens
tcttctggaggggtccccatcaccaagattacaccagcctccctcttgttctggaagtgccgtcaatccgttgggttttctgttttcctcaatgcaaaatgataggccgggcgaggtggctc

SEQ ID NO: 480838 - DNA, 122 bp, Homo sapiens
agtgcgaacgccgggaggggagagctaaaattcaaagggcgaaatatttataatgcctaccgtcggcgaagagaaacagcagccccaaccgaaggcaaaaggaaatcccaccgcagcctcca

SEQ ID NO: 480839 - DNA, 122 bp, Homo sapiens
taaaaatattatttgggtttccttttcgcaggacttacctaagcctttaatatgcatctacggaggtaaaaataaagctatatattttttccaaagatatttgttgaagaaacatttgtctt

SEQ ID NO: 480840 - DNA, 122 bp, Homo sapiens
gtgttaactccatagagaggccagcacaaccagccttgcagcctgagataaggcctttggcgggtgtctcccctatcgctccctcaagccctcaagtaggtgttggagagaggggtgatgcc

SEQ ID NO: 480841 - DNA, 122 bp, Homo sapiens
tgcagccacagagctgttgctgggccgtggttttcccctaagtgggtggaacagtggctccgtgtccagaggccgggcacctttggttttcctttgcccagcccagccctggcaggggaggc

SEQ ID NO: 480842 - DNA, 122 bp, Homo sapiens
ggccctcaggaggagcgtcggctggtttgactgtggctgtcgttcctactccgacggtcccgtggcccctcagcaagagcatcggctggtttgactgtggctgtcgttccgactctgacggt

SEQ ID NO: 480843 - DNA, 122 bp, Homo sapiens
cctttgtccccctcccctcctgtcctgtacacactgaaaccacacaccggccccacaccacgtgatgcaggctcagagctgcccatggggcactgccacacaaggctgcccccgctgcagcc

SEQ ID NO: 480844 - DNA, 122 bp, Homo sapiens
cctgggggcaaggggcatgacagcacagaggagccgcccctcttctcctcccacaagccccgcggggacttccccagccccatccatgtgagcggcccccgcttggtccagccccacggccc

SEQ ID NO: 480845 - DNA, 122 bp, Homo sapiens
gaaagtttaactttgcggacaaacaggacttattgtagggggtggtcaaaatagtcccggcggggcggggccatgacccctgacgtcgccggtccggcgcgcagttcagtttggcggttccg

SEQ ID NO: 480846 - DNA, 122 bp, Homo sapiens
ccccgcgtagtggggccagctgggtcggctgcagcctctgccaggacggtcctatttctgcgcccccgcggggcggccgccaggtgcacggtcccggcccccgcctggctaggaggaggcgg

SEQ ID NO: 480847 - DNA, 122 bp, Homo sapiens
gtaggtgatgagctcaacactcataaagaagcttgagcctctagcatagttgttctccaacgttagtgtgcatcagaaacacctggagggcttactaaaacacagctgggccccatctcaga

SEQ ID NO: 480848 - DNA, 122 bp, Homo sapiens
caaggtggaacccttccgtatccacagaccagtaacaggacgggcatgctggcaccatggcggggcacgggagagcgcacgggagggcacggtactagagaagggtttctgctacattaccc

SEQ ID NO: 480849 - DNA, 122 bp, Homo sapiens
gtgggacgtgcgtggtcccctggccgcaggctgggctcaaggctggtgtgagctgaagaccgagatgctggtggcttaggaggatttgcgaccagttcttcgcaatccttgaagggaggagg

SEQ ID NO: 480850 - DNA, 122 bp, Homo sapiens
cctgagaattacaattctccatttagtctttggaagccctagactagtacacgcttcctccgcatactgcacactagctcacaataaaagcaactaatagttgataactgaagcattcatat

SEQ ID NO: 480851 - DNA, 122 bp, Homo sapiens
tcggccctcagtctccttcagccataagatggcggctgggctgacagccgggaccccgggcgtcctgtctcctccctgcgcagtgactgtgctttggcctggagccctccctgggcagctct

SEQ ID NO: 480852 - DNA, 122 bp, Homo sapiens
gatgcggtgacctgccagcacctgccgcagccttcgtccgggagtcgccccatctctccacgcatcggggccctgtgccccttgctgctgcagccgggcaccatgtcgacctcgtccttgag

SEQ ID NO: 480853 - DNA, 122 bp, Homo sapiens
tcccacttgtcaatttttacaggcttatcatctatcttccacttatccaacaagccgctacggccactccctgtcccgcagttggaagcaccaccagccccactacagcctccgctaccacc

SEQ ID NO: 480854 - DNA, 122 bp, Homo sapiens
cggtgttgcaggcggcagccacgcagactgctctctcatccttttgtccttcagtcagaacgtgaatgtactgctgacgcatactgttctgggagaagattagcgtgatgcagtgctcttat

SEQ ID NO: 480855 - DNA, 122 bp, Homo sapiens
tgctcggagcccgtgtggaagcagcggctggagttcgacatcaacatctgcgacctgccccgcatggcccgtctctgctttgcgctgtacgccgtgatcgagaaagccaagaaggctcgctc

SEQ ID NO: 480856 - DNA, 122 bp, Homo sapiens
ctgaagagttgcccctgtgctagtcagtgccgccgccataaccgagccccgccggctgcgcggcgtcttcagcaagcgtttatttgctaattctgggggctggaggtccgcggtcacggtgt

SEQ ID NO: 480857 - DNA, 122 bp, Homo sapiens
catggacaagaggttgccgcctgccacctcctccatcgcctggcccagcacctacccacccgcctgtagcaagcccagcagcatcatcccggccgccgccgccatttcactctgtcggagac

SEQ ID NO: 480858 - DNA, 122 bp, Homo sapiens
cgggactcagcgcctgagctcaaaggattttgttcttttccagaatcctgccatctacagcgtgatgtgtttgtgccctacacacacttcctatcgagaattgtggggagtttgttaagatt

SEQ ID NO: 480859 - DNA, 122 bp, Homo sapiens
gtacaatggggtcccctccccgagaggactgcgcgggggatgggtctgtgggcatctctccgccgcgcaaggtctccgggcacccccgccggccaccgccccgcggccgcggcgctcagcgt

SEQ ID NO: 480860 - DNA, 122 bp, Homo sapiens
agggtggtgactgaggaccagctcctcatgcttgaggctgtggtgatgcacctcgggatccgctctgcccgctgtgtcctgggcatggagggtcagcaggtcatcctgcacctgcccctatc

SEQ ID NO: 480861 - DNA, 122 bp, Homo sapiens
cataccccaaagtgacccccttcagtgcacctgccctgcccaggcctaggccctccccttcgttgcctggatgagggcagggacttccactcttattgcagaatccttttctgaaagcagct

SEQ ID NO: 480862 - DNA, 122 bp, Homo sapiens
gtcaggagctttctggaacattctgtgtggctagcaggcctcatggtctacactgtaggccgcagccctcagagacctgcagtcacaaggcatctcagtagattccttttaaccagagagca

SEQ ID NO: 480863 - DNA, 122 bp, Homo sapiens
ctgctggtccagcggccacatcaaggaggtgcttagccaggggctaggggtgcgggagcacgggcaggtggccccagcccaggcaggccctggccagcacctccgccagcaggaaacggaac

SEQ ID NO: 480864 - DNA, 122 bp, Homo sapiens
gagtgaaactcaggagctgagaaaccgagtcactgtgaaaagatgggaaattatctcctgcgaaaactcaggtgagtcttgactcttggtgccgcctttcttgggagaaagagaacagagat

SEQ ID NO: 480865 - DNA, 122 bp, Homo sapiens
catgtcgggcggctggggtgagcccggggacgggcgggcgggaaggcgcggagtggcgggcgggtggcagggaaggtcccgggcccagccccagccccagccccagtccagcgaagccggca

SEQ ID NO: 480866 - DNA, 122 bp, Homo sapiens
ggcatgctcctaccctggaacaggagagtagatgggtactggcagcctatgtcctctctccgaaatgcctgctctgtagtccagaaaagagtcaaaatggttccagacaaaagaatccatgg

SEQ ID NO: 480867 - DNA, 122 bp, Homo sapiens
tttgaagcttcccaaggaagaagccaaaggccgtgtccccaaggccaccccgggaggccacgagatgaacacgttgctcacaggtcgggcgcaacagagcaactccaggagccccacctcca

SEQ ID NO: 480868 - DNA, 122 bp, Homo sapiens
ttccgccctatccttgtcctccttggctggggcgcccaccggcggtctgataggctacatcgcggcatgagatgaagctgtgacaggtaagggggctttcaagcttctccatgggaaaccac

SEQ ID NO: 480869 - DNA, 122 bp, Homo sapiens
gcaaaccttagaagctaagtctggggcagagattaaatgcaagttgaaataggaggaacacgatcaggagccttgaggctcaaaggtgggttaaataagcttgcagcaccccataatttaaa

SEQ ID NO: 480870 - DNA, 122 bp, Homo sapiens
gcgtggcgcgaataagtgtcagggcggttggctctgaggggtgggtcccggggctcgcctcgcgcccccgactgcgtgctcaggccccgcccctccccgtccacgcatgctgaggctccgcc

SEQ ID NO: 480871 - DNA, 122 bp, Homo sapiens
cgccgtagccggacgtggggtccagggggcgctgtggcccagcggcgccggcggcaggagcggccacccgacgctggaggcttcgctgaggatccccgcctgccgcacctcggtcgtcccgc

SEQ ID NO: 480872 - DNA, 122 bp, Homo sapiens
ctccctgaccccttgtgcttcctgagtgaggcaatgcctcgtgctgcttcagcttccacacggtgagctgcacctactgtcctgcacccactgtttgtcactcccttagtgagatgaaccca

SEQ ID NO: 480873 - DNA, 122 bp, Homo sapiens
ccgcgaggccttccagaggctcaacttcctgtaccaggtgagtctgcgacaagggccccacggggacggtgctcggcgtcccagagtgactgctcccctcccgcaggccgcccattgtgtcc

SEQ ID NO: 480874 - DNA, 122 bp, Homo sapiens
acatactgtgaatatgtgcatgatgtaagcagacagtgtaaatatcctcctctttaccttcgaatttggtctagtctccaactgctttacagaacaaccctccggccccttcctccacagac

SEQ ID NO: 480875 - DNA, 122 bp, Homo sapiens
cctcattcccacagaaggcaataggcatggtaccctctggaattatgcaatttttgtatgcgctcaagactcagtacttaggaatggccaggatccactcttttaagggaaggaaattgccc

SEQ ID NO: 480876 - DNA, 122 bp, Homo sapiens
gccctctcggctcaccgtccgcgcagcctcctgaagcagccgtaaactccgccccttgcgcgcaggacggcgcgaaaacccaattgacaagaattccctccgaagctctgtggtccgatctg

SEQ ID NO: 480877 - DNA, 122 bp, Homo sapiens
cgctaacgtgatgatgcgtgagctcttcagacccacttgggcctgccctggccagacacgcgggatcccgccctgccagcaggagggcctaacatttacctttaagcttattacgaagggtg

SEQ ID NO: 480878 - DNA, 122 bp, Homo sapiens
gctgggcaaacactcaggcccaggcagctgaaaaattcacagcaggagcagctaccgaagcgactgcagcctcttcctcctcttcctcctcctcctcctcctccgccactgctaccgccacc

SEQ ID NO: 480879 - DNA, 122 bp, Homo sapiens
tttcagggagaatttatcacttgcttcctgaccatttggatgtgatctgctttttctctccgtaagcacctgaggtctttgtattccgtctgttctagcttatcaatcttctcctttttttt

SEQ ID NO: 480880 - DNA, 122 bp, Homo sapiens
ggtggagatttaagatgctaatgagacatgagtcctaggagcaagcatgtatagcaaatgcgcatgtgcacccagaggaccacccagaacatgcttactagtgatgcctcttcccacccatt

SEQ ID NO: 480881 - DNA, 122 bp, Homo sapiens
ccttacacgtttgcacgcgcttttcacgtcctcccccccgccgccagcacgcaccgtgcacgccctgcccccacgctcagagctccgtggcacgcccccccagccccacgaccctgagtgca

SEQ ID NO: 480882 - DNA, 122 bp, Homo sapiens
gagcttaagtgatcctcctgcctcagcctcctgggcactgggactacaggtgtacaccaccgcgccacactgttttttgtagagacggggtctccctgtgttgcccagtctggtctcaaatt

SEQ ID NO: 480883 - DNA, 122 bp, Homo sapiens
gaattgctattgtattcccaaactcctagcctatcacagagctgtttcctgataattttacggtctggccataaatgttttgaagtagatactcaaaaattcaccaagcaaatctacgtttc

SEQ ID NO: 480884 - DNA, 122 bp, Homo sapiens
gagacagaaggctctcaagggaggaggaagcagccgcgattccagggcaggccggctctgcgggtctccatgggaacctgctttacctcaaaagtcgtgtctgctccagcctggcttcccca

SEQ ID NO: 480885 - DNA, 122 bp, Homo sapiens
agagcactcctgcagaagccaccaggccctgtgcttggggagctgttgaattcagttctccgcagtcctcttagtaggggttaattcctgttttatagaggaagaaactgaagcccaaggtc

SEQ ID NO: 480886 - DNA, 122 bp, Homo sapiens
ccaagagacggccaagctcttttcagtgccagactttgtaggtgatgcctgcaaagccatcgcatcccgggtgcggggggccgtggcctctgtcactttcgatgacttccataagaactcag

SEQ ID NO: 480887 - DNA, 122 bp, Homo sapiens
aaggagcgcgtgcgcagaagaggcaaaattcgggccttaacgagagggtgcccccttcagcgcatgcgcaaggaggcccgctgaacgctcacctggactgtggtatttacactctaggactc

SEQ ID NO: 480888 - DNA, 122 bp, Homo sapiens
cctggcagcaggtccctgtgggctgaaacacgagcctccacctgccgctgattgacttctcgttttttcagtgggcccaagatcctgtaaattgagttccctgcgcttttggatgtcagaaa

SEQ ID NO: 480889 - DNA, 122 bp, Homo sapiens
ggtgtggagggagaggcgggggcgggaactggggctgcccgctgctcttacgggccagcacgagttccaggtggccacgggctcggtgggccccacactcagagtggccggctggggccacc

SEQ ID NO: 480890 - DNA, 122 bp, Homo sapiens
cgcagccgctgccccggaccctgacgacccgttcggcgcgcatggggacttcactgccgacgacctggaggagcttgacaccctcgcgtcacaggccctgagccaatgtccggccgcggctc

SEQ ID NO: 480891 - DNA, 122 bp, Homo sapiens
ccatctctttccaggggaattaatttcgttcttgccaatgtcccagtagctgacaccccccgcctcttgttctttctccttgacctcgacgtcagcaccatgctgtgcagcaggacagccgt

SEQ ID NO: 480892 - DNA, 122 bp, Homo sapiens
caggggtgtggagaccctcttcaggactgtacaggcgaagcagggggctgggaacaaggccggttattataacccaacaaactgggttccaaggagccaggggtgtggagcccctcttcagg

SEQ ID NO: 480893 - DNA, 122 bp, Homo sapiens
gtgaccctctgcatcagcttcctatgccgagtggtgcatgtcgggggctggtccaggctgcgcgtgccagggccgccctcctccttggggaggggtggtgccacaggtgtgaccctctgcat

SEQ ID NO: 480894 - DNA, 122 bp, Homo sapiens
tgttcactttcctttctgaacctctgctggactgtgcgtgagttttcaacacttccattccgaagttaagcctttcagatgctcacagggctgggcaggtatttccttcagtcaccagctgg

SEQ ID NO: 480895 - DNA, 122 bp, Homo sapiens
cttccctggctcttcgctggagtcttagtgatttggtggagatttccaaggacaggcctccgggagctcagcgccgccctcctgttactgggcagttaggtgtgggaaggaacatactgaca

SEQ ID NO: 480896 - DNA, 122 bp, Homo sapiens
caacacagcgaatccccgtcaccaccaaaaaaatacgaaaaccagtcaggcgtggtggcgcgcgcctgcaatcgcaggcactcggcaagctgaggcaggagaatcaggcagggaggttgcag

SEQ ID NO: 480897 - DNA, 122 bp, Homo sapiens
agagcgggccccgccctgaaggggcaccgtgggctggggggcctgttttggagcaggcaccggtggccgagctccgtgaccatgaaggtcaaggtcatccccgtgctcgaggacaactacat

SEQ ID NO: 480898 - DNA, 122 bp, Homo sapiens
gtagccatgacggtggtggccgtggcgagatgccccctcagtgcatgagggcacatatcccggtggtgcctttaatggtgacaggtttgtttgcagacaagggtgaccgctggtgctgcccc

SEQ ID NO: 480899 - DNA, 122 bp, Homo sapiens
ggccccagtctgcaggtgcactgggtgttggcatggcatgtctgggcacctccaaggtggcgtggaggaggccgtgtggctccctggcccaggtcccagcctccttcctccctctatagtca

SEQ ID NO: 480900 - DNA, 122 bp, Homo sapiens
gcaaggttgctttcactcagccaggaggacgcattgttacaggtgtggaacttgttgctccgagccctcgcctggcagctcactctggatctgcgggttctgaggagcctcgggacccacct

SEQ ID NO: 480901 - DNA, 122 bp, Homo sapiens
tcacgggacgcccggtccttgggcgtgcaggggtcatggggggtgacggggccgcgggagcgccgggttttcgtagagcccaggtgcgcggtggtgcttgcattcgagagggaggggcgtgg

SEQ ID NO: 480902 - DNA, 122 bp, Homo sapiens
aaagtaggtagacacgtgagccccctcagagagaacctggatccttgcggctccagcccccgataggaagagagcccaccaaacttcggctccgcagcagagatacagccaaggactccagg

SEQ ID NO: 480903 - DNA, 122 bp, Homo sapiens
cccaagcatgcagatggcagtggggagcagggaggctgtgttcttatcttctccacaggccgagaccaggtgtgtcacctcatttgacttcacaaattctaactccagaaagtgtttgtatg

SEQ ID NO: 480904 - DNA, 122 bp, Homo sapiens
cctcgcgccgccattctctaaaaaacatgtgtgttgaacgaatggtgactaaacagaccgcgggagcaggggaccaaacttcgggtcggagatggggttgcgtaataattgcacttgggcta

SEQ ID NO: 480905 - DNA, 122 bp, Homo sapiens
gcccaagcagattccacggccaaagcagggggtccgggtatggcgggagctgggccctggcggctgcaggctgtgcacgtggtcaggactcaaggaggtccgggagtcgggccaggacacgg

SEQ ID NO: 480906 - DNA, 122 bp, Homo sapiens
tgcccgaagatttgctcgtgcagccctctcgagagcatctggatgtccaatgggttgtgccgcagctgcccgccctccgaggatagcacttgcggctgctgaggctgctgttgctgctgctg

SEQ ID NO: 480907 - DNA, 122 bp, Homo sapiens
acgtcctcccccccgccgccagcacgcaccgtgcacgccctgcccccacgctcagagctccgtggcacgcccccccagccccacgaccctgagtgcacgctcctctcacctggcccggttcc

SEQ ID NO: 480908 - DNA, 122 bp, Homo sapiens
cgcttaccaaacgttgtgggacaaacgcctttcaactgtttctggacgccagtgggccggcgttaccctgttgagccattcctttctattagcttactattgttagtattgttattatttgg

SEQ ID NO: 480909 - DNA, 122 bp, Homo sapiens
agggaagcccccatggctggaggagctgtgtagggagggaggggagagggagaggcctgtcgggctgaccgctgtcttgtctcttgaccgccccgcaggccaccaggccctcgggttccaag

SEQ ID NO: 480910 - DNA, 122 bp, Homo sapiens
acaaaagtcccaaaatttcacataggctatagagtcttggcctctacagtcactggttaccgacttcctctaaggaattaagtgcatgtcctatgggcagccctgtggttttaattatcttg

SEQ ID NO: 480911 - DNA, 122 bp, Homo sapiens
cgcgtagggcgcctgcagacggcccctggaagggctctggtggggctgagcgctctgccgcgggggcgcgggcacagcaggaagcaggtccgcgtgggcgctgggggcatcagctaccgggg

SEQ ID NO: 480912 - DNA, 122 bp, Homo sapiens
ttgcctgctccgtgactttgacaagttaagctctccaagctcccagtttccttatggggtcgtggtaaaactcatgattaataataacaatagcgaagaaagggaaggagtaagaaagagag

SEQ ID NO: 480913 - DNA, 122 bp, Homo sapiens
ttcgtgtcggagctcaacaccgccttacagaagatgttttggtgatgaaataagagctttcgtatctgtttaggcagctggcgcatttccgcaagcctcctgacctgagcaggctgagtcag

SEQ ID NO: 480914 - DNA, 122 bp, Homo sapiens
agatccgcgcccgggaaggcggaggggggcggcaggcccttctctgacaccctcgacgagcgaccgccgcaggggcctaggccacccctgcccacctcggcctggcccgctcgaaggttccg

SEQ ID NO: 480915 - DNA, 122 bp, Homo sapiens
atttatcctgcttgctcggcacagggcttttttaaattattataataattttaaaccaaccgaaaatatttctgatcaaaccttgtaacttaaacatataccatagagataattctgatgtt

SEQ ID NO: 480916 - DNA, 122 bp, Homo sapiens
ggttgtaccagatagagatgagaacaatttttatgccttttgcctgcatacttttaactgcgaggtgtgagtgaagggttaaggataaaattaaatgattgcatctgttttctcattacatg

SEQ ID NO: 480917 - DNA, 122 bp, Homo sapiens
ggcctgcatcgatccagcctgacatttttactcttgtccttctatttagaatccctcaaacgctccatccccatggcttcttgctgatgtttggcagtttctgtggtaccgaatctctggag

SEQ ID NO: 480918 - DNA, 122 bp, Homo sapiens
ggagtgggagggggctttaaaggcgcctgggtgggcggaggcggcgaatctggaccagcccggccggcgacgaagagcgccgggcaccggccgcggcccacaaaggggagcggcgtggtccg

SEQ ID NO: 480919 - DNA, 122 bp, Homo sapiens
ccgcccaccccgcgcgcccggccgccgcacttccagactccgcggactccggcgctcggccgccaccctccgcctcaggccctcaaattgacacataagggagagcggcggcccgcagagcc

SEQ ID NO: 480920 - DNA, 122 bp, Homo sapiens
gctgctggcgcacaggctgcggcgctggcacaagtcacgtctgctacaggcttcgggaggcggcttagcgagcatgcccggttcgcactttgtgggcgtggacggggttcgggctttcctgc

SEQ ID NO: 480921 - DNA, 122 bp, Homo sapiens
cagctgcgcccatcagctctattccccgaatgaccgtgagcttgaaggaaagccatttaacgcacacggtgccgatgggtgtcttctgcttggcgacatcgtgggctttatcctacttcctc

SEQ ID NO: 480922 - DNA, 122 bp, Homo sapiens
ctgaaccccctcttttctttgtcagtgagtgggatgaaaagtgagggactggaggggaagcgacaaccgtggtagatttaagtaaggctttggccctggaaagcctcgcggacgtgttctga

SEQ ID NO: 480923 - DNA, 122 bp, Homo sapiens
tgatgggccaagcgggtggaggagcctccatccttctcacctccatggtgatgggccaagcgggtggaggagcctccatccttctcacctctgtggtgatgggccgagcgggtggaggagcc

SEQ ID NO: 480924 - DNA, 122 bp, Homo sapiens
aaggcgggcgaggtctgggatggggcggggcctatgggagcggggctgaagccctgggcccggcagaggaaggtcgagatggaccatgttgggccccttctctccccgcccccaggccgcag

SEQ ID NO: 480925 - DNA, 122 bp, Homo sapiens
gaggcctcgaacccttttgggacccggaacccatcaaaagtgacccacaaaggccggaagcggccacggggggtctaagaaccagcccgcgcggggcgcacttccgcggccgctctaggaag

SEQ ID NO: 480926 - DNA, 122 bp, Homo sapiens
tcctccgcgggcaaccacgaagagaatttcaaggccccccacttcccagccttcctgcttcgcctaggggagctcccaaacgcctgaaaatatctttaaattaggaaaaagagctaagccgc

SEQ ID NO: 480927 - DNA, 122 bp, Homo sapiens
tggaaactttattctcaatcgaatggttcgttctaatagccagaggaagatggctatacacgcagcctctattagttcactgctgtgctaaagccagtcggctacacccaataagctactac

SEQ ID NO: 480928 - DNA, 122 bp, Homo sapiens
tcttctcccggaacgccaacgtctcccaggatttgtcttcacagaagacactgtggggaacgctggcttccagcatgaacgcggcacttggagaatcgagcagcgggatccaggctgagccg

SEQ ID NO: 480929 - DNA, 122 bp, Homo sapiens
atgctgacgaaggcgggagcgcggcggggtgaacagatgataacgaaggcgggagcgcggcggggtgaacagatgctgacgaaggcaggaacgtggcggggtgaacagatgctgaggaaggc

SEQ ID NO: 480930 - DNA, 122 bp, Homo sapiens
agtccctgtggacttctccctgtgatagaacggagtccacccctatcctccggagaggggcgcattgctggtgttcattcctgtgggaaaaccctgtgaccttggcgtgtgccgctcttcct

SEQ ID NO: 480931 - DNA, 122 bp, Homo sapiens
tgggaagagaagactgggtgctgtccttggcttgcaagggaagtgtagccacaagagcatcgacactggagccaagactgcctaagtgccaccctccactctgcagcttactgtctgtgggg

SEQ ID NO: 480932 - DNA, 122 bp, Homo sapiens
aaaaaggctcgggtccaggctagaagggcctggatggcccgaggcctccaagatatcagacggaccggctgggcacccgcggcctgcaggccatatttcgcgtcctccaaatcagctgccta

SEQ ID NO: 480933 - DNA, 122 bp, Homo sapiens
agccccagcttggccaagcagagctgggggggcggtggccggcaccgcagtgagtgtgcgcgcgtcagccgggccgggccgggatcgggcagaggcgcgcggggcctccgcgggcgcccgga

SEQ ID NO: 480934 - DNA, 122 bp, Homo sapiens
gactcaaactattccgagattggctagggactctacctttcgctaagggatagggctttccgcccgggggtcacctcttgtcttggatttctccttcttcccccttgtagttctcttgtttt

SEQ ID NO: 480935 - DNA, 122 bp, Homo sapiens
agcggatcctctgtgccctaagaaccccccaaaccagactcgcctcaaaggcgttccagacgcattctgctgttctctgaccatctagggtggtgttttccaaactgcaaccactgcccccg

SEQ ID NO: 480936 - DNA, 122 bp, Homo sapiens
agaagcacattttaaatcacatttaactttggttcacttggatgtgaatttaagtgaccacgcggggccgacgtcccggggcgcaccccgactctcacgcggggccggcatcccggggcgca

SEQ ID NO: 480937 - DNA, 122 bp, Homo sapiens
ccttgctgggtgaagaagtgatgagtgcagaaacttgttctgactgcaccagtttaaatacgcaggtgtttgaattatggtcagaagtttaacagaggaggaaagctcatatctgtcctaca

SEQ ID NO: 480938 - DNA, 122 bp, Homo sapiens
ctgatttgctggctggtcttgtcctggttcactaccaccttgttcttgatgttgcgggcccgattggcatatttgagtgtgttgagggtctccatgaaatctcggtctgaggggctcacaca

SEQ ID NO: 480939 - DNA, 122 bp, Homo sapiens
agcctgctcggctgccccgccccggccctcccagctcggtgcgtcacgccccgcggggcccgcctcccccgcaccggctcccagtcccggcgacctcgtcacccgctgccgggctcctgctc

SEQ ID NO: 480940 - DNA, 122 bp, Homo sapiens
tagaacagggacaggtactgtgtaaacagcagctatcaaactcgtggctatcactttcttcgtgttattctgatgccgactgtggcccacggagctgcctgggatggtgtcacgagcgctca

SEQ ID NO: 480941 - DNA, 122 bp, Homo sapiens
tgtgttttccccctttcattattagaatatcaggttttaaatggcactggcaatcagccacgtaaaatttgtgattttaatagaatcccttcaattaaggacacgtgcaaataccactatgc

SEQ ID NO: 480942 - DNA, 122 bp, Homo sapiens
tcgcagcgcctctctcaggagcgatcgggaattggcgcatgcgcactacggtggtggtggcgacgaaggcgggggttgcacgttgcctgcctcgagctctaggtggcgtcatccttcgggct

SEQ ID NO: 480943 - DNA, 122 bp, Homo sapiens
ctttcagaagacccaaaagccttcagaaaagtgcaaacgtcagcccctgctatgagacaacgatccacaacctggagcacagactgattaataaaagtcccttttcctctctgaaatctctg

SEQ ID NO: 480944 - DNA, 122 bp, Homo sapiens
ctgcaaggccgaatggagttctccaaggcagctgtgtctcgtgtggtagaggcctcagaccgcctacagcgccgggtggaggaactctgtcagcgagtgtacagccgaggtgggttctttgt

SEQ ID NO: 480945 - DNA, 122 bp, Homo sapiens
cggggggcacatgtgggcggagactaggggggcttcggggagagcagccctggtggtcggcgtctgtgcaggtccctgctggggagcttgacttcccgcgtggcctcccgcggcgctgatgc

SEQ ID NO: 480946 - DNA, 122 bp, Homo sapiens
agaagaggctccagtgaaaacacaaggatgcaggtacttcacgtccctgtcccaaccacacgcgctcacagaccggagaatgttaaaaactgccgagcctgccgggtgaggatggtgaggct

SEQ ID NO: 480947 - DNA, 122 bp, Homo sapiens
aaccagccctgggtaagcgtgtgtgggagagaaacacactgtaacctggaccttgggccccggtccttcacagctctggagtcacccacgtttccttaacgtccaaatgaggcggcctgggt

SEQ ID NO: 480948 - DNA, 122 bp, Homo sapiens
gccaataggaagcttctagagggtatttggactcaagattctgtatccgggcccttgagccgctgctcaggtcgcttccgtacagagcgtgctttaattttcaataagtccctgcttttgtt

SEQ ID NO: 480949 - DNA, 122 bp, Homo sapiens
ggaggcagccaggtgaggacctctaaagtcagtggcgctcttgcgcccagcccgccaacccgcgctctcagccccaacgccatcacttcagaagcacttcaggaaatatagcagtttagaga

SEQ ID NO: 480950 - DNA, 122 bp, Homo sapiens
accgcgcgccgggtgctaaagagacccgcagggggcgtgagcttccagcgccagcggcttcgggtctcccgtgcgacggcagtgtgagaaagaaacgttccgggcgccggtgctcctttatg

SEQ ID NO: 480951 - DNA, 122 bp, Homo sapiens
ttagtctagaaagctccctcctgtggttagtgggggcccaaatggcacgcagagggcgcccgctgcttcagttgtcctctatccaccatggtttgaatgaggccccacctggaggcaggggt

SEQ ID NO: 480952 - DNA, 122 bp, Homo sapiens
tgggccctgggcaagcacacagcaggagagacaggcccccggtgggctatgggcagaacacgagggctccggcaattgggctgacaccgtccctgagcgtcagggatggccctgccagcacc

SEQ ID NO: 480953 - DNA, 122 bp, Homo sapiens
agacacccctccccttcctaaaccaaggtataaaagttaatcaagccccttcctctgggccgagagaactttgcacgttagccgtctctcggtcgccggctaataaaggactcttaattcat

SEQ ID NO: 480954 - DNA, 122 bp, Homo sapiens
ctttcagtaaaacatcagccacattagatattaacatgtaagttgaacacaataaaaggccgtatctttgttgcctgatgtgttaaccaaaggataaattatctttcccaaagggaaagagc

SEQ ID NO: 480955 - DNA, 122 bp, Homo sapiens
cgtaagaccccagaacagtggacgagacccacccagagtccatttaatctttttggcaagcgtggacacacgcccctagcccccaccgccttagagtgtcagttactccccctccttcatca

SEQ ID NO: 480956 - DNA, 122 bp, Homo sapiens
cttccagccacttcatgatgtgctgcaggtggccgccgtggctgcagccctggcaccacacgaagagacccttgactacgtggtggcagacggcacacatgctggcgcagcggtggcacctg

SEQ ID NO: 480957 - DNA, 122 bp, Homo sapiens
actggagttgcaggataaactagaggtcctttcaaggtctcttcccatccaaagaatctacggttaaccaggaaaacatttaattatgtacagcctaataaatctaaaaatataaacttaaa

SEQ ID NO: 480958 - DNA, 122 bp, Homo sapiens
ccgtccctgacggggacagcttgctccatgtgaaggtgtccagattaaaggcatacacgtcgttgtagtagatgtaatccctggttagaagaacagcagctgtcagggtccgtaacattggg

SEQ ID NO: 480959 - DNA, 122 bp, Homo sapiens
tacaagccaacacactgttagccttaattgttacagactatatctaaaattaataaggcccgtgtctttttaagtagtctgtcatttataatgtaaatgatttaaggtattcttttttccta

SEQ ID NO: 480960 - DNA, 122 bp, Homo sapiens
acaaccttcccctcgcttggctgcccatgatcccataaacacaactggcgcattccacctcgagcccctcacaccagtgccaactgacccacaggcccctgagacataccccggggttcctc

SEQ ID NO: 480961 - DNA, 122 bp, Homo sapiens
gcctgcctggaggagaaggaggaacccccatgccaatgtccaggtcacaggcatccgctgcgctcccacctcggacaccatcttgggattcctcccctggaagttgtcctttctgatcctct

SEQ ID NO: 480962 - DNA, 122 bp, Homo sapiens
gtgctggggcagcagctggcagccgctgttgacgtggctgaggactttctgcttgagctgcgccacctgctcgcgcagcaggctcgccgtggacgccagctccgtgttctgactcttgaggg

SEQ ID NO: 480963 - DNA, 122 bp, Homo sapiens
cccagaggagtgactcaggcccatggctcgagtggctgagtagggaccagggttggggatcgggcatgagtcagcctggcaggtcccatgagaaggggaggggagggagagaaatgggggct

SEQ ID NO: 480964 - DNA, 122 bp, Homo sapiens
tcggggcctgagcgtcaagagcatgccctagtgagcgggctcctctgggggagcccagcgcgctccgggcgcctgccggtttgggggtgtctcctcccggggcgctatggcggcgctggcca

SEQ ID NO: 480965 - DNA, 122 bp, Homo sapiens
ccctgccccagcaacctccttgccatttcagaattagaattccagcttctatgaaaagaccgcgtgtagttggggtttcagcaccatggacaagacaccaactctggaggcctagaaagagc

SEQ ID NO: 480966 - DNA, 122 bp, Homo sapiens
accgctcacggagtccgggcgggcaccgacaccgcccaaatccccgcccccaacgggccacgccctgcaccctacgtaaatgcacggaagccttccccgcccgcagcccagtcttggcccca

SEQ ID NO: 480967 - DNA, 122 bp, Homo sapiens
catcctcctgctttcttctcggggagctggcacttcccccttctctagtagctgtaaatacgcctcccaactccaaggagacctttcttgcatctcccttactgttctcacgcctgtagggc

SEQ ID NO: 480968 - DNA, 122 bp, Homo sapiens
gggccgcggggagtccggagccttctttgtttgcaaggtttccctcaacaatggctgctccgctctttcctctctcctcctcctccttctcggctctccccgccgccgcctcttgctgcctc

SEQ ID NO: 480969 - DNA, 122 bp, Homo sapiens
aaaatggatgtgctcaagttatgagccttgcctcatcagtgctataaaaagccctttagccgggctgtaatttgactctcctctctaatgttacgcaatattcctatggttacagagcccga

SEQ ID NO: 480970 - DNA, 122 bp, Homo sapiens
gggcacttttcagattgtgggctggaaagggttattttatctgtgggggagggagggagacgtgaagcctatttaaaatgagcctgtgacgattatgcacatgaccagaggcggccggtaat

SEQ ID NO: 480971 - DNA, 122 bp, Homo sapiens
agagtgtgggcgttggcagctttgtcccaggtgctgcagggttggggtggtccctgtcaccgcctgctgctggtgggggtcagctgcacggatgcacggcctcgcaccagcggcagccccag

SEQ ID NO: 480972 - DNA, 122 bp, Homo sapiens
cgctacgtagtgctgcacgcttcccgagtggcggtggagaaagtgcagctggccgaggaccgggcgttcggggctgtccctgtagccggttttttcctctacccgcaaacccaggtcttagt

SEQ ID NO: 480973 - DNA, 122 bp, Homo sapiens
ttaccgcccaggccgcgaaactaggactctggccgctgtctaattccatacccttgcagtcgttggtccctgaagttccaactgccccttgctttggccaggggcagtctttcccgggaggg

SEQ ID NO: 480974 - DNA, 122 bp, Homo sapiens
tgcggagcccccagggctcgagcgggccacggagtctgtccgggagcagggggcgttgcccggacgctggcctgggtccccggtgcgggaggcagtgcggcggcctccgcccgcccctgcag

SEQ ID NO: 480975 - DNA, 122 bp, Homo sapiens
ctcttccagggactacaggaggctggggaggaccaacggcgagagcagcacagcctaggacgggctggatacggtctggagtcgctagggctccaccgcactggaactacaattcccaacat

SEQ ID NO: 480976 - DNA, 122 bp, Homo sapiens
ggcggcagcagacacatccagagagggagtcggccgcccagccaatcagggatcgggattcgcagcgccagtgggcggagccgctccatggcaacgggggagggcccaggccccaggcccca

SEQ ID NO: 480977 - DNA, 122 bp, Homo sapiens
gagggattacagggaggcccaaagccacttgtccagctgcaaactgcaaaggtcaccctccgcacactctcttccctgaagcccctgcacgccgctggggaccggagcatgtggttctctct

SEQ ID NO: 480978 - DNA, 122 bp, Homo sapiens
ggcccccacgcacccgtttcccgtgggtctgtttcccatgagccagtacctgtggggtctcgtgcggccaggtttctgccctatccgtccaagacacaggatgaagctcatgcctcactcgg

SEQ ID NO: 480979 - DNA, 122 bp, Homo sapiens
cctgaccctgaagcttctggttctagactcttgctcggttcggctttctggcctccctggcgccttcccgccaagctcctcctcctgcttgcctccccagcctccacttagtccccttcctt

SEQ ID NO: 480980 - DNA, 122 bp, Homo sapiens
ggtgagtgtgaacaagctcttccaaagatccgcccgcagggccacgagccttccttcctgcggccacactttgcagccctcctctgggactagtcttcagaacgaagctggcggcatggaat

SEQ ID NO: 480981 - DNA, 122 bp, Homo sapiens
taaggagttcctgctgtgtgccagtagcttttccgggccctagggtccttgctataaatacgttagccctgctgggcttctgaactaagggagctaaatgcttccagcttccttagtgaggc

SEQ ID NO: 480982 - DNA, 122 bp, Homo sapiens
gagcctgtgctgtcctgcaccctagtcccagggtctgtagggcttggggagaggtctcaccgatgatgctgatgctgacagcacggctttcctggggcccgtggctggaatgggtggccaca

SEQ ID NO: 480983 - DNA, 122 bp, Homo sapiens
cacactgtactcttggaaaggtcgtccccaggcataggccacactcagggtgggtgtggacggattaccacacccctctggatgaggtattattagaattcctctgcaaggaagattatccc

SEQ ID NO: 480984 - DNA, 122 bp, Homo sapiens
tcaccttaccccgccttttgggattatgcgtttctggtctctgcaggttggagaccttctcgcctctctgtcaatgatgttgacaataagctgggccacatcaccctgtccctagcgaaagg

SEQ ID NO: 480985 - DNA, 122 bp, Homo sapiens
aagccttgaggctatacctgcctgtgattatcaaggacagtccatcaaacaggccttccacgcttggatatctgccaaagagtaaatccctcctatcacaattctctcacagccctctaatc

SEQ ID NO: 480986 - DNA, 122 bp, Homo sapiens
tgccgagacccagaagagcagccagctcttggctgacaccagcaagtgctaaaccagatgcgtttctcagacgttctctcaacccgcagccagaaacgagaggcaaatctgcctcctgatca

SEQ ID NO: 480987 - DNA, 122 bp, Homo sapiens
gagatgccgacgagcaagcaggtaagtggcggcgccctcccagtgggtgctcttcccaggcgcgagagtccggaggggccgaggagagatctgcacgcccggagctgctcccgcgctctgca

SEQ ID NO: 480988 - DNA, 122 bp, Homo sapiens
tgtccccatctgcaggaaggaacgtagggcagtttggtgtcatggaactgggggcccagccgaggggctcaagagcccttcagactctgcctggtgagtcaagtgctaaggacctcacttct

SEQ ID NO: 480989 - DNA, 122 bp, Homo sapiens
tgtacattggaatcacttggagagctttaaagatgactgatagccaagtcccacccccagcgattctgatttaattaggctgaggtgcagccttaaaggtgatctattgatattatccctaa

SEQ ID NO: 480990 - DNA, 122 bp, Homo sapiens
catagctgagggatacattaacgcggcagctatcttccactatctggtccacagagacttcggacatctcaacatctcacaagttcactacactgctattcccacaagcaagtatacgtttt

SEQ ID NO: 480991 - DNA, 122 bp, Homo sapiens
gggcgcagtggacccaggaaggggcacctgcccggcagatgcgaggccacgggaaccactcgcggctgaaatccagatgtgcttctctgggcaacgtccatcaccaccaggcacagatggcg

SEQ ID NO: 480992 - DNA, 122 bp, Homo sapiens
aagatggtgtgtcatgcgatgtactgtgaaaaccccttcttcatatccctaaaagaccaccgctgatggtgattcatggtacaattgatgattgtatcatgatataattcagtgcttttgca

SEQ ID NO: 480993 - DNA, 122 bp, Homo sapiens
cattgcactttagcctaatgacagagctagactcctccgtctcaaaaaaaaaaaagtgggcggagatacaggttgccacacctggagtccagtccatcctccaccagctcccagtagcctat

SEQ ID NO: 480994 - DNA, 122 bp, Homo sapiens
gtgtggtgttggggtgtctgcacctcgttactgggggactgtgtggtgttggggtgtctgcgcctcgttactgggggactgtgtggtgttgggtgtcggcgcctcgttactgggggactgtg

SEQ ID NO: 480995 - DNA, 122 bp, Homo sapiens
ctccacctccactcagcacctgcctttccgcttctacgaccaggggcgccggggcagcagcgaccccacagtgcagcgctccgtgtttgcatcggtggacaaggtgccaggtgagccagccc

SEQ ID NO: 480996 - DNA, 122 bp, Homo sapiens
caccaaatacactacttgcaaaatatatgaggatgttgttgatgagggtgtcagaacaggcgagcttgatgacctgaacgacttcacagaagaacaaagggatttcaacgtttttgcagaag

SEQ ID NO: 480997 - DNA, 122 bp, Homo sapiens
aatccctggcttttttgagattttttttaatgacattgtcaatttggaaggcttgtgatacgtctcacatcctggatttgtcttcttgcttgcttgtgattagagtcaagttaaccattttg

SEQ ID NO: 480998 - DNA, 122 bp, Homo sapiens
agcgccagccccgcctcccgcccgcccctgtcggcccctcgcgccgcctccgctgcggcccgtcccctagctcccgcccgcccgagaacccagccccaggctgggccccaggaggcgcccgc

SEQ ID NO: 480999 - DNA, 122 bp, Homo sapiens
tgtgaaactactgaggccagctggtattagtaaggaattaccttcagctgctaggaagagcgactcaaactaacaatggcttcaacgagaagcaggtttattttttccagcacataaaagaa

SEQ ID NO: 481000 - DNA, 122 bp, Homo sapiens
gtggagtttgtctgagtggacccaggcagaacaacaggcttaaagtctcagggcctcacacgacaaatatgtgtgcacgagggaaattggacagagaccataataaataattacagctgtgt

SEQ ID NO: 481001 - DNA, 122 bp, Homo sapiens
tctccaccatccagggctctttgccttgctctaggaaggagatcacatcaggtttggaaacggcaagacctggagatgagaagaaacatgccacctggttatggtgtgggggccccagaatt

SEQ ID NO: 481002 - DNA, 122 bp, Homo sapiens
agtccaaactgctgacccagtcctcataggcagggagcgcggtgaagaccgccggcctggcggggccttggcaagcatctccgaagctgtgcagcccggccaggaaccatgtgcccctcacc

SEQ ID NO: 481003 - DNA, 122 bp, Homo sapiens
tcacgtcacactaagagggtttggagaagttcaagggaggaatcctgcaaagaagaggggcgactttttccgtgtctccggacagctaatcgttttagtgacaggatgagagagcccttcgt

SEQ ID NO: 481004 - DNA, 122 bp, Homo sapiens
gcgctgaggtcacgggcgccggccctggtgacgtcattacgcccgcgctcctcgcctggccgtgatatcaatggcgcaggcttcacttctgctgtggcggtgactgaggcctttctggtgac

SEQ ID NO: 481005 - DNA, 122 bp, Homo sapiens
catccaaaaaaactcatggcgagctgcaaagaaagtagaacacacgggcattcccacacgcgcctagatcgattcactcacgccgagggcacgaccaagttcatgccaccatggattcctgc

SEQ ID NO: 481006 - DNA, 122 bp, Homo sapiens
cgcccagggccctcccgggagacccgaggccgcccagggccctcccgggagacccgaggccgtccagaatcttggattccaaagatccgctaacctctgttttaggggaaatcagtttctgc

SEQ ID NO: 481007 - DNA, 122 bp, Homo sapiens
atggcagtgccccagtctgaacgcagcctctctctgcatctggagggcacggggacttggcgcgtgtttggaaagggggatctgtttgtatcgaccagcagccgaggggacgccgtcttctc

SEQ ID NO: 481008 - DNA, 122 bp, Homo sapiens
acgtgggaagctctcggttagcaggtgacagggcaaaagcaccaccaggacctggaagaacgtctgaccaggctacagagcaatggatttctcttacgctgaactgaaagtagcctaagaat

SEQ ID NO: 481009 - DNA, 122 bp, Homo sapiens
ccgccctgccccctccacctccccgggccatcactccaagcaggagtgctgccagggagtcgggctgcctggattcccatctcagccctgaaacttcccagcattgagaacaaccaaatcac

SEQ ID NO: 481010 - DNA, 122 bp, Homo sapiens
ccagtgccaggtccctgagcccgcctgcaggtggcgtctctccctcacgggtgccgggcccggacctgggcactgcacttggcgttgccgacccagccgctccgactcctgcccgggaagtc

SEQ ID NO: 481011 - DNA, 122 bp, Homo sapiens
ctttccagggcatctggtggacgtgaggggcaccgggagcctgtctcagaactatcagtacgaggtgtgcctggcaggaggctcagggacgaatgagttccagttcctgaaaccagtattac

SEQ ID NO: 481012 - DNA, 122 bp, Homo sapiens
attatgcatacacattatcttgactgcctagttaaataatcagagctaaacaaaaattttcgaagaaattaacagtaaatggttaataggcaacgcctcttgggctcgctagcagacacaaa

SEQ ID NO: 481013 - DNA, 122 bp, Homo sapiens
aacccccacaaaaccctgccctttaactctatacccctacatcttgactttttgttgtctcggtttacatatttttatattgtctatctcttagcaggtcactgtagcaattattgtttttg

SEQ ID NO: 481014 - DNA, 122 bp, Homo sapiens
ctgggtaatggcatgaaatgttttccttatgagaagtggtgttgagttacagcgtgcagacggagaacggggaggagagaaacggcagtctcaatctggcccccaccttttcttgggcttgt

SEQ ID NO: 481015 - DNA, 122 bp, Homo sapiens
gatgttctttgaaggaaaataatagaatgctatgagcatgaagaatgtgggtggtagtggcgggggagggatgtataatttagataagggcagtggttaaagatggactctctagggcagtg

SEQ ID NO: 481016 - DNA, 122 bp, Homo sapiens
tgtgagtgctagggagtgtgtgctctcctcacactgtccgggactggggtgctccacccacgctgtgcgggacctgggtgctccacccacgctgtgcgggaccggggtgctccacccacgct

SEQ ID NO: 481017 - DNA, 122 bp, Homo sapiens
tgctgcaggttatgtgttctgtatgttacatcgcctccccgagcagcacgactgcacattcgaccacatgggccgtggccgggaggaagccatcatgaaaatggtgaagctggaccggaaag

SEQ ID NO: 481018 - DNA, 122 bp, Homo sapiens
tgatccagacttttctcagaaacacactggggcactgtgtccgacagtggagtgggcagccggagctgctgtgaactgtttgtccgctgggaaggccagagagggagacactgagctgcagg

SEQ ID NO: 481019 - DNA, 122 bp, Homo sapiens
gatggaggtgcaggttcagggggatcttgggggtggcttgggcatggccctgcttctgcccgttcaccggactcccggctttagttcctcttacaacagccccttctcacttcctttggcgg

SEQ ID NO: 481020 - DNA, 122 bp, Homo sapiens
ctggcttcccgcccaggtcactgcgatgccccagcgcctctggcgggagcgtgccactcacgtggtggcacctgctccgctgccgcagttttgtttacagaaatcgcttcacacggggaaat

SEQ ID NO: 481021 - DNA, 122 bp, Homo sapiens
ccgaggaggaacaatccggcagtaggtgactagcgattgacagggttccacgaactaagtcggaaatttcgctcttggaaacttgtcctcctgctgggctgatcttcccaacagggggctgc

SEQ ID NO: 481022 - DNA, 122 bp, Homo sapiens
acagtactgggcagcttgaggtctcaccctgtggtcacagtctcagagctctgcaaaccccgaaaacctgtgagaaaaatcaacccaagaggtgttaaaaggactcacccatccgggcagca

SEQ ID NO: 481023 - DNA, 122 bp, Homo sapiens
gcgagcagcgggtgtgaggtttgctggtttgggtgtcggaaagccagcacacccgaggtccggctgctgcacccacagggttcgcgctttgacttgttgatgagtggtgggcacgctgggcc

SEQ ID NO: 481024 - DNA, 122 bp, Homo sapiens
tggtgctttgaggagggtgggggacatcagaagaccctcttgctgggaacatccacttcccgatgcctcctcctttgacgtcgtgagccacaggccaccaagcaggttctgcggcagcaact

SEQ ID NO: 481025 - DNA, 122 bp, Homo sapiens
ttggtcatgttgaattctgtgaatgacaaagtgctactgcctcaataaccaccctctgcccgtatccaacaggcacatctcctcctttgtggttccacttcccctgtgcagatcgtgggatg

SEQ ID NO: 481026 - DNA, 122 bp, Homo sapiens
gctgactccagtctaaaatctgtacaacttcacttcaactcagacaaagctcttgcccagcgtgtgttgaatcgcttccagccaatcagcgtgcttccaaatcaaaagctgatggagtcacc

SEQ ID NO: 481027 - DNA, 122 bp, Homo sapiens
tttctggcaatgttaaagaaaacctgcaattagacatatggtaatacaattgcaaaccatcgaagacaaaaaatgttaaaaatgtagtacacaaataagaacaaattatactgtcagtaaag

SEQ ID NO: 481028 - DNA, 122 bp, Homo sapiens
agtcgacatgacgttagtttttcatttgccaaattgctggttagttgcaaagcctaccctcggccgcgagcactgaaggatgggagggtcgagcgccgcgttttgacaggaggaagtgcgga

SEQ ID NO: 481029 - DNA, 122 bp, Homo sapiens
agcagtcagctatatcttgttttaaatcattgctctagacctgagtctagccagcatcatcggatttatagtgcaaaaaatacaccagctatagaaaatagaaactagagatacacgagaca

SEQ ID NO: 481030 - DNA, 122 bp, Homo sapiens
cgaggggcggggctgaggcggggcttggggcggaggccccgcctggaactgagggtggggcgggtccgggtccgggaggagtctcagctggagcccacccggttcctttcctgattgagcag

SEQ ID NO: 481031 - DNA, 122 bp, Homo sapiens
ccacaacagccaagaccactgtatcagaacagacgccagcggggcagcctgctcgttggccgggcggagcagggtcggcacacagcccgggctggccttcaccccagctcccgacagcgttg

SEQ ID NO: 481032 - DNA, 122 bp, Homo sapiens
acactgcccctctcattctcttcaaactgtgactttttacagactcgggcgggtgttctgcggccccccaggtgctatgggggaggggggcgttgaatggaattaaaccagaaagaaagcaa

SEQ ID NO: 481033 - DNA, 122 bp, Homo sapiens
ctacagtgtggactggagccgagatggaggcctcatttgtacctcctgccgtgacaagcgcgtgcgcatcatcgagccccgcaaaggcactgtcgtagctgtgagtcgccatctaccctgac

SEQ ID NO: 481034 - DNA, 122 bp, Homo sapiens
agaaaatacatggcttcctgcgggctgcagcctaatgcccacgttcctctcggggcagaccgaaggttattcaaccagggcaaaggacagccttgcaaaccaactacgtcctccttctggag

SEQ ID NO: 481035 - DNA, 122 bp, Homo sapiens
ggcggtgccaggccgggcgtgggcgagagcacgaacgggctgcctgcgggctgagagcgtcgagctgtcaccatgggtgatcacgcttggagcttcctaaaggacttcctggccgggggcgt

SEQ ID NO: 481036 - DNA, 122 bp, Homo sapiens
ttgaggaaacgtccagtttccgtttcagggaatgcgcataggggaaaacgcaagtccccacgccatcacggggccctccaccgcggccggacgacccctctctcgggagtgactggggcagg

SEQ ID NO: 481037 - DNA, 122 bp, Homo sapiens
agctggcgcgctggcttggcctggcgctcggggccaggactgggcggcggagcggaggggcggggcgcaccgggccgtttcccgtttccgggcccgcgccccgccccgtcccgtcccgtccc

SEQ ID NO: 481038 - DNA, 122 bp, Homo sapiens
aggccgcctggcaccccaggacacatcggcagcctccccagtggaaacgcccaagacaggcgaagaccagaggggacgcatggagacaagtcttcatgtttgccttaagaccgttgtggcga

SEQ ID NO: 481039 - DNA, 122 bp, Homo sapiens
aaataattttccctttcaaaactctttcaaatgttctccaaaagaagccaggaaagctcccgtatgagtagataattcactttaaaattcgctcatctctctttaacacgagagtctgcagg

SEQ ID NO: 481040 - DNA, 122 bp, Homo sapiens
tcccctaccttatttccccaggtagagaggaaccacaaggacgggccaccatcggcactgcgctgagacccaggcactatagaattcagaagataggagtctagcagcctccagacagggca

SEQ ID NO: 481041 - DNA, 122 bp, Homo sapiens
ggcccgggagacacctcttggaccctgaggcgtctgtcgaagagcagcccagtgggcatccgtgacagcttggggacttccttccttcctgggggagacgagcacccaggcacataaagtcc

SEQ ID NO: 481042 - DNA, 122 bp, Homo sapiens
tataaaagcccctaatacaactacgagtccgtggagccagggctttacacaaatatatgtcgtgtactacatattaatatatatgcacatacaatattttgttcttctggtgctaacgacta

SEQ ID NO: 481043 - DNA, 122 bp, Homo sapiens
ccagaatctccagctccctggccactcactcgcctcctctgtattccgtcattatgctaacgcctggccatcacgcacagccagaccgggccaccttgttcctgggcgcagccatcgccaac

SEQ ID NO: 481044 - DNA, 122 bp, Homo sapiens
gaggacggcgggcccggcgccgcctccacctcggccgccgcaatggcgacggtcggggagcgcaggcctctgcccagtcctgaagtgatgctgggacagtcgtggaatctgtgggttgaggc

SEQ ID NO: 481045 - DNA, 122 bp, Homo sapiens
cttctcttctgagccctcccctgccccaggaaccctggcctcaccaaaacagcagcagctcgttggctccaaaaccagggagcagaccatgccctcccaaccctggagttgtcagggagggc

SEQ ID NO: 481046 - DNA, 122 bp, Homo sapiens
agtttcccttttactctttaaggtgaaagataatggatcacgtcagtgcctggactcatccggcccagctctgtgtctctagggaggctaccacagtctgccattagatggttttttatccc

SEQ ID NO: 481047 - DNA, 122 bp, Homo sapiens
ttgacgtccgggctgccgctccgccggtcggggctgtcccgcagacacgggctctcgctccgccgctccatgctgctccgactcggagacaaagttcccaccggcaggtcgcaataaaacgc

SEQ ID NO: 481048 - DNA, 122 bp, Homo sapiens
ccccagttcgagggagccgatcagccgctccgcgcccgctctcgccggcgctcagcaccacggacagtcgcctccccgcccaccccggaactccagcttccactcgcgcccctgcctcgctc

SEQ ID NO: 481049 - DNA, 122 bp, Homo sapiens
ccggactatatatgttttaaaaatcactaaacaatcccacatagtgtttatggaaacaaccgtggaaaaagtacgaaaagaggcttgggactgatgcacaccaacttcaggatagcgattac

SEQ ID NO: 481050 - DNA, 122 bp, Homo sapiens
aggatctgctccttggtgtgcacttccggcctcagccagagatgacaaagttcccagagccggctcagagcctcatggggcccaggtgaatcctggtagccaaactgcctgaattgctggcg

SEQ ID NO: 481051 - DNA, 122 bp, Homo sapiens
gcagggtgtggctgtgctaggaaagagacttggcccacagcctcacagtgattcagaagacgctgggtgaggacctctgtgtccctgctccaaggaccctgagatgacccatcccaggacac

SEQ ID NO: 481052 - DNA, 122 bp, Homo sapiens
tctctgcagtccctggcccacatctggaaggcccggcacaccctgttggagccagaagtgcgctactacctgcggcagatcctttctggcctcaagtacttgcaccagcgcggcatcttgca

SEQ ID NO: 481053 - DNA, 122 bp, Homo sapiens
tgctgctttgggtattaattaacaaatcagaatattccacactgacagagagataaagaacgtgtagagaattgaaaaacatcaaatatatgggtcaaaaaggtaaagtgcacattcttatt

SEQ ID NO: 481054 - DNA, 122 bp, Homo sapiens
ctccgagaaactgaccgcctccgagcaagcccacccacaggagccggcagaaagtgcccacgagccccggttatcagctgaatatgagaaagttgagctgccctcagaggagcaagtcagtg

SEQ ID NO: 481055 - DNA, 122 bp, Homo sapiens
ccgcgcgcccccgccggccgcgcactccatgaagggcccattagcgcggcaggtgcctcccgggctgtaaattcgccccgatttatctccccggggacgaaataaatccagcttggatggga

SEQ ID NO: 481056 - DNA, 122 bp, Homo sapiens
tcatgagtgactaggttagggtggactaaattttcctgactgggtggattccttctgctacgtagtttaataattaagcacaaacaagtaagaagagatttccacattaaaatcaaatgctg

SEQ ID NO: 481057 - DNA, 122 bp, Homo sapiens
gggaactcgcgtgggctgaggagaccggagtggacgggctggggaaggcaccgtgatgcccgcaaccccgtccctgaaggtggtccatgagctgcctgcctgtaccctctgtgcggggccgc

SEQ ID NO: 481058 - DNA, 122 bp, Homo sapiens
agaaactctggtgtgggttttcagtcctggaaggtgagccctggggtaggcacgcgtgggcgctcagaaaagggaaggcagaggcgcctccccggctgggcctgcggagggatgacccacac

SEQ ID NO: 481059 - DNA, 122 bp, Homo sapiens
ttctgaagacagggctgactctgtccattaagcaaagcagatcctgcctagagcccaccacgcacacgaggaagaggcccaggtgggctttgcctagggtgcattttatgatttgaattaca

SEQ ID NO: 481060 - DNA, 122 bp, Homo sapiens
tagaacttaaaaagctgtgaaatggagccggagtgaccaactgtcccagtctgctggagccgaaagccctgcatgccggaatttccatgctaaaaccaagacagtccctggcaaaccaagac

SEQ ID NO: 481061 - DNA, 122 bp, Homo sapiens
gtccaccatcttcctcttgctgccagtggtagcgctcgtctggcggagctgggtgagttgcggctgtggccgcggccagggagacgggcaatcctcccctcccccatccccttccacacgca

SEQ ID NO: 481062 - DNA, 122 bp, Homo sapiens
ccgcagacacttcaaacccagtgcattcccatttatcatctcctccgcagacctgctccccgactgcggccctgtcttggcagccagcaacaggcatccaggccctgcctcccagcccactg

SEQ ID NO: 481063 - DNA, 122 bp, Homo sapiens
tgtgtgggtgggacacagggtgtggacctgggtggatcttaaggagggtggatggcaaggcgggggatgccattcctgctgtgggaggaatcggatcagccaatgcaggaatgattggcatg

SEQ ID NO: 481064 - DNA, 122 bp, Homo sapiens
gagcccgacagcactgacatcggcgtcctacgccaccacttgcgagctggggcaaggccacggagcctctctgagcactgtttccacgctgcagtccacacacgggcagtgcagggcatgag

SEQ ID NO: 481065 - DNA, 122 bp, Homo sapiens
ccctgggagtgaggccagcaatcagtgttttaagcaagctttgcatgtgattcagatgaacgctagagtttgggaattactggtttacattttaacagcttacaaccatcttttccaatgca

SEQ ID NO: 481066 - DNA, 122 bp, Homo sapiens
gacagcctgatttaagccctagcaaaacctcctaccttgagcatgtctgctatattgattcgcctatggaagagttgccacgtttcaccctctacctcctaaggtggttctgccttccttaa

SEQ ID NO: 481067 - DNA, 122 bp, Homo sapiens
atggcctcagcaagggtaggaggaacccggcctggcctggaggctaaggccaggtggaggcgcccaggagcaggtgccccgaaccacacgccacccctgcgactgttaaacgagaagtgtca

SEQ ID NO: 481068 - DNA, 122 bp, Homo sapiens
gactattcagagttggagtctttgcttttgggcggtgaggtctcaggagccaggggacctcggccagtcccagtgaactgaatgaagggtcgctagcagaagcaagaggcgccatggggccc

SEQ ID NO: 481069 - DNA, 122 bp, Homo sapiens
caatgggcggggctgaaccaatggatgggttggaccaatggcaagggctggactaatggacgagggatgggccggggctggaccaatgggcgagggctggaccaatggccacgggctgggcg

SEQ ID NO: 481070 - DNA, 122 bp, Homo sapiens
gacaggaccctagagaggatgttgcagaactccgccgaggccaaaaacagagagtgggcacgttgctgccggttatagaggaatgggaccacctcagggtggtctgctgtctgcatcttaca

SEQ ID NO: 481071 - DNA, 122 bp, Homo sapiens
agtgtccctagcgtcacgccctgtcgccctcccctgagctcccggaagcccatggggccgcggccaagtttccccgcctcccgaggagagacagagaagccacgagtcgccgggtgggcgcg

SEQ ID NO: 481072 - DNA, 122 bp, Homo sapiens
tcctgcaagaagcgttgcccgttggctagctgctcggtggggatctgcctgccctgggggcgccgcccgcgctccccgcggtgctctcgctcctgggctgcgccagtccgaggcggtgccgg

SEQ ID NO: 481073 - DNA, 122 bp, Homo sapiens
ttgatttacaaacagtgctcatatgaatttactgaccttgtaatgacagaggtcttcaaacggattgtggcctatggattgtgaactgatgtaattgactcattcctgatcaacctcagatt

SEQ ID NO: 481074 - DNA, 122 bp, Homo sapiens
cctcccacaccctcaccttccaggcggggaggaagggctgcagccccacggccgccggaacgccctcccgacccagggagaatcaaggccagggctctccaccgccccttccatatccgggt

SEQ ID NO: 481075 - DNA, 122 bp, Homo sapiens
tcctctgtctctttcttggtccatccctcaatggctgtgcttggagtctttagtctttgccggcctctagttttgcacccacccttttctcagcccccttgtatggtaccctcactgctaag

SEQ ID NO: 481076 - DNA, 122 bp, Homo sapiens
catttcatcacagtataaatgggcaaatccatcacttccctctgctcagtgctcttgaagcgagattgaagggaaaattagaagctgttcatttgtgcttgcgggctcagaagcgtcgcact

SEQ ID NO: 481077 - DNA, 122 bp, Homo sapiens
atttgtgaaaaggcttgaaagagttgaaatagtaggttgatcaatcatgtagggagatcacggggcccagaaagaataggtaagatcttcaggcagaagcattcctagcccttttcaggaag

SEQ ID NO: 481078 - DNA, 122 bp, Homo sapiens
acccaggactgtgcagcgatccccgggacccgcagtttgcgaaactgtaggagtctgacccgcgcccccgctgcgtgtccaggtgaccgggaaaggttgcagaggcgtgcttggggtttgga

SEQ ID NO: 481079 - DNA, 122 bp, Homo sapiens
aagaaaacttgtcacctgagggtctttcctggcccaggacacagtgactctcctctcctgcgtgccctctccctgtcctgatcccccacccacggacagagggctgagcatcgagatgccaa

SEQ ID NO: 481080 - DNA, 122 bp, Homo sapiens
cctcgcccgcggccctgggcaatgggtgtggtgacgtcctggggcccccatgagtcagctcgtcctcgtgcccgggcactggcctctccttcctgtgggcgcacagccccggttcctctgaa

SEQ ID NO: 481081 - DNA, 122 bp, Homo sapiens
caggcccagagcagctggccttgtagaggcacccagtgtcccagcctgtggggctcctgacgcctgtgctgagcggcctcaccagtggcagaggcacccagtgtcccagcctgtggggctcc

SEQ ID NO: 481082 - DNA, 122 bp, Homo sapiens
attagaggcatgaaccaacacacctggcttgtgttcatttttattaggtgaggagccaaccggcctgtgatctgcaaaagccacaaaattactatgctagccaacacactatctacattaaa

SEQ ID NO: 481083 - DNA, 122 bp, Homo sapiens
ggagctttcccgtaacaccgatgcatcaaacaaaaggtagtaaaagtgcctgggtttttgcgttgaaatatctttcccttcaactccccacaaggtgcttttactccccgtcatcaccaccg

SEQ ID NO: 481084 - DNA, 122 bp, Homo sapiens
gttgttatctgaacttggtttcctgtaactcgacaaatttgggaaaccactcacaggaaccgcaagccacaggccttcctgcccagccagaagtgccaccttggccgttcggtcagagctca

SEQ ID NO: 481085 - DNA, 122 bp, Homo sapiens
gagagtgtggtctgtggaggtaacatgtgagccacaacctgatgacctgaagaagtcagccgtgcactgctatggggggacaacactccagacagagggatctatgagtgcaaaggccctga

SEQ ID NO: 481086 - DNA, 122 bp, Homo sapiens
taaagaaagggcagaagtggggacccctctcccacccccttcccctgctccaagccaaagcgtttgaagcaagaggttgcctcctgtgagtttcccccagtccctggaggcctgggctttgg

SEQ ID NO: 481087 - DNA, 122 bp, Homo sapiens
agctcgggacccccgctctggcgaaacgaggaatatgacatacagcaaaacaccccttcgcggccgctgcactgccgcgacacacccggcgcctgcctctacagcaagccggcgaggggctg

SEQ ID NO: 481088 - DNA, 122 bp, Homo sapiens
ccggaagaaagcccactgggagctaaattccagttgtcactagcttcttactgcagagaacgagaactaaagaggttgagaaaggagcaaatggagcagagaatcaactccgagaattcttt

SEQ ID NO: 481089 - DNA, 122 bp, Homo sapiens
gcgtgtgtgagcgtgttgtgagtgtgtgcgtgttgtggggtagagggtaagagggcaaagcgaggagtaaagctaaagagctggggattgaggtcccaagctgttctccgcggcagccgaga

SEQ ID NO: 481090 - DNA, 122 bp, Homo sapiens
taccacttattggaggggaagaccaaatatgaaggagctaggtaccactagatgcatttacgatgctgttgggcctctgggggagttaactggtgtaatttcaaggatgttgaatttccatg

SEQ ID NO: 481091 - DNA, 122 bp, Homo sapiens
gagatgttgtggcaccctgtactaaatacacggtactgaatgttctggccaaagagaaaacgtttctcattggagaaccctgatgagatcagccattgagagtgctgccaaacgactccagg

SEQ ID NO: 481092 - DNA, 122 bp, Homo sapiens
tcaaatgccagctagggcttagtttgtttataggagtttccaaaatagctcctttggtttcgcatgaaaggaaatggcaaaatagcccaggaagaggaatgtgagtttacacagaagacaga

SEQ ID NO: 481093 - DNA, 122 bp, Homo sapiens
gttcccagaatgctccaagggcagcgcttcccaccagctgggctttgttttgactcaagccggttgggtttgagccacttctctggtgctactactgtgagattcgtttttgttttattcat

SEQ ID NO: 481094 - DNA, 122 bp, Homo sapiens
atgggaaagtaccgtgaaaggtgaggttacactttctccttccagcaccggcccaggcgccggcacatctgggttctggtgcacacccatcctgactcagagtccctgaaccttggcccacg

SEQ ID NO: 481095 - DNA, 122 bp, Homo sapiens
ctgcaaatcaatacgatccccctcaccctaccatactcgttggccaggatttactggctgcggctgttctgtgttaacgcagctcttggagtgggcctgtcctggagatgattatttatttt

SEQ ID NO: 481096 - DNA, 122 bp, Homo sapiens
gcggtgtcaggaccctttaagcaattggtgatcccagggcagcgtggcgtgttcggaagacgcccagctaattctggctgtgtgacccgaggctggttacccccctctctgggccgatggtt

SEQ ID NO: 481097 - DNA, 122 bp, Homo sapiens
actctttcatgtaaaaaatcccagaggaaagagatcgccgggactcgagaccccttaacccgccccatccacagtcaacgaatccctgagaccggattccctaacgaggcgctcccggtgcc

SEQ ID NO: 481098 - DNA, 122 bp, Homo sapiens
gacctctgagaggggactggcatggggggatctcagagcttacaggctgagccaagcccacggccatgcacagggacactcacacaggcacacgcacctgctctccacctggactcaggccg

SEQ ID NO: 481099 - DNA, 122 bp, Homo sapiens
cagggtctttcctcttcaaagccaggttaacaagacaaacatcttttttttttttctttacgaggtaagttgctttcacaggggaaaaagaaaaccgtccataaagaccctaaattatctcc

SEQ ID NO: 481100 - DNA, 122 bp, Homo sapiens
gtgtcggagggtttggagctctcgttgctgctaccacgtccaatgagtggaaagtgaccacgcgagcctcctcggtgataacagccacttgggtttaccagggtctgtggatgaactgcgca

SEQ ID NO: 481101 - DNA, 122 bp, Homo sapiens
ggctccagggaggatccttcctgcctcttccagcttccggtggccgatgacaactcttggcgtttttcacttatggacgcgttactccagtctctgtccctgtcttcatcgggtgttccccc

SEQ ID NO: 481102 - DNA, 122 bp, Homo sapiens
gaggtgtggccagttacttacgtggggaccagagccccaaggatctgggaaagtggggaccgtgacaccgcaggcaagaaagcctgcaggggccaggtgccacagctcacgcctgtaatccc

SEQ ID NO: 481103 - DNA, 122 bp, Homo sapiens
ctcggagcgaggggcggggtgggagagctggcgcgcgcacgcgtaaagtctttgcagcctcgctacggggcggagtcttgcctgtcagcaggggcagagtagcgatcgtcgccaaagcgcgc

SEQ ID NO: 481104 - DNA, 122 bp, Homo sapiens
cttgtcttgtttcatcgcccgtgtccgggctgtgtaagaagcatgtccatttgtcccgagcggagggtctctgccccgcccctgagggaggccaggaggcccttgttggatgctctggcggg

SEQ ID NO: 481105 - DNA, 122 bp, Homo sapiens
tgtagacatattttgattgtcatgactgtgccgttctattgacatctcgtgggtcgaggccggggatgttgctaaacatcctgcaatgcacgggacagtccccgcagcgaagaatcatccgg

SEQ ID NO: 481106 - DNA, 122 bp, Homo sapiens
cccgatcggcggccgccaggtccctggagccgccgcctccccgctcccggcctcagctgtcgttgtccacaggaagggcggccccgcccagccgtggcgtccgaacgcagccgaggcaaccg

SEQ ID NO: 481107 - DNA, 122 bp, Homo sapiens
agctcctaagagaatttcccagtaaaatcgcctcaactgcggtaaataggctgttccccgcgccagcatttgagaagagctggtccccagagtgtaaaggagttaggatgttggcaggagga

SEQ ID NO: 481108 - DNA, 122 bp, Homo sapiens
tgcgacttgcagcgtttggggaaagttactcaccaactagtcatgcgcctcggatgccgccggccacggggctcccggaggggggtccgacaccgcccggtgcccgggatccccaatctggc

SEQ ID NO: 481109 - DNA, 122 bp, Homo sapiens
tagaaaggccgcaaggggagaggaggagcctgagaagcgccaagcacctcctccgctctgcgccagatcacctcagcagaggcacacaagcccggttccggcatctctgctcctattggctg

SEQ ID NO: 481110 - DNA, 122 bp, Homo sapiens
ttcctgtattttcacaaccatttagcatatgccagatgggaaaaataatgcattgcttcccgaggaagtgggacatttagtaagacagtttttcacacataaaaatactgtcttttatctct

SEQ ID NO: 481111 - DNA, 122 bp, Homo sapiens
gctccctgcggccgcagccggggaacaatgaggcgccggcctctttaagggagataccaccgcgccggcggggcaggggacggcatcctcccagatgatcgcacccagccccgcgccgccgc

SEQ ID NO: 481112 - DNA, 122 bp, Homo sapiens
tgtactgggaaagggctttcttagcatagcccttgggttaaacacacacgagtgcatgtgcgcacacacacacacacacacacacacacacacagatgacagctgtagaagtactccactgt

SEQ ID NO: 481113 - DNA, 122 bp, Homo sapiens
ggctcagcctccccacctgcctggtgggcagggaggccttgagcctgggaaaggcgcgggcggccactgctggaggggagcgggcaccgtggggctgcgcgctgcggcgggctccccccaca

SEQ ID NO: 481114 - DNA, 122 bp, Homo sapiens
cccaggtgccagggctggtagtggtaacagccagcacctgttccaggcctgcggtctttccgtctcgagcctgccctcccgcctgtctgagcccccgttttgcattgacagtgttgggttgg

SEQ ID NO: 481115 - DNA, 122 bp, Homo sapiens
gcagggtcgtctctagggccttctttgggggttcctgggacctgctggccaggaaatgcccgtgagtccacagacgcttctgccagcccatggccccttgcgtgcagagatgctggtcctgg

SEQ ID NO: 481116 - DNA, 122 bp, Homo sapiens
aatccaaagatcccttcacctctgaaggggtctgctgctattttgggcacacacatccaccgtgggaggccgctgaggctctcgatattcacacaaggatttgtttggcttgtcatatgttt

SEQ ID NO: 481117 - DNA, 122 bp, Homo sapiens
acggtcctggccagcggaaggcggcaagaggagcagcaaggctccacgcgaggcggccggcggctggagtcccagtcagcctccgctttcatcccagagcagtccacgggggccttaaagga

SEQ ID NO: 481118 - DNA, 122 bp, Homo sapiens
gttcaggtttcggcagctgccactccgccctcatcctgtcagggacacctcaggccaaggcgctgtctggattttagccagcaatggggagtcccgctctgccctggccgccgcccactgtc

SEQ ID NO: 481119 - DNA, 122 bp, Homo sapiens
gcgcccgctccctacttgggaggaggagtacgcgcgaccgcagctggaatccgcgcggcgcgcaagctgcctgcagccccgaacttgcctgacaacggagcatgcccagtggccgccggggc

SEQ ID NO: 481120 - DNA, 122 bp, Homo sapiens
acctcctcgggcagcagcaggcgctcggccgtctggatctccctggaggtgatggtcgagcgcttgttgtaatgcgccaggcgggaagcctcgcccgcgacgtgctcaaagatgtcgttgac

SEQ ID NO: 481121 - DNA, 122 bp, Homo sapiens
cccgctggctgtgggcggagcagcgacccgggggtgcggtgagcacgtggacctccgcctcggccggctcctcctgttaagcgatctctgctttgttagccgcctgctgtgagcagtcccag

SEQ ID NO: 481122 - DNA, 122 bp, Homo sapiens
cctgccctgttcagtgctcccaggtggcaggtgtgtaggtgtcagccacaagaacaccctcgtctaaatccagtgggtcagcaatggtgtctctctatcacatcactaagtcgggttccacc

SEQ ID NO: 481123 - DNA, 122 bp, Homo sapiens
cctataatttaaaattatttgccgcattctcggggctgtttctcacctcccgttgtgcaacggctttctcgtcttcacagacacatgggcagccatctctgtcccttgtcaccagcggtggg

SEQ ID NO: 481124 - DNA, 122 bp, Homo sapiens
acgcacaggccggcccggccgcacgcgcctgctggacggcacttcagggcacaacccacacgcgtctttggacttgcagacattccgcgaggcttctggcctctcgaaggcaaagcttttca

SEQ ID NO: 481125 - DNA, 122 bp, Homo sapiens
ggctgggtgggtcggggccagggctggcggggtcggggcgcccacctgtgcgcggggatgcgctgcgagctgagccccttgcccaccaggaagtgcacgtcgcacagcacctcgttgttgaa

SEQ ID NO: 481126 - DNA, 122 bp, Homo sapiens
gtgcctttgcgaagcggcagcgcatggagaaacagtcgctggtggccagggccagagtcgcgcaccgggtagccagaacaggcaggagcgaggaggctcccggggtgagaacggggcacccc

SEQ ID NO: 481127 - DNA, 122 bp, Homo sapiens
acagacagagcatttcatcactctagaaactggatggcaagtgctacccagcacagcagccgtgaggacctttcttgggctgctgactgttctgtctgtgactgtgtcatatcaactgactt

SEQ ID NO: 481128 - DNA, 122 bp, Homo sapiens
tccttcttcttcccttcccacttcgttcttctctttcccttaattaggcaaaaatctatacgagaaaccttaaaaaaaaaacagttttatgtttacttaagtaaagaggggggagcatttta

SEQ ID NO: 481129 - DNA, 122 bp, Homo sapiens
cgcccttgtcccgcagcactcggtactcctcccagcagtagtagatgccgtatgccagcacgcccagcactcccaggatcagcaccagcaccaggggcccagccaccaggcgcagaagcaag

SEQ ID NO: 481130 - DNA, 122 bp, Homo sapiens
gtaggaaaactaaccatatatttaccacctgtcgtgtgctggggagtctgttaggaagctcgggtgtgttatcatatccagtcctccaagaccataaaagagatgggaacttgaggcttagg

SEQ ID NO: 481131 - DNA, 122 bp, Homo sapiens
ggtgggtcagggaggaacaccaggattccgagttctcctgcagactggcagggagctggccgtgccaccaccatcacggaagtgggtggtttatgtctggaggacaggaaaagggagcccca

SEQ ID NO: 481132 - DNA, 122 bp, Homo sapiens
caaaaaacagtcacctgcagcatcccctggggctcccagaaattcttgggatatcatgtacggggctgcagggtccctgcttgagcaagtgggaataagagtcagggactttataggcatag

SEQ ID NO: 481133 - DNA, 122 bp, Homo sapiens
acagggcaggtggtggaggggttagaggtgccctgagcgcacatcccactccattacttccggctgtgaacccttggacaagtggcttggcaggcggtggcttcctacctcagctgtgaagt

SEQ ID NO: 481134 - DNA, 122 bp, Homo sapiens
acgagcctggcctgaaaccacgcccgtgctcaaagtgatgtttacttagaaggtggcacccgacaagggcttccaatgtgttccatgtgcaggatctcttggaagacggatgccgtgtgcac

SEQ ID NO: 481135 - DNA, 122 bp, Homo sapiens
tagccccgcccccgcaccgcgccgagtggagagctcacggctgccggggtgttttggcagcgagaacaagcgagctgcgcctgagaacggccttcaggcctggcgctaaataataagtcgtt

SEQ ID NO: 481136 - DNA, 122 bp, Homo sapiens
cccttcttcaccatccttgggaaaattccctccaaactgggataggtggcaacagaggttcggaaacagcaagcgtcccaggctgaatctgcggaggaggaagagatgaacctttcctgagc

SEQ ID NO: 481137 - DNA, 122 bp, Homo sapiens
atttctttctcactgcaacagacaaaggatctctgagtcatactattaactttagaactgcggtcagagttggactcatcttttaaatagtcaccaataacatttgcatttttcagattatc

SEQ ID NO: 481138 - DNA, 122 bp, Homo sapiens
gcatggtaggtgctgtgcccagtggcagatgcaccaccaccatcacttccacatttgccccgtcccaaatactagaggccccacttggctcggcctggtccagtggtcactgtgcatgggcc

SEQ ID NO: 481139 - DNA, 122 bp, Homo sapiens
tagatcacatctgttaagtctcttgccacaagcatcaaaacttttcagagctgtctcttccgtgaaaatccatttcatgtagtagcaagttgattttctttgtggttcatccccacgcctga

SEQ ID NO: 481140 - DNA, 122 bp, Homo sapiens
tctatgtaaattatccaggggcaggggcattgctttggtccgcccaagagtcagatggcgcgggttccctccctgtgagtttcgacagtgcatcatcttacggaagaggctaaactagtatt

SEQ ID NO: 481141 - DNA, 122 bp, Homo sapiens
cggccgcttggaggacttccctgtcaatgtgttctccgtcactccttacacacccagcaccgctgacatccaggtgtccgatgatgacaaggcgggggccaccttgctcttctcaggcatct

SEQ ID NO: 481142 - DNA, 122 bp, Homo sapiens
ctccccatcccaaagcaaaacttggtgggctatgcacgcctcagaaagtctgggtcaacccgctacaaatgttaagcacagtgctggggcacccctgaattaatgaggcatttcttaatgac

SEQ ID NO: 481143 - DNA, 122 bp, Homo sapiens
ctttgtttagatatgctgatgccttccttcgctgggaacggtccagtcctgcccgcctggcgctcagctctgcggatctcaggggatggagtggcaatctcattgctcccgcctctcctgac

SEQ ID NO: 481144 - DNA, 122 bp, Homo sapiens
actagggcgcaggcgagcggaggactgtgtgcccgtgtccgagctggggctgcctctgggcgaaaactctaccgacaggcggcacgcattccgcgcccgctctgcctacttgaggagggggt

SEQ ID NO: 481145 - DNA, 122 bp, Homo sapiens
cattaagtggcacttttgttatctggggaaggtgggaaggaggccaagcctggaggaaaacgccgaggaaacagcttgaagcacacttcccagcgtggagcaaagtaggggtggttgggcag

SEQ ID NO: 481146 - DNA, 122 bp, Homo sapiens
cgaccgcaggccggggaggctgcaggagactgggggccaggggagcgggggagtcggcagcgccgcctgggacagagcttgccgcacgctgacctactttctggggccgatgtgtttgcagc

SEQ ID NO: 481147 - DNA, 122 bp, Homo sapiens
tagaggggcccggggactcaggcgatagacgcgggaagggcccagagggacgtcaaggaccgagctacttaaggagctcgaggtgtctggcgggaccggaggcaggagagaagccggcgacc

SEQ ID NO: 481148 - DNA, 122 bp, Homo sapiens
gcgccccgcccacacgcctggcccgtcgagcgcctgcgcacgcagcgccttttacggcgccgtaaagcagctcggccgagcagactgctgcggttcctggtgagaccctacccacccccctg

SEQ ID NO: 481149 - DNA, 122 bp, Homo sapiens
aataccagaggcctccgcacagcctctgggcctctctgccgctgcctctgctgctgctggcgagcctgtgcgcaaccgtgatcatcttctgggtggcctaccgcaatgaggaccgctgggcg

SEQ ID NO: 481150 - DNA, 122 bp, Homo sapiens
gcaccactgccacccccagcaactccaggacccggaagaggcccacttccacgtcctcctcgcctgagacccccgaattcagcactttccgggcctgccagtgaggctgaggactgggggac

SEQ ID NO: 481151 - DNA, 122 bp, Homo sapiens
aactgaggcccagagaggtaaataaatttgctcaagatcatcatccagtccatggtttggcgcaaacctgtgtgcccttgggctagtcacagccctactttgagcctcagattttctcattt

SEQ ID NO: 481152 - DNA, 122 bp, Homo sapiens
tccatcctgctctgatattcagcacctctgcgcttctctacttgggctggaggcagatcccgcccccaccccccaccacaccttcccctgaactacctgcccttcctatacacacacacaca

SEQ ID NO: 481153 - DNA, 122 bp, Homo sapiens
atcccccaagtgattctaatttgcagccacagctgtgagcactgccctaacccaactgaacgggttagagttctgcccagttcccacgttctcccacatccctgtgctcacccatcctggct

SEQ ID NO: 481154 - DNA, 122 bp, Homo sapiens
gggtttcacattctctaacgagggatttaggatgtacattccaatcgggatttccagtcccgtggggagcaaacatcagttcacattcctgagacgtgcagcctccatgctccacggacgca

SEQ ID NO: 481155 - DNA, 122 bp, Homo sapiens
gaaaagaactcggcgagcctctgggttcctccattctgcaattcagtgttaattgactaccgactgtatgccaggccccgttctaggctcagaggatagagcagtggacaaagtggacagag

SEQ ID NO: 481156 - DNA, 122 bp, Homo sapiens
caaaactcctgcacatccagagctggaagggacttcaaaggttgttggcgccaaccttcccgtttcacagtgaagaaattgagggcaagagatgaactgcagaatcccagcctcccggacgg

SEQ ID NO: 481157 - DNA, 122 bp, Homo sapiens
tgtggccactacacttggaagggcgagtcacctgcagccacctgggaggcggagctgtggcgcaggagttgggggggggatccccaacacatgggagagacgaggtgagctcaggtggccaa

SEQ ID NO: 481158 - DNA, 122 bp, Homo sapiens
gaacaaatgctaggaaatggcagggtaagagcttggtcccagctctgaatcagaagcccacgctcctaccaggaccctctccaccttttttcagttcactggattcactatggagcatcttg

SEQ ID NO: 481159 - DNA, 122 bp, Homo sapiens
gctcagacccagtggcaacagcacccagggtgaattttaatggccccaaagaatgagagtcgggccctggttgtcgccgtggtgaccggcggctcctaacgaacaacatggcttccgtggtg

SEQ ID NO: 481160 - DNA, 122 bp, Homo sapiens
tctgcagaggtggccaactcagtggcaatcatgccaccacagatacagactgaattcaagcgaagtcactacactcttgtttcttttaaaatgttgacttcggctgggcacagtggctcaca

SEQ ID NO: 481161 - DNA, 122 bp, Homo sapiens
gcttgcatgtcattttccaatttaagtgaaataattacaccatgttagagacatccttttcgggggaattaccaagaattcataatattttatagaagttgctgatgttgaaaatctgccta

SEQ ID NO: 481162 - DNA, 122 bp, Homo sapiens
gtgtgtttctgcgcctggcctcttgcatttctaaggggcctttgaagacagggccgaatgcgcgcgggggcttcaggcactttgcgctccacggcgggtcccgcagcccggcccgagccggc

SEQ ID NO: 481163 - DNA, 122 bp, Homo sapiens
ttttaatgctactgggcgtagtcactgggcgcgttccacctcttcgtttcattgtctggacgaaatccagtttccatgctagtgtcccttcccttcttcacccgctccggcagcttggtggc

SEQ ID NO: 481164 - DNA, 122 bp, Homo sapiens
catgtatacaagttgccaatcaccagtaccaacataccatgggcagacctctcacctctccgtacccgggctgcactcaggacccagagagagcagaacccaaagaggcccttagaggcaca

SEQ ID NO: 481165 - DNA, 122 bp, Homo sapiens
aattgcacagtgagttgtgtgcatgtggcgaatctggaaccttcaaacatttctggaccccgattcctgcacagacatctgaggctatggctgaaaggtcagatagaatcccagggaagagc

SEQ ID NO: 481166 - DNA, 122 bp, Homo sapiens
gcgaggtggaggctgggcggagtagaagggttttcgggggcctgtggggtagagctggcacgctttttagacctgtaactgctgcttctactctgattgactatcctgcccgttcagttcac

SEQ ID NO: 481167 - DNA, 122 bp, Homo sapiens
aaaaactcgaatgtcgccctgccgttcctggggttggtgacaggtctggtcatcgcacggcggcagctcctcacctggatttagaagagctggcgtccccgcccgcccaagcctttaaactc

SEQ ID NO: 481168 - DNA, 122 bp, Homo sapiens
caggtaagctcgccgggcattttcatgcagcaggattatgataaatgcttaacagacacacggctgggctggggtgaggcgcgcgaactctcaggtttgtgcgagtgcttccttaaattgag

SEQ ID NO: 481169 - DNA, 122 bp, Homo sapiens
ctgggccagaggtctcaatagggccttccagcaccgccatttttgtcgccctgccttgcccgccaccgaaagattccacgtcctaggtggcctggcgagtgtttgctgccgtccagccgata

SEQ ID NO: 481170 - DNA, 122 bp, Homo sapiens
ccatctctaagttttcaaagagaacctgagccaggtataaatgtcttttcttctgctctgcggctattctcgagaacttactgcttacttaacagtgtggccatgttctaaatgttgcctac

SEQ ID NO: 481171 - DNA, 122 bp, Homo sapiens
gcggttcctctcccaccaattggggtcctgaattagggtgcgagcagccaggcgccatcccggggcgggttgtggggtcctcggtatggggaggttgggaaacagagaggacactggggaga

SEQ ID NO: 481172 - DNA, 122 bp, Homo sapiens
gggaagctgggggcatggtgctcaccttctcacccttatgacccttcagaccccgaattccgtccacaccctagaattagagaggggatagaagtagactgatcaggggatggaggtgggtt

SEQ ID NO: 481173 - DNA, 122 bp, Homo sapiens
ggcaggggagggtgcgctgattggcccggcggggattaagtcatcgctagcaggttcgagcggcccagacaccggcggggcggccgaggctgctgtgagagggcgctcgaggctgccgagag

SEQ ID NO: 481174 - DNA, 122 bp, Homo sapiens
tttgaatttcaagtctctcgccttaggcaaaacaccaccacctgatgctcaccagaggggcgtgacgcggcagctgggcagggaagggatgggaagggatgggaagggaggcgatcgataac

SEQ ID NO: 481175 - DNA, 122 bp, Homo sapiens
tctgaaacattccatacttcttatcttgcccacctggtgttggggctagtgatagggatccgtggatgaagctggggtggggtggagaacatggttgccacatgcccagacagtgcctggca

SEQ ID NO: 481176 - DNA, 122 bp, Homo sapiens
cattggagataaagtccaaggaggtgaactaacctttgaacgtgccagtaagtaagatggcgagaaaagcaagagagagtgggaccgatcgatagcgcagcggtcggcttggcgccctttca

SEQ ID NO: 481177 - DNA, 122 bp, Homo sapiens
accgggacctgggtgggaggagccctcagttaccttcaccggggcctgggcagtgggaggcgcccttggtcaccgtcaccagggcctgagcagtgggcgcaggactttactcccgcttagtt

SEQ ID NO: 481178 - DNA, 122 bp, Homo sapiens
gtgaatttttactccaggtcagtgtcttcagttactcttctttgtctaattcttgcccttcgtccactttagaattccttgagtgttttaaagcgcaatattccatcccttaacagatccca

SEQ ID NO: 481179 - DNA, 122 bp, Homo sapiens
agtgtttaaaaaggcttctcagggatgatgtagagcgagaagcgaaagaggtgaagtgtacggcacattcccatgaggaccgccgggctgcttccccgcccctatgtggcatagctcgagct

SEQ ID NO: 481180 - DNA, 122 bp, Homo sapiens
gcgccggagggaggtgcggaggccgggaggccggggaggccggcggggagcagagtcgagcgcctccggagcagagaaaggagcccgcgccccgcgccccgcgccccgcgcacggtccccag

SEQ ID NO: 481181 - DNA, 122 bp, Homo sapiens
cgttggcgctggtgcaggaaggaggaggagaggcttggggccggaccacgggcgcgaaggcgctcttctgtttcactgcggagatgacattggcaggtgagaatgagaaaatgccgtgtgtg

SEQ ID NO: 481182 - DNA, 122 bp, Homo sapiens
tcatcaccatctctgctcctctcagtggataaactttttaatcagtggtgacctcgtcatcgcgttaaaatagttctgccctcagcccctctttatctgtagatggcagagcgagcgccggt

SEQ ID NO: 481183 - DNA, 122 bp, Homo sapiens
ctgagatgatggctctgggcgcagcgggagctacccgggtctttgtcgcgatggtagcggcggctctcggcggccaccctctgctgggagtgagcgccaccttgaactcggttctcaattcc

SEQ ID NO: 481184 - DNA, 122 bp, Homo sapiens
tccatggtttctggggcactatcccagtcacttcctgaattctccgaggagctgtccacccgtctgggttctgggtaaggcgggtcaggcctcattggtttccggcggccccaagggcgagg

SEQ ID NO: 481185 - DNA, 122 bp, Homo sapiens
accctcttttccaggcctagcgcagagcccggggatgccgcccgggggagcctgaggacccgctccagctaggcacgccaggccccgccctttgaggacacgccccacaccagcctcagagc

SEQ ID NO: 481186 - DNA, 122 bp, Homo sapiens
tgctcttgtgctttggggccatgatgaagtcaaatgagggttccttgtactcaagcactgcgacccctggaccgtggatctgataaccaagaggccataagaggggcggggagcgtccgcag

SEQ ID NO: 481187 - DNA, 122 bp, Homo sapiens
gcgccagacgatgcatcttctggaacggcagctgaggcaatgcggggtgtgaagtggcggcgggcagaggggctcgcaggggctgggatccgcgtgcccctctctgcctcggtgcggagcac

SEQ ID NO: 481188 - DNA, 122 bp, Homo sapiens
ctcggtaagtggtagctctcttctttctttcccttaagtttcagcccaacagatctctttcgtcagctgttatcattgtaaaaatcatcagttaaaggcaaataaactggcctccaattatg

SEQ ID NO: 481189 - DNA, 122 bp, Homo sapiens
cctgggccaggggctgagaagacatggaaatgtaacacacactccctggactgaaaaacacgccttcctggacaaacggcaaatcctagcatctaaaaacagccttaggagtcagacagact

SEQ ID NO: 481190 - DNA, 122 bp, Homo sapiens
gaacagacatgttttaacaaactggttgagccgtatcagtgcgaaccagctgaatgtcagcgctgttccctcctgtgacagaagccaccggcgcctgcctgagggcactcccctcactggga

SEQ ID NO: 481191 - DNA, 122 bp, Homo sapiens
gcggcccggcggcgttgggggctgggcgcacacgcggcgggcatgtgggggagtgcggcgcggcatcatatggacatttgtttgtgaaaatctctgtgaacacctttgtgtgcgtaaataca

SEQ ID NO: 481192 - DNA, 122 bp, Homo sapiens
tgtcttcacgtggtctccctccgtgggtttctgtgtcctgattgtctcttaccagaacaccgtggattagagcccaccccacagtgacctcattttaacttaatcaccttattgatgaccct

SEQ ID NO: 481193 - DNA, 122 bp, Homo sapiens
acatttcagcgtatgaactacggggacacattcagagcatagcaggggcctagggccatgcgatatcagcttgacctctggaggggctaagactcaaccagtcacatttgcacttgaccatg

SEQ ID NO: 481194 - DNA, 122 bp, Homo sapiens
gtcttccgggttcaagcaattctctgtctcagcctcagagtacctgagaccacaggcgcccgccacaacgctgggctaatttttgtatttttagtagagacggggtttcgccatgttattgg

SEQ ID NO: 481195 - DNA, 122 bp, Homo sapiens
gcttctgccagaacaacagactgaggggccaagagggagagaggaggtaggaggccaggtcggaggctgctgcaggatccaagcaagggcatgatgtgactgtgacctgcatagatgggcat

SEQ ID NO: 481196 - DNA, 122 bp, Homo sapiens
actttcctggaactacccaatgtttccattaaatagtaccacttgccttccctgttttgccgtgaatctttctaacacccacagtacctatcttcataacttctggttgttcagtcttctgt

SEQ ID NO: 481197 - DNA, 122 bp, Homo sapiens
cttgctcgggtttggcaacgacgtactgtaatgatgatggatttcagtctttaaaagctccgggacagcctgagagtaggggtcaggggactcaagccgacctccccaccgctcatctcgga

SEQ ID NO: 481198 - DNA, 122 bp, Homo sapiens
gggaggggccgcgcgagggttggggcaggccccgcgcctggggcggaggtgcggggagggcgtccagcagcagcaacaccccgcgcgccccgagcacccactgggggtccactcgccgcatc

SEQ ID NO: 481199 - DNA, 122 bp, Homo sapiens
aggctggactacaggtgcctgccaccacgcctggccaatttttgagttttttgttagagacggggttaaaccatattggccagggtggtgtccaactcctgaccccaagtgatccacctgcc

SEQ ID NO: 481200 - DNA, 122 bp, Homo sapiens
agtacaacatcagctcagcaggaacgccggctccccgaggacccaggcttgacgattcaccggggatctcctgggctgggctctccttggaagtgaggccttttattaaaaataaaagggtt

SEQ ID NO: 481201 - DNA, 122 bp, Homo sapiens
cgtgatccgccaacctcggcctcccaaagtgctgggattacaggcgtgagccaccagacccggcccttaagtggtctttatgtgagtattaactgtataactcgaccttcctgtgttttttt

SEQ ID NO: 481202 - DNA, 122 bp, Homo sapiens
cattcccactctagtacccgtaagctacaagacgccgccgttcgtcgggtggctctgtggcgcaatggatagcgcattggacttctagtgacgaatagagcaattcaaaggttgtgggttcg

SEQ ID NO: 481203 - DNA, 122 bp, Homo sapiens
gttccccgcttgcctcctctgagtgacccagtgacattcccatgtaccagtaaaatcttacgcctggttactgcgtcctcctccaccctgacgccaggcactgtccctgggactggcgtgga

SEQ ID NO: 481204 - DNA, 122 bp, Homo sapiens
cagccacccgcagccagagtcccgcgagaccgacggacggcctgcccctgcgtgacggcacgcctgggactgtcccagcaggctcccatgcttcacccaactgcgacagggaaacaggaggg

SEQ ID NO: 481205 - DNA, 122 bp, Homo sapiens
aacaggccccaggaatcctagacctaagcctggcgcgaaactacatttcccacaatccttcgggggctgataaggctccgcaatggtctgaactacaattcccacaatccagggcgatttcc

SEQ ID NO: 481206 - DNA, 122 bp, Homo sapiens
aggtacaggggcttattcaatatttttagcaccatctagtgtaatttttttccttctctccggcttgtgactgtaaccaaaactgatgtaaaatgtttgttgcctgcttttctgtatggtta

SEQ ID NO: 481207 - DNA, 122 bp, Homo sapiens
ctcaagcgagccccctgcctcagcctcccaaagtgctgggattacaggcgtgggccactacgcccggcctgaaaccaattgcctttgaattcatcctggggaatctgctgaagtggacagtt

SEQ ID NO: 481208 - DNA, 122 bp, Homo sapiens
gcactgccagggctgcatggggacgcgtggggctgggggacgagcaccagcagccgcacacgccccgccgggccctgacagctgagctgcggaggcacccggcctgtcccctctgcttccac

SEQ ID NO: 481209 - DNA, 122 bp, Homo sapiens
caactcccacccggatcaagctactgccgcttaccccgccgtccgcacccgcccggccgccggggaggctctgtcacgccaaggccatggccacccgctggctcctctgtctctccgctgcc

SEQ ID NO: 481210 - DNA, 122 bp, Homo sapiens
tccgacggagacgcagtgcgcctgcgcaagagccggtgcgtatttgcctgtacctacgcgcgatgccagtacttctggtcagtttccaggagcggcaagtgaggaatatgaaataaccttat

SEQ ID NO: 481211 - DNA, 122 bp, Homo sapiens
gagtttgagtttgaccggctgagggccttccaggctatgcaggtgagtgagtccggctctcgaggagggctctgaagccatgcagggtgccgttggggtgcccccaccactcctagccttga

SEQ ID NO: 481212 - DNA, 122 bp, Homo sapiens
gagagatgaaatgtaaacaacaaaatacaggaggcagggagatggatggaagcgtgatggcggacgaaacactccaggcagagccaaaagccaggctaccggcagggaaggctggaatcagc

SEQ ID NO: 481213 - DNA, 122 bp, Homo sapiens
ggagcctgcgctcccgggcgcccactccgcacgcggagccgccccccgcacccgccgcggcggccgagccccgcccccggcccatcggcacgattcacctcgcccggtcctgaggtcccagg

SEQ ID NO: 481214 - DNA, 122 bp, Homo sapiens
gccagccccgtccagcccctgcccccgccccagcagcactcaccccccggcgggccggagcgcgccaggccctgacccgtgaagaccacggagcggggtaatccacaccacctgtctccacc

SEQ ID NO: 481215 - DNA, 122 bp, Homo sapiens
cgctccaaccaccgagtcagttaggttcctgcgaacgccagcagctcagtcatcagcgctcgcttctctcacttcccacctgcctatctcagcaggaggaacacctggaggttctccccagg

SEQ ID NO: 481216 - DNA, 122 bp, Homo sapiens
accctctcagggtggtgggggtgtccatggtcatggccagcgtccaagcccttaggccaccgggaagcagttccctactgcagatctagggaaggggcacaggcgcccaggcaaccagcaga

SEQ ID NO: 481217 - DNA, 122 bp, Homo sapiens
ccaggccaggagagggtcccgggctgaaggggtgactagctgggggttcccagggagattcggggagagcgaagggtcccggcttaggagggaggtgaggagcaggagcgggtcccggacac

SEQ ID NO: 481218 - DNA, 122 bp, Homo sapiens
ttctcatttgctaaattgggccaagtcagaaaatttagacctgagttctaattctagcttcgcttctaaatagctcacttaactctctaggccttaatatcctcaaccagaaaatatagaag

SEQ ID NO: 481219 - DNA, 122 bp, Homo sapiens
ctatgtgatcaggggcaagttatttaacctctttgtgcttctatttcctcgcaagtaaaacggagacaatagcagtacttacaaagctgttttgtggattaaagcactgcgaacagtgcctg

SEQ ID NO: 481220 - DNA, 122 bp, Homo sapiens
ctgaatgtggagagagctgtagttttatctggcttttaaaacatggacctgccggctgggcgcagtggcttacacctgtaatcccagtactttgggaggccgaagtgggtggatcacttgag

SEQ ID NO: 481221 - DNA, 122 bp, Homo sapiens
tggctaatgaaaagtggtggataagtttgacagcaggtgaatttgtaaaataattaaaaacgtttaagtggtagataaggcagactataacacacactaactgcgctaataattctgggttc

SEQ ID NO: 481222 - DNA, 122 bp, Homo sapiens
gactagaacatcttcaccagagaccggcgccgactccttggcagtgtgtaacattcagctcggtgccgaggtctgcccatgcaggactgatctccattctctcaatgaccctaggagacagg

SEQ ID NO: 481223 - DNA, 122 bp, Homo sapiens
ccggcggccaggacctcagacaggccctggggtgcctcccaacgccgccccgcttaccggcgacccttgtcctgcgtcttgcggctctgctcaaacagcgccgcctcattgaaggagacccg

SEQ ID NO: 481224 - DNA, 122 bp, Homo sapiens
ggcgctgaactggccctgacccagtgaacgccggcagaggcaaagcacctcctcgccgcccgctcggggggtccagaccctccccaggctagatggccggcccctgtatcctcagaccgggg

SEQ ID NO: 481225 - DNA, 122 bp, Homo sapiens
gcgccaggcgggaccagccgcgcgcccccagcgcgccaggctcgcgccgcagcagctccacgtggctatagaagacgtgcagaacctgccaggccagcaccagcgggctcagcgccaggttc

SEQ ID NO: 481226 - DNA, 122 bp, Homo sapiens
tcctggcttctacagaggacgagatggggagggcgtagggcgaggaaggaggagataaagcggtttggtgcatggatgagtcagagcccgggcactcccacccatggctgaaaagagcatga

SEQ ID NO: 481227 - DNA, 122 bp, Homo sapiens
gcgggcgtccgggcccctctcctcacctccctgcggacagctcctaggccagtcgagcgccgatttatcagcccctctgaggaccgccaagcctggctaagccgagctccaagcaatggatc

SEQ ID NO: 481228 - DNA, 122 bp, Homo sapiens
gggtgcagggaggaaactcggcctgagaggcgcagtggctagaaccagtcaacactgctacgcacagccacgtttccatggcttcctacgtcactcaggccttagggggcggggtatgtcac

SEQ ID NO: 481229 - DNA, 122 bp, Homo sapiens
attaacatttgtagaagaaagagactggaaagtgactcctacagtcccccccatgtccgccggaaacagaaaatcaccgacattgtcaacaagtaccggaacaagcagctggagccagagtt

SEQ ID NO: 481230 - DNA, 122 bp, Homo sapiens
gatgttagtcacatgggtctagtcagtcgttgaaatgcactggcctggaaatttatgacacgtgtgtgcatttttctgtgtgtttgttctacttgcatcaaaaattgacttaaaaccaaaaa

SEQ ID NO: 481231 - DNA, 122 bp, Homo sapiens
tccactagaaattgatttaacctcaccttccacatgtactcatccactagctccctacgacgtcataatctgagagagtaagcacagttttcttgtgattgtttctaagagagtaatagaac

SEQ ID NO: 481232 - DNA, 122 bp, Homo sapiens
agcacccaagtgaggggcattgcgaaccacaccaggattacaggctagagtccagagcaccgggactcccactcccaaaacatgtcaaaagcaaacttttccagctctgagggagctgagtt

SEQ ID NO: 481233 - DNA, 122 bp, Homo sapiens
ctcatcagtaactgaaaggacaattctgagatctgggagatactctgggttcccctaacccgaggaaggagactgttcctttattaggccctgattttgctctctggaagcagcttcctaat

SEQ ID NO: 481234 - DNA, 122 bp, Homo sapiens
gatgtgtggtgcaggtccccccaccccagccaaataaccaagaggtaaattgtgtaccctcgaatactgttggttataaaaaaggcattttatttgccgtcgtataggtacttgtattggaa

SEQ ID NO: 481235 - DNA, 122 bp, Homo sapiens
ggcgctgtttcgtcgcgaaatatattctttgtgtggttcgctcactcgtgcctggttctccgagagcgcagcgcgggctttattctcagggggtgtggcgcctcgcccccaaacccagcagc

SEQ ID NO: 481236 - DNA, 122 bp, Homo sapiens
cttggccacacgtgctccttttagctgcacggcctgtctttaggtgccagtgtgatgcaccgggtgtgcgtcgagtgagcgtcccgaggccacgtgcggaggcccctcactgtgctgtcaaa

SEQ ID NO: 481237 - DNA, 122 bp, Homo sapiens
tgggaacatcagctcaggtgagacatatgaattcaacaaaacatcagggatggtttgccacgtttgcgagcagcacagaaaacggcagtttgctccaagttcccagcacaccaaagggggca

SEQ ID NO: 481238 - DNA, 122 bp, Homo sapiens
cgcgtcgccgttgatgtagccgcccgcagcggtggccagctccgggcgcggggtgggcggcggcgcagaccctgcagccgccggacccagctctccacgcacagctgctgcgtacatgggct

SEQ ID NO: 481239 - DNA, 122 bp, Homo sapiens
gagaacccaactcccagaaaacatctggggcggaaacggaagcatggccgcagcggtgaacgcactgcattctgggaaatgtagtcgaaacggccgctggggcagagtgagcacccacagtg

SEQ ID NO: 481240 - DNA, 122 bp, Homo sapiens
atctgcctcactgaatcactgaattccctactaacaggtacataccccacagatggacatcgcacagggcaaggactttgttcagctctcagctgtgtcctcagcacctagaacagtaatga

SEQ ID NO: 481241 - DNA, 122 bp, Homo sapiens
tccatctaacaagaacttcaggaaattcaggtaaatgatactaaaaggaaacattcctaacgtgggacaatctaggtaaatggcctgatctcttcaaaagatcgatgtcataaaaataaaag

SEQ ID NO: 481242 - DNA, 122 bp, Homo sapiens
cctgaaaccctagccggggtccctcttgcctggctctgagggtgatactctgaagacttccggtgtgacagaaattgaagaatcccctgaaggggtggttgtggaaagactcataaaatgat

SEQ ID NO: 481243 - DNA, 122 bp, Homo sapiens
gcccctgcggtgcctcggaaggtgcttgctatccgaggacaccttcatgcaaagcaaacccgcacaccctgtctcaccaccactccaccagggaggtaagagaagagcaaaacagacagttc

SEQ ID NO: 481244 - DNA, 122 bp, Homo sapiens
gaaagcaggcccaactcatcaaatgttgctttcgttttcctgggtccagggctagagcctcgggtactggaccaagcctctgccataaatctgaacaattcataaacacatacacatacagc

SEQ ID NO: 481245 - DNA, 122 bp, Homo sapiens
gcggcagaggccaaagtctataaatttctgactctgcgccctactcattgtccgagtttccgcgtttttcatgaacgctctcggccgccgggaattctctttgatgggatttcaggtttcag

SEQ ID NO: 481246 - DNA, 122 bp, Homo sapiens
ccaaatttgggagaaaaacatctcttggtctagcccagaaaaggcacttacttcctttttcgtgtgtgggaagaactatgcacatctttccaatgaagccatttatgtaggtcactcaggca

SEQ ID NO: 481247 - DNA, 122 bp, Homo sapiens
aggcattggctcagtaacttttcacgtcattttctgctcgggagccccttctagcctctccgcgcagcctttcccaccgcaaatcaccagtgctcatggggcaggcggagaggagcttgcag

SEQ ID NO: 481248 - DNA, 122 bp, Homo sapiens
gctagaagcacagctctgaagacctgatatgcagtcggtgaagggacagccctttgaattcgctctggttcagagcactacctttctaaggtcacagtgttgccccttgcacacctcaggcc

SEQ ID NO: 481249 - DNA, 122 bp, Homo sapiens
ttggctgcggccatagagactggctcataattttaacaacagacaaagacagactagtggcgagactgaaagctcaagtttactgtctccttcataaagcaaatgcaaatactaagtttttg

SEQ ID NO: 481250 - DNA, 122 bp, Homo sapiens
cgtcaccagggcctgagcagtgggcgcaggactttactcccgcttagttgatttcaggctcgtgttagcctgggtgttgcccttgccatcttcccccctcacctttgccgcctgactgtcat

SEQ ID NO: 481251 - DNA, 122 bp, Homo sapiens
tcttccatcgccagagtctttgtcatcattccttgtgctttgacataaagtgttggttgccggaatctttccaaactggattcagaattgtttttcacctgctctgaaaataggttgagttg

SEQ ID NO: 481252 - DNA, 122 bp, Homo sapiens
tcctagagaaatctgttataatttaacaacccacttatccaccttaaaactgaggaaagtcgtctttacatctaattttattcttgtgtgttataacttaaacctatttctatttttgtttg

SEQ ID NO: 481253 - DNA, 122 bp, Homo sapiens
gaatctctctccctctgcagagctcctgagcccctgacaatgacagacaggccttggaaacggtccctgtgctttagacaaacaaaagcaaaaagaatgaagtgccactgaccctgcatttg

SEQ ID NO: 481254 - DNA, 122 bp, Homo sapiens
gtgctcctgcttcctggccgagggcgggcgagcggagcctgctttcgcagcgatcgcgagcgtgtggcgattgcttctgtctgttatttagatatggaagctgaggggatgcacagaggcag

SEQ ID NO: 481255 - DNA, 122 bp, Homo sapiens
gtcgctcaggccaccaggagaagccggggaaagcacctccatcttcggaatttttagcggcgagttggcgggcagctccgagccacagggcgcagccatcttccaagcggccgccgctgcac

SEQ ID NO: 481256 - DNA, 122 bp, Homo sapiens
taagagctgaggattcaaaggcatgtaagaccgcccctgccctcagctgcaagacctgtccgcgatcctacgaggtaaacgatggcctccttcggcttctcactccccctgccacctctgag

SEQ ID NO: 481257 - DNA, 122 bp, Homo sapiens
tgggacacaagccccggacccgggcagcacggagagcctgcaggagaagcccatggagatcggtgtgtgggtgggtggggctcggaggctgtgggatgggggtcggaggctgtgggatgggg

SEQ ID NO: 481258 - DNA, 122 bp, Homo sapiens
acacattaagacacttcagtcagaagatctgaaagtttggcccttccaaaaactgagcgccgtgcctttaaaccactcaagtttcctaagcattagtttctttctctgtaaaagaaggccaa

SEQ ID NO: 481259 - DNA, 122 bp, Homo sapiens
aagaactttctgtcttaaaacacaaaacaacagaaataacagaacacaacacaagaaccacgtgctaaaaggagaagggggaagctgtggcggaggagctaagtccaggatgatgacccggg

SEQ ID NO: 481260 - DNA, 122 bp, Homo sapiens
caagctgagaggaggaatccacaagtagcagctggctgcagggtaccacagaggaagcggcgtgatggcgaaacaaagccacagaagcagcgtcttcctttctagagcagactgaacagagt

SEQ ID NO: 481261 - DNA, 122 bp, Homo sapiens
ccagagagtggcaggctgcagtgcctgtggggtggcagggctggtccagacactcgtccacgtctccctcacagcgtagccccacaaagcctggagggcaggcacagtggaatcctccaggt

SEQ ID NO: 481262 - DNA, 122 bp, Homo sapiens
atttactttgcggggcaagaagcgtgtggtcccgctccgggccgcttttggctccacttacggcgacaatgcctcctagcgccctgcgcagcgcagtcacgctccctccgccgccggcggcg

SEQ ID NO: 481263 - DNA, 122 bp, Homo sapiens
gtaggggagatgggggttaatctctctctatgcaatcaggctctaaaattggctgcttcccggaacagaaacggcaggagttggcatcagaatgcagcaacttgattcctggctacttacca

SEQ ID NO: 481264 - DNA, 122 bp, Homo sapiens
tggttcagagtgctctctgcgtccaggcgggctgccagaaaccttcagtgagctggtctgcgacactcaggccctccaccggcacatgggacagcagcacccacgctgctgcagcctggtag

SEQ ID NO: 481265 - DNA, 122 bp, Homo sapiens
tttacctaaaggagactggcttctaccgacaggaaggtcccttgcccccaacaaagagggcgtccaatgacgtaaaccaatccgattgctctgtgccagggccgggattcgctggcgtagcc

SEQ ID NO: 481266 - DNA, 122 bp, Homo sapiens
ggtattttaactcatccaggcttcgtacaggacaaatcttattactgtaacttagttacacggccataaacatagtttccctttctctttctcagcttgtttacttagtaccagaagaaagt

SEQ ID NO: 481267 - DNA, 122 bp, Homo sapiens
aatgtgtggacgctccttgcagaaagcctggcaccagatgcaatgctgccggcatgttcccgtgacccccttgcctgggaagctgaggctggaggctaggatgagcagcatgagggctacag

SEQ ID NO: 481268 - DNA, 122 bp, Homo sapiens
ggcaggaagagaggaaaggtctccaggaaggtgccgaacttcttgtgaggaagttagggacgacttggaactggggaaacttgtttgcaggtaagacagaaaggtgggaggtaaaccatatt

SEQ ID NO: 481269 - DNA, 122 bp, Homo sapiens
cccacacttctcaccgccgctcggcaggggaagtggcagatctgacagccgcgttctacgcgaggacctgccccagagtttaaatgtcaatgataagaaaagagggtgctcaggcaggcgct

SEQ ID NO: 481270 - DNA, 122 bp, Homo sapiens
ggagtgggcagagagtggtggtcctggaataccagaatactattatctgccaaaagctagcgaacgtcatcctccaccccatccttaaaaagtttggaacctgtagacgaaactaggtagag

SEQ ID NO: 481271 - DNA, 122 bp, Homo sapiens
aatttattctttcatggttctggaggttggaagccccaaatctcaaggtatcatcagggccgtaaatcctttgaagggtatagagaagaaaccttccttctagttttggtggttgccagcaa

SEQ ID NO: 481272 - DNA, 122 bp, Homo sapiens
gggttctaggtaggtgtgtgacttcccgtgtgaatggctttcaggttttctatccggctacgttctacaggttcaggagcgtccctcttagaggttaggctcaggaccgtcagtctccttaa

SEQ ID NO: 481273 - DNA, 122 bp, Homo sapiens
gggtctggcagagataaaaaaacatgtaggcctgcaggagttgaggtcattgtgggctcccgtttctgaaggattttgcccattctacggtagtttccctgagggaaaatggaacatacata

SEQ ID NO: 481274 - DNA, 122 bp, Homo sapiens
ttccttgaccgtctggaaggagctggagcagaagcccacccatcactacaagtcagcatccgaccccatccacacctttgacctgtacggcagcgaggtggtcactggcaccgtgtccaaca

SEQ ID NO: 481275 - DNA, 122 bp, Homo sapiens
tgattgtgtgtgagaatatacctccacgtttgtgtgtgaatgagtgtgtgattgtgagaacgtaccttcgtgcgtgagtgggtatgtgtggttgtgtgtatgtactttcacatttgtgagtg

SEQ ID NO: 481276 - DNA, 122 bp, Homo sapiens
gccccctcagacctccaaggtgggtcacatctcccccttagagccctcaggacagggccccgttgcccacagagaattcctaaaggcctatccatatgtccctgtccataaagacgtcgagt

SEQ ID NO: 481277 - DNA, 122 bp, Homo sapiens
gaccggtgacgccgtgggtgtggagggggaggcagtggctggccctcttggggtaaggtacgcccaggaacagtttagaataacgtgcgcgagtcaaagggaagaagaagctcctgcagacc

SEQ ID NO: 481278 - DNA, 122 bp, Homo sapiens
taaagcaaatagcataaaagatgtaaatcttatccatttatgtgtgtggtatatttaatgcgtgttacgtggatttagggttttatgtaaactgtgttctagattacttatttcaaacaaag

SEQ ID NO: 481279 - DNA, 122 bp, Homo sapiens
ggggagtctgtttactgcagccgcaggcccagggcccttgcgtgagctccacgaagtctgcgccgggccttggcactgaccctgcggggcctgcaacccaaactcaccggtttctgggagct

SEQ ID NO: 481280 - DNA, 122 bp, Homo sapiens
ggagccgcttctccaggccgcccgcctccctgccgcaggagcaggcccgcgcccgccgcccgagagcctccggtagagggagacactccagcggctcctccgacttggcagcggccgggccg

SEQ ID NO: 481281 - DNA, 122 bp, Homo sapiens
ctgtgtgactatgagactgaaatatcagataaaaatcaggtcccctaccatctcatttaccggtaggatatggcactatgacagcttgtgaaaaaatcttcaccaagtagtcatacaactgt

SEQ ID NO: 481282 - DNA, 122 bp, Homo sapiens
gcggaggcgagaaggcggggagcgacggtgcgggggcgtcgcggagaaatgacttcatgacgcggcttcttaaaggcgccggcccagcgcgccgcggatagcacaggcacgtcccgggggct

SEQ ID NO: 481283 - DNA, 122 bp, Homo sapiens
gaatcttggtggccgctgctggagcgcggcctgcgccatggccacctccgccgcctcctccgagcgtttcaagaagctgcacgaaatcttccgcggcctccacgaagacctacaaggggtgc

SEQ ID NO: 481284 - DNA, 122 bp, Homo sapiens
tggaaccagtgcagagccagtgctgtgaacgtcaggctcaagacacggacacttgggagccgcgtgaccctaggggatgaaagaaacgggccacagagctgcttccacagcgtggctcagct

SEQ ID NO: 481285 - DNA, 122 bp, Homo sapiens
ggcgtgagccaccaggcccggccaaccagtgctaagtacttattaacaataagcccaggccgggcgcggtggctcacgcctgtaatcccagtactttgggaggccgaggcaggtggatcatg

SEQ ID NO: 481286 - DNA, 122 bp, Homo sapiens
taatgaagtaaaaaatatgcccctcccatcatagattatctgcagcagaaacctggcaggcgtcagccatggtacctgtggtttaagctctcagcttaaagcatctgaaaggggcattacgt

SEQ ID NO: 481287 - DNA, 122 bp, Homo sapiens
taaataccatgccttaacctcaaagtcttctttctacactggcccagatacctctgcacccggctatgtgttgggtttgagattgtcctgggtgagaaacaccaggaaacagcgggaccggt

SEQ ID NO: 481288 - DNA, 122 bp, Homo sapiens
cctcttggatagtagcaatgttacctgggacccagtggagactcacagaaataggagacccgatccctggcctcagggggcttgtaatctagccaaagaaagttcttaataaagttagtcat

SEQ ID NO: 481289 - DNA, 122 bp, Homo sapiens
agcgcggcccaggcggggtgcgagtggcgcagttggagcccgttgcggcccctgaggaagcgaggaggcgtcggcgtcggctgaggcgggcggaccggcgaggcgaggcggcggccccaggc

SEQ ID NO: 481290 - DNA, 122 bp, Homo sapiens
ccttgggacctattgttcggtacttcgggtcctggaaagcgagatttgggtgttcagtctcgaggtctctgaatcttcccgctgctggagagaaatgcgcgctgtggagttgtctggacatt

SEQ ID NO: 481291 - DNA, 122 bp, Homo sapiens
ctgcgtatgtgccttaggccagcagtcttgttgtatgtctgcagcactgaaataggtgctcgttaaatgtttgtaggatgaatgctgagtgaatgcagtggacaggatacaggcaggtgatt

SEQ ID NO: 481292 - DNA, 122 bp, Homo sapiens
agcaggcgacatgcgaggaggcgggcagcccaggagggttggacacggcaatgtggacctcgccgcttccacaacgatgctggctactgatcgcgtgcacttccttgccaaagaaagtgagt

SEQ ID NO: 481293 - DNA, 122 bp, Homo sapiens
gagcacccggaggacccatgagtgaagaaagaggtggagatgagccctctgccttgcagccgtcttcctggttccagggctacccccacctcatgggggcccgtaggcagcgggtacgcccc

SEQ ID NO: 481294 - DNA, 122 bp, Homo sapiens
cacaatcaacccactcctacagtcaaagccttcccttttcccacaggatttcctgctccacgacctgccaggccatgagtggagatggtgcttaggagggttttatggttctagggctcagc

SEQ ID NO: 481295 - DNA, 122 bp, Homo sapiens
tagcagtcaactggtatgattttgagagataatatcacacgaagtttaagtgtgggctctcggttagactgcctggaatcttgcagccactgtcattgctagctttgtgaccttgaccttgt

SEQ ID NO: 481296 - DNA, 122 bp, Homo sapiens
acctcaggtgatctacccacctaggcctcccaaagtgctgggattacaggcatgagccaccgcacccagcctgaagacaggttttattttgggcaacattcaagattacttggagtcaaatt

SEQ ID NO: 481297 - DNA, 122 bp, Homo sapiens
gtgcacccacgggaaaggcaaaggcagaaacgctgcaaatcccttcaccattggaggaggcgctaccagcccctaccctatccagctcgattttatcaagttctgcaggtaaagcggtgtga

SEQ ID NO: 481298 - DNA, 122 bp, Homo sapiens
cctggcggcttttgttggccgcgtgctaatagccagggcttaaaagttttccatcttgagcggcaatcagctttcttcctctccatctctggccaaagccccctcgtccctgggacgcgctg

SEQ ID NO: 481299 - DNA, 122 bp, Homo sapiens
tgaatactatgggaggtttcatcacagatgcttgccatttacttttagggacgtcgcatacgacgtccgtaaattactggctcgggttttgagctttacctggctctcgtcccctgtagtac

SEQ ID NO: 481300 - DNA, 122 bp, Homo sapiens
ctgggaatatccagcctccagtccaggaatggccctcacgtccccatctgccccagtgcacgtgaccacagggctctagggtgccagatctcccgacagcaggcagttgctctgtcagcatc

SEQ ID NO: 481301 - DNA, 122 bp, Homo sapiens
gcggagcgcggagtccgcatagtctccagaggtaggacgcagcttttctctctgaacccgcgcagcggcagcttgatcaccgcgggcaggatagaccgggaggagctctgcgctcagagcgc

SEQ ID NO: 481302 - DNA, 122 bp, Homo sapiens
actgtggtccatcagcaggcatagtcaggctgtgtcttcaaactaaatccagacgctgaccggttccgtcacctgcaccgccgcctccctggctcacacccgcgtcctctccactctgggat

SEQ ID NO: 481303 - DNA, 122 bp, Homo sapiens
ggccgcggaaggatatttcactttgtttacctccccggccgggcgagggagctgcgaggccggtgctggcgcccccggcacggagctgcaatggcagcggcgcggggagccgcccgaggact

SEQ ID NO: 481304 - DNA, 122 bp, Homo sapiens
gttgtctggtttcaataaaaactgaagcggtcccgagctagcaggcttccctccgaggggcggacggaaggtccgcagggttaacggaagcggagagaacaggacaaaaaggaaaggccgga

SEQ ID NO: 481305 - DNA, 122 bp, Homo sapiens
tggaattgtcgccctgcctcagccgcctccccgcagggtcagggctcaggaccggcagcccgccatgcctgagcccccctcatgctcccgccgtgggctcccgttcggccagagcctccccg

SEQ ID NO: 481306 - DNA, 122 bp, Homo sapiens
actccggcagctttatcgccagagtccctgaactctcgctttcttttttatcccctgcatcgcgtcaccggcgtgccccaccatgtcagacgcagccgtagacaccagctccgaaatcacca

SEQ ID NO: 481307 - DNA, 122 bp, Homo sapiens
tagcaaggtcacagtgactgcagttgcctccactgatactaattcagagctcttgccccccgccccccgcccttttcccatattaatgttaccccttagcatcttttcttttctttcttttt

SEQ ID NO: 481308 - DNA, 122 bp, Homo sapiens
atcatcggcagctcggtgggtggtgctcctgggcgattggttggcagaatgagggcgctgcgcaaaaacggagaagccgagcgctcggagctcagaaactgccagcccagaccacaggctca

SEQ ID NO: 481309 - DNA, 122 bp, Homo sapiens
cctccgtcatctgacaggcaaatgttacagcccttcaagacttaggcattacctttcccgcgcggccttcccttcactgtgccttacaatcttctccatggcaggacatagtgaaactccgt

SEQ ID NO: 481310 - DNA, 122 bp, Homo sapiens
atgcccatcactacagccccagggaaggatgaggaggccaggagactaggctgatcaggacgtgctctcatacttgatcaacgacgggggctttcactgcattctccaaatatgttctgtcg

SEQ ID NO: 481311 - DNA, 122 bp, Homo sapiens
ccttcaacttatttatgtctaaaaatgtattgtcaagacgcttcttttttgatcaaggcccgatttgggtggtggggcagggtaggtgttaccgagaagccagaagcattagcacttacact

SEQ ID NO: 481312 - DNA, 122 bp, Homo sapiens
gtagagcttagctcaatgcccagcaccctaaaaccactgcataggagttagttatgatgccgatgatgacggtgatgatgctgccagtgcgtctcagagagagaaaggacgaacgcacaacc

SEQ ID NO: 481313 - DNA, 122 bp, Homo sapiens
agagctctgtagattacgttcttaaggaaaagagtaacccccttacggcgtttagattttcgtacacccaagcagtagcatagatgctgtacaacgtaacactgagtcagtctgaactgtgg

SEQ ID NO: 481314 - DNA, 122 bp, Homo sapiens
attttaggtaccggtgacaggcattgtgggagatttcatggggagggttctctcagaagacgaacagccccacagctttcgacttgactgacttggtatggttgaccctacaaaggagtata

SEQ ID NO: 481315 - DNA, 122 bp, Homo sapiens
ggtttcagttactcgtggagtttcagttactcgtggacaaagcgccgcgcgctagcatagcggcccgggcggagttccccttccctttccctttccttccacatccgcacgctcgttctccc

SEQ ID NO: 481316 - DNA, 122 bp, Homo sapiens
agttcccacatttataaagagaggcttatgggattgttttaaaacttattaggtaatacacgtaaggtgcttggaattctgactgtacttggtaaggcttcgtaacagttggcagctattct

SEQ ID NO: 481317 - DNA, 122 bp, Homo sapiens
cagaggccagaggctgcctggcatcagagatgggcggggccagtaaggagcaggcaggctcgggagccgtgactctgaaagctaagacgggccagactggaaccctttctcacagggcctcg

SEQ ID NO: 481318 - DNA, 122 bp, Homo sapiens
ggagactgaccatgacgatctccagcacttcattcttgctgatggtcccgttaccgtccacgtcgtagagggagaaggcccactccagcttctggttggtcttgcccgcggtggtcatgtgc

SEQ ID NO: 481319 - DNA, 122 bp, Homo sapiens
ccttgtcctagattctcaacaaggccagtatgcacacagctagcaattctttaaaaacttcgagggcagtggagggaggaggaggaggaggaagggtaggaagggctatgtctgaaacaagt

SEQ ID NO: 481320 - DNA, 122 bp, Homo sapiens
cagctcgagaaatatccatcccagagacctccttggacgctgctgttaggctcaatttttcgcggctataaacactgactgccctgaacatctttgagcaggaggcgctgtatggttttcgg

SEQ ID NO: 481321 - DNA, 122 bp, Homo sapiens
tttgcatcctgccaggaccctcagtgatcctgccaagaacaccaaggacatccgcaaacacgcaccccgcccctgccggcctagaggaaagacaaccaaaccaagagccaaaaacaaacgaa

SEQ ID NO: 481322 - DNA, 122 bp, Homo sapiens
ccagctccgcccaccctgccagctccgcccaccctgccagctccgcccaccctgctaccgcgatgagctgctactcccgaaaggcccggccagctccgcctccgcgctcagccccttccccg

SEQ ID NO: 481323 - DNA, 122 bp, Homo sapiens
gaaagaaagggagagctgaggagcaaagaggagtgtggacgatgcagagaccgaagggtgcgcagacaaaggaaaggacaagcttgtccagagagaatgagagacaaacagataaactgcaa

SEQ ID NO: 481324 - DNA, 122 bp, Homo sapiens
acgatagccacagctggaagaagcttcagagagaggctgcctttgcatcatggtacagctcgggaaacaagcccagtctgggatagggatgaccctaggggcacgtggcacatcagcagcag

SEQ ID NO: 481325 - DNA, 122 bp, Homo sapiens
gcagggtcccggcctctagggctgctgtgcgggcgggggtgggtgagttcgcttccttgacgccacgagaaccagtcttaatgtcagggtcaggccataggacacagagagcgggatatttt

SEQ ID NO: 481326 - DNA, 122 bp, Homo sapiens
cctgagtgtccaggtgccctggctccacctctcccgaagttaatgtttagatagctcccccgcccagcaggttggtgtgtagggtggggccggggggcactggagtgagacagaccagacgt

SEQ ID NO: 481327 - DNA, 122 bp, Homo sapiens
acattccatgcagttgccttaattattttactgaaatctgctccgttgtccactcatctgcggctctccaggctgaagcactttcaggaaaacaccagttgaaatgtacttcctacccgcaa

SEQ ID NO: 481328 - DNA, 122 bp, Homo sapiens
agacggaccgcccatgtgccaaagggcccacacaggtggttccctctggcaggaggctaccggaccctctcggcccagaggcttcccaccgaattcagagcggcccaagtcgaggcagccac

SEQ ID NO: 481329 - DNA, 122 bp, Homo sapiens
ggggttcagactccacctcaaaagccactcgctttagccaggcgagaacacagcagagggcgtgagagactcacgggggctcgtgtgaggtcagggagcagagttttaaattcattttgtga

SEQ ID NO: 481330 - DNA, 122 bp, Homo sapiens
cactgagcagtgcttcctttatttctgtagctgcaaatagggacatataactaccctggtcgcatacgctcagactgaagctgtggctgaaagacactttatggatggcattggctatcagg

SEQ ID NO: 481331 - DNA, 122 bp, Homo sapiens
cgcggggaggcggcggggccggggcctgcagagtcggagcggaacgcgggtagggacttccgcggcagcgcccccgcctcccggacccccgtccgggcctgcgcgttgccgacccccggggc

SEQ ID NO: 481332 - DNA, 122 bp, Homo sapiens
tagccaattcaactccatgatacacctgaaatcttctttataaacaaggtaagatattagcgacacataaaataaatataaacccagtggtctcatccttctaggctgtgttcagatgatta

SEQ ID NO: 481333 - DNA, 122 bp, Homo sapiens
gggcggcggcggcgcgagaggttgcaggccggggcccaacggcggggagttcaggaagggcggaggcggcggcggtggcgtgtagctggcaggcaggctctgcgccggcggcccgaagcccg

SEQ ID NO: 481334 - DNA, 122 bp, Homo sapiens
ttcagtaaacaaggtatttggtccattccaggatcgggggcaagagagatgggagggcctcggtgagaaacactcatattcacaaaaggtactagatagatagacagataaataaataaata

SEQ ID NO: 481335 - DNA, 122 bp, Homo sapiens
cgtgttatatagatgagaaaaagcgttaaagggattagattaagtgacttgcacagggtccgttagccagaggtagagctgggactcgaaattaagtctttctggttccaaagcccaaactt

SEQ ID NO: 481336 - DNA, 122 bp, Homo sapiens
tcggggcaacgggactctaactcccggcatcctcggctcccggctgggcacgccctccgccgtcctgtttgtagttcccgctgtccccagcgtcctattgttcccccgtagcatcagtggcc

SEQ ID NO: 481337 - DNA, 122 bp, Homo sapiens
atctcagctttgatttggtatagtgcagctgagagcatttagcttctctctatgatttgccgattctaagtggttgagtgaggcagtaaacacaggacttgggggtggggggagagtggttg

SEQ ID NO: 481338 - DNA, 122 bp, Homo sapiens
tgggagtccactcaggaggtggaggaagtgggtcgcacccaccaggcaaaatacttttcacggcctgcatcacagcgaacactccggggactcgggagtgttgtcccaggtgtacgctgtgt

SEQ ID NO: 481339 - DNA, 122 bp, Homo sapiens
aacagcgttttcttttcctgctgaagatcggagcaggtgcccctccctccaagtcgtgggcgtgggtttgtgtctggaaggaccacacagcccggttcctctcattcctgagctggcacctc

SEQ ID NO: 481340 - DNA, 122 bp, Homo sapiens
tagtcccaggtaaaccaccacagtgctgctagtaatgaaacctaccaggaacgcttggcacgtctagaaggggataaggagtccctcatattgcaggtgggtactttttggtgagaatcggc

SEQ ID NO: 481341 - DNA, 122 bp, Homo sapiens
aaaacaggacaaggagtggagtgtgtgataaggaacgctgaaaacagcctcctgagaatgcggtttgagtgcttttacaaggctacgggtgtctcacgacccgatctcaaatggccatctag

SEQ ID NO: 481342 - DNA, 122 bp, Homo sapiens
tgtccctggccgagaagatccaggtgctggaactcctggatgagtccaagatgtcccagtcggaggtggcccggcgcttccaggtttcccagccccagatctcgcgcatctgcaagaataag

SEQ ID NO: 481343 - DNA, 122 bp, Homo sapiens
cagcgtggtattcagcgttgttgctattaaacaagaaataataacagtgaaaagacaaagcgtttcacttataaggctagagtatagaactgtgccataaatgagggaattacggaaggatt

SEQ ID NO: 481344 - DNA, 122 bp, Homo sapiens
ggccgccgctcacctcgcgtatttcgtcttctggaaatccagcagccggggggcgaacatcgcggcgcttccatgggaatctggccccgggctcagagcgcgggtagctggcagagcctggg

SEQ ID NO: 481345 - DNA, 122 bp, Homo sapiens
gtggtccagggggcgttcctacggcagagaggagggtggggggtacatggccttcatttacgtgggtctcgagtcacatgggtgacatttctggttttgagattatctgatggacttgcttt

SEQ ID NO: 481346 - DNA, 122 bp, Homo sapiens
caaggatagtgggctggggaggggtccagtcgtggtcacggaaacgggtggtcctcgcgccgggctgcactcattctgactagcaatatgctggtggaaagtgctactccaatgcctttatc

SEQ ID NO: 481347 - DNA, 122 bp, Homo sapiens
ctgtgccactgcactctagcctgggcgacagagcaagactccatctcaaaaaaaaagagacgaaagagtgcaggggactctgtctaggaacctagtaccagccccaccacattaaaacacag

SEQ ID NO: 481348 - DNA, 122 bp, Homo sapiens
agggagagtctgtattctttattcttcccagcagtcagccttcccttatgctgctggggacgcgtcatggtgacctggagctccgagaggagccggacgctctccacccacccatgtctgaa

SEQ ID NO: 481349 - DNA, 122 bp, Homo sapiens
tgtgaaccctcctgcctcccccacctaacacatactgtggtattactgacttgttcattgcgtgcctcacctccctagaatgaaagctccacagggtaaggatttttctctttcattcactg

SEQ ID NO: 481350 - DNA, 122 bp, Homo sapiens
tccaccccaccccaatcactaccaccaagtaatggggcagcaggctgctaggacctaaagcgctggcctcagcggcagcagcgcccacatctggacacggccctctcccagtgggcctcccg

SEQ ID NO: 481351 - DNA, 122 bp, Homo sapiens
ggggtcccgctgctacggattctcagaactcccgcgtccgctcacaagagccgcgtttcccgtgaactgcgcctcaatcgtgtcactcgttttaaaaggcccggggaagcctcgcgttcgtc

SEQ ID NO: 481352 - DNA, 122 bp, Homo sapiens
tgattgtctgaagtccccacttcgttctgcctccggagacgcagttgtgaggactctcagcgcatcttcttccttctgcttccaccggctcccttgcccaaaagtcccctggggttcggaga

SEQ ID NO: 481353 - DNA, 122 bp, Homo sapiens
ttgagcactcaggtagcttcttctcttcccttctgattgctctctgtttccaccagatggcgcatttgttccttagagagttgtgtgtcaagtctcctgtgagatccttttctattcaaagt

SEQ ID NO: 481354 - DNA, 122 bp, Homo sapiens
aatcaatcagtggtacaatgtgtaccacagtagtacaaaatgtattcctattctccgaaacgactgaaataataaataaaaccaagtagtttacagtagagtgtgtgggggtttccacaatt

SEQ ID NO: 481355 - DNA, 122 bp, Homo sapiens
gaggtgaaagctgggttgaactgctttcctttacctttaaaaataacgtttttggctgggcgcagtggctcacgcctgtaatcccagcattttgggagggcgaggtgggtggatcacctgag

SEQ ID NO: 481356 - DNA, 122 bp, Homo sapiens
ggctaggatttaagcagcaaaaatcctttcccttcttgcaccctgtgtccacctctacctcgacccccttccgcctgacctcatggcagccagggaagctccagggtttgtgagggccgcca

SEQ ID NO: 481357 - DNA, 122 bp, Homo sapiens
gccatcactgtttctgctgcagggcttccttccttgccgcatcctgtagcaactgtgtgtcgacctcatctgctggcagctgcacgtatcggaccactgagccccgaatgaagcagttcttc

SEQ ID NO: 481358 - DNA, 122 bp, Homo sapiens
acaagctcttcatcatgctggagaactcgcagatgagagagcgcatgctgctgcaagccacggacgacgtcctgcggggcgagctgcagaggctgcgggaggagctgggccggctcgcggaa

SEQ ID NO: 481359 - DNA, 122 bp, Homo sapiens
cctcgtgatctacccacctcggcctcccaaaagggctgggattacaggcgtgagccaccacgccgaggcccaaatgccattttaaacaagactgcaaagcaagaaaagcctgaggtcatgaa

SEQ ID NO: 481360 - DNA, 122 bp, Homo sapiens
cgaagggatgcaaggcacgaaggagctaaccaataaggggtggcaggtgggcgtgagcgtcgggaccgggagccaaagccatctggggctgaaaggcgggacttcctgcttcgcttaccttc

SEQ ID NO: 481361 - DNA, 122 bp, Homo sapiens
tccaactaatctgcctcgtttgttttcacagctttgcccggaacatttgcagggatggcccgacactccccgcagagcctgagagcgagtggcgagccaagataccagcggcacaatgtttc

SEQ ID NO: 481362 - DNA, 122 bp, Homo sapiens
ctgctgctcctgccgccccgggcgggctgcggacgcgagaggcggcggggacaggcagcgcgccgcccttcccacgctgccattctgacccgcgctgcctcgccccagccccgtccgctgac

SEQ ID NO: 481363 - DNA, 122 bp, Homo sapiens
ggcccaaggtcccgcccctcgaggctccgtgccccgccccccgggtgccccgcccctttgcgcggctggcgcggccagcaggccaggctcccctcggcaaacctgtctaattggggcgggga

SEQ ID NO: 481364 - DNA, 122 bp, Homo sapiens
tataggggtttcctgtgactgtagctatagtgcacttctcattcacccctcagttgtggccgagggggttcatccccgctcaagatcatattacgaatctcagttgggagcttctctcaacc

SEQ ID NO: 481365 - DNA, 122 bp, Homo sapiens
gcgggctcgcgccttcctcccccgcgccgccgtgccccgacccggagaggggcagagctgcggaggccctggagctgcgcctttgcctgccccgcccactcctcacggcgggggaagcctgg

SEQ ID NO: 481366 - DNA, 122 bp, Homo sapiens
ttggcccttccatgtggactgcaaaaacagtgttggaatgcaggactctgggtatgttctcgaaagttgttacaaccccaacccagggttgacctcaaacacaggaggaagggggaggctgg

SEQ ID NO: 481367 - DNA, 122 bp, Homo sapiens
gagtggctgttgtccatggacagagctacagacgtgtccgaaatctgggactgcagatcccggatctcctcttcatacagctgcctgaggaagttgatctcagtcagcccttccaggcgaga

SEQ ID NO: 481368 - DNA, 122 bp, Homo sapiens
agctgcagagatctgagctggcacttacagcaggaccatcagcaccaggggatcctttctcgccagcagggccagggggaccagggggaccaacttcaccaggacgtccagcagggccagtc

SEQ ID NO: 481369 - DNA, 122 bp, Homo sapiens
tctgaggggtgttttccactggggacggggttgagtacacgggtttcccggggagggggccgcagctgctgctgctactgctgctgctgctactactgctgctgctgctgctgctgctactg

SEQ ID NO: 481370 - DNA, 122 bp, Homo sapiens
cccgggccccggcctgtcttcaggagcccacggtctgatggggaaggcggtcactggaatcgtcagagagaagacacctgaagggttgtgaagctgctgtgggtgacagtgacaggcgtctt

SEQ ID NO: 481371 - DNA, 122 bp, Homo sapiens
cttggggctagagctgtaatatactctgtatgctctggccacgtgattgatctcttctttcgtgccaatcaggccaaccagtttgggagaaaattctttcacataatttgcaatggcctttt

SEQ ID NO: 481372 - DNA, 122 bp, Homo sapiens
gcccatggtgcccctgctgggctttcctctggccgctcctgcgtcagcgctcagagccatcgaatgtcccacccgatggacggcagaggccatctggcctgactgctgtttccaaagggcga

SEQ ID NO: 481373 - DNA, 122 bp, Homo sapiens
gtaataactaccttgaggctaaataaggttttacttgatccttattcacttcccactgaacgttaatttctttatttttcttctttaccctctcctccccctttaattccacatttctcgga

SEQ ID NO: 481374 - DNA, 122 bp, Homo sapiens
ggacgtgtcccccacaccgcgacgaggtatgaggaagacgctgtctcccaaaggcctggacgggatggctccaagctcttgttctcctaacatctggacaggcgctctttgaagtgtatgaa

SEQ ID NO: 481375 - DNA, 122 bp, Homo sapiens
tcttggctccgtgtgccccagcacgacagaacaagtgcggcaagacccaggcctgcagggcggcggcaagtgcccggaggggcggaggcgggggtagggggtatgccggcgcccggcagtgt

SEQ ID NO: 481376 - DNA, 122 bp, Homo sapiens
accgtcaacactgtcccacaggggccatcccgggctggggtcactacagacacccagtcccggttgtctctgtcattgaagcccgagcaccggctgtcactcaggtacatgaagaccttgtc

SEQ ID NO: 481377 - DNA, 122 bp, Homo sapiens
acacctcaccggtggctgtcgaagctctccagctgccgctgcacagtgctgctgatgctgcggcggtagctgcggttcagccagttgcccaccacgccgaggccgtagtgccgcttcttccg

SEQ ID NO: 481378 - DNA, 122 bp, Homo sapiens
cccattagctatgccctcttttctccgaatgtcgatttaaggaagcaagcacctgtcttccgccactgcatcttcctagcaaactttaaaggccattttatctgataggaaggacatcgaga

SEQ ID NO: 481379 - DNA, 122 bp, Homo sapiens
cattcctaactcggagaccaagaaaaacccacaggtttgcagctggctctgaaataactgcggcttctttccgggagcatctggggccgccaacggagagctcccggtcctccgaaagggcc

SEQ ID NO: 481380 - DNA, 122 bp, Homo sapiens
ggtctgctagcttggtgaaaagacgtgggtgggaggcgtggtggcccaggcagagccccccgcagctgtcgctcacctcttcccctcgctctcttccagggctcagcgcctatcctggtggt

SEQ ID NO: 481381 - DNA, 122 bp, Homo sapiens
caaaaggccctatttgacttagttattgccaggctccttgaccttatcttgtgccactcccggcttgtcccctccttcagccatacctttctttgtagctcctggagattcaattctttctt

SEQ ID NO: 481382 - DNA, 122 bp, Homo sapiens
tcagtgagataagcctccgaaccatttgacacagtggtggcacgtgatcagtgtcaaccccgagagccgtgctgatgtccgctcctcctctcctccctgagcacctctgctccgcggagaaa

SEQ ID NO: 481383 - DNA, 122 bp, Homo sapiens
ccccaggtgctgcgaccgtgacaccggcactagagggtctcggatggagaaagcggcgcacggagaccaggaaactatgtgtagcacaactagcagaaaaccgtctggtcggccatccggga

SEQ ID NO: 481384 - DNA, 122 bp, Homo sapiens
cagccgatgcctctctgctgtggctcagaaattggcctcccagatagatacacataggcccggctccctgccaagccccaggcagagctcccagagaaaaccagttcactcccaaggaatag

SEQ ID NO: 481385 - DNA, 122 bp, Homo sapiens
ttcttgctctttagcattattttctttctaatttatgaactctctttagcctttcttgcacgtcaggtctggtattgatgaaatccctcagctgttgtttatcttggattatttgttgatgt

SEQ ID NO: 481386 - DNA, 122 bp, Homo sapiens
tgccagctgcatcttgctccaccggcaggatgcttgtttgcagtaggctactaactatcacgccagccttgtcactcacttattgcttatgttcacatattttgctctgggcacctggcctt

SEQ ID NO: 481387 - DNA, 122 bp, Homo sapiens
agggagcatcccaggggcctcagggtgggggaggccaggaactaggaggttctcactgcccgagcagaggccctacacccaccgaggcatggggctccctgggctgttctgcttggccgtgc

SEQ ID NO: 481388 - DNA, 122 bp, Homo sapiens
cagctgcctcagtttcctccattaagggcaaaggaggtaacagggaaactggcttggactcgaatcacagcatcaactgcgattcagccaagggtttgtacggggcacagggcgagctgccg

SEQ ID NO: 481389 - DNA, 122 bp, Homo sapiens
aagaaactaatacaagaggccataaggattcctggtgttgctttcagagatggtctggttcgctagcaagacacagtttatcacttagtaactgcatcaccatagtcagtttcttatcctct

SEQ ID NO: 481390 - DNA, 122 bp, Homo sapiens
atggcctcctttagtggatcttcctgggccagggtctgggccctactcacttctagctgtcgcatctgctctgcatgtggaactcaagaactgcggagctttctgatgcctggcagggtttt

SEQ ID NO: 481391 - DNA, 122 bp, Homo sapiens
ctggctggcagcttaagcctgagtcagtcttcttcgccttttgtaattgtcttaagtaggcgtggctacgtggctacaagtgcgtcgtcaaaacggggaatttacagggaagaattcagttt

SEQ ID NO: 481392 - DNA, 122 bp, Homo sapiens
gtctccacagccatgcatgcctttgtccagactagtgggcattgctaggcctgagatactcgtgaaggtccttgtattagtccattcttatgctgctgtaaggacataacctgagactgggt

SEQ ID NO: 481393 - DNA, 122 bp, Homo sapiens
gcccctgagtggcggctgcggtgactctgatactcaccctcggccatggtcgggcgggggcggtggctccttccactggcggcgagaccctccaagtgcgaccactggcggctggcactgcc

SEQ ID NO: 481394 - DNA, 122 bp, Homo sapiens
gcccagttgtcagtcagtccctcttcctcctcctcccctcactctcctcggatcccccagcgtttaccctctctgagtggctgggccccaggaaagcagtcactggaactattcggaggagg

SEQ ID NO: 481395 - DNA, 122 bp, Homo sapiens
ggcagccgggaagttcgcaggcccctaggaggccaggtgaggccgcgccccagcttgctccggagctgcaggaggcgccctggtctctgcgcttgacatcacccccgccccccgccaacacc

SEQ ID NO: 481396 - DNA, 122 bp, Homo sapiens
ccccgccccccgcgagtaaggggcggtggtagcgtctgctcggttacaaatggcccctcccgcccggctcgcccgctcgctcgggctcggcgcggacccgcctgggcgtgctcctcccgccg

SEQ ID NO: 481397 - DNA, 122 bp, Homo sapiens
gtacctaaccagcccctcacatcctccctgaacttcctgtccccactcacacaagtggtccggtgtcaccctgcagttgggtatagtcataggtaccattgatgacgccttctacctcggcc

SEQ ID NO: 481398 - DNA, 122 bp, Homo sapiens
atccactgattatcttaccaactttaacaatgaaaaaagcatcaacgtatatattgggaccgttatagaagtttacgccaaaaatgttaaagagatgttttatatatacttgacacagtcat

SEQ ID NO: 481399 - DNA, 122 bp, Homo sapiens
ctgagtgaacgactgggacctggcacgaactagcctggggccagaggagataaggcctgccgggagaagagttcccagcggctctgtccattctgctcttgccctcggctaatggctttgaa

SEQ ID NO: 481400 - DNA, 122 bp, Homo sapiens
agagctggtaggctgggggacactggggactgctgtcccacttggagcctcgggctactccgcccaggagcagcgatgtggaaccttgttggattttcatgttcccaaacatccaggagaca

SEQ ID NO: 481401 - DNA, 122 bp, Homo sapiens
acttatctgagcttcagcttcttcatctggaaaatgggataacaggcttcctaaatgggtcgaaagaaaaaatgtatggaacaacgctcagcacagtttgtggcttcataaatgagctctct

SEQ ID NO: 481402 - DNA, 122 bp, Homo sapiens
cacatccctataccctcagctagactgtcaaagggctgctggaccaagcctagtcctgaccggggcctggcgctgggcatggcaggccttctgggcaagcaagctgagtaaatggtctttca

SEQ ID NO: 481403 - DNA, 122 bp, Homo sapiens
gccaccaggggctccatgcatggcgggggtggttgtgatgattccgcttgccctgcccttcgggctttccttcttcaccctggtgagggtctgcgccagcctcaggctccacccaggactga

SEQ ID NO: 481404 - DNA, 122 bp, Homo sapiens
taggaggttctgcttgttgccattccccaaaggccatcctagccatgatgagggcaggtgcggttgtttgggaggagaccactgtggaacaaagagaaacaaggcttgcttgatgcagcagg

SEQ ID NO: 481405 - DNA, 122 bp, Homo sapiens
cgacctgaggcctgggggcaccgtggacccctatgcccgggtcagcgtctccacccaggccggacacagacatgagacaaaagtgcaccgaggcacgctctgccccgtgtttgacgagacct

SEQ ID NO: 481406 - DNA, 122 bp, Homo sapiens
cctgctgctctctgctcctctccaccatcctctgccactctcttcctctgctcctcttgacgttccaccacttatgtgtgtgcctgctaaggtcttgggtttatatgagcacaggatgggag

SEQ ID NO: 481407 - DNA, 122 bp, Homo sapiens
attgagcgttggcgccccgggtcaggctgcgaggccgcaattatagtgggatggggcggccgcccacgcgccgcttggcggttcttacgagaactttgtttgtgacggcagtggtgatgtaa

SEQ ID NO: 481408 - DNA, 122 bp, Homo sapiens
ctccgctccagctcgaaagacggtggcgctgactctgctctgcgcgccgcagcttcctcccgctgctccgcccagcggtttctgatcccctttcggcgctggggactcacacgctgcggcga

SEQ ID NO: 481409 - DNA, 122 bp, Homo sapiens
tctctccctccatagtgcttcaaccagaaggcagcggcgaaggctgcaggcacttcccagcgtcacctaagaggcgacccacatccgctgtgcgggggcaactgcgacttgacgaacttccg

SEQ ID NO: 481410 - DNA, 122 bp, Homo sapiens
cgggggccgccggtgcgggggccgggagcggcggctgggggcgggggcggccgggggtctcggcgcgggcgcggggcgggggtccggacggcgccggcgcggggtggggggcggcccgccgt

SEQ ID NO: 481411 - DNA, 122 bp, Homo sapiens
gagccgtgtgatgcccagtgagctgcaaggcttacagtcaccaggggacgagccaggacccgggtgccttaaagagaaactgcttgtccctggtgccagtgtgttaagtacctaatcagaag

SEQ ID NO: 481412 - DNA, 122 bp, Homo sapiens
cgctcctccctccaaggacgactccccgtgtccttctcctgacctggctgctcacggccacgcagcagacacagacactgtacaccctcaaggactcccggcccattcacatgcatgtctgt

SEQ ID NO: 481413 - DNA, 122 bp, Homo sapiens
ctttgtgttaggctattcttgtgttgctgtaaagaaataccagccgggcgcggtggcttacgcctgcaatcccagcactttgggaggctgaggtgggcggatcacctgaggttgggagtttg

SEQ ID NO: 481414 - DNA, 122 bp, Homo sapiens
gtggacggtcgggcctgggggtgggacctccgtgaccttggatcgcgttgtcaagggcgacgggccttgcgcgcggaggtgggggaggtggccccgccgcccccggcccacgctggccggct

SEQ ID NO: 481415 - DNA, 122 bp, Homo sapiens
ttgtggggaggcctggctccactgaccactccagcagtgcaggtcaccgtgatcaggaagcggtaatgatggaacaaatcacagcactcagagggctcctccccttcatgttaccatttgag

SEQ ID NO: 481416 - DNA, 122 bp, Homo sapiens
cgtccggctccgactcggacccagattcggattccgcaggcggctgtggtatgggggccacgctctggcccgagggccccggagcggactccgtcgccgtcccggccccaccgccgcccttc

SEQ ID NO: 481417 - DNA, 122 bp, Homo sapiens
taccccatgggtggcactgccctttgacccccagctggcagggagagtgagggaacatcccgcagtgagagccaggagccatccacatccaccacatcctgcaccatttgcctggaatggct

SEQ ID NO: 481418 - DNA, 122 bp, Homo sapiens
tgctctaaccggccactgctgatgggcctccccaggtggggcgatggggggtctgtgccccgggggcactggtaatccctaccttcagcttctggtggcacatttgatgcttgggaaactcc

SEQ ID NO: 481419 - DNA, 122 bp, Homo sapiens
cttgggtattatatacatagccaagaagttgtgggggttaagtaaggcctgtatcttaagcgttcaagataataatttaaagtaagctgtagaatcaacttataataatgacttgcctttct

SEQ ID NO: 481420 - DNA, 122 bp, Homo sapiens
cgtgggcggggcgggagctctaggcggttaggagtcggggctcagatgcgggggcggggccggagcgaggccgggtatcacccgggagtggaggaagtgcggggggttcgcggcgcggggag

SEQ ID NO: 481421 - DNA, 122 bp, Homo sapiens
catgcacgctttgtgtcaggtttcaaaacccccatttattcatgcacactttgtatcaggcgtctccccatttattcacacgcttcatgtctctcaggcgtctccccatttattcacaggct

SEQ ID NO: 481422 - DNA, 122 bp, Homo sapiens
ctggagccgaggtggactcgggtagggagcgcagagagcgcagagactcaatgccagagtcgtactggctctcctccgcctcgtccggccccttccgcgcctccgacatgcccgcggctctg

SEQ ID NO: 481423 - DNA, 122 bp, Homo sapiens
atttgtgggccctggcgcgtacagacgttccgggcggttgaaagagcgctggtattcaaacgtggtcccagcgaaggggaactccccaggccagtcgatgctccagcccccggtgaggtaat

SEQ ID NO: 481424 - DNA, 122 bp, Homo sapiens
cgtggcagtggagaacgcagttgggagggaggtgaaggctgcccagggtctgggtgtcgtcgcctagcagctgcccttggtagatgagtcgcacctgctgttcccggccgggaaactgggtc

SEQ ID NO: 481425 - DNA, 122 bp, Homo sapiens
cgcaggtcagtaacctcggacctgctcatctggagctgctccgtgtggccagcgacctcccggttcaattcttcagtctgcagagagaggaagaagagggaataagcattgagtcagacctt

SEQ ID NO: 481426 - DNA, 122 bp, Homo sapiens
aggacaggcagcgccaggcacctctcagggacataagtgcgccggccctctggctctgcacgcctggctcgggcagaagaacccagaggtgtggtgaagactcctgagaatccagaggagct

SEQ ID NO: 481427 - DNA, 122 bp, Homo sapiens
gtggatggttgaatctgcttgaaggctgtgtgtggcatttaaaatccccttttaaaaccccgtaactgatttattccatctttagatgggaatggaggatgtgtcaaactatcaaaccaact

SEQ ID NO: 481428 - DNA, 122 bp, Homo sapiens
tagccttctccacaaataagctcacagcacgacaaaggacactagttagagtaatttgggcgataagtaaacagaaggaatggctaggagcatagtgtcatctggcagagagcttatttcct

SEQ ID NO: 481429 - DNA, 122 bp, Homo sapiens
aacatttgagcaccctcttataattatatcagcaaatcaacttgtatttattgaatggggcgatccctagtgctgtgggggcaacagagaaggagaagctgctccaggccacggcttcttgg

SEQ ID NO: 481430 - DNA, 122 bp, Homo sapiens
gtttgggatgtgtggctgccatggcaacccgtctccccgacgaagggtagacgggttgggcgccgaacgcagggtgttgcaggttgggctccattttgactctggtggagaacgatcacctg

SEQ ID NO: 481431 - DNA, 122 bp, Homo sapiens
ccatgtcctgcgtgtacatcctgcacaagtacgagggcgagccggagaacgcggtgctgccgctgtgcttcgtggtggccgtctacttcatgaccgggcccatgggcttctactggcgaagc

SEQ ID NO: 481432 - DNA, 122 bp, Homo sapiens
atctcagatgaattcactttaatctctcatgcccaaattgtaaaatatcattttgatcaccgtcaatattacacagacctgtttgaatgtgctcagctttttcagtaaaattagaagaaacc

SEQ ID NO: 481433 - DNA, 122 bp, Homo sapiens
acatgtatgcatgtgacatgtgcacacttgcatgctatgcatagtcacgtgcattgtgcacgtgtatgtgaggtctatacatacacatgcacgtgtagctatgtgcatcgatatgtgcacac

SEQ ID NO: 481434 - DNA, 122 bp, Homo sapiens
gccagtggcccaccaggcccagctgtacgttcccagggaccccccaaagcgtatatgtcccgggcacacacacactaggtggtttgttttgttccccagcagcccgtgtctgcccgggcaga

SEQ ID NO: 481435 - DNA, 122 bp, Homo sapiens
tgtggagggaggaaaagctgatgtgttcacctccccactcgctgtttgcagcctggaagacgattgcagggggtggcagggctgaaaagacaatgtcctcattaaaggaaattgagaaagag

SEQ ID NO: 481436 - DNA, 122 bp, Homo sapiens
gcgtgggacacaacgcagggtccttgctgctctagccgctgctcaggccacttatgctggcgccctaagaagtctccctcctcacatgtcctccctggagtttaagccgagctctcccctcc

SEQ ID NO: 481437 - DNA, 122 bp, Homo sapiens
tatggtgaactcatataatgggacccaaataggaagtgaaaattgcataatctagaactacgtgtatccatgtgaacacatttcaagattatcctgctgggtgaaaaaagcaagttgcacaa

SEQ ID NO: 481438 - DNA, 122 bp, Homo sapiens
agctattgctaaatgctgctactgccgctaatgctactgctgtggcggcggtggtggcggcggcggctgctgctgctgctgctgatgctactggttttccttcccaggttcttcccctgcct

SEQ ID NO: 481439 - DNA, 122 bp, Homo sapiens
cccaaatctcatcttgaattgtagctcccgtactccccatgtgtcatggtgtcgtggtgtcgtggtgtcatgggagggacccggtgggaggtaattgaatcaagggggctgatttttcccat

SEQ ID NO: 481440 - DNA, 122 bp, Homo sapiens
gcgccgcgctctcggcctgccgtcccccctggagttggccgcgccctctctcgtccccaacgcctccgcaagtccccgccccgtttcctgccgccgcgccccgccccggcctgtccccggag

SEQ ID NO: 481441 - DNA, 122 bp, Homo sapiens
aatccaattaaattccaacaagagcctggtctaaaatgtaacaggctgattttacagtatcgctggactccccctacatccaaacttattcttaccttcattctcccattttggttaatggc

SEQ ID NO: 481442 - DNA, 122 bp, Homo sapiens
gcagagaagggggttaatgctactgactccctggccagcctttctcaaacactctacgcccgcaggggcgcccgcgccagccacgccgcaccaggtcccccagacctgctggtgacgacaga

SEQ ID NO: 481443 - DNA, 122 bp, Homo sapiens
gccagaaagaaggaatacaaaacagctggtagagtgcattgccatacatattggaatggtcgagcataaggattgagaaagggcctttggattgggtaagaaaacattgataaccctttaga

SEQ ID NO: 481444 - DNA, 122 bp, Homo sapiens
cagtggactgtgcaggttgggtacctgaattaagctggctcttcccctgaaattttcaagcgtattagaaaagagtcagttcctttggctgtggaatttataagaggtgaaacccaggagct

SEQ ID NO: 481445 - DNA, 122 bp, Homo sapiens
ctcttcaccactggctcccacctgctgagctccttgtggcctgtcgtggccgcggtgtggcgccacctgctaccggctctcctgctgctggtgctcagtgctctgcctgccctcctcttcac

SEQ ID NO: 481446 - DNA, 122 bp, Homo sapiens
ctttctatttcaccccttcatggttctttcttaccctcttccttgcatgtcgggcccactcgatgccccaaagaactccaggacttctgctcacaaatgaagttgtcctgaggtcctgtggc

SEQ ID NO: 481447 - DNA, 122 bp, Homo sapiens
agatgcgggccaatgggtactccgcgtcccaccgctggagagatggtcaaatgtgggaggcgaggtggtcccagcttgggagtctgtcaggttgcctagcaaccagaactaggcttcacctg

SEQ ID NO: 481448 - DNA, 122 bp, Homo sapiens
cacccccgacgtgcacttcaacttttaaaatgcttgctctggtggtccacagtactttcgcgttcactgggcggtaccatatctctcaatagatttgatccaaaaccccaagtgcgggagac

SEQ ID NO: 481449 - DNA, 122 bp, Homo sapiens
gtcccccgagaggcccctcccgacattcccgcccccgcgcgccgctccccgggtcctccgcgtctctttcccgggaaagcctccctcggttcctgcgcggccgcacagcctggacgcagcgc

SEQ ID NO: 481450 - DNA, 122 bp, Homo sapiens
ctagtttacgttcccaccaacagtgtacatcctcaccagcattccttatttctacatcctcgccagcattccttattgcctgtcttctggataaaagccagtttatctggggtgggatgtta

SEQ ID NO: 481451 - DNA, 122 bp, Homo sapiens
aattcttcagtgttatcaccagagcacacaccagaccctcagtggctttgcactagccagcgtgtaagtgtgctgtgttcattatgccaaacagaacatgcttgagaagagatcataatatc

SEQ ID NO: 481452 - DNA, 122 bp, Homo sapiens
ctcctagaaggtaaacaaaagacctgttctgttttgttcttcggcccatcccaagcctagcgtagtgcctggtatgtggtggtgtccaaacccaagcgtggagtgaatgagggatgaatcca

SEQ ID NO: 481453 - DNA, 122 bp, Homo sapiens
ggtcaggtgagtgtgggctgcctacgagctgtacttactgccttctgtttcacaaaaggacgttttctccccataatgtcgttgttcttgctttgaattatgggtgctgggagaaactaaac

SEQ ID NO: 481454 - DNA, 122 bp, Homo sapiens
ggcgggatgtaaccagccgctgagctgcagcccttccgtgtccgcaggcttcggcccggccgccgccgcccatcagctatggaggagctttacaacttcccggcctgcagagccgggcgcag

SEQ ID NO: 481455 - DNA, 122 bp, Homo sapiens
gaggggacggcagcgagtttctgcagcgggacttctcggagacgtacgagcggtaccacacggagagcctgcagaacatgagcaagcaggagctcatcaaggagtacctggaactggagaag

SEQ ID NO: 481456 - DNA, 122 bp, Homo sapiens
tctgcagagacctctgcgcgaggtatacctaagcgcattgtgtgcgtcttcgggaaaaggcgaaaactactcgcagtcccacgtggatttcattttttcccctttacctactcttagggtgc

SEQ ID NO: 481457 - DNA, 122 bp, Homo sapiens
gttttctatccccttagccagatctaaggcggagccaaagaatgagtaccctgtaagagccgcctctatcgccgccccctgcccccggcccgctgaagaattaagaatacaaaaagctgaac

SEQ ID NO: 481458 - DNA, 122 bp, Homo sapiens
aagcctgtggagttacacaaacctgtgttaaaacatgtaatttttatggatttcatctcccgttgtggatcaatttggaaaaaccaaaatatgtaattttaaaaaactaaaacacatcctgg

SEQ ID NO: 481459 - DNA, 122 bp, Homo sapiens
acgggcggagacctgcaaaagtggggggcggggggcggtcttcctattttcccagacgaccgggcatccgtcatccagctcgcccaccccgtcctggaggcagcaactgctcggccgcccct

SEQ ID NO: 481460 - DNA, 122 bp, Homo sapiens
acatgaaaactgacacaggcttcagccaaccgaattgttttttaactctcttctccacagcgtgcgtggggaggcctccgtgaactctgaccttagctttccgtagcgcccgcgtctgccgc

SEQ ID NO: 481461 - DNA, 122 bp, Homo sapiens
ggtaccgttattctcatcttattgacagaagcgaagcaaagcaacatatctcaagcagtacggctggtgaggttacagccaggatgcaaacatctctcattctctattgtattctgcctccc

SEQ ID NO: 481462 - DNA, 122 bp, Homo sapiens
tgcgcccgtcaccgccatccttgttgtagggaactcggcccccgagccgccgccgcgctccgtgggctcccaatgagcccctaccccagccacccgctgcgtttgcgccagcctcccagact

SEQ ID NO: 481463 - DNA, 122 bp, Homo sapiens
gcccgcactcctcagctcttgggcggttgatgggacggggcgccctggagcagggggtggcgcttggtcggggaggctcctgcccggcaggagcccacggcacgcgggggttgggggaggct

SEQ ID NO: 481464 - DNA, 122 bp, Homo sapiens
gccatagatgaatcaatgtgccatctagttttgggcacctgatttgaatggttctcctaacggtatttgaaggcatttttctaaactctgaattttaaaatggaaatgaaaatattacttgg

SEQ ID NO: 481465 - DNA, 122 bp, Homo sapiens
agctgcatggcaccaccagggaccaggccccggggccagtccagatatctgcagtgttagcgagagacgctgttgacccttcttggcttatcatggaactgaatttccttaggttcagttgg

SEQ ID NO: 481466 - DNA, 122 bp, Homo sapiens
gccagtttccaggagccagtttccatggttacccaccacttggccttctgggatatcagtcgctctgaacagggacctaacttgaaccatgaatcagaagcaaacacaggtggcttctaatc

SEQ ID NO: 481467 - DNA, 122 bp, Homo sapiens
ggacaggtctgcaggcccaccccacgtgcttctcgttgcagacggtggagcatggcttcccgcaccagcccagcgccctcggctacagcccgtccctgcgcatcctggccatcggcacccgt

SEQ ID NO: 481468 - DNA, 122 bp, Homo sapiens
ctattgggctgaaagactcaatccagtgtattctggatttaaggctcatgacataatgcccggagcgaatatcacacttccacttactcagatggctgcctctcactgagtgtcaagaggaa

SEQ ID NO: 481469 - DNA, 122 bp, Homo sapiens
gtcgtccaccagcctcttccagcggtgacagaccctgggggaggggacgcgcggttagaacgaccccagccccgggccacatcgcatctccaggtgccagctgcgccctccgccctgccctt

SEQ ID NO: 481470 - DNA, 122 bp, Homo sapiens
cttgagcaaggacagaagggcccccatggtggcagtggcccgctgtgggatgttgggacccgagcaaggtgaaaagggtgtctacataggagtgggatgaggggcagtgggagcatcagcgg

SEQ ID NO: 481471 - DNA, 122 bp, Homo sapiens
aacctgggcctggcccctttccagttttctgctgggagtccggattctggtgctttgctccgaagcagtgcccgtgggcctccgggcctggctcatcatcacagcttctctgctcagtgagg

SEQ ID NO: 481472 - DNA, 122 bp, Homo sapiens
gatctatgcattttactatatgtaaatgatatctgaaaataagttcccaggggactctaacgcagtgtgaagaactactggtctagaccgagggctccagcacccaagaagacaccatgtgc

SEQ ID NO: 481473 - DNA, 122 bp, Homo sapiens
aggttgcagtgagccgagatcgcgccactgcactccagtctgggtgacagagtaagactccgtcttcaaaaaaaaagttagctggatgtcatggcatgtgcctgtaatcccagttacttggg

SEQ ID NO: 481474 - DNA, 122 bp, Homo sapiens
cattgcagactaccgagccacggtcccttcctcggctccgtttctgctccctccaccccacgaggtaggcattggtgtttctgctttccagctggggaaacatagagtccggaggttaagtg

SEQ ID NO: 481475 - DNA, 122 bp, Homo sapiens
ccgctccggcggccaacaaaggcccgggcgagccctcggcctgcgcctcggcgcgcgacccgaccacccggggctgccccagctcccaggcgcctgcctgcctcgacccggccccttcccag

SEQ ID NO: 481476 - DNA, 122 bp, Homo sapiens
cctgcgtcatctgctgtgtatgtgtcatctgttgtgcatgcgtgtgtcgtctgctgtgggcgcgtgagtcatctgctctgtgtgcttgtgccgtctgctgtgcctgcgtcatcgtctgctgt

SEQ ID NO: 481477 - DNA, 122 bp, Homo sapiens
cagtctccaggcagcgcgcgtgagcctgggggctggggatctgatcagctgggatgtgcccgcgggagcagggcatggaggcggctgggaggcccgctgcacacttactcctactctggcct

SEQ ID NO: 481478 - DNA, 122 bp, Homo sapiens
gccgatcttctatgcgttcctgaattatctctgccatgaggtccgaggtctacaaccccgcgggtagcttctcaacagcgaacacgagcaggaagctcccggtttcaggttcggagacccag

SEQ ID NO: 481479 - DNA, 122 bp, Homo sapiens
ccaattcctgtagtcaggactatagcctgaaagggggaggacatggctccgggaccctaccgtcaaactgcgtgcttggctggttctcattccagacatgctggcctcctcattcaagtgct

SEQ ID NO: 481480 - DNA, 122 bp, Homo sapiens
tccctgagcacctgctggtggatttcctccagagcttgagctagaagtctccaaggaggtcgggatggggcttgtagcagaaggcaagcaccaggctcacagctggaaccctggtgtctcct

SEQ ID NO: 481481 - DNA, 122 bp, Homo sapiens
tttgatcttttttccatctaaaatctgataccttaagcctaatttctagctctttgctgtcgccaatgtgacatctctcttacttcaatagggcctgtgtggcattggggtttaaaggagag

SEQ ID NO: 481482 - DNA, 122 bp, Homo sapiens
tgacaacaaacaggattcgaggggtttggacagatggggggatcatcggtatcctggggccggcagcctcacactgatagatggttctggaactgcccaccggcagcccctctgccatgggt

SEQ ID NO: 481483 - DNA, 122 bp, Homo sapiens
cgcggtgcagcgcagcggcgagaaggagtgcgttatcgtcttgcgctactgctgaatgtccgtcccggaggaggaggagaggcttttgccgctgacccagagatggccccgagcgagcaaat

SEQ ID NO: 481484 - DNA, 122 bp, Homo sapiens
gggtgttcatctggttccttttctcattaattaagtgacccacctgactaggctgagtaacgcccacctgctactctaaggagcccggggcatgagtgggggtccctgccaggcgctgcctg

SEQ ID NO: 481485 - DNA, 122 bp, Homo sapiens
acaaaaatattttaaaaaatcatggccaggagtggtggctcatgtctaatcccagcacttcgggaggctgacgtgggtggatcacctgaggtcagaagtttgagaccagcctggccaacatg

SEQ ID NO: 481486 - DNA, 122 bp, Homo sapiens
cctcaattttatacttagagtagaatccagtcgaatcccacaaagcgacaaacctgtaggcgttttatgacaatgagtgtaatgtcaggcacaatgtgaccaataaaacaataaacccatgc

SEQ ID NO: 481487 - DNA, 122 bp, Homo sapiens
agtaggagccctcctgggcctcgcagaagtagtggccgtactgctgcgccgtgaggttctcgatgaacaggatgcagttggggctctggtgaccaggttcgcagctctgctccacgttctcc

SEQ ID NO: 481488 - DNA, 122 bp, Homo sapiens
ggcctttgagagtgagtgcgtgcgaggctttgagggcaggaagacccactctgccaacaccggggatgggacactctgctgggcccccttcctcctcgggagtccacttgtgtggtagtgga

SEQ ID NO: 481489 - DNA, 122 bp, Homo sapiens
cgccgtggccccacaagaccctcagaccttaacccgcctcagcagccaggaagagccactcgacacgccgacttcctgattgtcactgaggaaacttccggcacacgtcggaagttattcac

SEQ ID NO: 481490 - DNA, 122 bp, Homo sapiens
atcccaggaggcacagtacagccccccaaacaatgatctggcccaaaatgtcaatggtgccgaggttgggaagccccgctccagagcctccacttctctggctacccattcccccactcccg

SEQ ID NO: 481491 - DNA, 122 bp, Homo sapiens
ggagccttccaaacagagaggtgagtggggagctgcctggactgctggtgtagggctacacgtgtacgcacaggctgcatgcaccgtggtccagtctgcagaacacatctctggcactcatg

SEQ ID NO: 481492 - DNA, 122 bp, Homo sapiens
ctttgtcttttagacttccttctgttctccttattttcactgttttatagcaaagccctgcgggcagggaaccatccatgacttacttgtctttgtgttccaagcatccagccctaaacctg

SEQ ID NO: 481493 - DNA, 122 bp, Homo sapiens
agcccagcacctgggcaggctgagatgggaggatagcttgaacccagggagctgaggctacggtgagccatgatcgcactgctacacttcagcctgggtgacatagactctgtctcaaagaa

SEQ ID NO: 481494 - DNA, 122 bp, Homo sapiens
gatgtcacacggtacaatgtcctacccacaactcctctgccgcctcccctcatgcctcaccgtgtctcaggagagaggggtgcacgtttcatggactgttaccaacaaagaaaagtcagtat

SEQ ID NO: 481495 - DNA, 122 bp, Homo sapiens
tccagctgagggaaggtcctgagagcagccttgtctgtctcgctatcgctatatctcatgcgatatgccttatacacagtaggccttcagtatttattaaatgaattaaaagttaaggggtg

SEQ ID NO: 481496 - DNA, 122 bp, Homo sapiens
tcgctctttagccgcgtgctgctaatgcttgtgtgttttctattgttacatgctttccctcgttgatgtgcatttattgaatgcctcctgttgtcaaacttctaatagggaatacgaaaaca

SEQ ID NO: 481497 - DNA, 122 bp, Homo sapiens
tatggccagagaagggtgctgatggactaaggttctttaatccattagaattaacttgaacgtattcagtcttggggatgggggaaccctccagagaaagtgtggataaatatttaaagagt

SEQ ID NO: 481498 - DNA, 122 bp, Homo sapiens
gatctcgcgccacaaggagatggtgagccccccgcggcctggactggcgggcgagcggggcggggacccaccatctggtccagctggtggcagtgtcccatgggagtcaggctgcatcccca

SEQ ID NO: 481499 - DNA, 122 bp, Homo sapiens
aaatgtctttgccttcactgggaatggcatcaggagggctccctgagagctctttgctgacgccctgcaggtttataaaatgatgcttccccagatcataaccagtaactcatgtgtacaca

SEQ ID NO: 481500 - DNA, 122 bp, Homo sapiens
cgcgcgtgggtttccatcagcaatgaagtcaacggtcgcggcgctggagcctgcagaactcgcgctctagatctcgcgagatctccgcccagggcttcgcagcgtcacgccctccggggccg

SEQ ID NO: 481501 - DNA, 122 bp, Homo sapiens
atctgattctccctgtccctcccatgagccccatgttgggagaggacccccatcaggctgcgcccagcttttctaaaccttgacagtctatgtgaaccatacgcagatgctccacacctgct

SEQ ID NO: 481502 - DNA, 122 bp, Homo sapiens
tcctgacgaccatcaccgttcagctggagtagagagggctctgctcgcttcagatccggacgcgcaggtcctctgcaggccccgcccacccggcgtcacctgcaggtcccgcccacccggcg

SEQ ID NO: 481503 - DNA, 122 bp, Homo sapiens
ggcggctttaaaggacgctggccgcggagtgccgcgggttccgcgcctccagccccctttcgaatgtcaaacccaaggaaccccgacaggatggaaatgtcgcatcactaaattgtctcaaa

SEQ ID NO: 481504 - DNA, 122 bp, Homo sapiens
atgaggacgcggtgccgatgaggacgcggtgctgatgaggacagggtgctgatgaggacgcggtgctgatgaggacagggtgctgatgaggacgcggtgctgatgaggacagggtgctgatg

SEQ ID NO: 481505 - DNA, 122 bp, Homo sapiens
ccatcctgcccacccctttgatctcatctcctaccattaacctcctcattcactctgcatcgccatgttggactaccttctgcctagaaaaacgtgacaaacttgctggttcctctgcctgg

SEQ ID NO: 481506 - DNA, 122 bp, Homo sapiens
agttaacacgtaacaaagtttgttttccagcctcgcccttgatcttcagaatgcccctctcggctaggagggcttctccaagtggaagtggttaggcagttttgtttttggccgccaggcgt

SEQ ID NO: 481507 - DNA, 122 bp, Homo sapiens
agaaggggcagagttagcctctttgattggctgtacgagtccgaggtgctgggtcaggggcggggcgagctgtcgcaagcctgccctgggtctgcggcttctgagaggggtgggccgcgaag

SEQ ID NO: 481508 - DNA, 122 bp, Homo sapiens
ctttttttgtaatcaatcatattgaactgtttttccataacctacaacttggatgccttgcgtcatcaagcattatattagggacacacacatgaatgtattcacgggtttatagtctacaa

SEQ ID NO: 481509 - DNA, 122 bp, Homo sapiens
ccccctcccatccgcgtcggttaatgcgggtaaagtgctccctgagtccctctctccaagcgtggggagagggaagctcggctgcctggtcaaaaagccaggtcttgctgaccacgtgttgc

SEQ ID NO: 481510 - DNA, 122 bp, Homo sapiens
agatatgtggggaaaaataaacctatcaaaacatttgccaaaccaaaccaaatgaaacaccgactgtacgggccaacgaaactgctatctcactgctgttcctggcctgagcgggggaagag

SEQ ID NO: 481511 - DNA, 122 bp, Homo sapiens
caacagctacggaggttggccgcggcattgcccgcatccctatcctccacccgtccctggcgagtcactcacccagaagccaggctacgtagggccgcccccaaggccgccgagtttcgatt

SEQ ID NO: 481512 - DNA, 122 bp, Homo sapiens
ccaggtctctgtagcctccgggtctccgcagcctccaggtctccgcagcctccaggtctccgcagcctccaggtctccgtagcctccaggtctccgcagccgccgggtctccgcagcctccg

SEQ ID NO: 481513 - DNA, 122 bp, Homo sapiens
agtcgtaaaacccctttgtcaaaggaaacctgtaattgtaaaattcctccttgatttcatcgttcatgtggactgaaatagagttcctctttttttttttttttttggtctggttatgtggt

SEQ ID NO: 481514 - DNA, 122 bp, Homo sapiens
gcacaaaggtgagccccgtccccgccagccctcgtaccactgcgcacggggcagcccccacgtccagcctccgtcttgggggcgtggacccttgggctgcgcttcctttcccgcctcgggtc

SEQ ID NO: 481515 - DNA, 122 bp, Homo sapiens
aaacaggctcagagagattaagagcctgggcttttaagcggtgagataggagtcaagccccggctgtttgattccaaatctgcggagtcctgaaagacctcaggcttccggggcagctggat

SEQ ID NO: 481516 - DNA, 122 bp, Homo sapiens
acagaagtctctaaagataaaaagtcttcaaagcttcataccccttttccctattccgttcgttcaaaataactactgtcaaagtttgctatttcctttgacaagatggttattagaaaagc

SEQ ID NO: 481517 - DNA, 122 bp, Homo sapiens
ggctgtgcctcccccgcctccccactgcccacgttgtcacaggaggcccaggtgtgtcgccggctccgcagcagccagatcttgagccgcttttcatgcttcaggtttcccgccgcacgcag

SEQ ID NO: 481518 - DNA, 122 bp, Homo sapiens
gtcaccaccacacctcagtgttgagctaagtgaggacgtccccccagcaaatgtattggacggaaggaaacggtgtgcgggaggaggcggaggaaagtaggccacccggggctcaagtggtg

SEQ ID NO: 481519 - DNA, 122 bp, Homo sapiens
ttttcttcaataatagggaaacagtacttgaactcttcagctcatcttaatgtgggtacacgttctaaaaaaaaaaatattgatggtgcccagcataagccattggatgtctcctttctcac

SEQ ID NO: 481520 - DNA, 122 bp, Homo sapiens
ggcgaacctccgagtcgctgcgccacgtctgggcccccaggctggccccgcccccgcccccgcccccactcccgctagaggcccagtcccgctggagaccacgcccccagcgctcggtctcc

SEQ ID NO: 481521 - DNA, 122 bp, Homo sapiens
gcgggagagaccggagctccctttatacggaaactctgccttcgttatatggcgggatggcgttcccctcccccatcccgaaggcagttccaccccctgcgcaggacgccttggccgggctc

SEQ ID NO: 481522 - DNA, 122 bp, Homo sapiens
ttttccagggcatctggtggacgtgagcggcaccgggaccctgttccagagctaccagtacgaggtgtgtctgactggaggttcagagaccggcgagttcaagttcttgaagccgattaccc

SEQ ID NO: 481523 - DNA, 122 bp, Homo sapiens
gaggaggcgcagtcgtccacgttgtcgtcacagtgcctccccgagaagccggcctggcagcggcacaggtaggcatcaccgaggtccacacacttggcacctggaacacagggacatgaaca

SEQ ID NO: 481524 - DNA, 122 bp, Homo sapiens
ctgctcaggagaccgagcagctctttacaaagcccatgctggaccctgggcttagttgctcgctccttaggaaaggaaaaacttgctgcctgataaagggattaaggccggagtaacacaac

SEQ ID NO: 481525 - DNA, 122 bp, Homo sapiens
tttacggagacgtcttcatgtaggcatatggcgcattaggaaccgcgcctctagctagcccgtctcccctgctcagaggtgggggtagggctgaagctccaggtttctcatcatggtgtggt

SEQ ID NO: 481526 - DNA, 122 bp, Homo sapiens
catggctttcttaggaaacctgagaccttgtgtctgtaggggaccacagggcagggtccacgtgctaagtgtgcgttatacgtgatccttaccttggcaatcagcctgcctctctaatgagg

SEQ ID NO: 481527 - DNA, 122 bp, Homo sapiens
tccgccagctcagtgtttgggagcttccttgatgctgagcctttccttccctctactgctcgcttggccgcgcagctccagcctctaatgctttttcttatttctttatgtacctgattacc

SEQ ID NO: 481528 - DNA, 122 bp, Homo sapiens
taccacttcacgaggcctcctcgccctgccaggccgaggtcagggttagagaagctgggtcgttagattcgggagagctggaatgatctgatgtgtcattccgtacttgggtgaggaagccg

SEQ ID NO: 481529 - DNA, 122 bp, Homo sapiens
ggctcaaggccgctgcctcttcgaagtaccctggtggcatctggggacccgtagatagcgcgggaggggccgctcatctggaaaccctttaatcacaacgcaaacacgatgtggcagaaggt

SEQ ID NO: 481530 - DNA, 122 bp, Homo sapiens
ctgttgctgtccttagttcttttccttcctaatggaccagaaaagggctctgggtgtaagcgtggcttgcccaggttccaatcctggctttcccaccatccagatgggtggctctggaagaa

SEQ ID NO: 481531 - DNA, 122 bp, Homo sapiens
aagaaaatagcctggctaataagagccagaaccagaatttagagccagaatgactgatatcgaaaccagtaaagttgctaatattcccaaatattcctaatgtcctaatgtaccacagagct

SEQ ID NO: 481532 - DNA, 122 bp, Homo sapiens
actaatgacacgtgacctttggattctccacgaggcagcaggcgcgggccccgagcccagcggggacccctctgccagttaggggtcactctctccattcaacgctttattagccccctcaa

SEQ ID NO: 481533 - DNA, 122 bp, Homo sapiens
catagggttcttggttcagagggctcctcacacggcaggatgggccgcaggtgtgccagtcgggcccatgaggaggtatctgagctggggcagccccatcccccaagtgggccctccatccc

SEQ ID NO: 481534 - DNA, 122 bp, Homo sapiens
cgtgtgcaggggccccgggcacagtggacaatcatgaggccagtgcgtgtgcaggggccccgggcacagtggacaatcacgaggccagtgcgtgcgcaggggccccgggcacagtgggcagt

SEQ ID NO: 481535 - DNA, 122 bp, Homo sapiens
gcatctctttcagcattgagagtattatgcaaggggtcaggggagcgggtacaggggctgcgcagaatttgtccccgaccgcgtggagctactgccacctgctccagcgaccatcaagcctg

SEQ ID NO: 481536 - DNA, 122 bp, Homo sapiens
atgggcgggatagagatgaggaagccaataagccaagtgagcgagatgagcgcagcggcgcgccggggcgtcctcttgttcacgtagtcgatggggtccgtgatggcccagtacctgtccag

SEQ ID NO: 481537 - DNA, 122 bp, Homo sapiens
gcgcggagtgaaagaggaaggaaacgcaacgcaacaacgggaatgtgcagcccgccgcctcgatctactttgggttcggctgccaacgtcagcactagacggactccgccccgcggaagtgc

SEQ ID NO: 481538 - DNA, 122 bp, Homo sapiens
ccaagtaagaggcaacaatctctgagccttaggccttggggaggagccactcggcagtcccgcggaatgaacattccgtgtgacacactgccacccagtggccacaatggagactgtcagaa

SEQ ID NO: 481539 - DNA, 122 bp, Homo sapiens
gcggggaggctgagcctgttgcccctggagagcagaagatccatgttctggagatcgatgcggcctcctgccgcactcctgacccctcactctttagtccttggacattgctttcagaaccc

SEQ ID NO: 481540 - DNA, 122 bp, Homo sapiens
gccccgagcccaccagggcaaagcagcctaagacggctgtcttcccccaaccctgctgatcgcgcggcgcctggagtagggtcgacctgggcgcgcctgcggcgaggcggggccgagtcgtc

SEQ ID NO: 481541 - DNA, 122 bp, Homo sapiens
caattgggttagacagttagtctttccccttcattggttgtctgtgtgcacacgtgcttacgtttgtatatgtttgtcagcagtgatcttatagccagaagtgaaaatgattaatatctcta

SEQ ID NO: 481542 - DNA, 122 bp, Homo sapiens
ggaatctcgactttgcagcttgaagtcattttgttggcggcgctggttaccggctacctccgcgcgggcacttgattgtaacagaaagtagttccggcccatgttgtttcggccgaggagcc

SEQ ID NO: 481543 - DNA, 122 bp, Homo sapiens
ttccaggctggtgtgaaactgaagagcttccgcatcttgcttgggttggtgggctcggcccgcactgcctggtactgctcatccgtcaggaccttcccgtacagagcatccagcagccactc

SEQ ID NO: 481544 - DNA, 122 bp, Homo sapiens
aactcgcttcaaaaaaaaaagatatcaaatgatgaaatcacccaaaatagctggaattaccggcagattgtgtagtggtgaacctatggttttctgaagatatctcttaccctgtgattgac

SEQ ID NO: 481545 - DNA, 122 bp, Homo sapiens
cttaaaccccagctccacctttctgggatgggtgacctagtaaagtccaggcttgaatctcgggtctttacttgggcaacgggcaccatgataccctatgttctggggattagcagtgagga

SEQ ID NO: 481546 - DNA, 122 bp, Homo sapiens
agaaaggtgggtgggatctgtgtgttgtcgcccggctgggttatgtgctgcccggactcccggggttcctgactccgcgttcgcctgcgacacagctgccgccgtcccggcacacggacggg

SEQ ID NO: 481547 - DNA, 122 bp, Homo sapiens
cgaggcgccagtagcggtcatctcggaagaagatgatggagccatcgggcctcggcagggcgccgctgacctcctcagggatgcctccccagtcctgcagacttcgggggtagtagggctcc

SEQ ID NO: 481548 - DNA, 122 bp, Homo sapiens
ctatactaaggattgctgatggcttagggcggcgggatcgtcttacaaattggctagatgcgcatgacctcgatcatgtatggccctcccgcccctttccacagacaattgccttgagcctt

SEQ ID NO: 481549 - DNA, 122 bp, Homo sapiens
ccactaagcttctggaaaaagcaacagctcagaacagtcacacgcatccacatctgctgacgggcactccagaggggaggcaggcagaagctgccagggctgggacttcagagtgagttccc

SEQ ID NO: 481550 - DNA, 122 bp, Homo sapiens
tgcgcagaggccgacatactctatttcgacggcgacgatgccatctcctaccgcttcccgcgaggggtcagccgaagcctgtgggacgtgttcgccttcagcttcaagaccgaggagaagga

SEQ ID NO: 481551 - DNA, 122 bp, Homo sapiens
ggtggggggcactttaggggcctgcagaaggacaaagagagcatgagacaggtaaggggacgttccacccagtcctgctgctcacagaggcgccacgctcacctggtcaagcttggcccggg

SEQ ID NO: 481552 - DNA, 122 bp, Homo sapiens
ttgttccttcagacgtccagatgtgtctggagtttcttccttctggcgggttcgtggtctcgctgacttcaggaatgaagctgcagacctttgcggtgttacagctcttaaaggctgcacgt

SEQ ID NO: 481553 - DNA, 122 bp, Homo sapiens
cctcccctgcggagtggctctgaccagaccgggaggcaggacgctgcgttttggtccgagcgcacgtcccgacttgtggcccactcttggggacaagtgcatgtcccggcttcccccttggc

SEQ ID NO: 481554 - DNA, 122 bp, Homo sapiens
atgaatttaacccaataggcccagccaattgtaatttcagtttgtagccacagttgagatcgagttttacctggaaatctctacctcaaacagttgggttatggtgcaaacaacagaacttc

SEQ ID NO: 481555 - DNA, 122 bp, Homo sapiens
agaacagggaaaggacagcgaggatggacaggccctcctggagcgttctccgtgggctcccgcgtctccttcaggatttggacttggacacagcaagtccgatgagtccggccagtcccgcc

SEQ ID NO: 481556 - DNA, 122 bp, Homo sapiens
ccatctgccccatgcacacgctggccgcctccatcatggccccgtcggcgatggagcgagcggactccttctcgatgtgagggtttcccgacagcagctcctcgaccacctgccaggtgggg

SEQ ID NO: 481557 - DNA, 122 bp, Homo sapiens
ttaatctttctgtgaacctggttctgtggctcctggagcctgccagagctgagctttgtacgtaggatggtacaaagctcagccacctgagtgccgcacaggccactgctgtaagcctagtg

SEQ ID NO: 481558 - DNA, 122 bp, Homo sapiens
aggcttcctgagcccgccggcagagctcctgccaccccgtacctgtcccctcctgggcatcgtccttgattacttgtctggaccgccacccccggtccccgccctgagatggggaagacccc

SEQ ID NO: 481559 - DNA, 122 bp, Homo sapiens
tttcagtccaatcttatttcatgcctccccaacactgcatcagtcctttcttaaagggctcggcgtccttggttccaggacagctggtcctcccctccgactgggcttcattcttctactac

SEQ ID NO: 481560 - DNA, 122 bp, Homo sapiens
acacttgaaaaccagagttttcaactctgccttgaagattggtgaactccccagggctcccgtgggctctgccactggacagaaggcctccagctcctccgctctgccctggtagcccttca

SEQ ID NO: 481561 - DNA, 122 bp, Homo sapiens
aagcatgcaaatgagcttgttcactgagcctcagcattaaagctgggaccaatcccataacgcttgaaggataatttcaggacagataaaggtaaatattacttcacacaatggagaataat

SEQ ID NO: 481562 - DNA, 122 bp, Homo sapiens
acgctggtgtcctgcttgccggggccacgtgggcgagtcgggtgacagacccagtgcagccgggtgggctggtggacgtgctggccggggctgcgtgggcagcgcgggagggggcgccatct

SEQ ID NO: 481563 - DNA, 122 bp, Homo sapiens
tgtgggttgctctccttccaggctaaaacccatcatcttcgagggttggagggtgtgggccgtggtggatcctgcggggtcagctcctaggttaaaatgtaggcccactttgggggatccaa

SEQ ID NO: 481564 - DNA, 122 bp, Homo sapiens
acactcacgaagcgggaaagccgtggttcctgtggtgaggctgttgagagccacgccatacggggggacgctctggttcaggtacaacagcgagttgacggcaaacaccaccaccccacctg

SEQ ID NO: 481565 - DNA, 122 bp, Homo sapiens
aggcaggcgggttctgtgggtttgcatttaaggtttttgaggaaaataccttgaaaccgtcggtaggactagataggtgacaacgtgtgacaggaaaggctgtcaggccaagcgcaggcggg

SEQ ID NO: 481566 - DNA, 122 bp, Homo sapiens
tgctgtggggatgcaagggcaggcgccggagcagcggcctgggcctcacacgctggacctcgtgcctgtccgtcaggctcatggaacattctcgacaaggcctgggagccgggggccagggc

SEQ ID NO: 481567 - DNA, 122 bp, Homo sapiens
gctgactgtgtcatggcttcatacctttcatgctttggacttttgtgctttctgcaggaacgattccaggtgaagaatcctccccatacatacattcaaaagctcaaaggctatctggatcc

SEQ ID NO: 481568 - DNA, 122 bp, Homo sapiens
ggagttcacacctcaggggatcacaccagaggggtccacatttcagggagggtcacatctcgggggtgggggtcacacctcaggggatcatccactcactctgaggaggtgcacagctgtgg

SEQ ID NO: 481569 - DNA, 122 bp, Homo sapiens
ttacccaccgcaaggcgaagattctcattacctgttccactcttataagcataagaaaaccgagctcataaggtaggaactgtggcgaaacagggacaagccgccatcttggtaaaggagaa

SEQ ID NO: 481570 - DNA, 122 bp, Homo sapiens
aagatggcgaatttactgttctgcttgaaggacagtacaattgacaagggcacaatgatccgagatgcttctgtatgttgtatctacacatactgtagactaaaatggcagaatctgtctgc

SEQ ID NO: 481571 - DNA, 122 bp, Homo sapiens
cggttctgcctcatgcctttatcagggactcctccctcctttctatttactggctgtgatcgaacatctaagctttataaagcaagctagtggctgccctttccaatacctcactcagcaca

SEQ ID NO: 481572 - DNA, 122 bp, Homo sapiens
gttcgggttctgcacgtcgatccagccggcccccacgtcccaccagctggaggcgccggccgagcccacctcgcccgcagcacccaggcccgggtgcgagggcttaaaccacgactcgtacg

SEQ ID NO: 481573 - DNA, 122 bp, Homo sapiens
tcagaagtgtgtcagccattcttaaagtcttttacctagaaaatgtcagaactttgaccacgtccagacattagagcaacttttattatattgcattgcattgttttttctttatgcatgtt

SEQ ID NO: 481574 - DNA, 122 bp, Homo sapiens
caggagtggtcagagagatacaacagcgctggctgtgaagatgaaggtaagggccatgagcggaggaatgcaagcagcctctgaaagccgggaaaggcaaggaagtggatgctccccaagag

SEQ ID NO: 481575 - DNA, 122 bp, Homo sapiens
gcgactctctctcctcatcctctgtctggtgcccctcagctgggccttggatggtggatgcgcccagcgcaggtggcgagcttgttgtcgggcagccaagacctgtcagggacaagagtgct

SEQ ID NO: 481576 - DNA, 122 bp, Homo sapiens
tgtgtcctctggggtttttctctgtggctcttgaactcatgaacctaagtcttctgctcacgaggtgactagttagccaccagccatagtggcaaatgccatccagcttgacttcatgctca

SEQ ID NO: 481577 - DNA, 122 bp, Homo sapiens
ggggggcagtttcagcagattcctccaggtagcctaatgtgggagcagaagtgtaaaacccggcagccccatccaagtgccttctgcccaggaaaacaagtgcctgggctccagccgcaggc

SEQ ID NO: 481578 - DNA, 122 bp, Homo sapiens
ctgacgaaggggctgcacccgccagactctccatgcagatatgagacggcctaagtcatccgctaagatccggctgagatcactgatgaaggggctgcacccgccagactctccatgcagat

SEQ ID NO: 481579 - DNA, 122 bp, Homo sapiens
caggtgcctgcccggccactccccctgagtgaacttgggctcctcttagcattggcaggccggtataaacccccggctgggatggagctaaggcctgatgctgccttaagccttatgaggtc

SEQ ID NO: 481580 - DNA, 122 bp, Homo sapiens
ataaaaacccgtgtcatccaaaagcacacgaggggtcctctcacgcagggaccccttccccgagcccccttcataagcccccaagggccctcccggtgccctcccccagagttctgcgggcg

SEQ ID NO: 481581 - DNA, 122 bp, Homo sapiens
gccccggcacgcaggccccgcccccgggccgttggagctccgcctcccaggcgccgcggccggagcaaaggcccagcgagcccagcactcagcggaacctgtagaagcgtcgggggttgccc

SEQ ID NO: 481582 - DNA, 122 bp, Homo sapiens
acgactgtagtttcagcagaaagcagccaggatggaatgaaggcacaatgaaatggttttcgagggtactctaaattaagtatgaccataaaaatagagacaatcaggccggctgggatttg

SEQ ID NO: 481583 - DNA, 122 bp, Homo sapiens
agagaggggaaaccccgtaaagtggttggttgcagttgtgtagtagttaaggtaagtcaccgtttattctagggatgaaggttatgctgggtaatcatataaaaccttgtattgaaataagt

SEQ ID NO: 481584 - DNA, 122 bp, Homo sapiens
gtgcagtcttggcccacctggccactgaagcagactctttattccagcaaggtctccgggcgattcatgtgtgtagctgtttgaggcatgaaccaggacaggcagcgagacgtcagcagaga

SEQ ID NO: 481585 - DNA, 122 bp, Homo sapiens
accgtgagggaaacggccgccgccgccgctgccttcgtcacctcagcttccgcccgccgccgcccccgctgctgcctcagtcccgggacccgctgctgccgctgccgctccacagcctccac

SEQ ID NO: 481586 - DNA, 122 bp, Homo sapiens
gcgagagacattttaatctggaagagtcttgtgatttgggagacaggtttggtaaccgttcgttattcagtaataaatgtcaggaaggattgccagatttttaggcagtggctctgtgtgtg

SEQ ID NO: 481587 - DNA, 122 bp, Homo sapiens
ctgctcaggagctaccggagctgagcccgcggcggactgccccaggactgcgggaaggcgcgggagccaggggcctccaccccaaccccggctcagagactgggcggcccggcgggggctcc

SEQ ID NO: 481588 - DNA, 122 bp, Homo sapiens
gaaaaggagccctgttgtcaactggtccgtactccacctcaggaggcggccaacttggtgcgcccaagaataaaaacatttcccttgtaagaacatgcaagtgtttagaaacgcccccccac

SEQ ID NO: 481589 - DNA, 122 bp, Homo sapiens
ccattggtccccggctgcagaccccaaggttgggagctggttcccgtttcctcccagagccggcagggggggcaccaggcaaagtttgcaagacgcgcctccctcccacccctcccccttcc

SEQ ID NO: 481590 - DNA, 122 bp, Homo sapiens
gtccaaagtgcagcaggcagaggggggcgcagtggtgctgcttccggccgctgagctccacggtggggatgccctccatgatgcggtagtcggccaggtaaatgttccccttctggagggga

SEQ ID NO: 481591 - DNA, 122 bp, Homo sapiens
ccccaaactgagctttctaagcctaacacttcagtttctgtgaatttctacacatccttccggtatatccccatttttctaaggtagccaaaatcagtttttgtggcttgaaacaaaggact

SEQ ID NO: 481592 - DNA, 122 bp, Homo sapiens
agttttttctaactaaaatcctacagacctgtgtttcccaccacgtgcaccttcttctggcggcctctttgatttggaaataacgtttttaacaaaacttctcattccaaacgtttgggaca

SEQ ID NO: 481593 - DNA, 122 bp, Homo sapiens
ttcattatcaaccccacaaaaagaagagggataataagggacatatgtaaactttatatacgcagatatcttgctggttggagaaggctgcctgctacgtaatttatcctgaaatatttcct

SEQ ID NO: 481594 - DNA, 122 bp, Homo sapiens
cggggctcacccggtccggtccagttaaaagggtgggagcgtccgggggcccatctctctcgggtggagtcttctgacagctggtgcgcctgcccgggaacatcctcctggactcaatcatg

SEQ ID NO: 481595 - DNA, 122 bp, Homo sapiens
actctggtttctccctttttatctcccagtagagactcccactgagcaaacgtagctgggcgccggctgacatctggcctgggaaacaggccgaatgggtcagcttccactccacaggaaga

SEQ ID NO: 481596 - DNA, 122 bp, Homo sapiens
gaaatcaaattcttatttttgtacagttttgaagtttatacttagaactgaccacctccccggccacgcggagagctgtacagtgtgtaaatctgcctttatcttggattgattggtacagt

SEQ ID NO: 481597 - DNA, 122 bp, Homo sapiens
tcagcacactgatacaaagtgaacaccccgcgaggaagcggagcctgcagtccacgggctcgtggctcgccgggcggttttctggggatctgcgaagccccctccccaccccggagccggcc

SEQ ID NO: 481598 - DNA, 122 bp, Homo sapiens
tagtctcccataactgagccaataccatcagaaccaggaaactggctttagtaaaaggtgcgtgcagtagcccccagctgccgcccccaccgtccttaacccccctaaccactcccctgcca

SEQ ID NO: 481599 - DNA, 122 bp, Homo sapiens
cagaagctagaaagagggcatccgggttgtgcaaatttcagacacacggatatcccgtggcgcctgcgtccggagcccggccctgctgctggactgtccccggccacgcccgccgcccctcc

SEQ ID NO: 481600 - DNA, 122 bp, Homo sapiens
acatatgtcacaatggccctccagagggttgtgccaatttacaccgtaacagactctgagcgcctatatccttcatggaatgatttcatacagtctctctttctggtctattcttccctaag

SEQ ID NO: 481601 - DNA, 122 bp, Homo sapiens
agacattttacgaagttgagcattagaaaacttcgatgtctgagaaaaaaaactctctaacgcacagggaagaaagcggtttatccaatactctgaaaataaaatgggctgggtgagggaaa

SEQ ID NO: 481602 - DNA, 122 bp, Homo sapiens
gagagatgaaggaacatcaggaaggccgcctcctggggttccagggtgacccgccctgcccgcctggacacatttccagatgacctggagcaacaggaaccacccccgctgctcaccaagag

SEQ ID NO: 481603 - DNA, 122 bp, Homo sapiens
ataaaataataaaaaacgccccagagaggccccttgccccttccagcatatatggactctcgagaaggtgccatctatgagtcaggaagtgaccttcaccagacactgaagtggccagggcc

SEQ ID NO: 481604 - DNA, 122 bp, Homo sapiens
gggatgggagtggccaggagtgctgacctctcatctggctgcccagggcaaacagagagccgtggtcggctgcagggggtggcagaactgcgtctggcaggtttggagctgacagatgcctc

SEQ ID NO: 481605 - DNA, 122 bp, Homo sapiens
gcccacagtgggatgaggtctggaaatcagagtggacacctcatggggcagcgagggctgcgaggcggagagtggcctgacttcccgggtcaggttggtgttgtgaagcgcctgcgtgctct

SEQ ID NO: 481606 - DNA, 122 bp, Homo sapiens
ttttagtggcgctagggcaaatcactttcctgcatttctgctgtctcttaaggagctcaccgacagaggtcactgctgtcatggccctggctggagggacagtggatcagaagagaggtcct

SEQ ID NO: 481607 - DNA, 122 bp, Homo sapiens
actcttaattatacataagttgactgtgcattttggggattgttcaagatgacttcttaacgtcagtggcttctccctgtcacttggacgctgtcctcacaccccctggcgtgctcccaggg

SEQ ID NO: 481608 - DNA, 122 bp, Homo sapiens
gcacccaggccagcgtctgcggagggtgtactgggtcccccagcagtgccagcccacaggcgctgtgctcgatttctcgccgggccttagctgccttcccgcagggcagggctggggacctg

SEQ ID NO: 481609 - DNA, 122 bp, Homo sapiens
ggctgggcaggagaggaggccccaaggtctgtggggctctgaaaagctacccttttcaagcgattttgcctaaaatatttagcaggcaattatttaggtcagagagaatcaaccctacatca

SEQ ID NO: 481610 - DNA, 122 bp, Homo sapiens
ataccctacccctgatgtcaattcccatgctttgcctaataaaaaaaattcccagccaggcgcagtggcttatgcctgtaatcccagcactttgggaggccgaggcgggcgaaccatgaggt

SEQ ID NO: 481611 - DNA, 122 bp, Homo sapiens
cacccctgccccagcatcccagagtcggggtcgcgtggacatgagcgatggtcacctggccgttctctcccccatagaggaggagctccggaagctgcgagaagaaaccaacgcggagatgc

SEQ ID NO: 481612 - DNA, 122 bp, Homo sapiens
aggagaggaggtgaccccgcgaaaggtaagcggcggcttcggtggtgttgagtggctgggcgccggcctggaggggccagggcggccgcaccatcacgctcccgtctctgcccttcccagct

SEQ ID NO: 481613 - DNA, 122 bp, Homo sapiens
gcatttaatttattggggtgagaagttgctgcgggaggtttccaaagggggtctttgtcacgaagagagaggctctggtccaaccccgtaggtgcttagaagattatattttggcctcggaa

SEQ ID NO: 481614 - DNA, 122 bp, Homo sapiens
cagtggaggaaggcgggtagcacgttgcagcagcccacagccagcagctcctggttggcacgcacagagtagccgtgactgcgggcgaacatctccgccagcgagatggagaaggcggcagc

SEQ ID NO: 481615 - DNA, 122 bp, Homo sapiens
ctgaggtgatctgcccaccttggcctcccaaagtgctgggattataggcggaagccactgcgcctggcctatagcttatcttttgtaaaaatgtaatacatctgggtatatacccaaagaat

SEQ ID NO: 481616 - DNA, 122 bp, Homo sapiens
ccgtgctcagccccgagccctgggatgccccttcggcaaccttgccctcccagagccctacgtgaaggtccagctcatgctgaaccagaggaagtggaagaagagaaagacagccaccaaaa

SEQ ID NO: 481617 - DNA, 122 bp, Homo sapiens
aacattttccccatctacaactctatcttgtcattgcgatcattttcacaaaagtgactgcggctcacagaccctaaaaggagaaaatccagggtaggttatctgatctagttagtttcgaa

SEQ ID NO: 481618 - DNA, 122 bp, Homo sapiens
tagtgggagctcctagaagttcacttctgtgtcctcattaatctctgatagctttaatatcgcaggcataagctattttaggcttacattatacatttcctgccccaaacctggaccatcta

SEQ ID NO: 481619 - DNA, 122 bp, Homo sapiens
tcaaaaaaaaaaaaaaaagtcagagtgagacctcatctcaaaaacaacaacaacacccgccgccacgcctgactggttttggtggagacggggtttcgctgtgttggccgggccggtctcca

SEQ ID NO: 481620 - DNA, 122 bp, Homo sapiens
tgcaaacttgcagtccgggcaggactttccttctggctggctcttctctggccctgaggccgggtgcaatttctggtctccttgctaaacaaaccagcagtcacttgctcccgcgtgtccct

SEQ ID NO: 481621 - DNA, 122 bp, Homo sapiens
ggtcagggtgtgtaggttccctgcaggtcgccccaggttttatcctgggaggcggaatgccgtcagaccagtccccaggtggctcccgcggccaccccggctgtgggtcctgggcagagggc

SEQ ID NO: 481622 - DNA, 122 bp, Homo sapiens
gcaccgcaggcctctgcgttttgaccacccgcgccggttcgcggaatggccacatcctggcgactggcaccagagagatgcaaccgtctgagggccttggggtgtctgtcccccagggaaat

SEQ ID NO: 481623 - DNA, 122 bp, Homo sapiens
tctccggaaattcgaggttgggcctttgcctgaatctgttgctattgctccccttgctaccgctgacacttggcaccgccgcctcctagcagcggccagacgcggggctgggggccttccac

SEQ ID NO: 481624 - DNA, 122 bp, Homo sapiens
aagtctccacacccaaatgagcgtgggtctcatgtaacatacgtgttagccaactgcgcacgcttgcaacccccccttcatgaatatccatggctcttcctgcagcctggtgagtatgtgca

SEQ ID NO: 481625 - DNA, 122 bp, Homo sapiens
tcgtggccagcctcagctgcagaaccccgccgggcgcccgggagccctgtcccgccgcggcggcctcagagtccgggcacttggggattctctgagggtgcagccctcctgggcccctccga

SEQ ID NO: 481626 - DNA, 122 bp, Homo sapiens
agaacatgaaagaagaacaagtctcattttgatacattttatgtttgaccagaagggctccgcagttcaattgcttagtttccaggtaagaatttcagtggatctctttttcctgttcttgg

SEQ ID NO: 481627 - DNA, 122 bp, Homo sapiens
gaagccagtgcagaggatcaccaagtaccagctgctgctcaaggtgggctccgcggtgaccgtggcccggcctccccagcacctgctggccaggtgtctgtgccgccctggggccccgtccc

SEQ ID NO: 481628 - DNA, 122 bp, Homo sapiens
ctgctcccatttctgtagacagactggtcctccataatccactttcctgattttcctccccgttttctctgtgcccctccttggtcttctttgcaggcttcttcctctttgtccaatatcaa

SEQ ID NO: 481629 - DNA, 122 bp, Homo sapiens
ttctggcctgcgggaggaacaggcagcccagcccgtgcagaatgaggtttggttctgccacgtgggaagaacaggcagtcccccttctcactcctcacgagcagacagatcagggaggaggt

SEQ ID NO: 481630 - DNA, 122 bp, Homo sapiens
ctctgtcccatcctccgctccgtcctgccccgcttggccgccgcagccccatcccctttccgcccctcctgtcgggagtccgtggcccgtccccagtcccaccccacccgtcgccccagctg

SEQ ID NO: 481631 - DNA, 122 bp, Homo sapiens
gcctttgaagtcgtttctcattaaaaaacaagctttttgaataaccaaatgttcctttggcgccctccaattttattttactgtaatctattgagttgtatttgtttttctgaatccgcttc

SEQ ID NO: 481632 - DNA, 122 bp, Homo sapiens
agaccacagcatgaggcagacaaacagaaaacaatgaggtcatgcagaagtagctcattacgctgaacccaaaaatagaagcctgacaacccagcttggtgtgatgttgaaaagcactggac

SEQ ID NO: 481633 - DNA, 122 bp, Homo sapiens
taattgacatttattataccaattaagcttggaatggggcaatggatgcatttcccaaaacgtgtgaaagcactaacagcttatattgctgaatgagaatctcctgggtgtaatttagccac

SEQ ID NO: 481634 - DNA, 122 bp, Homo sapiens
gggctccctccacactatcctgtggctgtggcagatatgtcaatacccttacattcactgcgattcaacaatacaatgagggaggaaaatgttgagccccaaaacaagcagatggccttctg

SEQ ID NO: 481635 - DNA, 122 bp, Homo sapiens
tgcacttttacaaaactctgggagccccgagatcttcaagcccgaataatttttatcaggcgcagtgtggacagccccgaagcgcggccgggtcccctcatgcatatgcagcagattgtgat

SEQ ID NO: 481636 - DNA, 122 bp, Homo sapiens
gctgagccccatttgcagctttcccaacacataaagaaccagctctaccagctcctgctccgtgacaagagcaccaggggtgcagtgtccctccttaacagcctgagtttccactcctctaa

SEQ ID NO: 481637 - DNA, 122 bp, Homo sapiens
ggtatttgatgactataattcccaaactactcccaactgaatcagactcccacggggaggcgggtgcaccaggcgagggttacagatggaggtcgactgcctctgccacaggagagttggca

SEQ ID NO: 481638 - DNA, 122 bp, Homo sapiens
aaggactctggcctttagcttaagatcaatggaagccattgagggttttaagggaagggacgtcacactcaaatctgtatttagaaaagacctcactaatgttgtgtggatttgagagttgt

SEQ ID NO: 481639 - DNA, 122 bp, Homo sapiens
ccccactcctaggtctcacacgaaagtctccacagccccacattccccaaccccacatcccgagagtcttctctaggccttgggaggtccagaagtcaacacctgctcactggtgaggtccc

SEQ ID NO: 481640 - DNA, 122 bp, Homo sapiens
gtgtaggtgttgtatgatttacacacttctggttgtagatctagatccacctctctccttcgattctttcctgggcaaagtaatcagtgatttgcgtgttttgagcacaaaagctgagaaaa

SEQ ID NO: 481641 - DNA, 122 bp, Homo sapiens
caaaatgaaatgaatcatagttacattaatttcaaaagaggcatcagaaaagatcacaatcgaggaaggaaatcattatacctttagcagcgggttcagtcacctgctctttttcacgtttg

SEQ ID NO: 481642 - DNA, 122 bp, Homo sapiens
gggggagtgcagcaggggcggggccagggaaaccccaggccgcggcggtcagccaatcagcgccgtcggcctcatccctcccgacctgcggcatccgcccagaagtgcggctctcggcagcc

SEQ ID NO: 481643 - DNA, 122 bp, Homo sapiens
tcattactctagttggagaagaggaaagaatggggaacgagtgacaccgggaccggagggcgagtcttccaggagcacgtctcggccttctttgcccggcccgaccggcccgacccgtgccg

SEQ ID NO: 481644 - DNA, 122 bp, Homo sapiens
gacgcggtgtgtgcatacacgcatacacatctaagtgaactagacacgttacataaaatgcgtgcccgcagcagacgcggtgtgtgcatccacacacacacatatctaagtgaaccagacac

SEQ ID NO: 481645 - DNA, 122 bp, Homo sapiens
aggtggaaaaggctttccgcttcccctgagctgatgggatcttcaggatggtcgagaaaacgttcgtgtaagagataatcaggcaaagcacacaaatgagtcctgtgagacccccagtgatg

SEQ ID NO: 481646 - DNA, 122 bp, Homo sapiens
ctggtggctgccagggcgtgaccatcttacccagcatgccttgcgagtgccaggtgtactcgtaccaggtcttgacgcggttctgcacggacttggggatcttgtagaaattcatgtacttc

SEQ ID NO: 481647 - DNA, 122 bp, Homo sapiens
tgttctatctcttggtctcgcgcgatctcgcgcctccgaggaagccaactgtatcgcgcacgccatcaaatccccgcgggaatagaattccgcaggtccagaaagccgggaaatcgcgagcg

SEQ ID NO: 481648 - DNA, 122 bp, Homo sapiens
acacacttgcactcctaccccctttgctcacaggtacacttgtgtggaaattgcctcttccgtagttcttataaactcctcccagacaggcagaattctcagagcatcggaaccagggaact

SEQ ID NO: 481649 - DNA, 122 bp, Homo sapiens
tatccttataaggcacagaaaaggaaatacagagacacagaggagaaggccacatgaagacgaggcagagctggagttgtgcttccagaagccaagaagcgcctcaggccaccagaagctca

SEQ ID NO: 481650 - DNA, 122 bp, Homo sapiens
acaggacccactgtgtcctcttgaactttgcacagcgcgtgacgggggcagacggtgcaccgtggcccggcctttcgcgggggtcctcggggaagagagaggagcgcgggtttcctcggagg

SEQ ID NO: 481651 - DNA, 122 bp, Homo sapiens
gacgctcctcacttcccagacggggtggctgccgggtggagaggctcctcacttctcatacggggcggctgccgggcggagggtctcctctcttctcagacggggcggccgggcagagacgc

SEQ ID NO: 481652 - DNA, 122 bp, Homo sapiens
tacccagagccgcctagagctggtttgcagcacgccaatctacgtaacctcaatctagcacgagcaacaggcagatttcgccatctttgttgtggtcaaggagtcttcttgggttcctgggt

SEQ ID NO: 481653 - DNA, 122 bp, Homo sapiens
gtggttgaagctacctggtaagcctgttatgtttccagtgggatggagtccatctgcatacggcaagcataaatgaagttggcattccattaaaaacaaaaacaaaatgaggaaaccactct

SEQ ID NO: 481654 - DNA, 122 bp, Homo sapiens
tccctttgtttacctcttcctcattcatggctgtgctcactgccacctgattgtcttcagcggagacacttaagtacaatcttgaagccacatgattgtgaacagagacccatgggactgtc

SEQ ID NO: 481655 - DNA, 122 bp, Homo sapiens
atacatacaaccccaaaaatgtagcttatgcattattcacaggtcaacaattagtattcccgggataaactctgatgattaattctttagaaggacagggtaggaaaccattataaataatc

SEQ ID NO: 481656 - DNA, 122 bp, Homo sapiens
agacctcacaattgggcacgcaagcggcggtgccacgccacaatgagatgatgtaaaaaccggccctgccggaaaccaggcggcacttagtaccgcctacctggttagtttcaagtccttag

SEQ ID NO: 481657 - DNA, 122 bp, Homo sapiens
gaccatgtccttcctctgctcaaagcctcacaaggctcccagctcacttggagaaaaagccgaagtcctcacccagctatgaggcccctcccaagctgatgaccctcacccctcctcacccc

SEQ ID NO: 481658 - DNA, 122 bp, Homo sapiens
gggaagaaaactttcacattaagagttgctgatgcggattttctttctttcctctcccggcgttgatgagtgcttggctcctgacagaagggatttggctcccagctttgtagttcggaaga

SEQ ID NO: 481659 - DNA, 122 bp, Homo sapiens
tactgcgttctttccttttgtgtttttctttaggtgattgaagatagtactggagtccgccgggtggtggtcacaccccagtctcctgagtgttatcccccaagctacccctcagccatgtc

SEQ ID NO: 481660 - DNA, 122 bp, Homo sapiens
ccagtgccttgctggaggggagtaggccatgcacctgactctgggaagagctgcctcccccgtgccttgagggcacagccccctctgggaaggaaggcagcatgtggcccacccctgccagg

SEQ ID NO: 481661 - DNA, 122 bp, Homo sapiens
gagggcagggtctaaggcagtcttgttcactgttgtatcctgggcacccaatgcctgacacgtagttagcacctaatgaatgtttgttgaatggccaatgggacttccagctatccagtcaa

SEQ ID NO: 481662 - DNA, 122 bp, Homo sapiens
ttatttacctctctgggtcttaatgttcttatttccttttttttttttgagacagagtctcgcactgtcgccccagctggtgtgcagtggtgtaatcttggctctctgcaacttgtgcctcc

SEQ ID NO: 481663 - DNA, 122 bp, Homo sapiens
gcccatacttcatcactatgcaacatgcttctgtaagggagcggcatttgtactctctcacgtattaataaagagataaaaaaaaaggcctggtgaggtggctcaagcctataatcccagca

SEQ ID NO: 481664 - DNA, 122 bp, Homo sapiens
ggggagcacccactttggtaatgaacatcgttccctgttcgtctttagtgaattaagggccggatgaggaagtgggaaataggaggaagctgtgcctccccggaggagcacgtgccctcaga

SEQ ID NO: 481665 - DNA, 122 bp, Homo sapiens
gagtcccgctgcattggggaaattgaccagcgcccaaagacgggcccacctgggcatcttcgaccatgccagggacaagacagcagaaaaatggccccagggagaagggctggggtctctgg

SEQ ID NO: 481666 - DNA, 122 bp, Homo sapiens
gaagtgggagcctagagttttgctctcggcaaaacaagaactcggcttgtcctcccaggccggcggtttccgtacggcaagacaaggcgcggaaaacatttttaccatctgacgctgtagtc

SEQ ID NO: 481667 - DNA, 122 bp, Homo sapiens
caatcttgaagcgatctcctatgccgaccccactccctcccgatccctcagcagcagccccgggcacctccgagctctggacatcccccgatagcagcagcagcagcaggacgggaaagaag

SEQ ID NO: 481668 - DNA, 122 bp, Homo sapiens
ggacaggagagcagtgcgggaggaagtgggtggaggctttggcaaaatgagctgagaaggcgaagatggagggaggctggaaggagccccagccaagtcccgctcacaggatggggctagca

SEQ ID NO: 481669 - DNA, 122 bp, Homo sapiens
ttttcctttgttatttcttcaatcttttaaaaaatttttatctttttttttttctttttgcggctccttccagagcagggctaactcctacgcagtgtgcccagagtcagcctgtttttttt

SEQ ID NO: 481670 - DNA, 122 bp, Homo sapiens
aacttcagccccctgcgcccggctgctctcccagtggtggtggggagcggtgggggtagacgggggcgcgcccaggcttttctaatccggcgctggtgggggagaaccgagggcgccaccgc

SEQ ID NO: 481671 - DNA, 122 bp, Homo sapiens
cggggcggacctgggccggcccgacccggcctcacggtctggccgctgtccgcagccgaccgctgtaaggaggtacagcagatccgcgaccagcaccccagcaaaatcccggtgagtcccgc

SEQ ID NO: 481672 - DNA, 122 bp, Homo sapiens
ctggaggcctgggggcattggaagcaggaggatccgtgggtgcttgggcccctggcggagcgcggcagcttgttgggagctgggagcagagccacttactgtgagctcagagaggctgccaa

SEQ ID NO: 481673 - DNA, 122 bp, Homo sapiens
gagtgagacaaaaaaaaaaaaaaaaaaaaagagcaaaaaagtcgtggctcaaggcaagatcgggtggtaaataagagttgatctggatttagagctaaggtccttttgagaattttctccct

SEQ ID NO: 481674 - DNA, 122 bp, Homo sapiens
aaatatctgccttatacatgtcacaagttataaagattgagagctgtatttaggtaaatgcgttgtatgttttgtcatgttactcaaattactattagtatttctgtcacacagttaagcaa

SEQ ID NO: 481675 - DNA, 122 bp, Homo sapiens
taaacattttttactacgtagcttaccaagcaatacagagagtctaaaaaacatgactatcgattatcttccttgtgcaaaccactaacgaataaattaaaaagacaatactattttgtaaa

SEQ ID NO: 481676 - DNA, 122 bp, Homo sapiens
ctggtagaatgagggtctgcagggggaaacttgacggagcccatcaggcgacagccttctcgaagcccctccgggcccctcacgggaggggatcccccgctgcgctgccgggaggtccggac

SEQ ID NO: 481677 - DNA, 122 bp, Homo sapiens
taatttaagaccttccaagcagggaggtcaaacttaactctgcttccagcttacaaagcacgtcaacttattttgtatgtatagctataaactgtttgcaagtttcctcagtcaggtactcg

SEQ ID NO: 481678 - DNA, 122 bp, Homo sapiens
ccactggtctctgatggtgtctccgggtaactggagctcccccagcccggcagagctggacgcaagctcctcccagggctggagccgactgcctccctgcaggaatcacgggacccaaacgg

SEQ ID NO: 481679 - DNA, 122 bp, Homo sapiens
ttcctgcggctgcaggccctgcaccgctcccggaagctgcaccagcagtaccgcctggcccgccagcgcatcatccagttccaggcccgctgccgcgcctatctggtgcgcaaggccttccg

SEQ ID NO: 481680 - DNA, 122 bp, Homo sapiens
gcgccagtcgcaggagaaaagggagcacgcccaggagctgatgagcctgcagaacctgcgcggtggccgcatctgccttcatgacatcaggaagccagagggccaaggctgggagagcgggc

SEQ ID NO: 481681 - DNA, 122 bp, Homo sapiens
gaaagcctttgttgtgggtggtgcagaggtggacaggcagtccttgctgaagtgactccacgtgaggaatccaggctcctagtgagccagagtgccctgtattgaaaagttaagtttcaaat

SEQ ID NO: 481682 - DNA, 122 bp, Homo sapiens
aacagccagacagtggagcactcaaaacaaacacatttatcaattaagtttgccatcttacgtgggtaccattcatggctccccaaaacaataacaatagtgacatcaaagatcacagacca

SEQ ID NO: 481683 - DNA, 122 bp, Homo sapiens
tgccgggtccccgctcccagctggagctcagccctgcgggcgcccgaggagcgggggcatcggagatcctgtcctccgcacccctggcccgctctcggctcagggccgcaccccagctgtgc

SEQ ID NO: 481684 - DNA, 122 bp, Homo sapiens
tcctgcgttccaagccgaggcgcggcgcgaactgaggcgggaggctgggcgggggcgggacgcggggggcggggggcggtgtcccccgagtcctaacgccgccgccgttgccgccgccgccg

SEQ ID NO: 481685 - DNA, 122 bp, Homo sapiens
ttcaacaagtaagaatgtcatttctaaatggcagcaaaacccgaaatcccgggttagagccgagggtgtgtgggtcagggggtggacagggatgggcggagggcgtggggagagatggtgac

SEQ ID NO: 481686 - DNA, 122 bp, Homo sapiens
aggcaacgcgacttccttccccgcgctccgtgtttataggctttcaatgcagtaaaataacgggattccctcactgtttcctcctgtttatccagcgccatggaaaccactggatcccgtcc

SEQ ID NO: 481687 - DNA, 122 bp, Homo sapiens
tgaacaaggatccattaggcctgggaactaatgggcacagccaggtgccagcaagccaggcgttcagggagccgggcaatccgttagaagagggaggggatggctttgtacaagtcaggagg

SEQ ID NO: 481688 - DNA, 122 bp, Homo sapiens
aaacagaaaaaaaatgaagattccaaatttcagctctcagggcaagccacacagggaggccggaatctccaggtgagatctctccaaaaggtttcaaagaggtggaattcgagacaagttgg

SEQ ID NO: 481689 - DNA, 122 bp, Homo sapiens
tctatttctttgttaagtcgttccctctacaaaggacttcctagtgggtgtgaaaggcagcggtggccacagaggcggcggagagatggccttcagcggttcccaggctccctacctgagtc

SEQ ID NO: 481690 - DNA, 122 bp, Homo sapiens
atgtcttcatgaacgccagtgagatatgttaggtccagcagcacagaagccgtcaggcctcggaatcgcgccacatcaaacggcaatggttcacagggttccagattatacaatggagtatc

SEQ ID NO: 481691 - DNA, 122 bp, Homo sapiens
aaaagagtgtttggggttttttttttcagttgtatggcactgcttgcaaatgaaaggattcgttgtgtgcctcacatgcccaaaaaggacagcacgagcattctaacttaaggactggttta

SEQ ID NO: 481692 - DNA, 122 bp, Homo sapiens
gtgagtgggcccggcatgctggccctcctggtggggtggcagggggccgaggcaggcggtcggggaggactcatgccacgtaccttgcccggccaggccggcggcgctcgcggcaggcgagg

SEQ ID NO: 481693 - DNA, 122 bp, Homo sapiens
atcttgacctctgtaggcagttcttgatttataaatatttgatttatatgacagcatcctcgcatgaacagttggggggcctgaattgtaaacgcctattttctcaggaggcaatgttgttc

SEQ ID NO: 481694 - DNA, 122 bp, Homo sapiens
ggtttgctggtatagtttttataaaaaaaaaaaaagttgggccgcgcacggcggttcatgcgagtccctgctatacaggccttgaggattctgcagagaccaagataagctggggggcctga

SEQ ID NO: 481695 - DNA, 122 bp, Homo sapiens
ccttcaccccaaaccagatgagccttgtatggatagtcggtattttgcacccactgggctcgagtctttcatattttattcatgcttgggtaaggaaaaaaagaaagaagaaagaaagaaag

SEQ ID NO: 481696 - DNA, 122 bp, Homo sapiens
aattcatgttattcagaaacgaacatgagaaaacgtctgaataggtttccccgttgaactcgcaaacctccagcattgaactcacaaacctccggcagctctctgtctcccacctgcacaga

SEQ ID NO: 481697 - DNA, 122 bp, Homo sapiens
tggtcatacccacccctgtcttcctgccctgccgcccacagccaccagcaggaccaagtccgggcccgccgaagccccccaggcaggtatgcaggcacctcctcacgtctgggtgggacgtc

SEQ ID NO: 481698 - DNA, 122 bp, Homo sapiens
cctgggcaccatggcgaaactccatctctacgaaaaaataaaattagccaggcgtcgtggcgcgcgcctgtggtcctgctggggaggctgaggtgggaagatgtgagcctggggaggtagag

SEQ ID NO: 481699 - DNA, 122 bp, Homo sapiens
tgtggatgagaaggtgaagactggggaacggagtacagctagaataatcaacagcacatgcgccctgaaaaggcaggaggttataagatcctgagtcaggtaaaaagaggaaaaggtggata

SEQ ID NO: 481700 - DNA, 122 bp, Homo sapiens
atatcatctcaccccagtgcaaatagcttatatccaaacacaggcaataacaagtgctgacgaggatgtagagaaaagggaatctttgtacactgttggtggaaatgtacagtagcacaacc

SEQ ID NO: 481701 - DNA, 122 bp, Homo sapiens
gaaccagggcccttggcgagagttggggtgggaatcgcgtaagaaaagcaatttctagagcggaaaggtgaccccacattacaaaaagaaatggagtagaaaaataggcttgactattctaa

SEQ ID NO: 481702 - DNA, 122 bp, Homo sapiens
tttgatgtgttccattggtgcagaaccatcagtctgcactagcagctttgcaggaataaacggtttcccaaggaggggaggtttaacgtgttgttcctcttgctaccaccatcattgctgtt

SEQ ID NO: 481703 - DNA, 122 bp, Homo sapiens
gacgccagtatttatattagggggcgtggcctggtgacatcacagctggccgggcagccgcgcgagcggggcggaacccggttgcagcccggagaaaagggagggggacggaagaggaagga

SEQ ID NO: 481704 - DNA, 122 bp, Homo sapiens
ccgctctggctcgccaggttcatggctgggcgcgtggcgagtgggcccggccagggagggcgcgcgtgcgagggcgggtcaggctgcactcagggtctcggtcgccgccactcgccaccctg

SEQ ID NO: 481705 - DNA, 122 bp, Homo sapiens
ttgccttgggctgcccatccccattcttgtactggaccaggaagtggtcaaactgtccctcgggaaccgtccaggacaggctgagggagtcaggggtcgcatctgtcacggtcagctcctcc

SEQ ID NO: 481706 - DNA, 122 bp, Homo sapiens
cagcaggaggatgacagcttagaaagaagagggcaatggggcttcctcccagaggcggtgcggcacagaggagcgctcgcttcacaaggtgaccctagctcccaccgccaccgccgcggtcg

SEQ ID NO: 481707 - DNA, 122 bp, Homo sapiens
cgtgctttaatgggtgtgtagctcacgcccaactgatggcacgtggtgggcttctgtagacgttcgtaagaccgaatgggttcttggagtctgattcacttaacataatttattcaatagtc

SEQ ID NO: 481708 - DNA, 122 bp, Homo sapiens
caacgctgattttgcgtattcctttaatgccgaccttcgcaggattctgttcgcatagcccggtggagttctccagccccgcgtaggccctcctgaaatttacccagagtgggcgcggccat

SEQ ID NO: 481709 - DNA, 122 bp, Homo sapiens
cctcccgccagggcctcggtccagacccacccgtcctcatcttaggcagggcttattggccgtgcgattactttggggcctgggatgaactcagctggacgcctcagcttgccgcctgtttt

SEQ ID NO: 481710 - DNA, 122 bp, Homo sapiens
ttccaactccacaaggctcaactattgccccaatatcccacagtgggctccctgtcgtggcgatgaagccttgctttgcctcactactggcttaggaaggggatgaagttctgctgtctcac

SEQ ID NO: 481711 - DNA, 122 bp, Homo sapiens
tctttcccctttgggagctataggacctctgccttcccaaaagcactcacatttagagggcggtcaggaaaggagcaggggatgagctgctgccatgcagatggtgtttctggtcttctggc

SEQ ID NO: 481712 - DNA, 122 bp, Homo sapiens
aatcctaatctccacattttttgccaggcgagaaccgaagtttggaggtagacgagcaggcgagcggtttgcccgggcgcagagcatgaaggccgggcgggcgcggggagcggcgccccggc

SEQ ID NO: 481713 - DNA, 122 bp, Homo sapiens
aaacacctgtcctgccttggctccgcgagatttggggcgaaagcttaggcaacaggggcacgttctcgcgaggtttaggaaatttcccacggccgtgttgtgtctgagccgagtagtggaag

SEQ ID NO: 481714 - DNA, 122 bp, Homo sapiens
atgaaaatggttgcttatttctttaggtggcgctgggtcagtgaatgcacaccaagggtgcgaggatgtcatcaccctgtattacccctccagatgatgcctccgccccagagacacaggca

SEQ ID NO: 481715 - DNA, 122 bp, Homo sapiens
aggagactcggtgagtgtgtagggaagccgggctggggctgggaaatgccggtgcctcaacggtttaacgttttctgcgtccccgggatttccgttcaagaagagcactggtctgagaaacg

SEQ ID NO: 481716 - DNA, 122 bp, Homo sapiens
aggcgtgatgggtaaacactcctggcgggagactacaggcgctgcagctacatcctgtttcgtactgggagcaggtgccgccccgcggaacacttacttgccccgccctgcggtggagcagg

SEQ ID NO: 481717 - DNA, 122 bp, Homo sapiens
gagctgagtttcccgccccaagccccaaccccaaaccctttggcccggtgcccacggccccggtgcaccaagccttgcccccgccgtcccctcgccaaagcctggggcccaccaggccccat

SEQ ID NO: 481718 - DNA, 122 bp, Homo sapiens
cctgcctacccgtcataatcacttcccaattccttgaaaacttcgggttcctcggccggccgccagcgccgggcggagaatcgccctccctcccactgcccagactggagctgcctgttccg

SEQ ID NO: 481719 - DNA, 122 bp, Homo sapiens
taattcagcgggccgagttgggcctgccccagatgaattcctctggagctgaccggcccgcgcagagagcaagtgatgtggacagctgccttcagcatcgcagcccccagctcagtgtgctc

SEQ ID NO: 481720 - DNA, 122 bp, Homo sapiens
tccttcagaggctgggctgtgaaggccacaagggaagcccactgtggctcttcacggccccgctccggccttgacaccccgggcagagatcagtcttctccactcagggttgggccgggtgc

SEQ ID NO: 481721 - DNA, 122 bp, Homo sapiens
cctgtgtggtcaggatcacagcgagtgagaagtgaagacaccagaggctttctctctggacgcctgcgcttcccgcccatcctccagctgaggtaccggtcctcacgctgctgtgttcagga

SEQ ID NO: 481722 - DNA, 122 bp, Homo sapiens
ataccactccattgccatcctgatatctcctttctttcttacagtttgtatggtttttcccgtattatttagcatgaaatcatacttggctttttatgcttctcattcttgtttctctgaat

SEQ ID NO: 481723 - DNA, 122 bp, Homo sapiens
tttctttctctctgttcctgagcaagctgacgcaggtctgcaggagtgaattaatgctcacgtcctgagagatgagctcctggggaaccggggcaaatgcgccaataggagccgaggaaggg

SEQ ID NO: 481724 - DNA, 122 bp, Homo sapiens
actccccgcatcgcagggacggtctccgcccacctgcggtgtggatcgtaatacccagggcggggagagggtggtgatattactccctgcatctcggggggtgtctcccccaccccctgcgg

SEQ ID NO: 481725 - DNA, 122 bp, Homo sapiens
taacctccagtctctcatttccttctagatactcatgagaggcatttccccctcagttcacgaatattaacaggtttccctgggttctgtattcataatctacaaccccactatgaatctgg

SEQ ID NO: 481726 - DNA, 122 bp, Homo sapiens
tctccgcccaggaggcaaagggcagcgggctcgaaactacaggacttggaaagtcttaggcggagactgcgggggtggggggtggtgaggaggggccttccagggagctgattggtcgacgc

SEQ ID NO: 481727 - DNA, 122 bp, Homo sapiens
aacacgatctcccccggggcaggggactgccctggaagattcccggcaccgcttcccatgcgccacgtgactaggagggtcttggggcaggatggtgtcttttgtgccttgtgtgctggggc

SEQ ID NO: 481728 - DNA, 122 bp, Homo sapiens
gcaagcaagatgacagtcatctccaaggaaagatgagcagccagccaggggcctcgactccggcaaagctagccagggctgctctaaagagccaggtgccagccctcccgcccaggtgtggg

SEQ ID NO: 481729 - DNA, 122 bp, Homo sapiens
aacttttaaaaggtccacttcttttcctcatctttgcagctctcactctcaatgagatcacgtataaattgagtcctccttccaaatctcttaccttagaaaggaaactgctattttgctgt

SEQ ID NO: 481730 - DNA, 122 bp, Homo sapiens
cgctgctccagctgctgctcctgctggggccgtggctggaggctgcgggcgttgcggagtcgccgctgcccgccgtggtccttgccatcctggcccgcaatgccgaacactcgctgccccac

SEQ ID NO: 481731 - DNA, 122 bp, Homo sapiens
gaagcagccttgctgtacacaaaggcactgcgcggccacagagaggtgagtggccctgagcgcactacgcacagttccctcagagacccaggaaccagcggctcttcgggagagacgggcgc

SEQ ID NO: 481732 - DNA, 122 bp, Homo sapiens
aaactgtcaatgacttcaagaaactctcttctttttcatgatctttatttatcctcgagacgcttggatccagtaagcgagtgacaatttcaagactgccagccatgcacctctgtatgttt

SEQ ID NO: 481733 - DNA, 122 bp, Homo sapiens
cttcgactctgagcagtgcagagaccccggaccacaacaaccgtgttcctcagactgatgcgaaactccaaagagcgggaaaacgactttagagggaccggaaaggggaagcgagtctccca

SEQ ID NO: 481734 - DNA, 122 bp, Homo sapiens
cgaggtcttccccaccaagagcgccagcggcaaccgcgtctcctgcatgtatgttcgctgcgtgcctggtgccagcttctacattggcctgggctcccgcctccactgcaacatcttctcct

SEQ ID NO: 481735 - DNA, 122 bp, Homo sapiens
ctcctgaaatggactccaccaagatgtaagaagattaagtccaaacctgaggtacagtgccgttttgccttctgatagaattggtggctattttttgctaggcagactgcttaactgaaaag

SEQ ID NO: 481736 - DNA, 122 bp, Homo sapiens
aagagaatatccagggccatctgcaaacacttgcttttagcatcatgagatatatttgtgcgggctcactaactccttgtaaatcaccatctttaaaataacttcaagaatcaagtggtaca

SEQ ID NO: 481737 - DNA, 122 bp, Homo sapiens
tgcagattgatcacttattcattagtaatttaccagagattgtggtggagttattgatgacgttacatgagccagcaaattctagtgccagtcagagcactgacctctgtgacttttcaggg

SEQ ID NO: 481738 - DNA, 122 bp, Homo sapiens
ggacctcggggcctgtaaagatcatgggaaggggcagctgtgccggcagctcctcctcctcggtgcagcaactcctctccgagtttatttcatgtcagcaaaaagatggaattcttgccagc

SEQ ID NO: 481739 - DNA, 122 bp, Homo sapiens
aaatcctgttgcatccctgcgccctaacggctcctctaacctcaacccagactccggctccgtctgtgttgcaacctggaaattgtcctcagttggctcatttttaattcagcaagcgtagg

SEQ ID NO: 481740 - DNA, 122 bp, Homo sapiens
gccttccccatccccaaagaggacacccctccttccgcccggcccgctccccacccccgccgcggcaccgcctccccagccgcccgcccttgcccagcgcctcccaggcagccagcgagcga

SEQ ID NO: 481741 - DNA, 122 bp, Homo sapiens
ggtggcagtggtactgtggcaaagtggagagcacaaggctcttcccaagtgagccaccaccgcttggtcctgcagactgatgccaggaaagaacaaaggcctctgtgtagccagagcctctg

SEQ ID NO: 481742 - DNA, 122 bp, Homo sapiens
gatgcctcctaactggagtgtaacatttgtctgtagttcttgtcatttgtagcctgaggccgtggagtccagattttgggttcagaagttactggaattcactatcccatcccattggtcag

SEQ ID NO: 481743 - DNA, 122 bp, Homo sapiens
cccgactgccctgccccttggggagggtagatggagggaggttcgactcagaagccccaacgttgaccaagatccagacacgaaaagagaaaagagttcccggctagcacggcgacgctttc

SEQ ID NO: 481744 - DNA, 122 bp, Homo sapiens
ctcttcccgccccgggaggctttcgcggagcagtttctgcgtgggagtgattacgccattcgcctggcggctcagtctagtgagtgtggtgcccttcagctttcttactgcatcgctttgga

SEQ ID NO: 481745 - DNA, 122 bp, Homo sapiens
atgtacattcaaatatatattccagcaacattgaggtaccactgcatagtggaaagagtgcggattctggggtcacaagacagaaattcaacctgtctaccatcctagctgtgtgacctcag

SEQ ID NO: 481746 - DNA, 122 bp, Homo sapiens
tgtatgtctcgctgtcaattctacatccaacgctggaatctttcagcccattttcctccccggctgtttttgaactactatccccaaatatcgaggatatctgacagagtgaaccatcagaa

SEQ ID NO: 481747 - DNA, 122 bp, Homo sapiens
tgagtcatggcctgagactggaatgtgagcgtgagaagatgagccaagagagatgcacagcgggtaactgctttgctaaactccagcctcaaagtacacgggatggagggtggaaagagtct

SEQ ID NO: 481748 - DNA, 122 bp, Homo sapiens
gtcgcagctcagcctccttgaatcaccctggccacttccttcctgtgtatatcttatgcacgctaagggacggggcgggtgcaacgtgtgtgtttttacttcttttaagttttgtctatgtt

SEQ ID NO: 481749 - DNA, 122 bp, Homo sapiens
gtttgacaaacagcgcctcctggggtggggagagtggagtgccgctgcgcagccgggagccgggagcagaacagcctgggctcccacccaccccggggcaggtgtccgccccgggtcctgcc

SEQ ID NO: 481750 - DNA, 122 bp, Homo sapiens
ccaagtcccacactttcatggagcccacttgtttaccgatcttttgttagttgcttcatgcgtgcaagtgtattatgctaccaataacttgttttatctgagaacagggactatgtctacta

SEQ ID NO: 481751 - DNA, 122 bp, Homo sapiens
gctgtggcccagtcctggctccttgatagggagacctgcgactcctgcttcagtcatcgccgtctgttgctctggatctcacactgtctgggaagtctccttacggtagtgagaattcctgt

SEQ ID NO: 481752 - DNA, 122 bp, Homo sapiens
tggccgagtgagtgtgagtgtgagcgtgcgggtgggaagccgagcaggtgtgtgcgcgcccggcgcggcccgcgcgctgttaaccccttaccttccagcagcacttccttgcccgcgcgctt

SEQ ID NO: 481753 - DNA, 122 bp, Homo sapiens
tgctgttgtcaaggtggctgattggccggcgcgggatgcggggacgtttccttgggcccccggcgggcgcagccctcagcccacactgcggagccaggcggcagcatggaccgggctggggc

SEQ ID NO: 481754 - DNA, 122 bp, Homo sapiens
atcccaaaataggtggattatatccaaatccaagcagtatccatcatctggcaggggacacgctggtgctttgtagaatacagatctctggttcctaagaaaagcctaaaatcattgccata

SEQ ID NO: 481755 - DNA, 122 bp, Homo sapiens
ggagaggccaggttgcagtacaagtggaagagataaagatgctgaatttcctgtggatggcggaacatcactgactgactctgcatcaccattaaaactttcagtcaaggaagctggcaaga

SEQ ID NO: 481756 - DNA, 122 bp, Homo sapiens
ctcggctggctcggcatgcttgctggtgccgtggtcataatcgtgcgagcgccgcgttgtcgcgagctaccggcgcagaagtggtggcacacgggcgccctctaccgcatcggcgaccttca

SEQ ID NO: 481757 - DNA, 122 bp, Homo sapiens
gggtacggcgcgtagagatgacgtcgggttctacgcgcagtggtgacgtcacgggagcgccggcggctgagaatccgcgttgttccgtgttgggggcggcatggagcgggagccgggcgccg

SEQ ID NO: 481758 - DNA, 122 bp, Homo sapiens
ccacctcagatctgtagaatctgaacctgcgttttaaaaagatgcccaggtgagtctgggcgtggtggctcactcctgtaatcccagcactttgggaggccaaggcaggtagatcatctgaa

SEQ ID NO: 481759 - DNA, 122 bp, Homo sapiens
taccaaaatattgctgtacacagctacgtttatggattctttatccatccttggctggaccgctaatgaaatacccacatgccattctcaggcagtgaagatttgagagaaagagctctatt

SEQ ID NO: 481760 - DNA, 122 bp, Homo sapiens
agaacttcttctaaaaactcctgacctctttccatactccatacacctcacacctttccccggagatgcaatgagttgtctgattagtgaatgaagccatttgtctgaattttataaaaaca

SEQ ID NO: 481761 - DNA, 122 bp, Homo sapiens
ggaagatgagggtttctggaaatctgagggaacgacaaagactaccttacctgggaagatcggcaggagttcccatgggggctcagaggggctgacatccatccccacgtccagggagctgc

SEQ ID NO: 481762 - DNA, 122 bp, Homo sapiens
ctctcgcatggggtcgccattcttcctactttgtgctcaaggcgcaggatctggagttctcggtttccaagcaagactggtcgagtctaggtcggattggctgcgatagaacgaggggcagg

SEQ ID NO: 481763 - DNA, 122 bp, Homo sapiens
aaatgctcgggaggacgcgctctccttgctttctttcgcttccccgacttgttactccaccgtgctcagctgcaatccctgcacctggaatgacctgcattagctcagagataaaggagctc

SEQ ID NO: 481764 - DNA, 122 bp, Homo sapiens
cagcgagactccgcgggcgtaggaccctccgagccaggtgcggcagataatctcctagtgcgccgttttttaagcccgtcagaaaagcgcagtattcgggtgggagtgacctgattttccag

SEQ ID NO: 481765 - DNA, 122 bp, Homo sapiens
agacaccaccatgtcgccaaggccccaggactatccgtctctggctttgctttactcttccgctattgcttagttatgggaccagaagctaggtgaacgacagagcccccacggtcaaattc

SEQ ID NO: 481766 - DNA, 122 bp, Homo sapiens
ctcagggacccttggtgacccacaggccgagacctgagaaccactgcctgaatgctggagcgggcacacaggtgacctgagcgagcctcgtctgtccttgcccggtacccagagctggctca

SEQ ID NO: 481767 - DNA, 122 bp, Homo sapiens
acgcggtctcttcagtttccatttttccacttgtaacggctgttacagccgctgtttcatcgcgtcgtcataggagttgaacaaagctgtgtgtgtgtttccagaatgttggcacagcggcg

SEQ ID NO: 481768 - DNA, 122 bp, Homo sapiens
gcgagcctagaagttaacaacggaggacggccggcgtggtctccggggactcctagcgggcgcagaggcgtctagagatcgcccacgtgagggcgcgggcggcggagcgggcgtgtgtgggg

SEQ ID NO: 481769 - DNA, 122 bp, Homo sapiens
tcagctggtccggagtatccctgctggctctcagccctaaagtggcgtgagggctgggcacgtcgacagcacttgatccgctccttccctctggaaatgcatttccttccattaccagaaca

SEQ ID NO: 481770 - DNA, 122 bp, Homo sapiens
agagagccggaagtctctcccattaaaatagctgtcccttctgtctgtctctttccctctcgcctgtctcgatcgctgcctctatccctccctcggtttctatcgctccatccatctcgtcc

SEQ ID NO: 481771 - DNA, 122 bp, Homo sapiens
ttcagtcttatttgtaggaatgagaaataggagacaaatgaattgtgataagtagattaacggttaaatgaatcatggcacattcaaactgaggaattttgtagccacctgaagcttgtagt

SEQ ID NO: 481772 - DNA, 122 bp, Homo sapiens
ttacacccggcgccagaagggggtgggagcagggggaggggacgggggcttggggggagacgaagaagaggtaaccgttgaaagctcgtctccccaagggtgaaaggaagcctccctcgggt

SEQ ID NO: 481773 - DNA, 122 bp, Homo sapiens
aacggaggcccgaggctgctgggctggggaagctgatgctcagcttaagctgggaccccacgtggagccagtgaggggcaggctgaacccccgccatgggagaggcccaggggacagagaca

SEQ ID NO: 481774 - DNA, 122 bp, Homo sapiens
gtgtatttttagtatatgctttgctttattttagttctttttcagtgtcaggtgctcattcgtggtgtaaataacaattctgtgttaggcaggttttcctatttgatcacgtgtgtgggttg

SEQ ID NO: 481775 - DNA, 122 bp, Homo sapiens
ctcgctgaggatgaggcccggggtgggggaccgtctccagcagcgtaagtggggccgcagcgtgtggggcacagcatgtccacagtgtcactcctgcaaacgctgccaggttgtcagtatag

SEQ ID NO: 481776 - DNA, 122 bp, Homo sapiens
ttccctttgcgctggtggaagacacaagccagcagcccttcggaggggcctccccgcacgcgcctcttgggatcctgacttgcttaggaagaggagggcacggggagcctcctgctctgcag

SEQ ID NO: 481777 - DNA, 122 bp, Homo sapiens
ggactgggtttggagtaggacctgcggcgtgctcgagactccgacttcggtcttgcggcgcgctcgcgcccgcgggccatgccccactgactctaagtgggcactgccccggctccgggagg

SEQ ID NO: 481778 - DNA, 122 bp, Homo sapiens
ccccacctgtctgcctgtgttgggactcgcctgcccagggaagcggcagtgccaggccctcggtgcacactcctgcctccctctcttcctcccagcaacgccgccccatccccaccaggctc

SEQ ID NO: 481779 - DNA, 122 bp, Homo sapiens
gattcactttaactcactgcatggcacctggagagtgtgtccatgtgtgcccatgtcccccgaagcaatgggtaaaactcagagctccagaatctctgtgtcatctctgggggagtcttgtg

SEQ ID NO: 481780 - DNA, 122 bp, Homo sapiens
ttctacagaaaatagaaataaatggtttccatttcccactgggaaaaatgcttggttaaccgtagatggttgcacttccataaaaagcaccaaactatctttaaccatggatctttttcata

SEQ ID NO: 481781 - DNA, 122 bp, Homo sapiens
gacacctcgtgtctaagtctccaccagttactgaccgagcgacctcagcagtacgttcaccgctccgggtgtccctgtcccctgtggatggcatcattgcctcccttatggagatgagaaga

SEQ ID NO: 481782 - DNA, 122 bp, Homo sapiens
tagtttgagggaggcctgagcaacctgcagacagcgaaggtggatacagtcgcctgtgctcggattctattggcccacagagtcggtattcttcgcgggcgaatcccagaatgcaccgctct

SEQ ID NO: 481783 - DNA, 122 bp, Homo sapiens
ctccccacatctcagacgatgggcggcctggcagagacgcccctcacttcctagatgggacggcggccgggcagagacgctcctcaccttccagactgggcagccaggcagagaggctcctc

SEQ ID NO: 481784 - DNA, 122 bp, Homo sapiens
tgggaggtctgaacccagggcaagcatccgaggcagccaaacaagggcgggctttgtgcgcgggcgacggcaggactgcgagtcccccgcacccctcccggcccagatcccagcccctgccc

SEQ ID NO: 481785 - DNA, 122 bp, Homo sapiens
ggaaaaaactccaaactcggggctcgcgactccccaggatctgacagtctggttaatgtccgtcattggaaacgaccactgaccggcgccaccttttactccgcggaaacagcctgccattc

SEQ ID NO: 481786 - DNA, 122 bp, Homo sapiens
atagcaacaaggagatggtggtaagaggggaacgcctttttcatatgaataggtccaactcgtggctttgctgatgtgatattgtgatataataagaaatactccagcctggtcagcatggt

SEQ ID NO: 481787 - DNA, 122 bp, Homo sapiens
atatctgccactcacttgggaagtcctagtctggaaacattttagcaaatacgtaaccatcgttccattgtggcccacacatttgcctgacctgacattcttccccaaaactcttatatttg

SEQ ID NO: 481788 - DNA, 122 bp, Homo sapiens
aaggggccctggcagcgcccggcaggacagccgtccactgcacacctcagagccggcacccgggacggtcagcgtccccatgggcccggcaccagcagctgcccagatcctcacccgcacac

SEQ ID NO: 481789 - DNA, 122 bp, Homo sapiens
tagattttttattcacaccactctgcatcctcatgggtaagtgaggctgtcggcatgtcccgtgacttaattatgtggtggccctgctggaggtgtgcttgcttaccgtaaacagacgcaaa

SEQ ID NO: 481790 - DNA, 122 bp, Homo sapiens
acagtacagactgaaaatagatttcatggatctagcaagcactgcaggactgtcactcaacgaagaggaaatatggttactacatacactgactgttcaggacagtagttcttattctattc

SEQ ID NO: 481791 - DNA, 122 bp, Homo sapiens
cacgtggtgcaggccagtgagcccgggctcttcagcctggggctgcgaacaggcgaggtgcgcatggtgcgtgctttgggtgacaaggactcggtccgccagcgcctgctagtcgctgtaag

SEQ ID NO: 481792 - DNA, 122 bp, Homo sapiens
aatatttgcacagagaaaagatcaaggccggccgatccccctttctcccctacgggttttcggttgataatttatactggcccctcaactccggggaactttgctccagggcactgggccag

SEQ ID NO: 481793 - DNA, 122 bp, Homo sapiens
agtttgagatcagcctgggccatatagcgagatggtctctaccaaaaaatttaggctaggcgcagtggctcatgcctgtaatcccagcactttgggaggctgaggtaggcagattacttgag

SEQ ID NO: 481794 - DNA, 122 bp, Homo sapiens
ctcggccgcccccaccaattgatccatgatcggcttggccagggcgcccggcagcgagagcgccgccgcgccgttgggaggcagcgtcagcgcggggaagaacggcggctggtgacccagca

SEQ ID NO: 481795 - DNA, 122 bp, Homo sapiens
cctttctgtttctgaattctgtgtcttctacctttctttcattcaaatataaatacaagacgaaatatggaatttgggttactttctccttcattaagttagagaagagaggtttgttccca

SEQ ID NO: 481796 - DNA, 122 bp, Homo sapiens
cctcagatgaggacgaggacagcgacctcgaggagtttgtgcggagccacgggctgggctcgcacaagtacacgctggatgtggagctctgctcaggtaactgccttcgcggggtctctgtg

SEQ ID NO: 481797 - DNA, 122 bp, Homo sapiens
attttattgcacaaattaagctgtcatccacgggattagaaaagagggcattcaggcattcggcaactcctgaagaccaacctgaagaatatctgcccttgtaacctgtccatttgttcctc

SEQ ID NO: 481798 - DNA, 122 bp, Homo sapiens
ggcacgcaaggaagatcagctttgttcctgttcttacgttcactgcccatgtgaagagcacgtcaggtgccatcacctgcaagctcgccgtggcgcagtgaacgctgcctggggttccagat

SEQ ID NO: 481799 - DNA, 122 bp, Homo sapiens
gcggcgaggcccagcaccaaagacggtgcagaggagaaaagtcgagctattctgggtccccgtggggcatgtcaggggattcatattgcatgcccaatgtgacaggcggagggcatattttc

SEQ ID NO: 481800 - DNA, 122 bp, Homo sapiens
caactccagttttgtgccctaagcctcatttctcatgttcagacctcacatcttctaagccgccctgtgtctctgaccccttctcatttgcctagtatctctgcccctgcctccctaattag

SEQ ID NO: 481801 - DNA, 122 bp, Homo sapiens
agcaggatgcatctttgaggtccccaaaccaagccacctgcacggacccaatatctctggcgcgtcccgaacgccgtggattggcgtctgccgccccctgccggcggcgcgctgcactgcag

SEQ ID NO: 481802 - DNA, 122 bp, Homo sapiens
gtgctcacacagacacacgtctgtgatgtggccgatctgcctctggagctcatggaaagccgggtgcctggagcgggtctgaggctcctggctctgggagtctggatggactttaaactctt

SEQ ID NO: 481803 - DNA, 122 bp, Homo sapiens
ccctcttctgaaatagccaaaagcaccatcacaaggactgcagccaccaagttcacagggcgcatgtgcctcctgctgtgtgatcaaggactccttgtagttgttgttgcagtcataggcat

SEQ ID NO: 481804 - DNA, 122 bp, Homo sapiens
ttcactcaagtcctctgctcagaggaagccctgctctactgaaagccacaaggccattctcggtggcctgggacagcagcccaagacgtgggcttctaactgcctccgaaggggccacagca

SEQ ID NO: 481805 - DNA, 122 bp, Homo sapiens
ctgagttttgggggaacagaggtttatggtcacttagcattgccattcgcttgccagacacggactacttgaagtggctgttccccacctccatgcggtctaacctctatcggatctgctat

SEQ ID NO: 481806 - DNA, 122 bp, Homo sapiens
ctgccgaagtgccaggttgaatgagccgtggatgccttcccgcccgtgtctcctgcccagcgtttcacacgactctgcttagcctagaaactgccccaggaccttgtcctccaccagcttct

SEQ ID NO: 481807 - DNA, 122 bp, Homo sapiens
cggggctgtgcgaggggtggggctgcgggaggccctggagcgcggcggtgatggcggggccggtgaaggaccgcgaggccttccagaggctcaacttcctgtaccaggtgagtctgcgacaa

SEQ ID NO: 481808 - DNA, 122 bp, Homo sapiens
gaggataaacaaaaagggctatgaaataccaggaggctagcaacaatgggaagctgcttccggttctacagctaaatagggaggcctgcaggatctgtgacctcaagtagaacgttttagcc

SEQ ID NO: 481809 - DNA, 122 bp, Homo sapiens
ggcagataccgggacacggtgctgctgccgcagacgagcttccccatgaagctgctgggccgccagcagccggacacggagctggagatccagcaggtacgggccccgcctcggcgcggggc

SEQ ID NO: 481810 - DNA, 122 bp, Homo sapiens
tcatgtgacttggaaaaaaaccttcacctgctgcctggtggagaaactcttctctgggggcgtgaggcgagaggcggcagcaagggtgggggagaggttcatttttcattgccagggattaa

SEQ ID NO: 481811 - DNA, 122 bp, Homo sapiens
gagcagaccttggagagccagagccaagtctgacctacagctgggtgggacagaaaatttcgctaccctgccttctacccgcccgagggcgcaggctctttccggggtgctgtggcggctgc

SEQ ID NO: 481812 - DNA, 122 bp, Homo sapiens
tgcggcgtccacgcggtgagtgtgcagcgctttcattcaaactttctccagtctcggttccggcgtcagcaaggtgtgaccaatcagagcccagagacgggaataaattatgcaaatcacca

SEQ ID NO: 481813 - DNA, 122 bp, Homo sapiens
attatataattttactaataaagcagatttgaaaagaaacaaaagatccattcacaaatacgtatgcaaagatattttattcagggagtgaaagaaaagtgacaattgcacaggtgttagaa

SEQ ID NO: 481814 - DNA, 122 bp, Homo sapiens
agcttccctgttgcctctgcatttcctttcagtgaagcatttaaagtctctgcggtgagacggcttgctcacaccccacttagctcttttctgatacttggcttgggagtttatggttcttg

SEQ ID NO: 481815 - DNA, 122 bp, Homo sapiens
tgcagtttggaccgatagatgtgagtccccctctggggggcactcactttgtggagcccccggttcctgtttgcagaggggggcacagtggcacctcgtccgctgtggagtgagaacaggga

SEQ ID NO: 481816 - DNA, 122 bp, Homo sapiens
tccggagccgccggggtccgggcatgcgcagagaaccacgggcacaggggcagctccccgcggacgccaaagtcaacaaggccgggagacgcccccatctggccccgcccccctcagggctc

SEQ ID NO: 481817 - DNA, 122 bp, Homo sapiens
actaagagaacatttgcaagaagaatacaaagaactcccggatctcctttacccagcttccgcaattgtttatactttaccacatttgccccatgtctcattccttgtaaatatatacaaca

SEQ ID NO: 481818 - DNA, 122 bp, Homo sapiens
actggttccccagcctggaatctaagctgagcctgcagcctttgagctgggaggagcttgcggctgcctggctgccccgctgccccgcttcattcgctgaattcagaagcgcctgtggcgag

SEQ ID NO: 481819 - DNA, 122 bp, Homo sapiens
atgcggttaggcggcacccaggggcagcatctcagtctgagtccgtgtgcgtggctcttccgctcagacgccaagcactccccaggggacgcttcctggcccaaaactgggggccctttagc

SEQ ID NO: 481820 - DNA, 122 bp, Homo sapiens
ccgcagcgctccctggcggccgtcctggtcccggcgctccccgcgcaaacggaccccggccgcagcgccctccgccccaccctggcggccccagcagcccctgcacccccgaactcgcgcgc

SEQ ID NO: 481821 - DNA, 122 bp, Homo sapiens
cgtacccaagggcagggttctttccagacttgtctcttccccctgctacagccaaggccacgataaacagagtagggaagaggacacagaccaaatgggattctgggtgagacgaagatgat

SEQ ID NO: 481822 - DNA, 122 bp, Homo sapiens
tgtggttttggaggtacccattttggagtgcgatgagtactgtggggtccacggtgagcacgtactgcgcagtgggtgtaatgtggagttcatagtagcctgcagcttgggagaggggtctg

SEQ ID NO: 481823 - DNA, 122 bp, Homo sapiens
gggcctcagctgccacccagattacgggcttttccccccaggagggtctgactttggagccggtgaccttgggcaggtcacctcaccccctgttaaatgggctccaggtcctcaggggcccc

SEQ ID NO: 481824 - DNA, 122 bp, Homo sapiens
cctgagatgcgatccgaaggcacctgctgcagacgcacgaggggggcggggacacatacacgcacacacagccccccaccccagacctccggcatgggcaggtcccccccccaagtccccct

SEQ ID NO: 481825 - DNA, 122 bp, Homo sapiens
ccaatgatgtttccctaatcacagcagctcctcatttagaatgtgttcttatttaggatgcgttcgagtctctgtgatctgaactccacatgaggactccctgggtccctcaggaacccatg

SEQ ID NO: 481826 - DNA, 122 bp, Homo sapiens
ccagcagcaacatagttactttctcttttgctacactgtaaatgtaaggttctgagggggcggactcgccgccgaccgacggcgggttgggccaataagaatccggagaaagccgaccgcta

SEQ ID NO: 481827 - DNA, 122 bp, Homo sapiens
cgtgatccgcccgtctcggcctcccaaagtgctgggattacaggcatgagccactgcgcccggccgaatctttgtgaaattgaactgaatatctgggtgccatcacaaggcacgtatctagc

SEQ ID NO: 481828 - DNA, 122 bp, Homo sapiens
gaaaaatactaaaattacctagtacataaggaggtgctcagatgaacccactggatttttcggtacccactttatagaggaacagaacatcagtacattcctactacgcatgcaatcagcct

SEQ ID NO: 481829 - DNA, 122 bp, Homo sapiens
gattttaaaatcgtatgacgtcgggtacaagagctccgagcggctgcaccattggttcatcgcagcagcagcagctgtctagtcccaaagcgcccaccaggcgcttctaagaccaggagagt

SEQ ID NO: 481830 - DNA, 122 bp, Homo sapiens
cgaaggtggggccgcagcggcacggggcggggtctggggcccgccctcccgacacgtggccggggaccgggtatataaggcccttcggggccggccaccctttcactacttctcccccggac

SEQ ID NO: 481831 - DNA, 122 bp, Homo sapiens
atgatggtctgcgggaggggtggagtcaactcacccacaggctctgctggctctcagaggcggccacccagcacttcctcagaggagtccccagtcccaacctcactcccagaaacctgacc

SEQ ID NO: 481832 - DNA, 122 bp, Homo sapiens
ttggactagtgaggctccctacacacctcctgaactagagcaaaagctctgtgcacacaccgtgcatgtgtgagcctgtgaggagacggtgccttcctgcaggctgttctgaaggggtgttc

SEQ ID NO: 481833 - DNA, 122 bp, Homo sapiens
ggctgtatctcgtgggtggcgagggaacattgcctgtctcggaaacagttcccaagacaacgcgcatcccagacgcccggcgaggctgccttcctacaggtcttttacttcagcaggttttc

SEQ ID NO: 481834 - DNA, 122 bp, Homo sapiens
ggggggcgggacgggcagcctggcgatgcctggacatggttggtggccaaaaacatttatcgaaagatagcatacccacttagatggcgaggacatcgacaagcaagtcttcgcccgtaagc

SEQ ID NO: 481835 - DNA, 122 bp, Homo sapiens
gcaggagatgcctcccccgcgggtgttcaagagctttctgagtacgggccaggccagctgcgatcccctctgaccctcgggttcccctctccgaactccagttctctctgagcccccggccc

SEQ ID NO: 481836 - DNA, 122 bp, Homo sapiens
tgaggagtagtcactcaggtaagggcatctgtgtccgcatgtgccctgccccttggcatacgtggcaggaggacacttctctgctggggagtggtgggatgtggcctggacacatctgccac

SEQ ID NO: 481837 - DNA, 122 bp, Homo sapiens
gtcggttccatcacttcaaacatcatgtagtattgaatattctggacgaagttgagcattcgctgccgcagagtgaaagccccagcaaacctgagtgacacggaggacggaggacagccatg

SEQ ID NO: 481838 - DNA, 122 bp, Homo sapiens
ttttaatggaaacgatggcctccgagtccctttgtgactcctgtatgaacatgtccaccacggctagcacgtgtctcaagatgctgatgttcggcagctccttgttgcctgctcgtatctgt

SEQ ID NO: 481839 - DNA, 122 bp, Homo sapiens
gtgttgggattacaggtggagccattgttcctggaaggagtaattttttttattgttgttcgtatgttttggaaatttccttgaggttcaagtaattttgggagatcatctggatctttcct

SEQ ID NO: 481840 - DNA, 122 bp, Homo sapiens
ctgtttgatgttgggatgtgaggatgctgcaggtggatgtctgcacattgatggtgagaacgtggtcaccctggccctgctgggtctttgctaaagagactgtactctgttcttggggccgt

SEQ ID NO: 481841 - DNA, 122 bp, Homo sapiens
atctgtctttctgctgttttaaacccttgtttaaggctcaggctgttcagagacgtaatccggggcttgagcaaagagtgaaaagttgagattccttctctggacttcctgcaccgattttt

SEQ ID NO: 481842 - DNA, 122 bp, Homo sapiens
gacccaagggaatcaacgtactgaacacaaagaaatgtgttaagagtccagcaaggtcatcgtattcaaaatcaaatacaaaaataagtaatggtcctttatatgagcattgtctatgcaat

SEQ ID NO: 481843 - DNA, 122 bp, Homo sapiens
tgcagtcactgatctttttactgtttctatggtttggccttttccagaatgtcatatagtcggaatcgtatagtctgttgccttttcaggctggcttccttcacaaaacaatatgcctctta

SEQ ID NO: 481844 - DNA, 122 bp, Homo sapiens
gaacaatgcgagtgagcaacttcaggaagtcattgtgaaagaaagctgggaagagctccgcggccaagttagcaggacactctaacaagtgactgcgcggcccgcgcccggggcggtgactg

SEQ ID NO: 481845 - DNA, 122 bp, Homo sapiens
caggctggagcaggagccccccggttaacagaacctgtctgtgcttctccgatcacgtgccgtgccatcagctacatctcaaagcagttttcaaaggtagcgccgcgctgcgtcaccttaaa

SEQ ID NO: 481846 - DNA, 122 bp, Homo sapiens
cagttccgcagtttgaccgcaggggacggaatctgcggcggcctggaaaactggcgggggcgcgaggcgccgctctctcttgggtcagattctcagctcccagctccccgctcccggctccc

SEQ ID NO: 481847 - DNA, 122 bp, Homo sapiens
tgacctcgtgatctgcccacctcagcctcccaaaatgctgggattactggtgtgagccatcgcacctggcctatttgttcaatccaaaaacactcgtatggtggtaacatatacataacata

SEQ ID NO: 481848 - DNA, 122 bp, Homo sapiens
gaggacgatccgaccagcgaagccaacagggcagctggtagctctgctgagctcccgggccgcgaaagactgaaacgcctacccggcccagcaggggggttgggggcggggtctcggctggc

SEQ ID NO: 481849 - DNA, 122 bp, Homo sapiens
atggtatcagggacacctcggcagaactgaggctttgggtacggcttgttcttacaataccggtaacaacggacggggcggcggcccatggcgataccaggatcttcagcggcgcgcttaag

SEQ ID NO: 481850 - DNA, 122 bp, Homo sapiens
atacctgcaggttggaggggcttccccttctatcggaggacaggctctcttggagataatcggaagccagtggaataggaggttctgaatccctttgccgtaggcttgagggaaaatcagga

SEQ ID NO: 481851 - DNA, 122 bp, Homo sapiens
caggcaacctcccatcccacccccgaccctgccctgggcgagcccctccttctcccctgccggtgcacaggcctctgcctgctggggattactcgatcaaaaccttccttccctggctactt

SEQ ID NO: 481852 - DNA, 122 bp, Homo sapiens
gccattacatttttttgcttctatttgttagcacagatgagcctactctaacaaatacaacgaaacatatctatttctaaaccatctggagtctgaactctgtccttctggaatttggaata

SEQ ID NO: 481853 - DNA, 122 bp, Homo sapiens
ctctaacacatctccacggtgaccttcccttcccttggaagggggcgcttgtcttttcagcggtcttgcctccgaatcttggcttgtctaggattcttcctacagaagaagttcatataaaa

SEQ ID NO: 481854 - DNA, 122 bp, Homo sapiens
taggtgacccagggcccatgagctgtggagcttgctgtggcagccatctgggccagcccccgctatgacagaaacgggcactgaatttgacttgactgcagggctacagccgataggggtta

SEQ ID NO: 481855 - DNA, 122 bp, Homo sapiens
ggagccgaccttgcctgcgctacagcttccttattttcgtcgcctgttctcctgatcctgcgtgttctaaaaaccccttaggctttccatgggttcccagaccatggcggtggcgctgccca

SEQ ID NO: 481856 - DNA, 122 bp, Homo sapiens
aaaggacatataaaagtattagcacttaatatgtgcttaatgatgatcaccatctgttgacgcttgcttatggtatatattgaggttaggagtgccaatcatttagcccttctgtctccagg

SEQ ID NO: 481857 - DNA, 122 bp, Homo sapiens
tttcctttgcaaaccaactcttccccctctttaaactttcaattcgttacttagatttagcgtttgacgacccttttacgctcaaaaatataactgccagtgataggaagtctgtagtggga

SEQ ID NO: 481858 - DNA, 122 bp, Homo sapiens
gccagctccgggtttgttggagcacttttatatctctgctcccaccaggctgctagggagcgcctctgcctattgggcagcgcggcgtctctcgcggcgacggtgacgcgctctggctctga

SEQ ID NO: 481859 - DNA, 122 bp, Homo sapiens
tgttaggaacttctgtattaagcagcccattcagtagcctggcatttaagctaagttctacggaatcctgtatgctgatgcaattgtttttgagagagttaggtccagaatgttgcttagtt

SEQ ID NO: 481860 - DNA, 122 bp, Homo sapiens
gggcccctcttatttccccgagcacgatgttgtggctttgtttccaaggtataacacgaacgtttcaaacagacaaacacgggggtaccaggaaagagctaattctacaacaagcggacgtc

SEQ ID NO: 481861 - DNA, 122 bp, Homo sapiens
ccccaagtagctcttccgggtcactgcagtcttcacgggctccagactccgcccatggtccgtccttcaggccttgactccgcccacgcatcgacgtagaatttcccggccgggctccatga

SEQ ID NO: 481862 - DNA, 122 bp, Homo sapiens
ggcgtcccggcgtcccggcgctacgaggccaccggctgcgggtctgagcctgtcgctttccggctgcccgactttaactcacaccgaagcctggcgggagaacggatttctcaaggctcgga

SEQ ID NO: 481863 - DNA, 122 bp, Homo sapiens
gcgccgtgggtccgtcctgcaccactcctgtgtgctgtgggtccatcctggacacttctgcgtcccctgggcccctctatctccctgtcttatcgtctactttgccgggcatccgtgtagcc

SEQ ID NO: 481864 - DNA, 122 bp, Homo sapiens
tcctcgacatggactacctgccttgaagcatgatctatctagttccacttacctcctccccgacgcccccattctgactcttctccagagtggaggtctgagaagaaaaaaagaaatgccgc

SEQ ID NO: 481865 - DNA, 122 bp, Homo sapiens
tcaaatgttgaaaacgggcagatgggcaagtaatacactctcaagaaagcaagtgtctggcggtgatttcctaaattgcattttttattttatttcaaaacttcatgtaaatatgtttcctt

SEQ ID NO: 481866 - DNA, 122 bp, Homo sapiens
ttctccgtcagcctgcgggtcccggctggcggctgcttccggtaggagagcggtgtagagcgagcaggtctcagctcctcgtcatgtcatacggtcccttagacatgtaccggaacccgggg

SEQ ID NO: 481867 - DNA, 122 bp, Homo sapiens
atttatctccatgtagaaggatgacagggactgtgcgctagtgccagcctccgctgagagcgccaagacattacagcaagcgacggtaggagagcttgtaacgtgaagcaccaccacacctc

SEQ ID NO: 481868 - DNA, 122 bp, Homo sapiens
gccctcgcccggagcggcggcctgcgggggcacagagcggctcctggctcctcagaccgccgcagcccgtggctcctgccctgggtctacccagggctacaagggtcttttgcggtcgaccc

SEQ ID NO: 481869 - DNA, 122 bp, Homo sapiens
cccctgccctgcggggaggcagctgaggcctggcgagaattcaagcacggagcgggcgggcgggcagtgctgggggacccggcgtaccctccgcagctgctggcccaggtgctaagcccctc

SEQ ID NO: 481870 - DNA, 122 bp, Homo sapiens
ccaaaggcactcaaatgatgcaacccaagagtgtggaagaggctggcggatgggctgtcacgtctggctgatctgatgtcagagcagatcatgtggtgctctgtgggcagctgggactggcc

SEQ ID NO: 481871 - DNA, 122 bp, Homo sapiens
cctgactcggctggggggtggtggtgtctggagactgggcctacctgcaggggcatcctccggagttacgggccgggaaggaggggtcatttagggcgtgaggattccccgtagagagggat

SEQ ID NO: 481872 - DNA, 122 bp, Homo sapiens
caccctaacccctgccctggcttcctaaagcacagctccgatcacatctttctctggctccgaatccctcagagggccccaaggtgctcagcagggcaccctgacgaccaccaggattcagc

SEQ ID NO: 481873 - DNA, 122 bp, Homo sapiens
cgcggatgcggggcgggaagggtggagcggatcgggatggacgcggcgccaggcgagctgcgccctgggccaggaaggtttgctgctgagttccccaaattggattccttccacagccccga

SEQ ID NO: 481874 - DNA, 122 bp, Homo sapiens
tccagaggagcccagtgcggccctcgcctctacccgctgccctgcccggtgccctgccaccgacccacccttgctgttctgaaacccgggtcgtctttccacactgcgagcaggcactagac

SEQ ID NO: 481875 - DNA, 122 bp, Homo sapiens
aagacacacagtgtgcttacctttttaatgcattacctcagatactcatcacatccatcccgtgagggagacaatgttaccatacatattttaccaatgagaaaacaaaggcttagagaagt

SEQ ID NO: 481876 - DNA, 122 bp, Homo sapiens
aatctcactctgttgcctggcctcatctaggactcctgggatcaagcaacccttctgcctcgacctcttaaagtctaggattagaaggcatgagcctctgtgcctggcctttttacctaatt

SEQ ID NO: 481877 - DNA, 122 bp, Homo sapiens
cctccccctacctgggggccgcgcagcactttccctactcggcgctcacctcagccagcgcgctctgcgctccccccgcggtgctggccgccactcctcccgccctggcgcgccagctgccg

SEQ ID NO: 481878 - DNA, 122 bp, Homo sapiens
actgctcctccagccgcatgaggttcagcatgtccgagtagtttctgtccggcgtccttccggggaagtcctcttctggccggacatgctgacggatgttcatgttctgctgcggattcctc

SEQ ID NO: 481879 - DNA, 122 bp, Homo sapiens
taaggtgtgttttacctgaatgtaactggaggctatttcaaattagcagaggcataaaaacggaaaaaattacaatggataaggacacagtaggctttttgagtatccagttcaaatgaatg

SEQ ID NO: 481880 - DNA, 122 bp, Homo sapiens
gtgctgggaggaggggccataggaccctgggcgggagcagaggtacccagggctgcggggcgctcaggtgaggccgggagatcttcctacgggaggctgagacgggagctggctttgccctc

SEQ ID NO: 481881 - DNA, 122 bp, Homo sapiens
gaggacctggtcatctttagcgagacctcactggatggctggctgcagggccagaacagccgtggggagacagggctctttcctgcctcttatgtggagatcgtccgttctggcatcagcac

SEQ ID NO: 481882 - DNA, 122 bp, Homo sapiens
tcagtaaaaagcagcctcccttctaggtcagggaaccatgccattgagactagtaacgggcgttctgggcacagtcccactgtgcacaggtttgagaggacaagttcatcagaaggaaggca

SEQ ID NO: 481883 - DNA, 122 bp, Homo sapiens
cacatagatagaatagctctccttgcggctgcgcttacgcttcttaccatccttcttctgcgccttagtgatagccttcttagaaccctttttaggggctggagcagacttagagggttcag

SEQ ID NO: 481884 - DNA, 122 bp, Homo sapiens
tgggccgcaggaggtggaagtaagccagtatggggggtacccctcctgactgctgttgcccgtattcccccagaccccagagagccccacggtttgttctgcagtccattccctattcccca

SEQ ID NO: 481885 - DNA, 122 bp, Homo sapiens
agggcaagggtggaccaggcaaagggaacagaggactgggacctggaggtgggcgggaggcgtttggttcattggaggaaaggaatagccctgtgtgtgatgagcattgagaggaggtctgg

SEQ ID NO: 481886 - DNA, 122 bp, Homo sapiens
gaaaatagggaattacagagaccttagcacagtgtgttaactctgactttgctaccacagcggtgctgagttttgtattactgcagtaatttttagctataggatgtggcaaagtgctgaga

SEQ ID NO: 481887 - DNA, 122 bp, Homo sapiens
gcctgtctgccggtccccgttatagccctgtgtgcctgctgttatctggagaccttggggcgataatcccttccctgggagtgggcaagatgtgtcggtgcagggctggccaggaagcctgg

SEQ ID NO: 481888 - DNA, 122 bp, Homo sapiens
agccagggccagaatagaaacaagatacagagcaggaaatgagcttggcgttctgggaatcggacttggtgaaacacagactgggtgaataatggaagacaaaacaagaaaggaaggctgac

SEQ ID NO: 481889 - DNA, 122 bp, Homo sapiens
gcaggccgcgtgcaggtgaggcggggggcgtgctcccccctcggggccctggttgccgggcgctaaagcaaacgggctctatttgcccagtctgcgatgacaatgctgtcgccaaatatttg

SEQ ID NO: 481890 - DNA, 122 bp, Homo sapiens
gaaggccttaaaaaatagcactgtagtaaatagagcttagttggggtaaacagagcaccccggaaagtagtatattttggtgattcaaaatttatttcacttctctgatctgtgtaagtatt

SEQ ID NO: 481891 - DNA, 122 bp, Homo sapiens
cctgaccctcagtctggcccggtctggcctcccagcagggtcacgcaactgccccggggacgatgaaaggaggataaatggtgcccaaggtggacagcggtgccttcctgctgctcttcctg

SEQ ID NO: 481892 - DNA, 122 bp, Homo sapiens
gaaagaaaaagaaagaaagtgagaaaagaaggaaagaggaaggaaaggaggaaaggagaacggtaaaatggaggaaggcaaacaaaaaaatagaaaggaggaaggaagcaaaaaggaaagga

SEQ ID NO: 481893 - DNA, 122 bp, Homo sapiens
tcaccttgaactctgcagagggcggctgccaagtttaaagtcagccactgccggtgtggacgctaaggaataattagggtctggcggctcatggtgcccctgcgtcaagtcaagaatgtttt

SEQ ID NO: 481894 - DNA, 122 bp, Homo sapiens
ccgtcctcagaagaatggtgtttcctcgcagcgcctctctcaggagcgatcgggaattggcgcatgcgcactacggtggtggtggcgacgaaggcgggggttgcacgttgcctgcctcgagc

SEQ ID NO: 481895 - DNA, 122 bp, Homo sapiens
ccgctccacgaactccctaagcgacccgggacagtgagcagtatgacccctgactgggggcgacctacccggggagtcgttgccacctccacacccaccccgacccgcgcctgcgcacttcc

SEQ ID NO: 481896 - DNA, 122 bp, Homo sapiens
tgggccctgccgctgcgcccacggccctcgtgggaggcccctccctaccccggccgccctcgggcccccacggtctactaccccatggggaccggcatgtcaagcccctgcgtgggcgcctg

SEQ ID NO: 481897 - DNA, 122 bp, Homo sapiens
atatctgggctgaggcaccactgttcttaaaaactatcctctcatgtattttacctctttcgaggttcagttccctggagaatcccctgtttaaaaccatacaacctaaaaaagagttcagg

SEQ ID NO: 481898 - DNA, 122 bp, Homo sapiens
gttgactacttgccctgctgatctgcctccctgactgctctactgctgtcctgaaaaatgcgaatttgacttaatcgccaattttttcattgaccttttatgtcacaaaacgagaggacaca

SEQ ID NO: 481899 - DNA, 122 bp, Homo sapiens
atcccgatccgagcctgcgagctgtggccgcacgccctgctgggacttgtagtccactcccgagtcccattcccgatccgcgcagactcacacggcctctatctgcccttcggtcttgctga

SEQ ID NO: 481900 - DNA, 122 bp, Homo sapiens
cgttcaaccaggctcaggaggtccttcaagatcttggcttccttttcctgactccgcgcccggcgcggttaattatagccccaccccgcgactacctgcttcgctcccacccgcgcgcccag

SEQ ID NO: 481901 - DNA, 122 bp, Homo sapiens
tccgccccagcacatcctggagctggaagccatgctgtatgatgccctgcagcaggaggccggggctaaggtggctgagctgctgtcagaggaggagcgcgagaagctcaaggtggccgtgg

SEQ ID NO: 481902 - DNA, 122 bp, Homo sapiens
aagcaccaaggtactcgatccaggggcggcgtgcagtggggaggtgagctttgggtcggccgtcgcccctcggctaccggcgggatccagaaaccgggagtcaccaccaataccgttctcaa

SEQ ID NO: 481903 - DNA, 122 bp, Homo sapiens
tcggcgttcgcggtccaggagaaaccaccgcggggtgttgggaacattttgttaaaaagccgggaagctcagggccggtgtggcctccgttctggcctgagaacccggactttgggcagctt

SEQ ID NO: 481904 - DNA, 122 bp, Homo sapiens
ggcagcacagccttgatgatgaacatgtctgtcccttctttcatttcttcttgaagtacccgaccttctctctttgacaagacagcatagactcgacctgtaaaaccataaatcttttaaaa

SEQ ID NO: 481905 - DNA, 122 bp, Homo sapiens
tatgctgaacttatatttgaaaagcatttgttagcatcctaacaatgctttgttagtttccgcttttgaattatgcaaatttcttctgtcataataaaccttaagaaggtgcttttcattac

SEQ ID NO: 481906 - DNA, 122 bp, Homo sapiens
cggtggggagctggggttggaaaggcttcttggagtggactcctgggtctgtctgggagacggggaggaagggacactctgaacatcaccaggggctgctggggggccctggccacccccag

SEQ ID NO: 481907 - DNA, 122 bp, Homo sapiens
accatgccaaacctggccgggacccgctcctgatcccttcacatccacggattcccccagcgccccccaccccagggaactcctgctaatcaaccaagctgaaacctggaaaaaatcaagcc

SEQ ID NO: 481908 - DNA, 122 bp, Homo sapiens
ctgcggtgctgctgatggtgccgctgacccccgggaagcggggattttaagggttacacccgagcccttggcatctgtgcatcccagggtgattgaggtttggagaggtctaggaatccccc

SEQ ID NO: 481909 - DNA, 122 bp, Homo sapiens
agacacctatggtccacttggctttatctcccacctctacctcccaataatgtctcccggcgatgaagcatggagagcccaagacacagggaaacagattgaacctctcggggttgtcaggc

SEQ ID NO: 481910 - DNA, 122 bp, Homo sapiens
ttgcaaatattaatccgttgtttttctggcgcccagcccggcccgccgcagtactgtactcgaggtacgttcctatgcaaccgagagccccggcaaatacttcatgagcttagcagcctggg

SEQ ID NO: 481911 - DNA, 122 bp, Homo sapiens
ctgcaccgtcccgtgcagtagacaccgtggccgctgtgtctgagatattcagaccctcgccgtcccgtgcagtagacacggtggccgctgtctgtaagatattcagaccctcgccgtcccgt

SEQ ID NO: 481912 - DNA, 122 bp, Homo sapiens
cctcccctcgccggctagggtggtgcgtgccggcaggccggtcaaggaggcgggacacgtcggcgctaccaccgccaccgccgccgccgcccctcctcccgttccagctgccgctgccgctt

SEQ ID NO: 481913 - DNA, 122 bp, Homo sapiens
ggtccttatatgtgtacaacattaaaatgaaaggctttgtcttgcattgtgaggtacaggcggaagttggaatcaggttttaggattctgtctctcattagctgaataatgtgaggattaac

SEQ ID NO: 481914 - DNA, 122 bp, Homo sapiens
tgcgagcctcgaacacgatgaatccgctcgaatgggcttgggctttgcccgggtggcgcacgctcacacgctggaagcacagctttgacgatctccacacacgcacaggcacacacgccaca

SEQ ID NO: 481915 - DNA, 122 bp, Homo sapiens
cgaatctcatagattgactttctcttggcctgagcccctcgcacagccagcttgatcttgcgccatcccaggtggttgagttcagccaggttgagcacaacacagatgccacttacagcaaa

SEQ ID NO: 481916 - DNA, 122 bp, Homo sapiens
atggtagttttttgatggaattttttcctctcccaggcatcgtcagacgtgcccagcactcgactgcagagcagcctctctcacagtttccactctcatttctcaaagaactctcttggtac

SEQ ID NO: 481917 - DNA, 122 bp, Homo sapiens
tttgtggacggcccagctgtgcaacctgcccccagatgtgagcctgcaggcggcagattccgcttagattatcttgcttacctaatgatgtttgcttcactgccttgctcgattgtgttcac

SEQ ID NO: 481918 - DNA, 122 bp, Homo sapiens
accaagacatccattaagaaaataaagccatgctttccagagcgtttagcacttgtttaacgtacttgtgcttctaaatatcacaaggcaggatgggatttctaaagacaaggggatatagg

SEQ ID NO: 481919 - DNA, 122 bp, Homo sapiens
cctcccagggcatccggctgggataagcaacgcgcgagggttgccccatcccccgcccagcgggtccacaaggagaaagggccagccctcgagccagtgtcaggccccagaccctggaagat

SEQ ID NO: 481920 - DNA, 122 bp, Homo sapiens
tcagcacagagcgctgacaattaagggatctgttttacaggaaacttcaaattggctcttcggtttcagaaactgtaaaccacaatacatatgcaaaggactgtgattagatttcacctcat

SEQ ID NO: 481921 - DNA, 122 bp, Homo sapiens
atcccggcggcgggaaacttgctgtgggtgaccatggcgcacggagccagcgtggatctgcgcggcggcggctgcagctgcttcgcggcctccgcacagcggccgctaccgcatcccggggg

SEQ ID NO: 481922 - DNA, 122 bp, Homo sapiens
ctctgcagggtcacacgcaccgtgtccccacccaggacagcagacacccgccagagtgtgcgcgcccagtgactgcaccccggccctcatcacccaccggcactgatcggggcaccgcctgg

SEQ ID NO: 481923 - DNA, 122 bp, Homo sapiens
gtaacccacctgcctcccatctcctacatgcctggtctgcctgtgccagctgtcaggagccgagccatgggccctcccagctctaatggaaatggctctccatccagctctgccagctcagg

SEQ ID NO: 481924 - DNA, 122 bp, Homo sapiens
ccaagccgcctggaatggctcaggcttccaaaaggagcaggcgccaaaaagagctttgcccgccgggtgatggagatcatgaaactttccaaagtgactctgagagctgagtatgttccttt

SEQ ID NO: 481925 - DNA, 122 bp, Homo sapiens
actagaaccaagacccctgtggttctcatggctgcaaagggggccccagggagctgaacccgtcagtgaaacagcaggagcctgcagggccgagaggagccttctccagcccgccctgcccc

SEQ ID NO: 481926 - DNA, 122 bp, Homo sapiens
ttctcttttctttcagtagtgtacagtggagttttctagaggctgaataacatgtgaagacgttatgctgatggctaatggaatatatgcttgtgtattcttttacgtttctcattttaaat

SEQ ID NO: 481927 - DNA, 122 bp, Homo sapiens
agccctccctgtacaactaggacccaggggtgatctagtgacactagccatttatcaggacgtatgggtgccagtcaggatgataaagcttccttttggccactatactacttagaaatgcc

SEQ ID NO: 481928 - DNA, 122 bp, Homo sapiens
gtatcactagctattgacaatttctgaaatggaagaaggctggagtaatatgcatataaccgccttgataagagatcatcaggggctactcctgagaaggaggcagtcttaacatagcctta

SEQ ID NO: 481929 - DNA, 122 bp, Homo sapiens
tgtcccagccccaattgggagaaaagatagatttttatttaaaaagttattttcctgatgcgattagctgtggcactgcaaaaccgaaatcaaactataaggaactttcctcctttaatttc

SEQ ID NO: 481930 - DNA, 122 bp, Homo sapiens
aagtcccaggagactggagtgaccagctgcaaatgctctgggctgcgaaacaccggcttccgctcctggccagagctcaccaatcagcgcccggctttctccgtcatttcctcctagaaggc

SEQ ID NO: 481931 - DNA, 122 bp, Homo sapiens
tgtttctggaggaggcttctctgaaggcagctcacatgagtaaaagtcactttttcaggtcgcagtcccgcgcaaggggcggaaggggcggcggcgcctgcaaacgccgcgggagggcgagc

SEQ ID NO: 481932 - DNA, 122 bp, Homo sapiens
acaaagctcaagagtatttataggaatgcaaaaacatccagtacccaacaaggtaaaattcgacgtctgggatccaatcaagcccctggccaagggaaggaagcagaaatgaagagggagaa

SEQ ID NO: 481933 - DNA, 122 bp, Homo sapiens
cgcgggcaggaggagcagcgagcgcggggagcgcagggcccttcggagagggcgctccaccggccctgcgctccgtacctgtgccgccacgcccaccggtcccctgctgagcctagcaccgc

SEQ ID NO: 481934 - DNA, 122 bp, Homo sapiens
gcaccctgtcagttcagcctcagttgacaccccagtcctcagcactgtagcccaccctagcgtgtcttccagagagggtcagagccctgtaggatgccacatccccaggcagagcctggcaa

SEQ ID NO: 481935 - DNA, 122 bp, Homo sapiens
tggagtgtgtgtggagcatgtgtggcgggccctttgtgggagaagtgggtgttgggctcccgcccggccacgctgcaccaccatttggctctgtgaccctccgcagctcactctgcctcttg

SEQ ID NO: 481936 - DNA, 122 bp, Homo sapiens
cctccagtctcagccagccagggtggtggaggccatggtggattggagaccacacgccaacgtgaagaggcagcctctattcattccagcaactgctgctgtgtgcaaatgcaggcccaaca

SEQ ID NO: 481937 - DNA, 122 bp, Homo sapiens
aagtcccaaaggctgaaccattttcccctccacctttgaattggcgaaccttcattttcccgacccgccctgaaacagtctgctcaggatgctccaggttagggtcccttcttcctgccccc

SEQ ID NO: 481938 - DNA, 122 bp, Homo sapiens
tggtaaactagtttaggactttggagggcttagagctgctggctgtatacgcattgctctcgaataaacacgtgtccccaaatatcaggaccaaagcttcaccgccgaatttggccgcagga

SEQ ID NO: 481939 - DNA, 122 bp, Homo sapiens
aagacagcgcgctgcaggggctggtggccacttgtgcgagtgcccctgccccggggaacccgcaacccttcctcagccaggccgtggccaccaagtgccaagcagccaccactgaggaagag

SEQ ID NO: 481940 - DNA, 122 bp, Homo sapiens
gagcgggccgcactgtctgtctgtccgtctgtcccggaaagaactataaagcgctggaagcgcctgcagatggttttgcgccggtctttctttgggccccgggagggagggagtgggagtgg

SEQ ID NO: 481941 - DNA, 122 bp, Homo sapiens
cttttttccactgtgccaatacccagtgggggattccctggtgtgagcgcctggggataacgggggtgtcttctagtctgcatttacagtgaggaactcggctacgccagggtgtggccatg

SEQ ID NO: 481942 - DNA, 122 bp, Homo sapiens
tacaaattccaccactcatgggtgtcccaatcattcatttgttcatttagcaatatgtctcgcctgccaaccatgtaccaggccctgggctgggagtggagcaactagcagtgttcaagaca

SEQ ID NO: 481943 - DNA, 122 bp, Homo sapiens
cttactcttcatgctaatcatacccagagacccttaaggatacatgcaaatgcatatgtacgggcacacatcaatacgtatgtgtatatacacgtgttcttcctcagcccagcctctccttt

SEQ ID NO: 481944 - DNA, 122 bp, Homo sapiens
caaaattggcagatcaatctgctcatcaagatttcaaaatcaaatgctgcagagggttgccgcatatgaataagcaggccagtcaacaaacaagacaaattaagtactaagtgcagcttgga

SEQ ID NO: 481945 - DNA, 122 bp, Homo sapiens
ttgcaagggtttaaatgcctctgacaattttatgtattttcttaatagaaaatgctgggccgggcgcggtggctcacgcctgtaatcccagcactttgggaggccgaggcgggcggatcacg

SEQ ID NO: 481946 - DNA, 122 bp, Homo sapiens
attttccctcctgtctgcttgttttacaacatgatatgttgtagtaggtagagtcctagacgatgaagccatatagtcccagctctgcacctcactaggcagaccctcagcaagtcatttaa

SEQ ID NO: 481947 - DNA, 122 bp, Homo sapiens
gccacccaggagcacgccccgggcaggtacgctgtgtgtctacccgtgaccacgtgactgcgcacatagctgcattgttccctggggtcacacagagcagtagaatgtcactgtgcttggcc

SEQ ID NO: 481948 - DNA, 122 bp, Homo sapiens
ggcaggggtgcagctgcggccaaagcgtgtgactttggggtccaagaagtagatggggcccgggctggtgtcctgaggtggtgctggggagaggagcccagagtgctgagagtgattctgaa

SEQ ID NO: 481949 - DNA, 122 bp, Homo sapiens
tggtggtttttgttacatgcatgaattgtgtggtggtgaattctgagattctagtgcccccgtcacccaaggggtgtccattgtcctagcgtgtaggtctttttatccctagccccatcccg

SEQ ID NO: 481950 - DNA, 122 bp, Homo sapiens
agatgagaggatgccctttttaagatcaactgtggctgccatgtggaaaatggattgtagcgggaagctagagtagaatcagaaacattatttaggccactgaagaagagcccagccaggag

SEQ ID NO: 481951 - DNA, 122 bp, Homo sapiens
cgggctcctgctcccgcggagcgccgggctcgggaccagggtcgccgtcggcggggctcacggtcagcacgtcctccgccagactcagcagcacccgctgccatcgctcgccgccggccccc

SEQ ID NO: 481952 - DNA, 122 bp, Homo sapiens
ttggatgaaaagatttcaggcaaagacttgcaggaagatgatgataacggcgatgtgaatcgtcaaaggtacgggccagcttgtgcctaatagaaggttgagaccagcagagactgctgtga

SEQ ID NO: 481953 - DNA, 122 bp, Homo sapiens
ctcgttgaacaggcattttttgtgagagcaacgaacctgaaatgttaacaccaacactgacgtctacaattaccgttaccgtttttaataaccactcaggtacctccgactgttctgcgcct

SEQ ID NO: 481954 - DNA, 122 bp, Homo sapiens
aaaaggccgaggtgggctttgccaatctgcttgcacttaatgggaacctgtcgccttttgcgcgcccggaccatcgcttgtacttaagagaaagctggcttcctaagagttcacttatcgaa

SEQ ID NO: 481955 - DNA, 122 bp, Homo sapiens
ccagccatgctcacttctacggaagccgcggatctcagcctgggctgcgcgccctgcgcccggctaagggaccctgtgcacctcagtgcgccaaaggcactggctgtgggtagaggtaggag

SEQ ID NO: 481956 - DNA, 122 bp, Homo sapiens
aactgacagttctgtattatcatccctccttaaagcatttagagatttacatcacttggccgggcacagtggctcacacctgtaatccgagcactttgggaggccgaggcgggtggatcacg

SEQ ID NO: 481957 - DNA, 122 bp, Homo sapiens
gtgatccgccccccctaccctggcctcccaaagtgctgggattacaagcgtgagccaccgcgcccagcctgaattttaacagtttcatcaggatcttatcacttagagaggaagtactattc

SEQ ID NO: 481958 - DNA, 122 bp, Homo sapiens
ttctcgcacctgtcctgtttgagggaccagggtcgaccctgcccccttgggctcaggccccgcccccaggatcctacggattgaggtcctcaggccacgcccctgcagatccaggtctccag

SEQ ID NO: 481959 - DNA, 122 bp, Homo sapiens
ccctcttctgttgcttctgggtatgttgcaccttctgtaagaatttatttagtcacctgacgccggtataagtcagatgactacatagattttagtcatctaattttatgaagacagactgg

SEQ ID NO: 481960 - DNA, 122 bp, Homo sapiens
caactttgatgccaagcgagccctggacagctggtttgaggagaagtctgggaacagttacgcgctgtctgcagaagtcctcagtaggatgtctgcgctggagcagaagccagcactacaga

SEQ ID NO: 481961 - DNA, 122 bp, Homo sapiens
gctgcggagctgtgatccggtgttctataggcaggtgttgggtgcagagagcgcccctcccggacaggtaaggtttagcaagtcatgcttgaccctgttagtgcttttttattcctacatca

SEQ ID NO: 481962 - DNA, 122 bp, Homo sapiens
agcgctgccgccggggcctggggctgacccgtctgacttcccgtccgtgccgagcccactcgagccgcagccatgtctggggacgagatgatttttgatcctactatgagcaagaagaaaaa

SEQ ID NO: 481963 - DNA, 122 bp, Homo sapiens
aaaatgcagccgtgctaaagagcagcagctcaacagcaagtcagtcaactgtggctctgccgacaggtacatgggtggtgctggcccagggggaggtggcaaggcctagccaggaccgaaag

SEQ ID NO: 481964 - DNA, 122 bp, Homo sapiens
aatttgaggcctgtggctgctgtggaccctgggaaagagcctgtgcttcctgagccagtgcggggcctggcatggagtaggtaccccgggggtggacagataggcagaggaagggatgggca

SEQ ID NO: 481965 - DNA, 122 bp, Homo sapiens
tgtctccccctgagacagtgcactccatgtctctgctgcgtccccagtgcctggactggccgctggtgcccagcaggggctcagagaactttgatagagaggagaagggaaagctgcatcct

SEQ ID NO: 481966 - DNA, 122 bp, Homo sapiens
gttggcaggcaaaggtctgttccgaggtttctgaatggaagcagcggagtttgctctgcccgctagttctcaggaagaagactgtgtgcttgcagctggtgctctgagcagggaagaatcca

SEQ ID NO: 481967 - DNA, 122 bp, Homo sapiens
gaaataaaaccatgtgtctactgtcaactgattttcagcaagggtgctgagcacattcaacgggggaaagcacagtcttttcaacaaatggtactggggaaacttgatagccacatacaaaa

SEQ ID NO: 481968 - DNA, 122 bp, Homo sapiens
cgctggtatttgctcccggtcggccggaatgtcagttaacacaattttcattagataactcgttttcaatccggggagctcgggctgcagcccggggagaggcaggggctgggtgctgaggg

SEQ ID NO: 481969 - DNA, 122 bp, Homo sapiens
cctcaggtgatccacccgccttagcctcccaaaatgctgggattacaggcatgagcactgcgcccggcccaggtgtttattttcatagcaaagccactagactgtaagttccttggggtcag

SEQ ID NO: 481970 - DNA, 122 bp, Homo sapiens
cccaccctatccatctaactttgttttctctttctaacacaccctgcagtgtaacaataccgattttttgctgtttatatgagcattccatgttttttcctacttctgtaacttcctttgtt

SEQ ID NO: 481971 - DNA, 122 bp, Homo sapiens
gcaaagtaaatttgcaatggtccttgacgaaggggggtcgggggcggggagaagtccagccgagagaggagctcattccacgctatatttttgcagttgaaaagctgcctaatcatcgctaa

SEQ ID NO: 481972 - DNA, 122 bp, Homo sapiens
tcgcttctgctcaagccgggctgctgcttccgcgtccccgccacgcgcccaggtgagtcgcgccaggtggcagcgagcctttacctgccaggctgcccggcctctggagggtggccgtggca

SEQ ID NO: 481973 - DNA, 122 bp, Homo sapiens
aatacctggcgaaagcttgaagtcaattaaacacccaatgaaacaacagtaatactgttacgctgtcttaaaatttctatttttatacttggaacatggatggcacatttcttgaatggttc

SEQ ID NO: 481974 - DNA, 122 bp, Homo sapiens
gggttaaagatcagccacagagcacaggggtgagggtcaggcgcacactgcctgggggctcgtcgcggctcagccctcacactgccccttcctgtccagggcaccggggaactcaggacgcc

SEQ ID NO: 481975 - DNA, 122 bp, Homo sapiens
cccttaccacagaattgtgcaacactgatacacacctgtgttttgatctttaaaatctgtcgtggtaacatctcaagtaattttaaatagcttcgtggatgatccagattgcacgtctgcca

SEQ ID NO: 481976 - DNA, 122 bp, Homo sapiens
tgcggcgaggaggggaggggtccgcgcgggggcggagccgccggggattggccgggagggcgcggggcggggcgcgcggggtcgggggcgcgggggccgcagcgcgcgggccgggcagatgt

SEQ ID NO: 481977 - DNA, 122 bp, Homo sapiens
ctggtttccaattccataaatgattatcatcttcctttgtaagaggtaatcccaggattccgctgtctcactagagattaaactttttttttttttttttttgcctaggctttaggttccta

SEQ ID NO: 481978 - DNA, 122 bp, Homo sapiens
gagagagggtggtggaaagagtgttaggttcccgcaggccccgcccttggaacgcctttccgcaggttaagtggtcacctagcgggaagcaagtgatggcactaattgccggtggaaggcta

SEQ ID NO: 481979 - DNA, 122 bp, Homo sapiens
gcgtgcttggaaagttccagaagcagcaaggaagccaggtagccgcagcggagtaggggacggggaggagatgaggtcagggaaccaaggcaggtgcaggagggggtttgcgggtggagctt

SEQ ID NO: 481980 - DNA, 122 bp, Homo sapiens
aggcagccccatcacttggttcacggacacgcagttctcaagggcgtgcaacctgccaggcgctgcagagcgtccgggatgaaaacactaacatggatcactcgcaggtccccctggagtca

SEQ ID NO: 481981 - DNA, 122 bp, Homo sapiens
aggtcacgtctgggccgggtgatgtactccatggcaaactgtctgctcctgatgaaggtacgtgggtggccaagcagggctgccatgtgatctggaagagcggggtcagtgggagccgcgag

SEQ ID NO: 481982 - DNA, 122 bp, Homo sapiens
ggaaacttccctcagaaataaacagaaacgcaaagacaacttcccgagggcccgggccgtcgtgtgccgttacctcagccccaggtggttcccaggctcggccaggctatgtctcacacact

SEQ ID NO: 481983 - DNA, 122 bp, Homo sapiens
cagcccccactgccccatcgcagatggggtttcctacatcagcctgcccagtggcgatgccggccctgccctgcattctctgccaggacaggtcacacagagcgcgctgcagtcacctccct

SEQ ID NO: 481984 - DNA, 122 bp, Homo sapiens
ctctggggttggggcgggctgggattcccgctcactgagattcccgctcactgggattcccgctcactgggcttggtgtcgcggaaaaaacgaaggcagagaaagaattagaccacggtgca

SEQ ID NO: 481985 - DNA, 122 bp, Homo sapiens
agttctgaagtgatgtgggccaatacatagagtcatccattcagcagatgtttataaatacgtaacaaaattgtacagatgtgaaaagcatacacagtttttggatctattatggcagtttc

SEQ ID NO: 481986 - DNA, 122 bp, Homo sapiens
gatgttggctaggagttcagctggaaatgtcaactggaatgcccacacatagcctcttcacgtgacttgaacagtatggcggctaggttccgagaatacatgtttgaggagtcaggaagtag

SEQ ID NO: 481987 - DNA, 122 bp, Homo sapiens
gtacaggctggtgtaggtcacgcacttccagtcctctgacagctgcaggtacccactggccgactgtgggtccagggtgacgctcactgtggggacaagggaaaaaaaaaaaaacagcatca

SEQ ID NO: 481988 - DNA, 122 bp, Homo sapiens
tctgagcaagtgaatgatcacagagcctgccggggtagaggccaaggagcccgtctgtctcgctctccggggctgtcctggtggctgtgggcctcgcagaggcaaccactgcaaaggatgca

SEQ ID NO: 481989 - DNA, 122 bp, Homo sapiens
ctaataatttacatttaaaaataaacaactaccataaagtcaagtttacgttcttgtagtcgagtaggacagtaacatgatattcagaaaagcacaaagggggatggtctttcacaaatttc

SEQ ID NO: 481990 - DNA, 122 bp, Homo sapiens
agactctctacagagagcctaggcctggcagtcttcacagatgacacccaacagggagcacgtttattaaagtgggaaggggtggggtacaccccagggtgtatactgacagggacctcatg

SEQ ID NO: 481991 - DNA, 122 bp, Homo sapiens
gtgtgaggctgggctgggaggggcgtgtcggccagccatgttaccctctgcaatttgggacgttctgttcccaaagttccctgctctccctctcctccccctgtcccttcatcatccagcct

SEQ ID NO: 481992 - DNA, 122 bp, Homo sapiens
gtttgttatgtcagtgttttcacttagcatgtagcagaaccatctcataccgatgcctaccgctctccccctctcttcactcactgcatcctggtccacagaagagcgctcctgcactcttg

SEQ ID NO: 481993 - DNA, 122 bp, Homo sapiens
aatgacttctgactgtacctccagcttcatactttacatctcctcaatgccccacgggcacgtcagatctgtgaccaggccaaaacagaagtctggatgtcctccatgcctctgtgttctcc

SEQ ID NO: 481994 - DNA, 122 bp, Homo sapiens
tgttacagtttttaaacatgttgtgtcgggagtttgttccttcagatgttcagataggtccggagtttattccttctggtgggtgcgcagtctcgctgccttcaggagtgaagctgcagacc

SEQ ID NO: 481995 - DNA, 122 bp, Homo sapiens
ggctcttccttaatgaaatgccttcctgtaagaggtttctgggtggtgttcattgaccaccgaattagactactgcttcagatcatctctcaaaaaaagagaatgagaagacagtttttaac

SEQ ID NO: 481996 - DNA, 122 bp, Homo sapiens
tctgcagccttgcagtttttttcctgaatgattgggctatgatgtcatgtgctatctcagcgcagaaccttttcaaagctttgctggggtctgtgtgcctgagcgaggggagtggaggctcc

SEQ ID NO: 481997 - DNA, 122 bp, Homo sapiens
cccagccactcagctacgtttggcggttgctaggagacgcgagggcgtgcggcctgggggcggggctccgcggggcggggctttccccctcagccactgcgcgcagtttgtcaaatggctac

SEQ ID NO: 481998 - DNA, 122 bp, Homo sapiens
tgacttttccttgctctcggctgtgccaggcagagctaatgtccatgcatttcacaaacacgggaaaattcagaagctgttcttgctaggagatgtgcccggagaggaagatgccagccagg

SEQ ID NO: 481999 - DNA, 122 bp, Homo sapiens
aagaatgtccggattggacattcggaagagggcccgccttccctggggaatctctgcgcacgcgcagaacgcttcgaccaatgaaaacacaggaagccgtccgcgcaaccgcgttgcgtcac

SEQ ID NO: 482000 - DNA, 122 bp, Homo sapiens
agggacgcttcccccggggcgggcactgacccaggtggcggggtcggccctccggtgccgcgatctcaagggggagggggagaccaaaaaataactcagatccgcccaggaggcggggatcc

SEQ ID NO: 482001 - DNA, 122 bp, Homo sapiens
catattatagatcctaacattacataactataaacccaattaaccttattcttgaagaagcgaaaccccccagacacccaaaccactcggctggtggtattgccaggcgatgggaggagcag

SEQ ID NO: 482002 - DNA, 122 bp, Homo sapiens
gaggcccgctcttccgctgaggcgccgcccgcgccgcctgaccagaggatactcgactgccgctcccggagccagggcgtacaggtaatatgctccgcagcatgatggttggagaaagcctg

SEQ ID NO: 482003 - DNA, 122 bp, Homo sapiens
cagccggcccggcaccccgcagccccgcccagcccggcacacaggagccccaggcggcagcgcactcacttgcggtcactctcgggtggccagttgtcccacttgtagtaggtctccggctg

SEQ ID NO: 482004 - DNA, 122 bp, Homo sapiens
aaaccagccaccaaaacccactgtcggaggagcttctcagaggccagaatcaaacaccaccggccctgtgagtgcccggcctctgccacagctgggtgggtgcccagccaaggaagcttgtg

SEQ ID NO: 482005 - DNA, 122 bp, Homo sapiens
ttcctccacggggatgtgggatttcagtttatgctcttgcgtccctctgcagccacaggccgcagagcccgcccccagggccccgcccccgctctccgggcgctggacgcgggacgccgtct

SEQ ID NO: 482006 - DNA, 122 bp, Homo sapiens
aggagagagtcagggcggcgggaagacatttctccgagttctcccgaagggagccaggcgcgagcgcgacctggggaaagtccagagtgccagccacggggaagggcgggcagtgcagagtg

SEQ ID NO: 482007 - DNA, 122 bp, Homo sapiens
atcaggatttgctcatgggtctcatgtctcttcctcctcccccagcaaatgacggctgctcggaaacttttataaaggaagcggttgctttgtggctgatagatctgaaggtgaagagcttc

SEQ ID NO: 482008 - DNA, 122 bp, Homo sapiens
atagttataactgcattgtttatcatttacaaaaagaaaacatctgaaagcccaacaagacggaactggttattccacattggcacattcctacaagggaatgtcattaggaagaatgatga

SEQ ID NO: 482009 - DNA, 122 bp, Homo sapiens
ggctgcacacctggaaccgccgggagcgtggtagtggtgtttttctcaatccacatgccacggttccagtcccccaaattcccatttaatcaatctgtcttggggcctgagcttctggctat

SEQ ID NO: 482010 - DNA, 122 bp, Homo sapiens
tgccttgggcttcatgccctgggctcctccaccagggccagccccaataggtctttagttcgaggtagaggttctgctgttatttcccaggtgagctagaagcaggtgagtagcaagcactc

SEQ ID NO: 482011 - DNA, 122 bp, Homo sapiens
tagagatggggttttaccacattggccaggattctctggatctccggagcttatgatccacgcacctcagcctcccaaagtgatgggattagaggcctgagccacaaagtgctcaaaaaatc

SEQ ID NO: 482012 - DNA, 122 bp, Homo sapiens
accttggggaccgcttgggtggtagagtgaaggagggggaacgggagtcctgccccatcccggcagctctattaagcaacagaaaggtgagcttctgtggggaaacagaggaagcagacccc

SEQ ID NO: 482013 - DNA, 122 bp, Homo sapiens
agtgcgcctctcgctgcgccctcctagagcgcgggtcccgtgcctgtgcccggcgcgacgcgatctccctgctagtcgggctccgcgtgctccccgcgcttcccgcagcctccgcgcagccc

SEQ ID NO: 482014 - DNA, 122 bp, Homo sapiens
gtgtggcactaacagtaccgatagtactactactaataattgcccgagaggtctgctatccgttaactgacactcggtagcggccgctgcggaatttcgaattgcgggaaacccgcagactt

SEQ ID NO: 482015 - DNA, 122 bp, Homo sapiens
ttcctgcttctccttttcatgagtgttcctgtggtctctgcacctcctttctgtaagtaccgatcctgcaagcatcacagcttacccagacgtctactaccttgtaagacaattttgttttc

SEQ ID NO: 482016 - DNA, 122 bp, Homo sapiens
cactgatgcctgatccacaattcccaaagcgccctcagggccaccatttcttgcgagcctcgcagcatccacgagggggcagcacaggactaacatcgccccacggcctgacgggctgccgg

SEQ ID NO: 482017 - DNA, 122 bp, Homo sapiens
aacatgcaggcgccaattcactttggctaattcaggtactactcagctttccctgggtggcggcattttcttgaatttttctaatgacaaaatatggccctggccctgaccttttaaatcca

SEQ ID NO: 482018 - DNA, 122 bp, Homo sapiens
cgcccacgaaccgcattccctgccttgctagttagttctccaacacgcgaaaaaggtagacgaggactggttttctttgcagctaaaatgaatcaagcctctggtaagtgtggatcctgttc

SEQ ID NO: 482019 - DNA, 122 bp, Homo sapiens
gaagctgccccaagctccaaatttgagcggccgaagtatcgcgagacctaagtatggctccggcgaccgtagcccaatctcgcgcaatgattgcgccacagatattcccatcccccattcag

SEQ ID NO: 482020 - DNA, 122 bp, Homo sapiens
ataagcctcactttacgagtgaaaaacaggagacaaagctaaaatttttgcagagtcatgcgagtggttagggacaggcctggatgagaacgtacctgttgtcagctccccacatagccccg

SEQ ID NO: 482021 - DNA, 122 bp, Homo sapiens
agactctgaagcttatttttagagcaccgtcgccctaacaaccaggctggctggtaaccacggagtacctgggcgtcctggagacggggtgggaccaggtcctcctccccagcctctaactg

SEQ ID NO: 482022 - DNA, 122 bp, Homo sapiens
gcggctgccctcccttgtttccgctgcatccagacttcctcaggcggtggctggaggctgcgcatctggggctttaaacatacaaagggattgccaggacctgcggcggcggcggcggcggc

SEQ ID NO: 482023 - DNA, 122 bp, Homo sapiens
caggctttaatgtaggaggtgagtatatcaccacctggtggaattttacctttgacggggcgaatagccgcctgacaatctggatttgcttgttcataagccataagttctacaacaagtct

SEQ ID NO: 482024 - DNA, 122 bp, Homo sapiens
acatgcaaggcacccaatgagtattgctgagttacctttgttaaaaacctatctaggagccgggcgcggtggctcacgcctgtaatcccagcactttgggaggccgaggcgggcggatcact

SEQ ID NO: 482025 - DNA, 122 bp, Homo sapiens
gcggagcagctgagctttccaggcatctctgcaggctgcaaccccagctccagttctattcggggctgagttgctgggattcttgaacctgagcccttcttttgtatcaaaatcacccaggt

SEQ ID NO: 482026 - DNA, 122 bp, Homo sapiens
ccattccaccaaaactagctacttagagtctcatctctcactgaagattcaaaacagaaacgtggatttagggaggcatgatggttcatcctctcttggagcccagttggaagttgactgac

SEQ ID NO: 482027 - DNA, 122 bp, Homo sapiens
gggaggttggcagaggtgtgcacactgcggaagcgcccccggcggtttggattcgggtcacgtgcgggtcactccggtgtgctggggatgggttgaaattaaaactttccgggatgcctggt

SEQ ID NO: 482028 - DNA, 122 bp, Homo sapiens
cgctgcacctctaggtgaaacttcagcgtgccgcgcggtggtgcgaaggtgagggcagcgcgcagaggaagtaaacggggactacaggggaccagagacgtgagatagtccttaaaatacat

SEQ ID NO: 482029 - DNA, 122 bp, Homo sapiens
atccaatgcccacaacaagaactggacctaagaaatgaaagcacaaagagctgatctattcgaagagagatgacacaggactgggtacaggtaccaggagctgggtagatgcggaagctccc

SEQ ID NO: 482030 - DNA, 122 bp, Homo sapiens
cgcagcacctgcagatgctgccgctgcagctgagcacctttggggaggagctggtctccccgcccgcggacgacgacgacgacagcgagaggtttaagctcctccaggagtacgtgtatgag

SEQ ID NO: 482031 - DNA, 122 bp, Homo sapiens
gacaccagagactgaaatcccagctgtgcactgccctggtggtctcctgtcccaaccgggcgttgatccgggccttgcaggctcacgtgctctgcagaaaatagagaaaccaataaatgctc

SEQ ID NO: 482032 - DNA, 122 bp, Homo sapiens
cccagtgaggaacccacaagagcatcaggctcagctagaagatccacatcctctacaggtcggggaccaaaggctgattcttggagatttaacaccccacaggcaatgggtttatagacatt

SEQ ID NO: 482033 - DNA, 122 bp, Homo sapiens
cctgctttaacgttagcgtcgctgggggtaagcgggaagcagccatgtccaccagaggtccgccggagcctcagcgcgcaggagcggaagtggggttcgaccaaggggtgtggcgagcccgg

SEQ ID NO: 482034 - DNA, 122 bp, Homo sapiens
cctttccccttcttgatgccaggacctactgagtgctcgcaggtgtgcaatgctgggctgcgggtgctgcttgtgtggcaagaagcctcggggtgcctccctccttctcacacctttcccag

SEQ ID NO: 482035 - DNA, 122 bp, Homo sapiens
aaccattcccgactctcctgggtacaaagacttctgggagttgtagttttatcccctccccgctacctcctctcaggcccgagctttgaaaaggcggttagctgcccttgtcttcttcccaa

SEQ ID NO: 482036 - DNA, 122 bp, Homo sapiens
ggaaatgcgctcagcgctaacgacagccacagagccacccttcttactgccccttgactgcggcacgtaagagcagaggcaagcgcttttccaagttggtatattcgagagagtgatacgca

SEQ ID NO: 482037 - DNA, 122 bp, Homo sapiens
ggagtctcgctctgtcgcccaggctggagtagtggtgcaatctccgctcactgcaagctccgcctcccgggttcacgccattctcctgcctcagcctcccgagtagctgggactacaggcac

SEQ ID NO: 482038 - DNA, 122 bp, Homo sapiens
gacgccggatcctcaggctgcactggtccctcaggcgtgggcctgtctgcagaataaacccggctgagcgcaaacctcaaaatccacgggaaccaggcctcggagggccccgagatgtcccc

SEQ ID NO: 482039 - DNA, 122 bp, Homo sapiens
cccgccccctccctaaataattctcccgggagggacacggaagcagcaaccgggatgggacggggagagaggaggcactactggggacctaagctggttctcaaatgcctctccttttcccc

SEQ ID NO: 482040 - DNA, 122 bp, Homo sapiens
ttttgtgcttgaaagtataataaatgggatatcatctttactcttgccataatgctaagacgcaaatatttgaattctgaattgcaggccagaggaagcagaaacttccctatggagagaga

SEQ ID NO: 482041 - DNA, 122 bp, Homo sapiens
aaccaatcccggttctacaaataagtgaaacaaaatcccctttaacaccgtagggtctcacgccctcagatgactcacggaaatgacgccatcagcgaaaagcggggcgggcgtagacgtca

SEQ ID NO: 482042 - DNA, 122 bp, Homo sapiens
aaatcacccacaagcatttcctgagcactaccaggcatgttacctgccaggaacggctggcggaggagacagatacggcttaactgcgctcatgatcatgacggggtgtgatcagcgctccc

SEQ ID NO: 482043 - DNA, 122 bp, Homo sapiens
ccatgacacatcagtgtttcacatggatcccatcacatgggtccatggtgggagagcaatcgtgagctagcatcccccacccccttcctgcatggaggcgtgaggttccatttggacacatg

SEQ ID NO: 482044 - DNA, 122 bp, Homo sapiens
ccaataaacacctgcactcgccaccggactgtgctgacagggtccagaagcaggagccagcggaccagcagctgagaggtggggagatagtggggaaaagagcaatgccaggagctaccatt

SEQ ID NO: 482045 - DNA, 122 bp, Homo sapiens
tgttccctgtttgaaatattgtgatctccctcccatgaaagaaaaaccaagaaccagaggcgtagactgactgaagacacaactcctggctttctgaagctatggacttggattggattgct

SEQ ID NO: 482046 - DNA, 122 bp, Homo sapiens
cagagatgcctgtctgcaggttcttgaagttattgttagtatttggtatctcaaatttttcgtcactgttcacatgccactttctctgtgcacagtggtatcctcatttgctttttaaccta

SEQ ID NO: 482047 - DNA, 122 bp, Homo sapiens
aataaataaataaatacagataggaagtggtgttcgctctccaacaccaccgccgcctctcgcttgcagagctccacctgaagcagaagggggataacgaaggaggtctctataccatggct

SEQ ID NO: 482048 - DNA, 122 bp, Homo sapiens
gtggtctttactgcttttctccctgatgtgtgaaacaagcgccttctatgtgcctggggtcgcgcctatcaacttccaccagaacgatcccgtagaaatcaaggtaagtgtgttcctggatt

SEQ ID NO: 482049 - DNA, 122 bp, Homo sapiens
ggggcgatgtccttgccagcagaggtgctgctcaagtgcagggctggcatcccagcgactcgcccaaggccacctcgccaatccccgcaccctgcgtgccactcccccagcactgccgcacg

SEQ ID NO: 482050 - DNA, 122 bp, Homo sapiens
gtccatctcacccgtggtgaggaagcctgtgagaggctcactctcctcaaagcctcggaccgagaccacggtcacctcatagcgagcgcctgggatcagcccctggagtttctgggtccggg

SEQ ID NO: 482051 - DNA, 122 bp, Homo sapiens
aaacccccaccgaataactgaagggaagcggaaggcgcagaaacgcggacgaagaggaagcgggcgcttgttaaaccgtgcgatgcacaatgcgggaaagtccaaccagctccgtgtttcaa

SEQ ID NO: 482052 - DNA, 122 bp, Homo sapiens
tgagaaacataagaacacaaacatggtaagacacagcgggagtcagggcaaagcatgaaccgttaggtacagatggatgtaaaagaggaaattttcctaagaagacaaggaactggggacca

SEQ ID NO: 482053 - DNA, 122 bp, Homo sapiens
cttctctggcaccgtgtccctgcccggcctggagccccctggcgggcctgacctcctggacgatggctttgcctacgaccctacggcccccacactcttcaccatgctggacctgctgcccc

SEQ ID NO: 482054 - DNA, 122 bp, Homo sapiens
aaaggaaagctgcgggggaaaagggccaaaccctgaaattacccggatgtggtccccgcgcgcgcatgctcagtggcttctcgacaagttggcagcaacaacacggccctggtcgtcgtcgc

SEQ ID NO: 482055 - DNA, 122 bp, Homo sapiens
gagtaaatgagtgtgtgtttccatacatatattcagtaccactacagttcacaaaatgaacgggacttcttaggttaaagccttgttaagttattctttaaaacgctttccaatctgataga

SEQ ID NO: 482056 - DNA, 122 bp, Homo sapiens
acccttcctcagacatcacctagccaccagggttctccttcctgtgatcagtcagtcccacgagcacaatcctgtgctgtgactctgcgctgttttgttgttgctcactgctacggctgagt

SEQ ID NO: 482057 - DNA, 122 bp, Homo sapiens
cctcgccggccttggggccgctgactcaggccaggggcggggaaaagaaaaaggccgcagcggggaactctaggccaacaacggtgatgggagtgtccctttcaggccagccatctcgtagt

SEQ ID NO: 482058 - DNA, 122 bp, Homo sapiens
tgtagcagattcgagactccgggatcctcttcaccagccgccccatgaagaactcggagccgaagagctcggaggggatgaaggccccatacttctgcaggcccacctcgtagggggagaac

SEQ ID NO: 482059 - DNA, 122 bp, Homo sapiens
gctccggacgccagggtccgcagagatccccttctgagttctgggagcgggggtctggtccgggacagcgcggagcaggaggaggccggtggttctcagacctgggaacttgcggcttttgc

SEQ ID NO: 482060 - DNA, 122 bp, Homo sapiens
gactccgtttcccccagcgtacccagccacattgggaggctccacctcggtctaacgctccggcattagcaggacctgctgaatgagtggcgccgggcccatccatctctgccatcgctgct

SEQ ID NO: 482061 - DNA, 122 bp, Homo sapiens
tgctgagctgctctgtgcttcccccttgcacaagaaccaggcccagccagggaaaggaaacgcaggccattccctcagagccgaagttaagggagaaataataatacaggcacaggaggacc

SEQ ID NO: 482062 - DNA, 122 bp, Homo sapiens
gtccctggaacagtacgatgccgttgacctcaaggacgaccgaagatagctgtcattcaccgcctgggatggcaacgagtgtttgtaagggtccgaggggcatctcccaataaccaagcgtt

SEQ ID NO: 482063 - DNA, 122 bp, Homo sapiens
gcaagccagttctgagctggggtttatggtctctttggaggttcgggaggtgggagactgcgcatttgttcccattttctgtgtgaccacgggcgtgcctttatttctgggccacgttttct

SEQ ID NO: 482064 - DNA, 122 bp, Homo sapiens
tctgttcctctttcttggcaggtaagggaagggatgccctcccgggctctgggagatgtgcgtgtgcgggatgccacgtgacacagctgaacctgaggggccacttttggcaaaggcagtgc

SEQ ID NO: 482065 - DNA, 122 bp, Homo sapiens
ctggaaaaggctcctggccttcacgacgtgctccagctccgggaggcccctcccgcgtagcgtttgccctccaaggtgaccccttgcctgagagtatggagggcgaatagtgtataaattgg

SEQ ID NO: 482066 - DNA, 122 bp, Homo sapiens
atgaaagggccgagtctgggtatttggaccgtgattgtaaagaagctgttctaaacccgtcggggggcggtgtttgcagggagggaagtagcgtgaggcaggttggggaaggcgtgagaggc

SEQ ID NO: 482067 - DNA, 122 bp, Homo sapiens
gaagagcagtttccagcaaccaactcacactcttgaaacgcctcctcctccagcgggacccgacaacagagacgacccgagggggccctaaggtcaagacttttagggtcccgcaatgggtt

SEQ ID NO: 482068 - DNA, 122 bp, Homo sapiens
gtccatggacctccgcagggcgatgaacttggccccctcatcggatgaggacattttcctcgcctcagcaaaggcgagaagagtgccccgcggagtggctgtgatgagcgggatgcggaagg

SEQ ID NO: 482069 - DNA, 122 bp, Homo sapiens
caaattagggggaaacgcagccttgcctgctcttctccagggctggggcagccagggagacgcggtgtcattaagtagtgagcgcaaagggcggcagtgtctgcagaaggagccacgcggcc

SEQ ID NO: 482070 - DNA, 122 bp, Homo sapiens
cttgaacccgggaggcagaggctgcagtgagccgagatcgccactgcactccagcctgggcgacagagcgagcgagactcagtcaaaaaaaaagaagaagaaaagacacgcgagcccctttg

SEQ ID NO: 482071 - DNA, 122 bp, Homo sapiens
aagcagaatagtctgaggttaaatctgtagactgcaaactcacctcttgactgccacctacgagccatgatatcttagccaagtgctttcttctacgtcttagtttcccatatcttagatgg

SEQ ID NO: 482072 - DNA, 122 bp, Homo sapiens
cccatacgagaaggaagccctggagccgggccttccgtcgctgcgccctcctgcaccctccgagtgtctcccccgcccacgtcggaggcacacacctgctgtcacctgcacaccttgcgctg

SEQ ID NO: 482073 - DNA, 122 bp, Homo sapiens
ggaggcggaggatggggcaggaagtgcgaccgggacaaaggaaccggctgcgcgggagcgcgcctgagggaggccgcggggggcagggccgggactgcgttgagacagtcgccgtgcctcag

SEQ ID NO: 482074 - DNA, 122 bp, Homo sapiens
cagggaggcctgccagagctgttcaccagtactgttattcagaaggcgtccccaggctgacgtgtagtaatttaaatgttggaatgtaaattccttgaggttctttgtgggttttctttttt

SEQ ID NO: 482075 - DNA, 122 bp, Homo sapiens
gaaggtccgcgtgccagggctatcgggaggtcggccggagggccgcgcgcatgcgccccgcgcctgctttcaaactccggttaggaagggcctggagctattttcagaacctgttagggtgg

SEQ ID NO: 482076 - DNA, 122 bp, Homo sapiens
gctgccgcagccgctgcctccgctctgagcactgagcccgcccagttcgccggcgccgagcgcagggcccgcccccatcccaggccccccgcgcggccccacccgctgccacacacccagat

SEQ ID NO: 482077 - DNA, 122 bp, Homo sapiens
caaaaagccagcggcgacagtgttggaggaaaacaggccaggagagccgtctcctccccgcggacctctgccaagacctcctctgctccgactgtggcagcggctgctccctccgcgcccac

SEQ ID NO: 482078 - DNA, 122 bp, Homo sapiens
taaaatgtggttttgtcctttaacatctctatctgttaaagacacacatgggtggccgggcggggtggctcacacctgtaatcccagcactttgggaggccgaggcaggcagatcacctgag

SEQ ID NO: 482079 - DNA, 122 bp, Homo sapiens
agaagttttaagagacagagaaggaaaaacatgaactaagtatgagtttttgcccagaaacggtttacctagactcatgctggagaaatacctttgtcacaccatgaagattggatgggcac

SEQ ID NO: 482080 - DNA, 122 bp, Homo sapiens
cggtttgggggctagggggcaggtgaagagacgccgcagccttgaggttgtacctggtagcgtgggctttggagtctgtgcgccttggggaaatgattttcgcgctctaaatctctgttttc

SEQ ID NO: 482081 - DNA, 122 bp, Homo sapiens
ggcagcgcaagggagaggcagacacccagcgagagagcaaacgggagaggcatcgtgagacgcgggagcagctggagagggaggttagggcgaggtgcatgcaccccaagagatggagaaac

SEQ ID NO: 482082 - DNA, 122 bp, Homo sapiens
tatattactttctacatgcaaggcacttgtacagaggttgaaaagatgtctccatttaagcgtccatttaagcaggggagtggtggagtcttctgtgaaggtagaccagcacatggtttgca

SEQ ID NO: 482083 - DNA, 122 bp, Homo sapiens
gtgacagcagcacccaaggctcaacggacactacacctttccctgatttacaaagcagcgcggtggccacagggcttgggtggccccagagatgcccattcaagtccactggattcatggaa

SEQ ID NO: 482084 - DNA, 122 bp, Homo sapiens
ctcagcattggggagaatcttcaactgctggtggaccggcccgatggcacctactgtttccgtctgcacaacgaccgggtgtactatgtgaggtgaggcggggccgggcaggcagcatggac

SEQ ID NO: 482085 - DNA, 122 bp, Homo sapiens
acgctgctgcaggcctgggtggacagggctcggagaggcccaggagcagcctctgtgtgccggctggggccggggcagtgcgggcagtggcaggacctccctgcctctctccaccacaggct

SEQ ID NO: 482086 - DNA, 122 bp, Homo sapiens
ttcctcgcactcccctaccagctcccagctggggctggcagcgccgccagggcacgcttccggtcatctgtgcacccccccgccttgtagacttgatttccggtcccaccgccaggttccgg

SEQ ID NO: 482087 - DNA, 122 bp, Homo sapiens
tgttccttcctccatggctgaactgcctgctgcgggatttttaattgcatttgcccgtttcgagatgtacggcatgattccaggcttggatcttgggtctgtagtttctaggctgtcattct

SEQ ID NO: 482088 - DNA, 122 bp, Homo sapiens
gaaatgagtttctttctaatcagtcttgcatcagtctccagtcattcatataaaggagcccggggatgggaggattcgcattgctcttcagcaccagggttctggacagcgccccaagcagg

SEQ ID NO: 482089 - DNA, 122 bp, Homo sapiens
ttctgtataaataaacaggatgaagtgggcagccgactgcacattagagatatttttagacgtgggtggcactgcaatccagaaggctgacatatcaaggagagagtgcctgatcccagaat

SEQ ID NO: 482090 - DNA, 122 bp, Homo sapiens
gggccgtcagttcctgaagctgccaccgcagccctctctcctgaggtgatgggtggggaacgctctccacccacctaatccccaggaggacaccggacccctcccgagcaggtctgaaggtg

SEQ ID NO: 482091 - DNA, 122 bp, Homo sapiens
ggcgcgttggggaagcctcatgcatagattgggtgagtaaggctggcccagttctcctcccggcaagataagaacgcattaggagggaagcgctggagtgctcctcttggcgacggatggcc

SEQ ID NO: 482092 - DNA, 122 bp, Homo sapiens
gctgtgggctctcctttccagaatgtctccgtttgcaggcttgctcttccattacatctacggctcttagaaagcaggggctgcgtgtggctcatctttgtacgcccagctcccggcaggac

SEQ ID NO: 482093 - DNA, 122 bp, Homo sapiens
ttctcctcggcgtgtgcaggcggccggggcgatgttccaggaatattaattctccacagccggctcactcccgccgcacgcatgcgccccctgcaccgccggctgctgcttggggagcgggg

SEQ ID NO: 482094 - DNA, 122 bp, Homo sapiens
ttcttggcctgttggtctctccacgcatccgtgctgctctcgtgaccgcctcggtctccacgctgcctcttgaccccacataggcgtcttccctgtgtctgcctccccaacccgcctgtctc

SEQ ID NO: 482095 - DNA, 122 bp, Homo sapiens
agcaatagaaaaccaaacaccactttcaaggcctttctcaaaagccactcctttagtaggcgtgtcactatcccactactgtcccattccacagctggaagtgggaatcacatagttccata

SEQ ID NO: 482096 - DNA, 122 bp, Homo sapiens
acctcatactgcacatgacgatcattacctttttatctcctagaagcaaggtttgagggacgtcgtagtccccagggttccagctggcggtgggagtgggccacaggccgggtgatgagccg

SEQ ID NO: 482097 - DNA, 122 bp, Homo sapiens
gtgtggagagagaccaagggagatggcaagaaggaagttggtaaatcaatttggggtacacgggctttggggtccctcagggacactcaggcggtgatgtccaatagacagttggcaaagct

SEQ ID NO: 482098 - DNA, 122 bp, Homo sapiens
agggtatacaccatatgagtaggtcacatttaatctacattctaaactattgctgagcatcgtactccatcctctgcatccaaacagttgctcaataaatacacagcttagcatggggaatg

SEQ ID NO: 482099 - DNA, 122 bp, Homo sapiens
tgtgatgtcagttcaacttgggattgctgcagctaatgtggcagcagaaatggcatcaggcgctgagctgcagctggggccagagcagctccaaccggcctgctgcaattagagacgtaccg

SEQ ID NO: 482100 - DNA, 122 bp, Homo sapiens
aaacaccgtcgcagcgaccacaggtgcagaccaccaagtccacaccgccagccgcccgggcgtccccaattagcagttggggcgggaccaagtcctcgagctgccgccgcagcggcggttga

SEQ ID NO: 482101 - DNA, 122 bp, Homo sapiens
gagataagtttctcgaagggaaagataaaagacttttggaagagttgtacacgatttcaccggtgttggacacagaattgaatgctcccattagaattctggaatgcctttgtttggttttt

SEQ ID NO: 482102 - DNA, 122 bp, Homo sapiens
atggggaacggctgtccctcccttcagagctagaaacaaggccagccaggatgttgggggcggcatttggggacgtgataatgcgggtgataaccattatggagtgcttcccaccctccagg

SEQ ID NO: 482103 - DNA, 122 bp, Homo sapiens
gagtatctctcttgtggtgcctggaactggcatcccctttgtggagcttagggcaagccccgcctctgcatgagacttggtttgtgggacacacttggtttcagggaaggggaaagaggtca

SEQ ID NO: 482104 - DNA, 122 bp, Homo sapiens
tccccctgcgaggagaaggcgccgatgacctagggttccttcgcagtcgggtttgttatccgagtccccgaggagaaggcaccatgtgtccttggacattttattatcggctgcgccccagg

SEQ ID NO: 482105 - DNA, 122 bp, Homo sapiens
aaactctcctcccatttgtagagcgaaggaggccgggccaacgtggagaggaacacaggccgacagtatagaggacctgagcggagagtcctggggaaaacgctgacttctttttcttcaca

SEQ ID NO: 482106 - DNA, 122 bp, Homo sapiens
ggaggttccaccaagcccgcctagctttcttgacatggggttgggggtggcagggccccccgggagatagggagtgttagggggctcccggaggtgagggctccctggccttctgcataccc

SEQ ID NO: 482107 - DNA, 122 bp, Homo sapiens
agaggccactccttgttatttctcaagttttatcatcgccggcgcggctgaggagctgcccgagcctgcccctctgctccccagcagccacccgggcgttcgcgctcgggaaagcggtctct

SEQ ID NO: 482108 - DNA, 122 bp, Homo sapiens
ctaacagccatcaacttcacttccctgatcttccagcaatcctatcataggttatgagagcgtataaagaggaagagaggaggagagaatccaagatacagaccagattcaaacacaagttc

SEQ ID NO: 482109 - DNA, 122 bp, Homo sapiens
cggggtccaagcctgtcgtctgcagcccttcattgccctgcctagcttggactgcgtaagcgtctgctgggcccaaaccccagcccggtccacacacttgggccatctctcctgggggaccg

SEQ ID NO: 482110 - DNA, 122 bp, Homo sapiens
caaatgtagcagctagtgtagtcagtgggttgtgatttggctggagctgaggcaagggaacgtctgaagcgaatgaataaaaccctgcacagctctgagaatgcccgtggcctggcctgtgc

SEQ ID NO: 482111 - DNA, 122 bp, Homo sapiens
cccgggcgctgcggacgcggcctgggctgcagccccgcgacctgggagctgtgctcgggacggctgctgcggactgctcttgtttgcactggccgtttgcttttgggatttctccagtgcag

SEQ ID NO: 482112 - DNA, 122 bp, Homo sapiens
tgtgcagactactgtacacattgagagcctcctgaacaggtagtctgaacactgggttggcggggccggctatccatcctgcagaaccccccaggcagacgctggggccaccaggccaggcc

SEQ ID NO: 482113 - DNA, 122 bp, Homo sapiens
gtgcccagcacagcctttactgtttattatctcctcgagccctaagattactctccaccacgggtgctgttctagtctcttcattttacagtggaggaaactgagtctcaaaatggtcaagt

SEQ ID NO: 482114 - DNA, 122 bp, Homo sapiens
cagcgggggcgcccggaggcggggcagcggtgggggcagcatgagcaagacctgcacctacgaaggctgcagcgagaccacgagccaggtggccaagcagcgcaaaccgtggatgtgcaaga

SEQ ID NO: 482115 - DNA, 122 bp, Homo sapiens
cgaacgacaggaggggtgaggggcaggtgtggctggctaccggggggccctgccagcgagcggagccacaagggcatgcaggacggagaggcaagggcctgtggtcaggcatgcaaaacagc

SEQ ID NO: 482116 - DNA, 122 bp, Homo sapiens
ttaaacatacaccgagcgaaaatgcgccggagggaggcgatgttgcctgtgagccaaagccggttcggcaccaagacagaagcagagagaactgatctctctcccggtacccatgacaatct

SEQ ID NO: 482117 - DNA, 122 bp, Homo sapiens
tgcagagcttcttcagggcccttgatgccctgaattgcttaagacacaggaatccaccagcgagttggatttcttctagtcctgagagacatctaacagtcagtgctaatttgtccaggtgt

SEQ ID NO: 482118 - DNA, 122 bp, Homo sapiens
ctcactttctgcgtctatcaaatgagaatagcgctactatctgctgtatgaaacactgaccgagttaagcaaaataatgcaggttagctgcttaatccagtgtctagcacatagcaagtgcc

SEQ ID NO: 482119 - DNA, 122 bp, Homo sapiens
gacgtgctggtagtgagccgggcggccttgcaggcgctgggcgtggccgagggtggcgagcgctgcccacagagcgtgggctggatgcccggcctcaacgagcgcacacggcagcgaggtga

SEQ ID NO: 482120 - DNA, 122 bp, Homo sapiens
tgtgtgtgtgtgtgagtgcgcgcgcgcgcacgcgtgtgtgtgtgtgtgtgtgctgggggacgcttaggtaggaggctgctcaagacacccaaagtattctggaagcaagcaccctctggggc

SEQ ID NO: 482121 - DNA, 122 bp, Homo sapiens
ccgagcccagtcacatctccagcggtccggtgatggccgtggggctggcgccgagtggcacggcctccacagtggcccacaagggtctgttgtccacgccgcgtggaccgcgcaggccggtg

SEQ ID NO: 482122 - DNA, 122 bp, Homo sapiens
tgctcccgggccgcctctccgctcgggcgctcctggactctcggagggagtgagcctcaccgcgtactgccacccccagccggcgcccattcactttatggcagaccagggcgcccccagcc

SEQ ID NO: 482123 - DNA, 122 bp, Homo sapiens
gggcgcggggcagtccctggaccggctctgctgtgctccgggcagtcgggggcttgcgggcgctccggggaggatgcgggcaccaccggctggacggtcgcagcctgcagggggccctgggg

SEQ ID NO: 482124 - DNA, 122 bp, Homo sapiens
aataactccccgtatgtaaaatgggattactacccaccatgcacgcatttgtttacaaatcgacttgcaatagttgaaaagaatttgaatgttgaaaataaactaaaactctcagtagattt

SEQ ID NO: 482125 - DNA, 122 bp, Homo sapiens
cggaagcccaggaccgtggtgccctcgccgcgccgctcccgggtctccaggtgggcgccgcgctcccgctggctgaggtcatgcccaggtcaccgtcgcgtggtccctcctctctgggtgag

SEQ ID NO: 482126 - DNA, 122 bp, Homo sapiens
ctcgggccacccccagctggccggcccgcatttggggacttggcagccgaagacttggtgcggagacctgagaggagcccgccaagcggcggcggcggctacgagctgcgagagccttgcgg

SEQ ID NO: 482127 - DNA, 122 bp, Homo sapiens
gacatggccacgcaggtgtagttggccgagtccttgacatctgtgagttccagcacgttccgacccacgggcatgtcatcctcgggggtcaggtcctcggccccctgcatccacttcacgta

SEQ ID NO: 482128 - DNA, 122 bp, Homo sapiens
cgccgcgccagcaggtcctaatgcctgtcacttcccaggacgctggcagcagcagcagcccggagcccccgagccctcggcaggtttgcgtgtccttccccgcgatctgattggataaagtg

SEQ ID NO: 482129 - DNA, 122 bp, Homo sapiens
cgcaaaagatgttgatttctgaatcccagatacccggtgtcagctggtgaaagaaggacgcgatgaagttgctgtctcccctcggagtttggcaggcccgggattccacaaaggagtaggcg

SEQ ID NO: 482130 - DNA, 122 bp, Homo sapiens
tcactgcccctttccttctcatagaaatattaagggacctacttctgaccattacatgcccgagagttcccttctgccacttaaaagtgttaaaatattaaacaggaaaacccataaatcaa

SEQ ID NO: 482131 - DNA, 122 bp, Homo sapiens
tgttcagagtatgaatttctttttaaaacttgctgtgtctttcacctgggccacaccctacgcccacccaccccctctcagccaaaagggaggtaaaaaatcctgcgggcccagctgggggt

SEQ ID NO: 482132 - DNA, 122 bp, Homo sapiens
ggtagctgtttcacaactttactttctcaacaaacttgcttttactttgcactgcggactcgccctgaattttttcttgcgcgagatccaagaaccctcccttggggtctgaatcggacccc

SEQ ID NO: 482133 - DNA, 122 bp, Homo sapiens
tggattctctggactgatacattttcactctgtggagctgaccgtcctttgacctagggtcgcaggtgggagcccactggcctgaaagatccgagttttcaacctgcagaatcaccgccaac

SEQ ID NO: 482134 - DNA, 122 bp, Homo sapiens
cttttctgcttcggaggccaggatctgggcctgtttcttcccttctgccacattgatggccgactctcgggtcccctcagactctagaactgtggcccgtttccgccgctctgcctccacct

SEQ ID NO: 482135 - DNA, 122 bp, Homo sapiens
ggtagagagggccatggaaggaatgcggctcaccagctcttcctgaagctttatgggcgacgcgagaacccgctaacgagtgaggaacttaaaacgtatttatatgtaagcaagaaatgttt

SEQ ID NO: 482136 - DNA, 122 bp, Homo sapiens
tccagctgtgtctcttaggcctatcctgtgcctgctctgttagcttcccaggtagccactcgtttagcaagaaagaagagaaagagatgcactttcaaaaggtcaaaagacacattcatttg

SEQ ID NO: 482137 - DNA, 122 bp, Homo sapiens
cgccggaccagccgccagccctgagggcttttctgttctcctaggtcagtttcattgacacggagaactcaggaaatgtttttttggggggttttgtgtgcgtgtgtgcgtgtgtgcgtgcg

SEQ ID NO: 482138 - DNA, 122 bp, Homo sapiens
aaagtggggacaggtgtgtgtctggggaaatctaaggagtcctgcaaggctgagagcccccgatcctgccgtttgaattccagggtcgcggcggacggcacggcgctgccgcctttgcacgg

SEQ ID NO: 482139 - DNA, 122 bp, Homo sapiens
ttcttcttcttctgccctttgggctgcgggtatttctggaggggaacgacacaggtcatacgctcagctctgcccttcctgcgggtcacacaaccgcattctccagctcacccagcagccca

SEQ ID NO: 482140 - DNA, 122 bp, Homo sapiens
tcccaataggagctccgagcttcactttctcgtcttctccccgcgcccctcccgtcctgccgaccccaggtgtcctgtataaccagttcctgtcgcaagtggactttgagctgctgctggcc

SEQ ID NO: 482141 - DNA, 122 bp, Homo sapiens
cccctcttgtccccccgtgcgcagggcttcctcagccgccgcctcaagggctccatcaagcgcaccaagagccagcccaagctggaccgcaaccacagcttccgccacatcctgccggggtt

SEQ ID NO: 482142 - DNA, 122 bp, Homo sapiens
tgcggagtttgttccttctgatgttcggatgtctttggagtttcttccttctggtgggttcgtggtctcgctggctcaggagtgaagcagcagaccttcgtggtgttacagctcttaaggtg

SEQ ID NO: 482143 - DNA, 122 bp, Homo sapiens
ctcctcgcctctgtttactcgcctgtgagatggctgaggatgacaaggcgaggattaaggcgcgtactcctattacccgggttcaaatcctggcacggccacttactcactgcgtggccttc

SEQ ID NO: 482144 - DNA, 122 bp, Homo sapiens
tctggtcacccgtcggcccgtttcttgagctcagtggcccaagcctggatggcatcgaagcgaagattccgggatttagagcccgaaacgtaaccttcctgagcttcagtttcatctgtaaa

SEQ ID NO: 482145 - DNA, 122 bp, Homo sapiens
aaacagaaaaggggtgatgtaggagatggtcaggttggtaggagaagctataaggaaagacgcaattggaaggtcgggaggttttccaaagcttcaggagagaataaagctgaaggcagctt

SEQ ID NO: 482146 - DNA, 122 bp, Homo sapiens
ttggccttgtgcgaatgttgtaagctttccgcctgcagaggaatgggctggcgtctgggccgggctgggaagagtgatcgctccagccgcgtggcagtaacattcccgcacatttaacaaca

SEQ ID NO: 482147 - DNA, 122 bp, Homo sapiens
ccagggtgggctgcgctgggcgctacctttcacaaaagaccagggaccccaacgcgcccgcgaccccagagggccggtcctgtatttgttcctgggtggaaggagaataagaacgggattaa

SEQ ID NO: 482148 - DNA, 122 bp, Homo sapiens
gtactttatgcaaatcctagaagccgcgcctcccgccccgcctgcccgcccacactcactcggtgatctcctctgtgaccgtgtgctccacctgcaggcgggagttgacctcgatgaagtag

SEQ ID NO: 482149 - DNA, 122 bp, Homo sapiens
atacactcgcattcccggagctcttcggagagcacaaggcaggagggtcagtgacgttctcgcattctttttctggctggccattagaattagtaggccacatctaatacgtccacacaggt

SEQ ID NO: 482150 - DNA, 122 bp, Homo sapiens
gtgtgaagcggaggtacatgctggaaacgtgtgaatgttgttacgagattggagcgtttgcgatgaccttcctgcaggtggaagcattgtgcacaggtggttgggtttgtttgactcccgga

SEQ ID NO: 482151 - DNA, 122 bp, Homo sapiens
cctcgcccctcaccaccccaggagccccctcccgaggcataggacgccctgcgtcccccacgcacctgcctggccatcaggattcttcctactgccctaattggacaggcacctagacagct

SEQ ID NO: 482152 - DNA, 122 bp, Homo sapiens
agagcacgtttctgggcatctgccagggatttagagcggggctgtccaggggcccctctgcgtcctggggtgagggcgctcagtgcgcactgcccgccctgcacgctcggttctcctgcctg

SEQ ID NO: 482153 - DNA, 122 bp, Homo sapiens
tctgctatttcccatcaggaaaaagtcaccaaacgaatgaactagcaaacggcccattctcgatggatttctcctccactcagtaaagcagaatcctcctgtggcttgtttctccacgcctt

SEQ ID NO: 482154 - DNA, 122 bp, Homo sapiens
aggagggcggggctaaaagggagatgctgcctagtgattcgttgtggcgcattagtaacgcgactacagggggctggaaacagttcagtctttgattggttgctgagaggcggggctactcg

SEQ ID NO: 482155 - DNA, 122 bp, Homo sapiens
ccattgctcccagcaagagccaagccccatgcagaggctggaggccagcaggtctgacctcgttcccaaccgtctccgccactgctctcccttgcgttctcaccttgcctctgcacactggc

SEQ ID NO: 482156 - DNA, 122 bp, Homo sapiens
tcggtctgcgccggaagtgcatgagctgccgatgtggtgcttagtgattgcggtttcggtcgctctcccgtgtttcccgggctgggtatttgcctcgcaccatggcggtaaggaggatggat

SEQ ID NO: 482157 - DNA, 122 bp, Homo sapiens
tcccacgtccccccgcgaaggactcccagacactgcccaccccgcgtcggcctccatccgcgtgctctgtccaccacccgggcctcgccctggggccaccctttatccagtctcggaagaaa

SEQ ID NO: 482158 - DNA, 122 bp, Homo sapiens
gtctagagcaagtgttggcgaactattctgtaaagggctagatagtaaatgtctgaggttcgtaggatcatatggtgtctgtcacaactactcgactctgccattgcagtggaaaagcagcc

SEQ ID NO: 482159 - DNA, 122 bp, Homo sapiens
cccaggccatgtggccggtgtggcctgccgatcactgaccacaccctggtgtgcagagtccggggctgaccctcagcctggctgcagtgccttcagttctcaagcaccctggcctgctcttg

SEQ ID NO: 482160 - DNA, 122 bp, Homo sapiens
aataaatagagactaggatccatgttcagtccatcttgtgttttctctaataccagcaaacgctgtgcatagcagaagccctgcacacataacaagggatggttttacagggagccaaggac

SEQ ID NO: 482161 - DNA, 122 bp, Homo sapiens
agtccatagaaacagctgtcttgggggtccgggaagagtttaacactggaatcacatctgcggaaaccgggaactggaagcaaattgaggatgcggccagaagggaaaatcaagtttttcaa

SEQ ID NO: 482162 - DNA, 122 bp, Homo sapiens
gggcagaaggggtggggtagggggcgagggcagagcgccccctcgtggctggggcgcctgcgcaaaccagctgcctcacgagcactggagcttgcgttacttggcctcacctcacctgtgct

SEQ ID NO: 482163 - DNA, 122 bp, Homo sapiens
cacctgccacccggagacattttccaccccgtcccccagaacgcagccactgcgcccttgcggccttgcttgctctccactggccaaggactctgaatctccaccaggcctgtaaacgggga

SEQ ID NO: 482164 - DNA, 122 bp, Homo sapiens
gtcccgcgcgcggctacttcttgagcatgtcctgcagcggcccgggcaggtacttgatgacggtgtccaggatgctctcgtcctcctcctccacctcgtccccgcagcccggcgggatggcc

SEQ ID NO: 482165 - DNA, 122 bp, Homo sapiens
gcagaggctgctgctggtgaggcggcgtcggtacaaagtggggcgctcaggcgaagcgcacggagcggccgctgccgctgctctggccgcagggcgcacacaggccggtgctcaccgccacg

SEQ ID NO: 482166 - DNA, 122 bp, Homo sapiens
ctcagaccgcccgtgggtcacaagtgcaaaggtaacagtgtcccctgggaggccgggatgcgtcgggggcggggagggcgcgcacctgggtctcggtgagcatgagcgaggtggccacctcg

SEQ ID NO: 482167 - DNA, 122 bp, Homo sapiens
tatcaggtggacacagatccaagaaacaagagtcacaaatgcacctggaccaggccaggacgctcagttcccgggacaagtgagatttccttgttctagttcaaacccagccacttggacag

SEQ ID NO: 482168 - DNA, 122 bp, Homo sapiens
gagccaggaggagaacacgcagctctgaactggctgagcgaggtggccacagggccagggcgggcgctgggtggagggcaggaggcaatgacactaatgctttttttttttttttttaactt

SEQ ID NO: 482169 - DNA, 122 bp, Homo sapiens
ctttgtccgtgtcgctcagctgccggctcactgaagggtggtcatggaagagcaggccgccgtcgggcggtgactgattacaatcatttgttgtgatgcatcgcaaattaaagggacaagcc

SEQ ID NO: 482170 - DNA, 122 bp, Homo sapiens
gaaattcaccgtcgcgccgactctccggagggaaacaaaaaggcagaaaaaagagaccggcgcctggacgactttcaggggagagctggaagaaagactgtcaacagctgagtgcgggcgcc

SEQ ID NO: 482171 - DNA, 122 bp, Homo sapiens
ccagccagccctgggcacctgcgttttcgctcttggagccaaccgttgccctgaggaccccgcaggcccccagccagagcacggcccagcggctcaggcccaccgcccagacccggagcagt

SEQ ID NO: 482172 - DNA, 122 bp, Homo sapiens
gatttacctggttaattttatgtgtcaatttggctgagccacagtgagtgaagagatattcggtcaacattattctggatgtctctatgagggtgttttaggatgagatttacatatatatt

SEQ ID NO: 482173 - DNA, 122 bp, Homo sapiens
gcctcctcgctctgtgggctgggaggctacagcgttggcagaacggcgagattacctgcccggggcagaaaggaataaaagaagatggtgaggcctccgaggcctctgagctggggctgagg

SEQ ID NO: 482174 - DNA, 122 bp, Homo sapiens
gagtctttcaagccttggcattcaaccagccttcagacatgaatcaggacatgtctggaccggccagagctattacatatgtttggccccagaacccacatcggtatagaaaccactgacac

SEQ ID NO: 482175 - DNA, 122 bp, Homo sapiens
ggcccagggagacccgggcagccgcgggatcggcctccggagtcctgggacagcccagctcgccaggatcgcaagggaaacccggggaccagagcaggaattttcctacttgcttcagcgcg

SEQ ID NO: 482176 - DNA, 122 bp, Homo sapiens
tctggctccccctcctcgggtcctcgtggctctctgtcgtgtgaagcggggggtcaggagcgcacaaatgtttatactccacgtgagtcacttgcacagatgacgggtgatgttttcctcgc

SEQ ID NO: 482177 - DNA, 122 bp, Homo sapiens
cgtccccccaggcatcctttccaggtgcccccgcaggtgtcccctccagtcacacctttccggaagcctccccatgcaggagcacagggaagcacgatccgctgaggcctgtgtgcatcgct

SEQ ID NO: 482178 - DNA, 122 bp, Homo sapiens
ggcgccgaggtgacagcaggctggggaggcttggagggatctcccgccaacacacagctacgttccccacaaacttcgcgtcacgcgtggaggcgccgaccccctcggaggcacagagagga

SEQ ID NO: 482179 - DNA, 122 bp, Homo sapiens
caatactattatttctcctgtttacagacaagaaccctggggctgagagccatttggtcacgtgaccagggccttccctgcagaatgggcagagccaagtcccctgaccccaaagtgcaggc

SEQ ID NO: 482180 - DNA, 122 bp, Homo sapiens
atctgatgcatcgtttcgtgtcgtgtaagtcctctaagatgagcaagagagctgaaggtccgatcaccccagcgtggacccagctggctctgctctgccaacctggggaccaaatatcctgt

SEQ ID NO: 482181 - DNA, 122 bp, Homo sapiens
tttcataaccccctgggcaccctccttgcacgtttcctgggtttttactccttggctttgcgggctttcagacataagctgtgacatgctttgtccagctttctcagagtgaatcctaaggg

SEQ ID NO: 482182 - DNA, 122 bp, Homo sapiens
gtccagcagcctggggagcaagccagagacacagtgaagggcctgcacgtttgtccccagcgcctggtttctcccttcccgcaggagcgcctccccatgaaggggtccatccccaggaggcc

SEQ ID NO: 482183 - DNA, 122 bp, Homo sapiens
ctaatcactaagccgagtaccaagtccaaatggcaagggagtgatggagtggaagctggccgagcaccacttagcctcctggagatctgggcaagctgtggtggaaaaaaatcacagggtct

SEQ ID NO: 482184 - DNA, 122 bp, Homo sapiens
tgtgggctcagctccttctaggaatgttggccctatcaccagccattgcagaagaacttccgtgagtgcttggtgtcagaattggtttattagggcagcggcttcttcgcctaactttctca

SEQ ID NO: 482185 - DNA, 122 bp, Homo sapiens
tggtcacctgaatctttgattcagcattgccacaactggtgagttttcttcttgcctccccgagactgccagacaatgcttctctcttctcctgtcccctatttgttgtgtctttttccttc

SEQ ID NO: 482186 - DNA, 122 bp, Homo sapiens
gggccagagaagaggcccaagtcttccagggagggctcagggggtccccaggagtcctcccgggacaaacgccccctctccgggcctgatgtcggcaccccccagcctgctggtctggccag

SEQ ID NO: 482187 - DNA, 122 bp, Homo sapiens
gacaactattcagctgggtgggacgttgctacccccttgtggcacccctgctgcagcctgcgattcttacgccctgtatttctggtctaacatcaaccaacactttggcgaaatataataaa

SEQ ID NO: 482188 - DNA, 122 bp, Homo sapiens
tgttggggagccaggggccgctcctctccgataaatgacctctctcttagcaagtgatcccgaggggaggctggggagcacgcggtcgcgccagaggccggcctgggttcgcggggaaaagg

SEQ ID NO: 482189 - DNA, 122 bp, Homo sapiens
catcatcgtaggcgtgggcaatgctgacttctctgacatgcggctgctggatggcgacgacggccccttgcgctgcccccgaggggtgcctgcagcccgagacattgtccagttcgtgccct

SEQ ID NO: 482190 - DNA, 122 bp, Homo sapiens
gtgaaccacggagtgggtgcttggaaaagcctcagggcgtgcgtggctgcatccgtttcccgtggccaccgtcatgaagaccacagactgggtggctgaaggtaacagaaatgtactgtctc

SEQ ID NO: 482191 - DNA, 122 bp, Homo sapiens
ccctggcgtgcccgccactcccgggcccctgccggtccccgcctgggccccggcctcgctcgccacctccgcgacctctgctcccagcccacttctcggtcccgctcgcggcctctcccccg

SEQ ID NO: 482192 - DNA, 122 bp, Homo sapiens
gatgaagtctcctccctgctatcaccttcgatgctggctgaggagatggctctgcccacgcggccctccatcatgtcataggtgcgcttgggggcggccgtctcatgggggggtcctgagct

SEQ ID NO: 482193 - DNA, 122 bp, Homo sapiens
tggccgcactgcagccccgcagccttgtgggaaatgtagtctggcgctccgggctgtaagcgccggtcgcggctgtgtcggtcgccgctgctcccgctcctgctgggagagggtgagtgcgg

SEQ ID NO: 482194 - DNA, 122 bp, Homo sapiens
gcgcagttgccgcctttcttgccttggttttcgaagaatgtgacctggagggctggtgggcggtgcggcgcgccgcggcgcatgcgcgttccggtctgttttccctgagttaaagcgcgcgg

SEQ ID NO: 482195 - DNA, 122 bp, Homo sapiens
ctgtatgttaatgcctagggctgtagaaaggcgagacactgtgacaaatcttttttccagcgctaagcccttcgaggtaaaatgggtggaaagccaggcctgccgctaagccctgtccactc

SEQ ID NO: 482196 - DNA, 122 bp, Homo sapiens
cctctccgatccttcagagcccgcgccgggcaaagtagaggtcaagtcaacacacacgaccgcagggcagccctcccactctcccgtgcggtccgcagctcggcttcggaacgaccaccgct

SEQ ID NO: 482197 - DNA, 122 bp, Homo sapiens
cagcccctcgcgcgccgaggccgccggagccggggtggccgcgagaaagcagggaagccgcgcgctgcaagctcaagcctcgccgacgctagccccgaacacaaagcgagcgcccgcgtccg

SEQ ID NO: 482198 - DNA, 122 bp, Homo sapiens
actgtaattgatttatgtaaaggagcaaaagactcttcaactctcagtttaaaaaggaaacgatagttatgataccttttgcatgcagcgggaagaaatgggattgccaggaagcctcttct

SEQ ID NO: 482199 - DNA, 122 bp, Homo sapiens
gcccggcgtcgcacgactgggcaatggcgtgccagctcattggctgagccggaccaaacccgagcaaggacgcttgtttcctggcaacggctaaacgcaagggcggggtcgccgacggctat

SEQ ID NO: 482200 - DNA, 122 bp, Homo sapiens
gacaatatttttaaaattcagaaaatattgactcctttgaaatctgaccaccaggaaggccgggcacggtggctcacgcatgtaatcccagcaccttggggggccgaggcaggcggatcacg

SEQ ID NO: 482201 - DNA, 122 bp, Homo sapiens
cacaagaagggcctcaacgttacacttccgtaaactgctcctacttctggagtcctcgcacgggtttatggtccacctacggcggccgaggagaacctaaaatgtttaaaagagcaaggaca

SEQ ID NO: 482202 - DNA, 122 bp, Homo sapiens
cacctgcctctgcctccaacaggtgcccaggcactggggggacggcgggcgcaggctgggcggcggcggccggcgaggagagcgcggagtcgagctgtgcgagccgagagggagggagcgcc

SEQ ID NO: 482203 - DNA, 122 bp, Homo sapiens
cataggggtaggttcagaaacccgtggagagctcctcattcattaaactacttttttcaacgtaatatgatcttaccctacaatcctgccagaaatttacttgtttattacactgagttcta

SEQ ID NO: 482204 - DNA, 122 bp, Homo sapiens
agggtgatggtcccaaccgtgagaagccagctagagcagccaccttggatcccagcagaacgggccgctgtgtgtctttagttgccaaagcgactcggcaggaaaacaggccttttggtggc

SEQ ID NO: 482205 - DNA, 122 bp, Homo sapiens
gtgaagttccgcaaagtgcttcgcagcgggccgagcccgcgggagccacctgcccggccccgacgcgcatggtcatttataaatttaaaactcttccgtagcaaccggttatgtacagagtc

SEQ ID NO: 482206 - DNA, 122 bp, Homo sapiens
ggagccccacattgaatcacatgtttcataaggcagtaattctaactttgaaagaagtcacgatgctctgactaatttgaaatttatttttatttctgagggagatttggacatggaaaggg

SEQ ID NO: 482207 - DNA, 122 bp, Homo sapiens
tccaaatgactgacacgccagtgggaaaattttccgtttcgactcattggaagtggaccccgtgaaacaggcaagtcggtctgtctgtttccggcgttatgtgggttccagcaagagcacaa

SEQ ID NO: 482208 - DNA, 122 bp, Homo sapiens
aaagggagactttactccgtttcctctttgttatttcggccggccgggtgatactagggccgaaagaagaggaggtgataaggcaggtgacatttcctcctccttcccgtttttaggctctt

SEQ ID NO: 482209 - DNA, 122 bp, Homo sapiens
actgtgacatagtcccaagagagccttcactaccctgatagagttccagagctagtattgcgcctcactatcctacatggagccatgatggtcgggcctctgcaggccaccttgcttacaca

SEQ ID NO: 482210 - DNA, 122 bp, Homo sapiens
tatgatgagcagaaagagcctccaaagaaaagcgctggataaatacaaggtgtaacgccacgcctgattagcctgcatgctctctgcccacagacttctacccacagactatgttccactcc

SEQ ID NO: 482211 - DNA, 122 bp, Homo sapiens
tgtgaaaggaaatacacaggaaggaggtggcaacgggtgggaagccactagaccacgacgcgattctgccccagtgaaggcgaggggatagcctgggcctagatcgctgtgaggtctatgga

SEQ ID NO: 482212 - DNA, 122 bp, Homo sapiens
cgtcacacttaccttatcagaaagagcagcctggcactggcacaggagtgcaacaaaacacggtcaatttactaagcctcccgatagccaaggttattgttggcaatacaaaaggtaacaaa

SEQ ID NO: 482213 - DNA, 122 bp, Homo sapiens
tttgtccagtagacggtgctgttgtactctggccctgctgctgatggcatccttcttcctcgttagtgtttcatcacaggattttataatgaaaaggttctcagacatttggggaaaggctt

SEQ ID NO: 482214 - DNA, 122 bp, Homo sapiens
gaaggtgccggccccgggctctgctgcacaggccgtgcctccacctaaacctcattgcaccgaggggccctgccagggttcccgaatgttacagttacagatgccgaaactgaggctggggc

SEQ ID NO: 482215 - DNA, 122 bp, Homo sapiens
agaacccacaggttctggttgtcctcaggtgcttggtgtccttggatgattctgtgccttcgcctcccacagcgaactgagataagacctggggacatctcgactctcactctcccctcctt

SEQ ID NO: 482216 - DNA, 122 bp, Homo sapiens
ctatcagcctaacgattaagtcaacatgctaagcagccacacgggggctactaagtgactcgcacgggggaagcaggcagggagacagatgggcaggggagggaatctggggcaatgcacaa

SEQ ID NO: 482217 - DNA, 122 bp, Homo sapiens
aagcagcgtcgggggccaagccccaagacggagttggggggcccccaaggctccctagggcgggcttctctctctggacccttcggccccgggcctcagggaggtcctccgagccgtgaccg

SEQ ID NO: 482218 - DNA, 122 bp, Homo sapiens
aaagctatccttcctggggtgtattcatccaagactttccagatctgtatacccaatacccgtatttgtttattagaagctggcatctttcttaagcctggcacatccaaacatataaaaag

SEQ ID NO: 482219 - DNA, 122 bp, Homo sapiens
tttaatgggcgcgccgagccctcctggctggttttcactgctgcctgcgtgtgctctgttcgtcctgcttcctagagttgggggctcctcctccacctgcccaccagtgaggcccgagggga

SEQ ID NO: 482220 - DNA, 122 bp, Homo sapiens
ggtgtggagggagaggcgcagggggcaaccggggctgtgcacggtgcttgcgggccagcacgagttccgggtgggcgtgggctcacgggccccgcactaggagcagctggctggccccgcag

SEQ ID NO: 482221 - DNA, 122 bp, Homo sapiens
ctcggtggggctgctccgcgtgcccatttctgcttgcatggaagtcatttttcttaaaaccggcgcacgtttctgaacccactgggtgtgatgcagttgagagactgggctgctctgatctg

SEQ ID NO: 482222 - DNA, 122 bp, Homo sapiens
ccactgagccagagagagcccgggacaagcgggagacctgcccattcccagttggctgcgcgggagattccctggtgcagctgcggcaccctcacaggtgcaggtccaggcatctctgcagc

SEQ ID NO: 482223 - DNA, 122 bp, Homo sapiens
aggtttgaaattcatagagctcagttccttttactagtgagatagatcaaccttctcactcgtacctcaccttcatttcctaaaggaactttaaaataatcttcacctgtgataaacacttt

SEQ ID NO: 482224 - DNA, 122 bp, Homo sapiens
ttcagaccaatatccctgaggagcactgatgtgaaaaacctcaataaaacactggagaaccgaatccaggagcacatcaaaaaacttatccacctctatcaagtcggcttcatacctgggat

SEQ ID NO: 482225 - DNA, 122 bp, Homo sapiens
acgaaacgccgcggagctgaggcagttccgctggctagtgtgtacgcggcgagcttctcccggcgccgcccgctcggctcccatagcgcccgcgacagcggtccggacgccgcccgaacatg

SEQ ID NO: 482226 - DNA, 122 bp, Homo sapiens
taccctttcaggattaggttggtgttttctttcccatgccacctgggaagtttctgtttccgaagtggctgaacacagacgggtcagtcagtcccaggcctttacccggcagaggcgcgcgg

SEQ ID NO: 482227 - DNA, 122 bp, Homo sapiens
ctcagtgacggagggggcggggatcctggggcagggaccggcggagcctcccgggaggggcggggcctcaggaggagtgggcgggctttcctggacggggcggggcccccgaggagggggct

SEQ ID NO: 482228 - DNA, 122 bp, Homo sapiens
ttaaattatgcatgttgttttgcacacatttgcatgttcaattcacatgcctgagttattcgtctacaagataaaaccaagcatagtaattcaagtaacctgtgtctgatttctcttcaccc

SEQ ID NO: 482229 - DNA, 122 bp, Homo sapiens
cggggtggggccgggggggggtccgggggcgccccaggctttaaaggcggtggagggcgtcgcctgccagcgccccggcccggcgcgcgccccccagggcgcccgggcggcgggggcacggg

SEQ ID NO: 482230 - DNA, 122 bp, Homo sapiens
taccaaggagaggtcgttcaaattctggccagcaaccagcagaacatgtttctggtgttccgagccgccactgaccagtgccccgcagctgagggctggattccaggctttgtcctgggcca

SEQ ID NO: 482231 - DNA, 122 bp, Homo sapiens
acgagggctgcacttggtgtggccgtgtcctgagcctcagtgaggctgggcagatggtctcggagcctccatggggcgtagcaggaaccgggcttggcttcctattgtgactgatgagaaaa

SEQ ID NO: 482232 - DNA, 122 bp, Homo sapiens
aagtttgcccagcatgccttccgaaccttcgacaagaatggggacggcaccattgacttccgagagttcatctgcgctctgtccatcacctccaggggcagctttgagcagaagctgaactg

SEQ ID NO: 482233 - DNA, 122 bp, Homo sapiens
ggcggtggggggtgccgggggaacggggagaaccagggcgcctcgctcctggcctgctcgcggggctcgattttggagtctgaagcccaaaccagccgaccgggctcaggagagacccttaa

SEQ ID NO: 482234 - DNA, 122 bp, Homo sapiens
catgaagccggccgtggactgcatgggctgcggggggctgccggctggagatgggccccccgacgacgaggccaatcccttggccttctggtccttcttgtacttcatgcgccggttctgga

SEQ ID NO: 482235 - DNA, 122 bp, Homo sapiens
cgagtttcttgtgtgaacatcttagagtgtactcacacctatatggtatagcctcttacacgcctacgctatatggtacaggctgttgtttgctcctaggctacaaacctgtacggcaagtg

SEQ ID NO: 482236 - DNA, 122 bp, Homo sapiens
ttaactttataaaagtaataagctattttttgtaaactaagctgttaggcatcaagagcacgctaaagcagctgtattaagtagaaaggaggtgatttttttcctgatgtaaccacactcta

SEQ ID NO: 482237 - DNA, 122 bp, Homo sapiens
aggttgtctagttcaacctgagcctgggtctgcggagtcactgcccaaatgcttcctccccgtgcgcgttggcccccctcttgcttccaaccctccacatctttgttcataaagttcattct

SEQ ID NO: 482238 - DNA, 122 bp, Homo sapiens
agggagaacagagctcctgcgtcctgacgccgcgcccgccttcgcgcccatgggaaaacgcgcattctttgggagcgcgcaaagcatccagagaccacatccgagccttcccgcaccctgct

SEQ ID NO: 482239 - DNA, 122 bp, Homo sapiens
cagccagcatccacctttttactccagaggcggactcgggaagtctaggacagggccccacgtggagaacggatgtcgaagtgcttggtgaactagagaagaaacccagacactgccgaccg

SEQ ID NO: 482240 - DNA, 122 bp, Homo sapiens
cagcgtgcacgcggggcaggccgggagcgccgcgccgggccgccacacttcgcgcctgcgcgctcccgtcttacgggatggatttcgctctcaggtcccagtctcgtgcggcggggcgggga

SEQ ID NO: 482241 - DNA, 122 bp, Homo sapiens
atatccttttgacacaaaacacaaaatgttttccaaaacaattgacataatgatacattacgcctttgcagtgagctaataataagctaacctttgtgcacaaataacattatatatattat

SEQ ID NO: 482242 - DNA, 122 bp, Homo sapiens
tggaggagcgtttcattagcgacagctggggatcgttcgcagaaatgcaggcgtggcccccgggagaagcagacctgtgaaaatccggactttgaaaatggaagtgaaaaaacaagctctgt

SEQ ID NO: 482243 - DNA, 122 bp, Homo sapiens
aatgaccttctgggaccaaaggttcctctaactgcaacttgagtgcccataatcttccttcgtgggaaggtttacacaacactttagtgttcattatttcatttgcaccttaggacagcctt

SEQ ID NO: 482244 - DNA, 122 bp, Homo sapiens
aaaaaacatgatggggtcttgtcatgttgcccagggttgtctggaactcctgagcacaagcgatgcacccacctggcttcccaaagtgccgtgactaaaggtgtgaaccaccttgcctggtc

SEQ ID NO: 482245 - DNA, 122 bp, Homo sapiens
caggttcgcggcgcagggcctgcagtgccaggagcaggcaggggcctctgccctccccttcgtccctgatctcccgcctcctcctcacccgccgtctctgcgaactcaccctgggctgcggc

SEQ ID NO: 482246 - DNA, 122 bp, Homo sapiens
ccagccatgtgggtgcacacagggtggccaggccaattgctaggcagctctgctgcccaccgcctgtcatccttgctggtctgagcctgctggtgcatatgcttctttgtcccactggactt

SEQ ID NO: 482247 - DNA, 122 bp, Homo sapiens
cccctcctggcctgcctgatctttgggctcagcatgttcttgcagccgtccggccagccccgcagggccgttcatgctgtcatccacttgcttttgctcgtcctcgcgcctagtcgcccctc

SEQ ID NO: 482248 - DNA, 122 bp, Homo sapiens
gtgctttcaaagccccacttcaaagagggagatcaaatggggggtaattgaaagggacagcgatgtgagggggttcctgagacgccccccaacgatgactatgaatgcggcacacaccaccc

SEQ ID NO: 482249 - DNA, 122 bp, Homo sapiens
tcagacaggacatcaattgagagaagatgcccttacaaacttgcttttttcaggaattttcgccttgccccaaaggctacctaggaagtactataatgggctaaaggacagagaggagcacc

SEQ ID NO: 482250 - DNA, 122 bp, Homo sapiens
ttcaggcgtctgcaaccctcctgggttgcggcgtctgctcgcccttctgcgtccgcagctcggtccccacgttcccgctcgctgggccccacaggccaggagcgttgcccctttaacaagag

SEQ ID NO: 482251 - DNA, 122 bp, Homo sapiens
acctcacccctatcagtgtgtggggggacctgatgataacacctctgagaagccgggggccgcatgacaggcccagctccccagctccactgcggctccccgggggaccgcatgacaggccc

SEQ ID NO: 482252 - DNA, 122 bp, Homo sapiens
aaagcctatatttagtgctttcatatacgtaatctcaaaaaaaaaaaaagaaagaaatatcggcataaaatgtaagcttccagagggatacaaacgcagcccagcgcggacaccgccagccc

SEQ ID NO: 482253 - DNA, 122 bp, Homo sapiens
aaaagcatcttgtacgctgccaaccagggaggacccttggaagctcattcctggtttccccgacttcaccccatgtgcctcatccctttgctaatagttggctctgtttccttgcactgtaa

SEQ ID NO: 482254 - DNA, 122 bp, Homo sapiens
ctgctagctcactgcctgccacattgctccgtaaaatgattgtggcatgacctagtcgggcgggagattataaaggcctgcattagacagtggtagaaactgaaagaggaagacagattcca

SEQ ID NO: 482255 - DNA, 122 bp, Homo sapiens
agaatcggggtcccaggactggaaatgcagctgcccagggtcttcagacattgtgtgtctcggcccctggccccagacctgtctttcctggtccccacagctcgcacacagcaggaccagcc

SEQ ID NO: 482256 - DNA, 122 bp, Homo sapiens
gccatgggttggacgagcttgctctaaaagatatggaacaagccagtaacattagaagaccggcagagaggctgggtgcggtggctcactcctgtaatcccaacactttgggaggtgaagga

SEQ ID NO: 482257 - DNA, 122 bp, Homo sapiens
cccgctcagcaaacaccccccccttccacctttgctgccccaacaacagtcaggggaggccggggaatcacttaaggggccccgcccaccaccggagttccacccactccgcgtgcctctcc

SEQ ID NO: 482258 - DNA, 122 bp, Homo sapiens
gaggaaaaacaaatactgtactgtatacaataggtccttgagtcagaagggaggggagggcgagaaggcagagtggtattcagggatcaggagtcaaacagcaattaagggaacaaaggtca

SEQ ID NO: 482259 - DNA, 122 bp, Homo sapiens
gtcacccggaaggggacgctgagcctagccccggcgagagggtcgaggacgccgcggcgccgaaagccccaggcccttccccagcgaaggagaaaatcggcagcctcagaaaggtggaccga

SEQ ID NO: 482260 - DNA, 122 bp, Homo sapiens
ggccatactctcaggctgctgacagtcctgtcactgccctaagcacggtgccctaacacccgtgagtcatagagctgtgctaggtgcagcaggagagacgcgtcccagcggggagttctgga

SEQ ID NO: 482261 - DNA, 122 bp, Homo sapiens
gggtccaccgcaccgggaagccctgtctgtatcagttaccaaccacaattgcagtgagtacgaatcgtggctttcccacagtcaggaaaggcaagggagaccgacgacccgcttctctagga

SEQ ID NO: 482262 - DNA, 122 bp, Homo sapiens
cccaatggtcccctggtgccactcccctcctgtctgggggagtgagtcaccctctgtgaccgggcagcccaaagcacctctaggcaaatgggccccgccctgtcactccattcctcccggcc

SEQ ID NO: 482263 - DNA, 122 bp, Homo sapiens
aggtctgggcactggaagcggcacacgtggaaacggtaaaggccgacgccggttcagagccgcaaccgcgacagccccgtcgtccacctcaggtgccggcgccccctgctggtgcgcggaga

SEQ ID NO: 482264 - DNA, 122 bp, Homo sapiens
acgtgaccctgggagcggacgtggggacgtcacgctgccgcttgtctcggattgtgaagccggtcctggcttccttgtctaaaagctctttgggactgaaatggctgtttatgaatccttgt

SEQ ID NO: 482265 - DNA, 122 bp, Homo sapiens
tttccctgcgcattcagccacaacggctgacatggactgcaagctgagccctgagctaagcgtttgagagtagaaccaaggagacacaccctcagactcaaaaacgcgagggggaaatggtg

SEQ ID NO: 482266 - DNA, 122 bp, Homo sapiens
cccactatggcagacccccgctggacgtgcactctagcgagacacacagccactaaccaccgagctgcgtggtgagttatttaattgtgcctgtcatcaatgccaccaagaagcccctgcaa

SEQ ID NO: 482267 - DNA, 122 bp, Homo sapiens
agtaccaaaagggggccgactcgggtcctgtttgaggaatagaagtctcagcctgtaaaacgcaggcccttagaaccaagcggggaaaaacagctaagaaaagaaaataaccaagtccgaag

SEQ ID NO: 482268 - DNA, 122 bp, Homo sapiens
tcagtaccaagccagtttcgacttcagtgaaaaagcattctcctatggaaatagtttcctcgtttccctcaacttttccttcccttcaacgccctgtcatgtcagtagatcccgtttgacct

SEQ ID NO: 482269 - DNA, 122 bp, Homo sapiens
gcacccaagcccccttcccagcgctggtggatgttgtcaccacaggagtttaagctgggccgggtatggggagggacgctgtgtcgggtgcgccctgcgcttgccctggtgggggcgcgggg

SEQ ID NO: 482270 - DNA, 122 bp, Homo sapiens
ctgaagactcgtgacaccatgaggccagtgctgctctcagtctgccctgctcaagactcgcgacaccgtgaggccagtgctgatctcaccccgccctgctgagactcacgacatcgtgaggc

SEQ ID NO: 482271 - DNA, 122 bp, Homo sapiens
aaggggtcatagggaacagggtcccgcacagagaagagccgggagggtgtgcgcgcgccgcggacctcccattgctccagaagacgcgccatgtctgcatcattgtaatcgcgaatatcctt

SEQ ID NO: 482272 - DNA, 122 bp, Homo sapiens
ggcaaagccaaaccatatcagcacacaaactgccagtagaccgtttggtacttgcccccacgaccatgcttacaaccatgcatgtgcaccctgtcatgtctgatcccacagctgtgcatgta

SEQ ID NO: 482273 - DNA, 122 bp, Homo sapiens
tccagaaacagcccagtctgctccctgagggcctttggctcctcaacaacctcactggtacgcaccataatctgcccaggcctggacatttggataatggggatatttcctcatggcctagg

SEQ ID NO: 482274 - DNA, 122 bp, Homo sapiens
ccttggacatatgtccttttacccttcagcaataaaaacatggccctttctccccgctctcgggcggttaattttaacccgcagatcgcagtttcagcggactaacattcctcgcagaccaa

SEQ ID NO: 482275 - DNA, 122 bp, Homo sapiens
gttcaagccattctcctgcctcagcctccagagtagctgggattacggcgcttgccatcacgcccgactaattttttgtatttttaggaaagacagtgtttcaccaggttggccaggctggt

SEQ ID NO: 482276 - DNA, 122 bp, Homo sapiens
gcagacctgctctgggtgatgaaagcagtttccctgcctcccttcaggaagtagagaagccgggtgcctggttccagccaaacgctgggccagccagctcagtcagtggggcctgtgccggc

SEQ ID NO: 482277 - DNA, 122 bp, Homo sapiens
taggaccggaagtccttcatctcaagcatccaatgctgaaagcggcctgattttctctaccggaagcccttttccagaggctgggaacacggcccacctagcaggaagtcccacctccttga

SEQ ID NO: 482278 - DNA, 122 bp, Homo sapiens
actgttcggggtcaaggaggggggattcagccctggggctcaggaaatggctcgtgacaccgtctgtctacgcacctggcagtgccacctgggcagagggcacgccatttcagagcatgaga

SEQ ID NO: 482279 - DNA, 122 bp, Homo sapiens
cagtttgcgatctgcccacgcgttcgggcactagggccaccgctcttgtgggcagaaggccgcgtccattccaggaagaggatcttctccggaaatgtgagacctatagcatattgatttag

SEQ ID NO: 482280 - DNA, 122 bp, Homo sapiens
acaaacggccccgcccccactcagtcccgcgggcccaatcggggacagtcagggctgtcccgggctgtgcacctgctgtgcacacacaccccctgctgtgcacaccccccgcccccccggga

SEQ ID NO: 482281 - DNA, 122 bp, Homo sapiens
aggtaaagagaatgactctttcgttctgggcttcagggaaggcttcgggttttgtctgggcgccctgaagttcctgcggtgggaggtagggtacgctccctcagcctggcggcctccgttag

SEQ ID NO: 482282 - DNA, 122 bp, Homo sapiens
actaatggcacacagaggagggttaaattaagaaatttaaaaattggactaaatcactgccgctaagacagaattcctccatgccctggagtgggttcctccagcactcagttcccaaccag

SEQ ID NO: 482283 - DNA, 122 bp, Homo sapiens
gggagctggcgcggttgattttttccgagaatcctccacttggggtgacgtcgggcagcgcgcgcgggccgtgaggttaatgcccaggcttttctctaaagcgtccgggaatgatccggcga

SEQ ID NO: 482284 - DNA, 122 bp, Homo sapiens
ctactgtctgcaaaatgtgcgtccaccgtcacgcatgcggtggctgcgccccccgggtcccgcgtgtccaccacccctacagggagatgagcccccggccttgtaaaacgagccgggggcca

SEQ ID NO: 482285 - DNA, 122 bp, Homo sapiens
agccctgctctttgtcgtggctgagtcatgttccgtgatgtggaggcaccgggttttgtgcgtctccttattcagtggacgttggtgctgtttccagtgtctgcctgttgtgagttgagctg

SEQ ID NO: 482286 - DNA, 122 bp, Homo sapiens
aacacaacagcccttggtctggcagaagagctccagcagctgcccggggcggggtcagcgcgcggcagggctggggccagggtcccaggtgccacaggcccgtcccctggtttgtcccactg

SEQ ID NO: 482287 - DNA, 122 bp, Homo sapiens
gtagacggccacgcaccactgggtggccacgtagcgcccgtagcggctgtcatggaccagcgccccgaagatgatgcaggccacgaaggcctggacgatcttgaggagccccgacaccgtgg

SEQ ID NO: 482288 - DNA, 122 bp, Homo sapiens
ctgtcttacaatgttctggatggtttggaggagaaaggtcgtttttcttcattccttagtcggtctaaagggtacagttacctccttttgaaggagctccagatgaaagactctgcctctta

SEQ ID NO: 482289 - DNA, 122 bp, Homo sapiens
acctaattcctctgcctagaaagtgtgctggaattactgcctggcttctgatgaatagggcgtattgagagtgatgctttgtgagttctgaggctaggtcatagaaaggattgaacttattc

SEQ ID NO: 482290 - DNA, 122 bp, Homo sapiens
ccctgcgctccagctgcaaacatctcattagactaatgcattcagcacaggcagaaaactcgatttaccatagctacagcaatgaatttccattacgatgacagcttcaaccacatcatgtc

SEQ ID NO: 482291 - DNA, 122 bp, Homo sapiens
caggcaggaaggggtaaaaagcggtgggctggggtcctcccatggacaacagtgtgttaccggcagcccctgcgctggcctcagcgaggtcgtggagtcccttgattgcaccaagggtgggt

SEQ ID NO: 482292 - DNA, 122 bp, Homo sapiens
tggtagtggtaactgggaagaatacagttcatgccgactgagtaaagggtaatggagaggcggagtcaaagacacttccggggtttcaaaatggaatcacagtagagaataaaagcccattt

SEQ ID NO: 482293 - DNA, 122 bp, Homo sapiens
aagaaaccctgactccagatggaggctcccactgggagaccctgggctggcctagggatgcgtccagagaaagtgtgctgcctctgggccaggccctcgttgctgtcattccccacaggcca

SEQ ID NO: 482294 - DNA, 122 bp, Homo sapiens
tctctcctcaggaacctcacgcctgggtcattgtccatttgggtgggtcaagaaagcgatcgcttctgcccgggagcagttgattgtcaggaaggaattcgtgataaaaccgccatcaccac

SEQ ID NO: 482295 - DNA, 122 bp, Homo sapiens
tccgcgcttccctgttggcctaacatcttaaaaccagaggcgggcttcctggtgccgagacgtcactccgccgcggccctccccagccctctccgcctccgcctcctcccagacccttctcc

SEQ ID NO: 482296 - DNA, 122 bp, Homo sapiens
cctagatctgagctccttcctgggagtccagggcccttcacaagtttgggtgaacaatcccggtacacggtctgtggtaacatcctgcacggctctaaaccagaggcaacagggcaccccac

SEQ ID NO: 482297 - DNA, 122 bp, Homo sapiens
cgcgacgctcaccggggggcgctgtgaagccggcaccgggcggacagaggtgagtcggctcggaggcggtggctcccgttcctgcccgcgcgccgaggggcgaatcccaggcagcgaggtcg

SEQ ID NO: 482298 - DNA, 122 bp, Homo sapiens
cagcactgtttgtaaggctgaaaattagaaacattctaggtgctcaatcgcagggcttgtcgaataaatgtacgaatttagcacaaatttcctgtgtcactgttcctttccagcacagcctt

SEQ ID NO: 482299 - DNA, 122 bp, Homo sapiens
tcaaccagcaattagtcaatgactctagaatttcagcgcagatccgatgagtatagaggacgcggtgtacgccctgtgttgccatggcaacgcaggcatgcacatcctcctcccttggctgc

SEQ ID NO: 482300 - DNA, 122 bp, Homo sapiens
accgataatatgcacgaggtggcagcaacgtcacggccgccagcccggggcctccacgggcgactgaggctgcgcagttgacttcctcatcaccaacagggcagtcttggtttcaaaaccag

SEQ ID NO: 482301 - DNA, 122 bp, Homo sapiens
gcgcgcgaggcggcgcgggagcgcgcggagcgggtgcgcagaagactggaggaggcggagcgccacaaggaggacttggtgaggaagagtcctagaatggggctggacccagggtggggtga

SEQ ID NO: 482302 - DNA, 122 bp, Homo sapiens
gctatgtcattacctaaatattacgtttttgggggggtgtgtgatgtctgtgaaagtccacgcctgtgtatcttgtcagggtgctcttcagtccccagctgcctcactcattgcatatcatc

SEQ ID NO: 482303 - DNA, 122 bp, Homo sapiens
acccccacaggagttggagcagcttagaccgctgggctgcggaaagggcagcagagacatcgttagccccagttaacggggaccagaggtgtaccaggcatcaactaaccagggctggtgac

SEQ ID NO: 482304 - DNA, 122 bp, Homo sapiens
acacatggtgagatactaactatggattccagtttgggctgactcttgatttgactcctgcgtcttatcccccactctcattcctgtgacataatcagacaaaaatcaacataatcctgacc

SEQ ID NO: 482305 - DNA, 122 bp, Homo sapiens
tccatcgttgctaatttgaacatgagcagatggagtcctattatttggggtcattaatttcgtagcaagtgcagttgaaggtgttttgcatgttcattgtgcagtgcgcgccgtagtctgca

SEQ ID NO: 482306 - DNA, 122 bp, Homo sapiens
gctggagactccggtgcagcccgggaagcctcgaatccggattccggagctttcttgctgcgctgccgagtccgctgtccgaagctgtttaattccctctagtggccgcttacccactttcc

SEQ ID NO: 482307 - DNA, 122 bp, Homo sapiens
gcgcggggcctcgcccctcacctgtaagtcagcacgaaggtcaccgcgctctcgctgaaccgcaccaagtagcacccctgaggcttgggctccagcagcctctctgcctccctgtgggtgac

SEQ ID NO: 482308 - DNA, 122 bp, Homo sapiens
tgtgaggagcccctctgcacagccgcccaatctgagatgtgaatagcgcttctgcccggccgctaccccgtctggaaactgaggagtgtctctgcccggccgccgagtctgggaagtgagga

SEQ ID NO: 482309 - DNA, 122 bp, Homo sapiens
tggtttaaaaaagaaagggcagcagagaggccacccagaagagccgctgtttccatgtgccgcgcttacacatgctccagagggtccggctgcctaaccatgcgccgcgcttacacatgctc

SEQ ID NO: 482310 - DNA, 122 bp, Homo sapiens
agtgaggagtctctgctcggccgcccattgtctgggatgtggggagcgcctctgccccgccgccccatctgagatgtaaagagctcctctgcccggccgtgaccccgtctgggaactgagga

SEQ ID NO: 482311 - DNA, 122 bp, Homo sapiens
ctgcagtctgttctgagtgacttgcgactttctccaagaaacacagttgagttttaccaccgtaatgggaaatctacacatcaacccgacctcaactaaagaacaggagggcactgctgccc

SEQ ID NO: 482312 - DNA, 122 bp, Homo sapiens
tgtgagctccaccgtcagcaccattcagctgcatcccttgtgcacagaactgtttgccagcgttgggtgggacacccgtggcggctgctccctcagacctcccttctgtggactgacctctc

SEQ ID NO: 482313 - DNA, 122 bp, Homo sapiens
ggtcctggatctgtttgccctgaatccatcctccctctttgcctgctgtgttttagttcacgatggctgatccttgcaggctgcagttcacaggctcttgtgtctcagacttccagctggtt

SEQ ID NO: 482314 - DNA, 122 bp, Homo sapiens
aggaaccctgacggcaagctgttacataagagcccagtcctgcactgcggggacatggtccgcttgctactggcatgcaaagatcaaagagaggagacagcgctgggatgccagcccacggc

SEQ ID NO: 482315 - DNA, 122 bp, Homo sapiens
aggggcaaaggcatgagagcacataatacattccgggggctgcctctcagcctagaaggtcgggcatttcatacctggagaagaggacatacacattctcggaagttaagcaaaattatgaa

SEQ ID NO: 482316 - DNA, 122 bp, Homo sapiens
ttaatattcaaaatatataaggaactccttcagctcaattacactaaaaaacaaattacccgatttaaaaatgggcaaatgacttaagtagacattttcccaaagaagacatatagatagcc

SEQ ID NO: 482317 - DNA, 122 bp, Homo sapiens
gccgcgcagcggggcgaccggcagggggcgcgctgggatggccaggagctcggctctccccgctctgtccctgctctgcggcccgcctcgcccctgcaagtttaaattcctcttagcaagcc

SEQ ID NO: 482318 - DNA, 122 bp, Homo sapiens
acagctaggcataaccgcaccgacaggagcgagcaaagacacctcggctaggagtcccagcgcgaggcaccccacacctaagcctatggtcctcatcttgctggaaagaaaactgaggcgct

SEQ ID NO: 482319 - DNA, 122 bp, Homo sapiens
ggttcgggaggacgcctgcctttcaagcccggaagaggatccttaagaggtcttgcccggcgtctctccgtgaccttggaagccctgctccaattatgcctcctccgggacaccggcctgcg

SEQ ID NO: 482320 - DNA, 122 bp, Homo sapiens
ccagagctgacctcccgcccgcctccttccgcaggccatccgggtccaagcggacggcggcgtgttcctcaactccatctacacgcagctgcccctgtcggcaggtatgtggctctcccagg

SEQ ID NO: 482321 - DNA, 122 bp, Homo sapiens
ctcctgtactccagcgttccgaggcccacgtcttgcgtcacgtgtcccgcaacgcaggagcgctttctctggccagcggagaagcgaggagaaagactccaaatcagtcagggagaggagtg

SEQ ID NO: 482322 - DNA, 122 bp, Homo sapiens
gacactgagcggaaggatgcagtacctcggaggcatgttactttaactggatccagagggcgtctttcgggacctgtctctcctgactgcactgaccttttccttttcccaaggccgcatga

SEQ ID NO: 482323 - DNA, 122 bp, Homo sapiens
ctgctgctgctgctgctcctggaaaccggtgagacgagcggacggccccctgccctcgcgcggaccccctccaaccttaccttccgagctggggaagccgagcaccttccccgcccaccccc

SEQ ID NO: 482324 - DNA, 122 bp, Homo sapiens
gcgaggctggggagggaacaggggttgtgcaggatgtgagtcagagaccaggctgttttgcggcctcaaaatcttggacttgaacctggaggcagcagggagccacttcagggtccgtttct

SEQ ID NO: 482325 - DNA, 122 bp, Homo sapiens
tgatccaccccactcggcaaaggttcctgagacaacggcggggaatcgggtggccacgcacgtcggcctaaggggccctggcagcgcccggcaggacagccgtccactgcacacctcagagc

SEQ ID NO: 482326 - DNA, 122 bp, Homo sapiens
ggggcaggcgcagagctggcaagcacgtggtggggcccctgaggcgtgcatagggtcgcgcgcctgggagcttgtcgctggcgcggtccgggagggaggttcggcggcgggaggcagcatgt

SEQ ID NO: 482327 - DNA, 122 bp, Homo sapiens
ctccggcgcccactccggctcccgcctcctctcccggggacgccactcaggccccgcctccggccccgcccctcgctcccgcggcaggtggagacccaagcccgtctccaaggggatgccca

SEQ ID NO: 482328 - DNA, 122 bp, Homo sapiens
gaacaaaatagggagaaatccctgccctcatggagtttacatcggggcagggggcgggggcggcacagagcagacaatcaatacagtgattagcccccagttaggttaggcatttccaatct

SEQ ID NO: 482329 - DNA, 122 bp, Homo sapiens
ctagatggccaagaggacagctgctgatgccaaggcaccaaggaggacaaggcaagagaacgatggcctcatgtaactcgatgcagagggaggtacaaatcacgttagctttggcgtgcagg

SEQ ID NO: 482330 - DNA, 122 bp, Homo sapiens
tgggacccgaggacgccggatcggggattgttatgctaatcgcctgagatcagcagttcccgtgcccttcagatggcaggtagcgaggccgggctctgcccagcggctgtggctacaggagg

SEQ ID NO: 482331 - DNA, 122 bp, Homo sapiens
cggggcgagtagttgcaatgacaaacatttaacccaatagcgaggagatttcagacgctacggccgcaataaccaatgacaagaaagaatcctttcgaaaggacgtgtcaggcaaccaacgg

SEQ ID NO: 482332 - DNA, 122 bp, Homo sapiens
tattgatgtctaataattcctcaaatattattcccacatcttgatttttaaactggcccgcgcgcagtggctcacacctgtaatcccagcactttggaaggccaaggcaggtggatcaccta

SEQ ID NO: 482333 - DNA, 122 bp, Homo sapiens
ccatcctcccccatcagcgggggttcacccccaggccccgggggtgcacccagcagcccccgccgttcaccctcaggccccaggggtgcacccaccagccccagggatgcaccctcaggccc

SEQ ID NO: 482334 - DNA, 122 bp, Homo sapiens
gcgcttccggtgcgtgtggtgagcggcgggccccgggctggaggggccgggactgggcagcgcctaaagcgccccgtgccgcttaacgcggtctctcatagccgctcgccttcctttcactt

SEQ ID NO: 482335 - DNA, 122 bp, Homo sapiens
ggccccggagcggagcttctgccgagcagaggcggggcctggggactgggcgttaacatccggctttgacgtaaggagagccttaagttcctgtttggacaccttcctagcttaaatccgta

SEQ ID NO: 482336 - DNA, 122 bp, Homo sapiens
gcaagagaattgcttgagaacccgggaggcagaggtcgcagtgagccaagttcgcaccatcgcactctagcctgggtgacaagagtgaaactcagtctcaacaaacaaacaaacaaacaaaa

SEQ ID NO: 482337 - DNA, 122 bp, Homo sapiens
tgaggcgtgcttgggctccggagcccgcgcgctccccctcgtggccgctgctgcctctggcgcgtgacggtccccgaactcgctcgtctcctctgcgctctcctggccgcctcctctccccg

SEQ ID NO: 482338 - DNA, 122 bp, Homo sapiens
tagcggacaccttaggcttgggtccacaatcagggagccccaaatagaaataacacggggcgctgattggttttccgccgctccagaccctgcgcttggtgcttcaagtgactcatccttat

SEQ ID NO: 482339 - DNA, 122 bp, Homo sapiens
ttatacgacattgctaatgataccgacaaggcacgctaacgcggacactgtacacgacatcgctaatgaggactccgtataccacatcgctaatgagggtgccgtatatgacatcgctaatg

SEQ ID NO: 482340 - DNA, 122 bp, Homo sapiens
ggaaggggaagccggaggtcgggggtggtggtctcgcccctgtggccttctcgcccccggcggccaagtgcctctaatctccagaagtcacccaccacgcagggcaaggtggctggccaacc

SEQ ID NO: 482341 - DNA, 122 bp, Homo sapiens
ccgccctcccgccactgagcagccgttcattgggcaagggctggtgacacaagatggcggcgccgaacaaggaaggaccctgtctccggggcaaccgggaagccgacccggcgcctgattgc

SEQ ID NO: 482342 - DNA, 122 bp, Homo sapiens
catttgcccttaagcaagatggtgggcgccttgtgcacatgcgcggaagggttgtttcggcggggagttccgccgcgtcggaactcgctccgggcgtggattggcggcttgctggcgggggc

SEQ ID NO: 482343 - DNA, 122 bp, Homo sapiens
tgcatgtgtctggtgcccccgggtgtccctctgtgtgtagctgggttttatgaccaccctcgtgcggcccggcacgcccgcacgtcccgccaccccctcccttgggtgtgtgtctcgcagcc

SEQ ID NO: 482344 - DNA, 122 bp, Homo sapiens
atcaatctggcagccttcatttaccaaaagttgacttttgatagtataacttttatacaccgtgagacaacttattttaaaaaacagtttagaaatatttaatttttttttgaaagactttt

SEQ ID NO: 482345 - DNA, 122 bp, Homo sapiens
ccctcttccgggacccccgcttgggctgggtctccttcctctcctgagaaaccttcggtacgctcccagttgcccagccctgggaagccagcatcgggttcccacgctggggaggagcgaga

SEQ ID NO: 482346 - DNA, 122 bp, Homo sapiens
gtaattcaggaggctctctgagaagagacagcaaagcttcttagatggatcgaaagaccacgagctgggataccaagttctatgaaaaggtcagctattgaatttactctgctaccttcagg

SEQ ID NO: 482347 - DNA, 122 bp, Homo sapiens
ttcgtcttctttcatagcctctcctaaacccggcaactctgagctgtttttctggcaagccgccgtccattggcggcctctggcgccgcggctttcggcgtgcggacggcgcaggcgcgggc

SEQ ID NO: 482348 - DNA, 122 bp, Homo sapiens
cattctttgcctgctcacttacaatgaccttcttcactctgtcttgggaatccactcccacgactagaccattttcaaaacctcgcaaatatttacttaccaatcatgacttcccatccctc

SEQ ID NO: 482349 - DNA, 122 bp, Homo sapiens
gtgatattgggcaccttttcatatgctcattggcagtttccttctttcttcacctgtttacgtgtctgtccagtcacataaaagggggtggagaaaaggtggtgaagcggtgttgtttgtct

SEQ ID NO: 482350 - DNA, 122 bp, Homo sapiens
ccccggagtttcccagggcctccgccacgtgaccccagtgtttgtctcccgcccagagcccgcgcccgcagccacagggtggggcaaggtatcaaagaccccacccagctgagctaggagtg

SEQ ID NO: 482351 - DNA, 122 bp, Homo sapiens
tttgggtgattctgtactgtttttgcttactgtaatgcttcaataaaatagaaatgaaaacgtgagacaatggaagtaaaggtaaacattattcagtcatttatgaatagtatttcaaatac

SEQ ID NO: 482352 - DNA, 122 bp, Homo sapiens
ctgaaactgtccagatgcgactcctgattttcattccatcctccatctctgggactgttacgatagctgtttccctgaagtttctctttctacccgctccatgtcttcctctgcccgaaatc

SEQ ID NO: 482353 - DNA, 122 bp, Homo sapiens
gacatctgggagaagcagaatgaaacagaagatcgattccctaggtcctaggagatgaaacgccacctttgcgggttcgcgagtccttaggatcaaagctgggctccccagggccggggccg

SEQ ID NO: 482354 - DNA, 122 bp, Homo sapiens
tataaatgttctgggaaattaactaacaattaagtatgactaacaactgaaaaatgaaagcgcatatactagggctgattcacaagtgagatacttctggagttcatgatagcctgtgtgga

SEQ ID NO: 482355 - DNA, 122 bp, Homo sapiens
tttatgcaaactatctcaggtttgtcatgtaaaaatcaaagtcacatgtctctacatgagcggcattagctgaaaaacttccagcctactaagcagagatagtaaccacaaagacatgagac

SEQ ID NO: 482356 - DNA, 122 bp, Homo sapiens
actcgccttattttcctgttcgccactgcggggacttctaatttgcagcttccctttccccggcacacacagacacgagctggtggcttgcagactgcgtctgtctggagctagagagccag

SEQ ID NO: 482357 - DNA, 122 bp, Homo sapiens
tgattcatttcctgatccagtgatgctcccagcccacccccaaacagacacagcgtagcccgggccagctcttaaggagttcaggagtgagaagaggccctcagagatctgacagcctagga

SEQ ID NO: 482358 - DNA, 122 bp, Homo sapiens
tactggccaggtcgaagcccctgtctcactcacctacaatgaagggccccaggtcaaacacgcctccttccttgtccttggggacctcgccatcaggcccatgcccgctgttggggagcagc

SEQ ID NO: 482359 - DNA, 122 bp, Homo sapiens
cgggcatggatggcctgtgcagagtccagtcttgtgagggcggcgaactaggcagcgaatcgcgggagtttcctattggcagcagtccgagtcccagacgttaatttgtaacaaaagtagcg

SEQ ID NO: 482360 - DNA, 122 bp, Homo sapiens
tcatttggaggactctaacaaggacaaataacacttttattcaggggtcattggttacatcgctaggtctgggtcatagcagatctgcaattgcttaagaaaacactacctctgaattatgt

SEQ ID NO: 482361 - DNA, 122 bp, Homo sapiens
catagccaaggttaagaaccacaggctgcaatgaaaaagctctggcctcgctgatagactcgaaggagggtgagaagacaagacaatggggtcaaaaaagaaaaaaaatgtagaaatgacac

SEQ ID NO: 482362 - DNA, 122 bp, Homo sapiens
ctcagctccgttcccacaaccacagaacctctacgggttgtcatggagagtgccaacgtccgggccatggaggtttggcgaattggctcagatgacggttacactccgctgcgtcttcttcc

SEQ ID NO: 482363 - DNA, 122 bp, Homo sapiens
aaaaaaagaaagaaagaaagaaaatgcatgtatttctcagtatctcctacatgcagaggccgtgactgggcacaaggggatgtggcattgtctgagtttgcccttgcttttctagacctccc

SEQ ID NO: 482364 - DNA, 122 bp, Homo sapiens
cactccaatctgcgatcagagctcctgcaggagatgggggtggtgggggggagggtctcccggctctagcatctgagataagtacatcctcccacgggcaagtgaaaaacaaatcttaaagc

SEQ ID NO: 482365 - DNA, 122 bp, Homo sapiens
cgaccggcctcccatcgccatcttccagctcatccagcgaggtggaggtcggtgtgtggccggcgctacggggcctactgggtgtgggggcacctggaccccaggaggggtgggggctccag

SEQ ID NO: 482366 - DNA, 122 bp, Homo sapiens
tgctcccggcatgagcttagtgtggggctgcccgggctggtccccagctcaccgcagctgcggaggcccgaccctcggaacccaccaggcatgatgcagggggccggggacaccccccaggc

SEQ ID NO: 482367 - DNA, 122 bp, Homo sapiens
agaaggaagctgaggtagagaaagtttaagtaacttgtccaaggttgagcatcttgtcaacgtcattttactactggcatgtgaaacaggtgagttatattttttagaatattaattctcat

SEQ ID NO: 482368 - DNA, 122 bp, Homo sapiens
tcaccaattaatgggcataaatgttaatgcccgttaatcacacaagggctttgtctgtaccgtgggtccttgtcttgctgtgggaaggtgtttaacgatgattctagaagaagcacagcagc

SEQ ID NO: 482369 - DNA, 122 bp, Homo sapiens
cagctcacagaaagagtttcaaagtcatgctgagataattctcctacttcaggtaagactcggttcaaacattgactctggtacttaggagctatatggtcttgagcaagcaacctgtcctc

SEQ ID NO: 482370 - DNA, 122 bp, Homo sapiens
cacccctaccccgtcttttctggcccggagagacttcgggaaggtcagagcttccagtgccgcgagaggcggatgccctccagtccgggccgcttccaccgggcggggtggcctcctgggct

SEQ ID NO: 482371 - DNA, 122 bp, Homo sapiens
tcgggtcgcgctcacgtttcaatgcaaacacccgccactaggctcgctacgaggaagcgccgctgagggtccatctttttaagagatctagtgacgacacaagggatgggcgggttccttcc

SEQ ID NO: 482372 - DNA, 122 bp, Homo sapiens
ttgatctatagcacagttttgtaattcagatcatcacccctgcactttgtaccacatgggcgtattctttcttcccagtcattgctgcaattatcttgtctgttctttgtgtaatatgttct

SEQ ID NO: 482373 - DNA, 122 bp, Homo sapiens
aggtctggcggcagaacctggaaggcaaagcaggaaagcaggacagagatgaggctcaagcgtgcgggaccacaccgcacccccgcgacaactggacgtctgagaaatcaacatttgtaatg

SEQ ID NO: 482374 - DNA, 122 bp, Homo sapiens
aggtcccccaggagcttgggattctaagaggggaaatttaggggtccatcctgatgtgggcgaggcattctctggatcaaagaagagcttgtcagacccaggatggaggggccctgagtctc

SEQ ID NO: 482375 - DNA, 122 bp, Homo sapiens
ctttattggagtctcaacacaaaaacctcggcgatacaagggtcacggcatctggcccgtcgccttaactgcatcaaccgggtttacgaaacagcctgatttccagccccacccatcgcaac

SEQ ID NO: 482376 - DNA, 122 bp, Homo sapiens
ccgccgtgcctttgtcacaggaggaccaggccaaccagaccttggctcgatacaggaagacggtgcatgagctggatgacgctgaggaccgggctggcatggcagagactgccctaaacaag

SEQ ID NO: 482377 - DNA, 122 bp, Homo sapiens
cggtgtcagtcgctgccgaggctggaaacattgcgtttgaaaccattgggaagttgagggcggcacaagacgaaagccattctttctgttttagttctagactgcctcctcttctgtcatta

SEQ ID NO: 482378 - DNA, 122 bp, Homo sapiens
ttgtgaggctgcggtgtggatctcgcactgcggccgcatcgccttggctagggagaacctcgctaggaaggattcagaggggcttttggtttcccgttttccacactgaacccttctaactg

SEQ ID NO: 482379 - DNA, 122 bp, Homo sapiens
gtgtgtccatgacacagtcaccccgaggtgacacaaatgctaaaaatgcacagaaataaccggggcgggagagtggagccgacctgagtccacacagtggtgagggccaggcacgtgcacct

SEQ ID NO: 482380 - DNA, 122 bp, Homo sapiens
ctaaggctgcaaattaaaccactaccacacagctgcaaactactctttatattcacacagcgttaaacaaaacgacttcaattccatcttttcaaatgtgcctcggtgctgcaagaaaaaaa

SEQ ID NO: 482381 - DNA, 122 bp, Homo sapiens
aacaaactcatttgagggcacgtctgccttgaactgaggcaaacttccttaaaggggcaccgtccaattgaaatagaattggagctacaaagatgagccatgtgtgcatttcgaaatttcct

SEQ ID NO: 482382 - DNA, 122 bp, Homo sapiens
caggctggagtgcggtggcacatccaacctaggtcttttggattcaaatggtttttttagcggacagagtctctctatcacccaggctgaagtgcagtggtgtgatctcggctcactgcaac

SEQ ID NO: 482383 - DNA, 122 bp, Homo sapiens
ccgcgccgcctcccggggcgcccccacggagcccgggcgcccccggcggagcgcgcaccccggggcagaacaacctcaaccggcccgggccccagcgcaccaccagcgtgagcgcgcgcgcc

SEQ ID NO: 482384 - DNA, 122 bp, Homo sapiens
ggaggggtggaggaacggggcttggggaactgtcccaagggcctccccggctgatctctccgcaccacctaggactgcctgagcgccccctgtgggtccacggagcccaggagacgcgtttg

SEQ ID NO: 482385 - DNA, 122 bp, Homo sapiens
cgcggcggaaccgagtggcagaccgaaaagccaatcgagatagagtactgggatgatgggcgggataaagaagcaatcacagaaaagcagtcggacctagtcaagccggagcagccctctag

SEQ ID NO: 482386 - DNA, 122 bp, Homo sapiens
ttctgtggtcagatcatactctactggtcccacaatgtacatcaacaaattaatattgtacggatgtcatttcaaagccttctaaagacgagagtcattattgaagccattagagcacagat

SEQ ID NO: 482387 - DNA, 122 bp, Homo sapiens
agtcacactgccagtgagtagcaagcctgagctctgaaccatgacagttcacatcttccacgacagcagcttctcaatgctctttggagggaccagagcccaggcagtagcaacggctatga

SEQ ID NO: 482388 - DNA, 122 bp, Homo sapiens
tgctgagtttatggggcaacattcctatggcctgacttgcagcttaagtggcttctgaatcgaacatccctcctccagtggttgagagacacagactggcacttagtaacaatgcagcaatg

SEQ ID NO: 482389 - DNA, 122 bp, Homo sapiens
ttcctgtttcgcctgtattgttagttctacaataaacacttatcaatatccaaaaggctgcgtggaatgtttggaaaggcaaactattgaatactccaaacacaactgctcatcttcttaat

SEQ ID NO: 482390 - DNA, 122 bp, Homo sapiens
aaaacatgaatcaaagaatgcagaaatacaacagatataagctacaattaaatatctcaccggatgcacacacagttttatatggaataatcaaagcagcagtgatacccatcttataaata

SEQ ID NO: 482391 - DNA, 122 bp, Homo sapiens
ggtgactaagcccgagatgaaaagctgttaaagggacctgcatggaagcaaaccggtgtgcggcgccgagcatagggtgctgggggcgccttttttctgtgctggcgtcccccacccccggc

SEQ ID NO: 482392 - DNA, 122 bp, Homo sapiens
gcagccccgcgtgggctcgtgcgagtcggcctcaggtaaggctggagtgggagtgcaggtcgaccgcagccggggcggggggcgggcggcgggggcggcgctccgggaccccggtacccttc

SEQ ID NO: 482393 - DNA, 122 bp, Homo sapiens
ctccttgttaattgggtttgggttttttccaagtgggtttccataaatgattaatcttttcgttttatattaaatcttagtagcatttgtttttggagagtgatattttctactctttgtcc

SEQ ID NO: 482394 - DNA, 122 bp, Homo sapiens
atcaccctagagaaggctggtggcttggaagacactggatctcactggctcagctgggcacggtgcaaggtgctatacataaatggtttcactgacccctggaaggatgctcaggcctggat

SEQ ID NO: 482395 - DNA, 122 bp, Homo sapiens
ctaaggtcatatcatctgaccaggtctggaggctggcgggaggctccctgaaagtgggtgcgaaggagtccggctggcatgaaaatctgactttgcccagctcttttccttgatgcagtttc

SEQ ID NO: 482396 - DNA, 122 bp, Homo sapiens
agtgatttgcctgcctcagtctcccaaggtgctgggattacaggcacgagccacctcacccggtctgcttgcttttagtttctatatcccaaaggatgggcattcagggatcctacattcct

SEQ ID NO: 482397 - DNA, 122 bp, Homo sapiens
agaaacccgcaacccagagggagaacacccttgtctgccctcccttccccgacagcttctcgcttaataatatgcacatgcgcactgggggaacagggggcggagcctcaggatttcgcgcc

SEQ ID NO: 482398 - DNA, 122 bp, Homo sapiens
ccctctgcctcgcgcgcgcgctcacacccgcctggcaaccacctgacacgctgatgctggcggctgcaggaaacgtgcggcgccccgccgctcttccccgaaacctgccccctttccgcggg

SEQ ID NO: 482399 - DNA, 122 bp, Homo sapiens
cccattcacggccagaaaccagggctttgaaatccgagcccgggcgctgccagactggtccggcgagcggggccgacgggcgcgggcgccaccgagggtcggggggcggcgctgggcggggc

SEQ ID NO: 482400 - DNA, 122 bp, Homo sapiens
gcctcgggtttcttcttgagggcaaccacttcaggaaggtcaacaatacactcctcatgccgtatgttccttccacaaggattagagtcttcttccggggccttcgcatccgagactgaccg

SEQ ID NO: 482401 - DNA, 122 bp, Homo sapiens
tagaataaccactgtgaaagcatagtgtgaggattggatgagataatgtaaacacccgcccgtttatggctaagtgttagctgaagccaactgcttcattcagcattaaacccaactgcttt

SEQ ID NO: 482402 - DNA, 122 bp, Homo sapiens
gggtggacgggcgggaggtcggggtcctccggggattagagccggtgggctcgttgtgggcgccatttctcggcgtctaccgaggagccgcccctttctcagccttgctcggctcttccccg

SEQ ID NO: 482403 - DNA, 122 bp, Homo sapiens
acaatcgaaaatgtatcacttactggtgatgatgctcttgcgatctcaatatcaactaatcgaccaagcaatatagcaacgaactcaatgacaaaatatctaactttgtgaatattattaat

SEQ ID NO: 482404 - DNA, 122 bp, Homo sapiens
tatctagaaggcagagccagatgtacaggatggaacatgaaagtgaaacaggagtgtgaccgctgaagtacagcgtcacagggagatgtttaggcctccagataactgtgggcgggcctgac

SEQ ID NO: 482405 - DNA, 122 bp, Homo sapiens
gcgcttcacctcgcagaagcgggtgggctctgtggagagtcgcgggctcgcgggcagcagcgcctcctccactccggcgggcccgggttcggccggccgcccatcggactggcggactggct

SEQ ID NO: 482406 - DNA, 122 bp, Homo sapiens
gcggaggcaggtaaggaggtgcctgtgcgaggtgggggtggagccaaggctgtgtacctccgacgctgtgcacctctctgatgggacccagtccagacaaaaattgtatataacaaaccctt

SEQ ID NO: 482407 - DNA, 122 bp, Homo sapiens
gttcttccaggagaaggggttgtcctcctgcttccaggatgcgggccaggccatgagcaccgtgttgtgcttcaggccgcccaggccggccgactggatcaggtgggacatgccatcccgca

SEQ ID NO: 482408 - DNA, 122 bp, Homo sapiens
aagggcctgtccccttcactctgtttccctcacatggactctgttccctgttgtcctttccgctcctgtcaccttcaagagctgggcatgtgggcgttcagaggggggtagccagagaagag

SEQ ID NO: 482409 - DNA, 122 bp, Homo sapiens
cgttaccatgacgaccgggctcctagaagctgcagtcaaggacctggttgccatggtttccgcttctccgcctccagccccgcccgcgctccccgcggcgtcggcgcctgcgcagtgcgtgg

SEQ ID NO: 482410 - DNA, 122 bp, Homo sapiens
agcattcctcccacctcggcctcccaaagcgctgggattaccagcgtgagccactgtgcccgccgaggcacaagcattaaagcagcatggtgcctcccttggttctccatctgggagctcat

SEQ ID NO: 482411 - DNA, 122 bp, Homo sapiens
ttttttggttgagcccaccttaccagcctcttctaaacccaactcacctctctgtctgtacgcttttatatcttggaatttttttggttcctccgacttgtctggatctcttgtagctcagg

SEQ ID NO: 482412 - DNA, 122 bp, Homo sapiens
tctgtcagccaccgtcacactcaccgtggctgtggctgacagcatccccgaagtcttggccgacctgggcagccttgagccctccgacggtccttacaactatgacctcacgttgtacctgg

SEQ ID NO: 482413 - DNA, 122 bp, Homo sapiens
actctcgctcccgcagctcctctggtacccgccctcgtacctggcgcatctgggcctcggcggcgccgccctcctgccttcgcagctgctcccggaagcgcgcaacctgctccagcagcgcg

SEQ ID NO: 482414 - DNA, 122 bp, Homo sapiens
ggtgggccagggctgccggccggccagggcagctccacagtcaggggctgggggctaagccggggcgtgttgagagggggcggcttgggggtcggtgatgggaggaaaacagggaacccagg

SEQ ID NO: 482415 - DNA, 122 bp, Homo sapiens
cgctctgtgagaagttcttccgggtgggtgtactcccagcgggggcctccccctgacggccgcccgctccctgccctgggcctccccatgacggccgcccgctccctgccctgggcctcccc

SEQ ID NO: 482416 - DNA, 122 bp, Homo sapiens
gatttcatttgctttcacctgaggagccattatcactgcttaatttgttccatgtgcaagcggacactcaatgactttataatgatgatgtctaacatttcctgacaaagtgtgctttgtca

SEQ ID NO: 482417 - DNA, 122 bp, Homo sapiens
gagactgcctggcattcggaggacgaccacaggggtgtgagctgccccggggtgcattcgcgtcaaagaggttgaggtggaaccagctgcgaccctcagcagcagcaagtggccactttggg

SEQ ID NO: 482418 - DNA, 122 bp, Homo sapiens
tcggcgactgggacccctgccccggagctctctctggggagctctgcgcccgcagccgcgcgtctccccaaattgtgcggaagtcgtggagggaatcccgcctcgtgtgtggggttcccagt

SEQ ID NO: 482419 - DNA, 122 bp, Homo sapiens
ggttcctttcggattgacttgaactccatggaagagccagggaggccttccactgtgcttcgtttgaaaagcaattgagaaagtgggaagctggtggaactgggagtcagaggacctgagcc

SEQ ID NO: 482420 - DNA, 122 bp, Homo sapiens
ggcgccgccgcgtccctgcggggtctccacctggctgggggctcccccccgtcttcatctcgaggacgccttagggacgttttggggcttaaagccactaaagacgtttctttcagattttt

SEQ ID NO: 482421 - DNA, 122 bp, Homo sapiens
cagtccggcttgatgacttgtgcttttgtttttcctctctgcatcagttagctggcacctcgggttttgaattcagttccctggactgtaaggggttgaagatttgatttaacttatattta

SEQ ID NO: 482422 - DNA, 122 bp, Homo sapiens
gttcttactgtgaaggtcagcagagcttccctcaaaatttcaaggattaaatggccgctacagccaaaactgtccaggctccaggattttatgtatggctgatggaattctggagttggaaa

SEQ ID NO: 482423 - DNA, 122 bp, Homo sapiens
tcgcgaactcctggcctcagacgatccacccacctcagcctcccaaagtgctgggaattacaggcttgagccactgcactggccaaagctgctattttaaaaaatctttaacaggccaggca

SEQ ID NO: 482424 - DNA, 122 bp, Homo sapiens
aaaaaaggtgggaatgctgatctagtttacattctccactttaactcaaacaccattttacaggcagagacactgaggccctagtttgaagctcaaaggtcacagtctagtttttgttaaga

SEQ ID NO: 482425 - DNA, 122 bp, Homo sapiens
cactataaatattttatataccagacacttcctgtcccttctcaggtctctgtttgaatacagtactaaaaagttcatctggatcagcagcctaggctcccaccctgccatgagttgggtta

SEQ ID NO: 482426 - DNA, 122 bp, Homo sapiens
cagcactcagaaccagaagtttagtgagctctacccagaagcatgagcagagaacttttacaagccagccatcaggcagagtagagcaatcacctgattggctaaagctaggcatttgcctt

SEQ ID NO: 482427 - DNA, 122 bp, Homo sapiens
cactgcattgagaagggtaatttatttggcaaactttaatttcaatcctggatcattttacagcaatgatcagaattgtgttaacaataggtatatatagtgcagttagttcagttaggcct

SEQ ID NO: 482428 - DNA, 122 bp, Homo sapiens
actggagaagagtaaattcttgctataaagtagcagaaaacatgatggaattgtattctacaggtaggtgaaaagcagaacatgtaagcaatgaacttgaatattcatctgaggatatttcc

SEQ ID NO: 482429 - DNA, 122 bp, Homo sapiens
aactctgcctcctgggttcaaacaatactcctgcctcagcctgctaagtagctgggattacaggcataagccatcacacccagccttgaggattttcttatactgtgtttgaatccacatga

SEQ ID NO: 482430 - DNA, 122 bp, Homo sapiens
ctttgaatctacagccttcgtagagtacctgaaattttattcatttttacacttaatctacagatctttatggaacccctggtatatgataagcactgttctagatactggatatgcaaaag

SEQ ID NO: 482431 - DNA, 122 bp, Homo sapiens
tcttgtctttgggcttcagcctatgtctcaatctttattgccatgctatatattaagatacagcactagctctgaatcagccatgaaagagctgaaaaatcttgggcaatttatctaacctt

SEQ ID NO: 482432 - DNA, 122 bp, Homo sapiens
accaaaagtctctgtcaagtattggcccttgagctccagatacgtctagagatagagttacagcacattatatagggcatgacaccatgagattgtccctttaaccttagcaggatcatccc

SEQ ID NO: 482433 - DNA, 122 bp, Homo sapiens
cggatggacaaatggttccagaagctttctacttgcaaataacctgagtgatgaagattacaggcttatgagtgataacaatttgctaggcactataggtgaagtacagaagagttgctgag

SEQ ID NO: 482434 - DNA, 122 bp, Homo sapiens
tggtgtggctccagacttctcagcccagccaccatgttggaaatcagtttattgaatttacagtaaaggttttatggggctttcctggaagcttcccattatggaaactcttgtgctggcag

SEQ ID NO: 482435 - DNA, 122 bp, Homo sapiens
attattcagttagttttgcctaatgctcttatatctgtaataccttatttaactgttttacagccagtccagtgaggcaagtatctctatcactggagatttcttcagcaatgttctatgag

SEQ ID NO: 482436 - DNA, 122 bp, Homo sapiens
ccagataaatagctttgtatattatcatctgttagtgcgttctattacttttatttcttacaggaatgctacctgtcttacagggttctctaaataaacactgtgtttaaacactttacacc

SEQ ID NO: 482437 - DNA, 122 bp, Homo sapiens
gtctgcgggccctcttctccctcggccacaaaacggtgtgtccaggatgggtctgctttacagctggatcctggaacaagaagacatgcagagcagagccacagctgctgacaacaggagca

SEQ ID NO: 482438 - DNA, 122 bp, Homo sapiens
acatgaggcagagaacatcaattgtccctgttggagaatatttctattattattattttacagtagctctgagggtgagatactggtgaagattttggtgggtcaaagccatcccttggcac

SEQ ID NO: 482439 - DNA, 122 bp, Homo sapiens
gaagcatgttagtttcgattagggtccagaacaagaaagggatccatagtgggttccctacagctttggccatgtgacccagcaaggccaataatactagaggtattgaaagtggttaaggt

SEQ ID NO: 482440 - DNA, 122 bp, Homo sapiens
atgacatttatctgcttgggtagtccctgatcattgtgcaaagttgggtcttcctaggtacagtacttagatttcttttgagtgtctggaacttaagacttgcctcatctcagaggacagcc

SEQ ID NO: 482441 - DNA, 122 bp, Homo sapiens
gagctccttggggaagttctggagatggaagattggagatggagctacaacctccctttacagctatccttccccagaggccatcagccccagggcttcagtgaaagcagacagcgctgctg

SEQ ID NO: 482442 - DNA, 122 bp, Homo sapiens
gtgggttcgtggtctcgctggcttcaggagtgaagctgcagaccttcccagtgagtgttacagctcataaaggtagtgtagacccaatgagtgaacagcagcaacattttttgcaaagagcc

SEQ ID NO: 482443 - DNA, 122 bp, Homo sapiens
aaactaaaagtttgacccataatctgcagccagcagcacagaaagtcaagccattatctacagtaaccagcccaggaagccagcttgctatccataagtcagacttacagaaagtcagacca

SEQ ID NO: 482444 - DNA, 122 bp, Homo sapiens
aaggtactctgtgggagggaggagataatagccaatgattatattcctccttcatacttgcagtacctctgagagagacattttagagacaacatctgaaaagtcaggttttcatccttcat

SEQ ID NO: 482445 - DNA, 122 bp, Homo sapiens
gtcttgaactcctgagctcaagtgatccatgtgcctcagcctcctaaagtgctgggattacaggcatgagcctctccacccagccacttatgctcttagggtaatattagcagggatagaaa

SEQ ID NO: 482446 - DNA, 122 bp, Homo sapiens
taggtttttctatttattttttcccttttcaccttaataaaatcatggattaattggatacagtcagtggttgtgccataagtttataaatcacttagctgttatctaatttgattctcaca

SEQ ID NO: 482447 - DNA, 122 bp, Homo sapiens
gtttatataaacaattaccccagcaagtgagaactcactatacagatagtccctgacttacagtctctcaactttatcatggttcaaaggttatacatattcagtagaaactatacaattag

SEQ ID NO: 482448 - DNA, 122 bp, Homo sapiens
cagttcttccctgtatgagaagggcctaacactctccctgagtatcagccacaggaattacaggcaaagggatctgaggcactaagagggaacctaaagggcttcactgggctcctttctag

SEQ ID NO: 482449 - DNA, 122 bp, Homo sapiens
aagaattgaaaacaggaatttaaacatatacttacatgtggatattcacacaggcatttacaatagtcaaaaggtgaaaacaatgtgcaagtgcccatcaacaaatgaatgaacaagatatt

SEQ ID NO: 482450 - DNA, 122 bp, Homo sapiens
gactcaaactcctggggaaaagcaatcctcttgcctcagtttcccaagtagctgggataacaggcatgtgccactgccattacagccatttttaagtgtacagttcagtggcattaaataca

SEQ ID NO: 482451 - DNA, 122 bp, Homo sapiens
aaagttctctttgtgcactacagaccgggtagactgacgtggtgttcacagacacggttacagcctgatgttatgcaatagcatgttaaccacacattctagtaaaaaaataaaataaataa

SEQ ID NO: 482452 - DNA, 122 bp, Homo sapiens
actatgtttcccaggatggaatgcagtaggtattcatgggcatgcagtcataacacactacagccttgaattcctggcctcaggtgaacctcccactgcagcctcccaagtacgtaggacga

SEQ ID NO: 482453 - DNA, 122 bp, Homo sapiens
tggagaaagatggagcttcttgttctgtgagtttcactcatagctccagctctggagttacagggacttgggtttgaatcctcattctgttactttctgtctgtagtggttttgagtaagtg

SEQ ID NO: 482454 - DNA, 122 bp, Homo sapiens
gataatgctggtacgagtgacagcttccctcatggaaggcccaccacgtaaagcagtttacagccatctcattccatctatgacagaatcctgtgtcactgttttggagatgggaaaaaaga

SEQ ID NO: 482455 - DNA, 122 bp, Homo sapiens
cgaggctgtgccctgttgatatcctcagtctccgttcacagcacagtggagtgagggaaacagtctggccctttgttcttgtctgaaaagaataatgagctgtctgccccaggcgtgcggct

SEQ ID NO: 482456 - DNA, 122 bp, Homo sapiens
gtctcgaactccttacctcaggtgatctgcctgcctcggcttgccaaagtggtgggattacaggcatgagccactgtgcccaaccaagaaatatgttcttaacaggaaagatgaaaaagagt

SEQ ID NO: 482457 - DNA, 122 bp, Homo sapiens
tgtgggttgagtcctgcctgtgttccaagcatctttctctatgagaaagaatccaatctacagctatcaggccaacctttaagagacctggtgcatttaggaaatttgctgcctggcctaga

SEQ ID NO: 482458 - DNA, 122 bp, Homo sapiens
tgctaagcaaacaacctgcctttctgtgcccaaccctgaagcagcagtacacagtacttacaggccatggcatagatccctttggatgcattctgggctttcccagagaggtctccgcccat

SEQ ID NO: 482459 - DNA, 122 bp, Homo sapiens
aatgactactagagaatctaaatgaaaactatgttcagaaaagatcctatttcaagattacagacatgtacccacagcctgggcttgtcctaaatgagtagcttaaatatagtcatgaaagt

SEQ ID NO: 482460 - DNA, 122 bp, Homo sapiens
accagtgaactttgggcttaagttattctcttatcttaacctcccaagtagctaggactacaggagaacaccatcacacccagctacttaattttgtagacaggatctcactatgttgccta

SEQ ID NO: 482461 - DNA, 122 bp, Homo sapiens
gaggacaaagaagagttaattccatgtgtgaaacatgagtgaaagagaatgcaagatttacagcactgacagcagagagctaacctaggctggccagatggttcacctgtatttgtgaaacc

SEQ ID NO: 482462 - DNA, 122 bp, Homo sapiens
gtttcttgggggaggtgaaaatgggaacaaagggacctgtggccctggggtttctgataacagcaccagtggcatctgacatgaacctgtgggggacagggctgtccctcagcctttggaaa

SEQ ID NO: 482463 - DNA, 122 bp, Homo sapiens
acattgtccatctcatagggttattatgaggcttagtcaatacatgaaaaatgcacacaacagcacctggaggatagtaaatgtacagtaaatattggtcactacttctccccatgggtgat

SEQ ID NO: 482464 - DNA, 122 bp, Homo sapiens
caatgcccaaagtggttggattagagatggatttcatacattttaggggaacagaagttacaggcagacatcaatcaatacatgtgaggtatacattggtttgatccagaaagatgagacaa

SEQ ID NO: 482465 - DNA, 122 bp, Homo sapiens
aagactgtgtgggaagcatatttgggttgtttgaaagtaaagctggagattcctgttatacatcctactggagctgtcaagtaaggagttagatattcacaatgtggcatccataggaggga

SEQ ID NO: 482466 - DNA, 122 bp, Homo sapiens
ttcacagatggttctgcacaatatgcaggcaccacccgaaagtggacagctgcagcactacagccctgctttctaggacatccctgaaagacagtggtgaagggaaatctttccagtgggca

SEQ ID NO: 482467 - DNA, 122 bp, Homo sapiens
tggggtatgaaaaaaaacaaaaaaacaaaaaaactgccgctagctagctgtctgcccaaacagctacccagttttgtgcttgaaacccagggccctggtggtggaggcacctgagggaatct

SEQ ID NO: 482468 - DNA, 122 bp, Homo sapiens
ttgtcactctcatatgccattgacatgtgtggcagagagcagaggaggcagtgtgacttacagctggacacccctgggaccccagactgttgttgtgtcctgtggagggtctgtcctcagtg

SEQ ID NO: 482469 - DNA, 122 bp, Homo sapiens
tctctcattagtgtttgtatgcagagaagatttctggaaggagacacaagaaatgagtaacagcagttgccctgaggagcaagactgagagttgaaatcaaatggagatttgcttttcactg

SEQ ID NO: 482470 - DNA, 122 bp, Homo sapiens
tatgatgctaaaagagttgttttcacatctcctcctccccagcaccatagcacatggtctcagcttctcaagttctgctgccatccctgccaaagctgctgacacatgtggagcccaatcat

SEQ ID NO: 482471 - DNA, 122 bp, Homo sapiens
cccactttctaagctatgccatagaattacagggaggccatgcagcttatcagcattacacagcactaagtggtggagataggactgcagctaggtctgccccactctgaagtcttcagttg

SEQ ID NO: 482472 - DNA, 122 bp, Homo sapiens
gagtttgttttaattaagaaacgaattaatcaccccgacttgtgggtttccactgttctacagattcaacaaattccagtgacaacatctacacaatgattaatccagtgccgcctggaggc

SEQ ID NO: 482473 - DNA, 122 bp, Homo sapiens
tggcaatacttggaagattattgtgaggataaaatgagagtatatatgtagtacgtactacagtggctggtttacagtaagctatagctaatacagttgtccctggtccttgggtatctgaa

SEQ ID NO: 482474 - DNA, 122 bp, Homo sapiens
ggagagcacagtcaatgcaggtgtgaagaaagagataaaatctaggatagtgaagggtaacagccagatgaccaggatgagctacatcaccttggtgtggccaaattccttcagtatggagg

SEQ ID NO: 482475 - DNA, 122 bp, Homo sapiens
acagagccccatgaagcaggggcagacttgtatcagaggaagagtgtgtgctatgatctacaggccatgagctgtagctaagtgaatggtggccagccagcacattggagcagtggtcaagg

SEQ ID NO: 482476 - DNA, 122 bp, Homo sapiens
aactggttaaattgtggaaagaacattaaataaattgtagtgttaaaattatcttaattacaattgttgagtgaatgaaatgacccattgtccaaatgatatgtgaatgggtactcatgggg

SEQ ID NO: 482477 - DNA, 122 bp, Homo sapiens
tgcaagtgagctgagtctgaaaagagagtcagcaaagggagatggggtggggcggttttacaggatttgggtaggtagtggaaaattacagttaaaggtgattatctcttgtgggcaggggc

SEQ ID NO: 482478 - DNA, 122 bp, Homo sapiens
actgggagcagcattaaatagcttcatggaaacatgcatggtctgtccatctctattttacaggcctagctttcaacaaataatagaaagaagggtcttgtatttatatgctgagaagtaag

SEQ ID NO: 482479 - DNA, 122 bp, Homo sapiens
aatctaatggggagcgctgaaatgtccagaaatgtgtcccagcgctgatggcatctggtacactttgtcaacttgatagggataaaatgataggtttctgtgtagtgaagaattaacttagg

SEQ ID NO: 482480 - DNA, 122 bp, Homo sapiens
gaagaaaataaggcagtgcaatatgaaaaagggtgactggggtggggcctacctttcatacagtagtcaaagaaggtctgtctgaggaagtgaccttttgaactgagtcctgaatgatgagt

SEQ ID NO: 482481 - DNA, 122 bp, Homo sapiens
cagtgtctcctgtaatcttttctgaaaggcaagagggagccagtttgcctgttttgtttacaggctttgagcatttagcacatctgcttgtgcaaacttacagcatgtgaatttctctgggc

SEQ ID NO: 482482 - DNA, 122 bp, Homo sapiens
cagtttgcctgttttgtttacaggctttgagcatttagcacatctgcttgtgcaaacttacagcatgtgaatttctctgggctgactgaggttattggggctgactttaagtctgtcttcca

SEQ ID NO: 482483 - DNA, 122 bp, Homo sapiens
tatgagccatcaggagccagaagacagggcaagcagagcagctggaatgcagtttctctacagtcaccagcagactgtgctggcctggccatctggacatgcaggagatatggcagaaaaca

SEQ ID NO: 482484 - DNA, 122 bp, Homo sapiens
ggactaaagaaactgactttagaaggagctaaagtgacacataatggcaggtacctgttacagtcactgaaatgttaaattatgaatgctatagttataaccacagttatttttgtggccca

SEQ ID NO: 482485 - DNA, 122 bp, Homo sapiens
actgacataccaggtattacagagttttaagcacaggaatgacatcatcagtttgtaatacaggtaagtgacagctgtgtggcagatggccatgagaggaaaaagctacaggcaagacaacc

SEQ ID NO: 482486 - DNA, 122 bp, Homo sapiens
gattatgtagacactttgattaaaactgggaatacaaaatgcttgccacgtatttctttacaagaccagcatcctaatgttttttcagagtagccaatgtggaatgagctgctgaacttttg

SEQ ID NO: 482487 - DNA, 122 bp, Homo sapiens
cagagtgagaccctgtctcaaaaaaaaagaaaaaaaaaaaagaatgacttttagactttacagctctaagaaatccccatcaagcccttctgtcttaagaggtgattggcaagtaacttgat

SEQ ID NO: 482488 - DNA, 122 bp, Homo sapiens
tagtaaattggaatgtcagtatcatccagggtaatggcaagagcaccaaagttgatgctacaagacctgagatgcagtccaggctaccccatttattgtgtgtgacctcacaaaagttactt

SEQ ID NO: 482489 - DNA, 122 bp, Homo sapiens
actgaagaggaggaggctcctgagagacgggtaggagaaccgggaggtaaggggtaggtacagcctccagggacctgcaatgctgaccaaacacctgaccagggtttgatctcagcatcaga

SEQ ID NO: 482490 - DNA, 122 bp, Homo sapiens
cccaagaactgtaacagcccattggacagatgtgggcaggaatggggacaaaatcacccacagtctcagaccccaaatgaggtgtgaatatgaaatccatgaaaacctcatgtggaggccaa

SEQ ID NO: 482491 - DNA, 122 bp, Homo sapiens
tgtgcattgggcagtgagcccattgctcggtaacaataggtgagaatggatgttgagccacagtcaaccaattcctgcacactgtcctgcctgagacccattattgtgtgttcatctgtctc

SEQ ID NO: 482492 - DNA, 122 bp, Homo sapiens
atacgtctcagaggagaggtggtaagtagtaataacagatggcggaagacattacaataacaggcaccaaataaatggggtgatcagggtcttgatctggggtcattacacaggtcaataga

SEQ ID NO: 482493 - DNA, 122 bp, Homo sapiens
ccaagctggttttaaactccggacctccatccgccttggcctctcaaagcgctgagattacaggaatgagccactgcactcagcctcagatcaattatttaaacaaactcagtcaatataaa

SEQ ID NO: 482494 - DNA, 122 bp, Homo sapiens
tgagtcaacatggggacataacttggttagcccaggatttcatctgtactctgcaataaacaagccaacattaattcagaaggctgctgtgtgtccctgatagaattacccgtgaatgttgc

SEQ ID NO: 482495 - DNA, 122 bp, Homo sapiens
gaagagtgttgtttttacactaaccagtcagggagagtatgagacgctgcctggcatttacaggaaaaggcttctgaaatcagacaatgcctttcagactcttataccaacctctggagttg

SEQ ID NO: 482496 - DNA, 122 bp, Homo sapiens
ccattgtattagagagcattagagctctgaaagagacatatagtgttcctgtcatagaaacagcatgtggcaagaccaggaggttagactgtgcatggctgatttcagataatgaaatggag

SEQ ID NO: 482497 - DNA, 122 bp, Homo sapiens
agatctcaatatatagtattaaaatgttgtaaatgattagctggatgtggtacaggcctacagcccctagctactcaggaggatgaagtgggaagatgtcttgagcccaagaatttgaggct

SEQ ID NO: 482498 - DNA, 122 bp, Homo sapiens
gatgcaagaggtgggctcccaaggcctggggcagctctgcttttgtggttctacagggtacaatccctgcacctgctttcatgggctgttgttgaatgtttgtgacttttccagtatcactg

SEQ ID NO: 482499 - DNA, 122 bp, Homo sapiens
aaaaccttcaggctgaacttaaatatgtaaggaggcagcttcaggccaaacttgatttaacaagctgcttaataatgtgagtccctgtactgatactgaagtagttacatggagtgccagcc

SEQ ID NO: 482500 - DNA, 122 bp, Homo sapiens
tgcgtagtcttgtggtagtgtctgtgcatgtgaaagagaaaacacattgtccagtatctacaagctgtattgcaggtaaagacctcttgctgggtccttgtgatgatgggattgtctctgga

SEQ ID NO: 482501 - DNA, 122 bp, Homo sapiens
ttgtttgatgagaccactgactgagctttgcaattagaataagtaggtgaatggaccctacagtaacctgtaatcaggcttggccacagggtgtattttctggacagatggtaccactattt

SEQ ID NO: 482502 - DNA, 122 bp, Homo sapiens
gattagacagagggtgctgattttgcagagtgcagagttttgctcatctctgaagatgtacagtctctgggcaggcagagagaggcctctggaaacagaactgcatggaagaaagattagag

SEQ ID NO: 482503 - DNA, 122 bp, Homo sapiens
ggtgttgattctagaagatgttcttcagtgtccgggcactgaagagtcaggtatgtattacagtcttcactgtctggacttctttgtagccatacttcttgggaaggctttccagatatttg

SEQ ID NO: 482504 - DNA, 122 bp, Homo sapiens
agcctccaggatcatctgtaacaggataaaccttggtgctaggtcagggatgagcaaagacaggcctctggcattgcagagaaagtaagtaaaatcctctggcctaactgaagcatagaatt

SEQ ID NO: 482505 - DNA, 122 bp, Homo sapiens
gcaagtgctcaccaatgttgccattagtatgagaggctggtcactgtcctggtggttttacaggacttatatcatttaaatctaacaaggacatgaggtaggatcaactgctttattattat

SEQ ID NO: 482506 - DNA, 122 bp, Homo sapiens
tgttcttccctttagggtgacaagttcctcctggttccaggcaggtccatagatgctgtacagcagccagggtctggagtcagaaactttagaaatctacctggtgctctattctactgagg

SEQ ID NO: 482507 - DNA, 122 bp, Homo sapiens
aaagtagaagtagagtgagaagtgggagattagcaggagagacattcaaaaataaaactacagcatgtagcccatggtaggaaatttggctttcacactgaataaactgatgagtcatccga

SEQ ID NO: 482508 - DNA, 122 bp, Homo sapiens
caagtgtttatttgtaactaacatgaaagattatggccagtgcacaaaaaaaggtgtgtacagtcactactgtgagcacaaaagaggggctcttgggcttaggttgaaggtgctggtggcat

SEQ ID NO: 482509 - DNA, 122 bp, Homo sapiens
agtgatgtgaccacagaggcagcgattggagtgatgtagtcacaagccaaggagcaccaacagccaccaggagctggaagagcccaagagtatatactaatacctggatttgggacttggga

SEQ ID NO: 482510 - DNA, 122 bp, Homo sapiens
gggacaagactgctgggcagtggtggcatctttggacactctgggttaagcagccatttacagcccagaagaccatgcagagatagtccagtgtgcatgagggcccatgctatgccatgcac

SEQ ID NO: 482511 - DNA, 122 bp, Homo sapiens
cggatgatttgcactcagagagccaggccctctctgttttgttgccctgccccctagttacagcagagtgggagtggtggtggcatcctgttgaacatacagattaccaggcctcacctcag

SEQ ID NO: 482512 - DNA, 122 bp, Homo sapiens
aagcatgtgccccaggggctacaagcagggtccatgtgatccccgagcagacatgagttacagccaccccactgtgaaaacactgaaatacttccaaatgggcacagagctcccgccccaac

SEQ ID NO: 482513 - DNA, 122 bp, Homo sapiens
agtaagttgttcaggccagcagccagaatgaggggctccagaaagatggaagttgaaatacagtatgtgactggaaaacacaacatggcagagaagattctaggaagtgctgggtgatccag

SEQ ID NO: 482514 - DNA, 122 bp, Homo sapiens
agatatgatatgcccttttagaaaatcatattggggaatgcttgatgctgatatgttctacagctggtgaggttgacatttatcacttggataaggtggtatctttcaggtttctccatggt

SEQ ID NO: 482515 - DNA, 122 bp, Homo sapiens
taacctggcagaactggtatgaacaggttgaggttggcccaaaccagccaaaaccaattacagatggtcagaaccagtctaaactggttgtggcctgtcatagctatggtcagaaccagtct

SEQ ID NO: 482516 - DNA, 122 bp, Homo sapiens
caacctgttcataccagttctgccaggttatggctggttctgataggcttagaccaattacacctggtcacaactggtttagactagttatgactgccacagccactttagactggctatgg

SEQ ID NO: 482517 - DNA, 122 bp, Homo sapiens
taactcagtaatttagttgctcaattccaaattcccaaagaaggatgtttttgggggttacaccacaagtcctaagccactaccatgtccatggagtgactgccttttcatcaggtatccat

SEQ ID NO: 482518 - DNA, 122 bp, Homo sapiens
agacaggtcacttaactttcctgtgcctccatagcctcatctggaacacaagcataacaacagcatccaacccatggagttgtcatgaggatcagaggagctaccatatgtaaagtgtctgg

SEQ ID NO: 482519 - DNA, 122 bp, Homo sapiens
ttttctgtattttgagtgaaagttgtctgtaatatgtcaagcaagaatgttataattctacagtaatgtgtgacttcatgacagagctacattctgagaaatttgtcattaggtgatttcat

SEQ ID NO: 482520 - DNA, 122 bp, Homo sapiens
ttaaagaggatggaaaaaatggtaggagatgaaagaaactgtcagacttctgggattctacaggactggacaatagagctatctggccaagaatatgctttattcttcaagaaaaggaaaga

SEQ ID NO: 482521 - DNA, 122 bp, Homo sapiens
agaagtgagttacggccatggtagccatttgaggatcctcaggaagggtcagtatatttacagccatatttcatggtgttcccaaggggctgcatagactaagtactgtacaagaaataaga

SEQ ID NO: 482522 - DNA, 122 bp, Homo sapiens
acatccgcctcctgtgttcaagtgattctcctgcctcagcctcccgagtagctgggattacaggcatgcaccaccatgcccagctagtttttgtattattagtagagacagggtttcaccat

SEQ ID NO: 482523 - DNA, 122 bp, Homo sapiens
agctcctgcacgttagtgtatagccaagaggtttgtgagaatattgaagtgctcctgttacagctagtacatagtttctatagtgggccctctaagtgccttctctaagcatcctgaccctc

SEQ ID NO: 482524 - DNA, 122 bp, Homo sapiens
gcagtgtccagattatgcaggattttgagaccataaaaagaatatggaaatttatcataacagtcatcaaagatttaaagcagagaaatggtatgatcaggtctgcattgttaaaatagtgg

SEQ ID NO: 482525 - DNA, 122 bp, Homo sapiens
ttagagtgaataaggagagtctagaggggcagccagggatgctggaccatagccagaagacagcagtagtacccagaagtcaagatggtaagaaatttcagagaagacaagagagtggatgg

SEQ ID NO: 482526 - DNA, 122 bp, Homo sapiens
gttctccatcatcctgaagtagctgacttgctggaattatggaatggccctttgaagttacagttacagcatgagctaagtgacaatactttgcagggttagaacaaggctcttcagaaggc

SEQ ID NO: 482527 - DNA, 122 bp, Homo sapiens
ggctcagagaagaagaacagattattcgttgcaacagcagtggacagattgtacagattacaagcttgttgtgatggttcctcaagctctggttcccacaaggtgaggcccagagagccaga

SEQ ID NO: 482528 - DNA, 122 bp, Homo sapiens
tggaggatattgggcaggttggagctaatgaaggtagtctgaggaacatcacactatcaacagtctgttcagaagggaaagtgatgacaacagtgaggacctttgtggagtgcttgctctat

SEQ ID NO: 482529 - DNA, 122 bp, Homo sapiens
attggtgggtttttggtctcactgactttaagaatgaagccacggaccctcgtggtgttacagctcttaaggtggcacatttggaatttgttccttctgatgttcagatgtgttcggagttt

SEQ ID NO: 482530 - DNA, 122 bp, Homo sapiens
caatgtgataaaaaggtgatgtgaaatcaatgtgataaagtgtgcatggagatagcattacagtgaccagaagcatctccatgaggcagtaatctttgcagttgattgacaggagccaagca

SEQ ID NO: 482531 - DNA, 122 bp, Homo sapiens
atcaagaatggtggccaccagaggggagggacagaactgggaaggacacataaagggctacagctgtactgctgcacattctattggtgtcctgggtgctcattctttgatatttgtttagt

SEQ ID NO: 482532 - DNA, 122 bp, Homo sapiens
tggcaatcccagaacaccactgcaagaagtctttgtcgggcactccaggtgtcagagagacagcctgccaggtgggacccagtaacatcccaggacagggacaggaagcagtctgggccctg

SEQ ID NO: 482533 - DNA, 122 bp, Homo sapiens
tatgaatgcagcctgcctccaagagtgagctgtgagactcaggtgcattggggcatggaacagcacctgtgaacaggtgaggccaagatgatgctgtctgcccacaaactgtttcaggctct

SEQ ID NO: 482534 - DNA, 122 bp, Homo sapiens
gggaagccccaggaggcctggagccagccctcaaactcagagccacagccaagcggactacagacagccattctgttgctggaggcatcaaagccttgtatgaaagaggtccagttctgatg

SEQ ID NO: 482535 - DNA, 122 bp, Homo sapiens
gaggcatctgggattccagggtcaggcagagctggttgtttatccggtgtggttggcttacagctgttcttacacatgaggaaactgaaggttccagaacttgctccaggtgacacagccaa

SEQ ID NO: 482536 - DNA, 122 bp, Homo sapiens
tcttgaactcctgacctcaggtgatccacctgccttggcctcccaaaagtgctgggattacaggcatgaaccactgtgtctgaccaagagctttccttttgaattccagttgtttcccttgt

SEQ ID NO: 482537 - DNA, 122 bp, Homo sapiens
tttttggcatgttggaaaataacaaatttggcaaagatttttaatacaccataccatctacagcattatttttaaacctgaggcatgtgtcctaattaagtaggaatgttttctaagtttct

SEQ ID NO: 482538 - DNA, 122 bp, Homo sapiens
atgcaaggtaagtcagcatttattatgtgcccaaatgatttgaacatatagctgagtttacagtaagaagtgatcagtgtgagctggaagatttcaaggtttcatgtggactgatgatgaca

SEQ ID NO: 482539 - DNA, 122 bp, Homo sapiens
ttgctcttgttgcccaggctggagtgcaatggtgtgatcttggctcgctgcaacttcttacaggcatcagccactgctcctggccaaggaaggtttcatcatgttggccagactgaacgacg

SEQ ID NO: 482540 - DNA, 122 bp, Homo sapiens
tatagagaaaggggtctctgagagtaaagaaccggtgggtgatggatgggctgagttttacagtcaggtttgaggaggcaatgtctgatttacacagggcttatagattggttcaatcaggc

SEQ ID NO: 482541 - DNA, 122 bp, Homo sapiens
aggctgacctcctgagctcaagtgatccttccacctgggcctcccaaaacgctggtgttacaggcctgagccactgtgccctgccatgaacactgtttgaatgaacaaatgtgatgtccttc

SEQ ID NO: 482542 - DNA, 122 bp, Homo sapiens
gacaccaatcccagctaatttctgttctttatagaggaaccagtctgtggttttgtgttacagcagcacacatggttagactaagacaagtgtgttccaaatgttgaatgcgacatatacta

SEQ ID NO: 482543 - DNA, 122 bp, Homo sapiens
agggaagatcaggccagcagacaggcagaggttgcggccagaaagtggagggaaaatctacagtccctgaatttcccagcaaaaacctcagaagccagaagacatggaacaaacgcttccaa

SEQ ID NO: 482544 - DNA, 122 bp, Homo sapiens
acagtattcctttttacttcatatgcgagttattgattatgctgtaggatttaactattacagcactaaaaggcaactattgagggaagaggcagaaaaaggaaaaaggaatgtacgtaagg

SEQ ID NO: 482545 - DNA, 122 bp, Homo sapiens
aaaccggggttagtgtttagaaagaaagaacaacacgtgcaaaggcatggagcccctttacagccctgagcctgaaaggtggcacaatggggcatggcaggaaataaaactggacacatggg

SEQ ID NO: 482546 - DNA, 122 bp, Homo sapiens
ttagtaaggttttggcaagctccgatggatgggcaatggcagtgggcaaaattagtcctacagctgcagcaagttatctcagcacctgtagatgaaactggttttgggttacaacaggcagt

SEQ ID NO: 482547 - DNA, 122 bp, Homo sapiens
actggtaaattttttcatcttcaagagtaactaactttgaacagcttacggtcatagttacagcatgtggcagatttataaatgatctctagattcaactgtcaagcagtgagcctattggt

SEQ ID NO: 482548 - DNA, 122 bp, Homo sapiens
aaaacttataatagattggcatggactgggtggattaaacgaaataagtttattttgttacagtcctagaggcttgaagtgccagataaaggtgctggaagtcagttcctggtgagaccctc

SEQ ID NO: 482549 - DNA, 122 bp, Homo sapiens
gtctcaaaattctgggtttaagtgatgctcctgccttggcctccaaaagtgctgtgattacaggcataagccactgttcccagccagttgtttagctttctgagcaccactttctttactgt

SEQ ID NO: 482550 - DNA, 122 bp, Homo sapiens
ctatgcctgtagccccactgtatctaggaagtagatccaagtagattgcttttgattttacaggctccaagaaagggacttgccttgtctcagatgagactttgtacttggacttttgagtt

SEQ ID NO: 482551 - DNA, 122 bp, Homo sapiens
gtcttgaactcctgagctcaagtgattctcctgccttggcctcccaaaatgctgggattacaggcatgagccactgcattttgaatgaggcaagagaatatgctttttaataggaattttaa

SEQ ID NO: 482552 - DNA, 122 bp, Homo sapiens
gattgttaagcgacttgcccatagtcacctagtaagcaagttcagttctccttttctctacagccatttcacagtaagaattacttaattatgtagtttgactttcaggtacagtggagaag

SEQ ID NO: 482553 - DNA, 122 bp, Homo sapiens
tgatttacggaagaccagtcttggtgcagtgtagagaaaggactggacatgttggcattacagacatcagtatgtccttctgagtaaaacagaccagaacctgaaagagcttctccacctgt

SEQ ID NO: 482554 - DNA, 122 bp, Homo sapiens
acggccgtggctcaggatccataagtcggggtttggtctcagcatttacaaatgtgtttacagtcagaatgaaacacattccttctagaaagtgcttgggggtttttgctgccctggaagcc

SEQ ID NO: 482555 - DNA, 122 bp, Homo sapiens
acgtgtgtgtgacatttttggagagcttcctattttgaggctgtgggggatttaacactacagtcccagcccttgaggagcttagagagtgttgtggaagaactagaccatgggtgtcccaa

SEQ ID NO: 482556 - DNA, 122 bp, Homo sapiens
aaaacttgagaaaactttagaaataccgacttcaaacctgtaacctgtagcctaactttacagctgcaactagaatacaagcccctcatgtgcagctccactgtgggtctggcttaccaaaa

SEQ ID NO: 482557 - DNA, 122 bp, Homo sapiens
tatgacatatgtgaaacacatgtttcagagggaatgcctgcttcagctacttcatatctacagcttctactgaacaggtgtaagtaggaggctatatttcaactcagtgactcctctcttac

SEQ ID NO: 482558 - DNA, 122 bp, Homo sapiens
aagacagttatttgacctatatatggtaatcataacatgtttctctttagcttggttctacagccattgggatccagacatcagagggtgtgtgcctagctgtggagaagagaattacttcc

SEQ ID NO: 482559 - DNA, 122 bp, Homo sapiens
gctggtctttaactcgagttcaagtgatcctcgattcaggttcccaaagtgctgggattacaggcatgagccaccacacctggcccaaagcccaatactttttaaaagccttgagtgtttct

SEQ ID NO: 482560 - DNA, 122 bp, Homo sapiens
cctcccgtctcagcctccctagtagctgggattacaggcatgtgccaccatgtctgactacagcattttaatattggcaacattgggaagactaaaatttatgtgtcatgaattcaacttac

SEQ ID NO: 482561 - DNA, 122 bp, Homo sapiens
accacatttaatctttacaaaaactcttatgagatgaggactacgactaaccctattttacagctgaggaaactgaagtttgccttgaggcagttattaaacaataacttatccatgttcac

SEQ ID NO: 482562 - DNA, 122 bp, Homo sapiens
tgtaaggttcctgcagaggattcagggtttaatcactgtctagctgtcactttctagctacaggacctcacaagtcagtttgctgctctgtagttgcttatccctaataaaatggatgtaat

SEQ ID NO: 482563 - DNA, 122 bp, Homo sapiens
agcttctgaagtgaacatttcctcctaaattttaccaatttgtaggaggctattattatacaataccaatgtcttgtagttaggcatgtatccatgtcctactataggcaaaaattttgtgt

SEQ ID NO: 482564 - DNA, 122 bp, Homo sapiens
atgtcattatgtcaccaggagactcctgaggaaagtacagaatcaatggtgactccactacaatcaccccaacctgtgtgattgacaggttaggccaaggggaccttattcagttcagcaga

SEQ ID NO: 482565 - DNA, 122 bp, Homo sapiens
gttgaacgttaattctctcggcaagcttaaaaacacaagtgccagtgcgtattgaagttacagttctggctgtttggtccttttgtttgtccacagttggttggagaacatgggcttccact

SEQ ID NO: 482566 - DNA, 122 bp, Homo sapiens
gtgaccatggtaacactccctacctgaccaaaagctatcaaacgctctgacaagtgtttacagctgctttctcaattactgaagtggctctgaaaagagcctttggggttaggtggttgatc

SEQ ID NO: 482567 - DNA, 122 bp, Homo sapiens
caacaaagaaatggaaacttttaaaaaacaacaaaatagaaatccaaagactgaaaactacagtaacagaaataaaaattttactaggtgggcttaacaggagaattgagatgacagaagaa

SEQ ID NO: 482568 - DNA, 122 bp, Homo sapiens
tgagcactgggtgacaccacagggaaagaagctggctgcctctttggggcattgaaacttcagccaagagcaacagtaacattagcacagcctctgaggagctcactcagtgtatctgtgag

SEQ ID NO: 482569 - DNA, 122 bp, Homo sapiens
acaccacagggaaagaagctggctgcctctttggggcattgaaacttcagccaagagcaacagtaacattagcacagcctctgaggagctcactcagtgtatctgtgagactgtgaagtggg

SEQ ID NO: 482570 - DNA, 122 bp, Homo sapiens
aaaaaaaaagaagaaagaaagaaagaaaaaaacccaaaatttcatgaagctttacatttacagttccctggttgttcctaggaaagagccctcagcttgctccttttatagaaccacatgtt

SEQ ID NO: 482571 - DNA, 122 bp, Homo sapiens
gtctcgaactcttgggctcacgccatcctcccaccttggcctatcaaagtgctagaattacaggcataagccactgtgtccagcctaaagtttcttttaatgatattgatatttacctaggt

SEQ ID NO: 482572 - DNA, 122 bp, Homo sapiens
gtctcgaactcctggcctcaggcaatctgcccgcctcagcctcccaaagtgctaggattacaggcatgagccaccatgcctagctgcttgctgaattttcaaatactgaataaattcatgta

SEQ ID NO: 482573 - DNA, 122 bp, Homo sapiens
agataagatctcttctttgtctaacaattttttatctggacatagtgcctgacacttatacagccaccctgctatgagccagagacaagagaattgttgaaaaccagcagggcagtcaaatt

SEQ ID NO: 482574 - DNA, 122 bp, Homo sapiens
ctgcacagggagactcaaccattggccagttccaggtacctctccttactgtgtgctctacagtttcaagtactcaaccttgaaagacaccagaaaaaaaggcctgggaaaacatgttgcat

SEQ ID NO: 482575 - DNA, 122 bp, Homo sapiens
tcttgaactcctaaggctcaggctgtcctcccacttcaacctcccaaagtgctaggattacaggtgtaagctaccatgcccagcctctaaatgtgatgagaaatacatagcctcaaatttta

SEQ ID NO: 482576 - DNA, 122 bp, Homo sapiens
ccttgaactcctgggctcaagcaatcctctcacctcagactccccaagtagctaggactacaggtgtgcatccccatgcctggctaagttttaaaaatttttttagagacagggtcttccta

SEQ ID NO: 482577 - DNA, 122 bp, Homo sapiens
cttaaccatttttaagagtacagttcagtgacattaggtatatttgctgctgttgtattacaggaattttatattacattaattgaaatgacatttccaggctatatgactagctgaaccca

SEQ ID NO: 482578 - DNA, 122 bp, Homo sapiens
agatggggtgtctgtggtaactcatgacgatgatattgggagcagctgccgctgatggtacacctgctgtgcataaggcctgtgccaggactgccctcttagctttgctgtgttacaaataa

SEQ ID NO: 482579 - DNA, 122 bp, Homo sapiens
ctttatgttgaaaaacatctcccttgaagaagcagccacattcatagagactggcaataacaggaagcagcatttgcctaccctggtcagataagcttgggcaaaggccaagtccttctgct

SEQ ID NO: 482580 - DNA, 122 bp, Homo sapiens
tagcatatttttactgtaccttttctacatttagatacacaaatacttaccattgtgttacagcattcagtacagtaacatgctatacaggattgtagcctagaagaataggccatatcgta

SEQ ID NO: 482581 - DNA, 122 bp, Homo sapiens
ccaatggctcccatatgcccagttccttcatgtccaccaaagtacccgtctcaccatttacaccccaggtctcacagttctcctgggtgtgcttggcctgcaattgaagcaagaagtaaagg

SEQ ID NO: 482582 - DNA, 122 bp, Homo sapiens
tcatccagaataggttgtcaatccccaaccacctccctactatgcaccctgagcgttttacagtctcatggtagggaagacacagccaagcctgctttttataaaacaagtttattcacatt

SEQ ID NO: 482583 - DNA, 122 bp, Homo sapiens
taggtcacttttatcgatcttatctcctataactacatactgcattctcttaactcacaacagtcaagtcaattccaatgagaacttgaggaatgttctaaagccaatacaaccacaacttc

SEQ ID NO: 482584 - DNA, 122 bp, Homo sapiens
tggcagtgctggcgctggcatcaaactttgcctggccctgatcctgctccacttttctcacagtcaacaaaccaatgaaaaacagcttggaagaatgatgttctttttttatctttctgttt

SEQ ID NO: 482585 - DNA, 122 bp, Homo sapiens
aagtgcttgaaatggccactttttgccttgaaactgcaacaataacagcttaaacttaaacagcacttagtatgcttcaggcactgcactagttttatgtgtatgggctgagtatctctatc

SEQ ID NO: 482586 - DNA, 122 bp, Homo sapiens
catggagactaagttatgagtacatcctgatatgtgatcgatcagttggtgctgggattacaggtgtgaaccattgcacttggccagtaccacattttcaatctcaatcatgatcataatta

SEQ ID NO: 482587 - DNA, 122 bp, Homo sapiens
ttacacagttttaaatagctgagcagaaagcttttggggtgcagcaggaggtctaatctacagtcattgaaattttacaatgtgtcatttaagatgtcagactttgtgcccaggttacgtta

SEQ ID NO: 482588 - DNA, 122 bp, Homo sapiens
agttgtattatgttttatttccagcctttaaaaattaaaattacagattattcatgtctacaggagtagacattgaatggatttctaattcaattaaagattttttaaataagattctagca

SEQ ID NO: 482589 - DNA, 122 bp, Homo sapiens
gaaggactagaatcaaattaaatagggctacaggctacagagactgtgaaaggtgtactacaggacacaacataatgactcctgagcagttaatttgtagttagaagcaggtctctttgctt

SEQ ID NO: 482590 - DNA, 122 bp, Homo sapiens
ggaagggaggcaccgtgagagggtgttggaaaggactgagcacttcagccagttgatttacaggcaaggtcatttccaagtccttacttacaaggttgggccctttggctatttcttttcca

SEQ ID NO: 482591 - DNA, 122 bp, Homo sapiens
tggtcttagagttgcactagtttctttcagtagcccttagataaaactggtttccggttacagcaggcagtttcagcagccaggcctacagagaattacattttgggagaaatgttttgtgc

SEQ ID NO: 482592 - DNA, 122 bp, Homo sapiens
tcagctcaaacacctaatggcacagattatgtagcctcaggaaaatccatccagaccccacagtcacatggcactctgacagctgaattatgggataacaaggtggccccaccagctgtgct

SEQ ID NO: 482593 - DNA, 122 bp, Homo sapiens
aagcccagattctctgctcttggcccaacataagttgttactggcctcagtgcatccttacaggaggaaggtctacactggggagagagggctacctcctttagtaagcactgagaaccata

SEQ ID NO: 482594 - DNA, 122 bp, Homo sapiens
gtatttccctcgtcgggttgagaactgaatgaaaatgttttgctcctcacggcatccctacagccttggtcaaagacctaccccacacatcagatttgcatcaaatattggccagaactatt

SEQ ID NO: 482595 - DNA, 122 bp, Homo sapiens
ctaaccagtgagagagagggacaagacttggaagctgcctccaaaccaatttttggtctacagtaaacaaggataaacataaaacaccattccacaggccagcttcaaaagaactagtgtgc

SEQ ID NO: 482596 - DNA, 122 bp, Homo sapiens
tattctgttttacagattagcctccccaaaagaagcaattctacttcgtaaattttactacaggctttaggtgaagttgttattatttttaaacacctccaaaaacagacacagatgtctct

SEQ ID NO: 482597 - DNA, 122 bp, Homo sapiens
tcagcactcaatctcattctcctccacctagggggaacagcgacaccagaaatcagtttacaatagtttcccatgtgattgcttagttcagcctaagcagcagcacatgtgtgtatgaacac

SEQ ID NO: 482598 - DNA, 122 bp, Homo sapiens
taataaaaaactgtattctgtaataaccaatcagcatgctcaggcctacttttcatattacaggtaggtgctgatgaatttgagtgtgtttaaatcttagacttactgtaccttcatggctg

SEQ ID NO: 482599 - DNA, 122 bp, Homo sapiens
ctctggatgaaagtgcgtgtatatataatgtgttgatatttaaacagctgatctgacttacaggagttgaaccttcagaactttggtaatttctatgaaatacagagaaattcaagaaaatg

SEQ ID NO: 482600 - DNA, 122 bp, Homo sapiens
gcaccacagtcctggccagtcacgtgaggcaaacattcacactgccccgtcacggggttacagctgctctgctgcttcatggtcccatacagattgcaattgcaggctaaggcaggaagaca

SEQ ID NO: 482601 - DNA, 122 bp, Homo sapiens
tcgtgagtttctgctctaatttataaatatctctgtaaatctaactgaactgtactttcacagtcatggtaatttgtattggcctgggcatggtagtcagtttcaggcaggacagaccaaga

SEQ ID NO: 482602 - DNA, 122 bp, Homo sapiens
ggtctcgacctcctgggctcaaatgataccccatttaggcctcccaaaacgttgggattacaggcatgagacactgagcctagctgaggttttcataaatgtttgctcaacaagctgaggta

SEQ ID NO: 482603 - DNA, 122 bp, Homo sapiens
atggggtgtctgaagtcactgagataattttcctaaaaatagaatgaagcccaccagctacagtcagaaatgctattgtgctgcagactaacactgacagaggcccccccaaaagtatgctg

SEQ ID NO: 482604 - DNA, 122 bp, Homo sapiens
cattgatattatgctcagctttttgtatgtccttttttttagctttgtaagtgtatactacagtcacaggcctaaaattgcctgtaatattatctttgttcagattctctgtcactgtgctc

SEQ ID NO: 482605 - DNA, 122 bp, Homo sapiens
cacaaagatgagggctattttgtcagtcccttataacttttcccccaaagagtttgattacagcagtagcatagtctggctttaacctacagccctctgagtgatgccattctttttggtta

SEQ ID NO: 482606 - DNA, 122 bp, Homo sapiens
gcaggagaattgcttgaacccaggtggcggaggttgcagtgagctgagatcgcaccactgcactccaggccaggtgacagagtgcaactcccactcagaaaataaaaataaaaagtaaacaa

SEQ ID NO: 482607 - DNA, 122 bp, Homo sapiens
aaaaatgtttcccttataaatgagaggaagtataagataggaatggagagcctacatttacaggaaatgacccaaggatctaggaataactgatgactcaggaaagttaatcccctatgtgt

SEQ ID NO: 482608 - DNA, 122 bp, Homo sapiens
gatttcaaggttgattaaagaagggtaagagcagaggagattgtgaaggcatgtggaatacagtcaggaagaaaactggggagtgtcatgtcatagccctctagaaagaaggtgttcttaaa

SEQ ID NO: 482609 - DNA, 122 bp, Homo sapiens
atctaggcactccctatgatctcagcagcagcactttacaaagtcacgctcacctgattacagcaacaaagtcaaacattttaccagcagataggctgggcacagtggctcatacctgtaat

SEQ ID NO: 482610 - DNA, 122 bp, Homo sapiens
gaagaagtcttactagatctagattcccctggggcctttagttccttgcaaatttgattacagcagattaccacagagtgataagcagtggttgcaaaggctctaaagcaaccctcttaagc

SEQ ID NO: 482611 - DNA, 122 bp, Homo sapiens
gtcacagccataggatacaaagaagcaaaggcaaagagccctgtgtcctgggcacggttacaggccagtgtagggaaagagcttctgcttgccagtgtgaagaacagaggagtttaggaagt

SEQ ID NO: 482612 - DNA, 122 bp, Homo sapiens
aatggaattttgctacaaaaaaaaaatatataataagggtcttagaagtagaagagtttacaagacacatgtctttattctcatgaggcagcaacctggctatgggctgtcgagctgacata

SEQ ID NO: 482613 - DNA, 122 bp, Homo sapiens
actgtatgtgaggaataacatctgttgtttatgagccacacggtccatggtgtctttctacagcccctgaatggatgaagatggggcctggctttctcagtcctttgtgtttccccttcaca

SEQ ID NO: 482614 - DNA, 122 bp, Homo sapiens
taaatacttggttctcaataattgagaaccagtaatgataatctttacaataattagtaacagtcactatttattgagtgtttaattatgtgccagacactgaactaaataattttcatata

SEQ ID NO: 482615 - DNA, 122 bp, Homo sapiens
tgccatgtacctggcaccatgatctgcactcttatatacattatctcatttcatgctttacactcagtgaggcaactgtctttatccatagcttatgtaatgaggaaacagattcagaatgg

SEQ ID NO: 482616 - DNA, 122 bp, Homo sapiens
ttggcaattattaaagctgttataaacatctctccctttttatacattatagtctcaccacaggagatgtagtgcagctggctctgctggcttctaatttcaccaacttggtcaaaaattac

SEQ ID NO: 482617 - DNA, 122 bp, Homo sapiens
tgttgaatgacgtggttcagacgtgatgttcttctgcctgtccacacataactcggtgtacaggctctgatatttgagatcctggcaagcttgcacctcctaaatttgaatttgcctagtga

SEQ ID NO: 482618 - DNA, 122 bp, Homo sapiens
aagcagcagccatgggatctgggaaactaaggctcccaaaacacagcacactcgagtctacaggctactaactaatcagcagatttggagactaggcagaccaggttggaataagactatgt

SEQ ID NO: 482619 - DNA, 122 bp, Homo sapiens
gacagaaaagttgaaagtttgctaaatgaaatgaaagaattagactcaaaactccatttacaggaggtacaactaatgaccaaaattgaagcatgcatagaattggaaaaaatagttgggga

SEQ ID NO: 482620 - DNA, 122 bp, Homo sapiens
gtctcaaactcctgacctcaagtgatccacccactctggcctcccaaagtgttgggattacaggcatgagccattgctccccaccagagttgttattatattttaaaaaattgggccagaca

SEQ ID NO: 482621 - DNA, 122 bp, Homo sapiens
caaaaacaaaaacaaaaaataagcaaatgagagggagagacaaagcaagacaatcaactacaagcaaaccaaaaagttaggagaaaaagtaaaaggtcaaattatttatcttccatcacggg

SEQ ID NO: 482622 - DNA, 122 bp, Homo sapiens
atcttgaactcctggcctcaagtgatctggccaccttggcctcccaaagtgttgggattacaggagtgagccaccatgcctggcccaattcattttttaagtttaatttttttgataagtcc

SEQ ID NO: 482623 - DNA, 122 bp, Homo sapiens
aacttggacacatcaattgatgcaaagatgacaaagtttgtgtcagtctgtctcagcttacagtcaccagagtgcagtttatctctgctaacatttttgtatcttctgtgtattacttatta

SEQ ID NO: 482624 - DNA, 122 bp, Homo sapiens
gatgtgacaaattagaatcaacaagatatttaatgaacattctacatttcctactgtccacaggcatctggtattgttgaggattggagcaggcttctcaaaaattggcttgaaaaggcttg

SEQ ID NO: 482625 - DNA, 122 bp, Homo sapiens
gatatgtatgctactgtttacataaaggaaaaatggagaaacaacacaaaaatatttctacagttacttataaatgcagagaaaaggtctgagaattatctggctaaaatcataagtgatta

SEQ ID NO: 482626 - DNA, 122 bp, Homo sapiens
cttcattcctgaatacaaattaagacccctttggcctaataaacatcattgtcatgattacagtactgatagctaccattggctgagctcatggaaggtatgcaccaggtattttacacagc

SEQ ID NO: 482627 - DNA, 122 bp, Homo sapiens
actcttgtctcaaaaaaaaaaaaaataaacaaacaaacaaataaaaaagtgctgggattacaggcttgagctaccatgccaagcccaaatttaaaaatcaagttccatatgagtggctccaa

SEQ ID NO: 482628 - DNA, 122 bp, Homo sapiens
aagccaggctatgcacagggagggaccacagaagggaaacagtcaccatgggacacactacaggacagcctctaatccttgtctgccccaggtaatctgacagcacataagtgactctgtag

SEQ ID NO: 482629 - DNA, 122 bp, Homo sapiens
cctcagaggccagggcctgtccccatcaccacataggagccagaaacagaggaatgtgtacaggaggtcacagcacagtctctgcttgctgggtgtggactcagcatggtgcagtggacggc

SEQ ID NO: 482630 - DNA, 122 bp, Homo sapiens
aaacacagtgtttctcattctgagttgaagtttctcagccatatcactagagcagaactacaatgaccttacctgcacccagtgagacaggaagcccactagctcacctaagtagggggtca

SEQ ID NO: 482631 - DNA, 122 bp, Homo sapiens
gcctcaaactcctggcctcaagtgatcctaccgccttggcctctcaaagtgctgggattacagcatgagccactgaggctggctgggaactttgttttttaaacaggaagcataatatccct

SEQ ID NO: 482632 - DNA, 122 bp, Homo sapiens
atctgcctattccacattgccagaataccttcctgctttcctgtctttgcttactatttacagcactgggggaaaggggacttttgagaggtaaagacctaggtccaagtctcccacaagct

SEQ ID NO: 482633 - DNA, 122 bp, Homo sapiens
taggttggtttgatattagtctgagtctcttctctggaagtttgggtggagcatcagatacagccaggttggagctggctgccacccacactcctgtgctccagattttaggtaaccctgaa

SEQ ID NO: 482634 - DNA, 122 bp, Homo sapiens
acgcaaactcctgggctcaagggatgctcctgccttgggtgtccagagcagctgggactacaggtgtgcaccatgtctgactgcttctactgggagcatattttcagaacaaaaaatcagga

SEQ ID NO: 482635 - DNA, 122 bp, Homo sapiens
gatatttctttcacccaactttaccatgcctccttgaggccatgggccttctgtgaactacagcaataggaagaacctgcctgacatgcagcagctacagaaaggtcccctttatccaagat

SEQ ID NO: 482636 - DNA, 122 bp, Homo sapiens
gaaagaaatcatctcaccttcatagtgccccagtgaggcaccatcattattcccattttacagtcaatgaaactagcaaagagaggtaggttaacatgcttatgaatacatggctagtcatg

SEQ ID NO: 482637 - DNA, 122 bp, Homo sapiens
gccaatccatatgaccttacttaaccgtcatgactgctttacatgccctatttctatatacagtcacattctgaggtgtactggggtcaggactttaacaagtgaatctgagagggacacag

SEQ ID NO: 482638 - DNA, 122 bp, Homo sapiens
atggggcaggaggaggaagctggggcagatggtagtggttttatgaaaaaggcaaaattacagcagtggttacaagaaatcagggcaaagtgcagcatctacctagatgtcccaatctgggt

SEQ ID NO: 482639 - DNA, 122 bp, Homo sapiens
agctcaggtgccactgcctcacacagtcacttagggtcattggtttaggttatcattctacagcattttaaactgacacattgtctggaccatgtgggttcttgaggactcatcaaaactcg

SEQ ID NO: 482640 - DNA, 122 bp, Homo sapiens
tattgacctcctgggctcaagtaatcctcccacctcagcctccccaaagtgttggtattacaggcatgagccactgagcctggcccacatagagttgtaaatcatgaaactgttctggacag

SEQ ID NO: 482641 - DNA, 122 bp, Homo sapiens
tatttcaggaaggtagtatgggaactggcttggagttctgtcttgctgtcagtgaatttacagcatgtgggtagatagccctgttcctacagcacccagccaggaactagcactgtgagtag

SEQ ID NO: 482642 - DNA, 122 bp, Homo sapiens
ctgggcgacagagcaagaccctgtctcaaaaacaaaaaaaaaaaagcttgcccaaaactacagccagtaagaggtggatcctagattcaccagacacacagctgtagagcccatgctcttaa

SEQ ID NO: 482643 - DNA, 122 bp, Homo sapiens
tgctatccttcactgactgaaacttagtgattggcacaagagtaggttatagtctatttacacctccatttagggtatagttcaccatgtacagataaacctttaggctgaactttagatat

SEQ ID NO: 482644 - DNA, 122 bp, Homo sapiens
tctttccctcaggtcataagtcttcagagcagagtctgtttcctcataaagttaatattacagtcagccatatccaaggcccaccatttcctgtaatgggggtgactgcagaatgtgtgagc

SEQ ID NO: 482645 - DNA, 122 bp, Homo sapiens
agtgaggtctatgaggttaaggaatacaagcagcctgctcaaggtcatctgaaaccacaacagccagacttgcaagcctgagccatgacccagaaagggagtggaatgttatcctgggaggc

SEQ ID NO: 482646 - DNA, 122 bp, Homo sapiens
atcctgctgattggtagaaccgagtggtctgttttgacagggtgctgattggtgcgtttacaatccctgagctggacacaaagattctccactgtccccatcagattagttagatacagtgt

SEQ ID NO: 482647 - DNA, 122 bp, Homo sapiens
gcttctacttggtatttatatacattatttatatggttggtgggacttacttccactttacagctgaggagtgggaggctcaaaggggtgaataaatttgcctaatcacatggttaatcact

SEQ ID NO: 482648 - DNA, 122 bp, Homo sapiens
atagagtaatagcactatttcctgctgcttctcaggaatgtggtcacttagataaccatacaggctcccactttcaagggaggacttagggaccaactgcaggacattagtaagggacagaa

SEQ ID NO: 482649 - DNA, 122 bp, Homo sapiens
cctaaaaacagtttgagtggcttattgatgttttttctttaaaaacaaaattttctcttacagcaattctggggtcagaagccatggagtcagcattatcaccaaggatattattgaatacc

SEQ ID NO: 482650 - DNA, 122 bp, Homo sapiens
ggtagggggaagattttttggatattcatagttttattttaaatggtaaatatagaattacagcacctaacattttgaaggttaaattttttaccaattttgatgtttaatagaatgatcgt

SEQ ID NO: 482651 - DNA, 122 bp, Homo sapiens
ttccttaaatgttttgtcctacgtgcctctcttgcctcacccttgtactgggccaggttacagctcactgctatgaccagggctgtttagataccatgatgtgatcagaccagggggtggga

SEQ ID NO: 482652 - DNA, 122 bp, Homo sapiens
ggtaggggagaggggcatgggctttggggttagtggttcaagtttgtgctcagccatttacagccctggtgaattgaggaaaagccaagggggccaagccaagaatcatgagctaataaaca

SEQ ID NO: 482653 - DNA, 122 bp, Homo sapiens
atgagcccctgaaggacagaaccacatctcattcgtgtttgtgattcctggcacccaacacagcacctgacaaatgacagcctttgatgggtgttggtaggtacataaaatttcagaacacc

SEQ ID NO: 482654 - DNA, 122 bp, Homo sapiens
gaagggggaaaatattatttgagcaaggaatttttctactctaggaactcacctatcttacagccttgagtgagacaacccagaattaagatgtatgagaccactcagtcatacacccacaa

SEQ ID NO: 482655 - DNA, 122 bp, Homo sapiens
ctgcaggctcaacaccacatgaaagctgccaaggcttggggcttgcattctctgaagccacagcctgagctgtgccttggtccctgttagccatggctagagcagctgatatgcagggaacc

SEQ ID NO: 482656 - DNA, 122 bp, Homo sapiens
tttagtcattgcacttgtggaactcacagcttggaggtgaaaacaggttcatcagatttacaatcacttctttgttgtgtaagggagagaggtaacatagtgcaaaaggagttgacctgggt

SEQ ID NO: 482657 - DNA, 122 bp, Homo sapiens
gtggaagagagaggaagggaaggaagagaagaagagggaagggagcaagaggttagcctacagctctaggaaatgaacaatggcaactttcctgcccatgagccagtgtgttatttggggct

SEQ ID NO: 482658 - DNA, 122 bp, Homo sapiens
ggtggaaacagcatgggcaagaaactgtgtggagtgtgatctgttaaagtctcagtctcacagcagcttctagcaggatgttgggcattgtcctatgtatgcataggagaacttggcttccc

SEQ ID NO: 482659 - DNA, 122 bp, Homo sapiens
gtcacaaactcctgaccccaagtgatccgcctgcctcagcctcccaaaatgttgggattacaggcataagccactgtcactgtgcctggccaataattcttaattctttacctggtcagtag

SEQ ID NO: 482660 - DNA, 122 bp, Homo sapiens
acaatggtaagacagaaaaagacgggagcacagtgatggtggagctccacgccagccctacaccagctacctggatttttaaatgtgagagaaattaatggccatcttgtttaagacagtgt

SEQ ID NO: 482661 - DNA, 122 bp, Homo sapiens
gggaaaaagaattaaatgagggtggaggagtggcctggggccaaaacctcaggcaacttacaggacttcaggttttaccctaaatagaaaagtaagcccaggagagttctgagcaaagcaac

SEQ ID NO: 482662 - DNA, 122 bp, Homo sapiens
tcccaaagtgctaggattacaggcatgagctactgcaccttgaccaagctcttttttctacagcctagtgaccacaagtgacatgagaggatggagtctgaacatggtttcacagagtcaca

SEQ ID NO: 482663 - DNA, 122 bp, Homo sapiens
gtaaaaccatgatgatttcaactggccaataccattggtattagctgcagtttgcccctacagctgttaacatctgctttgcaggaggcacaataattaaacccactgaatgccagcttcat

SEQ ID NO: 482664 - DNA, 122 bp, Homo sapiens
ggaaagacttcagagggtgtagtcaatgggtttggttttaaaggatgcacaaggattttacaggcaaagagattggtggtgggaattccacccagagggatttttatccctcttcagtactt

SEQ ID NO: 482665 - DNA, 122 bp, Homo sapiens
aaccatatcagtgtgtgtatgtgttcttgtgtatgtgtatgtgaacagtggatacaagtacagtctttgtaattaggcagatgtgagcttgaattttgatttttaccacatataagtgaatt

SEQ ID NO: 482666 - DNA, 122 bp, Homo sapiens
ttcacaaggtggaagagtcaacatgggctctctgccctgattcagcaaataaatcatttacaagcatttcactcatttctgggtgttggtctaattaatcaaagaatgtggaatgtctttga

SEQ ID NO: 482667 - DNA, 122 bp, Homo sapiens
aattgtgtgttgaggccgattcccagcacacaaaaagctttaggaactgctggttccctacagtcacagcaattgcagacatgtgtggcagttatttgcaatgcagggatggtcagactcca

SEQ ID NO: 482668 - DNA, 122 bp, Homo sapiens
tgttatggcagcccaagcagaataagacagattttggtagcaaggagtgcagtgctgctacaatacctatctaaagatgtggaagtggctttgaaactgggtaataggtagaggctagaaga

SEQ ID NO: 482669 - DNA, 122 bp, Homo sapiens
accagaattagatccaggtgccaagtttacagggggctcagccagcgccctgaactattacagtctttagtatggagtatactaaaaaaacatgactcaccatttctctgaaatacaaactt

SEQ ID NO: 482670 - DNA, 122 bp, Homo sapiens
cttgaatgattttaatcagtttttactctattcttctaatttcaatcctacttcatcttacaagactttgtaaagagctgtctttgtgcctaagaatgaatgaatacatgttacttcagtac

SEQ ID NO: 482671 - DNA, 122 bp, Homo sapiens
tccccgttctgatgatgtgagtgagtcagatacagttcttgccttcatatatatagcttacagtcaaggatgtggacaaaaaacatttatacaataattcaatttaattttaatagagaaga

SEQ ID NO: 482672 - DNA, 122 bp, Homo sapiens
taggtgtgagccactatgcctgaccaggacgtcattttagaatccatgggaatactactacaatagtagtattgtctagtgcaagcttgtccaacccacagcctgaggaccatgtgatggct

SEQ ID NO: 482673 - DNA, 122 bp, Homo sapiens
tggctgattatagagccccagggccttgaacgaacataggcagtagccagaaagtggttacagccagccttgggtgaggcccagtgccatgctggcttcaggtctgacccagtgcagtcata

SEQ ID NO: 482674 - DNA, 122 bp, Homo sapiens
tgaagggctgttaactaatataatctagttgttggtctcaggacaatgtcatgtatcttacagcctttggtagaaaatcaaggagacatcaaagagaggaaaataatcacctggtaagagct

SEQ ID NO: 482675 - DNA, 122 bp, Homo sapiens
aagaactttaactcagtctcatggtcaatgttctctagtgttttgtgacatgatcactaacagtcattgattatttagtgccaacaatgtgctaggagctgttgaagtacaggcactgcata

SEQ ID NO: 482676 - DNA, 122 bp, Homo sapiens
taaaacagtaataagggtaaaataaattaaactgagtgtgtaacttagactataaatttacagtgatctattataggctaagtacttacctgggataatagggaaaacagagctggaaggtg

SEQ ID NO: 482677 - DNA, 122 bp, Homo sapiens
agaaccaaaaagtaggatggtagttactagcaactgggctgtgggggaatgggaggattacagtcaaagggtacaaagcctcagtaaggagggatatgttttatttttttttaggtgaattg

SEQ ID NO: 482678 - DNA, 122 bp, Homo sapiens
gtatggcaatgggcacatgctcgtggagttcattggtcctaccacatgctagcccagttacagcaccagcttagagatggcatcctatggggataagtattatcttttggagtatagtgtgc

SEQ ID NO: 482679 - DNA, 122 bp, Homo sapiens
gtttcaaacttctggcctcaagagatcctcccgccttggcctcccaacgtgctggaattacagccatgagccaccacaactggcccagagtaggtgattttttaaaaatcaaatcttctaag

SEQ ID NO: 482680 - DNA, 122 bp, Homo sapiens
gagcaccttctggtgggagggagaagagataatcaatagttatgaaagaatgtacatatacaggagttatactgagcttcactcactgcatgcatatttcatgtagtgggaagtttccttta

SEQ ID NO: 482681 - DNA, 122 bp, Homo sapiens
ttctgtgggttttgggacagggcttccgtgttcaaacaacctacccaaagagaggcactacaggcagtgtagtcagtctcccctgtgaccactggagctgaatattggtttgacctacttgg

SEQ ID NO: 482682 - DNA, 122 bp, Homo sapiens
gctctgccctgtcgggctgtggagcaagggtctgccccgggctgcgcagagccatgcatacagtaggtgctcaggaaatgcttgtgacctgaggtgtggtcccaatctgcagacagtttccc

SEQ ID NO: 482683 - DNA, 122 bp, Homo sapiens
tcttgcccaggaaactcttccgattagagttcatatcttgtgacgagtattctgaagttacagcatctcttttaagctatttggacagtagaggcctctaataaccaacttcagtttttctt

SEQ ID NO: 482684 - DNA, 122 bp, Homo sapiens
tatggcaatatgaaagaggattaaattcattctgaggaatgctggaaggaaaaacctaaacagttactgaaagctataaggagatggatgtcaagctaatagtcagaagagtggctaacact

SEQ ID NO: 482685 - DNA, 122 bp, Homo sapiens
ggcacatatgtactgtctgtgtggcctattatgagctcccctgtgactgtggcactgatacaggactcaaagaaaccatggggagctgagaaggtgtagtaccattgcccagggcaaaagtg

SEQ ID NO: 482686 - DNA, 122 bp, Homo sapiens
tcaacccttagagacccaagagtgagcaagacagtattgctgacctcatggagctttctacaggagcaggggttggcaaattatggcccatgccatatctggcccacagcttatttttgtca

SEQ ID NO: 482687 - DNA, 122 bp, Homo sapiens
ctgagctaggaacgtgaagttctcgtcccatgttctcactccttaaaatatttatatttacagtacactaggggtaggtgctgagaattcagcagaagtggatttgaagtctaaacaaatac

SEQ ID NO: 482688 - DNA, 122 bp, Homo sapiens
ggacagttaggaggctactgcactaatccaggcaaaagatgatggtggctcagactataacagcagcagtagaaacaatgagaagtgatgggattctggatatattttgaatgtaaaaccaa

SEQ ID NO: 482689 - DNA, 122 bp, Homo sapiens
tgcaacaagccagtcaccaaaaggtaaatgctgtaagagtctatttatttgaagtatctacagtaatcaaattcatagggacagaaagtattaatataattgttgctgctggggactggagt

SEQ ID NO: 482690 - DNA, 122 bp, Homo sapiens
ctttggaggctattgggatgaaataagtttactttgtatgtgagaaggacatgaattttacaggccagaggtggaatgcaaaggtctgaattcctgggtcttgtcaaaattcatgtggaaat

SEQ ID NO: 482691 - DNA, 122 bp, Homo sapiens
taacccttgaaaaatgagctctatcatggaaacaatgacagacctgggcactaccaggtacagctgctgaagctgacagtcagtcaagtaagagtaatgcatggtttcttcatatgcaaatc

SEQ ID NO: 482692 - DNA, 122 bp, Homo sapiens
cctctgtgcctctttaaactcttctttctagtatcataggtatcatatcagcagacattacaacctattgaacttcctttgtgtatagggacttgaaaacccttgttcccaggccttggggg

SEQ ID NO: 482693 - DNA, 122 bp, Homo sapiens
tatgttgccgaggttcatgaactcctgagttcaagtgatcctcccaaagtgctaggattacaggcatgagccaccaggcccagcctgaatctgtggtcaaatttttatcagtgagcagagta

SEQ ID NO: 482694 - DNA, 122 bp, Homo sapiens
tgctgtgactgtttgcctgagggatccagagagagacatccaagacatttgctggttttacaggaaatgggatctgggaggatctctacctggaatcattatggcagtgagcctgccaggtt

SEQ ID NO: 482695 - DNA, 122 bp, Homo sapiens
accttgaactcctgggctcaagtgatcctcctgcctcagtctcttaagtagttcggactacaggcatgagccattgcacccagcttgtttgtattttaagatccttcctctgggagggttat

SEQ ID NO: 482696 - DNA, 122 bp, Homo sapiens
tgtgcaagagtgagaatgcaagagagtctaagatggccgaataggaacagctccagtctacagctctcagcatgagcaatgcagaagacagatgatttctgcatttccagctgaggtactgg

SEQ ID NO: 482697 - DNA, 122 bp, Homo sapiens
aaggttgaagacggccatctccaaggcaaggaaagaggcctggaacagatcttttattcacagccctcaggaggaaccaatcctggggatgccttgatttcttacttctagcctctagaatg

SEQ ID NO: 482698 - DNA, 122 bp, Homo sapiens
gtgtgggcttcttgcctggccaagcctcttttgcatatttcttcttcttgggttcatttacagcttcagggttatagactgcagggtttggtgcagggttcatgttcactgctgacggcaca

SEQ ID NO: 482699 - DNA, 122 bp, Homo sapiens
aagtgctgagatttcaggccatgaaccaccacaccttgccctgagggctttctaatactacagtcaactctagttttgcatggtcctagatggacttgtcaaagtgaattcacacaatggaa

SEQ ID NO: 482700 - DNA, 122 bp, Homo sapiens
catgaataggtggggatcatcgcctcacaaaatgtgtataaaaatgctcatttgtacttacaggctagaggcctgtggatattcagatttcatgaaagaaatggaagatatttgcgggcttt

SEQ ID NO: 482701 - DNA, 122 bp, Homo sapiens
acagacggactagtcaactggaccagacactagatcactctgggctcagctggccacttacaatacaaggcttggcttaggtgcacttgggtctcttttagtgctaatattttacaatagaa

SEQ ID NO: 482702 - DNA, 122 bp, Homo sapiens
atcttgaactcctggcctcaagtgatccacccgccttggcctcccaaagcactgggattacaggcctgagccactgtgcccagcttcaagtggttttaaatgtaatttacatttattttggg

SEQ ID NO: 482703 - DNA, 122 bp, Homo sapiens
atcctgaattcccgaactcaagcagtactgcagccttagcctcccaaacaactggaattacaggcataagcctgtaacagctggcttgacatacatttttttagtcatctttctgcctccat

SEQ ID NO: 482704 - DNA, 122 bp, Homo sapiens
gtcttgaactcctgggctcaagcgatcctcccacctcagcctcccaaagtgctgggattacaagcatgagccactgtggctggccagagtttaatcttttagaattaaacatcaaaatggtc

SEQ ID NO: 482705 - DNA, 122 bp, Homo sapiens
gacatcccaacctgcttttctgcagattgggggttggtgtgaggagccagtagtctcagacagcactagtattgaggccatggatgtccagggagaagcctggcaccttattctttggcatg

SEQ ID NO: 482706 - DNA, 122 bp, Homo sapiens
atcttgaactcctgacctcaggagatccacccacttcggcctcccaaagttccgggattacaggcatgagccaaggcacctggccccagactcatttagtaaacattcatttatgcatttta

SEQ ID NO: 482707 - DNA, 122 bp, Homo sapiens
gtgcactcaaggcatgactaatacgagagtgttgcacgatagaagaactgtgtggttttacaccacatctgggaggatttcatccagctacttgtctgaaaggatctttaactgaaatgcag

SEQ ID NO: 482708 - DNA, 122 bp, Homo sapiens
tcccagggccctgctgctctgtacagcattgggacatggtgccctacattgtgatcactacagccattgctaaaagaggcccaggtaaagctcaggctgctgctccagagggtaaaaaccct

SEQ ID NO: 482709 - DNA, 122 bp, Homo sapiens
agcgcctcctgaacggggcccccgaagcactgtggccgtccacgcagtcactccaggttacagtccaggacatttggcaaattatgcacacttggcaaatcagaaactgaggctggaagaca

SEQ ID NO: 482710 - DNA, 122 bp, Homo sapiens
ggagaggtgtgcagtgggtacttagggtgggcagcgtcgaaatgcctagatctgttactacagctgcagcctaaatgggaggtggctttagggcatgggatgcaagcaaacaaagtgtctgc

SEQ ID NO: 482711 - DNA, 122 bp, Homo sapiens
ggcaagtggaaattgaggcaaaaggtctaaaatgggaatgagcttgacacctttgatttacaagaacatcaatgtggccagaacaaggaggacaaagagcagcaaagtttttagataaagtt

SEQ ID NO: 482712 - DNA, 122 bp, Homo sapiens
ttgtcttcaaggctttgctccaggctgtggctggacatctcagcaatctaatcatttttacaagaaatggattcttactaatgaaaagtaggaattacagccaatagcatactcttagatac

SEQ ID NO: 482713 - DNA, 122 bp, Homo sapiens
ttctattgctactttgttcaaagcctaacagtttaatgtcagcggtagtaatgatgacaacagcagctgacctgactgagcacccccacatgtgacaagacaccatgctaagggatttacat

SEQ ID NO: 482714 - DNA, 122 bp, Homo sapiens
atctcaaactcctgacctcaggtgatccacatgcctcagcctcccaaagtgctgggattacaggcatgagccaccatgcctggtcaaatggctgaatcttatagaaaataaattgcagttga

SEQ ID NO: 482715 - DNA, 122 bp, Homo sapiens
tattgaagtgatggagggaaagggtgcttccagaagacactcaagcatgatcagaaattacagcagagttgctgaggtctaggaagcagtgacaagttgacagatcacactggcaaaagtgt

SEQ ID NO: 482716 - DNA, 122 bp, Homo sapiens
tatcacattgagaggaaaataccagacagagagtacatattgtatggctccatttacatacagtcaaaatcaagtaaaacccatttgtggtatgagaggtcaggatattcatagttgcctta

SEQ ID NO: 482717 - DNA, 122 bp, Homo sapiens
attaagtaaaataagggttacttgccaataagacagctgagatgtctactaagagaataacagtcaggtagtgtagatagcatgcacaggctggacaaagggatgattcacacccaggaggg

SEQ ID NO: 482718 - DNA, 122 bp, Homo sapiens
ggcaggcagtatttatagataggaaaaggaagtgacgtacagagacagcttgattggttacagctatgagtttgccttatttgcatacagtgtgatgaggcatttgccttatatgttcatgg

SEQ ID NO: 482719 - DNA, 122 bp, Homo sapiens
taacagagtttatttgaggttcagagagttccaatctaacacttgggcagtgaatatttacagacagacacaaaagtagtgtacagaaagagcttgattggttacagtgaggcatttgcatt

SEQ ID NO: 482720 - DNA, 122 bp, Homo sapiens
tggcaggagactggcatgtcaatgcaaccccaagcatgtacacaccccgtcaggtggcaacagcactggggcttggccacaactttgctccacactggggcagtcactgggagtaggaagag

SEQ ID NO: 482721 - DNA, 122 bp, Homo sapiens
gcttacccaaaagcagaccttggagaacagtcaggtctgttgctgcttttattgtttctacagtagacacagcagtaggtggagttagttactaatcagtagtactatgtgtcattgttaac

SEQ ID NO: 482722 - DNA, 122 bp, Homo sapiens
tgggaatctccaggtgaaatgccgaggacttggtccatctgcaggctcatctcatgactacagcctagccaaggtaagcatggcagttgcatttgctgggtactgtgtcccttatgtgaaga

SEQ ID NO: 482723 - DNA, 122 bp, Homo sapiens
cctttcagttatagttttaggagccaacaaaatatattttcttccttatttcatgtgttacaggacttttgataggcaagctctctataagggtttgcttaagttattttctataccctgaa

SEQ ID NO: 482724 - DNA, 122 bp, Homo sapiens
ccaggactgtgagaaataaatttgttatttataagtcacccagtctacaatactttgttacagcaatctgaaatggctaaaaaagagcccaaccaaataatccagggtaattcctccttgca

SEQ ID NO: 482725 - DNA, 122 bp, Homo sapiens
agtgggttcgtggtctgttgacttcaggaatgaagccacagaccctcgcagtgagtgttacagctcataaaggtagtgtggacacaaagaatgagcagcagcaagatttattgtgaagagca

SEQ ID NO: 482726 - DNA, 122 bp, Homo sapiens
gctaataaagacatacctgagactgagtaatttgtaaaggaaagaggtttaattgacttacagttccacatggctgaggaggccacacaatcatggtggaaggtaaaggaagagcaaaatca

SEQ ID NO: 482727 - DNA, 122 bp, Homo sapiens
cagccctaactgattctaaggagcctcactcacccctggcagacgtgttgtccagggttacaccacttgatatgctatagcctgtcatgatgcctcctgtgagaatggaccaggatggtgta

SEQ ID NO: 482728 - DNA, 122 bp, Homo sapiens
gggcagtgtttgtgatttatgtgggcagagcctctgcaaagcaggtaactcacaaaggaacagcaggaaccactcttggtcatctcttgccaggtgttaattttaaggctgatttacacact

SEQ ID NO: 482729 - DNA, 122 bp, Homo sapiens
tgcacagcgttctccagtgacagagtgcttttgtgactgtcgtctctctgggccccacaacagccacataggatgaagagaaccagtcaggtgtaggagccatatattatggatgaggaaat

SEQ ID NO: 482730 - DNA, 122 bp, Homo sapiens
tgtttaatgtttgtttccccagtgtttcacataaacttaatagaggagtgtattaacatacagtaggtctagtgctcatcatgtctgcttggaatctgggtagctttgttccttggcaggag

SEQ ID NO: 482731 - DNA, 122 bp, Homo sapiens
agcagagcaggagtgggattctgaaacccttgctcttctggttattccatgtccaatctacagcacagtactttgtacacaggaggtgctttgtaaaagcccagcagattagtgaaccagtg

SEQ ID NO: 482732 - DNA, 122 bp, Homo sapiens
ctatactgacaatgttaagtgaggacttactgtatttcattacataggctggcagtgctacaggactctatattatctttaaccctgaaaagagcagggcctcttgttttttcagttttaaa

SEQ ID NO: 482733 - DNA, 122 bp, Homo sapiens
aaaaatatagttaaatagattacataagatacagtatttgatagcacaataaggtgattacagttaataatttacagtacattttagaataactaaaggaatgcagttggaatgtttttcac

SEQ ID NO: 482734 - DNA, 122 bp, Homo sapiens
gatcgtccaaggtgtctcttagtatgatcatgccttatgattaaagtcaatggaaaactacagcaactgaatgcaggcaggactcatagcccagactcttcaggaattaaggtttgggtcac

SEQ ID NO: 482735 - DNA, 122 bp, Homo sapiens
tcccacccttacaaccaaatttagccttaattacttctataaagactctatctccaaatacagccacactggggtcaggacttccacagatgaatttgaggatgggaacatgaacattccgt

SEQ ID NO: 482736 - DNA, 122 bp, Homo sapiens
caggagacttacaatcatggcagaaggtgaagggaagcctgggaggcctcaggagacttacagtcatggcagacagcaaagggaaactgagcaccttcttcacatggcagagtgggagagag

SEQ ID NO: 482737 - DNA, 122 bp, Homo sapiens
caacaataaataagctcatagtaattttctttggaaagatgaatgtagtataggcctttacagttttgggggtttacagtaaatggtgctacaggaatcagtcatgcttggagaaaagagca

SEQ ID NO: 482738 - DNA, 122 bp, Homo sapiens
gtgtaaaagtgttggtgcccagaggtgaaatgcctccaccaggggatatagttgtggttacagcagtgcctgtaggggacaggttctggagccaggctgcctacaccagcatgcaggggcag

SEQ ID NO: 482739 - DNA, 122 bp, Homo sapiens
atggcatgagccatttattgtaaatatattactgcaaagccacaaatgctattcctgctacaggacaagataaaagcagatataacaaaccaagctaaaggaaaagctatactttctccctg

SEQ ID NO: 482740 - DNA, 122 bp, Homo sapiens
tcacattgacagattcttttataaaattggattatctggaaatatggagtctatgtcttacaagaattgactagaactgagcattgggctgctccctgtgttggtttacacacagtctctac

SEQ ID NO: 482741 - DNA, 122 bp, Homo sapiens
tggattatgaccaactctaatgatcttattttaccattttaaatatcctatctccaaatacagtcacattctgaagcactgggagttaggatttcaacataggattttgaaggggcacagtt

SEQ ID NO: 482742 - DNA, 122 bp, Homo sapiens
ctctgttctactgtggccgtgctggcatccaagccacaaggcaaaattgttcccactctacaggccccatccatagaataattaggtggggacctgtcaaaggagaatcctcaaatgtcagc

SEQ ID NO: 482743 - DNA, 122 bp, Homo sapiens
gtcccagctactcccaaggctgaggcaggagaatcccatgaacccgggaggcagagcttacagtcagccaagattgtgccactatactccagcctagtcaacagagagactccgtctcaaaa

SEQ ID NO: 482744 - DNA, 122 bp, Homo sapiens
agatagctgatagaaacaaaaagggaagactaagcagaggaccacaagtgtggagatatacactctttaattgtatagcatagctaaagctaattgggtgtgtttgggaagaccatgtaggt

SEQ ID NO: 482745 - DNA, 122 bp, Homo sapiens
ctggatggtgttttattattgatataattcatgtgccacatattatcattttaaagtgtacagttcagtggcttttagcataatcatgaggttgtgccacagtcaccactatctaattggga

SEQ ID NO: 482746 - DNA, 122 bp, Homo sapiens
tctcagtgtgttagatttgtgcaaaggctctcagtgcccaagtgggctctagactaccaacagctactcattccatttgctttgattggagttagcatttaactgagtacctactgtataca

SEQ ID NO: 482747 - DNA, 122 bp, Homo sapiens
caacatactattagcaactgatatttggactctatgccaagaactgtgcataagcttttacaagcaggagctcactgaagcctcccaaccatcctgtagggtagctaccattttacagatga

SEQ ID NO: 482748 - DNA, 122 bp, Homo sapiens
acccagacagatcgcctcccctcccgggacctccttggcctctctgtctgtaatgaagtacagtcacacagcattgcagagtgggaactggctctttataaagcccagcctcttaaaagcag

SEQ ID NO: 482749 - DNA, 122 bp, Homo sapiens
aatcattaatggaggtgttgggacataactggcagaaataaattaagccagctatgtttacagtcaacaaaatcagtatttgtgaattccatgcaggcaaagaactaatcacagtggttttg

SEQ ID NO: 482750 - DNA, 122 bp, Homo sapiens
cgtaggctcctggagggcagacctgtgcctgatgtatctctggtgtcctagcctgtactacaggcctcacacataacacatacttggtgttggatgaacaaatgaatgaatctttcatgccc

SEQ ID NO: 482751 - DNA, 122 bp, Homo sapiens
ttaatagtttgtgagctccatgagggtggaagtcatgtcttatatctacctctccatctacagcacttgcttagaatattgcctaatacacaagtggcacatgtgtgtgtatgtgtaaagga

SEQ ID NO: 482752 - DNA, 122 bp, Homo sapiens
gagtttgacaaaggggtctatagacaccaggccaggggtactccagtgtgctccacataacagcacctggacacaaaccaagcccctactgcaacaaggcatgctcagaaattgacagtgag

SEQ ID NO: 482753 - DNA, 122 bp, Homo sapiens
agctgtgctcaggggaaggggccaggccaggcttaagagcatctgagccttcatgatctacagccctgatgagaaacacccagaaggcagggcacctatagagttacaggatcaagggggtg

SEQ ID NO: 482754 - DNA, 122 bp, Homo sapiens
gacttcgaattggaacttatattaaaaaggaaagcagagtgtaaaaatttggaaaatttacagcctggccatatggcagagaaagaaaaagctttttcaggagaggaattcaagcaggctgt

SEQ ID NO: 482755 - DNA, 122 bp, Homo sapiens
tgcccagtacagcgggggtgggggggtcccttgtgggcaaaggaccatcacattcatctacagcactgagcctggttcctgccctggagtagcaataagatattggagtgaatgtttggttc

SEQ ID NO: 482756 - DNA, 122 bp, Homo sapiens
cagactacagcacaggcaggaggaactcagtggggtccagaggtctgagtagagaggttacagatctaggagcctggaacaccaagggagctgcagagggaagacagcttcatggatctcag

SEQ ID NO: 482757 - DNA, 122 bp, Homo sapiens
ctaacctacggtgaatcccagagaatgttccatgtgctggtgaaaagaatgtgtattctacaggtgttgggtgaaatgttctgtaaatgtcttttagttccatttcatctatggtgtagttt

SEQ ID NO: 482758 - DNA, 122 bp, Homo sapiens
tttttgtgtttagacacacagataccaccattgcattaaatctgcctacagtattcagtacagtcacatgtacaggtttgcaatctaggagtaggctctaccatatcagtttgtgtaagtac

SEQ ID NO: 482759 - DNA, 122 bp, Homo sapiens
aacgttgagtacatggcacagactatatgtctggccccacgctatctacatacagagttacagcagtgaaccaggtgggctagctgcttaccttggggcatgcttactgtcttttcgactct

SEQ ID NO: 482760 - DNA, 122 bp, Homo sapiens
tttactggaacacagccatacttgttcactaatgtactgtcaacaggggctctcgcactacagcagtggggctgggtagctgcaacagagatcatgtgacttgcagagtccgaaatctttac

SEQ ID NO: 482761 - DNA, 122 bp, Homo sapiens
tgttgttctgcagagttgcttctgcaggataaaattctctagcgtggcattactgggttacagggtagtcacatctcaatggttcttgttcaacatggccagattccctatggaacactgag

SEQ ID NO: 482762 - DNA, 122 bp, Homo sapiens
gaaaatgatcaaagcactcgatttccaaaacctgagttagagattcaatttacacctttacagccaaacaaaatggcagtgaaacaccctggttgtaccacaccagtgacagttaagattcc

SEQ ID NO: 482763 - DNA, 122 bp, Homo sapiens
aaacccattgaattcaaataatcacacaattgaagccattgattcaaaacaacttgtttacaattgctgaacctactggtgtcctcctgaaaccatcttctgggaagtatcacagggttgcc

SEQ ID NO: 482764 - DNA, 122 bp, Homo sapiens
ttcacagatggttctgcatgatatgtaggcaccacccaaaagtggacagctgtagcactacagcccctttctaggacatctcttaaggagagcagtgaagggaaatctttccagtgagcaga

SEQ ID NO: 482765 - DNA, 122 bp, Homo sapiens
caacacggtaaaaccttgtctctactaaaattacaaaaattaaccaggtgtggtggtacacacctgtagtccaagctatgtgggaagctgaggcagaagaattgcttgaacccaggaggcgg

SEQ ID NO: 482766 - DNA, 122 bp, Homo sapiens
cttaataagtataaacttcatggaattctgtgtgatgacatgggtttaggaaaaactttacagtccatctgcattctagcaggagatcattgtcataggtaatttaagatgttattttaaaa

SEQ ID NO: 482767 - DNA, 122 bp, Homo sapiens
aaggctgcttctttagcagcagtataactaaggctgatatttagtgagcctgttccattacagccatacagttataaattggtgtcaatctcttggtttggtgtttataccatgccagttgt

SEQ ID NO: 482768 - DNA, 122 bp, Homo sapiens
cccaggcactcctaagctcaagtgatccgcccaccttggacttccaaagtgctgggtttacaggtgtgagtcactgtgtccatcctagtaaatgaacttttaaaatatataatagccaaata

SEQ ID NO: 482769 - DNA, 122 bp, Homo sapiens
gggagtgattctgctgccacaggggacatttggcaatgctgagagacttttttggtgttacaatcagggagtgctactggctttgagtgagtattcacatagtacactgtttttcttgtgta

SEQ ID NO: 482770 - DNA, 122 bp, Homo sapiens
aatggggtacttagtggttaaaacatgtcaaataaatagagagctggattatttctgttacactccattgagttcaaaataaagtaaatatagatgaatggagtttgagaatagtgaaagag

SEQ ID NO: 482771 - DNA, 122 bp, Homo sapiens
tataaagaaatacctgagactgggtaagtgataaagaaatttagttgactcacagttctacagcctttacaggaagaatagtgccaacatctgcttggcttctgggaaggcctcaggaagct

SEQ ID NO: 482772 - DNA, 122 bp, Homo sapiens
atctttaactcctgacctcaagtgatccacacgcctcagcctcccaaagtgctaggattacaggcatgaggtaaaaaacaattttttaagagataagatctcactctgtcacccaggctgga

SEQ ID NO: 482773 - DNA, 122 bp, Homo sapiens
tggcttaagctatcccccacacccacacccataccttggcctctgaaagtgctgggattacaggcatgagctagcacaactggccttacctaggggttttgaagaacatgtttttatttata

SEQ ID NO: 482774 - DNA, 122 bp, Homo sapiens
tatcccatttctttgcttttaaaaaaatacctgtgtattcgcttagctggagttggtctacaggctgtagtttgctgaccccaggactagaggtttgttgccatgtgtgaatttgtacttaa

SEQ ID NO: 482775 - DNA, 122 bp, Homo sapiens
agatgggaaaaatgtactctgaaattttatttatttttcctcttggaaggtgtagatatacagtacacatagtacaacttttgagttggctgaaatagagtgattgcaggatatccgaataa

SEQ ID NO: 482776 - DNA, 122 bp, Homo sapiens
taaggtcaccaggctaggtgagctggatggggtcttctctttcacaacggagaaatattacatcctctgcagctctggatcatgtcaatggaaacaattctttgctcatcttctttcagtca

SEQ ID NO: 482777 - DNA, 122 bp, Homo sapiens
tactgtgacatgacatatatatccatggtccctggcttataactctaataatcctttttacagtcttttgttataatgttggtgtaaggaaacagaatctctctggtattctcctgaactcc

SEQ ID NO: 482778 - DNA, 122 bp, Homo sapiens
tgtcaggattgacaggaacgaaagacaaaatctccaagattttaggcagtccacagtctacagctagaagatttcaaagggtgaatgcaaaactgcctttggataacttgagagtatattga

SEQ ID NO: 482779 - DNA, 122 bp, Homo sapiens
aatgaagtcaacaagaggatacctttattaaattacggtatgaatattgaaattgtaccacagtcaagctaattttaggatgttttctttgaagcagatctaatcctggggaaagggccaaa

SEQ ID NO: 482780 - DNA, 122 bp, Homo sapiens
tcttcttgacatgattcttgatcttttctccactgagacacacttaagtgatgatccttacaggactgacaccctaatgccaataaaagttgctcattatggactgctacaaagaccagacc

SEQ ID NO: 482781 - DNA, 122 bp, Homo sapiens
atgtgttggataattggttgaaactgttaaattatgaggacaagcatcctgggccatacacaccatgtataatgtgttgagtcatccacagataattgaaatctggactatgtgtgcaggtt

SEQ ID NO: 482782 - DNA, 122 bp, Homo sapiens
gaatgtgttggataattggttgaaactgttaaattatgaggacaagcatcctgggccatacacaccatgtataatgtgttgagtcatccacagataattgaaatctggactatgtgtgcagg

SEQ ID NO: 482783 - DNA, 122 bp, Homo sapiens
atgaagcacacacacttgagaaagggacgatctattgcaacatgccacaaatctgccttacaggccctagtctgagccctgctggcatcatgtgtagcatcacatgtggaagaaatatgtat

SEQ ID NO: 482784 - DNA, 122 bp, Homo sapiens
gagggtagctgtcagtgtttaatttacagaacaacctggccaatgtgaattttaacactacagcactatggcaaggagttaccacactctgtgaaaaacaggtttctatgaatttttatatc

SEQ ID NO: 482785 - DNA, 122 bp, Homo sapiens
gaaatgaagcttaattccccttcacttgagtatgggccagaatcaatgactcagttctaacagaacatggtgtcacctctgagtctaggttacacaaggcactggagatttctccttgcttt

SEQ ID NO: 482786 - DNA, 122 bp, Homo sapiens
ctgctggcggctcgggggctctcgggcttctcaaagtctgtagggaaagcaaggtggttacagtcagattcccttgttggtacaagacaactctcacattgcccagctggctgcttatagag

SEQ ID NO: 482787 - DNA, 122 bp, Homo sapiens
gatagcggattgaaagcagccctcggtgctcctgggaaaagagaacaggacttacgactgcagtcaggctccacccaggaccctgttctcccaagactaagcagtgcaagctgaatcccttg

SEQ ID NO: 482788 - DNA, 122 bp, Homo sapiens
acacttcttttcaaatggaatctaatttaatctttgtaagtacccccaaattgtattttacaagccagggcactgaggggcagagaattaatgccacttgctcaggttcactcagcagagct

SEQ ID NO: 482789 - DNA, 122 bp, Homo sapiens
aaaggttggaaaaccacaacaacaaaataataacacttactagagcagctgacagacatacagcacttagcatgccaagcaccagaatgagccttccctagtgttatgaacagagttttatt

SEQ ID NO: 482790 - DNA, 122 bp, Homo sapiens
acaagtatttgtgtctgatgtggcgtggcagtggtgggggttctctttcacaagtaactacagccagctagcttgggtcatagatgtcctaaaattaatttttattaggaatagtttctagg

SEQ ID NO: 482791 - DNA, 122 bp, Homo sapiens
gtagacaaatttagtcttgttcttaacccagaacaaccatgctttgaaacaccatggaaacaggcagtcctggccccagacccaggaaggcttcataaaaccaacaatcccctcaggtgtgt

SEQ ID NO: 482792 - DNA, 122 bp, Homo sapiens
gtcttgatctcctggcctcaagagatcctcttgcctcggcctcccaaagtgctgggattacagtcatgagctccatgctgagccaccaccatgcccagcctggaaagaaggtctttgtggat

SEQ ID NO: 482793 - DNA, 122 bp, Homo sapiens
ccagaaagacatcatttaccttggaatttcagggcaatttttcaggattttctgggagtacagcctaatgccacattggctttacactaatagaactacatgtagctgtggtccctgggtgg

SEQ ID NO: 482794 - DNA, 122 bp, Homo sapiens
attaccagattcattgagtgcatttaattcacctcctgggtcttccatctcttcaaattacagccaaaggcatcttttggactcatttcaatagaagtggtattcctaatggtattcctcag

SEQ ID NO: 482795 - DNA, 122 bp, Homo sapiens
tacccaggtcccttcttagatgggcagcaggaagtgagcaaagcccaggtctgaaagttacagtcactaaggtatcaaacaatgacatccccttcaagtatcagccagagctgagcgctcct

SEQ ID NO: 482796 - DNA, 122 bp, Homo sapiens
agagcaggtgctggcctaggggctgcaaatggtgatactgtgtgctgcttcccagggctgcagtctcagggtgtccatggctccctatgcagagctggctttacagaagtagggataaacct

SEQ ID NO: 482797 - DNA, 122 bp, Homo sapiens
tagcagttatattatgaatatttgtatcttattccagatttggcttctcttttcactctacagcatgtttggtaataagtacttacaatcaatggtagccaaattacttatctactgatagt

SEQ ID NO: 482798 - DNA, 122 bp, Homo sapiens
gaaaggagtatagaactaagaacaagagaattcatcgaaaatctgtataaaaagcagttacagccttggaaactgttccccaccccatgtagcagggtgactgctgattaggattaagcgct

SEQ ID NO: 482799 - DNA, 122 bp, Homo sapiens
accctgcacagtggctcacacttatgcatggaatatatgaatctaggaacattttatatacagtacatatagagatgtaaatttgctggtgacctcactgtttaaaatggcctccaagtgta

SEQ ID NO: 482800 - DNA, 122 bp, Homo sapiens
cgtagcatcttagttattaaaaaattagttttatccaggtattttgtactcttagaaccacagtcctttaccatttgttggcttactgggttatttcatgcattttggtacagctggtcatg

SEQ ID NO: 482801 - DNA, 122 bp, Homo sapiens
tctataagaagtgtttaaatatattcggtaagtagcaggtttttaggcttttttgttttacaacaactaggatttgaaaagattataggtttgaggaatagtatgataatggttctcaaagc

SEQ ID NO: 482802 - DNA, 122 bp, Homo sapiens
gtctcaaactcctggcctcaagtgatcctcccacctcggctttccaaagtgctgggattacaggcaggagccactgcccccacctgttattttttaactgtccttgcttggtaaagtaaaac

SEQ ID NO: 482803 - DNA, 122 bp, Homo sapiens
aaaataaatagctgctagatactctgctagagtttataccctctggaagcttcttatttacaccaccaagtgacatcctaaaaatcaattatgggctgggtgcagtggctcacacctgtaat

SEQ ID NO: 482804 - DNA, 122 bp, Homo sapiens
agaaccaagagacaattaccttcggttgcctaagcaccccaagcccgtggtacattgttacagcagctccagcaaactaatgtacccagacactaagttaacataactggacagtcggtgag

SEQ ID NO: 482805 - DNA, 122 bp, Homo sapiens
ctgtgctctcaaccattatgtactactgtcacagactgatttgagaaaagataagatttacagcacaaagatgtttcctgcaactttataatagagaaaagctaggaaaagctaacatttag

SEQ ID NO: 482806 - DNA, 122 bp, Homo sapiens
tcgtatatgttcttcgttgatagaggatgtaacaggatctacagaccaatctattaactacagtcatttcaaaatagtgattagcccagctgatattttgagataactgcatcaactacgac

SEQ ID NO: 482807 - DNA, 122 bp, Homo sapiens
gtcttgaactcctgggttcaaaggatcctcccgcttcagcctcctgtggagctaggattacaggcatttaccatcaaataaccttggaaccactggtgaatgtgacaggctgtgtcttacat

SEQ ID NO: 482808 - DNA, 122 bp, Homo sapiens
agtaccttccctaattaatgttacaggctgtattattagtaccttccctaattaatgttacaggctgtattatttggcttggggttgagtggcttctaccagctgggtatcaatttgggtct

SEQ ID NO: 482809 - DNA, 122 bp, Homo sapiens
aagcagtcctctgccgcttcgtccttgatggcagagggcaagggacccttttttgggaaacagttagttttcctgggacttagtgatgggaatttctcctgttcaaaaccaggacttttcct

SEQ ID NO: 482810 - DNA, 122 bp, Homo sapiens
tgaccccaacactggggatcagatttcaacatgaggtttggggtacacacatccaaactacagcagctactataaatcaccccaaacttagtggctcaaagcaacagaagtttatgatctta

SEQ ID NO: 482811 - DNA, 122 bp, Homo sapiens
acggtggcaatccactaggctgccgagtggccatcgcagcccttgaggtaaagactgatacagccacacagtgtctattctttaaagcaatgttgaagtgatttttaatttgggcccactgg

SEQ ID NO: 482812 - DNA, 122 bp, Homo sapiens
tccagaacacttgtcagtcttgaccattagtgaagctaggcaatgcttgagggccacttacacctatcacattagcaagagagaaggggaaaaaagagaaccccctgccctttgttctatga

SEQ ID NO: 482813 - DNA, 122 bp, Homo sapiens
ttacacatgcagtcatgtctcctcttataatcctaagactcacctgtgagattcctattacagcccctagtttacatgtaggaatatcagaaccccaaggtttagaaacagaacggccagaa

SEQ ID NO: 482814 - DNA, 122 bp, Homo sapiens
caggcacatcccagagagaaagaggaaaaagcacaggctgatggcatgagggcctttttacagctgttcagttgaggaagcagcatggggctatatcctattcactgccaaccttaatgaaa

SEQ ID NO: 482815 - DNA, 122 bp, Homo sapiens
ggggctgctccttcccctgcaggcactcccctgctccgtggtgaccagctgctgttattacagtcatggttgtttctagatatctgtctgcccatgtgagtggcagaaaccttgatcttgga

SEQ ID NO: 482816 - DNA, 122 bp, Homo sapiens
ttctaattaggattacatgatattcctgcattaattgtgagaaaactgataatttagttacaagacttgccatgaggttacatggggtatctttctgtattcagattctatgtttttagtgg

SEQ ID NO: 482817 - DNA, 122 bp, Homo sapiens
atgcttagtacttcattaagacatttgtgagcaaactcattcccattaagtgatattttacagccactggtgaaggttgcatggtactgctttgaaagcacagccctgtccctcaaaatggc

SEQ ID NO: 482818 - DNA, 122 bp, Homo sapiens
tttaaagatgaaaaaataaaaaaataaagaaataaagaaaatgacaatgcattcagttaacaggcacagcttctctgattaggggcatggaggccctgttccacactggggttagggcctct

SEQ ID NO: 482819 - DNA, 122 bp, Homo sapiens
atccataggtccataggtcaaaggggtgtctgcactcacatgtaatggtagcactatttacaatagccaagatagggaatcaacctgtgtccattgacagatggagaaagtgtgctatatac

SEQ ID NO: 482820 - DNA, 122 bp, Homo sapiens
ggggaagaatacacttccaaagtcgtacattcattggcagaattcagtcctttgtggctacaggactgagaaattctgtttctttatggctgctggctggatgtcagcctcagctcctagag

SEQ ID NO: 482821 - DNA, 122 bp, Homo sapiens
gagctacaattcaagatgagatttgggtggggacacagtcaaaccctatcactacctttacaagaactacatcattgatggaaacctgaccctgccaagggttcactccagcaaaatgttta

SEQ ID NO: 482822 - DNA, 122 bp, Homo sapiens
gaataatcttggctgatttctctctgcagactatacattgctatagccctcattattttacagctgtcaagtaaaaccatgagcagctgggctgaactggtctgcttttttggaccatatta

SEQ ID NO: 482823 - DNA, 122 bp, Homo sapiens
ctggtgggccctgggcaaggaggggagctggggcccctggacaaggtgaccgggggcctacaccacccactgtgagtgccaggtccttgagctagagaccatccagcagtgcccactttcaa

SEQ ID NO: 482824 - DNA, 122 bp, Homo sapiens
tgtggcgttgttagggtaatttatggctacttggtggcaaaacttagtctagagtccatacagcaggtggttttgaacttagctcaaggtggggagtaagatgttactgctatctcaaacaa

SEQ ID NO: 482825 - DNA, 122 bp, Homo sapiens
aaaatgagttaccagtgggttcacacacactgcaggttttgtcaatgactcacttgtatacagaaccataagaagtatgtgtgcccaggagagctggacttcagaaagcccaggttaggatt

SEQ ID NO: 482826 - DNA, 122 bp, Homo sapiens
ttctggctgctaggaagccagggctggatataggccctctggtgagtgttccagagtctacaggaggaattttgggtatgaccttatcctggcctttttatgttttcctttcttgttcattg

SEQ ID NO: 482827 - DNA, 122 bp, Homo sapiens
gattggccttaagagctcatagccttgaccgctgggttatctgcttgaccaaagggacaacagcctcattggtttttggctttgtgggctgaaattttgcttgggcaggcctttgggtgggg

SEQ ID NO: 482828 - DNA, 122 bp, Homo sapiens
caccttgaggtcataaggatctactgattttgaagtatatcgtaccaatagttatgattacagtactttgcattaagtttacctgagttccaggcagggacagtgatgaaactctcgattcc

SEQ ID NO: 482829 - DNA, 122 bp, Homo sapiens
gtgggctcgtagtcttgctgggctcaggagtgaagctgcaaatcttcacggtgagtgttacagctcataaaagcagcatggactcaaagagtgagcagtagcaaaacatattgcaaagagcg

SEQ ID NO: 482830 - DNA, 122 bp, Homo sapiens
aagcacaaaacaaagaaagaatgaagccgcaaaagcagagatttattgaacacgaaagtacactccatatgttggaaggaagccaatcacagggtctcaagggcccagtgccagtattttct

SEQ ID NO: 482831 - DNA, 122 bp, Homo sapiens
ctttcgaactcctggcctcaagtgattcacccgcctcagcctcccaaagtgctgggattacaggcatgagccactgtgcccagcttggaatttttatagaaacaaaaaggcgaaagaataaa

SEQ ID NO: 482832 - DNA, 122 bp, Homo sapiens
gtttgccattctgagaagattccgttggttcttggctctccattttcaaacgagtctttacagccctcaggtgagaagttcaccctgcaagataatgagatttgttcaggctaaaattattt

SEQ ID NO: 482833 - DNA, 122 bp, Homo sapiens
ttgtgagggggagtctgtgagtgtggctggggtgggatggcactgacctggttcaccctacagtacctgtgccagtgggaaactagattgacaggaaagtagtataatctattttgggggta

SEQ ID NO: 482834 - DNA, 122 bp, Homo sapiens
agacacaagttttaattccagctttctcaaaatctccttttgtgagcttagacataattacagcacctgggtactaaacacctctgttccaggtgccatgatcattgcctgagttgtaattc

SEQ ID NO: 482835 - DNA, 122 bp, Homo sapiens
ttaaactaaagagctggaggattgctggcaagatggccaaataggaacagctctggtctacagctctcagcaagatagacccagaaggtgggtgatttctgcatttccaactgaggtaccca

SEQ ID NO: 482836 - DNA, 122 bp, Homo sapiens
ctatatctgtgtacagtatatgtgtacagtatatacatgtgtgcagtacatatgtgtgtacagtatatacatgtgtgcagtacatatgtgtatacagtatgtatgtgtgtgcagtaagttta

SEQ ID NO: 482837 - DNA, 122 bp, Homo sapiens
ggacattttagtaatttgtggattgtctttggttgattttggtttgttggtgtgattttacagcattccactgtgtggaaagaccacatttgatttatgtgctctactgttggtagacattg

SEQ ID NO: 482838 - DNA, 122 bp, Homo sapiens
ggaaagatttgaaaggaattataagaaatgaatgagctcaggaatgaactggtcaaattacaagcagaaatagatgggaatagagagatatgtgatcccacctatgaaggacaagcttgtat

SEQ ID NO: 482839 - DNA, 122 bp, Homo sapiens
agttctgcaggcctgctttccagggcattggacaaatgtgtctcctggcatgtacccgtacaagcaggactgctctcagaagatgacatctaagaggggctggaatcatttattatatggcc

SEQ ID NO: 482840 - DNA, 122 bp, Homo sapiens
actgtcttgcacaactcaagggcaccttcacagtatgtctcatgtctgtggacaatgtcacaatatgtctgcctggatgtgtgctaggcaaaggtcctcacatagaagacagaagatgcaaa

SEQ ID NO: 482841 - DNA, 122 bp, Homo sapiens
ccagcaggactgataggtcttggggctcaaatcctggctccggtggctaaagtgtcattacagcacaggagctctgggtaattctggaaattgaaggaaggaaagtagacctcgttctgaac

SEQ ID NO: 482842 - DNA, 122 bp, Homo sapiens
gggctctagccatctgccaccccatcctctcagtgctgggattacaggtgtgagccactgcagccagcctgagcatcttttcatgtgcttgttggccattggtatatcttttttgagaaatg

SEQ ID NO: 482843 - DNA, 122 bp, Homo sapiens
gacagtgtcccgctgtcacccaggctggagtacagtgagctgtgaggtgaccacggctcacagcctcaaccttgggctccagcagtcctcctgccttggctggattcagtgctggggttaca

SEQ ID NO: 482844 - DNA, 122 bp, Homo sapiens
agacctgcctctgaggcctagcacacccaacattctaacaaaaggctgtaacagaggctacaggagttatgtatgagccaggaaccatgggtgaaatccaatatatatcataatgtcacaga

SEQ ID NO: 482845 - DNA, 122 bp, Homo sapiens
attagtgtgctagcccgtgtccagaatggtctgtgatgggaaaaattggaaaaaacattacagtccactaataggaggttggttaggtaaatggtggcatgtcctgtgccatggagtattgc

SEQ ID NO: 482846 - DNA, 122 bp, Homo sapiens
gtcttgaactccagggctcaagtggccctcctgcctcagcctcctaacatgctggaattacaggcatgagttactgcacccagttcaatacagactttttaagatctgtgatttttgaaagt

SEQ ID NO: 482847 - DNA, 122 bp, Homo sapiens
aaaaagaatgagtaataatgtaatacggaaaatgtgacaaattgttaaatgaacaaattacagcaaatctaatgaatgctgatagaagttggaatagtgcttacccatgggggtgggtagta

SEQ ID NO: 482848 - DNA, 122 bp, Homo sapiens
atacatttcactttttgacccatttctttagaaatatgatttgtctgctcatgactgttacagtcatgtgactgtcactggtatacctgtgtttatacttgcaagatatatatgttattttt

SEQ ID NO: 482849 - DNA, 122 bp, Homo sapiens
gtctcaaactcctggcctcaagtgatcctcttgtcttggcctcccaaagtgctgggattacaggcatgagctgctgtgtctggacaaaactcagttgttaatggtgccccttggagctgtat

SEQ ID NO: 482850 - DNA, 122 bp, Homo sapiens
ggctaaagtttctgtgttttaatcactgccatgatatacagataacagaatttgatgttacagcaatgatgaattggtctgaaggggactcctgtagtagtcaaagacaggaagtttatgag

SEQ ID NO: 482851 - DNA, 122 bp, Homo sapiens
ttctgccaccatattcacagaaacaagacaagagctgaaaatatagcctgactcttgaaacagtcaaagaattgtgtatgtttatgaaagttctgattaataagatattctgaggacaaaag

SEQ ID NO: 482852 - DNA, 122 bp, Homo sapiens
tctgatggtaattttagttcctgggaatgaaatgaataagaaagtccttttgcttcattacaggtttgtatggcctgaaaagtaaagctccatagaagagaacctggggatgtgttctgtgt

SEQ ID NO: 482853 - DNA, 122 bp, Homo sapiens
ctctgcacctcctgggttcaagcaattcttgtgcctcaacctcccaagtagctgagattacaggcccagctaattttttgtataaattagctgccaccaggcccagctaattttttgtaatt

SEQ ID NO: 482854 - DNA, 122 bp, Homo sapiens
gatgacatcctaggcctggagttaagcatttgatggctttctagtcacaggtgacagttacagcaatggtaagatacagggcaagagtttaaataaagggaatgagaagtcaaagacaaagc

SEQ ID NO: 482855 - DNA, 122 bp, Homo sapiens
agcaagctttataagctttagagggaggtagggataaggtagctcttcctattcagtctacagcttaaagctcatggctcttctgagcctgacaacagacatttaatatgaatgcattagga

SEQ ID NO: 482856 - DNA, 122 bp, Homo sapiens
tgaagtgccactagagatgctggaggtgttaccaagtattagagaaaagtcattacattacaagaaaaagttgaattgcttgatatgtaccatagattgaggtctgctgctgcagttgtcca

SEQ ID NO: 482857 - DNA, 122 bp, Homo sapiens
aaaattagaaaaagaaagaataagaagggtctggtcccagttctgactcggccattcttacagctctttctggctttgagtttgcttgtggaatttcctgggcagttgtgttaaatccgcca

SEQ ID NO: 482858 - DNA, 122 bp, Homo sapiens
cagctgattgcagagccccaggcccttgaactgtcataggcagtggccagggagtggttacagcaggccttgggcaagacccattgctgtcttggctttgggtctgcagcactgtcacagtg

SEQ ID NO: 482859 - DNA, 122 bp, Homo sapiens
gcctcaaactcctgggctcaagtgatcctcccgtcttggcctcccaaagttctgggattacaggcatgagccactgcacccagccaggttttttgtttttaaaagtaaagacaaactatgga

SEQ ID NO: 482860 - DNA, 122 bp, Homo sapiens
aaaagtttttaatcttttttcattaccctgcaaatcaactcaagtaaatcattatacttacagtcatgtaccacataaggatgtttaagtcaatgaagaacaatttatgtgaccaagtagtc

SEQ ID NO: 482861 - DNA, 122 bp, Homo sapiens
agcagtggtggttatatctgaactggggtgtcatatgttcatatgtcttcttttcatttacagcacttttccaaaatgttgagtataaatgtgcattacttctgtagtaagagaaacaagta

SEQ ID NO: 482862 - DNA, 122 bp, Homo sapiens
gtaacatgagcaggagccaagcccatattgtcttgacccaccgagctctgggggttgttacagcagcaaaacctggcctatcctgattgatatagcctggctccaggacaaccttgggcaag

SEQ ID NO: 482863 - DNA, 122 bp, Homo sapiens
ggtgttatgattcctcacttacctgagagaaaactgaggctcagagaagactgaggcttacagcaccacacagctgtgaggaatcagagttgataattgaacctggatgtgtttgagcccta

SEQ ID NO: 482864 - DNA, 122 bp, Homo sapiens
tgtggtccagggaccagcagtttgggcatcccctgggagctagctagacatgcagaaatacagccttggcccagcctgttgaattggaatctgtattttaataagatccaagagatttgttg

SEQ ID NO: 482865 - DNA, 122 bp, Homo sapiens
ctaagtgaaacatgtcagacacagaaggctacatactatatgatttgtatttctctattacagcttttgcttccttgagtaagcagtgattaatgtgataccatctatcatgctttatatct

SEQ ID NO: 482866 - DNA, 122 bp, Homo sapiens
gcctcaaactcctgggcccaagtgaccctcctacctcagcctcctgagtagctaggattacaagcacatgctatcatgcacagctaattaaaaaaaatgttttttgcagagacggggtctca

SEQ ID NO: 482867 - DNA, 122 bp, Homo sapiens
aggaaacagctgtacaggccaggtataatttatacattttttttaaaagttataattctacaatcccaagggagtagaggttatagtcattgaatgactgcttgataccatgtcctcttcgt

SEQ ID NO: 482868 - DNA, 122 bp, Homo sapiens
gcctcagattccaatactcaagcaatcctcgtgccacagcctcctgggtcactgggactacaggcatgtgccaccaagctcagctaatttaaaaaattattttttgtagagatggagtctca

SEQ ID NO: 482869 - DNA, 122 bp, Homo sapiens
agtcaaacaccagtcatggttgcccaggcaaggtggccaaataggaacagctctggtctgcagctcccagtgagaccaacacagaagggaggttatttctgcatttccaactgaggtacctg

SEQ ID NO: 482870 - DNA, 122 bp, Homo sapiens
ctgaagtgagagcacgctcatggaggactgttgccctttaacctgtgtaatctggccttacaccatgtaagttggcattataattttgacagattttataatcttgccacaatgttccattg

SEQ ID NO: 482871 - DNA, 122 bp, Homo sapiens
agggaggatattgaaagattaagaataaagatttcatgtttttaattgggaataaacttacactgtctaaagttaataaataaagaaatggaagttagggtctgtgtgtgtgtgtgtgtgtg

SEQ ID NO: 482872 - DNA, 122 bp, Homo sapiens
ttgctcatctaactcagatttcatgcagccccatctgtcctagattgtaatctgtgtttacagtccttggctagataggtgatcattaagttttgcaaaatgcttagtcacacattagtcta

SEQ ID NO: 482873 - DNA, 122 bp, Homo sapiens
gtctcgaactcctgagctcagacaatccgcccgactcggcatcccaaagtgctgggattacaggcatgagccactgagcctggcccacaataaaaatttataaaagaaacaaagcacttaaa

SEQ ID NO: 482874 - DNA, 122 bp, Homo sapiens
gcagggttgcatcgaaagtatagagtgtgtagtgactgtgaggatgaagagcagaaattacagtcactagcatagaggcagtgcagggttctcttacatgacaataatggcatcattattat

SEQ ID NO: 482875 - DNA, 122 bp, Homo sapiens
agcctagggcctcaggggctggcctgatgcctggttttatggctgctgatcttgtgcctgcagccacagcatctggcctgatgctaaggtgggcatggagactgggttcacagagctgagcc

SEQ ID NO: 482876 - DNA, 122 bp, Homo sapiens
taaacactgacattgccccagagctgcagtgggcagccaggagtgtcaaaccacaatctacagccatacagctggcactcaagggggagaggaacccacactttcagagcatcgagagtgaa

SEQ ID NO: 482877 - DNA, 122 bp, Homo sapiens
gcctcaaactcctgacctcaggtgatccacctgcctagccctcccaaagtgctgggattacaggcatgagccaccatgcccagccaccattttagcaaatttttacctgttttttagaattg

SEQ ID NO: 482878 - DNA, 122 bp, Homo sapiens
agtctggagttggccaacccctgaaatgacctcttctgccagagtcatcaagagactttacaggcaaaatcttgctgatgtgtgggatccaccaatgtgacttgccaggctgacatgctcaa

SEQ ID NO: 482879 - DNA, 122 bp, Homo sapiens
gtcacttcccaaaagaaggagaaacaaagtcttgaaaaggtatctgcatagccacacttacagcctccacttactagcccaatgtggaggtaacccaagtgtccatgggtggatgagtggat

SEQ ID NO: 482880 - DNA, 122 bp, Homo sapiens
tacgaataactttgtagagagaaatgcagctaaacaatgaggttgattacctgaggtttacagcattcagagaaatgacaaaaatagggcagagtccttggctgaatattgattagtgaata

SEQ ID NO: 482881 - DNA, 122 bp, Homo sapiens
aggcagggaaagtagtggagagagggtatagaaagagattggttgaaggatacaaaattacagccagataggagaagaggaatgagctctagttttctacagcactataggatgactatagt

SEQ ID NO: 482882 - DNA, 122 bp, Homo sapiens
cacagagagtcacaccaaatatgagactcgaacaagggccagaagatggaagcttatatacagcatcctgagctaaagacaggaataggggcccagagcttcttgggggtggcagagacagg

SEQ ID NO: 482883 - DNA, 122 bp, Homo sapiens
acagccaacaggaatacccaggagtatggtaaaggaaggttccagatggaatcagttctacagtccaaactagaagaatgttccagggagtagaggtgatgggatatatttggagggggagg

SEQ ID NO: 482884 - DNA, 122 bp, Homo sapiens
ggcttgaggtccccatgctttatgcagcttagggactggtgccctgcatcctggccactacagccatggctgaatgggaccaataaagaactcaagctgtggcttcagagggtgtaagcctc

SEQ ID NO: 482885 - DNA, 122 bp, Homo sapiens
gcctctgccttcagggctccagggattctcctggctaagcctccccagtagctgaaattacaggcacatgccatcacacctggctaattttgtattttaatagagatggggtttcacttggc

SEQ ID NO: 482886 - DNA, 122 bp, Homo sapiens
tcttcattatcttctgtcactaaagagcacaccatggcagaaaagtgagaacaaaaattacagccctagaggactcatcattttcaaccagttaggccatgagtctttgaactcaggaactg

SEQ ID NO: 482887 - DNA, 122 bp, Homo sapiens
tccaagaaaataaatgtaaaaaactttggaagagatagtctaaacaagagcacagagttacaggaattggtagattatcaagttctcctagataatgtctttgtggatataccatcatgtgc

SEQ ID NO: 482888 - DNA, 122 bp, Homo sapiens
ggaggaagatagcttgagcccaggagttcgaggctgcagtgagctatgattacaccactacagtccatcctgagtgacagagcaagaccctgcctcaaaagaaaaagaaaaacagactggcg

SEQ ID NO: 482889 - DNA, 122 bp, Homo sapiens
tgaaaaagtctgagatgaaggaagcaatcaggtcatcttggagacagagccaaagttgtacaggacaggggcttatcttttgattggacaaaagatgacaagttgatgtcccagtaattcaa

SEQ ID NO: 482890 - DNA, 122 bp, Homo sapiens
acactccatcctgagcaactgctctcattacaatttcaaatatactcaaatttgagagtacaggctgcttttaataaaactgaaagcaaatgcttatggaacccctgacacacctcaaggag

SEQ ID NO: 482891 - DNA, 122 bp, Homo sapiens
gagacattagttatggatgataaaccaatgttagaatcgtcatttgccaatgggcatttacatccaggcacaggcagatacaaaatgagtacaagagtatattttaccatgtgaatagggta

SEQ ID NO: 482892 - DNA, 122 bp, Homo sapiens
gagttccagcttagccacagtagactagaacattaggaaaattgctaaggttttttattccagttcctggctcccagacagcatcctggacatacctggcttctgggggaacttgctgccct

SEQ ID NO: 482893 - DNA, 122 bp, Homo sapiens
aatctggtttctggtgtacttagagatttagagatctctgaaagctgcatcaccaccccacagctgctgcagcttgggctcaggagcaggcagtgccaagaccactgtctgctttggcctca

SEQ ID NO: 482894 - DNA, 122 bp, Homo sapiens
tttgctgaggatatgagacttcagtgctaacccaggaatgttcttggtaaactgggacaacagtaaccctaattgtgggtctgtggactacactttatgtgataaggtcctagggcagaggt

SEQ ID NO: 482895 - DNA, 122 bp, Homo sapiens
gcacaatctgtggtggaagagagagagaatgaatgtgagtaagggcctggaggccagctacagctcctgggggctgtgggccatcctgtcaacctattagctctgttcacaaagaaagtgtt

SEQ ID NO: 482896 - DNA, 122 bp, Homo sapiens
agaatggaagaaggagataaacatgatatttcaggagtagttattgtgtgctatgacttacagttactgcacaaattctataatattttgagaggtggggtaccagtggctgaaagtgagga

SEQ ID NO: 482897 - DNA, 122 bp, Homo sapiens
catacacaggagcagtcctgaaccctaggtctacttgtcaagtgctgatgtctacagttacaggcctgaaccctgagtctgctggagcacagatttccaggggccagcctagagtgtgagat

SEQ ID NO: 482898 - DNA, 122 bp, Homo sapiens
agccttcaggtaaactgtgaaatcaaaaggcatcgttcggttttatcaagcaaacagctacagtcatcactttgtgaacaacttgagaaaaagatgcaagactgttgttgcttgcctcttct

SEQ ID NO: 482899 - DNA, 122 bp, Homo sapiens
gcagacaagttatattatttgaagccaaagagtgagtaagtatactttggattaggtctacaagaacttgcacagaaagaaattatctaaaatgtgatttagaagtaaagcatgtgcatatg

SEQ ID NO: 482900 - DNA, 122 bp, Homo sapiens
cgcctaaacattgttaatcgtgtgtttttaaatgtgttcatttagtgcatatgtagactacaccataagatcctgaagggatgattttacaagtatcatggtgctgagcatgacactgcttc

SEQ ID NO: 482901 - DNA, 122 bp, Homo sapiens
tgagaactagctcaccgtggcaatggctttagtgtctcagatgtgggtagagacccattacagccacagagcctgagtctgaaatgtgggtacctgtggagtggccacagctccaggattgt

SEQ ID NO: 482902 - DNA, 122 bp, Homo sapiens
gggcaggggaactatagtgagaaaacatgccagaatcacctgcataactttttcaaactacaagtctgctcacagcctggtgcctgattcagggagttctggtctggtatgtcactgagcaa

SEQ ID NO: 482903 - DNA, 122 bp, Homo sapiens
cttagaattttttaactaattgtctcgtttctctttacaattatagtgaaatttgatttacaggcatctttagtctggggagggttcattccatgagcaacatatacatatatttggatcat

SEQ ID NO: 482904 - DNA, 122 bp, Homo sapiens
caaccacaaagaagagggatgcacatctcccagaaatattaaatagctgtatctcaactacagtttcagaatttagaaccaccaattcaagatggaaatatgcagtgggaagagttattaaa

SEQ ID NO: 482905 - DNA, 122 bp, Homo sapiens
gagactcgcatcatagatgggggaatgcaaacatttgtttcagccttcatgttcatcttacaccccaggaggaccaagaactctttagtcattgaggcctatttcttaatcttttaagggat

SEQ ID NO: 482906 - DNA, 122 bp, Homo sapiens
ggtttattgcaagtaataattagggcttatttatatgcacagcagtgactgcttggtttacagaatgtaaatagcttgctgccctagttctaatggtcagtaagtagctgagaaaggatttc

SEQ ID NO: 482907 - DNA, 122 bp, Homo sapiens
ggcatatggggatgggccagaggcctgtatccatgggggccagcctgaagcctgagtctacaagagctgagctgatactggtgtgaaccttgagcctgactgtttaggggtcactcagatgt

SEQ ID NO: 482908 - DNA, 122 bp, Homo sapiens
ggacttgatattttgccatttcgagattctaggtcagatttagaccaaagtgagactctacagtcacccagtaacatgggcttataaagatggctcatttcccagcctttctggcaaggaaa

SEQ ID NO: 482909 - DNA, 122 bp, Homo sapiens
tttcccaggctggagcctcaggaaggagttcccaaggcactggggtagtggtagctagaacagccatggaagcagagagctaggagtttagtctcaaaacagtagtgagattttctcacacc

SEQ ID NO: 482910 - DNA, 122 bp, Homo sapiens
atagctggtaggcacactacagaaacttgtttttgtgagtttcacctcatctgaaccctacagtaactggcatgtgctttaagcctcttaactactagtgtcaagtcatttgggagatggca

SEQ ID NO: 482911 - DNA, 122 bp, Homo sapiens
tgcgaaaggacaaaggagttcgggaaacacttcatcctgtacgcccatcctggacattcacagcacattattataagactgttcatgagccatggtcacaccactgcactccagcctgggtg

SEQ ID NO: 482912 - DNA, 122 bp, Homo sapiens
gtagatactgctctaattcctaccctctgtatgtgacacggattcagatacccgggtttacagttttgtaccctgaaggccacccttaattttggtagccatctattctttaggacatttaa

SEQ ID NO: 482913 - DNA, 122 bp, Homo sapiens
cctgtgcctttgtgctgtttggctgaggcatggagactgccagtgggtggttctattttacaggattcccaggccaagaaagcctggggactgtccttgatggcagagcagaatagcctgcc

SEQ ID NO: 482914 - DNA, 122 bp, Homo sapiens
gccgccatccccagaatcatcattgtaagatggataaacaacctccctgtgacagaaagacagcaagcagtacctgtccaggaagggcagctgcatccaggccaatctcatccccgtagctg

SEQ ID NO: 482915 - DNA, 122 bp, Homo sapiens
tgtcttaaaaacaaaaacaaaaaacaaacaaacaaacaaaaaaaaaaagtcggggatcaacagtaaccctgtatctaaagctagtgaatgcctttgtagtagtatccctaccatgtatttct

SEQ ID NO: 482916 - DNA, 122 bp, Homo sapiens
ttctcagattcctcactctgaggctgtaaaacctgctgagaagagatgctgggggactcacagtcattttcagcagtgtctgtcttgtgtgtggctgagtcctcctactatatctgcactca

SEQ ID NO: 482917 - DNA, 122 bp, Homo sapiens
ctgacaataatataagaggaattttaccccaggttagtgtggcctgagaaatgggttacacagcaaaggaggttggaatgtgcctaaaatgaactgcatctattttgaaatactgattagag

SEQ ID NO: 482918 - DNA, 122 bp, Homo sapiens
ctgcctgtgaaattggcttggcgccccgccagcccatctgctaactgtccccaggctctacaggcagccttggagggacagatgagccctccacagagaactgccagaggaggtatctgaag

SEQ ID NO: 482919 - DNA, 122 bp, Homo sapiens
gagacttgtcttggcagactagagtgagagagactctcctgctggctgtgaagaagaaaacagccatgaactgcctatagagaaagccatttgttagagcacttctggtggacctgaaggca

SEQ ID NO: 482920 - DNA, 122 bp, Homo sapiens
ggttttggacagagtggagttctcaaaggcaggcgtgtgcaggagaggggcaggttgtcacagtccttgattgccaggtgccattttggggctggcaccactcactggggagcaggaggaca

SEQ ID NO: 482921 - DNA, 122 bp, Homo sapiens
tagagagaaagagagaaattggctcacatgattctacaagctaagaagtcccaaaatcttcagccagcaagctggagacccaggagaaccaatgtgtagctccagcccaaaagccaggaggc

SEQ ID NO: 482922 - DNA, 122 bp, Homo sapiens
cccagcacttctctattctccagacctccttccttccagaacccgagactaccgagactacagccctggtcctaggaagtagggctaggagaaatgcaaaattgggggttttgttaaagtta

SEQ ID NO: 482923 - DNA, 122 bp, Homo sapiens
agtcttgaactcctgacctaggtaatctgcctgccttggcctcccaaagtgctgggattacaggcatgagccactgggcctggctacagtatattttcttaaagcaaggacagatataagct

SEQ ID NO: 482924 - DNA, 122 bp, Homo sapiens
gtctcgaactcttggcctcaggtgatccacctgccttggcctcccaaagtgttgggattacaggcatgaaccaccatgcccagcctgggtgtttcatgtaaatggaatcatacaatatactg

SEQ ID NO: 482925 - DNA, 122 bp, Homo sapiens
gatgatggggcagcttgaagatagagacccagatagcaaagggtgctgggaaaaacattacaaggaaggtctaagaatatctgcaaaggagagagcttttctgggaatgtcagtcttaacca

SEQ ID NO: 482926 - DNA, 122 bp, Homo sapiens
cccccttttaattttatcccttgctagaattaagatactatatgcctcacttatcaattacagtctaaatccaaaagaagtaattcaggtaaaaatatgcttttgtttttttcataaatttt

SEQ ID NO: 482927 - DNA, 122 bp, Homo sapiens
ggagagagcccagccgcccccacattcatttctagggtacatgaggatttgtggacaacacagcacatgtcctactagaatatgaaggtcaagtccaaggagctttctccacacctacagtg

SEQ ID NO: 482928 - DNA, 122 bp, Homo sapiens
tgggaaagacaaatgacacctgagaagaactagccctgcacattccagtattgcagcctacagcagttgtcactgacttgcagactttgggcaaaacccacctgtttttaatattaatgcag

SEQ ID NO: 482929 - DNA, 122 bp, Homo sapiens
gtgttggagaggattaagtaaatgtatacatttaaagctcttagaacagtgcctggcatacagtcagcactcacaaaacattggctgctggaactgctgctgggactccagggatcctctgc

SEQ ID NO: 482930 - DNA, 122 bp, Homo sapiens
ggttgaatttagaggcatgaagtggttcctaatatgcccttattcttcttttactgtctgcaggatctgtcatgatataacctgtattattcctgatactggtttgtgtgctcttttttttc

SEQ ID NO: 482931 - DNA, 122 bp, Homo sapiens
gcattatgtttagaattataatgaatgtatggatgaaattggagaaggctgacatttttacaatatcaattctttttgaccatgaagatagaaaaactgtggtggccagaattccaagatga

SEQ ID NO: 482932 - DNA, 122 bp, Homo sapiens
gattttctatttcttcctgattcagggttggtaggttatgaagataaataattttcactacagccctttcacttgactaagatattagaagctaggatctcacactaaaatagagagttaag

SEQ ID NO: 482933 - DNA, 122 bp, Homo sapiens
cataggatgaagagaatggacaagatatattaatatgttgtgttagtacattttaatttacagaacttttttcagattcatcatctttggatttttttggggaaagagtctcgctctgtcac

SEQ ID NO: 482934 - DNA, 122 bp, Homo sapiens
tgtactggagaaagagatcatattaaacatctattggaagattaatatgtttatcaactacaggaagaaggtagatagttcattgataggtaccaattcctaaattgatgtgtttggtttga

SEQ ID NO: 482935 - DNA, 122 bp, Homo sapiens
tcttgtttcttaacaacaataacaataaaagcaactttctgattgtgttactttccttaacagtcacttcacttgtggtcaggagttaagtcagtcaggaactctgacttcggtacatcttg

SEQ ID NO: 482936 - DNA, 122 bp, Homo sapiens
cagcagaggtgggtccagtatactcagagaggacctgcccaccagataatcttgtatttacagccacaagtggcttctccttgctagaatggataccttcagagcctagtaactcttccccc

SEQ ID NO: 482937 - DNA, 122 bp, Homo sapiens
gtctcaaactcctggcctcaagtgatccgcccgcctcagcctcccaaagtgttgggattacaggcatgagccactgtgcccagccaatactcactttttgtatcagccaggagaagctagcc

SEQ ID NO: 482938 - DNA, 122 bp, Homo sapiens
gcagcatttagccaagaaggccctgataacactgagaatatcacttacttttgacataaacagtacttccacttggcaagacaactacattggaggcaggactggcaggtcttggagactta

SEQ ID NO: 482939 - DNA, 122 bp, Homo sapiens
ttgagaatctgaaggtgagcccagcttatggagaggttttatgggataatgtcagacttacagcagtcaccctcccaagcaccacagcttcctggagatagacattccagagtcttttgaag

SEQ ID NO: 482940 - DNA, 122 bp, Homo sapiens
tggcctcccaaagtgttgggattacaggcgtgaggcactgcgcccaaccatttctcactacagcctcttgagataggaattcccattttgagatgcaaagaaatgaagtgactggtagaacc

SEQ ID NO: 482941 - DNA, 122 bp, Homo sapiens
gtttatttaaccactcacttactgattgacatttaggttgtttccaatttttcactattacaggcaatgctgcattgaagatccttttggacatgagtgagtatttctttagaatagactcc

SEQ ID NO: 482942 - DNA, 122 bp, Homo sapiens
tgaactgtaagacgataaatctctattgtcttaagccaacaaatttgtagtcatttgttacagcaactacaagaaactactaagggcctggcatgatagctcaagcctgtgatcctagcatt

SEQ ID NO: 482943 - DNA, 122 bp, Homo sapiens
cctgcaacagttatattacagacgtatctacagaactgagaaatgtggattcttcttatacagtaccttcatcctgtaatggtaacagtgtgaaggtgtggttctctgaccctaagatgaca

SEQ ID NO: 482944 - DNA, 122 bp, Homo sapiens
gaaccacccccatgattcattcacctcccatgaagttcctccaccaacacatggggattacaatttggactataactccaaatgagatgtgggtgggaacacagagccagaccatatcaagt

SEQ ID NO: 482945 - DNA, 122 bp, Homo sapiens
atgttgcctagtttatccattagagcccttagcatattaatggtagttgttttaaatttacagtctgataattttaacatccctgtcatatctgatttggagtctgttgcttgctgtttctt

SEQ ID NO: 482946 - DNA, 122 bp, Homo sapiens
atagagataagacacaccattatggtgatgcagataccaaaaatagcacaaaccatagtacagcacatgttttgccagagcaaatgaagtgtcagggtacccagtgaaatatcggaattgtc

SEQ ID NO: 482947 - DNA, 122 bp, Homo sapiens
tttgaacaattgtccatgcacaaaaatactttcacaataggtaaggaaaccaagagattacagcacctgggtacagcaccaaaataagaaaacatgcatggaagagggtagaaagaacagct

SEQ ID NO: 482948 - DNA, 122 bp, Homo sapiens
ctgaaggggatgctgctggtatatagtaggtaaaggccagggctgcttcaaaacatcttacaataatgcacagaacaggctgggtgaggtagctcacacctgtaatcccagcaatttgggag

SEQ ID NO: 482949 - DNA, 122 bp, Homo sapiens
gatacccatgcatatggaatgggtctttgatacaagtgagaaattgccaacactcatttacagcctattaataaatgggctttatcctatagattagtatctatgtccctgtcaacatggca

SEQ ID NO: 482950 - DNA, 122 bp, Homo sapiens
tttgtaagtgtcatagtatctaaatttttgtggttctctgtttgattatatcaatgactacaatacttaaacttttggattattagaatgactaaaatcaaaggattggtgaatgttataac

SEQ ID NO: 482951 - DNA, 122 bp, Homo sapiens
taagactagactgggaagggtgaggcctgatagccatggtttctgttcaagggagtctcacagcccaaaacacctggaatgactaagtgatctgaatgcagatagcttgagtctagcctaac

SEQ ID NO: 482952 - DNA, 122 bp, Homo sapiens
ctgggtcaggaatctggacacagctcagctaggtcctgtgctcagggattcacagtgctacagcctagttgtggaaggttgtattctcatctggaaggtcaactggggaaagagctgcttca

SEQ ID NO: 482953 - DNA, 122 bp, Homo sapiens
gtgaaggagtttgtggagttttagcacggcaccctgtgatcacctctccacaagcatttacacctttctctgtatgggcatcagatgagattgataactgagctggggaaattgggagggaa

SEQ ID NO: 482954 - DNA, 122 bp, Homo sapiens
catgatgttactagccacctcttttagatggatttgtaatgagttatacatccatatctacagccaatccatgaaagaatgacaaaccacaggtcacttatggtaaggcagggagctgatgt

SEQ ID NO: 482955 - DNA, 122 bp, Homo sapiens
aggtgcttctgttttccctaacaaatccatccctctagaatattaagtggaaggatattacaagagtatgcaacaagtgacccacttacccagattgaaactcaaggaactgaaccagagat

SEQ ID NO: 482956 - DNA, 122 bp, Homo sapiens
cagagtgctgcgctagcagtgagcaatactctgtgggcatgggacctgccgagccaggtacaggagggaatctcctcatttgctggttgcaaagaccatgggaaaagcccagtatttgggca

SEQ ID NO: 482957 - DNA, 122 bp, Homo sapiens
ttaataatttttatttcagtcttcataccaaatttataagtagtttatgatccatgtttacagtattagaatattgtgggtttgtctttataattactggtaccagcagtgagttttatatc

SEQ ID NO: 482958 - DNA, 122 bp, Homo sapiens
ttattcttgattggttatgttagcatgtttagaatgctatgttatgtaggttattatctacagtacttcattagttatttctttattggggttaaagttggcctgaatttattatatttgat

SEQ ID NO: 482959 - DNA, 122 bp, Homo sapiens
tgagctattgcccattttttcatactaagattctgcaggctgctgttgattttatatttacagcacatcctaacttagactagctgtgggtaattgctaccatacagaatggtgggtctaga

SEQ ID NO: 482960 - DNA, 122 bp, Homo sapiens
gccttttggaagtgaaatgattactagtgaagaaaaagaaagaacctaacacttattttacagtaagtagcaagttgatctccattagggtcaaccctctggggtgctctggcccttccctt

SEQ ID NO: 482961 - DNA, 122 bp, Homo sapiens
aacttctcttaaaaggcaaacttgtctcccatttgtatgtgacctccatgttaattactacagcaccaggaagtttaaaaaacattaagggaaggaaaactaattctgtcatttttacaatc

SEQ ID NO: 482962 - DNA, 122 bp, Homo sapiens
tcagttaaactaggctgtcactgtgttgttgttttatttgatgagatcccactaagactacagcatctcactgtgtgagagccaagagctgacagggagtgtgcaatctcttctgtaatgct

SEQ ID NO: 482963 - DNA, 122 bp, Homo sapiens
gtaaagaaagagaacagacgtatctgtgtggtaatccagagaattcttctagatcttgtacaagaccttcaaggtggtacctctatgagtctccaggaactacagtgttactggggttgggg

SEQ ID NO: 482964 - DNA, 122 bp, Homo sapiens
actacaataaccagtgtagagaaatccttaaatgacctgatggagctgaaaaccatgggacaagaactatgtgatgcatgcacaagcctcagtagtggattcaatcaactggaagaaagcat

SEQ ID NO: 482965 - DNA, 122 bp, Homo sapiens
gcgaatgggtctacccactcacctagacccgttgtagatttttttctacgctaagacttacagtcaagtgtctaaccatggaacaaaacttcccttggtgctgagggcagctggtctgtctt

SEQ ID NO: 482966 - DNA, 122 bp, Homo sapiens
tagtgacatcttcaattaccaatctacaaaaatcccatgcatgaccatgtttttagattacaggagccactgaagccaatttctatctgtcataggatttgggaagctgccaatgtcaccta

SEQ ID NO: 482967 - DNA, 122 bp, Homo sapiens
gagaatgaacactgtctagaaataatttataggcattaactgatctacaatagatagaaacaagactataccatcctgggcaaactagggtaagtgttcccctacagaaaatcctgggtgct

SEQ ID NO: 482968 - DNA, 122 bp, Homo sapiens
ccctggaactgcttcaaaagagctcacagagaagtcttcattcaacatttattacatttacagcatttacagagaaggcacttgggccaggcactgtatgtagagctacaaaaataaatatg

SEQ ID NO: 482969 - DNA, 122 bp, Homo sapiens
ctatggttggacagggttggtttcagggtctgtgagtgggtggggctgcttctggatccacaggcaacaggcctgctacagctagtacagctggttaaggctcctgctgtgtctgtgggaag

SEQ ID NO: 482970 - DNA, 122 bp, Homo sapiens
atctctgcctcccaggttcaggccatcctcccaccccagcctcctaagtatctgggactacagcacatgccaccatgcccagctaatgtttaaattttttatagagaaggggtcttgccatg

SEQ ID NO: 482971 - DNA, 122 bp, Homo sapiens
tgactgtgccgtgtggcttcattccttcctaagctggttggggcacatggatgcctattacagcattctgtactgtgacttatagctttcaatatgtcttaaaatatttgaaaataaaatgc

SEQ ID NO: 482972 - DNA, 122 bp, Homo sapiens
taaatgcctaccatatgcttgacattgtgctaggtcccaggaatatatagctatagcttacagtcaatgtcccaatggctcatggggcaatcaacacattgctttaatgggaagagacagct

SEQ ID NO: 482973 - DNA, 122 bp, Homo sapiens
cccagactcaccgggtcccgtatgctgacatcacagagaaagggcagggcagggcatctacagcctatgactgcttgacatttcagtttggaaaatgcactggtagaaaaggaaaactaacc

SEQ ID NO: 482974 - DNA, 122 bp, Homo sapiens
cagggggtgcggccaagtcaggaagaaccaggggactcctcagagctctgaagcccattacagctctagcataccaagaagtattaacaaaaccaaggcagtatctgaactacagtttccca

SEQ ID NO: 482975 - DNA, 122 bp, Homo sapiens
agtaaggcttgtcatattgattttcctttattaattttctttttaactccacaatgtttacagccctgttgattttgatttacaggagacagtagaagaatcccaggggcaggagccatgtt

SEQ ID NO: 482976 - DNA, 122 bp, Homo sapiens
ggaatgccttgctaggcctaagctccaccccaaatcccacacagtcccatgttgggcttacagtttgcaaaatgcttattgttttatccacatcagctctgaaaagtaggtattaacctcaa

SEQ ID NO: 482977 - DNA, 122 bp, Homo sapiens
tggtggactcagtcctccctgcaattcagtgaggtgtgtggaattctgagctccactttacaggtgaggatgtggaggcttggagaagttcagcagctttccagcaccaatcgccaaggggc

SEQ ID NO: 482978 - DNA, 122 bp, Homo sapiens
tagggcctctaaaataaaactcatctccaaacttactttactaatagattctcaggactacaccttgacatagggtaagttgtgactgatgattctctcactggattcaacttgactgaagg

SEQ ID NO: 482979 - DNA, 122 bp, Homo sapiens
tctacaacagggaatgatgataataataatacttccttgagaaggttctttaaaaaattacaagacttaacacatggaaagaagcctttaaacagtgtcaggcacagagtaagtgctgaata

SEQ ID NO: 482980 - DNA, 122 bp, Homo sapiens
catcacagctgggaatgtgctgggtcatatctgagccagcatgactctaagtctcactcacagcctgtggcaagtactgcctgggtacttctgatggtttttcaaggcctaagggttctaca

SEQ ID NO: 482981 - DNA, 122 bp, Homo sapiens
aaacttcattagagagctggggcagccgatgggaagttacaaaagaagtaccagttttcacagtacactgtgttgggtgtgggtaaggggaaataatgatattgctgatcaaagcagtagaa

SEQ ID NO: 482982 - DNA, 122 bp, Homo sapiens
agagcagtcctctcccacgcagctcttggaggcgtgttcttttcaaggtgacttggactacagcacaaagccctctgtcctgagttcagtgtctgcagtgatgaggatggcatgaccaggaa

SEQ ID NO: 482983 - DNA, 122 bp, Homo sapiens
ggtgagggccttcttgctgcatcataacatggtggagggcatcacatggcaaaagggtaacagcaagagagcaagagagaactcacttttataagacatccaccaccaaaacaacaaaccca

SEQ ID NO: 482984 - DNA, 122 bp, Homo sapiens
actctgaaatttttaaagtggacttcctccagaaaggaaagtctgtgttgtctacttttacagtacttccattttgaagcacatgggccatgcttattttatgggtctgttgtgttatcttt

SEQ ID NO: 482985 - DNA, 122 bp, Homo sapiens
aagttaacttttgtcaactccaattttgtattgttctccattgagattttagtttatagacagcagccctggtggatttaaccaatttgcctataattcaattatataaatatttttatgtg

SEQ ID NO: 482986 - DNA, 122 bp, Homo sapiens
tacacagagacatcaattccatcagtgacattcttccaactgctacttcttgaatgcctacaagacacaagtccagattcagaaatgggggcccagcaatgagtgaaatgcagcatcttacc

SEQ ID NO: 482987 - DNA, 122 bp, Homo sapiens
agtaggagagagagagagatgaggctcaattctgaatacagcaaggaaaattagcagttacagccaaagagtagggtgagggtcaatggattgaaaattactaacaggaaaattcagggaca

SEQ ID NO: 482988 - DNA, 122 bp, Homo sapiens
aggaaggtgcaggtcaaccagtgcactgagctgatggcattcccactgaatttgacagaacagtaacaacaggagtcaattttaatgagactggtgctccttgggaaggacatatgccataa

SEQ ID NO: 482989 - DNA, 122 bp, Homo sapiens
gaccctgcgtttgatagacttattgtccaatcaaaggcgatgctggatgtggaagagttacagcacagagctgcagaaggggacatgtgctacctgggcaaaagaagaaatattgtatttct

SEQ ID NO: 482990 - DNA, 122 bp, Homo sapiens
gtgtcgggagaacaacatattgtatgtgggagggtgcattgcaatgagtgcatgaaattacagtacaaaggatcaaagagaaaaattgcctttagaatgacaggctttccttcacggagaag

SEQ ID NO: 482991 - DNA, 122 bp, Homo sapiens
attggatctgtttatgtgatggattacatttactgatttgcatatgttaaaccagccttgcatcccagagatgaagccaacttgatcattgtggataagctttttaatgtgctgctggattc

SEQ ID NO: 482992 - DNA, 122 bp, Homo sapiens
cagctcccctggcaggtgccactgtgaagtttatccctcctgaaaggacccagactgatacagtcttcaaaatgctggtttcagtactaggctagaattacttttttattctagtaatttca

SEQ ID NO: 482993 - DNA, 122 bp, Homo sapiens
aagagcctaagcacaaattttggaggaagtccttggtctgaaccccagctccagcatttacaattagtagctgtgtgactttgggccaattaactgtcccttctgtacctcagttatctgga

SEQ ID NO: 482994 - DNA, 122 bp, Homo sapiens
ggtcttgaactcctggttcagactatcttcctgccttggcctcccaaagtgctgggattacaggcatgagtcactgctcctggccatgtttttaaactgttagaagaatctcactgtcatta

SEQ ID NO: 482995 - DNA, 122 bp, Homo sapiens
taatgccagcactttgggaggttgaggcaagaggatcacttgaagccaggaattcaagaccagcctgggaaacatagggagaccctgtctgtatgaaaactttaaaaaattagtcaagaatg

SEQ ID NO: 482996 - DNA, 122 bp, Homo sapiens
caagaaaacaatttctcctttatgagaaacagaaattgcaaccacatgtgactcaaattacagtcatatcactctcaaggcttaaagagtttgaggggttccaacagcttttaaattatact

SEQ ID NO: 482997 - DNA, 122 bp, Homo sapiens
agtatcagttttctattgccagaatattgtgtaactccaccaccaaagttcaggggcatacagcaatcaacagctgcctggctctttgtcttggggttcagctgatcaaggctgtgtgtggg

SEQ ID NO: 482998 - DNA, 122 bp, Homo sapiens
aacagcaattatattggtggctgtttaccgagcaggagtacgccatgccaggcacgtttacatatgacatactgctcattcctcatggggagccactggaggcagagagcagttgctccatt

SEQ ID NO: 482999 - DNA, 122 bp, Homo sapiens
tgacctaccaaatgacaaggagtcagctttctaacaatcttggatcagatatacagtaaacagcaagaagactagtgtgatagggtggctcttatatagccctcagtgaccccacctgttgt

SEQ ID NO: 483000 - DNA, 122 bp, Homo sapiens
cggatcatcaaagacaaattgagcatcacttattttaaaaataggctttaaactactctacagctgtgttggaaaatgctaagagtggggcatgaacttctctaatataacaggaatagata

SEQ ID NO: 483001 - DNA, 122 bp, Homo sapiens
acttaaaaacatctgggattcttggaaggtgggaagcagacaggaatagctatagaaaaacagccacagctctgaagcatttgtagaaggctgcctagagagcaggggagccaacttcggag

SEQ ID NO: 483002 - DNA, 122 bp, Homo sapiens
atctcaaactcctgacctcaagtgatccgcctgcctcatcctcccaaagtactgggattacaggcatgagccaccacaacaggctgtgttgcagacattaataaggatacattaccttaacg

SEQ ID NO: 483003 - DNA, 122 bp, Homo sapiens
tcagataataatggaaggctttaaactgaaagttgtgtgaattttgaaggaattctcttacagctttgttacaatcatttgcagtgttcccagtataggccactagagctgtttcatggaaa

SEQ ID NO: 483004 - DNA, 122 bp, Homo sapiens
tgagtgagttcatggtccgtaggaggatgaccactagcccaccaccttccactgtttctacagtcctggccagcaagtttggagttaaggcttcaaaatcctggaagaagggggcgttagaa

SEQ ID NO: 483005 - DNA, 122 bp, Homo sapiens
atcacacacacacacacacacacacacacacacacacacacacacgtgcgcgcgcaaatacaggacttcagctctaaagaatctgtgaagttctgtgtcctctcccagaggcatccctatta

SEQ ID NO: 483006 - DNA, 122 bp, Homo sapiens
tctgcaggtttgcaggaagcatggtgctgcctgtttccggtgaggatctcaggaagcttacagtcatggagaaaaccaaagggggagcagacatctcacatggtgagagtaggagcaagtga

SEQ ID NO: 483007 - DNA, 122 bp, Homo sapiens
cagaggatatacatcaaatagctttttctttgtaactaacaactgcaaacaattgatttacaagcatttacttagctcataatctgtggttggccaaatgggactgaagtcagttgaatggt

SEQ ID NO: 483008 - DNA, 122 bp, Homo sapiens
gcttgttactaacacaaagtttaaactcattaaatggtatagcttacatttatatgtttacaatagcttactaatgatagacaaggctggaaatggtcttttgccttttttcattcctttat

SEQ ID NO: 483009 - DNA, 122 bp, Homo sapiens
tagggtggagagatcataagtttaaagtttaagttttgttttgtttgtgtaattagattacagcactgggtatggctagaaagtgcctagtacatgcttggtgcttaatgtctatttaatca

SEQ ID NO: 483010 - DNA, 122 bp, Homo sapiens
tacagattaggggacgggcatgaaatggtacatgtgataaattgggagaaagcaaagttacaggtagccacaagaagcctagtctagtggaatgaagctttaagcaaatctttgtcatggat

SEQ ID NO: 483011 - DNA, 122 bp, Homo sapiens
tgaagaaggaagaagaaatctgtgctggttttgctgtcacacctgaaactgcaagagttacagccacagtgtgtgataagtgcttagtttagatggaaaaggcattaagtttgtgggtggaa

SEQ ID NO: 483012 - DNA, 122 bp, Homo sapiens
taacaggattgttacttggaaaatgattgctcgatgctgtttctttataaaactgaattacaggcagggatagggagctttaataaaaggaagagaggaatcagcagtcatgaactaaatga

SEQ ID NO: 483013 - DNA, 122 bp, Homo sapiens
taactgaggaatgaggactgactcagaaaggggatctgagtggggtaccaacaacatccacagcagcctggtgtgagtgtagctcaaccaggcccaccctggcctgacaggatgacatttat

SEQ ID NO: 483014 - DNA, 122 bp, Homo sapiens
ttccttcttgcatgagtgcagttatgttttccctggtcatgaaaaatactttgtaaactacaagactctctttaagtatcagttgtggctatgaactctagctccagtctctgaatttggga

SEQ ID NO: 483015 - DNA, 122 bp, Homo sapiens
attaacccatttccttctggtctgcaacttagttctggctgatagtccttcacaagtttacagtcaaactagttggctagagctgcagtaattttaaggctgtgctacagcttaataatcca

SEQ ID NO: 483016 - DNA, 122 bp, Homo sapiens
taggttatgaatgaatactgttgttagtccaagctatttgaatgtaaagttaaaattctccagcaatccagaatgacttgtaacccttcagtggaatgggaaatttctggtatgcaaatagg

SEQ ID NO: 483017 - DNA, 122 bp, Homo sapiens
acaatagcataataaaacttaggtgccaccatcctcgtgaaactagatgctagaggactacaatttgaatggtgggacactgagccaatcaaaaggtcaaaggtataggttctgatattata

SEQ ID NO: 483018 - DNA, 122 bp, Homo sapiens
aaagcaggtggaaaagccaagtctacctctgagatcacccacatctctagatctaagctacagttatttgtatccaaaagcactcctaaatgatcaacatcctgtgagcagcactagtttgt

SEQ ID NO: 483019 - DNA, 122 bp, Homo sapiens
tcctggtcttcctggtctcaagtgatccccccacctcagcctcccaaagacctaggattacaggtgtgagccaccatacccagctggagctgaaaaattgctatcacctgatgataccatag

SEQ ID NO: 483020 - DNA, 122 bp, Homo sapiens
ttgtgttgggtttttcttccagtgccctacttgttttgctccaagacagcctgctagcaacagccagttctcccaaattctcagagcttgttatgaaggtgaagttgaaatgatttgatctc

SEQ ID NO: 483021 - DNA, 122 bp, Homo sapiens
tgagtggtgcctgtatcacctgataccatggctccaccagtgtgcaactcatcactctcacagtctaaatcaggaggttggaatcaactacataggcactggagaaatttatttgttcatct

SEQ ID NO: 483022 - DNA, 122 bp, Homo sapiens
taggtaccagcttggccactgggggtagaacaccaagcaaactcttggagcccccgattacagcacttagctcttggaggcatttctggacctgctctgtgcctgagaggagcccgtttccc

SEQ ID NO: 483023 - DNA, 122 bp, Homo sapiens
ctcatttgtatttccagcctgtcatgcagtgttgatgcataacacgctgaagcaataatacagcctggagtcagacttcatggcttctcctggcattggctttttcattgactgggtgtgtg

SEQ ID NO: 483024 - DNA, 122 bp, Homo sapiens
ctccaggtgccggcatcagtgctggggccctgtgaggctgcagctaaaccaggcatactacaggcagcttccactgctagcactggggaacacagtggcatccagaagcttggagatgccag

SEQ ID NO: 483025 - DNA, 122 bp, Homo sapiens
attatggtttttcttttcacttattttatttacgcttatttttattttttttaagttttacaatgagcacacataagggcttcccaccaaagtctgaatgtattcacattgcagaatggtca

SEQ ID NO: 483026 - DNA, 122 bp, Homo sapiens
ttccatatattatttttctctctggagcaacagtgtgggtagaaatccttacctccactacagcaatgagaaactggggctcaaaaagaggtcataatgacctgcccatggccaagttaaaa

SEQ ID NO: 483027 - DNA, 122 bp, Homo sapiens
atgtagtccagtgaaatattacagggttggtactacacttagcatccaaagctgcttgtacagtcaagaagaaggatctatgcagggctgagaaaattattaacctttacaagaaataattt

SEQ ID NO: 483028 - DNA, 122 bp, Homo sapiens
taaataagcctcaatgtccagtgataattttatccacaaaatggataatacacatgtgaacagtaacatagctatcatttactgagtacttactatgtgtgacagtattctaagacatttac

SEQ ID NO: 483029 - DNA, 122 bp, Homo sapiens
gagcccctcccacttgggattctgtattcctttaggctgaaatccctagccctttgactacagtctgactgcttcaaaacttgcaaagttcaattatgagtttatcattaagtggcaccttt

SEQ ID NO: 483030 - DNA, 122 bp, Homo sapiens
ctgaggctcaatacttctgaattccgtgttcaggcctcagacttttctcagaggcccttacagcaactagcattcttctgacacaaaatgtgaaggacacaaaatgggggcaccattttgaa

SEQ ID NO: 483031 - DNA, 122 bp, Homo sapiens
cataataagaccatgttagctagaattccgtcttaacccagctgctggattctatatttacagcccctactgcctagctggatttgtgccaaactttctgtagaacattataaatttggagg

SEQ ID NO: 483032 - DNA, 122 bp, Homo sapiens
ggagcaactatgaaataaagcagactgtggtaggtcacttaagtctacataacattcttacagctgccctcaagctaattaatatggtcaagatgatactaaacattctggaaaggtaattc

SEQ ID NO: 483033 - DNA, 122 bp, Homo sapiens
acctgggctcaatcctgtgggtgctttacatgtaagcaaatgcctgctgcttggtttttacagtaatgcacaggatgaaatctggttgccattatgcttgctatatgatctttttgtggctt

SEQ ID NO: 483034 - DNA, 122 bp, Homo sapiens
tgatctgtagcaggggacagcaaactgtcaagagccagacagtaactattttaggctctacaggccatgaggtctctgttgcaataattcaactctgccactgtagcatgaaagcaatcata

SEQ ID NO: 483035 - DNA, 122 bp, Homo sapiens
tctgcaggctgtacaggaagcacagtgatatcatcctctgggaaggcctcagggagcttacaatcatggtggaagccaatggggaagtgaggcatcttacatgacaggagcaggaggaagag

SEQ ID NO: 483036 - DNA, 122 bp, Homo sapiens
aagaggctgcagtgaaacttctcaggcaggactgacagcaccctggtgaggagactactacaccactgaccatgtggccttgggcaagtcacttagaatggtgatggtgttgataatagaga

SEQ ID NO: 483037 - DNA, 122 bp, Homo sapiens
gatacagccaaaatcatgtggcaaggacacacagggaaacaaacttagaaagcccagttacagtcatgagggatgatgtgggatgacagcagaaatgctcataactgctgaagccagatcat

SEQ ID NO: 483038 - DNA, 122 bp, Homo sapiens
tgcccaggcttacatgcatcagtgcatttaaccttcataacaagtctaatcccaattttacagtacaggaagctaagactcacatgggttaagttgcttgtctaagttcatataacaggtat

SEQ ID NO: 483039 - DNA, 122 bp, Homo sapiens
tggtctcaaactcctggcttcaagttatctttccgccccagcttctcagtgttgggattacaggaatgagccactgaacctagctcccccagagatcttgaccaggaaggtccaagttgcgc

SEQ ID NO: 483040 - DNA, 122 bp, Homo sapiens
tgcacatgcatgtgtctttatggtagaatgaggcaattttgcatacatggggttgtactacacttgctggcttgcacacttggtttttattcaagaatatattgttgttgtctcttcatgtc

SEQ ID NO: 483041 - DNA, 122 bp, Homo sapiens
tataggtacatataggcatgtatgtctatctgtgcaagtgcagatgtatgagagtttttacatacacagacacaagtgtgtcaacttatatgtgtatgtgaaaaatatgtgagcaattttgt

SEQ ID NO: 483042 - DNA, 122 bp, Homo sapiens
gacatcaggccccccatgtccattatgcccgcctaaaaactctacgtagcttagaggctacagactctgcctttgataaccctgattactggcatagcaggcttttccccaaggctaatgcc

SEQ ID NO: 483043 - DNA, 122 bp, Homo sapiens
gtgcctggtttcctgcctggccatggcagaaatctgctaaatatttgaagaatgaatttacagtacctgcaactctaggctctcagtgtgtggtttcctgatgagaaaggaggcactctcat

SEQ ID NO: 483044 - DNA, 122 bp, Homo sapiens
tcttttgcgtcctatgttagaaccccactttggagacattgctccaccaatactggtttacagtctgtattctgtagactcaccccaggtattccagaagtgtatttcaggggtaggattag

SEQ ID NO: 483045 - DNA, 122 bp, Homo sapiens
gtggagtttgtgaaatataaacaaacaatggccaaagaaaattatcaaagtaactaactacagtcacagggctagagaggggtctatggaacaattatggcctgtgccacaagaggcagtgc

SEQ ID NO: 483046 - DNA, 122 bp, Homo sapiens
atactcttttgcccaatgatttttttaaatttatttcttttcaggaatcctcctcaattacaagggtaggtgcttgacaaggacactgcaaacatctgtacagtgtatgacctgcagaacca

SEQ ID NO: 483047 - DNA, 122 bp, Homo sapiens
gaaaagtcaaacaggatgaactgagaggcccctgaaggtcatgctccattaaagaacttacaatcaaacacaccaaaacttaggagcatggagtccagcagatctggatttgagtattgaat

SEQ ID NO: 483048 - DNA, 122 bp, Homo sapiens
tagcctcccccctcgttgatggacatttgtaatggtttcaaattcaagtttgtattattacaaacaatacaaacttctctagtaaaatgtgcctcttagaagcctttgctcagatgtcacct

SEQ ID NO: 483049 - DNA, 122 bp, Homo sapiens
tgtggataggcagtctaattttgtttttttatgatatgaacttatccaatattgaatttacaggcattaaaaaaatcaggttttattctgcaaactgttggtggcatgttaaatgttttgtt

SEQ ID NO: 483050 - DNA, 122 bp, Homo sapiens
ttctcgaactcctgacctcaagtgatccacccgcctcggtctcccaaagtgctgggattacaggcctaagttttaaatttaaatatgatgcagtgatctcaatggggaaggaactccatgtt

SEQ ID NO: 483051 - DNA, 122 bp, Homo sapiens
acgtccacgctttgaggatttgtcttttccctgcaaccccagcgccgccgacattcattacaggcccaggactgtaactttgtcagaaacaaaccaggcccaacactctgtgtttagaaaga

SEQ ID NO: 483052 - DNA, 122 bp, Homo sapiens
gcttgggctgttgtgtttccattttctgtgggaaatgtctgaaatgtacattgcaccttacagatcatcagaaagatctcagctggcctttgggaggcagaaggaccctaaggggcgagggg

SEQ ID NO: 483053 - DNA, 122 bp, Homo sapiens
gggggcgggtaggaggtgcagtagaggtacttgggggctccacatgtgcccaacttcttacagcaagagccagggcaaaaagatggactgacagaaagtgagatggagcattagctttatgg

SEQ ID NO: 483054 - DNA, 122 bp, Homo sapiens
aggttatatggttgttacctgctttgaaagctgaagattcactctgctcacattcacctacagcctggatagtcttttggagaatggtgacctgaagaagcaaaaactggtattgaagtagc

SEQ ID NO: 483055 - DNA, 122 bp, Homo sapiens
ttgtctgatgaaattggagagaaacatgaggtggaatactttccttagaaaggtaacctacagcacatgcagaagagtacactgggctcagcaaaactctctgtggggatgagggtctgatt

SEQ ID NO: 483056 - DNA, 122 bp, Homo sapiens
agtataggtcaagctaagctctttcaaggttatcaagcactatgtgtaaggacagtgatacacttactgcattcctccacataatctggaattggagtctgctgcatgtgtttagaacttca

SEQ ID NO: 483057 - DNA, 122 bp, Homo sapiens
ggaatctttacccaacgcctagaccaccactgtatcttggaagtaaacgacgtgattttacaggctcataggtagaaggaacttatctgcaaatgagacttagagcttgggacttgagacgt

SEQ ID NO: 483058 - DNA, 122 bp, Homo sapiens
ctacgtccgtcccacatgcagaagactggaaaaggccatttaaggaagaaccactttgaacagcaggtattttagaagggaagtctaccaggcacagtggctcatgtgctttgggatgccga

SEQ ID NO: 483059 - DNA, 122 bp, Homo sapiens
ggggagggggtagatacttgtgaaatcctttgagggtgttcagtgaagggcaattacttacagcatatacttggtgcactgacacccagcagtgatgatggttttgctttctgttttttttt

SEQ ID NO: 483060 - DNA, 122 bp, Homo sapiens
gcatagagccaagagggaaaatcactggagctagtggtgagtttttcaatgtgttggttacaggttctagacaaagaataagaaagtgtgaaaactgccctaggagcctctgtatttctcac

SEQ ID NO: 483061 - DNA, 122 bp, Homo sapiens
cagtaaccacctcactacatcctagccatcctgcaaacttccaacagcctaatcaacctacagtcacaagttcctgggatgtagaaggggttggtaagtatttaaaggcagtggggtggctc

SEQ ID NO: 483062 - DNA, 122 bp, Homo sapiens
ggtctcaaacttctgatctcagatgatccaccaccttggcctcccaaattgctaggattacaggcatgagccactctgcctgggcagtaattttaatttttaaaaagtagagttacatacct

SEQ ID NO: 483063 - DNA, 122 bp, Homo sapiens
atgtgatgggaatcaccacccctgggtctttcaagtctttgatggtggcgctaatctctacagcccctccagggatgaaatattgtttttgatttactgtttttctaggtagaggcagctct

SEQ ID NO: 483064 - DNA, 122 bp, Homo sapiens
atcctggacaatggcagcttgtaactattgtaacaggagattgaatggcaagtttggctacagcacctagtcacaggaaatgctgcattccaaaggtgttggactctgcagaattgatggag

SEQ ID NO: 483065 - DNA, 122 bp, Homo sapiens
tattgcttctgtaataaattacctcaaacttagtgacttaaaacacaaacgtttatcttacagtcctggaggtcagaagttcatcagggttctcactgggctaaaattccaggtgccagaga

SEQ ID NO: 483066 - DNA, 122 bp, Homo sapiens
cccgccatgtcctcatacacctgcctctccttgacttcattcttcatgctccatcagcaacagccctctgtcaataatgattgtcccagggaagtgtattcaagggtcacataaaatgtgcc

SEQ ID NO: 483067 - DNA, 122 bp, Homo sapiens
ctacctggcatttttttccaaagtctgtctcatctgcattaaaaatctattgtttagttacagccactttcatcagtacttttaggtagatctggataacttgctgctgcttctccatcagc

SEQ ID NO: 483068 - DNA, 122 bp, Homo sapiens
atacattgttttaattataagtacaaactcatgatgtagatattttaagtaccccatttacagctgtagaaactaagaacagagacagcaaataaatttgccagtgacacaatggggctgga

SEQ ID NO: 483069 - DNA, 122 bp, Homo sapiens
tatctgcttcgaaagatttcatgtactcacagaaggtacacacaagtaaatatttaattacaatacccaactatggttggcaaactaaaggctggccacagacatctatgtactaatatctg

SEQ ID NO: 483070 - DNA, 122 bp, Homo sapiens
ttaagtttatcccgagtgtaaagtatgaatagtaggtggttagggggtattttggacttacagtaccctttgccagcagtggtttgaagattcttgatgctgctgctatgtgcttttatccc

SEQ ID NO: 483071 - DNA, 122 bp, Homo sapiens
ttccctcctgaactctgcttccctgcaggcttaacattatgtggaagctgccaaaacttacagcttgcatttgccaaagtagcagcttaagctgtacctgggcccctttgagtaacagctgg

SEQ ID NO: 483072 - DNA, 122 bp, Homo sapiens
aaacagacacataggccaatggaatggaacagaaaacccagaaatacatccaagaatttacagtcaattgatttttttttacaaaggtgccaagaacacacattggggaaaggataatttct

SEQ ID NO: 483073 - DNA, 122 bp, Homo sapiens
tgaattataaaaatagagaatcatggctcctaaatcaattttcaaacttgaaccagtttacaggcccagaaccttaaataaaggggaggctgggtccccttgaggaaggacccaattacact

SEQ ID NO: 483074 - DNA, 122 bp, Homo sapiens
gaaatatcaagtagtcaggtagacataggggtcttcaattcaatggaggtgttcaagttacaccacatgggtggcatttaaatatttcaggctgggtgaagttaagaaagaaaattaaccta

SEQ ID NO: 483075 - DNA, 122 bp, Homo sapiens
gagtaacttatgtagtccacatagccaataagcattatatctcctctatagccctaattacagcaagttgaaattactcaatttgttggttgaataaatagatgccattactatgctgtggc

SEQ ID NO: 483076 - DNA, 122 bp, Homo sapiens
acacctcttccacgtttagatttgttacttacataaatactactgtgttaaaactgcctacagtactcactaaagtaacatgctgtgtgggtttgtaaattaagagcaacaggctatgctgt

SEQ ID NO: 483077 - DNA, 122 bp, Homo sapiens
gtgctgattggtgtgtttacaaaccttgagctagatacagagtgccgattggtgtatttacaatccctgagctagacataaaggttctccacagccccagcagagcagctagatacagagct

SEQ ID NO: 483078 - DNA, 122 bp, Homo sapiens
acctctgcttcctgggttcaagcaattctcctgcctcagcctcccaagtagctgggattacaggcatgagccattgcacccagccataaatatttttaaaaaccactgagacacatagttaa

SEQ ID NO: 483079 - DNA, 122 bp, Homo sapiens
gaagggatgggataacgagagtgagaagaccagtggatttggtggggccaccaacatttacagcatcagtagaaagacagaaacccatgatggaaatggagaatggtaaaggactatgagga

SEQ ID NO: 483080 - DNA, 122 bp, Homo sapiens
cagggacaatatgagtcagtgccatcttggcagctctcacaatcctgggaagaagtattacagtagccagcaggagagatttgcttgttaggcctccctcctggaatcaggtgctagctctg

SEQ ID NO: 483081 - DNA, 122 bp, Homo sapiens
ttattttcagtctcactcattctgtacctcaaatccagtaagtcaggagttggcaagctacagcctgtgggccagatctgccccaccacctgtttttatatggctcaagagctaagaatggg

SEQ ID NO: 483082 - DNA, 122 bp, Homo sapiens
gcatctgccttgtactaagtggttattcactaataattgtcatccttgccttattttttacagtcaactctctattttgggggtgctaatggtggtttggaacttaaccctgttcagggcct

SEQ ID NO: 483083 - DNA, 122 bp, Homo sapiens
cagaagaaacgtcaaagcagcaaagcattcaggaggtgcctggctgtttctgaaagtttacagtcatatgcattcacaaagagatggtctgaaattggaacttatgttgaaaagggaagcag

SEQ ID NO: 483084 - DNA, 122 bp, Homo sapiens
caatatgggctttcagacttcaggattcaacatgcccgttaatacaaaccagaacttctacagtagtccaagcacagttggagtgaccaagatgactctgggaacacctcccactttgccaa

SEQ ID NO: 483085 - DNA, 122 bp, Homo sapiens
gctctgcagttcagtttaccctaattctacaaaagctgcctaagccatctatgaaatccacagtacctccacagttcatgatttttctgacagcagttgtggttaaaatttgtctgcttctt

SEQ ID NO: 483086 - DNA, 122 bp, Homo sapiens
agactgtggttcttatgcctctagtagccatagacttgaatcttggtacataaccacttacaagctgagtggtcatgggcaatttatcagatttttatggatctctgtttccattgttaatc

SEQ ID NO: 483087 - DNA, 122 bp, Homo sapiens
aaaaaaaaaagaaaaaagaaaaaatgcaaattggaaaaataatccagtgttacaactatacagcatttacattgtgttaggtattataagagatctagaaatgatttaaagtatgtggaagg

SEQ ID NO: 483088 - DNA, 122 bp, Homo sapiens
taccataaacccggaatcgtcagggcgaatatgtgtaagagtaccatatgcaatatattacagtccttttgtcaacagaacaacctcctgattgtttccagggagtgatggaaccttagaca

SEQ ID NO: 483089 - DNA, 122 bp, Homo sapiens
tggcagcagcgaccctagggatatcgaccaggacaaccgaagcacgtcccccagtatctacagccctggaagtgtggagaatgactctgactcatcttctggcctgtcccagggcccagccc

SEQ ID NO: 483090 - DNA, 122 bp, Homo sapiens
aaagcactaagaatagccatggcacagtaaatgctcaataaatgttaattattattatttcagcaggcaagttattagtcaaaaaggcttccattttgctcccagattctttacaccttttc

SEQ ID NO: 483091 - DNA, 122 bp, Homo sapiens
aagttgtatcatgtgaaactcatcagctcttctcagcaattaacgtctggattttgattacaggtgcagtctttgcaagccacatttggaacttttgagtccatcttgagaagctcccaaca

SEQ ID NO: 483092 - DNA, 122 bp, Homo sapiens
tacaggatattttgttcttccttattacttccttgggatgtaattcctgaagtggaattacaggaccagagggcctatccctgttttatccagtagaactttctgcactgatggtaatgttc

SEQ ID NO: 483093 - DNA, 122 bp, Homo sapiens
ttggagtccaggacaaatgtgtggcccggaaagataaagggaaagacagtacctggcctacagaccatcctggctaactcaggcacacaccctctgtcctggttgcctgtggctgctgtgac

SEQ ID NO: 483094 - DNA, 122 bp, Homo sapiens
tcttcattttcaaagttgtttttgctattctgacttccttgcatttccatgtgaactttacagtcagctgttgatttctataaaaaagcctactgggagttttgactggggttgttttagag

SEQ ID NO: 483095 - DNA, 122 bp, Homo sapiens
acgcatgtacatttattttatactttgggttataatctatttttcttgctcaaattgttacagctttggtcactgggaggttcttcagattggctcctgtgtcatttgacatgtccccaccc

SEQ ID NO: 483096 - DNA, 122 bp, Homo sapiens
tatgtaggtgaagcctccttgaaaactgagtccacatctagctcttctacctccccattacagcaccttgcccagagtagctgcttagcaaatacttatcaaaaagctattttgattcattt

SEQ ID NO: 483097 - DNA, 122 bp, Homo sapiens
gggccacaggttctcccaaatggctagaggccagtgcaaagaggaccctgattagttttacagtttagtgttcacaagatacaaactgaccaaacagagtcagagaaatatctatttttagt

SEQ ID NO: 483098 - DNA, 122 bp, Homo sapiens
aggaaggttcgggtggtatttgcagatgtgttgacgttttgcccctgccagggtggaagacagcacctttgaagggctctccttggacctcagtcccacagccagaaatttgacatcatgtt

SEQ ID NO: 483099 - DNA, 122 bp, Homo sapiens
acttcagagaaaataaatatagccaactctgttcatccgtggtgatggaacattcaactacagcactggcagtttgggatctaagaccacccttccagcacttcaaaattctgacttataaa

SEQ ID NO: 483100 - DNA, 122 bp, Homo sapiens
cattattgtaattcaagtcaaatttaaatttccccagtggacctcaaaagatgtcctttacagctggttcacatatcaagacccaaaccagaactgttctatgtctggtgcattatgcctgg

SEQ ID NO: 483101 - DNA, 122 bp, Homo sapiens
aggctgagatacgaggatcccttgatcccaggagttcaagggtgcagtgagttatgattacaccaccacactccagcctgggcaacagccagaccctgtgtcaaaaaggaaaaaaaattaca

SEQ ID NO: 483102 - DNA, 122 bp, Homo sapiens
aacatatctatgagtttccccagctttcggaggatgtcagtatgtatcccctgacccttacagcactctagattctgagggctacaaggaacaaaccttgaaacccatctggtccagcgccc

SEQ ID NO: 483103 - DNA, 122 bp, Homo sapiens
ctaagcataatacatcaattctgtggtacctcagaaggtgaagggtctatgggcaaattacagcagggtaagggggactgatgttttctaagtttttgttttatgaagaaaaattaagccca

SEQ ID NO: 483104 - DNA, 122 bp, Homo sapiens
tcctcctcccaaaagttctgttactcaagtccttgaacatggaggggctcaaaggtgctacagcccatgttaaataatcagtctcaggacttgctggtaatgccacatgttgtgatgtcttt

SEQ ID NO: 483105 - DNA, 122 bp, Homo sapiens
ctccgtataataaaaacttcctgttgatccacaaaatcaacaagattccaatcaaaattacagccacctttaaagaaatatggacaaggtgattttaagattcatatggaaacacaaagggt

SEQ ID NO: 483106 - DNA, 122 bp, Homo sapiens
tgatctgccctaggccctgtttagatacatttagatacatgaatacttaccactgtgttacagtctgctacagtattgagtacagtagcatgctgtgtaggtttgtagcccaggagcaatag

SEQ ID NO: 483107 - DNA, 122 bp, Homo sapiens
tgaagtatttaaatgactctacaaaccagctgaggtatatccaataccaaaccaaaattacagctggtgcttgctacagatgacacaaaactatatgacagacatctaagcccaaagaattt

SEQ ID NO: 483108 - DNA, 122 bp, Homo sapiens
attacaggcatgaaccactgtacccggcctccagatggttttcacagagaaagctatttacagctggtctcaaatttttgggtcataggactcctttacatgcttaattgtatgattccact

SEQ ID NO: 483109 - DNA, 122 bp, Homo sapiens
ccaggctggtcttgacctcaggtgatctgcccgcctcggcctcccaaagtgttgggattacaggcatgagccactgtgcccagcatgaaaggtcattcctatgctgtatttggatttcctga

SEQ ID NO: 483110 - DNA, 122 bp, Homo sapiens
gcgggaggattacttgagctgaggagttcgaggctgcagtgagccatggacacaccactacactccagcctgagtgacagagtgagagtgagacccttactctaaaaaaaataggccaggtg

SEQ ID NO: 483111 - DNA, 122 bp, Homo sapiens
taaagtctatgacttaatcttttgtgacattttatgcatttctctcttgcctccagattacaggaccagataacaaaggaatttacaaaggagacagagaatccagtgggaaatacacattt

SEQ ID NO: 483112 - DNA, 122 bp, Homo sapiens
gtagaaagtaccaaactagaaacaaaaatatttattttctagtttctatttcagcatttacagcttttataactgtgagcaagattctcaacctttctgggcctccatttcctaataatcag

SEQ ID NO: 483113 - DNA, 122 bp, Homo sapiens
tttgttaaatatagttgaacttatccatctttgctcttacaccttccagattttgaatcacaggcttttcccactgcaaggttatagtgtaattcttccatgttcctgtgaggtttttcttc

SEQ ID NO: 483114 - DNA, 122 bp, Homo sapiens
agaatacactggacaaactcccattaacagggaagcttctgtttgcataacgtctgcttccaggagatgagcctgtagcctcttgctcttggccccaatgaactctactcccaagatgggca

SEQ ID NO: 483115 - DNA, 122 bp, Homo sapiens
tgcacaactctgcaaagtgactaaatgtcactgaattgtacacttaatgggtgaattttacagtacataaatcatacttcaataaagttgtttacatgacaaaaagaggctgggtgcagtgg

SEQ ID NO: 483116 - DNA, 122 bp, Homo sapiens
tggcaaagttacatgtccgcagggaacttaattttttttttttcctaattgctaatgctgcagtcaaagctgctaatatcttttgcttaaagcactaatgacctatcataagaaagagttgc

SEQ ID NO: 483117 - DNA, 122 bp, Homo sapiens
gaggctttagaaatcacccagtatgcaattatacccagagaagtggtgtgactttgcctacaagcccatggtcagttaatagaagacctgggcttgaaagcaaggtgtcttgactccgtgtc

SEQ ID NO: 483118 - DNA, 122 bp, Homo sapiens
gtctcaaactcctaggctcaatcagtttacctgcctcagcctcccaaagtgttggcattacaggcatgagctgctatgcccagcccacagcctgattattttaagattcatccgtgctgttg

SEQ ID NO: 483119 - DNA, 122 bp, Homo sapiens
gtctccaactcctgggctcaagcaatcccgccagcttggcttcccaaagcactgggattacaggcatgagccactgtgcccactttaagctgggaactatattggccattttcaaaacccct

SEQ ID NO: 483120 - DNA, 122 bp, Homo sapiens
tgaatgctgttttaactttcacaatcatatcaatgtagatagaaaacaacgcatctattacagcacaagggctgaggggagtgaggagaaacatcaacttgacaaaagtctgatcaagcagc

SEQ ID NO: 483121 - DNA, 122 bp, Homo sapiens
cagattctcctttgatgtcagaggcctcacctacaagtgggccatcctgggatgggtttacagcacctggaggtgacatcaggtgttcctctccagcagttaatgccaacagcacaaagcat

SEQ ID NO: 483122 - DNA, 122 bp, Homo sapiens
gtgtccaaaaacccaatcaactgcacatttaaaaatctgcacttaactatatgtaaattacagtaagtcctcacttaacatcaatggattcctggaaactgtgatggttaagtgaagtaatg

SEQ ID NO: 483123 - DNA, 122 bp, Homo sapiens
ctccagtcacataacacactttgtaagtgtgctttctaaccattatgtaaacagattttacagtcactaatcctgtcatttgtaggaatttactgtcatttttaagtctcaacaacaaaaag

SEQ ID NO: 483124 - DNA, 122 bp, Homo sapiens
tataacaactcaacatcatgaggccagcatgaggatgggagatgggatgagcagtctatacagtcatagtgaaggtagtgattctgaaatagccagaacaagggccagcaaattatggtcca

SEQ ID NO: 483125 - DNA, 122 bp, Homo sapiens
tggcaatagtttgacctcgctgaccccctggaagttttcagaaatcccatccacactttacagacttgtaggaagaataccacttgggtcaaatatgttggtaacatcataaaatgtattct

SEQ ID NO: 483126 - DNA, 122 bp, Homo sapiens
ataccatactatacccaattttagtcaatttgtaaattataaattatattatttgtgctacagtttgtgacatttaaatcttattagaagataagcaccaaacctattaaaataaaaaatag

SEQ ID NO: 483127 - DNA, 122 bp, Homo sapiens
aatccatttctttctggcttttgggacatgtgaaaatagcagttgagtctggattctttacaagcctcaacaggcattgctgagagatgttgagagcagcattggcatccaacaggcctacg

SEQ ID NO: 483128 - DNA, 122 bp, Homo sapiens
aagggttggagtctggtgcctgcagctctcccaggctggtgttgcatgctggtagttctacagttctggaattctggaggcagccctacccctgtggttccactaggcattgctttggtggg

SEQ ID NO: 483129 - DNA, 122 bp, Homo sapiens
taacaattacttgtagagacaaagtgttgctatgttgcccaggctcttgatgtttctttacagccttcactcagtgcttttatggagtccatctctgaagagcagggcttatatttgagttt

SEQ ID NO: 483130 - DNA, 122 bp, Homo sapiens
ataaaaaataaaataacagcagagaagagggattgaaagtatagttggggctgctgactacaattaatgggttgctagggaaggccttactgaaaaatggagttgcctttaactgagattgg

SEQ ID NO: 483131 - DNA, 122 bp, Homo sapiens
ttttgattttaagcatttttatagggtgcagtcaccaaatgaatgaaagaagaggaattacagccagagagagtgtgatgagagagatggactgtgaacctagtacatttgattttaaacat

SEQ ID NO: 483132 - DNA, 122 bp, Homo sapiens
ttgaaggtaatgttgagaatggacaaaaattgagatatgtttatcccagggagctggttacagtacctgtgacctgaatcagtggcagttgtgatcttagatagtggctttgtggatggaca

SEQ ID NO: 483133 - DNA, 122 bp, Homo sapiens
tgtgctgtggaaatggcaatggggtggggtgatggcttccatttctggatatttgatctacaccttgggatttcctgaaagcagagtttgagacaaacatttgtttgaaaacatgattctag

SEQ ID NO: 483134 - DNA, 122 bp, Homo sapiens
cataatgcagaaaacctgaacctaaagaagatcacacatgagatcagcactccagagctacagcattcactatggaggcaccacccatgtgtggctactcaattaaaaatgaaacaaaacta

SEQ ID NO: 483135 - DNA, 122 bp, Homo sapiens
catgaggacagattcctcatgaagggcttggtgttgtccttgagacaatgagtgagttctcactctatgagttcacagagatctggctgttgaatgagtgtggcacctcctccctgtctccc

SEQ ID NO: 483136 - DNA, 122 bp, Homo sapiens
tgcctgctatattagggttttgcgaggaccgatgagattgggacatgaagtacttaactacagtgcctggcacacattgggctgttagggacagagctccaatgctcacatcagtaatagaa

SEQ ID NO: 483137 - DNA, 122 bp, Homo sapiens
tgtggtgacatcacaaaaacttggaggcaccattgaccccgaagcctcaaagtggtgttacagcatgtcacagccctggcttggggagcccttagatctggactcccagaagggccgcagct

SEQ ID NO: 483138 - DNA, 122 bp, Homo sapiens
aggcagagggtgtggcttctcccagggcctgggatcagagaaggcctgagagcagagttacagtctgtgaacaactgttagtgagcactcactggatacaaagccccatgaccctgagagag

SEQ ID NO: 483139 - DNA, 122 bp, Homo sapiens
ctatggagagagactcctgcttgagtaaagcagagagaaaagtaaagggactttgtcttacaccttaggtgccagcaagaccacagtggggtagagcaccaagtgggctattgtggttcctg

SEQ ID NO: 483140 - DNA, 122 bp, Homo sapiens
ctgcatataattatccaattttcccagcaccatttattgaaaagactgtcttccccgttacagttcttggcacctttgtcaaagatgagttggttgtaaacatgtggacttaggtatctggg

SEQ ID NO: 483141 - DNA, 122 bp, Homo sapiens
tatgtacacgtttttgtgtgaccatatgttttcacttctctcgggtgtatatctaaggtacagttgctgggttatatggtagctctgtctttgactttttgaggaactgccaagtggttttg

SEQ ID NO: 483142 - DNA, 122 bp, Homo sapiens
aaggaatgttctctggagaaatctgtatgatagaatagtgaaggtaactggcctgaactacagctcttgagccatctggtttcaccttcagggaggtaagtgcactgagaagtactagctaa

SEQ ID NO: 483143 - DNA, 122 bp, Homo sapiens
aaggaaaaagtggatatttaacaagtattgctgactgaatgaatgaatgaatccataatacagcaactggaagttattggtttgttcagtaaagaatttcagaacaaataatgatctgagat

SEQ ID NO: 483144 - DNA, 122 bp, Homo sapiens
catgctctggaagcccatgggaaatttatggacaccctggttgatttgatttagagactacagaatgtatgggaggaggttgctgcagcttctgcactggccaaatatctcagagacattaa

SEQ ID NO: 483145 - DNA, 122 bp, Homo sapiens
aacgcctgtaggggaaaggaaggaaataggtataggaaaggggcaagacaggttatgctacagttagacaaaggactcaggtgactccatgcaaagaatgaagctgagaaagctcttgagag

SEQ ID NO: 483146 - DNA, 122 bp, Homo sapiens
tatccatggctcatggccacactgtggcctgcagagagacaacactgtgcatttaaactacagccatgagctccaaaacaggcaaaacaggggtgtgatggggatatagatgggatttcagc

SEQ ID NO: 483147 - DNA, 122 bp, Homo sapiens
ttcgcagatagttatgcccaatatgcaggcatcacccaaaagtggacagctgtagcactacagcccctttctaggacatccatgaaggagagcagtgaagggaaatcttcccagggggcaga

SEQ ID NO: 483148 - DNA, 122 bp, Homo sapiens
tatcagtttgacctctgaaggagctggaaactgagtaaataaggtcagccacatgagttacagccatacagagtgacttctgatttaatgactgaagtctggctcttagaatttttgctact

SEQ ID NO: 483149 - DNA, 122 bp, Homo sapiens
tgtaccccttagcaagaactatccctaaagctggtgtcattactgcagaaatgcaagttacagcccttgcagacacacagttcagggcccaagttacacctaagttgctctccttttactaa

SEQ ID NO: 483150 - DNA, 122 bp, Homo sapiens
acatggaggttatacattggtttggccctaaaaggtgagatatctcgaagcagaggtttacaggtgataggtggattcagagattcttcaattcaccattggttaaggaagcaaggctttgt

SEQ ID NO: 483151 - DNA, 122 bp, Homo sapiens
cagctggtccgtcagaatgcaggatctgaaaaatacctcgaacaccaatcttagattttacaatagtgatgttatccagctgggaggttaggaatcttgtggcctctggctgcatgactccc

SEQ ID NO: 483152 - DNA, 122 bp, Homo sapiens
cagcctgtgagaaataaatttctgttgtttataagccatccagtctatggtacttagttacagcagtccaaatggactaagacagcacctctcaattatatccataagtaggagcatactag

SEQ ID NO: 483153 - DNA, 122 bp, Homo sapiens
tagcccataaagcccttcatctcctcaccttcttctcttattcctacctttgtacatgtacagtcatgtgttacttaactttggggatgcattctgagaaaatgcattgttaagtaattttt

SEQ ID NO: 483154 - DNA, 122 bp, Homo sapiens
gtcttgaactcctgacctcaagtgatctgcctgcctcggcctcctaaagtgcaaggattacaggcatgagccatccacaggccaagacaaaggatttgaataggcatttcttcaaagaagac

SEQ ID NO: 483155 - DNA, 122 bp, Homo sapiens
tgtccaagtatgaggaaggccaggccacatggaaaatctatgtgtaggcattcaggccaacagctcaagtaggactccagctggtatcaatcctagacatgtaaatgaagaaatcttcaaga

SEQ ID NO: 483156 - DNA, 122 bp, Homo sapiens
tcacacgaaagggtcatgattgatttgagcaagcagggggtacatgacaggggctgcatgcaccagtggtcagagtggaacagaacagagaagggagtttcacaatgttcttttatacaatg

SEQ ID NO: 483157 - DNA, 122 bp, Homo sapiens
gcatgtaaaaagggcacaatattgtcttaagggaatgtgctacttctccaagagcaattacagcaaatagtatcatgccaacaggagctgttgaaagttatattgttgatctgtggttggag

SEQ ID NO: 483158 - DNA, 122 bp, Homo sapiens
gaaatttaggcagaggtttccaaactttaattcttgacttctgtgcacctgcagggtctacaccacatggaagctgccaaggcttttggcttgcaccctctgaagccatggctcaagctgta

SEQ ID NO: 483159 - DNA, 122 bp, Homo sapiens
ttgtgcccagatgtagaacattcagaatctggagaagtagtgccatctgatttgtggaaacagcctaaaacaacaatactgggacagaggcagatgcaatggccactagtagccagattaga

SEQ ID NO: 483160 - DNA, 122 bp, Homo sapiens
aggggtgagctgaatgacctggtttatctgtgtgaccatggtcttctttcatcccatgtacagtacttgtctgggctcattcactggccatggctttagctccctgttgctaaatatgcagt

SEQ ID NO: 483161 - DNA, 122 bp, Homo sapiens
aacggggtcatggacttggggctgaggaagccctgagaacatatcagtcccaaatagctacagctggtgcaaaaggagactgggcaaagagctgctgcttgactgttaccccgatgctgccc

SEQ ID NO: 483162 - DNA, 122 bp, Homo sapiens
tgagccaccacgcctggccaggagttcactttaatattggtttgtacccaaactactgtacaagctgtgactagattaataattgtctttgagtgcaggagagttattttaaggaggtgaaa

SEQ ID NO: 483163 - DNA, 122 bp, Homo sapiens
gaattgcacttcgtgcagtaagtctgtaggattttctgaaagactgtgcatacttaactacagacatcagagtgtgacttctcatagaaagcagatgcagcactgctttgctggatgaggca

SEQ ID NO: 483164 - DNA, 122 bp, Homo sapiens
gaggttgaggtggttagtggggaagggagaatgaggagatgtcagttacatacatgattacagttaggagaaatttcaagagatccattgtacagcaaggtgattatagttaatgaaaatat

SEQ ID NO: 483165 - DNA, 122 bp, Homo sapiens
agggaatgtggtcagatgagattggagactttagcagggaccagatcttttaggtttttacaggccatagtcaggaatcataattttatcctaagtgtgatggcaagctatgcagagtatat

SEQ ID NO: 483166 - DNA, 122 bp, Homo sapiens
tcactgattggtgcatttacaaaccttgagctagacacagggtgctgactggtgcgtttacaatccctgagctagacacagagtgctgactggtgcatttacaatactctagctcgacatat

SEQ ID NO: 483167 - DNA, 122 bp, Homo sapiens
agccaagagaccatgggacagaactgctgtctcacataccttctgagccctaagtggctacagcaaggcatcattttcaaacctgggctttggcagactgcactgtgtgctggatccaagca

SEQ ID NO: 483168 - DNA, 122 bp, Homo sapiens
gtctccaacttctgagcttaagcgatcattctgtcttggcctcccaaagtgctaggattacaggcatgagccaccaagtactgcttacactgttgttgttgttgtttttttttttaatggca

SEQ ID NO: 483169 - DNA, 122 bp, Homo sapiens
tttcctgggtctctaaagactcaatagctgattatgacactaataccagataggtgtttacagctgtgctgtctggagtccacagcccaagttgtgtgggagaatataggaccaggtccgtt

SEQ ID NO: 483170 - DNA, 122 bp, Homo sapiens
gaacaaggtcttgaaggatattgttccagatatttatttctgtgcgacaaacaaaacttacagccttaaaacactcatcttattttgctcctgatgtgttggtgaggaattcaggaagggct

SEQ ID NO: 483171 - DNA, 122 bp, Homo sapiens
acctgtctagatagcatagggcccggatataggaattcaagagattcaaaaaaaagattacaggccatggtatttgaggcatattgcctaatggtttatttttatgatttgtgtttcctaca

SEQ ID NO: 483172 - DNA, 122 bp, Homo sapiens
tttactttataaaggggaaaaaactgctccacagatctcagatcctatccagaattcttacagctatgttctcttggaaccagatgtaactgagatggagcatatggctagctccatgcaaa

SEQ ID NO: 483173 - DNA, 122 bp, Homo sapiens
acctaaagaaagagatggacagcaatacaataacagtagggaattctaacatcccatttacagcactagacagatcactgagacatgaaattaacaaagaaatactgggctcaggctgggtg

SEQ ID NO: 483174 - DNA, 122 bp, Homo sapiens
catacctttgtccaaacccatagaatgcagaacaccaagaacgagccctaacatgaactacagcctctgtgggtgtgtcagtgtaggttcttggattgtgacaaatgtacttctctggtgag

SEQ ID NO: 483175 - DNA, 122 bp, Homo sapiens
ttaaataaataaaatgttaatataaacatacatgagatcagtgggaacattcttctattacaataggtcaaggaagagaccatagctagggccctgtccagaaaatacctaatttgtaatat

SEQ ID NO: 483176 - DNA, 122 bp, Homo sapiens
agggaagagtgaataaaatcgccagagtagatctcaaaagcttgcttacacttgagactacagtcatgtaccatgtcccctgaaataaagaaagaagggtgtgggaaatgcctagttatggg

SEQ ID NO: 483177 - DNA, 122 bp, Homo sapiens
agactgaagcttaaaaggctacagtcatatttacatattatagcagaaaagctagaactacagcatgcaattcaatgaggtggaagaatggtgaatatgaaaaccatttttctaaacctgca

SEQ ID NO: 483178 - DNA, 122 bp, Homo sapiens
tctgtgagccattctaggaaacgatggaacctgagatgggttctgggaagctctgatttacagccaatcagtcagaggcaccagtgacaacttgggctcatgattggtgtctgaagtgtggg

SEQ ID NO: 483179 - DNA, 122 bp, Homo sapiens
ggggcaggaagtgggcatcagagtcagaggcctggtctttcctccagcacggctcatccacagcacctgtgtgctgctgcctgtctagaggacagccccatcccagtccaagccctttgtgc

SEQ ID NO: 483180 - DNA, 122 bp, Homo sapiens
cagttttaccaagcttttggggtggttacgatgctggtaaaagtttgagaacagctgttacaggcaaatatggaaggctctgtttgtttggtgtgtgctagtctcagatgacaaggtaaatc

SEQ ID NO: 483181 - DNA, 122 bp, Homo sapiens
atgacaaggagggcaaaagattactttctataagaactgaaatgggcacagaatggcttacagttataccatcatcttaactttaagcatttacattcagagaatggttgaaagtaactcat

SEQ ID NO: 483182 - DNA, 122 bp, Homo sapiens
tgtgctggtcagcaccaggtgtcatatccccaaagcagacacaactgaaatgtccaccaacagtcaaatgggccagtcaactgtggtatacctgggatactctatggcaacaagaatgaata

SEQ ID NO: 483183 - DNA, 122 bp, Homo sapiens
gactgttgaaaaagatgaatatattgatcccataccaagacaaggcatagtgaaattttacagtactgaagccaaagagaagacttttaagttgtcagagaaaatgattacctatgaagaat

SEQ ID NO: 483184 - DNA, 122 bp, Homo sapiens
acagaggagcccagaggacgggccaacacattttgcctgggaggctggcagagggctctacaggatgtgatatttacaatgtgcctagaaggacaaataggactatactatgcaggcctggt

SEQ ID NO: 483185 - DNA, 122 bp, Homo sapiens
gatgtctcatcttggaccccactggcgattgtgtgaccttactgtgattgtggtactctacagtatctgctctaaataggggtgctgggcctgaaagaagaggctcagtgtttccatccatg

SEQ ID NO: 483186 - DNA, 122 bp, Homo sapiens
gagactgggtaaatgtgtaaagaaaagaggtttaattggctcatggttctgcaggccgtacaggaagcatactggcttctgctatgcagaggcctcaggaaacttaaaatcatggcagaagg

SEQ ID NO: 483187 - DNA, 122 bp, Homo sapiens
cgagatggagaatgtaagacatgttcaaaagaaaacattttgtctgaattttagaaaatacaggatagtgtagatgcacttggacctggacccagaatacatgggtcctaatcaccactagg

SEQ ID NO: 483188 - DNA, 122 bp, Homo sapiens
taaaacttctaggggtggccatatgggttctgggctaaaaggagcctaatacccttactacagtgactccagtgcaatctcaataaagttcaattgtatcaggccagggactgtggctcaca

SEQ ID NO: 483189 - DNA, 122 bp, Homo sapiens
tcattatctaccttgggctaaggacctcaagatttgggggtacaggatgatggaggacaacagcatcattcctcaatctctgtttacttgtggctgccacagcccatgtttcaatggcttgt

SEQ ID NO: 483190 - DNA, 122 bp, Homo sapiens
atacttactaaagggattgtaaaaaacaccccagcattttaggtgtcttggttccatttacagcactgaggtaatctttctgctgtttgttgtcctgcttggttgagtaccacaattaaaga

SEQ ID NO: 483191 - DNA, 122 bp, Homo sapiens
atttaccaggactttcataaatcatattatttacctgaagcaaatcagaatctatgtttacagctgactgctactctgaaactctggtttggcccatgtgtgtgatgactttaggttggtgt

SEQ ID NO: 483192 - DNA, 122 bp, Homo sapiens
ttgtttagaattttttacttagtttgatttttaaaatgccttctgaatacctattatgtacaagacattggcctagatgctgtggggtcaccaaatacataatctgtaatctccaatacaaa

SEQ ID NO: 483193 - DNA, 122 bp, Homo sapiens
acaaaagaaaagtgatgtacagaaaacagaaggacagtccagaaacaactggattggttacagctcctaacatttgcttgtttgaatatggtttgaacagctggctgcctgtgagtggctga

SEQ ID NO: 483194 - DNA, 122 bp, Homo sapiens
agctttcacttttttgtcatccctctcactttctggcctgtctttacggatgctgtcttacagctgcttatccaaagataagtgggttgtggtgatactgattacagctgcttatcagaaga

SEQ ID NO: 483195 - DNA, 122 bp, Homo sapiens
aggattaaatgctcatgtcctgggtaggatttccaggaactatagctattttccaagatacagcatttcatgaacatactcaatttttccagtgtagagcatactgtgatggttaatattga

SEQ ID NO: 483196 - DNA, 122 bp, Homo sapiens
accccagcctgcacactggtgagtgtgttctggtgcagaagcgacaacaatctccggttacagcagaaagtgacctcctctgttggtttaccaattgccactgtgactgaggaccatggctc

SEQ ID NO: 483197 - DNA, 122 bp, Homo sapiens
gtctcaaattcctgggctcaagtgatccacctgcctcaggctccaaaagtgctgggattacaggcatgagctactgcacccagtctgatttttaatttgaattttttatttggaaataactg

SEQ ID NO: 483198 - DNA, 122 bp, Homo sapiens
ggggtggtctatcatcttcaacacctggctcctcaggttgccttgggtgttgacatcttacaggcaaaaggagttggtgtgggtaagaaaggcatactcactttttaaccatgttgaaaggg

SEQ ID NO: 483199 - DNA, 122 bp, Homo sapiens
cgaggcaaactgtctggcatggagctgaatatggagactcctatctttactcccatattacagtagcagaattggagagataaaatgctcagtgttcttatttaaaattgtacctaccacca

SEQ ID NO: 483200 - DNA, 122 bp, Homo sapiens
gtagttctttaaaaatatctgacactgaagggtattcttccagaatatttttaattcttacagtaagtggctctctttgtcctgactgctcaaatcccatgttttcaggatttatcagtctt

SEQ ID NO: 483201 - DNA, 122 bp, Homo sapiens
aaatggcttcagtaggccagaaaccttggagtcttcttttggtacctgattttaaaattacagcaagcccccttatccaagggagatgtgttcccagaacaccagtggatgcctagagctac

SEQ ID NO: 483202 - DNA, 122 bp, Homo sapiens
actttgacaaaatgtcaaatatctcttatagaatttgtgtatttctctttccccagtctacagttacttaggtgaatgatcacacatttggagaaggaatggagggattattagtgcatata

SEQ ID NO: 483203 - DNA, 122 bp, Homo sapiens
gacacttcaatcagtggcaactctgcatttttctgaggagggaatcctagaaacagcctacaggccctctcccattgcaactgcagtggtaatgaccttattgccctcagtctgggaaagaa

SEQ ID NO: 483204 - DNA, 122 bp, Homo sapiens
aagatagataatacttactttatatgcttattcagaacgtttttactctgactttacttacagcactcaaaagccacatcctagtctaaaacactagtaggtaatggtgtgacattctgatg

SEQ ID NO: 483205 - DNA, 122 bp, Homo sapiens
agaaaaagtgtttgtcttttttagtaaccctgaaggtgactagctgttatttttctcctacagcatgcctaaatcataagaggtgtttgttacatgcttgctgttggcaaatagcatacaca

SEQ ID NO: 483206 - DNA, 122 bp, Homo sapiens
aaggaccataatgcctcacttcttgattggtggttgcttccccgaccacatgcctctaaacagcagtttatatgttttctccagcttgtatagtggattagaacttgatttctaagatgttg

SEQ ID NO: 483207 - DNA, 122 bp, Homo sapiens
tgagtcagtgctgtgggcaccataaatcacagaaagcccagaagacatcgtcatttattacagccccagtcaagtaaaagcccatttacccaggcacattggttccaacagtaagccttttt

SEQ ID NO: 483208 - DNA, 122 bp, Homo sapiens
gtaattagtaaagcctaccttacaaagttaggaagacatacatgtaaaccatttaacatacagtacctcttggccttctattagtaggctacaaaggtaagttttactaatataagcaaccc

SEQ ID NO: 483209 - DNA, 122 bp, Homo sapiens
cttacttgcaggcaaactagagagctgtctatggggcaagacttgaaggggctgagactacagtcctcaggtccatgctgccaatcatgcctgaaattccaccaccaccacaagagatgaac

SEQ ID NO: 483210 - DNA, 122 bp, Homo sapiens
tctgctaaaaaagaaacagcaaaaattaaagaaaacagaaagaaagaaaaagaaaaattacagcagtggtggatgtgaggtcttttcaaatcccttgctcagaactcattaccaatttaccc

SEQ ID NO: 483211 - DNA, 122 bp, Homo sapiens
ggtatataaattatacatcaataagctgttttggaaaaccttaattactcttcagacttacagcttttacaaattttcagcaaaataaaaattgcaatctagggtgctcattttttttaaga

SEQ ID NO: 483212 - DNA, 122 bp, Homo sapiens
tctcaatgctttcgggtcattatactttcctgtgaaagtatgctagctgacatatgcttacaggagtcacagttttcttacaggtttggtttaagtgagagatcaacccagatttttgggac

SEQ ID NO: 483213 - DNA, 122 bp, Homo sapiens
tgagccatttggaaagacccagcaatagctggtcaacgatgaagggggccattctgtttacagcagtagaaggcagggatgagcacagctcctacctctatgtggaggcttcattgcccagc

SEQ ID NO: 483214 - DNA, 122 bp, Homo sapiens
tctccaggaaccccagacactgggggagaagggagttcaagtggggagcattttgccttacaggagccaagaccaggaatgtgaatgaggctggcagccccatccaggatttgcgggttcca

SEQ ID NO: 483215 - DNA, 122 bp, Homo sapiens
gtgggaggagactggttggaaggcggcagcactgagggccgggggtccctacaccgcccacagccacagaccccagcctctagtggaggctgctgccatccccacactgggcctcagggctc

SEQ ID NO: 483216 - DNA, 122 bp, Homo sapiens
ggtaagaggcctgactggctgtcaggctcagttctcgtctggtgcatggcagcagctccacacccaggctttgtccagagcaaaggcagctgatttttttaagtttttttgtttgtttttgt

SEQ ID NO: 483217 - DNA, 122 bp, Homo sapiens
ccaggctggtctcaaactcctaggctcaagcaatcctcccacttcaaagtgctgggattacaggcatgaaccaccacacctggccacatgttgtttgtttgtgtatatgtggtgtttttgtg

SEQ ID NO: 483218 - DNA, 122 bp, Homo sapiens
ggctcgaattcctggtctcaagcaagccctctactcatgcctcctgaatagcccagattacaggcttgcagcaccacacctgactttggtttagaagattttgacatgacccgcttaaagga

SEQ ID NO: 483219 - DNA, 122 bp, Homo sapiens
aggctaaggcaggagtgtcgcttcagcctaggagttggaggctgcagtgagctgtgctcacaccattgcaatccagcctgtgtgacagagtaagactctgtcaaagaaagaaagaaagaaag

SEQ ID NO: 483220 - DNA, 122 bp, Homo sapiens
gactgactgtgtagaatctcaaaggttagataaaatcaattaggggatgaaatggacttacagtcagtaagattagtgaggatacatttcaaggacccatgtttgctaagtaaaggtttcca

SEQ ID NO: 483221 - DNA, 122 bp, Homo sapiens
tctggccctgacataagctgtctggcctctctgtgacatgatgaaattgaaatcaatccacagtccatgaaattgtgacactccaccagattaagttagggcataacattaacttggaaatg

SEQ ID NO: 483222 - DNA, 122 bp, Homo sapiens
ttggaatgtcgtatttgagaagatgcatagaatgcctggtttcaagtgtttctagccttacagtgaaggagtaaaaagttgtcacttcctggcaggcccaggaacctcaagctattagatat

SEQ ID NO: 483223 - DNA, 122 bp, Homo sapiens
tgtagctagaatgagtttggaggaatccaacatgaaggtagcccaatactaggttgcaaacaggctagatgcttttgggtttgtagacatgtttgatttggaactcccagtgttttacatga

SEQ ID NO: 483224 - DNA, 122 bp, Homo sapiens
aacaaagcaagcaagaagatagtggatagcattctaaaagtcctgaaagaaaaagtattacagcacttctctattaattcctgttctgtttcaagtaggctgagacctgtgggtagggcatg

SEQ ID NO: 483225 - DNA, 122 bp, Homo sapiens
gctggatgtgttaaatatcagctgtgtgaccttggccaaattattcaaatgttctggcttcagttcctgtatcaaaaaagtggaatctttcaaatgtcctcacaaggttgtggtaaagctcc

SEQ ID NO: 483226 - DNA, 122 bp, Homo sapiens
gttgctgatactcagaggaaaactggactggacatatggatttttaaacttaaagatccacaagcattatctttgagtgcttactatgtgcttggcaccactgatttacataaaaagtattt

SEQ ID NO: 483227 - DNA, 122 bp, Homo sapiens
gattcagtttagttcagtctccaagggaatacaacctctgtgtggagagctgatcagttacacctacagctgcattggtagcaatcttgtgattccagctgtgggagtggctgcagagtcct

SEQ ID NO: 483228 - DNA, 122 bp, Homo sapiens
acattgaacctgtctgaagacttcagcaagggatcctctaaaaggagtaacagtcatttacagcaagtaaaagatgggtacacagattcaggaataggtttgtactgaaaaatataaaaatt

SEQ ID NO: 483229 - DNA, 122 bp, Homo sapiens
cagccatgtgtaaatcactgaaaggaccttggaaacagtcccttgagtatctacaatctacagtccacatcctctgtgccccttgcttttggggaaggtgaacccccaaaaaagaaagtgtt

SEQ ID NO: 483230 - DNA, 122 bp, Homo sapiens
acaatgaaaatagagagaaagggacacgtatggtaggggtagggtagtcctgtaaatttacaggacttagtgatatcaaggtcagtcactggggagaaggagacaaagctgattcgttgatt

SEQ ID NO: 483231 - DNA, 122 bp, Homo sapiens
gtattaaaatattgtataaggagttgcagagaagtgctgtgacatggatgaaccaaactacaggatgaaaggccaggagagagggtttcctgaatggatcttttgctaatggtgaaaacgga

SEQ ID NO: 483232 - DNA, 122 bp, Homo sapiens
ctgaataggatacgtgatgctgacatttgctcagctcctgaagtggcgtcaggaaacttacaatcaaggcacaaggcaaagggggagcagacacatcacatggttggagcaggagcaagagg

SEQ ID NO: 483233 - DNA, 122 bp, Homo sapiens
atgataagaaacagtatgtttattcagtcttgaaggatctctccacaacttacttatttacagcaaaggggaaaatagtaccttcacagtggcagacaccaccttagcaaagtgagcaaagc

SEQ ID NO: 483234 - DNA, 122 bp, Homo sapiens
taggccaagagaggcgaagaatgatgttctatgcaagggaggacagaagtgcaaacactacaagacacaagatgtcttggcaagttgaaggaacaaaaaggaggacaatgatgtaatcaggc

SEQ ID NO: 483235 - DNA, 122 bp, Homo sapiens
gtgaatggatttggggagggaggatcagactagaggccagaagtccggtgagcaatattacagtagtccaggtgagaggtaataatggcctgcctaacccagggaagcagccacggggatta

SEQ ID NO: 483236 - DNA, 122 bp, Homo sapiens
tgagaaaagctgggttgagaggatgaaaagaaaaaaaaagaaaaatttagtggagtttaacagcagtaaagaagtatccatatgcagcagagagaagcaaagaggaaagaaataggaaagga

SEQ ID NO: 483237 - DNA, 122 bp, Homo sapiens
ggggagtaccgatgtttcctgcctgtcctggacacatttgagcgcatgtaaattgacctacaagcctgtcaggaggtgttttgatccacattttcagaaaagagaactgaagctcagagagg

SEQ ID NO: 483238 - DNA, 122 bp, Homo sapiens
attaatagttccacagcaggtacaaatggggaccatttcaagcaactataccgttacttacaggacccattgagttattttagagtctacagtccagttcctggaggatggatctgaaagtt

SEQ ID NO: 483239 - DNA, 122 bp, Homo sapiens
agtgaggtccacagaagtgaatctgcgtcctttctcattctcttggtgtcttcattgttacaggacttgtgctctgaagtctgatgaacaacatacagcttctatttgttttatttcctggg

SEQ ID NO: 483240 - DNA, 122 bp, Homo sapiens
gaggtgccacacacttttcaatgaccagatctcagggtagcttgctcactatttcaacaacagcaccaaaggtggatggtgttgaaaccatgagaaaccacccctgtgatgcagtcacctcc

SEQ ID NO: 483241 - DNA, 122 bp, Homo sapiens
ttatcctgaattaggagactatatttttaaaaatttaaattagagcagaatattacattacaattctgagtgttagagagtccagaatgcttggggcaaggcctaaggctgtcattacaagg

SEQ ID NO: 483242 - DNA, 122 bp, Homo sapiens
ctgagggtatgaggagggagaagctgtccacagttggttttattgcccttaaaaatcttacaggaattcaatgaatctattcagatgcctcttggctgacagtttggagcactaattcatct

SEQ ID NO: 483243 - DNA, 122 bp, Homo sapiens
ggcaatgaaaactagacaggaagtgcccagataccggaggcactgcagatgcttcatctacaggaaagagcctgaagaggcacattgacacccagggtagactggttgtgtgctgtttcagg

SEQ ID NO: 483244 - DNA, 122 bp, Homo sapiens
atgcagagagcagtggcttgggaaccttaagaactggtttctaatggcaatagtaagaaacagcagttaattgagtgactgaaaagcttcaggatagtatggtatgcttgctatatcttcat

SEQ ID NO: 483245 - DNA, 122 bp, Homo sapiens
ggtctctatttgccctaatcaggcagccttctttctcctagaccaggggttggcaaactacagtctgtgggccaatgtggcctactggttgtttttgtatggactgcaagctaagaacagat

SEQ ID NO: 483246 - DNA, 122 bp, Homo sapiens
aaaaaatgagtagaaaacaaacattgaatttatccactcaaatttgggctttatctattacagtagttagtattactctaatgcattgaagtggagttctgctaaatacatagaattggttt

SEQ ID NO: 483247 - DNA, 122 bp, Homo sapiens
aagtaactcaggaattttaagtgaagtaaccgaaaaccaaatactgtatgttctcatttacaagtaggagctaagccatgggtatgcaaaggcatacaggatgatttagtggcctttggagg

SEQ ID NO: 483248 - DNA, 122 bp, Homo sapiens
cagaagggttacagagcatgtcaccactcgtagcttggcaagccagccaggaacatgttacatccttttaatgcccactgttcagcaggtcctgagttattgttccatgtccaggaagaatg

SEQ ID NO: 483249 - DNA, 122 bp, Homo sapiens
gagggcctagtgctgacaccataatgggctgtcagggactggagccagtctaggggcctacaggcaacatggagttgtggcctcaccagatgtcttcagttgctccaagaccttatttcgat

SEQ ID NO: 483250 - DNA, 122 bp, Homo sapiens
caaagactagaagacttaaaattttattacagaagagtaatagagatggcagggtgattacagccaattctgtggggtgtaggtgtggatttcatgcctgaccaaaagagtaagaattcaga

SEQ ID NO: 483251 - DNA, 122 bp, Homo sapiens
agatggacttggtgccctgcatccaacctgctccagctgtggctaaaaggggccaaagtacagctctggccactgcaatggagggtgaaagcccaatccctggcagcttcctcatggtgttg

SEQ ID NO: 483252 - DNA, 122 bp, Homo sapiens
ggaacatattgttgatggaaagagacatagaaagactttttaaaatgaagatagatattacagcatgtgtgaatgttgactggactgggcagccactaaaatggaaaaaaaaataatgctga

SEQ ID NO: 483253 - DNA, 122 bp, Homo sapiens
ttttttttttcagtagcagtatgtactaagtttgtcaaatctggcatgtgttttacactacagcacatcttaatgtgaactaggcacattttaaatgctcaatagctacatgtggctgccat

SEQ ID NO: 483254 - DNA, 122 bp, Homo sapiens
aaattggctgtgggtgtctcttgaaagagaaatataaccaagttccattcgaattttttacaggctctgacattctgccaccaacacacaggaagcaaacaggtttttttctactggtgttg

SEQ ID NO: 483255 - DNA, 122 bp, Homo sapiens
gtagccttgccaatgagcagagtggcagcttcttggatacacagcaacatttccaagctacaggcagtaagttttctttcaggggtctcagtagactcagggaaaactaaaagaaactctga

SEQ ID NO: 483256 - DNA, 122 bp, Homo sapiens
tgtcaaatacaaagaatacagagaacaagtcattacgcttgataagtcatcagaaagttacaggaggtttccatgaaaggttcagtgttcagtttggagctacagagtaagggattgaggaa

SEQ ID NO: 483257 - DNA, 122 bp, Homo sapiens
aatattgggcatgaggaggagagtggggtagttctgggaagcacagttaccaccagtttacaggatccatgaactgatttgctaacccttgctgactttgctcctgaccatgccttgggaca

SEQ ID NO: 483258 - DNA, 122 bp, Homo sapiens
aaatgacttttttttttttaactttaatctcttacctccaaattccaaaggtacatattacagctcttatgaatgtcctgaagcatgctaggggagttattttgctgccttagcccttggga

SEQ ID NO: 483259 - DNA, 122 bp, Homo sapiens
aaaatctccgggatcctataacagtgcaacttaaattcatttcaagtcaatataaaggtacagctgtctctgctgtaagtccattatgaacaaggggcctgctggaagggccactttacctg

SEQ ID NO: 483260 - DNA, 122 bp, Homo sapiens
tggtctcaaactcctgacctcatgatcggcccacctcggcctcccaaagtgctgggattacaggcatgagccaccacaccttgctgacattaagctttaactcagcctttattagtaatgag

SEQ ID NO: 483261 - DNA, 122 bp, Homo sapiens
atttcctcccaataaaatcctgtcttgtttaaattaattagaacccatctctgttgcttacagccaaagaatctagacacagaaaaccatagatctctattgttggcagggagcttaactgg

SEQ ID NO: 483262 - DNA, 122 bp, Homo sapiens
tgaactccttcctgacctcaaatgatctgcccgacttggcctcccaaagtgctgggattacaggcataagccaccatgcctggctgggattggctttttaaactcagtagaattctgaatgt

SEQ ID NO: 483263 - DNA, 122 bp, Homo sapiens
ctgaatgtgcttagttggaaagatgttcacaatatatcatttagtgaaaaaggcaatttacagtaaaacatatataaaatgatcccatttgggtatgtgtattttatagtgtatatatgtgt

SEQ ID NO: 483264 - DNA, 122 bp, Homo sapiens
ggagatctggatggcgtaggactgaagagttcaagagtctggaaacccgagtttgaattacagctctgccactcacaagctggtgatttttgacaagttcctaaactttggtaaccgctagt

SEQ ID NO: 483265 - DNA, 122 bp, Homo sapiens
tattggtctttttgtctgtttttgttccagtacgatgctgttttggtcactatagccttacagtacagtctgaagtcaattaatgtcatgcctttggctttggtttttttgttttgaattag

SEQ ID NO: 483266 - DNA, 122 bp, Homo sapiens
tcttttatataacataccatttcatatttgtgggcccagagtaaagagctcattctgttacagacactgaatagccttgtttttgtcagtagtcagctctgttttaaaacaattgcttgggt

SEQ ID NO: 483267 - DNA, 122 bp, Homo sapiens
attcagtctggcttagatttaggcttttaacctcgagtgttgtactaccttttaaaattacagttttatgattatagttgtctctcagtatctgtgagggattggctccaggctcacctgtg

SEQ ID NO: 483268 - DNA, 122 bp, Homo sapiens
ttagtgagtatagagccccagggccttaagtgaaaataggtaatggccagggagtggttacagcaggccttggataagatccagggctttgcttacttcaggtctgacccagcacagacata

SEQ ID NO: 483269 - DNA, 122 bp, Homo sapiens
gcccagggtccccatgctgtgtgcagcttagggacttggtgccctgtgtgccagccactacagccatgactgcaaggggccaacatacagctcaagctgtggcttcagagcggggaagcccc

SEQ ID NO: 483270 - DNA, 122 bp, Homo sapiens
gaaagttctacaaagcagtgaaaaacacatacaaaagggtagattatatccatatatccacagtcaagaggcaagggcattttattcacctgaaaattagtagcatactatatattaccagg

SEQ ID NO: 483271 - DNA, 122 bp, Homo sapiens
gcctggtactggggtctactggggtctactgggttgagcttgggccctggatctgtggtacagcactagactctgggtcatctgaagcctgggaccacagggaccagcctggcacttggggt

SEQ ID NO: 483272 - DNA, 122 bp, Homo sapiens
aagaactattgccatgtgaaatgaataagaaagggagtgctagacatagacacagtattacaagaaaagaccatggcagtaggttacagagtgctcagtctgggctttgactttgagctgag

SEQ ID NO: 483273 - DNA, 122 bp, Homo sapiens
gccaaaggtggacagagaagtaaggtcgtgtgtgatcaaatactggaattttggagagcacagcctgttagtttggacatattccttagatgaaggtgtgagtaggacaagctttttcaatc

SEQ ID NO: 483274 - DNA, 122 bp, Homo sapiens
ggatgccagctcagttgcagtagagtagaatgccaggtagagtcctaagatttctgactgcaggctctggctcccagatggcatctctggacctgcccagtgtcaggaagaacttgtcaccc

SEQ ID NO: 483275 - DNA, 122 bp, Homo sapiens
attgaggttgttggcaggaattgagtgactaggagatgtagatccccggatacataattacagttagaagaaataagttcaagagatgtgttgcacaaggtggctgtatggtgactaaagtt

SEQ ID NO: 483276 - DNA, 122 bp, Homo sapiens
tgtgggaaaagacagacagcaaggcggtttctgcaggcaagagggacaatgcagaaaatacagtatctcaaagtgaagatagtctgctttggactctgcagccactaatcttgttgccctaa

SEQ ID NO: 483277 - DNA, 122 bp, Homo sapiens
tttacccaatgcctgtatccctatggtatctaggaagtaactaatttgcttttgattttacaggctcataagcagaaagggcttgtcttgtctcagatgagactttgtacttggatttttga

SEQ ID NO: 483278 - DNA, 122 bp, Homo sapiens
gctcaaccttaaggggtcagagaacaaagcagcatgcctggtctcagttccccaaggttacagcatgtagcctaggaatgctgggctgagtcttagcactctgaaagtatccagaaatgaag

SEQ ID NO: 483279 - DNA, 122 bp, Homo sapiens
gatgaaaaaggtgggctcccaaggccttgggcagctgcttccctgtggctctgcagggtacagcacctgaggctgccttcacaggctggcattaagtgcctgcagcttgtcctggcacacag

SEQ ID NO: 483280 - DNA, 122 bp, Homo sapiens
cagctccagcaatggtgaaaagggaccaaggtacagcttgggccattgcttcagagggtgcaagtcccaagtcttagtgtcttccacatggtgttgggcctgagggtgcacagaaggcaaga

SEQ ID NO: 483281 - DNA, 122 bp, Homo sapiens
gctggcctatgagctccctggaggtatgaaggggatgaaccaaaactgctgtacatgctacaggcaacatgttaaaaggaaggaagaaaatcagaagtgactcagtgtcaggaaaaattgtg

SEQ ID NO: 483282 - DNA, 122 bp, Homo sapiens
aaatagaaaaacaaaatgtgtgctttcttgtagttagaattttactaccctttaatattacagtgactaggggagctaggagagggatagcatatagcattaggagaaatacccaacgtaga

SEQ ID NO: 483283 - DNA, 122 bp, Homo sapiens
gattctctgaatgtctggaaacctgcttgggcatgaagtgcagagggccccactgcaccacagtctatgtccatgaagggtgaggaatctcaggctgctggctgaggcaagtgggtgctcca

SEQ ID NO: 483284 - DNA, 122 bp, Homo sapiens
ggttctctgaaagcctgaagatctgcctgggcatagagtggagaggcccttgctgcactacaatcagtgcccagaaagtgtgtagtgactcatgctgctgcaccaggcaaacggattctctg

SEQ ID NO: 483285 - DNA, 122 bp, Homo sapiens
ctagtcttagagttacagcagctcttttaggagccatttgacaaaactggcttagggttacagcaggcagttttagctgcagggcttgcagtgaattacattttttggagcaacattctgca

SEQ ID NO: 483286 - DNA, 122 bp, Homo sapiens
tagagtttgaggtgagcttcctaaaatgaataggaaaaattggcagaaaaagtggaaatacagtcaagtaaggatgtaagtaataaagggatcccaaatatgtattggcagccttgcctgaa

SEQ ID NO: 483287 - DNA, 122 bp, Homo sapiens
aatctctaaggtaaggcagttctctgaagtaggagcagctctgggccctcagtaaccttacagcagctggagaacaggtattttagactggaaaagaagattggaatgtgtgtatggttgaa

SEQ ID NO: 483288 - DNA, 122 bp, Homo sapiens
tagttgtgggatacgcatttttcacagacctcagttgcactgtggcctggaagtaaaagacagtacttatgtgaactgaaggttgtaagccctgggatggggtctgatagggaagtggatca

SEQ ID NO: 483289 - DNA, 122 bp, Homo sapiens
tcaaatgttaatagctaagacaatgggaaaaatgcctcaaaggtatttcagacatctttacagcaactactcctatcacagtcccagaggcctaggagggaagaatgatttcctgggcttgg

SEQ ID NO: 483290 - DNA, 122 bp, Homo sapiens
gcaaggattctcttttcttcacatcctcgccaactgttgtaaactttcatcttttgattacagccattctgacaggtgtggaatgatacctccctgtggttttaatatgtatttccttaatg

SEQ ID NO: 483291 - DNA, 122 bp, Homo sapiens
cagtgagaagaatgaaccactcaggctgagggaataggggaggagggtgagacactgttacaccccatcacctttgccaggtttcaggccccagtggctggcaccttgggcagggtgggtat

SEQ ID NO: 483292 - DNA, 122 bp, Homo sapiens
gggaggagctgtgcaaaggccccaaggtggggcttctgagggctgagtcttcctgccccacagtcactgcagagcctgacacatggcaggcatctggtctacagcacctactgtgtgcctgt

SEQ ID NO: 483293 - DNA, 122 bp, Homo sapiens
actcctggggatgagtctccctgtggtattattattcctcatgaaaactcaccagatcaacagcaacctgaggagcataggccaaaaataggactaagtcttaaactgggtacgttagcatt

SEQ ID NO: 483294 - DNA, 122 bp, Homo sapiens
taagggcgttaactgaaagtatattgctacaaaaggttgtcatccttgaaattattcatacagctacagacttctctaggccatcttttgtgctttgacatttccatttctagctaacaaga

SEQ ID NO: 483295 - DNA, 122 bp, Homo sapiens
ggctggatctctatgtccttagcagaaatcagacacctctgaaaagctcaggaagtcttacagcttcttaggttttctattaatatcttaaagtgaggataataataatacctacctcttag

SEQ ID NO: 483296 - DNA, 122 bp, Homo sapiens
gcccaccttctccatcacagaggctttggggaatagacatcctgtttctctgtattattacagcacaaagcatttatcatgctgacaatgacagtgacatttcaggacctaaacaagcttag

SEQ ID NO: 483297 - DNA, 122 bp, Homo sapiens
ctgaatcttgattaggtcgtatgcagatttttttcttagaaattactgaatgtgtaagcacagtcacaaccttagactatcttatttgtgtttgtgttctgtgtttttattaccttatctct

SEQ ID NO: 483298 - DNA, 122 bp, Homo sapiens
caggctggtctcagacctcaggtgatctgcctgcctcagcctcccaaagtgctggtattacaggcatgagtcactgcacatagcctcctaggaataaacttaaccaaagaagtgaaagatcg

SEQ ID NO: 483299 - DNA, 122 bp, Homo sapiens
tctgattaaatgttctctcagcaaacctgtgagctaggtactattattttctcaattttacagacaattaacttatggtttagagagttgtgttgacttgtccagtcacatagctaatacat

SEQ ID NO: 483300 - DNA, 122 bp, Homo sapiens
taacactttttatcttcattgaaaccatagaagacaggcactagtattatccccattttacagaacacagaggcacagtgagtgacttgtctacaagtcatgggtaccaatgactagacatt

SEQ ID NO: 483301 - DNA, 122 bp, Homo sapiens
tattatacatgtatgtggttttgatattttttctttgtttttttcagagtgctgctgctacagctgctaccttagcactccctgcaggtgtgactcctgttcagcagatattaacaaattca

SEQ ID NO: 483302 - DNA, 122 bp, Homo sapiens
cttggcaccagccgctacctttagcatgttattctcgtggagatggcagagatggggctacaagccacagtgtgcaagctcattttaagcttctgataatgtcactaatctgttagcatcct

SEQ ID NO: 483303 - DNA, 122 bp, Homo sapiens
tggtccattttacagagtgctgattggtccatttttacagaatggtgattggtgcatttacaatcctctagctagacagaaaagttctccaagtccccacttgtcccaggacgttcagctgg

SEQ ID NO: 483304 - DNA, 122 bp, Homo sapiens
ttttaccacacaaatttaatttagtattctaaaagttaatatcctgaccccactctcaaacagtaaaaggacttttgaatacctatgaagagcttcagtctttatcctcctcatttacttgt

SEQ ID NO: 483305 - DNA, 122 bp, Homo sapiens
agagttggtgccacacacttttaaacaaccagatcttatgagaactcacaatcactgcaacagcaccaagggagagagtgttaaaccatgagaaaccacacccatgatccaatcacttccca

SEQ ID NO: 483306 - DNA, 122 bp, Homo sapiens
ttgggcaaggggaggaaaaagattgacagccactaagataaggccaccattgtcaacttacagcacacactgtcatttagaaaggtattaggttttacttttcagaagtgactgcaatacag

SEQ ID NO: 483307 - DNA, 122 bp, Homo sapiens
gcacctaacaggaaacatcaaggtttaacacaggaacgtgaggtttgctggatctgtttacagcaaagcaatgccagtcatggcatccttctgcctgaggagtgctttggtgatctacttcc

SEQ ID NO: 483308 - DNA, 122 bp, Homo sapiens
tgttctttctgtctcctgctgttttaacttcagcatccaagatgtcataaaaccacagcacagtcataaaacttcactctgggctgaactctgtctgggcaaaatcaatccaattagtcaaa

SEQ ID NO: 483309 - DNA, 122 bp, Homo sapiens
acagcttaatccaaatagctattaagtacagagctggagttcaaattcagcttcactctacagctctggctgctattatagcccatgcctaagaaaccccttcctgaattgatgtttatggt

SEQ ID NO: 483310 - DNA, 122 bp, Homo sapiens
tatgttgctctaaggctcctagtttgtgtaatttgcagtggcagccataagaagcgactacaccacctcataaacatcactgtgagcatgaaataaattatgccatgggagtggcttggaac

SEQ ID NO: 483311 - DNA, 122 bp, Homo sapiens
atcagcccctcccccaggccctcctcgatttaaggagcaggaaggaccttgaagggattacagccccctgcagtttacatgttgggaaactgaggccctagagaggaggaagctgttcaggc

SEQ ID NO: 483312 - DNA, 122 bp, Homo sapiens
aaggtaggctatgatattcaggttaggtggattaaatgcattttcaacttacagtacttacaatactttcaatttacaatgggtttatcaggaggtaaccccattgttaagtccaagagcat

SEQ ID NO: 483313 - DNA, 122 bp, Homo sapiens
atcttgaggatgggacccaagtctaaacatgaaattcatttatgtttcatatacaccttacagcttgaaggtaattttacacaatatttttaaataatgttgtgaatgaaacaggttttggt

SEQ ID NO: 483314 - DNA, 122 bp, Homo sapiens
taggcgtaagccactgcgcccggccaatgcttttatttttaacatgttttcctggcattacagcacagagaagtaacccaagaggaatccacaataagcagtattgttgtctttattatcaa

SEQ ID NO: 483315 - DNA, 122 bp, Homo sapiens
tctcgaactcctgacctcaaagtgattcgcctgccctagcctcccaaaatgctgggattacaggcatgagctgcagcatccagccctgactaattatttttaaaaattatttgtagagacag

SEQ ID NO: 483316 - DNA, 122 bp, Homo sapiens
tggaacaggggagaagatccagaaacagacccaagcccatggtgatcctgtacatgacaacagtcatacataaaaccagcaggaaaaatagcttaataactggtattggacaaccagctagc

SEQ ID NO: 483317 - DNA, 122 bp, Homo sapiens
ggggaagggaaaggaaggacgtgcctccttccttgaaggctgctgctttgatgatgtgtacagcagtgcttacattgcattggccagaccttatggctgtacctgggtgagtgggagactgg

SEQ ID NO: 483318 - DNA, 122 bp, Homo sapiens
ttaaaaggttgaaaactactaccatagggaaaaacattgtgcctccctgttgggaagttacagcttcagcagaagtgactgccaggaatgaatgtgacagcttttgattaagttataataac

SEQ ID NO: 483319 - DNA, 122 bp, Homo sapiens
gtcacaaactcctgacctcaagtgatttgctggtctcggcctcccaaagtgctgggattacaggcatgagccaccacacctggccaataatgacttttttgataaatactaataatatggat

SEQ ID NO: 483320 - DNA, 122 bp, Homo sapiens
aacggcctatattattcgaaatatccaaacaatgtcttccggaagtccaataacaccatacagcctaaaatagcattatgtgtttcctggagtttattgctaactttttttttttttttttt

SEQ ID NO: 483321 - DNA, 122 bp, Homo sapiens
actggatcaaaatttctaaggatttattcctctcagttttgaaaggctatccagtggttacagtcatgccctctagagtcagttggcctgggtgacaaccttatcccttacaaaactctatt

SEQ ID NO: 483322 - DNA, 122 bp, Homo sapiens
ttcacttctcaaatgggtgtttggataccgcacagccacagcctgaagcactcatgtgcacagtcaggttaccttaaaccagtcttggacaagcagcatggaagaacaatcagacaaaaagg

SEQ ID NO: 483323 - DNA, 122 bp, Homo sapiens
caagcaatgggaagactgcataaaaagaagtgtgggtgtggtggctcacacctgcaattacagcactttgggaagctgaggtaagtaggattgcttgagctcaggaatttgagaccagcctg

SEQ ID NO: 483324 - DNA, 122 bp, Homo sapiens
aggagggcattccaagcaatgggaagactgcataaaaagaagtgtgggtgtggtggctcacacctgcaattacagcactttgggaagctgaggtaagtaggattgcttgagctcaggaattt

SEQ ID NO: 483325 - DNA, 122 bp, Homo sapiens
tagcctaggagcattaggctaggtgtgtagtaggctatgccatctaggtttgtgtaactacactctatgatgttcccataatgacagaattgcctaatgatgcatttctcagaacatattcc

SEQ ID NO: 483326 - DNA, 122 bp, Homo sapiens
tgggttgtggcaataacagtagacgtaaaaagtagatgaatttgggatacattttgaaaacagccaccaacaaaagctaatgataaagtgggtgtttaagtgaaagttagcagccaaagact

SEQ ID NO: 483327 - DNA, 122 bp, Homo sapiens
ttcttaaaataaaacctctcctactgtacagagttgacaataagcatttagaaacttttacagccatttgacctggccatgacatccaaacctggaaccagtggacttgtcaggttgaacag

SEQ ID NO: 483328 - DNA, 122 bp, Homo sapiens
acataaccagggaagactaagaaaggcatttcagacaaaaggaacagttacaaactgttacaagagacaagatagatgcctccaattctgaaatctttggaagacaatgggtaagtcgtgtt

SEQ ID NO: 483329 - DNA, 122 bp, Homo sapiens
taccttagcaacatagtgctgatggcaaagtgggccaggctgacctcaacatctgacttacagcagcatcaggacagacaccagcaggccccaagtggtttccaggactatggggcaaccac

SEQ ID NO: 483330 - DNA, 122 bp, Homo sapiens
cagaaagcagattagtggttgtctgggtatgggtgaggcaggagtaagaaggcaggattacagcagtgcaggaagaatcttttggaagtgaagattatgttcattatcttgatatgggcaat

SEQ ID NO: 483331 - DNA, 122 bp, Homo sapiens
gccaaggatgaaactgaacatgtggcacacattgccactgtgtgtctctggctggtcttacacccatcacaaaggtgcatgtcttggggtgtggcaaattgttacagggaagatactaagtg

SEQ ID NO: 483332 - DNA, 122 bp, Homo sapiens
atgcctggaaaatagcaggtgatgataaaatagcagcttttccctattgttgttctattgcactacatgagggttgagccacagcccagaaattgatcagaacctgtgttcccagaaggtgt

SEQ ID NO: 483333 - DNA, 122 bp, Homo sapiens
gttgggtgtttctcacttggatctctcatgagattgtaaacaagatgctagccagcgctacagtcacttgatagcttgtctcagggatttgcttccattggttcattcatgttcaggcaagt

SEQ ID NO: 483334 - DNA, 122 bp, Homo sapiens
ttagaatactttctctggttgtagtatggagagcaggtggagaggactcaagactagagacaggcagattttggcagctgagtgagaggcaaccataccctgcagcagagagatagccatgg

SEQ ID NO: 483335 - DNA, 122 bp, Homo sapiens
acacaactattaagtggcaaagttaggatttaaactcatgcatgctggcattagagactacaccacattgttaactgtgtaagcagtaggatgtatgggtcttggaatactttggatgtgat

SEQ ID NO: 483336 - DNA, 122 bp, Homo sapiens
tttgcagctttgagctggttgctttgtagtttctattgtctggttgctttaaagggtctacaggctatgtacttacatatgtttctgtggttgcaggtattgttcttttgtttccatgtttt

SEQ ID NO: 483337 - DNA, 122 bp, Homo sapiens
ttttatggtagggatcaaaaagaggaacaatcgattgctaggattaatgatggtggcttacagcagtggcatgagtgatgttgtacaggaaaataatttgtccctgaagttaatcctaactc

SEQ ID NO: 483338 - DNA, 122 bp, Homo sapiens
gagtttcttcttttagggaggaagtatcgcagaagaccacactactttcgggagtctttacagctactctgattatttgatgctaattgtgatttatgatggtgtattgtatacaagggctg

SEQ ID NO: 483339 - DNA, 122 bp, Homo sapiens
tggatatagaatggatcaaaagaaagggttattttggagtggccaaaaaaaatgccgttgcagaacttgagttgccaatatttgatctaatgctatactgcttgaagttaatggatagtgtt

SEQ ID NO: 483340 - DNA, 122 bp, Homo sapiens
ccttgaacttcctgggctcaagtgatcctcctgtcttggcctcccaaaatgctaggattacaggcatgagtcaccacacttggccttgatttggttttagaatggattcttggatcattttt

SEQ ID NO: 483341 - DNA, 122 bp, Homo sapiens
atttacgcaagcctgtacccccattgtatcttggaagtaactaacttgtttttgattttacagacttacaggtggaagggacttgcctggtctcagatgagactttggacttggacttttga

SEQ ID NO: 483342 - DNA, 122 bp, Homo sapiens
ctgggcactcagaatctatttagagatgagagagagggaaagggacttttcttgaatccacagcacctagaacagtgcctgatccagagcaagcatgtggcagacatttgctgaaaggataa

SEQ ID NO: 483343 - DNA, 122 bp, Homo sapiens
aacctcattttcttcccagttttgatatgtctttgtcagcagtgtgaaaatgaactaatacagtcagtgaccaaataaagctatgaatgtattgcatagaggtaacaaagtgtgaaatgcat

SEQ ID NO: 483344 - DNA, 122 bp, Homo sapiens
aatgccagggattgagggaaaatgtgggaactgtcaatatatacatgaaatgtaaagttacaggactgtatgagatcataaagggatgggtataaatagagcaggaaagaggtccattggct

SEQ ID NO: 483345 - DNA, 122 bp, Homo sapiens
gaagattaggaaaaggaggtggggagccagattgttactaaaaacatgtgaaggaaaatacagcaacaatattggtaagcaatgagcttttataggtatgagggacctaataagaagatgat

SEQ ID NO: 483346 - DNA, 122 bp, Homo sapiens
aatggagcttgcatctgggttgtatgttataaactgctctgtgctaagccagggcatctacagctttgcaaggttcacagaaatttcttaccacagtgacagcatatgttttaaatgcagag

SEQ ID NO: 483347 - DNA, 122 bp, Homo sapiens
gtttgggtcaattccagagtagagatcaatggacaagatgcagagtgaaaaacaaaattacagcagaagctgggaattggaggtcaaagatgatataagcataaatatttgaggatctgagg

SEQ ID NO: 483348 - DNA, 122 bp, Homo sapiens
tctggctaggttggtgtttaaactgtgataatcatggaaagacactttgtcccaagtctacagcactaagaggatgaagcatattcacttgcttattgattggtttttattatttaatgact

SEQ ID NO: 483349 - DNA, 122 bp, Homo sapiens
ttttagggtctttttttttgttttttaaactttttgtctgaaatagttagaaaagacttacaggaagttgcaaaatatagtatatagggttttatgtatctgtcactcttcttcccctagtg

SEQ ID NO: 483350 - DNA, 122 bp, Homo sapiens
ttttcgtagctgtttttccaacctgtagtgtaatgcttgacatatgacaataatgtaatacaagacttctcatgaatgtatgtatttagttacacattcagctgttcttgtttctggacata

SEQ ID NO: 483351 - DNA, 122 bp, Homo sapiens
gaagatattctatgtgtttttctaaaagttttattgttttacatttcacatttagatctacagtccatttggaattgatttttatatatggtataagttaggggtcaaggtgtattttttcc

SEQ ID NO: 483352 - DNA, 122 bp, Homo sapiens
tccttgaactcctgggctcaagcgatcctcctacttcagccttctgagcagctaggactacaggcatgcaccactgtgcccaggtaaaatttttaaatacttctgtagatacagggtctcac

SEQ ID NO: 483353 - DNA, 122 bp, Homo sapiens
gcagaaattcctgactggcttcaggtttacgcacgagcccctgtgaagtaagtacatttacaacacaaatttgtttgaggagtgagtgaagggctgaatggagtctctgggctgctcgatcc

SEQ ID NO: 483354 - DNA, 122 bp, Homo sapiens
cctgtttgtactcacttcatagacttgttttgaggattattatatgtaacatccttattacagtggttggcacattgtactaggtgttaactatatgtgggtctcacaaaaactatacacct

SEQ ID NO: 483355 - DNA, 122 bp, Homo sapiens
acttcaaaggtcaagggtaagcaaggacctagaattactattgcatctaaaattattttacagccttcaaaagaacatggaaaaaatgattgcaattctcaaaattatataccgcctttggg

SEQ ID NO: 483356 - DNA, 122 bp, Homo sapiens
gtgacgttccacagaataaaaggaaacaagtttgccatcttggtgttgcaatatgaattacagccttaacagactgtgccacaggtctctgccatcctttgtgagctcatttgtcaggcaga

SEQ ID NO: 483357 - DNA, 122 bp, Homo sapiens
aagaataaaaaagcagcttaacttttctttaaaaaccccaaaactctagactcaggtttgcagcacttagaagctactgggtgaaactctcttgagacttgggtcagggactctcctctctg

SEQ ID NO: 483358 - DNA, 122 bp, Homo sapiens
gaggaggaaaagacaatgagccctttggttggggatattgggaggctgttaggaggattacagtcaggaagcatcaatagcactgtgggtactgggccaactagatctgacttgtgccttgg

SEQ ID NO: 483359 - DNA, 122 bp, Homo sapiens
tctagcttgaactctggtggctgtgtggctttaggcaagccacgtcgcaaaaccgagttacacttcatgggatgattggaaaacaaaatgaaataaaacaaatgaagcttggcaaatgagca

SEQ ID NO: 483360 - DNA, 122 bp, Homo sapiens
gtactttaaaaataccaaactggtgctcaaagttatataatagatataccatcttatttacagtagctaagatggcaatgataggtgacagttaactgccccatacctatacagtagaaata

SEQ ID NO: 483361 - DNA, 122 bp, Homo sapiens
gtacaacttttttcctgtgttgatagcttctaaatgttggacttgggcctaaagtgactacaggattttgtgcatgtttaagtttgaccaattctggctagtgcatgaaaccagtcagcaca

SEQ ID NO: 483362 - DNA, 122 bp, Homo sapiens
gcgtcattccagtggcttctggatctagctagggccatgatggtgtcagtccccatgctacagccaggtcctcttgggtaggtgttactgctgtaggcctctttgcagggccccattgcagg

SEQ ID NO: 483363 - DNA, 122 bp, Homo sapiens
aaagaaatataaataagctaagtacctattttaaagtaaataatacattcttaaaaactacagcagggtacagcaaaaagaaggaagaagacatccttataagaatgttcatatttccaatc

SEQ ID NO: 483364 - DNA, 122 bp, Homo sapiens
gctgtataaagagaaaagatttttggttcaaagttgccaagaactgttaaataaaatttacaggaggccactgttttgaactgagcttctgcattaggctccagcaggccagatcaaagtgg

SEQ ID NO: 483365 - DNA, 122 bp, Homo sapiens
aaaaaaaggaaaggaagttttcccatagaggtaagaatggaaataagttttgaatgattacagataggcaaggttaggagaatagaagtatcactctaggcagagggagagaacgtatgcat

SEQ ID NO: 483366 - DNA, 122 bp, Homo sapiens
cagcctgggcaacagagcgagactctgtctcaaaaaaaataaagtttaattcctcagttgcactacttgtacttcaggtgctcagtagccacatgtggcttgcagctctcatactgaacagt

SEQ ID NO: 483367 - DNA, 122 bp, Homo sapiens
actggtgctgctctctggctgaacccaacaggaagccaggggcaagggaatccattgctacagtccactaggtgaacctctgggctcagagcaggaggaaatggtagagggccaagctcaaa

SEQ ID NO: 483368 - DNA, 122 bp, Homo sapiens
ttgaaattttagagaagtgtggaagaaggagtccctcaccactgggctttgtttattttacagtcagcaagccttagggacccctcactgaaactgtttccttaaaggcctaggatttcact

SEQ ID NO: 483369 - DNA, 122 bp, Homo sapiens
gagtcacagttacatctctgtctcctggggctgagctactggagagtgcctttagagttacagtcctcagcttggtgggagagctgcatccactgtgcctcagagagtaaaccttcgctctt

SEQ ID NO: 483370 - DNA, 122 bp, Homo sapiens
catgctgtccaatacacctaatatacgaaaatgcgtgaaaaccgttctgagttgaggaaacagcatcagcaggatagttatgcaccttgtaggcttctggcctacatttagcatgtgtgctg

SEQ ID NO: 483371 - DNA, 122 bp, Homo sapiens
tgagtgcccatgtttttggttgtgctttgtttcatggatgaaatatgtaacttcaacttacagcccaatggccagaagtagtaacatggtcttgcctagctgaaagaaggctgacaaatgtc

SEQ ID NO: 483372 - DNA, 122 bp, Homo sapiens
tccctgcagcagagagacaactgcattttgatgtgctctgagggcaaactttactgcctacagctgctgctcttgtgggctgctgcaatcagggccaaagggtgagtaaaatgtgaaccccc

SEQ ID NO: 483373 - DNA, 122 bp, Homo sapiens
tgacctggaatgaagcttatattgcctttctgtagatggtgacagctaccatttatagtacagtcctcttattaactgaaatttgttgagtcctgggaactggatttagtctagttaatagt

SEQ ID NO: 483374 - DNA, 122 bp, Homo sapiens
aggatgaaatttgggcttgactgaagtaatgggggctgtctgtgaagccttgtggcagtacagcccaggtgatttgctgaacctaatgggtgtcagggtcagtccaagtgaaagcgaagaga

SEQ ID NO: 483375 - DNA, 122 bp, Homo sapiens
gttgttactagcaggaggaggaatggatgctggataggcagaagctgcagatgtccattacagtcaccatgctcaccattcagctgaagcaaagcagcattgccctgggtcccataaccaga

SEQ ID NO: 483376 - DNA, 122 bp, Homo sapiens
tcccaaagttttgggattacaggtgtgagccaccatgcctggctgagaccaagattcttacagtcaatgggattgaagtggtggtgtgctagagccactcaccatgcccatgtgagccaatt

SEQ ID NO: 483377 - DNA, 122 bp, Homo sapiens
agggcttgagggggctcagagggacgcaggcagagccagctggggccagcacccccgccacagccctgacctctgcctgggcagaagcaccatgaggcagacagtggcagatgctcgaggca

SEQ ID NO: 483378 - DNA, 122 bp, Homo sapiens
gtctcgaactcctggcttcaagagatcctcccatttcggccttccaaagtgctgggattacaggcatgagtcactgtgctcagccatgaaccttgatttttaatgtaacatttatttggagc

SEQ ID NO: 483379 - DNA, 122 bp, Homo sapiens
gatggcaggacacaacacagtgacactcagataaatgaaaggtagaacttttgtttcttacagctccaaatgagaggctgtcaggctgggccacacaggatgtgcaactggggacagggtcc

SEQ ID NO: 483380 - DNA, 122 bp, Homo sapiens
gcccatgttcccaacagctggaggaagacacttcagtcctgcaggggcatcggggtgatacatcactgcatcttggtctcctggcaagccagcagtaggtctggaatccaaccaggtccttc

SEQ ID NO: 483381 - DNA, 122 bp, Homo sapiens
accaggcacatgagaacctctgaaagggcttgtggccattgtaggtgaccttagcagatacagtccacatgggacctgcaagcaaatgccagccatgctggctgcagcaaaggcgtgggcac

SEQ ID NO: 483382 - DNA, 122 bp, Homo sapiens
aaaggtgcacagagactcctgctgggtggtacccactggggatgccaccaagtccctctacagcatctctggtgtgccacagagcacatgttcaaagccactggtctcatccagtttagaaa

SEQ ID NO: 483383 - DNA, 122 bp, Homo sapiens
ctgctgcccaaggaggatggagtagatacagtgttagagagtccacctcaataccctctacagctaaaggttccccagaggaacagggtgattggagggaaggtatatgaaacccagggcca

SEQ ID NO: 483384 - DNA, 122 bp, Homo sapiens
ctcctgggcaaggcctctgtccataggtaaagccagctaataaagagcccagcacaaatacagtcctactaggctcctggggaagagtgctaactggtgttattttaatgtaccagaacccc

SEQ ID NO: 483385 - DNA, 122 bp, Homo sapiens
aacacagctttagcttgtacatttattttaaaatttcagaaattcagttctgcagtcatacaggccacatttcaggtagccacatgtgactagtggctattgacttggacagggcagatcta

SEQ ID NO: 483386 - DNA, 122 bp, Homo sapiens
agggagggtttcctggaggagggggccagacttgatgagagacatatatctaacactttacagtttacacctttttgttgttaaaccacatgaaattttgatttttgtgagcccaatattgt

SEQ ID NO: 483387 - DNA, 122 bp, Homo sapiens
ggtatgtttagctttagcgaacactgccaaacagacttccaaagtagttgtatccctttacactcccagctgtaatgcatgggagagctggtggttctacaaccttggaggctaattttaaa

SEQ ID NO: 483388 - DNA, 122 bp, Homo sapiens
ccctgcacctgctggcagctgctgccatttgggccaggttcctcctgaaggatgagactacagtcctttttagggagagatctcaaactggtcatttcacaggatgacaaaccaggcacatg

SEQ ID NO: 483389 - DNA, 122 bp, Homo sapiens
gtattcaaaatatactcactcattccaatgtaaacagagatgaattccgacaggtgactacaatcaccagcactatcagagtgactctgcaactttaacagtggcttctaatattctgacta

SEQ ID NO: 483390 - DNA, 122 bp, Homo sapiens
cacttacttaggtatctatttaaatcaacacagcaacaactttcaaggtctttctttttacagtttctgcttataaaaccatgaacatcccaacaggtggtgactttgtgtagtagtagttg

SEQ ID NO: 483391 - DNA, 122 bp, Homo sapiens
ctattttccttatagagtttgttaaattagctaaatgagacccctccccgccaacatttacagcacctggaaatggagatggtggcagtaccagtgagacccctcagcctcctcggaagaaa

SEQ ID NO: 483392 - DNA, 122 bp, Homo sapiens
ctaggctctggggatgcagcagtgaccaaaatgagctgagacctgcctgcatggagattacagtctagagcagtgctgtccaggagacatacaatgggtgccacatttggaattctgagttt

SEQ ID NO: 483393 - DNA, 122 bp, Homo sapiens
aaaagtatttttagctccatcaaaggaaaagttccttaaagcggggacatattaaaacaacaataacaaccacagctctgcagcaggcaaagcacaatgatacctgttctgatctgatctct

SEQ ID NO: 483394 - DNA, 122 bp, Homo sapiens
tgaactcctgggctcaagtgatccacccacccaccttggcctcttaaaatgctaggattacaggagtgagccactgcccctggccaaacaattctttagtatcatcaagtttttgatatttg

SEQ ID NO: 483395 - DNA, 122 bp, Homo sapiens
ctaaacaccaggaccaatgcccagatagccctttacagggggagaatggccgccacattacagcagtggaactgggatttgaaaccaagccatatgctacattgtgggggctgggggctggg

SEQ ID NO: 483396 - DNA, 122 bp, Homo sapiens
aaacagacacacagacaaatagaacaaaatagagaacccagaaattaatccaggtatctacagccaactgatttttgacaaagaaatcaagaacactcactggggaaaggacagtctcttca

SEQ ID NO: 483397 - DNA, 122 bp, Homo sapiens
ttataatgcctctgtgacattggtaccattattttccccattttaaagacgggggcattacagcacagagcagtgacctgcccaaggacagatgcctagcaaagaagtggtgatgctggaat

SEQ ID NO: 483398 - DNA, 122 bp, Homo sapiens
gaagactcacatatagggcacaatggtttgggatgtactagtttgtaaagtatcattttacagtcacaaactgtcagttcccatctcagtaggcattcagtaaacactgatgcagtgaatgc

SEQ ID NO: 483399 - DNA, 122 bp, Homo sapiens
cggctccagcagttacaccaagaagttctgttggagctacgaagggctctcatggtcctacagcaccattctttttacattaacagggaaactgaagctagaggggagacctgcccaaggtc

SEQ ID NO: 483400 - DNA, 122 bp, Homo sapiens
tttctatgtttagatacacaaatactcaccatggttaacaactgcctacagtattcagtacagtcacatgctgtccaggcttgtagcctaggtgtgtggtgggctataccatctaggtttgt

SEQ ID NO: 483401 - DNA, 122 bp, Homo sapiens
catccccactgaaaccccctcgccacaggccccccacctctcggaagcctgttaagactacaggatgggcttccagatggatccaggagtgcagaatagagcttccatgcacaacaagtcag

SEQ ID NO: 483402 - DNA, 122 bp, Homo sapiens
tcccagctactcgagaggctgaggcaggaggatcacttgagcctgggggggtcaaggctacagcagtgagctgtgatcatgccactttactccagcctaggtgacagagtgagatcctgcct

SEQ ID NO: 483403 - DNA, 122 bp, Homo sapiens
ttttgcacatttcagttaatctggacgattatcagaatccatgatagaggctgacagctacagctgctgagcagtgtgagcatggcccttctgcagcaggtccccagctgcgcagtgctgat

SEQ ID NO: 483404 - DNA, 122 bp, Homo sapiens
agcctcaacctatgggctcgcgcgatcttcctatctcagccttccaagtagctgggactacaggcatgcaccaccacacctgggctgtctggtaagtttttattagatgctggatattgtga

SEQ ID NO: 483405 - DNA, 122 bp, Homo sapiens
aaggaaattattaggttaactactgaaactgtgatagtcctcgtgtgtttagtttacttacagccttgaatgtctgggtgttgtatatgggaaatatgtggagctatagcacacaaaaacct

SEQ ID NO: 483406 - DNA, 122 bp, Homo sapiens
ttatagttcactgcagtttaaactcctgggatcaagtgatcctcccacctgagcctattacagccaattacattgggacctcatggatggagagtcagtggtcactgatcccaagagcagga

SEQ ID NO: 483407 - DNA, 122 bp, Homo sapiens
cgcctgacccagaagtccagctagcttcacctctcagtaatatagtagaagtaggttctacaagcatttgggccactttcctgtgtaacttacttctgcctttagggcctgcttgaatctga

SEQ ID NO: 483408 - DNA, 122 bp, Homo sapiens
tttcttggttcctgcttttctactgctctgttctacaaagcattttctcttaagtaactacagtcactgcacagttaaataaaacaagtagggggccctctaggtttctgcaagctagtgtg

SEQ ID NO: 483409 - DNA, 122 bp, Homo sapiens
tctgattatttcaaagcaaaaagttaaaaaaaaaataggtaaagtataattccacttttacagcacttaaaaactggcaatagttaatctgtggtgttagaagtcagtatagtggctacaca

SEQ ID NO: 483410 - DNA, 122 bp, Homo sapiens
tcctgtgtttctaggaaagccaggtgctttaagaagtaagttattgaaatttttgaatcacagcagtgtcagtataatctgattttggcccattttaccttagctgtcaggaagctcagtat

SEQ ID NO: 483411 - DNA, 122 bp, Homo sapiens
gtctggaatttggttctttccggtgggttcttggtcgggctgacttcaagaatgaagccgcagacccttggggtgagtgttacagttcttaaagatggtgtatccagtttgttccttcatat

SEQ ID NO: 483412 - DNA, 122 bp, Homo sapiens
aagacaattgcccagcacctcaagcagagaggcaccagcaggagctggtaacaatgtctacagtctacagatgctggagagagcaggactcactctgggccactcatgagaccagccatggg

SEQ ID NO: 483413 - DNA, 122 bp, Homo sapiens
gggacctgaagcaggcttcctttgacttctgctgcttctctgacagctggcaccctggtacaggcatgggctgtttttgtccagctgaacctgttgaaggttgcagtagcctttgtaaactt

SEQ ID NO: 483414 - DNA, 122 bp, Homo sapiens
atcccagctacttcggggggctgaggcagagaattgcttgaacctgggaggcagaggttgcagtgagctgagatcacaccactgccatccagcctgggtgacagggtgatactccgtctgaa

SEQ ID NO: 483415 - DNA, 122 bp, Homo sapiens
atcaagtgcaaaattgaatgaaagtgaatatgcctgtgcaagctgtttgaaggtaacttacagccagtgtactaacagcctgtgacacagggttaagtcataggaactgagaatgccattct

SEQ ID NO: 483416 - DNA, 122 bp, Homo sapiens
cttgaactcccaacctcaggatcgatccacccacctcagcctcccaaagtgctgggattacaggcatgagccactacactgggcctttaactttaaggctcttcttaaagtaaaagttggcc

SEQ ID NO: 483417 - DNA, 122 bp, Homo sapiens
aggagaagcgggagaggtaggcagttgtgccttgggcaacacatctggcacctttgactacagcagccctggtgcccattttggaagcatcaagaggcaccttgtgcagccgaagcaagaga

SEQ ID NO: 483418 - DNA, 122 bp, Homo sapiens
gagtcagccaatacatatttgttgagtggatatatgaatacacaaatgaatatcactctacagtcccttgccctagaagaagaagatgtcagtgttactactcatttggaaaataatttttt

SEQ ID NO: 483419 - DNA, 122 bp, Homo sapiens
ggcattatgtaaagacagccaatttagaaactgctcaatttgttgatagataatgctttacaattgaactgaaaatgtggaatgacagtcttgtaactcagcctgatgtgatggggagtaac

SEQ ID NO: 483420 - DNA, 122 bp, Homo sapiens
aaagtgagaatatgtccagcttgctgctgttgagcctcggtgagagggagaaatcatttacagcatcaagtaagagtgcctgatttattgtcttggatcatgctaaagaatggactaacccc

SEQ ID NO: 483421 - DNA, 122 bp, Homo sapiens
gatagagatataaatatatttatacatacatacagagagagagagagacagacagacagacagctcatatgattttggaggctagaaagtctgaaatgccaagaggctggaaattcaggtaa

SEQ ID NO: 483422 - DNA, 122 bp, Homo sapiens
aatataggttagttgaacacaagcactgcaataccaagacagttgatctgataatggagacagctactaagtgacaaacaggcaggagtaggtatgacacagatacactggacaaagggagg

SEQ ID NO: 483423 - DNA, 122 bp, Homo sapiens
gaaacttgagatttgctgaagatggtgcttgagaggtacctgatgtttagtttcattctacagtcacatcatctagatttaacagagtataagttactataggtcatcttgtattccttgaa

SEQ ID NO: 483424 - DNA, 122 bp, Homo sapiens
ctcatactgatgggcccaagcataggctccactcttgtgaccatggctattctgttaatacacctgttgtaccagctgtagggtggacagtgacagaatggctgatgtcttccggtcagtac

SEQ ID NO: 483425 - DNA, 122 bp, Homo sapiens
ctaccagagaacggataagttcgctgtttttatgggttgctgttaatatcctaacatttacagggtgcttaccataaaccaaaactcagtgctaactgctttacatgcagtatctaaataaa

SEQ ID NO: 483426 - DNA, 122 bp, Homo sapiens
cccagcagttcttggagctacagaggcaggggatcttgatgtcttcgatggggtaacttacagtcacaggtagtctccttgttggtgctgatgagctgcttcaagtagatgactatcttctc

SEQ ID NO: 483427 - DNA, 122 bp, Homo sapiens
tacccctagttctgatgggaagagagttaagatttgctcctggagcccattgagagactacagcaatgagagagcctgacaaaagctgtgtcaggaaggcagccactggcaagcatggcacc

SEQ ID NO: 483428 - DNA, 122 bp, Homo sapiens
gagcctggttgggggtgctgcactccagcgcagaagccagggcttctgttgggagggagacagctagtcacctgggccctaacatggaggtaggagccaaggtgcctgtgcacccctaaccc

SEQ ID NO: 483429 - DNA, 122 bp, Homo sapiens
tggaaatctagagctgtattatagttagttgtttgaatattttccttcagttcttttttacaggctgcagcaaaccattcctcactattgagtattttgggcttgttttcacatatgggtgc

SEQ ID NO: 483430 - DNA, 122 bp, Homo sapiens
tatacttaaacctcctcatttctaattcaaactactatcaatctggccaaatagccattacaagattcagggaaggactcttaagaacatatttggtgtcttatactgaacacatacctaga

SEQ ID NO: 483431 - DNA, 122 bp, Homo sapiens
aacacattcttgtttgggtttttatataaaatatgagcacaaaaatactttccctaaatacagcctctggctttgcctacccttggcacacagccaagtacctcttccattctcagatacgt

SEQ ID NO: 483432 - DNA, 122 bp, Homo sapiens
acactggggctatgctggaaacaggcatggctttccctagaattctcaggctctcatcaacagtcatttactagcccatgaattcccaggatggaatgtttaaagggttctctggaagtgac

SEQ ID NO: 483433 - DNA, 122 bp, Homo sapiens
tctaaggatttagagtatcctttccaggaacaaagggcagtcaaagtctttattatacaacagtcacatagattaaccctgattcattgttggaggagactgtaaaaaggcctgaataccag

SEQ ID NO: 483434 - DNA, 122 bp, Homo sapiens
atggtggtagaaacagcacatagggagcacaaaaaattagttacagcattcctacgattacaggtcatatgcttcaagtaggcattcagaaattttctgacacctgtggagaagttatataa

SEQ ID NO: 483435 - DNA, 122 bp, Homo sapiens
tttcatagggggaagccacaggtcattgccaaatgtgaacccttgcctacatctgtgaaacagcaatcaggatctaagaccacttagttaaaaaaaagcacaaaaccctgtgttcaagctat

SEQ ID NO: 483436 - DNA, 122 bp, Homo sapiens
agttcattattttggacagttcagaaaataactattaaaatctttattaaaaaattcttccagccactgtgtaactcaatgttattactgtgagctcaaacttattgctgctgtggacattt

SEQ ID NO: 483437 - DNA, 122 bp, Homo sapiens
ttaacaagacacgggtacttggtaatagtttagtggggaagacacacaattaagaggatacaagaaaacaggatcacaaaatagcaggtgcataataatggcaaaaattactaggagacaat

SEQ ID NO: 483438 - DNA, 122 bp, Homo sapiens
tatagagcttttcagaaaaaaagagcttgaataaatcttaagtttaagaccaagagattacaggctgtgtcaaaactgctacaccttgaatatctaagttgttggaagtcatgaggccctgt

SEQ ID NO: 483439 - DNA, 122 bp, Homo sapiens
agtgtagacatggacatgatgggtggctggatcaatagagttgggtgaagaaaaggacaacagcagggcaccaagggctggataaatctgctgctatgtgactgtagcccctatccttttaa

SEQ ID NO: 483440 - DNA, 122 bp, Homo sapiens
cagtttaaaggggaaaagtctgggtttgaccttgtcacaggtaaacaaaggaatcatctacagtcttgtaggaatcatgagaaagagttggcagtgtcttgtctaagtcatatagggaatgg

SEQ ID NO: 483441 - DNA, 122 bp, Homo sapiens
ggtcctgtgttttactccctgaacgatcacctttgcctgtggcaaagggggttgggattacaccagtggtcttggactgttcaggtcccaatgctggagttggtaatggggtcacttgcata

SEQ ID NO: 483442 - DNA, 122 bp, Homo sapiens
gtgtaggcttttgttctggctgggttcagtagtatggtctctgtgctgtttcttcagctacagtcactgtcagcaatgcctatgaatactacagtggctgaggctcaggagtctgtgcaact

SEQ ID NO: 483443 - DNA, 122 bp, Homo sapiens
taagtttgatcagttagttaaggtgatgtctggctttgtccttatcaagtaaatactttacagcccatagcatagtaccctgtgcataataggtactgggtaaatattttcagtagaaaata

SEQ ID NO: 483444 - DNA, 122 bp, Homo sapiens
gaggactggatggcccttgtatgaccatcttctgggaagcaggagaaacagggtccttgacaggactaatgggcttcataggctgttgactctgcctgattgtatggtcaccctccaatttt

SEQ ID NO: 483445 - DNA, 122 bp, Homo sapiens
cagaagtcagggggaggcccaggtagccagagtgctactgggttctgagcaagcagcctacagccacatatttcagccctaaatgacagcagaacaagcagcactaaagtggatgagggacc

SEQ ID NO: 483446 - DNA, 122 bp, Homo sapiens
ggttgcagggcaaattggtagcctgaagtctaaggtaagacaagtgcctccgagaagaaacaggacatgaccactgatttacctggaacagacattgagtattatataagctggtaagaaga

SEQ ID NO: 483447 - DNA, 122 bp, Homo sapiens
ggtgggaaaatggcaccattagacctgttcaatgcgtggtcaccacaaaccttcaatttacagcaagtgcagtatctctgaagtgcaataaagttatggtggttaatactgtcaacttgact

SEQ ID NO: 483448 - DNA, 122 bp, Homo sapiens
tttctgaaaagggccaggtaggaaatattttagcctttgcaggttatatagtttctgttacagctactcaattctgctgttgtagctagaaaaacagccataggcaatccataaacaaatgg

SEQ ID NO: 483449 - DNA, 122 bp, Homo sapiens
tccactctctctagtcccatgtcctatgtccctttgtatatcttcatgccgctagaactacaatagctagtcaatgaatactacctaaatagatttaaggtttaactgtggcagttttctaa

SEQ ID NO: 483450 - DNA, 122 bp, Homo sapiens
cctctgaaaagcactgctctaggagcagagaaaaagggggattgagacatcaaacaattacacaaaatgactgggaaatgcctgcaatatggtcactgcaaaggctgaatattaaattgtct

SEQ ID NO: 483451 - DNA, 122 bp, Homo sapiens
tggagaaatgcataagtgaaaaaggggcagaaaaccaaaatgatatgtacattgtaactacagccctcttaagtgcttatggatgccaactaggctgtaatgggcaaaaacacagagctgtg

SEQ ID NO: 483452 - DNA, 122 bp, Homo sapiens
gggcctcagttatttcatctgtgagaagctgaaatagccaggtgtgatgatgtgtgcttacagtcctggctattctggaggttgaggcaagaggatgatttttgagcccaggagttcaaggc

SEQ ID NO: 483453 - DNA, 122 bp, Homo sapiens
aaatgacttggcccacagtgaaaacacaagcaggctccataaagagcaatgtgagagccacagcttaacagtagacagttgcaaaaatgtaggtggaagaacatgcccttcaattggcaaaa

SEQ ID NO: 483454 - DNA, 122 bp, Homo sapiens
tcagtgaatacttttgtgtatggcaaaattcagtgaagaaatttaaagcatgaaagcttacagcagagttggagagatgtaacttacatatctgaaacaaggcagaagcacgagaagacagc

SEQ ID NO: 483455 - DNA, 122 bp, Homo sapiens
tgatgtgactggcaatcccttggggaggaacattggggccatcttcccaggcattcagcacagcacctgccattctggaagtgaatgaatgaggttggggctacctggacaggaggtgcgca

SEQ ID NO: 483456 - DNA, 122 bp, Homo sapiens
aactgaatatttagagtttgctctgtgcttaggatacattttctaaaactttcacatctacagtcattggatatcatgaccctaaagcccttcaggaattaggcatctatagaaatattgaa

SEQ ID NO: 483457 - DNA, 122 bp, Homo sapiens
attgtggggtgggggctgtagcaatgcaaagatgggctaaatttaggcatattccttttgcaccctctgaggtgcaaaatgccagtaagtacagttctgtctgccaacaagagagacagact

SEQ ID NO: 483458 - DNA, 122 bp, Homo sapiens
ttactgagccaagacagattgatgggtgtatcctcaccctacagagacgagcttgggttacagcactcattccctaaagactacaggaggcatacacctgaactttggttcctggacctgct

SEQ ID NO: 483459 - DNA, 122 bp, Homo sapiens
gatgaagcttgtgaggaaggcatgtcaaaagccaagagaagttgaaagccaggcctctcacaccagttagccaagttgggaatgcaaaggaaaagttctgttttgtgttttgttttgtttga

SEQ ID NO: 483460 - DNA, 122 bp, Homo sapiens
aggcttatggaggagacaatgccagcaggtagaagggaccagacaggctgcagtgggctacagctctgcctcaaatggttgcaggggtgtgagtcaaacagctctccttggaccataccttt

SEQ ID NO: 483461 - DNA, 122 bp, Homo sapiens
atttttgccaaaaatgtttagctggatttgaataattaggaaacagacacaggcagattacaggacattctacaactggcctggactcttcagaaatatgaactgtatgtatttgatgctaa

SEQ ID NO: 483462 - DNA, 122 bp, Homo sapiens
ctcccgccttggtctcccaaagtgctgggattacaggcgtgagccaccgcgcccggcctacagtctgagaaaagtcatgctgagttccagtggctgcactggaagagtttgtgtcaccctaa

SEQ ID NO: 483463 - DNA, 122 bp, Homo sapiens
ccttccagactctgagagtacaggctgttggagccacagcccccgccctgaaggattttacagctaccaggaaagatgagatgagacatcagtaaaagcagaaagcaggtctcaggatggac

SEQ ID NO: 483464 - DNA, 122 bp, Homo sapiens
tatataaaaatcattcaagctgtacatgtaagatgtggatggtttactctataaaagttacacctcctgtttcaaaaagtgaagtgtggagtgaagtgttgaagggaacagcatgaactgaa

SEQ ID NO: 483465 - DNA, 122 bp, Homo sapiens
gaggatcaacacagcacccacttagggatctattaataggatcagacgagttaagaggtacagcactcagcccagggtctggcacacagtaggtgctcagtgagcacaagcatggttattgc

SEQ ID NO: 483466 - DNA, 122 bp, Homo sapiens
ttataggtcattgtaagggctggaagtaataaatgtgaaatagcatagtccagcataatacagcaaggacactggagtaggtttttattgatttttgctcatggtgataaagtgaatggctg

SEQ ID NO: 483467 - DNA, 122 bp, Homo sapiens
gtaaagacagagatgtacaggaaatgccctgtgtgacagtgaaggcaaagattgaatttacagcagctgcccactaaggaatgacaaagactgacagcaaaccaccagaagctaggaagagg

SEQ ID NO: 483468 - DNA, 122 bp, Homo sapiens
agctaagaagcagtgcttaaccagccattgagtgagctgttagggaccctggaataattacagccttctcaaatgagaagatgaagaggggttttttagtgtgtgtgtgtgtgtgtgtgtgt

SEQ ID NO: 483469 - DNA, 122 bp, Homo sapiens
tgtccaacaggcacagcacaggcacacgtggggctctgcaggcagaccctgcactattcacagtccttaacaacagcatttggcttagggactctgagccatgctgctccttctttagttta

SEQ ID NO: 483470 - DNA, 122 bp, Homo sapiens
aaaaacaatagagtaaacagaagcacagctttcaccaagtgtgtttgtccaatctctttacagtactatgcaggatgacatttttattctccatgagcaagagtatgacagtttgcttgaat

SEQ ID NO: 483471 - DNA, 122 bp, Homo sapiens
acggcatgtactcacacatttgcagtgtgcacagtacttttcttgcccttaatgagtttacagctccagtcacagacataaaacccagctgaattcatccctgagatgggtggatttagtca

SEQ ID NO: 483472 - DNA, 122 bp, Homo sapiens
gtctcaaattcctgacctcaagtgatctgcccaccttgacctcccaaagtgctggggttacaggcatgagccactgtacccagcctaaaagaacatcttaaaagttatataataaatgtttg

SEQ ID NO: 483473 - DNA, 122 bp, Homo sapiens
ggctgcctctagcaggtctttttccagttctaagctgggatccaagcctgttgtgggctacagtatgcaggatttgcacttccctggcacatggatgagacactgtgatcccattggtagct

SEQ ID NO: 483474 - DNA, 122 bp, Homo sapiens
tacaaccagtttcttgtgtacttgtatcaccagagatagctatggatcaacagggttttacagtcattttttgtttgtttgttctactcacatggtggtctactgtgcacatgtacttggct

SEQ ID NO: 483475 - DNA, 122 bp, Homo sapiens
tgctatctgggattatgccagatggttaccttgaaaggaggctgggccaccatcattttacaggctgtcatgaattattagtgtgggtaatgattttctgaaacttccaacaaggatgccat

SEQ ID NO: 483476 - DNA, 122 bp, Homo sapiens
gtctcaaacccctggactcaagcaatgtgcctgcctcagcctcccaaaatgctgggattacaggcatgaaccaccatgcctggccagcagtatgtactgtttgttttgtttttctttgttta

SEQ ID NO: 483477 - DNA, 122 bp, Homo sapiens
catcataacagatacctattctctgtgagaaaaatacttaccagagccttatcccatctacaggaaaaggcagctgatgaagcccagctttcctatctcaccaaagggaggagaaaaggaaa

SEQ ID NO: 483478 - DNA, 122 bp, Homo sapiens
ggactactactattatttgaaactactaacaaatggagctagtaggtatttctcttgttacaggggcactgtgaaaaagttcccagacacaaaagcaccatgaattgagaaagtccgggagc

SEQ ID NO: 483479 - DNA, 122 bp, Homo sapiens
agcaaaagagaaatagagatgactaattggatgatgtgacaaaaaaactagttgtccttacaatacttgtgccaatatggcaagggccaagggtcaatgggtcatcatgcatctaaaagcag

SEQ ID NO: 483480 - DNA, 122 bp, Homo sapiens
ctgcaagactttgccaaggttctagtaggtcaagccctgatcttgaaggcaaaaggcctacagtacctcactttttaattagtttaattgtctgcctgtaaaggtaggcaatgagctctttt

SEQ ID NO: 483481 - DNA, 122 bp, Homo sapiens
tcctcacagatggtagtggcaagcttctactgacaacaggctcttacccactactgacaacaggctcttacttccaaaagcagccaagaaggctcaggtgctgggccacattcccaaacagc

SEQ ID NO: 483482 - DNA, 122 bp, Homo sapiens
aggtcagaaaactatgatcctgtggcctgtggtttttgtaaataaagttttattgggacacagccatgcccatttgtttgtgtgtcatctatggcagcttttgcaatacaatgagagttgag

SEQ ID NO: 483483 - DNA, 122 bp, Homo sapiens
gcaaacctcattgctgtactagcatgcagaagaacaccaccaggtctcttagggcatttacaagactgctgggagatgagatggcagaatgggagtatcactacctatgtgaaaggatgaag

SEQ ID NO: 483484 - DNA, 122 bp, Homo sapiens
attaaagacataataatgtgaaataatatggtaatactaaggaatgagaaagtggccttacaggtgggcaatgtaaactttcctgtagaaggattgaaagtaaatagatgtaagactagaaa

SEQ ID NO: 483485 - DNA, 122 bp, Homo sapiens
gtaggtgctggaattgtgctcttcccccattgcaggcctagggcaggaggagaactgctacagctgcagtttcttctgggcagtgagacttgcagccaaggtcagcttggtgaactggaact

SEQ ID NO: 483486 - DNA, 122 bp, Homo sapiens
aaatgagccatttcctccttcctacttctctctgaagcaacaaaacagatttacaacttacagttcttggcaagtcatgcagaaaatttatggaaaggctcttttataatccttcctgcacg

SEQ ID NO: 483487 - DNA, 122 bp, Homo sapiens
tttaattaagtttctctagtgattctgatacagtggcttcagcgtacactttgagaattactgctgtggtcttgtgcaggagtacaatcctagtaccattttcagaccccacatatctccta

SEQ ID NO: 483488 - DNA, 122 bp, Homo sapiens
gaccatcaagatgaatgaatcagacattgtgagtagccctgtgcctcttacctccacctacacctcaggcttatgggtcagaacccctaaggagtcctgaaatttctgagattagaaacttt

SEQ ID NO: 483489 - DNA, 122 bp, Homo sapiens
ttatcacagtaatagatgatggatgctgctaatgaatatttttttgatagtaaagtagtacagccataaaatgtataaccatggctgagcctaaagtttctaaatgtaagaattggctgggc

SEQ ID NO: 483490 - DNA, 122 bp, Homo sapiens
attcgaataatgaacaggtgaaatcaacctgaacaagcaagacataggaaatatgaattacagccaggagcactgcaagatattgggggcaagagttaaacccatcaaataatacaccgact

SEQ ID NO: 483491 - DNA, 122 bp, Homo sapiens
tcacatatgttctatccttgaaaatgacctatgtgccgaagagaaagaatgcgtattctacagctgttagaggaattcttctgtaaatagctattaagtccatttggtctatagtgcagatt

SEQ ID NO: 483492 - DNA, 122 bp, Homo sapiens
gggcaaggtcctgctgatgcaggtggggacaagaacaggccctctgctctctcaaggttacaggaccaatgaagatgtaatgagttaggtacaaaaactgcaaatgaagaaatgagccatta

SEQ ID NO: 483493 - DNA, 122 bp, Homo sapiens
aacaacagcagtgggctgggcagacaacctttgggcagtctcaaccttaatccttgggtacagcacctgaacttaattgatgagaagtggaacttaagtggtttccctggtgctgttcatta

SEQ ID NO: 483494 - DNA, 122 bp, Homo sapiens
atacacctgtctcctgctgggactattgcttttaatagcttactgctttgctttgctttacagctcttacaaacttaaggaaaggatacctgtttatgtataatcttgtgcaattcttggga

SEQ ID NO: 483495 - DNA, 122 bp, Homo sapiens
gttccagctgttgggtccctctcagctgtggagtctttgcagtggaggcctcagactttacaggatggaagcaagtcagccctcctgtgctctgtgcaacttccagacctgcagaaccagga

SEQ ID NO: 483496 - DNA, 122 bp, Homo sapiens
cccactgggacttagtatattattctttatagatttgatttactagcattttaatatttacagctatataaaaagatttgtctgaggttttcttttatgtttactgtggtaggttttagtgt

SEQ ID NO: 483497 - DNA, 122 bp, Homo sapiens
gaccgagaaggtgacaggtctgggaccacacctccttccctaggtagaagggtgcatctacagcttcagcaacagcagctaacatggagcatggattgtgtgctaatgtgctgaatacttta

SEQ ID NO: 483498 - DNA, 122 bp, Homo sapiens
acattttaattgcctacctagatcttagtttaagttcttttattcatcatttttattttacagtaaatttgagcagctgaagagaacaatgagaaaagtcaatttaatgctgtagttcacta

SEQ ID NO: 483499 - DNA, 122 bp, Homo sapiens
tgggagcaaggaactaacgttcactatgttgaggccctgagatttcggggctgctggttacagcaggtggagttgggcattttccagagtgtcaagaaacttctgttgctaccatactaggg

SEQ ID NO: 483500 - DNA, 122 bp, Homo sapiens
tgagcaaataaagaagcattcagcagatctccctattaccccgcactggtttggcaggtacagcagctctgccaaacatcaatctggctgattcctaaaaggtgcagttgactctcattcct

SEQ ID NO: 483501 - DNA, 122 bp, Homo sapiens
ccccagtattgtcagcatttggcttctatcagtcactttatgcaatttccacatcatttacaggaggtaagtgccctctgtaactaaaacccaaatagctatgtagtatttggagggtttaa

SEQ ID NO: 483502 - DNA, 122 bp, Homo sapiens
aagagactatcaagttttctagcacattaatttgccctattattcccatctccagctccacagccagcttagaagctgacagccctcaatcacaatgaaaaccagaagcctgagaggtgaat

SEQ ID NO: 483503 - DNA, 122 bp, Homo sapiens
tgaactcctgggctcaaggcatcctaccactttggcctccagaagtgctgcgattgattacaggcatgagctactgcacctggcctatctttgtagatctatctattattgaaagtggagta

SEQ ID NO: 483504 - DNA, 122 bp, Homo sapiens
ggcaacatagctagaccctgtctctacaataaaatatatgttaaaaagttaaaatataaacagcacttcaaatctgataacctgtaggccacaagtggcctgtagacatgtttcgtttggtt

SEQ ID NO: 483505 - DNA, 122 bp, Homo sapiens
tagagcagtgactgtctgtacaagggaagcgctaatgagtgtttggcaaaggaagttttacacccttagccacaaagtaatattcagggcattaaggagtgaatttggttggctggtaactg

SEQ ID NO: 483506 - DNA, 122 bp, Homo sapiens
tttgagtgctgtagggtccaaaggtacatcttagtacagaatgaagcccaagtggaacaacagccaataccaacatgacagttccagcccatttaactgactacagttttagtcacaaacaa

SEQ ID NO: 483507 - DNA, 122 bp, Homo sapiens
aaaccactctttggcttcctcccaagtcctcctgtctattggccttgtgcctaatatttacagggagaactcctgtgctatgccaagaggcttacaagggactccacatgtaacagaattag

SEQ ID NO: 483508 - DNA, 122 bp, Homo sapiens
atcttgtcgtacttgatgatgactttttgtgggacttaatgctaccttctgaattgattacagcacatcagggattctctagttcttgaaaatgtccaagtagagtgcctgaaatgacctca

SEQ ID NO: 483509 - DNA, 122 bp, Homo sapiens
acccctttccagtaacaggactatgagaaaataagtctgttgtttaagccacttactctacagtcctttgtgatggcagcctgagctgactaagacagagtctacagttacatctgacatag

SEQ ID NO: 483510 - DNA, 122 bp, Homo sapiens
tatagcaaagggggcattgtcctttctgaaatgccagatcctttataagctggagagttacagtcactgtttggtaattgccctgccccctgctagtgcttccattcttggctcttataata

SEQ ID NO: 483511 - DNA, 122 bp, Homo sapiens
ctctgtctcaaaaacaaacaaacaaacaaacaaagcaggagagccatggtgaataaacaacagcacatctacatacagtaagaaacacaaggcagagagatgggggattctgtggactggcg

SEQ ID NO: 483512 - DNA, 122 bp, Homo sapiens
gtgtcgaactcctgggctcaagcagtcctcccaccttggcctcccgaagttttagggttacaggcaagagccaccacacctgacccactctttgagattttgatgaagaagatctggggtag

SEQ ID NO: 483513 - DNA, 122 bp, Homo sapiens
gagcctattgcaagggaaactcggtgtttacttatacaggaggaccagtgaaatatactacagcacatccatctagtggaatactatgcagctctaaaaataagaatgagtatgctctctat

SEQ ID NO: 483514 - DNA, 122 bp, Homo sapiens
ggtctcaaactcctgacttcaagcaatctcctgcctcagcctcccaaagttctgggattacaggcatcagccaatgtgtctggctggcttctatgttaaatacctcctagggaatcttatca

SEQ ID NO: 483515 - DNA, 122 bp, Homo sapiens
tgggccttcaaacgagtcccactttgcctgattacctgtttgctcataccctttagactacaggaaacagctttcaaaaactttataccaagggttgggtatgttgcctcatgcctttaatc

SEQ ID NO: 483516 - DNA, 122 bp, Homo sapiens
atgccaggcccaaaacctttttaatcttcagttttctttcctggacagtggagacaatcacagcacctctcaaaggattaagaaagatgctccaggtcaactgttgagcacaatactaatac

SEQ ID NO: 483517 - DNA, 122 bp, Homo sapiens
tggaaactctcagctatattttgtggctcccacaaaggtattctcatctgtgggtggttacaccaactggtgtttccttgaggggaatgagagctagattctcctgttctgccatcttgctg

SEQ ID NO: 483518 - DNA, 122 bp, Homo sapiens
gaaatgtttagaaccacatctgccagtcacagaggacctggtattgtatgattcgatttacagcccatgtccagaggaagcaaatccacagatacagaaagtctagggcataacctagggat

SEQ ID NO: 483519 - DNA, 122 bp, Homo sapiens
atacgatgacagatttcgggatgctcttcctgttgttctgggaagtgctatgttttcttacagtcttaatcttaaaaggatgacaaactttaaggatgctggtaaaatcaacaaataaccct

SEQ ID NO: 483520 - DNA, 122 bp, Homo sapiens
cactacaacttctgcctcccggtgatctgctcgcctcagcctcccaaagtgctgggattacaggcatgagccaccacacctggcctatgattcatttaaaaaagtacaacccaggccaggca

SEQ ID NO: 483521 - DNA, 122 bp, Homo sapiens
gagcaaaatgtactcaaatataacacagatttattacttattcccgaggggaatacattacagtcactagtgttggctatcataaacaaggctttaaaaagtttcttaaaactgcactaaaa

SEQ ID NO: 483522 - DNA, 122 bp, Homo sapiens
aatgattcagataaggccaaggctgctaccacaggccagatccaaccactaggcaacttacagttcactggagctgtaattcagcaaattcagcttggcagatgtgactggcccctgagagt

SEQ ID NO: 483523 - DNA, 122 bp, Homo sapiens
tgaaggtggaccagggtgataagatactgagggtgggagattttcaataaactgactcaacaggattcttgctaaaagtgggcctggaataaggacaaagaccaaggtcaggacctgttcgg

SEQ ID NO: 483524 - DNA, 122 bp, Homo sapiens
aaacaccgcaaagcaaggtttccccagaggactcttcagtgcctctattaagcacgcttacagcatcaatctccaagagagggtgtctctctgcagcactcaccaaactttgctgttgatgg

SEQ ID NO: 483525 - DNA, 122 bp, Homo sapiens
ggacatgtacgagtctgccaacagcagggtaggttgctgtttaccgtgctctggcctctacagcatctgtagtagacagcactacatttgtctgctttgttatctggaaatagtggaatcta

SEQ ID NO: 483526 - DNA, 122 bp, Homo sapiens
acttgcatggggttcactatttatagttttcttgggagtatcacaggaaaatcacaattacaccactttagaccctatgtgtagcaggtcacaacttacccttgtgtgtttagatgtgtatg

SEQ ID NO: 483527 - DNA, 122 bp, Homo sapiens
cgctgtgctccgctcgcctccttggatttaatgtgcacaaatcacagacctctgtagttacaggacctaaagtctgcacttgattctgctccctactggccagatgaccttggggaaggcat

SEQ ID NO: 483528 - DNA, 122 bp, Homo sapiens
ctgtattcctattgaaattcttaaccattgttgaacaagggaccccacattttaattttacaccaggtcctgcaaatgatgtggctagttctatctaaaatggggttttggctgggcatggt

SEQ ID NO: 483529 - DNA, 122 bp, Homo sapiens
aggagtgagagtgaccggctctatcgtgctgggcatattttgcaggagcccattacattacaacatggacaatttccaatgggtggtcaccttgctggtgacttctgaacagcttcgttttt

SEQ ID NO: 483530 - DNA, 122 bp, Homo sapiens
tcagcctttactcagcaggttgcagccatgtcaaaggttaatacatcagttctgtatccacagtcacctagatgtcaagtccaattcattgatttgcaaaaattatgtcaaagaggctgagc

SEQ ID NO: 483531 - DNA, 122 bp, Homo sapiens
aatggcaaaggcagatgtctaatacatacccaaatgactttgttaacttttttgttcctacaggtttatcactatgctgtaattcatagaacactctttgtaatgctaaagggacgctttta

SEQ ID NO: 483532 - DNA, 122 bp, Homo sapiens
aaacaattgaaaagtaggcattgagtgccttctgttttcccattgtaggttttcacattacagctcatgcagaaaagtatatcttcatcagatgcctggcagccctgaaagctgaggggctg

SEQ ID NO: 483533 - DNA, 122 bp, Homo sapiens
ccatttctcagatgaggaaactgaggttcagaaagggactgggacttccttaaggtgacacagcagggaagtgacaaaaccagccctgactggagttcctgtttttcccacagggcaacact

SEQ ID NO: 483534 - DNA, 122 bp, Homo sapiens
atgccttttacctacctgcaagaaccacttttagaaatgtttaagactgttccacctatacagtcattgatctctcttgataaattcttggacagaaggtttacagatactggaactctaca

SEQ ID NO: 483535 - DNA, 122 bp, Homo sapiens
ttataagtaatgtatggtaaaggagggattttaaagataagagaggttcaaacgagtttacaggctcaagggaacaggcaagtaaagagggtacattagtctgttttgtgttgctatgaagg

SEQ ID NO: 483536 - DNA, 122 bp, Homo sapiens
tcttgaactccttggcctcaaatgaactgcctgcctaggcctcccaaagtgctgggattacaggcatgagccaccatgctcagcctattaaaaagttttagagcaggaatggaaggaagtaa

SEQ ID NO: 483537 - DNA, 122 bp, Homo sapiens
ggcttataggacaggcagaaaaatgggcctggagtggggaggacaatgtccaggttgctacaggaagccaacagctggccaaacctggggtgagatgccccagggctgcagggccacccatt

SEQ ID NO: 483538 - DNA, 122 bp, Homo sapiens
tgagccctgacatacaggatctggctcatttgaacaactgcaaggaggggctgagtgttacaggcacctacaagaggcagaaaaacaagatagaattgggccaggcctggacactgtctgaa

SEQ ID NO: 483539 - DNA, 122 bp, Homo sapiens
aactcccagtgacttcccaaggcagtccatgatgaaggcctggaagcacaaagggatcaacaggagctgttctcccaggggacacttgggacacccagactacagggaagagcgctgcacag

SEQ ID NO: 483540 - DNA, 122 bp, Homo sapiens
catggttaattaggaaagattttgaacatgcagaaaataataatagctgatacttatgtgcacctaatagatatgaaaatgttacatttgttggggagtggggtggtggagtggggtgggtt

SEQ ID NO: 483541 - DNA, 122 bp, Homo sapiens
gtcaaaccagtacaaggagtttcaattagcaaaacttaaactcagtaattaaaccaactacagtactagggtgaacatctaaataaaatgtccaagaatgattgtcaacaaccattcaagga

SEQ ID NO: 483542 - DNA, 122 bp, Homo sapiens
aacatctatcactctatgccaatcagcgaatgttaggaaggcatgaggaaacctattttacagctgctgactctgaagtggagaggggccaaaatgctcagcccaagtcctcaactttgaag

SEQ ID NO: 483543 - DNA, 122 bp, Homo sapiens
aaaatggttcaatggctcagggaatgtattgacaaaataaataaatgtgaacacatgacacagcaccattgccaaattaggaagtaggagagatggaaactgtttaaaactttgtgagaatg

SEQ ID NO: 483544 - DNA, 122 bp, Homo sapiens
gtagcacctgaaagtactctacagacagtagctcttactgtgaggtgtgatactcaggtacaagagtgtccacaatgatggaacaggatggaaaaaatggttcaatggctcagggaatgtat

SEQ ID NO: 483545 - DNA, 122 bp, Homo sapiens
gtcttgaactcctggcctcaattgatctgtctgccttggcctcccaaagtgctgggattacaggtactcagcttaggtttgaatcttgattcagtcagctaacagttctgtgctttgggaaa

SEQ ID NO: 483546 - DNA, 122 bp, Homo sapiens
gttaggtttttgttagagaacacatgtaaaatggactagcacagtgtacttggaatgtaacagctgctcaaaatgtgtgtgttgaatctgagtctactgtagaaaaaaatggatggtgagta

SEQ ID NO: 483547 - DNA, 122 bp, Homo sapiens
tagaccttttacatattgctttggcctccagacgccatgaacaatgactgagattccctacagacatcatgaacaatcagtgagattccaaggatgctgtgaactgagagagtttgggaaca

SEQ ID NO: 483548 - DNA, 122 bp, Homo sapiens
tgacttttactctgagttaacacgaggctattgcagggctccaggaagtgaattcttttacaggatgtgatgtagaagcagacagaaaccaggaagctagttagaaggatactacaacaatc

SEQ ID NO: 483549 - DNA, 122 bp, Homo sapiens
ccagtcttactgatgtggaatctgtgcaaagagaggttgagcagctcattcatcatcacacagctattaagtgtcagaatggggatttgaaccttggctcatagggctcctcactgctgtgt

SEQ ID NO: 483550 - DNA, 122 bp, Homo sapiens
agtagagggctgaggatctgaaggttgttgctgaagcttgttcagctctatctttggaaacagtatgttcacataaagtgctgtattggttttctaagactgttacctcaagtacttcaagc

SEQ ID NO: 483551 - DNA, 122 bp, Homo sapiens
acaggaataatttctgtgctgtgggtttggctgggcatggcttagcccattgtttcattacacctgttgacaacaatgacatttatagaggctgcagggaactagttaggcctttttggctt

SEQ ID NO: 483552 - DNA, 122 bp, Homo sapiens
gtgtggcctgcggtcagtcacatagcttctctgtatgcattttcccacctaaaatgaatacagcaattgtaataatgataataatgataatatgcttcattttaagatgcacattttttact

SEQ ID NO: 483553 - DNA, 122 bp, Homo sapiens
tatctctttatggaaagaacacgagagattgtgcagcttttcctatagtgtgtggatttacaggagcaaaggcatcactttgtgaacaaacttggcaaacactggaaagagagaagtgagaa

SEQ ID NO: 483554 - DNA, 122 bp, Homo sapiens
ctgttggaacagacagagcaacttggtcgagtggcaatgaacagactccagtttaaattacagtccattaagaactgaagatctgaccatacctatgaagttatttctgaatagctggctga

SEQ ID NO: 483555 - DNA, 122 bp, Homo sapiens
ttccagatgccagtaagaacatttgtgattcatgggaggaggtaaaaatagtaaaatttacaggagttaaatcatagatgacttggaagggttcaagatttcagtggaggaagtaactgcag

SEQ ID NO: 483556 - DNA, 122 bp, Homo sapiens
cttcacctcccaaggttggtttccatgagatagtgttgttttatagcagtttaatggtcacagctggcagtatgtgcagagctgaaatcacagtagacttgtgtatttggtttatatatagg

SEQ ID NO: 483557 - DNA, 122 bp, Homo sapiens
agtacaagagaacatcaggtaaattgctgagggttttgatgccagtccctggctcccagacagcatttctgatcaatggggcttgggggagctcaccaccctcaagggaagggccttaggca

SEQ ID NO: 483558 - DNA, 122 bp, Homo sapiens
acaagtgatagataaatccttcggttgggttgagccactgagatcaggggtcagctgttacagcagcaccacttggcctatcctgacagatacatgtgggtgaccctgacatggcaagacaa

SEQ ID NO: 483559 - DNA, 122 bp, Homo sapiens
tagggctgccgtaacaaattaccgtagaccacgtggcttaaacaacagatacagtgtctacagttctggaagctagaagtccaagatcaaggtattggcagggttggtttcttctaaaggct

SEQ ID NO: 483560 - DNA, 122 bp, Homo sapiens
caccaggagtagagtgtaccgtggacatgcagagagtgcccagcaagtgattaaacattacagttcaagctcccttgtgcattttgctaatcaaagctataattatattttgtgtttcatat

SEQ ID NO: 483561 - DNA, 122 bp, Homo sapiens
tggcgaggatattattcacatcagtgaataaaatgctaattttagtggggggctgacaaacagttctcacacaccagtgtgcaccaacatcccctggagagtgtgttggagcacagactcct

SEQ ID NO: 483562 - DNA, 122 bp, Homo sapiens
ctgtctcaaaaaataaagaaaatatattatgaaatagttacagtactgtaaaaagtattacagtatggcacaaacttgtggcagcatgtgcagctgttctcagaaggcaatgcagagtggtg

SEQ ID NO: 483563 - DNA, 122 bp, Homo sapiens
tggctcacggttctgcaggctgtacaggaaatatagtggttttggcttctgtggaggcctcaagaagcttccaatcatggtggaaggcaaagtgggagcaaggtgtcttacaaggcaggagc

SEQ ID NO: 483564 - DNA, 122 bp, Homo sapiens
ctctaacttttgaattacagcacgtctttccgtataatgaccaggctgtgcagtaatttacagccagtccctggccttgctgagtagcagggaaatgctgtggaagtgactgttaatattga

SEQ ID NO: 483565 - DNA, 122 bp, Homo sapiens
tctttagaatttccattggaatgttattaaacttattaatttgaggtgatttggtatctacagttttgtacaattaaatataaggtggtatattgtgtgtgtgtgagcatatgtgtgtgttt

SEQ ID NO: 483566 - DNA, 122 bp, Homo sapiens
aatgctttgagcagcatggatgaaagcagctgagaagtacggcagcgggatttctggttccaatcaccaccttgctgcccttgagggagactatggctgttccccagagttcagggctagga

SEQ ID NO: 483567 - DNA, 122 bp, Homo sapiens
agggcggtggttggaggagaaacaggctcttaggacccatccttttccagggaaataacacaagcactgatcctcagaacacaggcagcagtgtgggggctggcctgggaataatttctgca

SEQ ID NO: 483568 - DNA, 122 bp, Homo sapiens
tgtagtcccaactacttgggaggctaaggtggaggatcacttgagcccaggtcgaggctacagtaagttatgattgtgccatggaactctagcctgggtaacaaaatgagaccctgactcta

SEQ ID NO: 483569 - DNA, 122 bp, Homo sapiens
cagatgcacatgtatcagtcagagtaagtggtttatcagtgagatgaagtgaggtcagtacaggaggcttttaaagaggttccatgtagaccaagagagtgacagctaaagtcaaggcaacc

SEQ ID NO: 483570 - DNA, 122 bp, Homo sapiens
tccagaactgtaagataaacttatgctgtattaagccactaagtttgtgacaatgggttacagcagctatagggaaataatatggcaggtaatttactggtgcatatggctggaaaactcaa

SEQ ID NO: 483571 - DNA, 122 bp, Homo sapiens
taataccatgttttattgtacctttcctgtttagctatgtttagatacacccttctgttacagttgcctacattactcagtacagtaacacactgtaggtttgtagcctaggagcagtaggc

SEQ ID NO: 483572 - DNA, 122 bp, Homo sapiens
gtctcaaactcctggcctcatgcaatcctcctgccacagcctcccaaagcactgggattacaggagtgagccatcacacctgaactcttttgtaaattttgacccagagtcttttcttttgt

SEQ ID NO: 483573 - DNA, 122 bp, Homo sapiens
gtgacccagaagatttcatcacatgtggaatttgatatgtcagagagccagttaaagatacaggtcttgggatgaaagcaaagacttagactaaaaatctaagttttgcagctgtagacggc

SEQ ID NO: 483574 - DNA, 122 bp, Homo sapiens
tctgtcctcacatcctttcaggcttaggtacagcaggaaggagaaagttggcttctcttacagctcaaacaagtactaggactgaatcttattgactactgtcatggctaatttgatgtcag

SEQ ID NO: 483575 - DNA, 122 bp, Homo sapiens
tgtgaaatgtggaggcagcagcgccttccctgagacgcgacaggcactcagcatgaattacaccaggtaagtctagagaagcaggtggcaggtacctggatataagtgaggtacaaccttga

SEQ ID NO: 483576 - DNA, 122 bp, Homo sapiens
gggccctagcattgctgtgtgtaaaagttttccaggtgattctaatgagtaggtagaatacagcaccattggtgtagggcctggcacagttcctggcattcagtgggtgtttaataaatgtt

SEQ ID NO: 483577 - DNA, 122 bp, Homo sapiens
ggatgggctggcaccgtctggatgagtaactgaatgcagtcgagtgagattcataaattacacctgcaccatggcaagctggactttgtcaggcaagaggctcttggactcctgctatcaga

SEQ ID NO: 483578 - DNA, 122 bp, Homo sapiens
ggggctcatttcagatgctacaactttagtgtcagagccaggagagagaatgtaactttacagcccagctctgggttcctgggctggaagaaaatgtcactttctgttcacgtggtccttac

SEQ ID NO: 483579 - DNA, 122 bp, Homo sapiens
gaaataggaaatcctcaagctgacctagctcagaggccacatttgccccaagggcatctacaggtcctagcaaatttgaatttctgtttttatggccttgagggtcaaggggaacacaaagc

SEQ ID NO: 483580 - DNA, 122 bp, Homo sapiens
cagccagcctaatatgccaacagtgacaaagctggggaggctcgacacattccaggcagacagctgtcacttgctgtctgcctgcagtagtgaatggggtggggcattcttgtgtaatctga

SEQ ID NO: 483581 - DNA, 122 bp, Homo sapiens
gattcaaatcagatgaagcaggtggaggagatccgggatctggaaacccacttgctgttacagccacatgttctaggtgctttgctgtggctgctccaggggagagtcctgtgcaggggaag

SEQ ID NO: 483582 - DNA, 122 bp, Homo sapiens
aacaaacagcttagaaacagagcagtttaaaacaatacctttgtttaattcgtaattttacagcagtttgtgctgggactatctgggtggttcttctggcatctgtggttgtcttctggatt

SEQ ID NO: 483583 - DNA, 122 bp, Homo sapiens
ggacccttcagagccaccctttctagtttgcatttcctggtgcacacatttaaggcataacagcacattcatccctttggtttgggatctcaggaatacagtcccatgcaaagattctctgg

SEQ ID NO: 483584 - DNA, 122 bp, Homo sapiens
ctgtcttccatcatgtggtcttcagcaggtagaggttccgggaagccacaggtcaggcaacagccatcttggccaaagcctggcatgatggggctgacaggtccttaggtcacaccagcccc

SEQ ID NO: 483585 - DNA, 122 bp, Homo sapiens
tgaatgaaatacgatttgaatgaatgaataaatgaatgaattggactgatgctggagatacaagcagatagactgggagaagctttctagaaatgaggcacttaagcaaagcctcagtggat

SEQ ID NO: 483586 - DNA, 122 bp, Homo sapiens
ctacctttctaacaagtccccagtgatgctgatgcgtctggaccacactcagatggtttacagcagtggttctttcaaaatgtggatcatgtccaagttggtgaacaaaactagtgaaagac

SEQ ID NO: 483587 - DNA, 122 bp, Homo sapiens
taaacagatctttaggtataataaaggaggaaagcacagaaatacctaggggtagagttacagggagaggcagttgcaagtaccaagaccccaaattgcctctgtttgaaatgagagaaggt

SEQ ID NO: 483588 - DNA, 122 bp, Homo sapiens
actctcaaatatttcctgttcttttacctctgggtctgttttctaaaaactagagatttacaccagggagcagcaagctataggcctgcagcccagatccagctcactgcctgctgtttata

SEQ ID NO: 483589 - DNA, 122 bp, Homo sapiens
tgcactccagcctgggggacagagccagatcctgtctcaaaataaaatgaaataaaattacaattatcaccttgaaaggaatgaaggcttgggaattaggctaggatgcaagatcggtggca

SEQ ID NO: 483590 - DNA, 122 bp, Homo sapiens
atagtcgtcaattttatgtaacaaatgggcatggttgtgttacaaatacaacttcatttacagcaacaagcagcaggctggatctggtctaagctctgtaatttgctaactgacttaggtca

SEQ ID NO: 483591 - DNA, 122 bp, Homo sapiens
ggaagggtgttcccagcagcagggattgcaagtgcaaagtcctagaaatggggtgggccacacctgctccagaaagctgctcactatggctggaatgaaaagaaaagcaaatacaccttgat

SEQ ID NO: 483592 - DNA, 122 bp, Homo sapiens
aggacagttggggatacacagtcctactggctagctcaggaactaagagtattatctgtacagcagtaactgatgtggcctttgaacaagggagggtgtgcaatgaagttgcctcagaagtt

SEQ ID NO: 483593 - DNA, 122 bp, Homo sapiens
gaaacaagggaaagagcagataacttttcctggggataatacttttgagcttatactttacagcaccatgttggagaaccacctctgcaaccctggaatgggatatatgacatttgagctcc

SEQ ID NO: 483594 - DNA, 122 bp, Homo sapiens
gatctgcaagggcttgtttatcctgccaagcagtgggacagaggaacatttccgactcaacagctactaactgaacatggagcaattctagggagccctacaagaccctatcaaaagtgtcc

SEQ ID NO: 483595 - DNA, 122 bp, Homo sapiens
agaagtcagaggtgagtttggggcggagccctggttgtcccctgggaggctccattattacagccctgcagattagcaacagccaagaaaggaccaacagcctttagatcaggggtgtccac

SEQ ID NO: 483596 - DNA, 122 bp, Homo sapiens
tggggtggcactgtgtaggtgatattcaaaaccatgggataaatgtggcatatctccctacagaacccattccacctcacagttttggggaaaacattaaggctagtagggaatttaaaaca

SEQ ID NO: 483597 - DNA, 122 bp, Homo sapiens
aaagtgtatataacataaaataagccattttagcctttttttttcttttttttttagagacaggatttcactccccaagctggagtgtagtagtgtagtcatagctcactgcatcactgaac

SEQ ID NO: 483598 - DNA, 122 bp, Homo sapiens
agaactagggtgacgcctcagccatgcaggctaacacgcctgccaaggtggcactttttacaggctgacacaaacacaggaatctaactggggcttgactgaccctggacctcaaaggcaga

SEQ ID NO: 483599 - DNA, 122 bp, Homo sapiens
actcaggaaaaaatttaagagtaagccagtggtagaagctttattgaggtagcagtgttacagctccttcactgctcttgcagagcagggctactccttaggcagtgtgaggggttagcagc

SEQ ID NO: 483600 - DNA, 122 bp, Homo sapiens
agatgaatgatttgatgtctgtaaaattgtaccttccttttaaacttaatttttatcttacagcagcagccagtaaggaggagaaggggagagagctcatttgatattaacaacattgtcat

SEQ ID NO: 483601 - DNA, 122 bp, Homo sapiens
gtattcaattcctaggctcaagcaatcctcctgccttggcctcccgaagtgttgggattacaggcatgagccactgcacatggccaagattcttttttagggcaaaggattctatactgcca

SEQ ID NO: 483602 - DNA, 122 bp, Homo sapiens
gcgtcaaactcctgacctcaaatgatccacccgcctcagcctcccaaagtgctgggattacaggcatgagctaccatgcccagctgaaatttttttaaatgagaaaaagaagtctattttat

SEQ ID NO: 483603 - DNA, 122 bp, Homo sapiens
atgagacgtaagagatgacggtagagagggctttgagttattggtaaaaggtctaggttacaggcagctgaggtatgcatggtctattatcatgatctaatcactttattatcttgggattt

SEQ ID NO: 483604 - DNA, 122 bp, Homo sapiens
attgacaaacatgcagctaaaagtgatcagtgtgatgtaggttctgttctttgtgtcttacagtcagactatgacatggtggattatctgaatgagctaagggaaagctgcttggaagccta

SEQ ID NO: 483605 - DNA, 122 bp, Homo sapiens
tagtccagttgagcctccccaactcaactttcaagcttttatacagacatataagaaatacagtcagcaattgcacaaaaagatgtaaactgagaaataaaatctttcttcttacaggactt

SEQ ID NO: 483606 - DNA, 122 bp, Homo sapiens
tgcagacctctagagttctggggggttatttactagtcaaaaccagcttattgcatgctacaggaccctggtagaaacagaacacctaaccaagggacatcaggggaccagagccgcccatc

SEQ ID NO: 483607 - DNA, 122 bp, Homo sapiens
gactgtgagtcacctgacctctatcctgtagggtggtgtcagttaactggatatcaactacagcctccagcatcacagtgtaagttggtatacagaaaaggtgtccttttgtaaaaatcagc

SEQ ID NO: 483608 - DNA, 122 bp, Homo sapiens
ggtgatgctgttgctgctggtctatgaaccaaactttgagaaccatctgttcagtgcaaacagttcaactgttttcagagcatggcatccttacatgtatttcaattgtacccataatttct

SEQ ID NO: 483609 - DNA, 122 bp, Homo sapiens
gtagggagttaacagtctgattggaaagacaggatcctctactatactgtaggctccttacaggtaggcactatggcctatcagtctttgaatttccctaccaagctagggcccagagcaga

SEQ ID NO: 483610 - DNA, 122 bp, Homo sapiens
tccaggtgattctgatgcatagaatatttgagaacccctagacaaggtgttggccaactacagcctgagagtccatgagccaaatcctacccaaggcctgtttttctatggaaaagttttgt

SEQ ID NO: 483611 - DNA, 122 bp, Homo sapiens
ctccttctcttctcccacaatgtgacaagaaaggggcatgtttcagccctgtttgtgttacagctcttttagcctcaccatttggcaggtcctaagttcttgtcctgcaagaatgtggtacg

SEQ ID NO: 483612 - DNA, 122 bp, Homo sapiens
ctctagcctgggtcacagagtctcaataaataaataaataaaatctcagccctgcaactacaagaggtgatatttctttcagacagtcctagaagctgttagatcccctatgcagatttttt

SEQ ID NO: 483613 - DNA, 122 bp, Homo sapiens
agtgcagagcatatgtgttcttccacaaaattagtaacaccaagtgctatccccactttacaggagagaacactgaggcaaaggtggattcctgaaggtcaaccagctcccaagtggtgaag

SEQ ID NO: 483614 - DNA, 122 bp, Homo sapiens
aatgtagttctctattaatttagcaaatttgtacattcacaaaaggcagtttgtctactacagcagaaggctggttaactgccagaaaatgtacctccaggccctgcatgccgtcagtaacc

SEQ ID NO: 483615 - DNA, 122 bp, Homo sapiens
atagctgtcataggagatctgttaacttggttgatcatttttttggcatgtttataattacagctatgtggtttgactttatatgtttttatataaactatgtactaagtctcctgtttagg

SEQ ID NO: 483616 - DNA, 122 bp, Homo sapiens
ttaagtgtgaggcaaaagagttccctgtgcaactcttgagttcaattgatatttaatttacagtaccttaacatgataatatggatttccaatagaatatagtataagtgcttctaaaactt

SEQ ID NO: 483617 - DNA, 122 bp, Homo sapiens
tgagccaccatgcccggcccctgtaaacttttatatgcatttatttaatctgccattttacagacaaggagctaggtgttacaccagataaattgtcctacctcagagcattcaataactga

SEQ ID NO: 483618 - DNA, 122 bp, Homo sapiens
ttttaaaataaagaacctggtactattttttatttttattttgcccaagatcacaccctacagcatgtcagaaaggagatttgaacccatgtctgttctaggttttttccataacactaagt

SEQ ID NO: 483619 - DNA, 122 bp, Homo sapiens
tgcacatactttctaatacagaaatcccactgttaggacattggcctccagaaaaaaatacagcagttcataaacacatatgtacaaaggcatataaataagtagtggtggctgggcgtggt

SEQ ID NO: 483620 - DNA, 122 bp, Homo sapiens
actccgtctcaaaaaacaaaaaaacaaaaaacaaaaccctgaaacactagcagagatcaacagtacttgccttgcagagaattggaacataaaggctctgtcccctaccactcctcccagac

SEQ ID NO: 483621 - DNA, 122 bp, Homo sapiens
ggggtaatccctgtccctctcccttaaatacttttcaaaagggccaacccaaaacatttacagtcactgctagaggtacacttaaaagggactggtttggggacttcctgagtttctaggtt

SEQ ID NO: 483622 - DNA, 122 bp, Homo sapiens
gtcttgaactcctgacctcaggtgatccacctgcctcggcctcccaaagtgctgggattacagtccagtacagttttaaataggacaaatgaaaaagggaatccttgccttgttcctgattt

SEQ ID NO: 483623 - DNA, 122 bp, Homo sapiens
tacacatttgtatgcatttgtctgtttacttggtgttaccataccaattcaagttagttacaggagagagtccctttagcacattcactcatcagtctctttggatttagtgaaaaccaact

SEQ ID NO: 483624 - DNA, 122 bp, Homo sapiens
tggtggcccgaggaaactaatacagatttgtgtagagtaatgggaccagttctgtatttacagtcagttaactggctctgtacctcctagctgggtatctttgcacaactttgttaccatca

SEQ ID NO: 483625 - DNA, 122 bp, Homo sapiens
cagatgtaattcttcaggtttgaaagtaagggcctccccagctcccttatcactgaattacaggactctgtattttttaattgaaatttactcaaaaggggacagatattcatctcatacta

SEQ ID NO: 483626 - DNA, 122 bp, Homo sapiens
attggcttatttattcaaaaattgcctatgtgctaggtactatgcttgttgctggggatacagcactgaacatggttcttgtcctcttggaggttaaagttttaggaaggagatagacaaca

SEQ ID NO: 483627 - DNA, 122 bp, Homo sapiens
gacgacctccaccccttctccccggtcactctgttcatggctgtgtttgctgatcatgtacagctgtccaattttgtactacaaaacagagtcagagacagaaaggtcagccccacagcgtg

SEQ ID NO: 483628 - DNA, 122 bp, Homo sapiens
agctccagctctcaggatcatgggatcctccgccggctcagcaagatcctgcagaagttacagccatttgtgctgctgagacttttcaaaaaaaatgtgttattgcctctgttatggtttaa

SEQ ID NO: 483629 - DNA, 122 bp, Homo sapiens
gtctcaaactgctgggcttaagtgatcttcctgtcttggcctcccaaagcatgtggattacaggcatgagacacttacctagcctaaaaataagttaaatttttcagtggttattttttatt

SEQ ID NO: 483630 - DNA, 122 bp, Homo sapiens
atcttgaactcctgggctcaagcaatccacccaacttggcctcccaaagtgctgggattacaggcatgagctaccctgcctggggtaaaagaacactttaatcatttattcagtgcagtaaa

SEQ ID NO: 483631 - DNA, 122 bp, Homo sapiens
ctcaaacctaaaattgagttctggaagcagaaggcagagattggggctgataatcatctacagtcttttacatttcaccccatgggagacactgacattatgtttagtgatgttttctgtgt

SEQ ID NO: 483632 - DNA, 122 bp, Homo sapiens
gccttgacctcctgtgctcaagcaatcctctcacctcagcctgccgaggagctgggactacaggcatgcaccagcaggcctggtgaatttttgaattattattattattattttttgtagag

SEQ ID NO: 483633 - DNA, 122 bp, Homo sapiens
aacaagaggggaactctggaaaaaaaaaaaaaaaaggtggtcacaggctataatggactacagctggctgtttgaaaaacatagtggaggtgacaaagccatgagattggatgtgatagatt

SEQ ID NO: 483634 - DNA, 122 bp, Homo sapiens
ggaagctctgtctctcccacacccccagttggccactgtcaagttcactctttttctatacacctaggactcagacccagctcagacaataagagatggggggtcagggagggggtggagga

SEQ ID NO: 483635 - DNA, 122 bp, Homo sapiens
ctagtctttaattctcaaaaacagttccctgagagagggaacataattgcctctattttacagatgacaaaaccaggcttagaagttacacaaattgccttgcacagtggctcacacctata

SEQ ID NO: 483636 - DNA, 122 bp, Homo sapiens
gcctgcagcctccctgtctgtgtgagcccagcggcccaggtgcccagcttcatggctttacagcactgttaggagggatggaggctggagacttcattctgtttcacaaaaagaattcatac

SEQ ID NO: 483637 - DNA, 122 bp, Homo sapiens
ttattgtagaatctaaaagggacactttggagcctgtttaggcctatagtgaaaaaaccgcatatccagcaaaaaaactagaaaggagctgtgtgtgaaaatgctttgcaatgtgggcatct

SEQ ID NO: 483638 - DNA, 122 bp, Homo sapiens
actgttcacttaaaaaaatgtattgaggtataattcacataacacaaaataaccatcttacagcaaacagctcaggggcttgtagaacattcaccaaggtgtggaaaccaccactgcttcta

SEQ ID NO: 483639 - DNA, 122 bp, Homo sapiens
gagttgctcttttttattggtgggttcaattcagaggttacaatcatcggctacagtttacagcatactggccaaaatgtcctacagcaagacaatcagcaaaacttcatgcatcagaaaca

SEQ ID NO: 483640 - DNA, 122 bp, Homo sapiens
agaccattgtttactcagctactctccttcatggggactcagattgattctaataatttacagttacaaacaatatagcagtgagtaaccctgtacatgtttattgttggaggtgtgtctac

SEQ ID NO: 483641 - DNA, 122 bp, Homo sapiens
tgtgagtaatcaatgaaatctggttaatgtgtaagaacatagcatagtaaaaatgtgttacagctgagtgtcttgcaatgtatgctcatgtgaattaagtgctaaacacataaaataaatag

SEQ ID NO: 483642 - DNA, 122 bp, Homo sapiens
tagagggagagtgggtctttgcagggggataagggagaaccaatgaaacctgaataattacagcaagtgaactttcactgagcctgaggctgctgtgaccaggaaaacacagccagcataga

SEQ ID NO: 483643 - DNA, 122 bp, Homo sapiens
agatatcagaaggaaaaagcaaaacaaaaggaaatcaagatgagactagccaaaaaagtacagtacttgagttacatctggaccagagtaagtctgtttttgatgatggagtgtgtgcaaaa

SEQ ID NO: 483644 - DNA, 122 bp, Homo sapiens
tgcaatgggtaggatgttcacagagtgagacagagaggtgggctctgcaggtggaggttacagcaggagcaaaatcccagagatagtacagcaagtggcagttacttgcaatcaggaattgc

SEQ ID NO: 483645 - DNA, 122 bp, Homo sapiens
cataagaaacattagtatttgtagtcgttagccattgagatttagggagtgtttgttgtacagcaccatagcagaagtctgatggattcaagagctttgaatgacatgctaagaaatttagg

SEQ ID NO: 483646 - DNA, 122 bp, Homo sapiens
gtccacaaagatatccttaaaaatgaatgggcgaagttccccagaatgctgttgagaatacagtaccactgtttgcttaaagatgggtgaaaaagtgttttttggagggattctaggcataa

SEQ ID NO: 483647 - DNA, 122 bp, Homo sapiens
gtcttgaactcctgagctcaagtgatcctcctgccttggtctcccaaagtattgggattacaggcatgaaccaaagatcaatttgagaccaacatgggcaacatagcaagaccctgtctcta

SEQ ID NO: 483648 - DNA, 122 bp, Homo sapiens
tgtggctgctgagtagacttaagtgatggaaggcaaaggttgaaactgagagaccaattacagttactgcaattaaaacaagtgagataggattgtgtggcagaggccagggtggaagttgt

SEQ ID NO: 483649 - DNA, 122 bp, Homo sapiens
gacctcaggtgatctgcctgccttggcctcccaaagtgctgggattacaggcatgagccacagcacccagcctaaattttgtattttttgtagagacagggctgcaccttgttgcccaggct

SEQ ID NO: 483650 - DNA, 122 bp, Homo sapiens
caattcggcctcccaaagtgctgggactacaggcgtgagccactgtgcccagcctgtttgcagcagttttgtttaatagctctaaactggaaataggataattgataaataaattgtagtat

SEQ ID NO: 483651 - DNA, 122 bp, Homo sapiens
acctggctaccagacagtgacagaatgagctactggccagaaaggagtggattctctttacaccctagtgcatttcagaaatgctgagggtctgagctttgtgccttggcccaggtggagag

SEQ ID NO: 483652 - DNA, 122 bp, Homo sapiens
ggcacacagtaaatgctcagcaaatgttaattaccattaccattatggtgtttcagcttacaccactctgagtgagccaggctagaagtggggaatcaaataaacacagggaacagaaccct

SEQ ID NO: 483653 - DNA, 122 bp, Homo sapiens
cagattaaatggtgtgtctgagacttgctcgaaaataatagaaaacagtggatacaaatacaatcactcatgaagtataaaagtggtcatgagtcttgttggtgatgagttaacagaggtta

SEQ ID NO: 483654 - DNA, 122 bp, Homo sapiens
gcatggccccttggacacttccagcctggtaagagtgagacaataggcatctgttgtttacagttacccagtacattacagcagccccaggaaattaaagcaactgatttctcaaacacttt

SEQ ID NO: 483655 - DNA, 122 bp, Homo sapiens
atgatagagaaattaagagttcttttttcgttctgcccaagttcatgaccatgacatttacaccctctacatatggtcatcagtctgtaggtgaaattggcaactggatagtactcgctact

SEQ ID NO: 483656 - DNA, 122 bp, Homo sapiens
gaggaaaagtttaaagagatatagcaaattctagagaacatggcagtggttgggggtgcacagcagtcagctgagtagcagactctctgaaaaggggattaatatgtggaggcaaaagaagt

SEQ ID NO: 483657 - DNA, 122 bp, Homo sapiens
acacctgcaaattttgattgtttggggaaaagggaagctgtataggcactgtactgagtacaggagttagagaaataaataatagttacagccatcaatgacctgataacataatgtgagat

SEQ ID NO: 483658 - DNA, 122 bp, Homo sapiens
aaagggaagctgtataggcactgtactgagtacaggagttagagaaataaataatagttacagccatcaatgacctgataacataatgtgagataaaagttggattgtggtatggtggggaa

SEQ ID NO: 483659 - DNA, 122 bp, Homo sapiens
aaagggtagaagacatcccagagagaataattccacagagatcaggaaaatgggatgttacagcaactaggaaatgatcagcaatgtgaaatgctggcaaaagtcagataagaaaaactgag

SEQ ID NO: 483660 - DNA, 122 bp, Homo sapiens
actcttttagggacaacatggcaggtagtgacagtggcaaagcttgaccaagggactttacagccactgagtatataaaagggggagtagagtgaaaaccacatggcagtggtttcaacagt

SEQ ID NO: 483661 - DNA, 122 bp, Homo sapiens
aggatgggacacttgaaccaagtctcaaaaaattgacgggaatatgccaagtataccttacagtactccaggctggggagtggcatgcagataagtttggagttgtaaaacatcaagacaag

SEQ ID NO: 483662 - DNA, 122 bp, Homo sapiens
tcagaagtttaatagggagaccacggaaagagacagccaagaagagcccttctatgcatacagtcaagtccaatcagaaaggctgtgctaggctgcactcacttgggaaaaatcagagcagg

SEQ ID NO: 483663 - DNA, 122 bp, Homo sapiens
tagagaaaacaaacctgagaggggcatctggccaggttaggtcagaggcacactctcttacagactaagagtttttaaggattcagggtgggagaccttatcagaggtgtgggctgcttctg

SEQ ID NO: 483664 - DNA, 122 bp, Homo sapiens
tccattcaactgagggctcagagaatttattataaataattggagctaggttctcagttacaggttgaagagccagggacttgaagccaggtctgcttgattccaaatcttcagattcttgg

SEQ ID NO: 483665 - DNA, 122 bp, Homo sapiens
agaaagtggctaggggatgaagagttttccatgcaaagcacattctaaagcacaaaggaacagcacatgcaagggccctgaggcagcaaagagattagggccttcaaaaaaaacagaacaaa

SEQ ID NO: 483666 - DNA, 122 bp, Homo sapiens
aaaacgcttcgtttttcaaatttacgaaaaacatgtagtataacagtctcagccacattacagcaagatggttacagggatctcagaagagaacaaagcttgctcttggaagataatctgat

SEQ ID NO: 483667 - DNA, 122 bp, Homo sapiens
ggatggatggtccaggatgagagatggctgagaggtctcccagggcaaaccttcaatctacagcatgacattatcttgagcagagatgagaaatgactcttccaaggtcatatagcttgact

SEQ ID NO: 483668 - DNA, 122 bp, Homo sapiens
ccgggtatctgcttgtatgcttgtacctaacaagaaatgagtcctgggctaaatggtttacaccactcattaactcatctaatctctgtggcagtcccaggaaacatgtcagattggcctga

SEQ ID NO: 483669 - DNA, 122 bp, Homo sapiens
cagccccaaactcctgggcttgtgatccccctacctcagcctcccaagtagctgggactacaggcacattccactgtacctggctaatgttgtacttttaattttgtagaaatggagtcttg

SEQ ID NO: 483670 - DNA, 122 bp, Homo sapiens
tgtattctttttacatttgggggtcaaggcttgtttttattttttatttttatttttttacagcatggccactataataatgtattatatgcctgaaatttgctaagagagtaaacctgttt

SEQ ID NO: 483671 - DNA, 122 bp, Homo sapiens
agctacatctagaattacagattcaaaaacacagtggcaatccacccaagtcctcatttacagggttcaagtcttcaaatgatgggactgttcagtggtaacaccaagggtacaaaaagtaa

SEQ ID NO: 483672 - DNA, 122 bp, Homo sapiens
gccattatgtttaagttacctatgtatttgccagtagggtccagcccagtaactggcatacagcaggtactcaggaggcattggttgaatgttaaatattggaattgtgttaattatacagc

SEQ ID NO: 483673 - DNA, 122 bp, Homo sapiens
agacagccatgcataagttaaataaggaaggaaagaaaatttaggtaattggtagcactacaagcagtcttaaaacaggctgcttttagtgctacctatgctacaagtccttgtagtgctga

SEQ ID NO: 483674 - DNA, 122 bp, Homo sapiens
ttaggaaagacctggatgaagagcaaatcaggaggcaaaatgggaatgatctggcccctacagtcatgctatggcactatgtgaaataatcacagcattcttggtgcaattacataggtgat

SEQ ID NO: 483675 - DNA, 122 bp, Homo sapiens
agcccactggactttcttgtacctgaggctgaagacgccacatttggtgagtgtgtggcccacataaggtgatcctcctggtatgtgtagggagagaaaagactcagccttctgtaagaccc

SEQ ID NO: 483676 - DNA, 122 bp, Homo sapiens
tcattgagcaactacagtgcacttggtcttctgcaagtgctgggcacctagagataggaacagtcatggtccctgctcttaaggaactgatgacctggtggggccctgttgtcttcaaggaa
